(19) United States
(12) Patent Application Publication
(10) Pub. No.: US 2009/0104218 A1
(43) Pub. Date: Apr. 23, 2009

(54) Group B Streptococcus

(75) Inventors: Herve Tettelin, Ellicott City, MD (US); Vega Masignani, Siena (IT)

Correspondence Address: NOVARTIS VACCINES AND DIAGNOSTICS INC., INTELLECTUAL PROPERTY R338, P.O. BOX 8097, Emeryville, CA, 94662-8097, US

(73) Assignees: J. CRAIG VENTER INSTITUTE, Rockville, MD (US); NOVARTIS VACCINES AND DIAGNOSTICS, S.R.L., Siena (IT)

(21) Appl. No.: 11/793,435

(22) PCT Filed: Dec. 21, 2005
(86) PCT No.: PCT/US2005/046491

§ 371 Date: Aug. 25, 2008

Related U.S. Application Data
(60) Provisional application No. 60/638,943, filed on Dec. 22, 2004.
(60) Provisional application No. 60/640,438, filed on Dec. 30, 2004.

(51) Int. Cl. A61K 39/00; C07K 14/00; C07K 16/18; A61P 31/00; C07H 21/04; A61K 38/00

(52) U.S. Cl. 424/190.1; 530/350; 530/387.9; 536/23.7; 514/12

(57) ABSTRACT

Polypeptides and nucleic acids from Streptococcus agalactiae which can be used in the development of vaccines, for diagnostic purposes, and as targets for antibiotics.

[0001] This application incorporates by reference the contents of each of two duplicate CD-ROMs which contain an identical 90.1 MB file labeled “PP28007 PCT sequence listing.txt,” which is the sequence listing for this application. The CD-ROMs were created on Dec. 21, 2005. This application also incorporates by reference the contents of each of two duplicate CD-ROMs which contain an identical 681 KB file labeled “Table I.txt” and containing Table I. The CD-ROMs were created on Dec. 20, 2005.

[0002] All documents cited herein are incorporated by reference in their entirety.

### TECHNICAL FIELD

[0003] This invention is in the field of Streptococcus biology, and in particular relates to S. agalactiae, also known as ‘group B streptococcus’ (GBS).

### BACKGROUND ART

[0004] Once thought to infect only cows, the Gram-positive bacterium Streptococcus agalactiae (or “group B streptococcus”, abbreviated to “GBS”) is now known to cause serious disease, bacteremia and meningitis, in immunocompromised individuals and in neonates. There are two types of neonatal infection. The first (early onset, usually within 5 days of birth) is manifested by bacteremia and pneumonia. It is contracted vertically as a baby passes through the birth canal. GBS colonises the vagina of about 25% of young women, and approximately 1% of infants born via a vaginal birth to colonised mothers will become infected. Mortality is between 50-70%. The second is a meningitis that occurs 10 to 60 days after birth. If pregnant women are vaccinated with type III capsule so that the infants are passively immunised, the incidence of the late onset meningitis is reduced but is not entirely eliminated.

[0005] The “B” in “GBS” refers to the Lancefield classification, which is based on the antigenicity of a carbohydrate which is soluble in dilute acid and called the C carbohydrate. Lancefield identified 13 types of C carbohydrate, designated A to 0, that could be serologically differentiated. The organisms that most commonly infect humans are found in groups A, B, D, and G. Within group B, strains can be divided into 8 serotypes (Ia, Ib, Ia/c, II, III, IV, V, and VI) based on the structure of their polysaccharide capsule. The genome sequence of a serotype V strain of GBS has been published and analysed [1,2], including a comparative genome hybridization analysis of 19 disease-causing isolates of the same type V strain 2603V/R. The genome sequence of a serotype III strain is also known [3].

[0006] Current GBS vaccines are based on polysaccharide antigens, although these suffer from poor immunogenicity. Anti-idiotypic approaches have also been used (e.g. ref. 4). There remains a need, however, for effective adult vaccines against S. agalactiae infection.

[0007] It is an object of the invention to provide proteins which can be used in the development of such vaccines. The proteins may also be useful for diagnostic purposes, and as targets for antibiotics.

### DISCLOSURE OF THE INVENTION

### Polypeptides

[0008] The invention provides polypeptides comprising the GBS amino acid sequences disclosed in the examples. These amino acid sequences are the even SEQ ID NOs between 2 and 22740. There are thus 11370 amino acid sequences. The polypeptides encoded by sequences listed in Table IV have not previously been seen in GBS strains.

[0009] The invention also provides polypeptides comprising amino acid sequences that have sequence identity to the GBS amino acid sequences disclosed in the examples. Depending on the particular sequence, the degree of sequence identity is preferably greater than 50% (e.g. 60%, 70%, 75%, 80%, 85%, 90%, 91%, 92%, 93%, 94%, 95%, 96%, 97%, 98%, 99% or more). These polypeptides include homologs, orthologs, allelic variants and functional mutants. Typically, 50% identity or more between two polypeptide sequences is considered to be an indication of functional equivalence. Identity between polypeptides is preferably determined by the Smith-Waterman homology search algorithm as implemented in the MPSRCH program (Oxford Molecular), using an affine gap search with parameters gap open penalty=12 and gap extension penalty=1.

[0010] These polypeptide may, compared to the GBS sequences of the examples, include one or more (e.g. 1, 2, 3, 4, 5, 6, 7, 8, 9, 10, etc.) conservative amino acid replacements i.e. replacements of one amino acid with another which has a related side chain. Genetically-encoded amino acids are generally divided into four families: (1) acidic i.e. aspartate, glutamate; (2) basic i.e. lysine, arginine, histidine; (3) non-polar i.e. alanine, valine, leucine, isoleucine, proline, phenylalanine, methionine, tryptophan; and (4) uncharged polar i.e. glycine, asparagine, glutamine, cysteine, serine, threonine, tyrosine. Phenylalanine, tryptophan, and tyrosine are sometimes classified jointly as aromatic amino acids. In general, substitution of single amino acids within these families does not have a major effect on the biological activity. The polypeptides may have one or more (e.g. 1, 2, 3, 4, 5, 6, 7, 8, 9, 10, etc.) single amino acid deletions relative to the GBS sequences of the examples. The polypeptides may also include one or more (e.g. 1, 2, 3, 4, 5, 6, 7, 8, 9, 10, etc.) insertions (e.g. each of 1, 2, 3, 4 or 5 amino acids) relative to the GBS sequences of the examples. Some of these deletions, insertions or substitutions may convert one sequence of the invention to another sequence of the invention e.g. amino acids 180-230 of SEQ ID NO: 8614 (identical to amino acids 173-223 of SEQ ID NO: 14060 and amino acids 4-54 of SEQ ID NO: 3916) become amino acids 180-230 of SEQ ID NO: 12908 by conservative substitution of Ile-185 for Val.

[0011] Preferred polypeptides of the invention are listed below, including polypeptides that are lipidated, that are located in the outer membrane, that are located in the inner membrane, or that are located in the periplasm. Particularly preferred polypeptides are those that fall into more than one of these categories e.g. lipidated polypeptides that are located in the outer membrane. Lipoproteins may have a N-terminal cysteine to which lipid is covalently attached, following post-translational processing of the signal peptide.

[0012] The invention further provides polypeptides comprising fragments of the GBS amino acid sequences disclosed in the examples. The fragments should comprise at least n consecutive amino acids from the sequences and, depending on the particular sequence, n is 7 or more (e.g. 8, 10, 12, 14, 16, 18, 20, 22, 24, 26, 28, 30, 35, 40, 45, 50, 60, 70, 80, 90, 100 or more).

[0013] The fragment may comprise at least one T-cell or, preferably, a B-cell epitope of the sequence. T- and B-cell epitopes can be identified empirically (e.g. using PEPSCAN [5,6] or similar methods), or they can be predicted (e.g. using the Jameson-Wolf antigenic index [7], matrix-based approaches [8], TEPITOPE [9], neural networks [10], OptiMer & EpiMer [11, 12], ADEPT [13], Tsites [14], hydrophilicity [15], antigenic index [16] or the methods disclosed in reference 17, etc.). Other preferred fragments are (a) the N-terminal signal peptides of the GBS polypeptides of the invention, (b) the GBS polypeptides, but without their N-terminal signal peptides, (c) the GBS polypeptides, but without their N-terminal amino acid residue.

[0014] Further preferred fragments are those common to at least two (e.g. 2, 3, 4 or 5) homologous coding sequences, and in particular those common to homologous coding sequences within the sequence listing. Table II shows homologous SEQ ID numbers for nucleic acids within the sequence listing e.g. SEQ ID NOs: 88, 4374, 8834, 13214 and 17994 are homologous within the sequence listing, and are also homologous with prior art GI sequences 22533036 and 23094457. Simple alignments show that amino acids 1-131 of these five SEQ ID NOs are common, as are amino acids 133-176, 178-182, 184-190, 192-217, 219-250, 252-278, 280-322, 324-366, 368-373 and 375-434. Similarly, 1-176 are common to SEQ ID NOs: 88, 4374, 8834 and 13214, but not to 17994. Thus fragments 1-131, 1-176 and 133-176 are all preferred fragments of the invention. In some cases, where homologous sequences are 100% identical between strains along their complete lengths (e.g. SEQ ID NOs: 2, 8616, 12910, 14062 and 22384), the common ‘fragment’ will in fact be the complete sequence.

[0015] Other preferred fragments are those that begin with an amino acid encoded by a potential start codon (ATG, GTG, TTG). Fragments starting at the methionine encoded by a start codon downstream of the indicated start codon are polypeptides of the invention.

[0016] Polypeptides of the invention can be prepared in many ways e.g. by chemical synthesis (in whole or in part), by digesting longer polypeptides using proteases, by translation from RNA, by purification from cell culture (e.g. from recombinant expression), from the organism itself (e.g. after bacterial culture, or direct from patients), etc. A preferred method for production of peptides <40 amino acids long involves in vitro chemical synthesis [18, 19]. Solid-phase peptide synthesis is particularly preferred, such as methods based on tBoc or Fmoc [20] chemistry. Enzymatic synthesis [21] may also be used in part or in full. As an alternative to chemical synthesis, biological synthesis may be used e.g. the polypeptides may be produced by translation. This may be carried out in vitro or in vivo. Biological methods are in general restricted to the production of polypeptides based on L-amino acids, but manipulation of translation machinery (e.g. of aminoacyl tRNA molecules) can be used to allow the introduction of D-amino acids (or of other non natural amino acids, such as iodotyrosine or methylphenylalanine, azidohomoalanine, etc.) [22]. Where D-amino acids are included, however, it is preferred to use chemical synthesis. Polypeptides of the invention may have covalent modifications at the C-terminus and/or N-terminus.

[0017] Polypeptides of the invention can take various forms (e.g. native, fusions, glycosylated, non-glycosylated, lipidated, non-lipidated, phosphorylated, non-phosphorylated, myristoylated, non-myristoylated, monomeric, multimeric, particulate, denatured, etc.).

[0018] Polypeptides of the invention are preferably provided in purified or substantially purified form i.e. substantially free from other polypeptides (e.g. free from naturally-occurring polypeptides), particularly from other streptococcal or host cell polypeptides, and are generally at least about 50% pure (by weight), and usually at least about 90% pure i.e. less than about 50%, and more preferably less than about 10% (e.g. 5%) of a composition is made up of other expressed polypeptides.

[0019] Polypeptides of the invention are preferably GBS polypeptides. Polypeptides of the invention preferably have the function indicated in Table I for the relevant sequence.

[0020] Polypeptides of the invention may be attached to a solid support. Polypeptides of the invention may comprise a detectable label (e.g. a radioactive or fluorescent label, or a biotin label). The term “polypeptide” refers to amino acid polymers of any length. The polymer may be linear or branched, it may comprise modified amino acids, and it may be interrupted by non-amino acids. The terms also encompass an amino acid polymer that has been modified naturally or by intervention; for example, disulfide bond formation, glycosylation, lipidation, acetylation, phosphorylation, or any other manipulation or modification, such as conjugation with a labeling component. Also included within the definition are, for example, polypeptides containing one or more analogs of an amino acid (including, for example, unnatural amino acids, etc.), as well as other modifications known in the art.

[0021] Polypeptides can occur as single chains or associated chains. Polypeptides of the invention can be naturally or non-naturally glycosylated (i.e. the polypeptide has a glycosylation pattern that differs from the glycosylation pattern found in the corresponding naturally occurring polypeptide). Polypeptides of the invention may be at least 40 amino acids long (e.g. at least 40, 50, 60, 70, 80, 90, 100, 120, 140, 160, 180, 200, 220, 240, 260, 280, 300, 350, 400, 450, 500 or more). Polypeptides of the invention may be shorter than 500 amino acids (e.g. no longer than 40, 50, 60, 70, 80, 90, 100, 120, 140, 160, 180, 200, 220, 240, 260, 280, 300, 350, 400 or 450 amino acids).

[0022] The invention provides polypeptides comprising a sequence —X—Y— or —Y—X—, wherein: —X— is an amino acid sequence as defined above and —Y— is not a sequence as defined above i.e. the invention provides fusion proteins. Where the N-terminus codon of a polypeptide-coding sequence is not ATG then that codon will be translated as the standard amino acid for that codon rather than as a Met, which occurs when the codon is translated as a start codon.

[0023] The invention provides a process for producing polypeptides of the invention, comprising the step of culturing a host cell of to the invention under conditions which induce polypeptide expression.

[0024] The invention provides a process for producing a polypeptide of the invention, wherein the polypeptide is synthesised in part or in whole using chemical means.

[0025] The invention provides a composition comprising two or more polypeptides of the invention.

[0026] The invention also provides a hybrid polypeptide represented by the formula NH₂-A-[-X-L-]ₙ-B—COOH, wherein X is a polypeptide of the invention as defined above, L is an optional linker amino acid sequence, A is an optional N-terminal amino acid sequence, B is an optional C-terminal amino acid sequence, and n is an integer greater than 1. The value of n is between 2 and x, and the value of x is typically 3, 4, 5, 6, 7, 8, 9 or 10. Preferably n is 2, 3 or 4; it is more preferably 2 or 3; most preferably, n=2. For each n instances, —X— may be the same or different. For each n instances of [—X-L-], linker amino acid sequence -L- may be present or absent. For instance, when n=2 the hybrid may be NH₂—X₁-L₁-X₂-L₂-COOH, NH₂—X₁—X₂—COOH, NH₂—X₁-L₁-X₂—COOH, NH₂—X₁—X₂-L₂-COOH, etc. Linker amino acid sequence(s)-L- will typically be short (e.g. 20 or fewer amino acids i.e. 19, 18, 17, 16, 15, 14, 13, 12, 11, 10, 9, 8, 7, 6, 5, 4, 3, 2, 1). Examples include short peptide sequences which facilitate cloning, poly-glycine linkers (i.e. Gly, where n=2, 3, 4, 5, 6, 7, 8, 9, 10 or more), and histidine tags (i.e. HiSₙ where n=3, 4, 5, 6, 7, 8, 9, 10 or more). Other suitable linker amino acid sequences will be apparent to those skilled in the art. -A- and -B- are optional sequences which will typically be short (e.g. 40 or fewer amino acids i.e. 39, 38, 37, 36, 35, 34, 33, 32, 31, 30, 29, 28, 27, 26, 25, 24, 23, 22, 21, 20, 19, 18, 17, 16, 15, 14, 13, 12, 11, 10, 9, 8, 7, 6, 5, 4, 3, 2, 1). Examples include leader sequences to direct polypeptide trafficking, or short peptide sequences which facilitate cloning or purification (e.g. histidine tags i.e. Hisₙ where n=3, 4, 5, 6, 7, 8, 9, 10 or more). Other suitable N-terminal and C-terminal amino acid sequences will be apparent to those skilled in the art.

[0027] Various tests can be used to assess the in vivo immunogenicity of polypeptides of the invention. For example, polypeptides can be expressed recombinantly and used to screen patient sera by immunoblot. A positive reaction between the polypeptide and patient serum indicates that the patient has previously mounted an immune response to the protein in question i.e. the protein is an immunogen. This method can also be used to identify immunodominant proteins.

### Antibodies

[0028] The invention provides antibodies that bind to polypeptides of the invention. These may be polyclonal or monoclonal and may be produced by any suitable means (e.g. by recombinant expression). To increase compatibility with the human immune system, the antibodies may be chimeric or humanised [e.g. refs. 23 & 24], or fully human antibodies may be used. The antibodies may include a detectable label (e.g. for diagnostic assays). Antibodies of the invention may be attached to a solid support. Antibodies of the invention are preferably neutralising antibodies.

[0029] Monoclonal antibodies are particularly useful in identification and purification of the individual polypeptides against which they are directed. Monoclonal antibodies of the invention may also be employed as reagents in immunoassays, radioimmunoassays (RIA) or enzyme-linked immunosorbent assays (ELISA), etc. In these applications, the antibodies can be labelled with an analytically-detectable reagent such as a radioisotope, a fluorescent molecule or an enzyme. The monoclonal antibodies produced by the above method may also be used for the molecular identification and characterization (epitope mapping) of polypeptides of the invention. Antibodies of the invention are preferably specific to Streptococci i.e. they bind preferentially to Streptococci bacteria relative to non-Streptococci bacteria. More preferably, the antibodies are specific to GBS i.e. they bind preferentially to GBS bacteria relative to non-type-b streptococci.

[0030] Antibodies of the invention are preferably provided in purified or substantially purified form. Typically, the antibody will be present in a composition that is substantially free of other polypeptides e.g. where less than 90% (by weight), usually less than 60% and more usually less than 50% of the composition is made up of other polypeptides.

[0031] Antibodies of the invention can be of any isotype (e.g. IgA, IgG, IgM i.e. an α, γ or μ heavy chain), but will generally be IgG. Within the IgG isotype, antibodies may be IgG1, IgG2, IgG3 or IgG4 subclass. Antibodies of the invention may have a κ or a λ light chain.

[0032] Antibodies of the invention can take various forms, including whole antibodies, antibody fragments such as F(ab′)₂ and F(ab) fragments, Fv fragments (non-covalent heterodimers), single-chain antibodies such as single chain Fv molecules (scFv), minibodies, oligobodies, etc. The term “antibody” does not imply any particular origin, and includes antibodies obtained through non-conventional processes, such as phage display.

[0033] The invention provides a process for detecting polypeptides of the invention, comprising the steps of: (a) contacting an antibody of the invention with a biological sample under conditions suitable for the formation of an antibody-antigen complexes; and (b) detecting said complexes.

[0034] The invention provides a process for detecting antibodies of the invention, comprising the steps of: (a) contacting a polypeptide of the invention with a biological sample (e.g. a blood or serum sample) under conditions suitable for the formation of an antibody-antigen complexes; and (b) detecting said complexes.

[0035] For good cross-reactivity, preferred antibodies of the invention bind to epitopes within fragments that are common to at least two (e.g. 2, 3, 4 or 5) homologous coding sequences, as described in more detail above. Conversely, for good specificity, other preferred antibodies of the invention bind to epitopes that include an amino acid that differs between homologous coding sequences e.g. binds to Phe-132 in SEQ ID NO: 17994 to distinguish from SEQ ID NOs: 88, 4374, 8834 and 13214, all of which have a Serine residue at position 132.

### Nucleic Acids

[0036] The invention provides nucleic acid comprising the GBS nucleotide sequences disclosed in the examples. These nucleic acid sequences are the odd SEQ ID NOs between 1 and 22739.

[0037] The invention also provides nucleic acid comprising nucleotide sequences having sequence identity to the GBS nucleotide sequences disclosed in the examples. Identity between sequences is preferably determined by the Smith-Waterman homology search algorithm as described above.

[0038] The invention also provides nucleic acid which can hybridize to the GBS nucleic acid disclosed in the examples. Hybridization reactions can be performed under conditions of different “stringency”. Conditions that increase stringency of a hybridization reaction of widely known and published in the art [e.g. page 7.52 of reference 25]. Examples of relevant conditions include (in order of increasing stringency): incubation temperatures of 25° C., 37° C., 50° C., 55° C. and 68° C.; buffer concentrations of 10×SSC, 6×SSC, 1×SSC, 0.1×SSC (where SSC is 0.15 M NaCl and 15 mM citrate buffer) and their equivalents using other buffer systems; formamide concentrations of 0%, 25%, 50%, and 75%; incubation times from 5 minutes to 24 hours; 1, 2, or more washing steps; wash incubation times of 1, 2, or 15 minutes; and wash solutions of 6×SSC, 1×SSC, 0.1×SSC, or de-ionized water. Hybridization techniques and their optimization are well known in the art [e.g. see refs 25-28, etc.].

[0039] In some embodiments, nucleic acid of the invention hybridizes to a target of the invention under low stringency conditions; in other embodiments it hybridizes under intermediate stringency conditions; in preferred embodiments, it hybridizes under high stringency conditions. An exemplary set of low stringency hybridization conditions is 50° C. and 10×SSC. An exemplary set of intermediate stringency hybridization conditions is 55° C. and 1×SSC. An exemplary set of high stringency hybridization conditions is 68° C. and 0.1×SSC.

[0040] Nucleic acid comprising fragments of these sequences are also provided. These should comprise at least n consecutive nucleotides from the GBS sequences and, depending on the particular sequence, n is 10 or more (e.g. 12, 14, 15, 18, 20, 25, 30, 35, 40, 50, 60, 70, 80, 90, 100, 150, 200 or more).

[0041] The invention provides nucleic acid of formula 5′-X—Y-Z-3′, wherein: —X— is a nucleotide sequence consisting of x nucleotides; -Z- is a nucleotide sequence consisting of z nucleotides; —Y— is a nucleotide sequence consisting of either (a) a fragment of one of the odd-numbered SEQ ID NOs: 1 to 22739, or (b) the complement of (a); and said nucleic acid 5′-X—Y-Z-3′ is neither (i) a fragment of one of the odd-numbered SEQ ID NOs: 1 to 22739 nor (ii) the complement of (i). The —X— and/or -Z-moieties may comprise a promoter sequence (or its complement).

[0042] The invention also provides nucleic acid encoding the polypeptides and polypeptide fragments of the invention.

[0043] The invention includes nucleic acid comprising sequences complementary to the sequences disclosed in the sequence listing (e.g. for antisense or probing, or for use as primers), as well as the sequences in the orientation actually shown.

[0044] Nucleic acids of the invention can be used in hybridisation reactions (e.g. Northern or Southern blots, or in nucleic acid microarrays or ‘gene chips’) and amplification reactions (e.g. PCR, SDA, SSSR, LCR, TMA, NASBA, etc.) and other nucleic acid techniques.

[0045] Nucleic acid according to the invention can take various forms (e.g. single-stranded, double-stranded, vectors, primers, probes, labelled etc.). Nucleic acids of the invention may be circular or branched, but will generally be linear. Unless otherwise specified or required, any embodiment of the invention that utilizes a nucleic acid may utilize both the double-stranded form and each of two complementary single-stranded forms which make up the double-stranded form. Primers and probes are generally single-stranded, as are antisense nucleic acids.

[0046] Nucleic acids of the invention are preferably provided in purified or substantially purified form i.e. substantially free from other nucleic acids (e.g. free from naturally-occurring nucleic acids), particularly from other streptococcal or host cell nucleic acids, generally being at least about 50% pure (by weight), and usually at least about 90% pure. Nucleic acids of the invention are preferably GBS nucleic acids.

[0047] Nucleic acids of the invention may be prepared in many ways e.g. by chemical synthesis (e.g. phosphoramidite synthesis of DNA) in whole or in part, by digesting longer nucleic acids using nucleases (e.g. restriction enzymes), by joining shorter nucleic acids or nucleotides (e.g. using ligases or polymerases), from genomic or cDNA libraries, etc.

[0048] Nucleic acid of the invention may be attached to a solid support (e.g. a bead, plate, filter, film, slide, microarray support, resin, etc.). Nucleic acid of the invention may be labelled e.g. with a radioactive or fluorescent label, or a biotin label. This is particularly useful where the nucleic acid is to be used in detection techniques e.g. where the nucleic acid is a primer or as a probe.

[0049] The term “nucleic acid” includes in general means a polymeric form of nucleotides of any length, which contain deoxyribonucleotides, ribonucleotides, and/or their analogs. It includes DNA, RNA, DNA/RNA hybrids. It also includes DNA or RNA analogs, such as those containing modified backbones (e.g. peptide nucleic acids (PNAs) or phosphorothioates) or modified bases. Thus the invention includes mRNA, tRNA, rRNA, ribozymes, DNA, cDNA, recombinant nucleic acids, branched nucleic acids, plasmids, vectors, probes, primers, etc. Where nucleic acid of the invention takes the form of RNA, it may or may not have a 5′ cap.

[0050] Nucleic acids of the invention comprise GBS sequences, but they may also comprise non-GBS sequences (e.g. in nucleic acids of formula 5′-X—Y-Z-3′, as defined above). This is particularly useful for primers, which may thus comprise a first sequence complementary to a GBS nucleic acid target and a second sequence which is not complementary to the nucleic acid target. Any such non-complementary sequences in the primer are preferably 5′ to the complementary sequences. Typical non-complementary sequences comprise restriction sites or promoter sequences.

[0051] Nucleic acids of the invention can be prepared in many ways e.g. by chemical synthesis (at least in part), by digesting longer nucleic acids using nucleases (e.g. restriction enzymes), by joining shorter nucleic acids (e.g. using ligases or polymerases), from genomic or cDNA libraries, etc.

[0052] Nucleic acids of the invention may be part of a vector i.e. part of a nucleic acid construct designed for transduction/transfection of one or more cell types. Vectors may be, for example, “cloning vectors” which are designed for isolation, propagation and replication of inserted nucleotides, “expression vectors” which are designed for expression of a nucleotide sequence in a host cell, “viral vectors” which is designed to result in the production of a recombinant virus or virus-like particle, or “shuttle vectors”, which comprise the attributes of more than one type of vector. Preferred vectors are plasmids. A “host cell” includes an individual cell or cell culture which can be or has been a recipient of exogenous nucleic acid. Host cells include progeny of a single host cell, and the progeny may not necessarily be completely identical (in morphology or in total DNA complement) to the original parent cell due to natural, accidental, or deliberate mutation and/or change. Host cells include cells transfected or infected in vivo or in vitro with nucleic acid of the invention.

[0053] Where a nucleic acid is DNA, it will be appreciated that “U” in a RNA sequence will be replaced by “T” in the DNA. Similarly, where a nucleic acid is RNA, it will be appreciated that “T” in a DNA sequence will be replaced by “U” in the RNA.

[0054] The term “complement” or “complementary” when used in relation to nucleic acids refers to Watson-Crick base pairing. Thus the complement of C is G, the complement of G is C, the complement of A is T (or U), and the complement of T (or U) is A. It is also possible to use bases such as I (the purine inosine) e.g. to complement pyrimidines (C or T). The terms also imply a direction the complement of 5′-ACAGT-3′ is 5′-ACTGT-3′ rather than 5′-TGTCA-3′.

[0055] Nucleic acids of the invention can be used, for example: to produce polypeptides; as hybridization probes for the detection of nucleic acid in biological samples; to generate additional copies of the nucleic acids; to generate ribozymes or antisense oligonucleotides; as single-stranded DNA primers or probes; or as triple-strand forming oligonucleotides.

[0056] The invention provides a process for producing nucleic acid of the invention, wherein the nucleic acid is synthesised in part or in whole using chemical means.

[0057] The invention provides vectors comprising nucleotide sequences of the invention (e.g. cloning or expression vectors) and host cells transformed with such vectors.

[0058] The invention also provides a kit comprising primers (e.g. PCR primers) for amplifying a template sequence contained within a streptococcus bacterium (e.g. GBS) nucleic acid sequence, the kit comprising a first primer and a second primer, wherein the first primer is substantially complementary to said template sequence and the second primer is substantially complementary to a complement of said template sequence, wherein the parts of said primers which have substantial complementarity define the termini of the template sequence to be amplified. The first primer and/or the second primer may include a detectable label (e.g. a fluorescent label).

[0059] The invention also provides a kit comprising first and second single-stranded oligonucleotides which allow amplification of a streptococcal template nucleic acid sequence contained in a single- or double-stranded nucleic acid (or mixture thereof), wherein: (a) the first oligonucleotide comprises a primer sequence which is substantially complementary to said template nucleic acid sequence; (b) the second oligonucleotide comprises a primer sequence which is substantially complementary to the complement of said template nucleic acid sequence; (c) the first oligonucleotide and/or the second oligonucleotide comprise(s) sequence which is not complementary to said template nucleic acid; and (d) said primer sequences define the termini of the template sequence to be amplified. The non-complementary sequence(s) of feature (c) are preferably upstream of (i.e. 5′ to) the primer sequences. One or both of these (c) sequences may comprise a restriction site [e.g. ref. 29] or a promoter sequence [e.g. 30]. The first oligonucleotide and/or the second oligonucleotide may include a detectable label (e.g. a fluorescent label).

[0060] The invention provides a process for detecting nucleic acid of the invention, comprising the steps of: (a) contacting a nucleic probe according to the invention with a biological sample under hybridising conditions to form duplexes; and (b) detecting said duplexes.

[0061] The invention provides a process for detecting GBS in a biological sample (e.g. blood), comprising the step of contacting nucleic acid according to the invention with the biological sample under hybridising conditions. The process may involve nucleic acid amplification (e.g. PCR, SDA, SSSR, LCR, TMA, NASBA, etc.) or hybridisation (e.g. microarrays, blots, hybridisation with a probe in solution etc.). PCR detection of GBS in clinical samples has been reported [e.g. see refs. 31 to 34]. Clinical assays based on nucleic acid are described in general in ref. 35.

[0062] The invention provides a process for preparing a fragment of a target sequence, wherein the fragment is prepared by extension of a nucleic acid primer. The target sequence and/or the primer are nucleic acids of the invention. The primer extension reaction may involve nucleic acid amplification (e.g. PCR, SDA, SSSR, LCR, TMA, NASBA, etc.).

[0063] Nucleic acid amplification according to the invention may be quantitative and/or real-time.

[0064] For certain embodiments of the invention, nucleic acids are preferably at least 7 nucleotides in length (e.g. 8, 9, 10, 11, 12, 13, 14, 15, 16, 17, 18, 19, 20, 21, 22, 23, 24, 25, 26, 27, 28, 29, 30, 31, 32, 33, 34, 35, 36, 37, 38, 39, 40, 45, 50, 55, 60, 65, 70, 75, 80, 90, 100, 110, 120, 130, 140, 150, 160, 170, 180, 190, 200, 225, 250, 275, 300 nucleotides or longer).

[0065] For certain embodiments of the invention, nucleic acids are preferably at most 500 nucleotides in length (e.g. 450, 400, 350, 300, 250, 200, 150, 140, 130, 120, 110, 100, 90, 80, 75, 70, 65, 60, 55, 50, 45, 40, 39, 38, 37, 36, 35, 34, 33, 32, 31, 30, 29, 28, 27, 26, 25, 24, 23, 22, 21, 20, 19, 18, 17, 16, 15 nucleotides or shorter).

[0066] Primers and probes of the invention, and other nucleic acids used for hybridization, are preferably between 10 and 30 nucleotides in length (e.g. 10, 11, 12, 13, 14, 15, 16, 17, 18, 19, 20, 21, 22, 23, 24, 25, 26, 27, 28, 29, or 30 nucleotides).

### Pharmaceutical Compositions

[0067] The invention provides compositions comprising: (a) polypeptide, antibody, and/or nucleic acid of the invention; and (b) a pharmaceutically acceptable carrier. These compositions may be suitable as immunogenic compositions, for instance, or as diagnostic reagents, or as vaccines. Vaccines according to the invention may either be prophylactic (i.e. to prevent infection) or therapeutic (i.e. to treat infection), but will typically be prophylactic.

[0068] A ‘pharmaceutically acceptable carrier’ includes any carrier that does not itself induce the production of antibodies harmful to the individual receiving the composition. Suitable carriers are typically large, slowly metabolised macromolecules such as proteins, polysaccharides, polylactic acids, polyglycolic acids, polymeric amino acids, amino acid copolymers, sucrose, trehalose, lactose, and lipid aggregates (such as oil droplets or liposomes). Such carriers are well known to those of ordinary skill in the art. The vaccines may also contain diluents, such as water, saline, glycerol, etc. Additionally, auxiliary substances, such as wetting or emulsifying agents, pH buffering substances, and the like, may be present. Sterile pyrogen-free, phosphate-buffered physiologic saline is a typical carrier. A thorough discussion of pharmaceutically acceptable excipients is available in ref. 155. Compositions of the invention may include an antimicrobial, particularly if packaged in a multiple dose format.

[0069] Compositions of the invention may comprise detergent e.g. a Tween (polysorbate), such as Tween 80. Detergents are generally present at low levels e.g. <0.01%. Compositions of the invention may include sodium salts (e.g. sodium chloride) to give tonicity. A concentration of 10+2 mg/ml NaCl is typical.

[0070] Compositions of the invention will generally include a buffer. A phosphate buffer is typical. Compositions of the invention may comprise a sugar alcohol (e.g. mannitol) or a disaccharide (e.g. sucrose or trehalose) e.g. at around 15-30 mg/ml (e.g. 25 mg/ml), particularly if they are to be lyophilised or if they include material which has been reconstituted from lyophilised material. The pH of a composition for lyophilisation may be adjusted to around 6.1 prior to lyophilisation. Polypeptides of the invention may be administered in conjunction with other immunoregulatory agents. In particular, composition will usually include a vaccine adjuvant. Adjuvants which may be used in compositions of the invention include, but are not limited to:

### A. Mineral-Containing Compositions

[0071] Mineral containing compositions suitable for use as adjuvants in the invention include mineral salts, such as aluminium salts and calcium salts. The invention includes mineral salts such as hydroxides (e.g. oxyhydroxides), phosphates (e.g. hydroxyphosphates, orthophosphates), sulphates, etc. [e.g. see chapters 8 & 9 of ref. 36], or mixtures of different mineral compounds (e.g. a mixture of a phosphate and a hydroxide adjuvant, optionally with an excess of the phosphate), with the compounds taking any suitable form (e.g., gel, crystalline, amorphous, etc.), and with adsorption to the salt(s) being preferred. Mineral containing compositions may also be formulated as a particle of metal salt [37].

[0072] Aluminum salts may be included in vaccines of the invention such that the dose of Al³⁺ is between 0.2 and 1.0 mg per dose.

[0073] A typical aluminium phosphate adjuvant is amorphous aluminium hydroxyphosphate with PO₄/Al molar ratio between 0.84 and 0.92, included at 0.6 mg Al³⁺/ml. Adsorption with a low dose of aluminium phosphate may be used e.g. between 50 and 100 μg Al³⁺ per conjugate per dose. Where an aluminium phosphate it used and it is desired not to adsorb an antigen to the adjuvant, this is favoured by including free phosphate ions in solution (e.g. by the use of a phosphate buffer).

### B. Oil Emulsions

[0074] Oil emulsion compositions suitable for use as adjuvants in the invention include squalene-water emulsions, such as MF59 (5% Squalene, 0.5% Tween 80, and 0.5% Span 85, formulated into submicron particles using a microfluidizer) [Chapter 10 of ref. 36; see also refs. 38-40]. MF59 is used as the adjuvant in the FLUAD™ influenza virus trivalent subunit vaccine.

[0075] Particularly preferred adjuvants for use in the compositions are submicron oil-in-water emulsions. Preferred submicron oil-in-water emulsions for use herein are squalene/water emulsions optionally containing varying amounts of MTP-PE, such as a submicron oil-in-water emulsion containing 4-5% w/v squalene, 0.25-1.0% w/v Tween 80 (polyoxyethylenesorbitan monooleate), and/or 0.25-1.0% Span 85 (sorbitan trioleate), and, optionally, N-acetylmuramyl-L-alanyl-D-isogluatminyl-L-alanine-2-(1′-2′-dipalmitoyl-sn-glycero-3-hydroxyphosphosphoryloxy)-ethylamine (MTP-PE). Submicron oil-in-water emulsions, methods of making the same and immunostimulating agents, such as muramyl peptides, for use in the compositions, are described in detail in references 38 & 41-42.

[0076] Complete Freund's adjuvant (CFA) and incomplete Freund's adjuvant (IFA) may also be used as adjuvants in the invention.

### C. Saponin Formulations [Chapter 22 of Ref 36]

[0077] Saponin formulations may also be used as adjuvants in the invention. Saponins are a heterologous group of sterol glycosides and triterpenoid glycosides that are found in the bark, leaves, stems, roots and even flowers of a wide range of plant species. Saponins isolated from the bark of the Quillaja saponaria Molina tree have been widely studied as adjuvants. Saponin can also be commercially obtained from Smilax ornata (sarsaprilla), Gypsophilla paniculata (brides veil), and Saponaria officianalis (soap root). Saponin adjuvant formulations include purified formulations, such as QS21, as well as lipid formulations, such as ISCOMs.

[0078] Saponin compositions have been purified using HPLC and RP-HPLC. Specific purified fractions using these techniques have been identified, including QS7, QS17, QS18, QS21, QH-A, QH-B and QH-C. Preferably, the saponin is QS21. A method of production of QS21 is disclosed in ref. 43. Saponin formulations may also comprise a sterol, such as cholesterol [44].

[0079] Combinations of saponins and cholesterols can be used to form unique particles called immunostimulating complexes (ISCOMs) [chapter 23 of ref. 36]. ISCOMs typically also include a phospholipid such as phosphatidylethanolamine or phosphatidylcholine. Any known saponin can be used in ISCOMs. Preferably, the ISCOM includes one or more of QuilA, QHA and QHC. ISCOMs are further described in refs. 44-46. Optionally, the ISCOMs may be devoid of additional detergent(s) [47].

[0080] A review of the development of saponin based adjuvants can be found in refs. 48 & 49.

### D. Virosomes and Virus-Like Particles

[0081] Virosomes and virus-like particles (VLPs) can also be used as adjuvants in the invention. These structures generally contain one or more proteins from a virus optionally combined or formulated with a phospholipid. They are generally non-pathogenic, non-replicating and generally do not contain any of the native viral genome. The viral proteins may be recombinantly produced or isolated from whole viruses. These viral proteins suitable for use in virosomes or VLPs include proteins derived from influenza virus (such as HA or NA), Hepatitis B virus (such as core or capsid proteins), Hepatitis E virus, measles virus, Sindbis virus, Rotavirus, Foot-and-Mouth Disease virus, Retrovirus, Norwalk virus, human Papilloma virus, HIV, RNA-phages, Qβ-phage (such as coat proteins), GA-phage, fr-phage, AP205 phage, and Ty (such as retrotransposon Ty protein p1). VLPs are discussed further in refs. 50-55. Virosomes are discussed further in, for example, ref 56

### E. Bacterial or Microbial Derivatives

[0082] Adjuvants suitable for use in the invention include bacterial or microbial derivatives such as non-toxic derivatives of enterobacterial lipopolysaccharide (LPS), Lipid A derivatives, immunostimulatory oligonucleotides and ADP-ribosylating toxins and detoxified derivatives thereof.

[0083] Non-toxic derivatives of LPS include monophosphoryl lipid A (MPL) and 3-O-deacylated MPL (3dMPL). 3dMPL is a mixture of 3 de-O-acylated monophosphoryl lipid A with 4, 5 or 6 acylated chains. A preferred “small particle” form of 3 De-O-acylated monophosphoryl lipid A is disclosed in ref. 57. Such “small particles” of 3dMPL are small enough to be sterile filtered through a 0.22 μm membrane [57]. Other non-toxic LPS derivatives include monophosphoryl lipid A mimics, such as aminoalkyl glucosaminide phosphate derivatives e.g. RC-529 [58, 59].

[0084] Lipid A derivatives include derivatives of lipid A from Escherichia coli such as OM-174. OM-174 is described for example in refs. 60 & 61.

[0085] Immunostimulatory oligonucleotides suitable for use as adjuvants in the invention include nucleotide sequences containing a CpG motif (a dinucleotide sequence containing an unmethylated cytosine linked by a phosphate bond to a guanosine). Double-stranded RNAs and oligonucleotides containing palindromic or poly(dG) sequences have also been shown to be immunostimulatory.

[0086] The CpG's can include nucleotide modifications/analogs such as phosphorothioate modifications and can be double-stranded or single-stranded. References 62, 63 and 64 disclose possible analog substitutions e.g. replacement of guanosine with 2′-deoxy-7-deazaguanosine. The adjuvant effect of CpG oligonucleotides is further discussed in refs. 65-70.

[0087] The CpG sequence may be directed to TLR9, such as the motif GTCGTT or TTCGTT [71]. The CpG sequence may be specific for inducing a Th1 immune response, such as a CpG-A ODN, or it may be more specific for inducing a B cell response, such a CpG-B ODN. CpG-A and CpG-B ODNs are discussed in refs. 72-74. Preferably, the CpG is a CpG-A ODN.

[0088] Preferably, the CpG oligonucleotide is constructed so that the 5′ end is accessible for receptor recognition. Optionally, two CpG oligonucleotide sequences may be attached at their 3′ ends to form “immunomers”. See, for example, refs. 71 & 75-77.

[0089] Bacterial ADP-ribosylating toxins and detoxified derivatives thereof may be used as adjuvants in the invention. Preferably, the protein is derived from E. coli (E. coli heat labile enterotoxin “LT”), cholera (“CT”), or pertussis (“PT”). The use of detoxified ADP-ribosylating toxins as mucosal adjuvants is described in ref. 78 and as parenteral adjuvants in ref 79. The toxin or toxoid is preferably in the form of a holotoxin, comprising both A and B subunits. Preferably, the A subunit contains a detoxifying mutation; preferably the B subunit is not mutated. Preferably, the adjuvant is a detoxified LT mutant such as LT-K63, LT-R72, and LT-G192. The use of ADP-ribosylating toxins and detoxified derivatives thereof, particularly LT-K63 and LT-R72, as adjuvants can be found in refs. 80-87. Numerical reference for amino acid substitutions is preferably based on the alignments of the A and B subunits of ADP-ribosylating toxins set forth in ref. 88, specifically incorporated herein by reference in its entirety.

### F. Human Immunomodulators

[0090] Human immunomodulators suitable for use as adjuvants in the invention include cytokines, such as interleukins (e.g. IL-1, IL-2, IL-4, IL-5, IL-6, IL-7, IL-12 [89], etc.) [90], interferons (e.g. interferon-γ), macrophage colony stimulating factor, and tumor necrosis factor.

### G. Bioadhesives and Mucoadhesives

[0091] Bioadhesives and mucoadhesives may also be used as adjuvants in the invention. Suitable bioadhesives include esterified hyaluronic acid microspheres [91] or mucoadhesives such as cross-linked derivatives of poly(acrylic acid), polyvinyl alcohol, polyvinyl pyrollidone, polysaccharides and carboxymethylcellulose. Chitosan and derivatives thereof may also be used as adjuvants in the invention [92].

### H. Microparticles

[0092] Microparticles may also be used as adjuvants in the invention. Microparticles (i.e. a particle of ˜100 nm to ˜150 μm in diameter, more preferably ˜200 nm to ˜30 μm in diameter, and most preferably ˜500 nm to ˜10 μm in diameter) formed from materials that are biodegradable and non-toxic (e.g. a poly(α-hydroxy acid), a polyhydroxybutyric acid, a polyorthoester, a polyanhydride, a polycaprolactone, etc.), with poly(lactide-co-glycolide) are preferred, optionally treated to have a negatively-charges surface (e.g. with SDS) or a positively-charged surface (e.g. with a cationic detergent, such as CTAB).

### I. Liposomes (Chapters 13 & 14 of ref 36)

[0093] Examples of liposome formulations suitable for use as adjuvants are described in refs. 93-95.

### J. Polyoxyethylene Ether and Polyoxyethylene Ester Formulations

[0094] Adjuvants suitable for use in the invention include polyoxyethylene ethers and polyoxyethylene esters [96]. Such formulations further include polyoxyethylene sorbitan ester surfactants in combination with an octoxynol [97] as well as polyoxyethylene alkyl ethers or ester surfactants in combination with at least one additional non-ionic surfactant such as an octoxynol [98]. Preferred polyoxyethylene ethers are selected from the following group: polyoxyethylene-9-lauryl ether (laureth 9), polyoxyethylene-9-steoryl ether, polyoxytheylene-8-steoryl ether, polyoxyethylene-4-lauryl ether, polyoxyethylene-35-lauryl ether, and polyoxyethylene-23-lauryl ether.

### K. Polyphosphazene (PCPP)

[0095] PCPP formulations are described, for example, in refs. 99 and 100.

[0096] L. Muramyl Peptides

[0097] Examples of muramyl peptides suitable for use as adjuvants in the invention include N-acetyl-muramyl-L-threonyl-D-isoglutamine (thr-MDP), N-acetyl-normuramyl-L-alanyl-D-isoglutamine (nor-MDP), and N-acetylmuramyl-L-alanyl-D-isoglutaminyl-L-alanine-2-(1′-2′-dipalmitoyl-sn-glycero-3-hydroxyphosphoryloxy)-ethylamine MTP-PE).

### M. Imidazoquinolone Compounds.

[0098] Examples of imidazoquinolone compounds suitable for use adjuvants in the invention include Imiquamod and its homologues (e.g. “Resiquimod 3M”), described further in refs. 101 and 102.

### N. Thiosemicarbazone Compounds.

[0099] Examples of thiosemicarbazone compounds, as well as methods of formulating, manufacturing, and screening for compounds all suitable for use as adjuvants in the invention include those described in ref. 103. The thiosemicarbazones are particularly effective in the stimulation of human peripheral blood mononuclear cells for the production of cytokines, such as TNF-α.

### O. Tryptanthrin Compounds.

[0100] Examples of tryptanthrin compounds, as well as methods of formulating, manufacturing, and screening for compounds all suitable for use as adjuvants in the invention include those described in ref. 104. The tryptanthrin compounds are particularly effective in the stimulation of human peripheral blood mononuclear cells for the production of cytokines, such as TNF-α.

[0101] The invention may also comprise combinations of aspects of one or more of the adjuvants identified above. For example, the following combinations may be used as adjuvant compositions in the invention: (1) a saponin and an oil-in-water emulsion [105]; (2) a saponin (e.g. QS21)+a non-toxic LPS derivative (e.g. 3dMPL) [106]; (3) a saponin (e.g. QS21)+a non-toxic LPS derivative (e.g. 3dMPL)+a cholesterol; (4) a saponin (e.g. QS21)+3dMPL+IL-12 (optionally+a sterol) [107]; (5) combinations of 3dMPL with, for example, QS21 and/or oil-in-water emulsions [108]; (6) SAF, containing 10% squalane, 0.4% Tween 80™, 5% pluronic-block polymer L121, and thr-MDP, either microfluidized into a submicron emulsion or vortexed to generate a larger particle size emulsion. (7) Ribi™ adjuvant system (RAS), (Ribi Immunochem) containing 2% squalene, 0.2% Tween 80, and one or more bacterial cell wall components from the group consisting of monophosphorylipid A (MPL), trehalose dimycolate (TDM), and cell wall skeleton (CWS), preferably MPL+CWS (Detox™); (8) one or more mineral salts (such as an aluminum salt)+a non-toxic derivative of LPS (such as 3dMPL); and (9) one or more mineral salts (such as an aluminum salt)+an immunostimulatory oligonucleotide (such as a nucleotide sequence including a CpG motif).

[0102] Other substances that act as immunostimulating agents are disclosed in chapter 7 of ref. 36.

[0103] The use of an aluminium hydroxide or aluminium phosphate adjuvant is particularly preferred, and antigens are generally adsorbed to these salts. Calcium phosphate is another preferred adjuvant.

[0104] The pH of compositions of the invention is preferably between 6 and 8, preferably about 7. Stable pH may be maintained by the use of a buffer. Where a composition comprises an aluminium hydroxide salt, it is preferred to use a histidine buffer [109]. The composition may be sterile and/or pyrogen-free. Compositions of the invention may be isotonic with respect to humans.

[0105] Compositions may be presented in vials, or they may be presented in ready-filled syringes. The syringes may be supplied with or without needles. A syringe will include a single dose of the composition, whereas a vial may include a single dose or multiple doses. Injectable compositions will usually be liquid solutions or suspensions. Alternatively, they may be presented in solid form (e.g. freeze-dried) for solution or suspension in liquid vehicles prior to injection.

[0106] Compositions of the invention may be packaged in unit dose form or in multiple dose form. For multiple dose forms, vials are preferred to pre-filled syringes. Effective dosage volumes can be routinely established, but a typical human dose of the composition for injection has a volume of 0.5 ml.

[0107] Where a composition of the invention is to be prepared extemporaneously prior to use (e.g. where a component is presented in lyophilised form) and is presented as a kit, the kit may comprise two vials, or it may comprise one ready-filled syringe and one vial, with the contents of the syringe being used to reactivate the contents of the vial prior to injection.

[0108] Immunogenic compositions used as vaccines comprise an immunologically effective amount of antigen(s), as well as any other components, as needed. By ‘immunologically effective amount’, it is meant that the administration of that amount to an individual, either in a single dose or as part of a series, is effective for treatment or prevention. This amount varies depending upon the health and physical condition of the individual to be treated, age, the taxonomic group of individual to be treated (e.g. non-human primate, primate, etc.), the capacity of the individual's immune system to synthesise antibodies, the degree of protection desired, the formulation of the vaccine, the treating doctor's assessment of the medical situation, and other relevant factors. It is expected that the amount will fall in a relatively broad range that can be determined through routine trials, and a typical quantity of each meningococcal saccharide antigen per dose is between 1 μg and 10 mg per antigen.

### Pharmaceutical Uses

[0109] The invention also provides a method of treating a patient, comprising administering to the patient a therapeutically effective amount of a composition of the invention. The patient may either be at risk from the disease themselves or may be a pregnant woman (‘maternal immunisation’ [110]).

[0110] The invention provides nucleic acid, polypeptide, or antibody of the invention for use as medicaments (e.g. as immunogenic compositions or as vaccines) or as diagnostic reagents. It also provides the use of nucleic acid, polypeptide, or antibody of the invention in the manufacture of: (i) a medicament for treating or preventing disease and/or infection caused by GBS; (ii) a diagnostic reagent for detecting the presence of GBS or of antibodies raised against GBS; and/or (iii) a reagent which can raise antibodies against GBS. Said GBS can be of any serotype or strain. Said disease may be, for instance, bacteremia, meningitis, puerperal fever, scarlet fever, erysipelas, pharyngitis, impetigo, necrotising fasciitis, myositis or toxic shock syndrome.

[0111] The patient is preferably a human. Where the vaccine is for prophylactic use, the human is preferably an adolescent (e.g. aged between 10 and 20 years); where the vaccine is for therapeutic use, the human is preferably an adult. A vaccine intended for children or adolescents may also be administered to adults e.g. to assess safety, dosage, immunogenicity, etc.

[0112] One way of checking efficacy of therapeutic treatment involves monitoring GBS infection after administration of the composition of the invention. One way of checking efficacy of prophylactic treatment involves monitoring immune responses against an administered polypeptide after administration. Immunogenicity of compositions of the invention can be determined by administering them to test subjects (e.g. children 12-16 months age, or animal models e.g. a mouse model) and then determining standard parameters including ELISA titres (GMT) of IgG. These immune responses will generally be determined around 4 weeks after administration of the composition, and compared to values determined before administration of the composition. Where more than one dose of the composition is administered, more than one post-administration determination may be made. A mouse neonatal sepsis model for protective efficacy against GBS infection is known e.g. see ref. 111.

[0113] Administration of polypeptide antigens is a preferred method of treatment for inducing immunity. Administration of antibodies of the invention is another preferred method of treatment. This method of passive immunisation is particularly useful for newborn children or for pregnant women. This method will typically use monoclonal antibodies, which will be humanised or fully human. Preferred compositions for use in immunisation include more than one GBS polypeptide. Multiple antigens can be included as separate admixed polypeptides in a single composition, and/or can be part of a hybrid polypeptide as described above. Preferred combinations of antigens include at least one (e.g. 1, 2, 3, 4, 5, 6 or more) ‘core’ polypeptide (as described below; Table V) and at least one (e.g. 1, 2, 3, 4, 5, 6 or more) ‘variable’ polypeptide (as described below; Table VI). Mixtures of one core polypeptide with more than one variable polypeptides are preferred. Examples of these combinations, using the nomenclature of reference 2, include (a) GBS322 (a core antigen) plus GBS80, GBS104 & GBS67 (all variable antigens); and (b) GBS322 plus GBS80 & GBS104. In some embodiments, this specific 3-valent combination [112] and this specific 4-valent combination [113] are excluded from the invention, although they illustrate the principle of combining core and variable antigens.

[0114] Compositions of the invention will generally be administered directly to a patient. Direct delivery may be accomplished by parenteral injection (e.g. subcutaneously, intraperitoneally, intravenously, intramuscularly, or to the interstitial space of a tissue), or by rectal, oral, vaginal, topical, transdermal, intranasal, sublingual, ocular, aural, pulmonary or other mucosal administration. Intramuscular administration to the thigh or the upper arm is preferred injection may be via a needle (e.g. a hypodermic needle), but needle-free injection may alternatively be used. A typical intramuscular dose is 0.5 ml.

[0115] The invention may be used to elicit systemic and/or mucosal immunity.

[0116] Dosage treatment can be a single dose schedule or a multiple dose schedule. Multiple doses may be used in a primary immunisation schedule and/or in a booster immunisation schedule. A primary dose schedule may be followed by a booster dose schedule. Suitable timing between priming doses (e.g. between 4-16 weeks), and between priming and boosting, can be routinely determined.

[0117] Bacterial infections affect various areas of the body and so compositions may be prepared in various forms. For example, the compositions may be prepared as injectables, either as liquid solutions or suspensions. Solid forms suitable for solution in, or suspension in, liquid vehicles prior to injection can also be prepared (e.g. a lyophilised composition). The composition may be prepared for topical administration e.g. as an ointment, cream or powder. The composition be prepared for oral administration e.g. as a tablet or capsule, or as a syrup (optionally flavoured). The composition may be prepared for pulmonary administration e.g. as an inhaler, using a fine powder or a spray. The composition may be prepared as a suppository or pessary. The composition may be prepared for nasal, aural or ocular administration e.g. as spray, drops, gel or powder [e.g. refs 114 & 115].

### Further Antigenic Components of Compositions of the Invention

[0118] The invention also provides a composition comprising a polypeptide or the invention and one or more of the following further antigens:
[0119] a saccharide antigen form N. meningitudis serogroup A, C, W135 and/or Y (preferably all four), such as the oligosaccharide disclosed in ref. 116 from serogroup C [see also ref. 117] or the oligosaccharides of ref. 118.
[0120] a saccharide antigen from Streptococcus pneumoniae [e.g. 119, 120, 121].
[0121] an antigen from hepatitis A virus, such as inactivated virus [e.g. 122, 123].
[0122] an antigen from hepatitis B virus, such as the surface and/or core antigens [e.g. 123, 124].
[0123] a diphtheria antigen, such as a diphtheria toxoid [e.g. chapter 3 of ref. 125] e.g. the CRM₁₉₇ mutant [e.g. 126].
[0124] a tetanus antigen, such as a tetanus toxoid [e.g. chapter 4 of ref 125].
[0125] an antigen from Bordetella pertussis, such as pertussis holotoxin (PT) and filamentous haemagglutinin (FHA) from B. pertussis, optionally also in combination with pertactin and/or agglutinogens 2 and 3 [e.g. refs. 127 & 128].
[0126] a saccharide antigen from Haemophilus influenzae B [e.g. 117].
[0127] polio antigen(s) [e.g. 129, 130] such as IPV.
[0128] measles, mumps and/or rubella antigens [e.g. chapters 9, 10 & 11 of ref. 125].
[0129] influenza antigen(s) [e.g. chapter 19 of ref. 125], such as the haemagglutinin and/or neuraminidase surface proteins.
[0130] an antigen from Moraxella catarrhalis [e.g. 131].
[0131] a saccharide antigen from Streptococcus agalactiae (group B streptococcus).
[0132] an antigen from Streptococcus pyogenes (group A streptococcus) [e.g. 132, 133, 134].
[0133] an antigen from Staphylococcus aureus [e.g. 135].

[0134] The composition may comprise one or more of these further antigens.

[0135] In another embodiment, the GBS antigens of the invention are combined with one or more additional, non-GBS antigens suitable for use in a vaccine designed to protect elderly or immunocompromised individuals. For example, the GBS antigens may be combined with an antigen derived from the group consisting of Enterococcus faecalis, Staphylococcus aureus, Staphylococcus epidermis, Pseudomonas aeruginosa, Legionella pneumophila, Listeria monocytogenes, Neisseria meningitides, influenza, and Parainfluenza virus (‘PIV’).

[0136] Toxic protein antigens may be detoxified where necessary (e.g. detoxification of pertussis toxin by chemical and/or genetic means [128]).

[0137] Where a diphtheria antigen is included in the composition it is preferred also to include tetanus antigen and pertussis antigens. Similarly, where a tetanus antigen is included it is preferred also to include diphtheria and pertussis antigens. Similarly, where a pertussis antigen is included it is preferred also to include diphtheria and tetanus antigens. DTP combinations are thus preferred.

[0138] Saccharide antigens are preferably in the form of conjugates. Carrier proteins for the conjugates include bacterial toxins (such as diphtheria toxoid or tetanus toxoid), the N. meningitidis outer membrane protein [136], synthetic peptides [137, 138], heat shock proteins [139, 140], pertussis proteins [141, 142], protein D from H. influenzae [143, 144], cytokines [145], lymphokines [145], H. influenzae proteins, hormones [145], growth factors [145], toxin A or B from C. difficile [146], iron-uptake proteins [147], artificial proteins comprising multiple human CD4+ T cell epitopes from various pathogen-derived antigens [148] such as the N19 protein [149], pneumococcal surface protein PspA [150], pneumolysin [151], etc. A preferred carrier protein is the CRM197 protein [152].

[0139] Antigens in the composition will typically be present at a concentration of at least 1 μg/ml each. In general, the concentration of any given antigen will be sufficient to elicit an immune response against that antigen.

[0140] As an alternative to using proteins antigens in the immunogenic compositions of the invention, nucleic acid (preferably DNA e.g. in the form of a plasmid) encoding the antigen may be used.

[0141] Antigens are preferably adsorbed to an aluminium salt.

### Screening Methods

[0142] The invention provides a process for determining whether a test compound binds to a polypeptide of the invention. If a test compound binds to a polypeptide of the invention and this binding inhibits the life cycle of the GBS bacterium, then the test compound can be used as an antibiotic or as a lead compound for the design of antibiotics. The process will typically comprise the steps of contacting a test compound with a polypeptide of the invention, and determining whether the test compound binds to said polypeptide. Preferred polypeptides of the invention for use in these processes are enzymes (e.g. tRNA synthetases), membrane transporters and ribosomal polypeptides. Suitable test compounds include polypeptides, polypeptides, carbohydrates, lipids, nucleic acids (e.g. DNA, RNA, and modified forms thereof), as well as small organic compounds (e.g. MW between 200 and 2000 Da). The test compounds may be provided individually, but will typically be part of a library (e.g. a combinatorial library). Methods for detecting a binding interaction include NMR, filter-binding assays, gel-retardation assays, displacement assays, surface plasmon resonance, reverse two-hybrid etc. A compound which binds to a polypeptide of the invention can be tested for antibiotic activity by contacting the compound with GBS bacteria and then monitoring for inhibition of growth. The invention also provides a compound identified using these methods.

[0143] Preferably, the process comprises the steps of: (a) contacting a polypeptide of the invention with one or more candidate compounds to give a mixture; (b) incubating the mixture to allow polypeptide and the candidate compound(s) to interact; and (c) assessing whether the candidate compound binds to the polypeptide or modulates its activity.

[0144] Once a candidate compound has been identified in vitro as a compound that binds to a polypeptide of the invention then it may be desirable to perform further experiments to confirm the in vivo function of the compound in inhibiting bacterial growth and/or survival. Thus the method comprise the further step of contacting the compound with a GBS bacterium and assessing its effect.

[0145] The polypeptide used in the screening process may be free in solution, affixed to a solid support, located on a cell surface or located intracellularly. Preferably, the binding of a candidate compound to the polypeptide is detected by means of a label directly or indirectly associated with the candidate compound. The label may be a fluorophore, radioisotope, or other detectable label.

[0146] Preferred polypeptides for use in these screening methods are the ‘core’ sequences identified below.

### General

[0147] The invention provides a computer-readable medium (e.g. a floppy disk, a hard disk, a CD-ROM, a DVD etc.) and/or a computer memory and/or a computer database containing one or more of the sequences in the sequence listing.

[0148] The term “comprising” encompasses “including” as well as “consisting” e.g. a composition “comprising” X may consist exclusively of X or may include something additional e.g. X+Y.

[0149] The term “about” in relation to a numerical value x means, for example, x±10%.

[0150] The word “substantially” does not exclude “completely” e.g. a composition which is “substantially free” from Y may be completely free from Y. Where necessary, the word “substantially” may be omitted from the definition of the invention.

[0151] The N-terminus residues in the amino acid sequences in the sequence listing are given as the amino acid encoded by the first codon in the corresponding nucleotide sequence. Where the first codon is not ATG, it will be understood that it will be translated as methionine when the codon is a start codon, but will be translated as the indicated non-Met amino acid when the sequence is at the C-terminus of a fusion partner. The invention specifically discloses and encompasses each of the amino acid sequences of the sequence listing having a N-terminus methionine residue (e.g. a formyl-methionine residue) in place of any indicated non-Met residue. It also specifically discloses and encompasses each of the amino acid sequences of the sequence listing starting at any internal methionine residues in the sequences.

[0152] As indicated in the above text, nucleic acids and polypeptides of the invention may include sequences that:
[0153] (a) are identical (i.e. 100% identical) to the sequences disclosed in the sequence listing;
[0154] (b) share sequence identity with the sequences disclosed in the sequence listing;
[0155] (c) have 1, 2, 3, 4, 5, 6, 7, 8, 9 or 10 single nucleotide or amino acid alterations (deletions, insertions, substitutions), which may be at separate locations or may be contiguous, as compared to the sequences of (a) or (b); and
[0156] (d) when aligned with a particular sequence from the sequence listing using a pairwise alignment algorithm, a moving window of x monomers (amino acids or nucleotides) moving from start (N-terminus or 5′) to end (C-terminus of 3′), such that for an alignment that extends to p monomers (where p>x) there are p−x+1 such windows, each window has at least x·y identical aligned monomers, where: x is selected from 20, 25, 30, 35, 40, 45, 50, 60, 70, 80, 90, 100, 150, 200; y is selected from 0.50, 0.60, 0.70, 0.75, 0.80, 0.85, 0.90, 0.91, 0.92, 0.93, 0.94, 0.95, 0.96, 0.97, 0.98, 0.99; and if x·y is not an integer then it is rounded up to the nearest integer. The preferred pairwise alignment algorithm is the Needleman-Wunsch global alignment algorithm [153], using default parameters (e.g. with Gap opening penalty=10.0, and with Gap extension penalty=0.5, using the EBLOSUM62 scoring matrix). This algorithm is conveniently implemented in the needle tool in the EMBOSS package [154].

[0157] The nucleic acids and polypeptides of the invention may additionally have further sequences to the N-terminus/5′ and/or C-terminus/3′ of these sequences (a) to (d).

[0158] The practice of the present invention will employ, unless otherwise indicated, conventional methods of chemistry, biochemistry, molecular biology, immunology and pharmacology, within the skill of the art. Such techniques are explained fully in the literature. See, e.g., references 155-162, etc.

### BRIEF DESCRIPTION OF DRAWINGS

[0159] There are no drawings.

### MODES FOR CARRYING OUT THE INVENTION

[0160] Genome sequencing has been carried out on five strains of GBS from different serotypes: ‘18RS21’ (type II; MLST type ST19), ‘515’ (type Ia; MLST type ST23), ‘CJB111’ (type V; MLST type ST1), ‘COH1’ (type III; MLST type ST17) and ‘H36B’ (type Ib; MLST type ST6). Different numbers of coding sequences were identified in the five genomes:

| | Strain | | | | |
|---|---|---|---|---|---|
| | 18RS21 | 515 | CJB111 | COH1 | H36B |
| Coding | 2151 | 2249 | 2167 | 2410 | 2393 |
| seqs | | | | | |

[0161] These 11370 coding sequences are given in the sequence listing together with their inferred translation products. Annotation of these polypeptide sequences is given in Table I.

[0162] The sequence listing gives sequences in pairs, such that an odd-numbered sequence ‘n’ is a DNA coding sequence and the even-numbered sequence ‘n+1’ is the corresponding amino acid sequence:

| | Strain | | | | |
|---|---|---|---|---|---|
| | 18RS21 | 515 | CJB111 | COH1 | H36B |
| SEQ ID | 1-4302 | 4303-8800 | 8801-13134 | 13135-17954 | 17955-22740 |
| NO^{S} | | | | | |

[0163] The polypeptides and their epitopes can be used as antigens e.g. in vaccines or diagnostic tests.

[0164] Homologous coding sequences between strains are shown in Table II (listing SEQ ID numbers). For comparison, Table II also includes the ‘gi’ (GenInfo Identifier) accession numbers for strains 2603V/R (serotype V; MLST type ST106) [1] and NEM316 (serotype III; MLST type ST23) [3]. A single row in Table II includes all homologs and, where applicable, paralogs within a single strain.

[0165] In contrast to Table II, coding sequences without homologs in any of the other six sequenced genomes (i.e. unique to one strain within the six strains) are listed in Table III. These are preferred coding sequences of the invention e.g. when strain-specificity is desired. Each of the seven sequenced genomes contains between 13 and 61 sequences not present in any of the other strains. This variability exceeds that seen in the comparative genome hybridization analysis of reference 1.

[0166] Table IV lists coding sequences in the five new sequenced genomes that do not have any homologs in strains 2603V/R [1] or NEM316 [3]. These are preferred coding sequences of the invention e.g. when sequences not known in the prior art are desired.

[0167] Table V lists ‘core’ GBS genes, namely those that are found in all seven sequenced genomes. These ‘universal’ GBS coding sequences are preferred for use with the invention e.g. when strain-specificity is not desired, such as when designing a diagnostic test with high inter-strain cross-reactivity, or when preparing a composition which will elicit antibodies with high inter-strain cross-reactivity, or when screening for broad-range anti-GBS antibiotics. Table VI lists variable GBS genes, namely those that are found in at least two sequenced genomes, but not in all seven. The format of Tables V and VI follows that of Table II.

[0168] The GBS “pan-genome” can thus be divided in three parts: a core-genome, strain-specific sequences, and “dispensable genes” shared only by some of the strains. The core genes describe the basic aspects of GBS biology and major phenotypic traits, whereas dispensable and strain-specific genes contribute to the observed genetic diversity of the species and might confer selective advantages, such as adaptation to different niches, antibiotic resistance, and increased invasive capabilities.

[0169] The vast majority of genes making up the core genome belong to the groups of housekeeping functions, cell envelope, regulatory functions, and transport and binding proteins. However, about one third of the shared genes fall into the annotation class of hypothetical proteins and proteins of unknown function, thus suggesting that many aspects of basic GBS biology still need to be explored. Because of their ‘core’ nature, however, these sequences still have utility as they can be used in situations where inter-strain cross-reactivity is needed, without needing to know their true underlying biological function. Hypothetical genes and genes of unknown function are much more represented among the dispensable genes, probably due to the fact that more functions have been ascribed to better known (i.e. more frequently found) genes. This view is also supported by the strain-specific genes being predominantly of unknown function. Furthermore, genes associated with mobile and extrachromosomal elements are particularly abundant in this group, supporting the hypothesis that the majority of specific traits depend upon phenomena of lateral gene transfer. On the other hand, this class of genes is very poorly represented within the core genome, indicating that only a few of these rearrangements have remained stable during evolution of GBS.

[0170] The core shared by all isolates (Table V) accounts for only about 80% of any single genome, with the remaining 20% being absent in at least one other strain (Table VI). Approximately 1800 coding sequences are shared by the sequenced GBS strains. The criteria for gene identity between genomes was set low so that coding sequences were considered shared even if they were quite divergent in sequence. The size of the core is thus likely to be an overestimated, but it substantially defines the basic characteristics of the GBS species. As further GBS genome sequences become available then this “core” may decrease (by analogy a coding sequence would move from Table V to Table VI), but for the purposes of the present invention the “core” is the group given in Table V. Even using the sequences herein, the core decreases with the addition of each new genome, but extrapolation of the curve indicates that the core stabilizes at around 1800 coding sequences and will remain constant even as many more genomes are added.

[0171] One mechanism by which bacteria can modulate their lifestyle and virulence in response to variable stimuli, stress conditions and adaptation to different niches is phase variation [163, 164]. Such variation occurs by altering the length of short repeated DNA tracts within or immediately upstream of coding regions (contingency genes), thus causing frame-shifts and affecting protein synthesis. At least one important virulence-associated gene in GBS is regulated in this way [165], and so identification of further phase variable genes can identify new virulence factors. Virulence factors are particularly useful for vaccination, antibiotic targets, etc. Table VII shows such phase variable genes, and these are preferred polypeptides for use with the invention.

[0172] It will be understood that the invention has been described by way of example only and modifications may be made whilst remaining within the scope and spirit of the invention.

TABLE II
Homologs and paralogs

| 2603vr | 18rs21 | 515 | cjb11 | coh1 | h36b | NEM316 |
|---|---|---|---|---|---|---|
| 22535220 | 1, 3919 | 8615 | 12909 | 14061 | 22383 | 24413708 |
| 22535221 | 3 | 8617 | 12911 | 14063 | 22385, 22427 | 24413709 |
| 22535222 | 5 | 8619, 8703 | 12913 | 14065 | 22387 | 24413710 |
| 22535223 | 7 | 8621 | 12915 | 14067 | 22389 | 24413711 |
| 22535224 | 9 | 8623 | 12917 | 14069 | 22391 | 24413712 |
| 22535225 | 11 | 8625 | 12919 | 14071 | 22393 | 24413713 |
| 22533003 | 13 | 8627 | 12921 | 14073 | 22395 | 23094427 |
| 22533004 | 15 | 4303, 8629 | 12923 | 14075 | 22397 | 23094428 |
| 22533005 | 17 | 4305, 8631 | 12925, 12927 | 14077 | 22399 | 23094429 |
| 22533006, 22535061 | 19, 3631 | 4307, 8305, | — | 14079, 17271 | 22401 | 23094430 |
| | | 8323, 8325, | | | | |
| | | 8327, 8329, | | | | |
| | | 8787 | | | | |
| 22533007 | 21 | 4309 | 9607 | 14081 | 22403 | 23094431 |
| 22533008 | 23 | 4311 | 9609 | 14083 | 22405 | 23094432 |
| 22533009 | 25 | 4313 | 9611 | 14085 | 22407 | 23094433 |
| 22533010 | 27, 29 | 4315 | 9613 | 14087 | 22409, 22663 | 23094434 |
| 22533012 | 31 | 4317 | 9615 | 14089 | 22413 | 23094435 |
| 22533013 | 33 | 4319 | 9617 | 14091 | 22415 | 23094436 |
| 22533014 | 35 | 4321 | 9619 | 14093 | 22417 | 23094437 |
| 22533015 | 37 | 4323 | 9621 | 13135, 14095 | 22419 | 23094438 |
| 22533016, 22534732 | 39 | 4325 | 9623, 12021 | 13137, 14097, | 21493, 22421 | 23094439 |
| | | | | 16681 | | |
| 22533017 | 41 | 4327 | 9625 | 13139, 13143, | 22423 | 23094440 |
| | | | | 14099 | | |
| 22533018 | 43 | 4329 | 9627 | 13145, 13147, | 22425, 22623 | 23094441 |
| | | | | 13149, 14101 | | |
| 22533020 | 45, 47, 49, 51 | 4331 | 8801 | 13181 | 17963 | 23094442 |
| 22533021 | 53 | 4333, 4335 | 8803 | 13183 | 17965 | 23094443 |
| 22533022 | 55 | 4337 | 8805 | 13185 | 17967 | 23094444 |
| 22533023 | 57 | 4339, 4341 | 8807 | 13187, 13189 | 17969 | 23094445 |
| 22533024 | 59 | 4343 | 8809 | 13191 | 17971 | 23094446 |
| 22533025 | 61 | 4345 | 8811 | 13193 | 17973 | 23094447 |
| 22533026 | 63 | 4347 | 8813, 8815 | 13195 | 17975 | 23094448 |
| 22533027 | 65 | 4349 | 8817 | 13197 | 17977, 18033, | 23094449 |
| | | | | | 18035 | |
| 22533028 | 67 | 4351 | 8819 | 13199, 13245, | 17979, 18037, | 23094450 |
| | | | | 13247, 17811, | 22555 | |
| | | | | 17821, 17859 | | |
| 22533029 | 69, 71, 3965, | 4353 | 8821 | 13201, 17803, | 17981 | 23094451 |
| | 4017, 4061 | | | 17891 | | |
| 22533030 | 73, 75, 3963 | 4355 | 8823 | 13203 | 17983 | 23094452 |
| 22533032 | 77 | 4357, 4365 | 8825 | 13205 | 17985 | 23094453 |
| 22533033 | 79 | — | 8827 | 13207 | 17987 | 23094454 |
| 22533034 | 81 | 4361, 4369, | 8829 | 13209 | 17989, 22505 | 23094455 |
| | | 8707 | | | | |
| 22533035 | 83, 85 | 4371 | 8831 | 13211, 13249, | 17991 | 23094456 |
| | | | | 13251, 13253 | | |
| 22533036 | 87 | 4373 | 8833 | 13213 | 17993 | 23094457 |
| 22533037 | 89 | 4375 | 8835 | 13215, 17895 | 17995 | 23094458 |
| 22533038 | 91 | 4377, 4413, | 8837 | 13217, 13255, | 17997 | 23094459 |
| | | 4415, 4417 | | 17893 | | |
| 22533039 | 93 | 4379 | 8839 | 13219, 13257 | 17999 | 23094460 |
| 22533040 | 95 | 4381, 4419, | 8841 | 13221, 13259 | 18001 | 23094461 |
| | | 4421 | | | | |
| 22533041 | 97 | 4383 | 8843 | 13223, 13261 | 18003 | 23094462 |
| 22533042 | 99 | 4385 | 8845 | 13225 | 18005 | 23094463 |
| 22533043 | 101 | 4387 | 8847 | 13227 | 18007 | 23094464 |
| 22533044 | 103 | 4389 | 8849 | 13229 | 18009 | 23094465 |
| 22533045 | 105 | 4391 | 8851 | 13231 | 18011 | 23094466 |
| 22533046 | 107 | 4393 | 8853 | 13233 | 18013 | 23094467 |
| 22533047 | 109 | 4395 | 8855 | 13235, 17875, | 18015, 18039, | 23094468 |
| | | | | 17941 | 18041, 22631 | |
| 22533048 | 111 | 4397 | 8857, 13023 | 13237 | 18017 | 23094469 |
| 22533049 | 113, 115, 117, | 4399 | 8859 | 13239 | 18019 | 23094470 |
| | 3949 | | | | | |
| 22533050 | 119 | — | 8861 | — | 18021 | — |
| 22533051 | 121 | 4405 | 8863 | 13265 | 18023 | 23094473 |
| 22533053 | 123 | 4407 | 8865 | 13267 | — | 23094474 |
| 22533054 | 125 | 4409 | 8867 | 13269 | 18027 | 23094475 |
| 22533055 | 127 | 4411 | 8869 | 13271 | 18029 | 23094476 |
| 22533056 | 129 | 4423 | 8871 | 13273 | 18031 | 23094477 |
| 22533057 | 131 | 4425, 4427 | 8873 | 13275 | 18043 | 23094478 |
| 22533058 | 133 | 4429, 4431, | 8875 | 13277, 13279 | 18045, 18047, | 23094479 |
| | | 4433 | | | 18049, 18051 | |
| 22533059 | 135 | 4435, 4437 | 8877 | 13281 | 18053 | 23094480 |
| 22533060 | 137 | 4439 | 8879 | 17759 | 18055 | 23094481 |
| 22533061 | 139 | 4441 | 8881 | 13283 | 18057 | 23094482 |
| 22533062 | 141 | — | 8883 | — | 18059 | 23094483 |
| 22533063 | 143 | 4443 | 8885 | 13285 | 18061 | 23094484 |
| 22533064 | 145 | 4445 | 8887 | 13287, 13289 | 18063, 18071 | 23094485 |
| 22533065 | 147 | 4447 | 8889 | 13291 | 18065, 18073 | 23094486 |
| 22533066 | 149 | 4449 | 8891 | 13293 | 18067, 18069, | 23094487 |
| | | | | | 18075 | |
| 22533067 | 151 | 4451 | 8893 | 13295 | 18077 | 23094488 |
| 22533068 | 153 | 4453 | 8895 | 13297 | 18079 | 23094489 |
| 22533069 | 155 | 4455 | 8897 | 13299 | 18081 | 23094490 |
| 22533070 | 157 | 4457 | 8899 | 13301 | 18083 | 23094491 |
| 22533071 | 159 | 4461 | 8903 | 13155, 13305, | 18087 | 23094492 |
| | | | | 17925 | | |
| 22533072 | 161 | 4463 | 8905 | 13307 | 18089 | 23094493 |
| 22533073 | 163 | 4465 | 8907 | 13309 | 18091 | 23094494 |
| 22533074 | 165 | 4467 | 8909 | 13311 | 18093 | 23094495 |
| 22533075 | 167 | 4469 | 8911 | 13313 | 18095 | 23094496 |
| 22533076, 22534790 | 169, 3205 | 6299 | 12167 | 16801 | 21615 | 23094497, 24413378 |
| 22533077 | 171 | 4471 | 8913 | 13315 | 18097 | 23094498 |
| 22533078 | 173 | 4473 | 8915 | 13317 | 18099 | 23094499 |
| 22533080 | 175 | 4475 | 8917 | 13319 | 18101 | 23094500 |
| 22533081 | 177 | 4477 | 8919 | 13321, 17737 | 18103 | 23094501 |
| 22533082 | 179 | 4481 | 8923 | 13325 | 18107 | 23094502 |
| 22533083 | 181 | 4483 | 8925 | 13327 | 18109 | 23094503 |
| 22533084 | 183 | 4485 | 8927 | 13329 | 18111 | 23094504 |
| 22533085 | 185 | 4487 | 8929, 8931 | 13331 | 18113 | 23094505 |
| 22533086 | 187 | 4489 | 8933 | — | 18115 | 23094506 |
| 22533088 | 189 | 4491 | 8935 | — | 18117 | 23094508 |
| 22533089 | 191 | 4493 | 8937 | — | 18119 | 23094509 |
| 22533090 | 193 | 4495 | 8939 | 13333, 13335 | 18121, 18123 | 23094510 |
| 22533091 | 195 | 4497 | 8941 | 13337 | 18125 | 23094511 |
| 22533092, 22533093, | 199, 201, 503 | 4499, 4875 | 8943, 8945, | 13341, 13345, | 18127, 18135, | 23094512 |
| 22533257, | | | 9475, 9497 | 13663, 13681, | 18437, 18451 | |
| 22533270 | | | | 13685 | | |
| 22533094, 22533258, | 203, 505 | 4501 | 8947, 9477 | 13343, 13347, | 18129, 18137 | 23094513 |
| 22533260 | | | | 13665, 13687, | | |
| | | | | 17743 | | |
| 22533095 | 205 | 4503 | 8949 | 13349 | 18139 | 23094514 |
| 22533096 | 207 | 4505 | 8951 | 13339, 13351 | 18141 | 23094515 |
| 22533097 | 209 | 4507 | 8953 | 13353 | 18143 | 23094516 |
| 22533098 | 211 | 4509 | 8955 | 13355, 13357 | 18145 | 23094517 |
| 22533099 | 213 | 4511 | 8957 | 13359 | 18147 | 23094518 |
| 22533100 | 215 | 4513 | 8959 | 13361 | 18149 | 23094519 |
| 22533101 | 217 | 4515 | 8961 | 13363 | 18151, 18171 | 23094520 |
| 22533102 | 219 | 4517 | 8963 | 13365 | 18153 | 23094521 |
| 22533104 | 221 | 4519 | 8965 | 13367 | 18155 | 23094522 |
| 22533105 | 223 | 4521 | 8967 | 13369 | 18157 | 23094523 |
| 22533106 | 225 | 4523 | 8969 | 13371 | 18159 | 23094524 |
| 22533107 | 227 | 4525 | 8971 | 13373 | 18161 | 23094525 |
| 22533108 | 229 | 4527 | 8973 | 13375, 13385 | 18163 | 23094526 |
| 22533116 | 231 | 4549 | 8991 | 13399 | 18183 | 23094534 |
| 22533117 | 233 | 4551 | 8993 | 13401, 13403 | 18185 | 23094535 |
| 22533118 | 235 | 4553 | 8995 | 13405 | 18187 | 23094536 |
| 22533119 | 237 | 4555 | 8997 | 13407 | 18189 | 23094537 |
| 22533120 | 239 | 4557 | 8999 | 13413 | 18193 | 23094538 |
| 22533121 | 241 | 4559, 4561, | 9001 | 13415 | 18195 | 23094539 |
| | | 4563 | | | | |
| 22533122 | 243 | 4565 | 9003 | 13417, 13443 | 18197 | 23094540 |
| 22533123 | 245 | 4567 | 9005 | 13419, 13445 | 18199 | 23094541 |
| 22533124 | 247 | 4569 | 9007 | 13421 | 18201 | 23094542 |
| 22533125 | 249, 251, 253, | 4571 | 9009 | 13423 | 18203 | 23094543 |
| | 4055 | | | | | |
| 22533126 | 255 | 4573 | 9011 | 13425 | 18205 | 23094544 |
| 22533128 | 257 | 4577 | 9015 | 13429 | 18209 | 23094545 |
| 22533133 | 259, 261 | 4585 | 9023 | 13437 | 18217 | 23094549 |
| 22533134 | 263, 265, 267 | 4587 | 9025 | 13439 | 18219 | 23094550 |
| 22533139 | 269, 271 | 4591 | 9035 | 13451, 13487 | 18227 | 23094555 |
| 22533140 | 273 | 4593 | 9037 | 13453 | 18229 | 23094556 |
| 22533141, 22533904, | 275, 1701, | 4595, 6149, | 9039, 10563, | 13455, 15055, | 18231, 19849, | 23095333, 24413101 |
| 22534480 | 2693, 4111 | 7287, 8771 | 11555 | 16017 | 20993, 20995 | |
| 22533142 | 277 | 4597, 4599 | 9041 | 13457 | 22175 | — |
| 22533143 | 281, 285, 4051 | 4603 | 9045 | 13461 | 22173 | 23094558 |
| — | 283 | 4601 | 9043 | 13459 | — | — |
| 22533144 | 287, 4053 | 4605 | 9047 | 13463 | 22169, 22171 | 23094559 |
| 22533145 | 289, 4163 | 4607, 4609 | 9049 | 13465 | 22165, 22167 | 23094560 |
| 22533146 | 291 | 4611 | 9051 | 13467 | 22163 | 23094561 |
| 22533147 | 293 | 4613 | 9053 | 13469 | 22161 | 23094562 |
| 22533148 | 295, 297 | 4615 | 9055 | 13471 | 22159 | 23094563 |
| 22533149 | 299 | 4617 | 9057 | 13473, 17949 | 22157, 22647 | 23094564 |
| 22533150, 22534271 | 301 | 4619 | 9059 | 13475 | 22155 | 23094565 |
| 22533151, 22534154 | 303 | 4621, 6727, | 9061, 11015 | 13477, 13489, | 20309, 20311, | 23094566, 23095668 |
| | | 6729, 6731 | | 15575 | 20313, 22153 | |
| 22533152 | 305 | 4623 | 9063 | 13479 | 22151 | 23094567 |
| 22533154 | 307 | 4625 | 9065 | 13481 | 22149 | 23094568 |
| 22533155 | 309, 311 | 4627 | 9067 | 13483 | 22147 | 23094569 |
| 22533156 | 313 | 4629 | 9069 | 13485 | 22145 | 23094570 |
| | | 4631 | 9071 | 13491 | | |
| 22533158 | 315 | 4633 | 9073 | 13493 | 17955, 18239 | 23094572 |
| 22533159 | 317 | 4635 | 9075 | 13495 | 17957, 18241 | 23094573 |
| 22533160 | 319 | 4637 | 9077 | 13497 | 17959 | 23094574 |
| 22533161 | 321, 4077, | 4639, 8785 | 9079 | 13499 | 17961, 22541 | 23094575 |
| | 4101, 4113 | | | | | |
| 22533162 | 323 | 4641 | 9081 | 13501, 13503 | 18243, 18253 | 23094576 |
| 22533163 | 325 | 4643 | 9087 | 13505 | 18245 | 23094577 |
| 22533164 | 327 | 4645 | 9089 | 13507 | 18247 | 23094578 |
| 22533165 | 329 | 4647 | 9091 | 13509 | 18249 | 23094579 |
| — | 331 | 4649 | 9093 | 13511 | 18251 | 23094580 |
| 22533167 | 333 | 4655, 4657 | 9095 | 13513 | 18255 | 23094581 |
| 22533168 | 335 | 4659 | 9097 | 13515, 13517 | 18257 | 23094582 |
| 22533169 | 337 | 4661 | 9099, 13081 | 13519 | 18259 | 23094583 |
| 22533170 | 339, 343 | 4663, 4729 | 9083, 9085, | 13521, 17817 | 18261, 18281, | 23094584 |
| | | | 9101 | | 18283, 18285 | |
| 22533171 | 341, 345 | 4665 | 9103 | 13523 | 18263, 18287 | 23094585 |
| 22533172 | 347 | 4667 | 9105 | 13525, 13527 | 18265 | 23094586 |
| 22533173 | 349 | 4669 | 9107 | 13529 | 18267 | 23094587 |
| 22533174 | 351 | 4675 | 9115 | 13531 | 18269 | 23094591 |
| 22533175 | 353 | 4677 | 9117 | — | 18271 | 23094592 |
| 22533176 | 355 | 4679 | 9119 | 13533 | 18273 | 23094593 |
| 22533177 | 357 | 4681 | 9121 | 13535 | 18275 | 23094594 |
| 22533178 | 359 | 4683 | 9123 | 13537 | 18277 | 23094595 |
| 22533179 | 361 | 4685 | 9125 | 13539 | 18279 | — |
| 22533180 | 363 | 4687 | 9127 | 13541 | — | 23094596 |
| 22533181 | 365 | 4689 | 9129 | 13543 | 18289 | 23094597 |
| 22533182 | 367 | 4691 | 9131 | 13545 | 18291 | 23094598 |
| 22533183 | 369 | 4693 | 9133 | 13547, 13611, | 18293 | 23094599 |
| | | | | 13613 | | |
| 22533186 | 371 | 4697 | 9137 | 13551 | 18297 | 23094601 |
| 22533187 | 373 | 4699 | 9139 | 13553 | 18299 | 23094602 |
| 22533188 | 375, 377 | 4701 | 9141 | 13555, 13615, | 18301 | 23094603 |
| | | | | 13617 | | |
| 22533189 | 379 | 4703 | 9143 | 13557, 13619 | 18303 | 23094604 |
| 22533190, 22533587, | 381, 3121 | 4705, 5537, | 9145, 12049 | 13559 | 18305, 19283 | 23094605, 24413338 |
| 22534747, | | 7833 | | | | |
| 22534904 | | | | | | |
| 22533191 | 383 | 4707 | 9147 | 13561 | 18307 | 23094606 |
| 22533192 | 385 | 4709 | 9149 | 13563 | 18309 | 23094607 |
| 22533193 | 387 | 4711, 4731 | 9151 | 13565 | 18311 | 23094608 |
| 22533194 | 389 | 4713, 4733, | 9153 | 13567 | 18313 | 23094609 |
| | | 8679 | | | | |
| 22533195 | 391, 393 | 4715 | 9155 | 13569 | 18315, 18319 | 23094610 |
| 22533196 | 395 | 4717 | 9157 | 13571 | 18317, 18321 | — |
| 22533197 | 397 | 4719 | 9159 | 13573, 13621, | 18323 | 23094611 |
| | | | | 13623, 13625 | | |
| 22533198 | 399 | 4721 | 9161 | 13575, 13627, | 18325 | 23094612 |
| | | | | 13629 | | |
| 22533199 | 401 | 4723 | 9163 | 13577, 13631 | 18327 | 23094613 |
| 22533200 | 403 | 4725 | 9165 | 13579, 13633, | 18329 | 23094614 |
| | | | | 13635 | | |
| 22533201 | 405 | 4727, 4735 | 9167 | 13581 | 18331 | 23094615 |
| 22533202 | 407 | 4737, 4739 | 9169 | 13583 | 18333, 18693 | 23094616 |
| 22533203 | 409, 411 | 4741 | 9171 | 13585 | 18335, 18431 | 23094617 |
| 22533204, 22533207 | 413 | 4745, 4749 | 9173 | 13587, 13637 | 18337 | 23094618 |
| 22533208 | 415 | 4747, 4751 | 9175 | 13589, 13639 | 18339 | 23094619 |
| 22533209 | 417 | 4753, 8715 | 9177 | 13591, 13641 | 18341 | 23094620 |
| 22533210 | 419 | 4755 | 9179 | 13593 | 18343 | 23094621 |
| 22533211 | 421 | 4757 | 9181 | 13595 | 18345 | 23094622 |
| 22533212 | 423, 425 | 4759 | 9183 | 13597 | 18347 | 23094623 |
| 22533213 | 427 | 4761 | 9185 | 13599 | 18349 | 23094624 |
| 22533214 | 429 | 4763, 8793 | 9187, 13129 | 13601, 13643 | 18351, 18433 | 23094625 |
| 22533215 | 431 | 4765 | 9189 | 13603 | 18353 | 23094626 |
| 22533216 | 433 | 4767 | 9191 | 13605 | 18355, 22597 | 23094627 |
| 22533217 | 435 | 4769 | 9193 | 13607 | 18357, 22595 | 23094628 |
| 22533218 | 437, 439 | 4771 | 9195 | 13609, 13645 | 18359 | 23094629 |
| 22533219 | 441 | 4773 | 9197 | 13647 | 18361 | 23094630 |
| 22533220 | 443 | 4775 | 9199 | 13649 | 18363, 18435, | 23094631 |
| | | | | | 22635 | |
| 22533221 | 445 | 4777 | 9201 | 13651 | 18365 | 23094632 |
| 22533222 | 447 | 4779 | 9203 | 13653, 13655 | 18367 | 23094633 |
| 22533225 | 449 | 4787 | 9207 | 13659 | 18371 | 23094636 |
| 22533226 | 451 | 4789 | 9209 | 13661 | 18373 | 23094637 |
| 22533228 | 453 | 4791 | 9211 | 17729 | 18375 | 23094638 |
| — | 455 | — | — | — | 18377 | 23094639 |
| 22533230 | 457 | — | 9215 | — | 18379 | 23094640 |
| 22533231 | 459 | 4795 | 9217 | 17725 | 18381 | 23094641 |
| 22533234 | 461 | — | 9223 | — | 18385 | 23094643 |
| 22533235 | 463 | — | 9225 | — | 18387 | 23094644 |
| 22533236 | 465 | — | 9227 | — | 18389 | 23094645 |
| 22533238 | 467 | — | 9229 | — | 18391 | 23094646 |
| 22533239 | 469 | — | 9231 | — | 18393 | 23094647 |
| 22533240 | 471 | — | 9233 | — | 18395 | 23094648 |
| 22533241, 22534994 | 473, 3519 | 8203 | 9235, 12471, | 17133 | 18397, 21891 | 23094649, 24413519 |
| | | | 12939, 12941 | | | |
| 22533242 | 475 | 4815 | 9241, 12547 | — | 18399, 21965, | 23094650, 24413560 |
| | | | | | 22459 | |
| 22533243 | 477 | 4817 | 9243 | — | 18401 | 23094651, 23094652 |
| 22533244 | 479 | 4819 | 9245, 9247 | — | 18403 | 23094653 |
| 22533245 | 481 | 4821, 4823 | 9249, 12537, | 17327, 17331 | 18405, 18407, | 24413548, 24413559 |
| | | | 12539, 12543 | | 21953, 21955, | |
| | | | | | 21959, 21963 | |
| 22533246 | 483 | 4825 | 9251 | — | 18409 | 23094654 |
| 22533247 | 485 | 4827 | 9253 | — | 18411 | 23094655 |
| 22533248 | 487 | 4829 | 9255 | — | 18413 | — |
| 22533249 | 489 | 4831 | 9257 | 13163 | 18415 | — |
| 22533251 | 491 | 4835 | 9261 | 13167, 13169 | 18419 | 23094656 |
| 22533252 | 493 | 4837, 4839, | 9263 | 13171 | 18421 | 23094657 |
| | | 4841, 6645 | | | | |
| 22533253 | 495 | 4843 | 9265 | 13173 | 18423 | 23094658 |
| 22533254 | 497 | 4845 | 9267 | 13175 | 18425 | 23094659 |
| 22533255 | 499 | 4847 | 9269, 9271 | 13177 | 18427 | 23094660 |
| 22533256 | 501, 3975, | 4849 | 9273 | 13179, 17931 | 18429 | 23094661 |
| | 4215 | | | | | |
| 22533261 | 507 | — | 9479 | 13667 | 18131 | — |
| 22533262 | 509 | — | 9481 | 13669, 13689 | 18133 | — |
| 22533263 | 513 | — | 9483 | — | — | — |
| 22533264 | 515 | — | 9485 | — | 18439 | — |
| 22533265 | 517 | 4865 | 9487 | 13671 | 18441 | 23094671 |
| 22533266 | 519 | 4867 | 9489 | 13673 | 18443 | 23094672 |
| 22533267 | 521 | 4869 | 9491 | 13675 | 18445 | 23094673 |
| 22533268 | 523 | 4871 | 9493 | 13677, 17877 | 18447 | 23094674 |
| 22533269 | 525 | 4873 | 9495 | 13679 | 18449 | 23094675 |
| 22533271 | 527 | 4877 | 9499 | 13683 | 18453 | 23094676 |
| 22533272 | 529 | 4879, 4881 | 9317, 9501 | 13691 | 18455, 18459 | 23094677 |
| 22533276 | 531 | 4885 | 9321 | 13695 | 18463 | 23094679 |
| 22533277 | 533 | 4887 | 9323 | 13697 | 18465, 18471 | 23094680 |
| 22533278 | 535 | 4889 | 9325 | 13699 | 18467 | 23094681 |
| 22533279 | 537 | 4891 | 9327 | 13701 | 18469 | 23094682 |
| 22533280 | 539 | 4893 | 9329, 9331 | 13703 | 18473, 22133 | 23094683 |
| 22533281 | 541 | 4895 | 9333 | 13705 | 18475 | 23094684 |
| 22533282 | 543 | 4897 | 9335 | 13707 | 18477 | 23094685 |
| 22533283 | 545 | 4899 | 9337 | 13709 | 18479, 18609, | 23094686 |
| | | | | | 18613 | |
| 22533284 | 547 | 4901 | 9339 | 13711 | 18481, 18611, | 23094687 |
| | | | | | 18615 | |
| 22533285 | 549 | 4903 | 9341 | 13713 | 18483, 18617 | 23094688 |
| 22533286 | 551 | 4905 | 9343 | 13715 | 18485 | 23094689 |
| 22533287 | 553 | 4907 | 9345 | 13717 | 18487 | 23094690 |
| 22533288 | 555 | 4909 | 9347 | 13719, 13781 | 18489 | 23094691 |
| 22533290 | 557 | 4911 | 9349 | 13721, 13783 | 18491 | 23094692 |
| 22533291 | 559 | 4913 | 9351 | 13723, 13785 | 18493 | 23094693 |
| 22533292 | 561, 563, 565, | 4915 | 9353, 12121 | 13725 | 18495, 21593, | 23094694 |
| | 4153, 4155 | | | | 22429 | |
| 22533293 | 567 | 4917 | 9355 | 13727 | 18497 | 23094695 |
| 22533294 | 569, 571 | 4919 | 9357 | 13729 | 18499 | 23094696 |
| 22533295 | 573 | 4921 | 9359 | 13731 | 18501 | 23094697 |
| 22533296 | 575 | 4923, 4929 | 9361 | 13733, 13735, | 18503 | 23094698 |
| | | | | 13787, 13789 | | |
| 22533297 | 577 | 4925, 4931 | 9363 | 13737 | 18505 | 23094699 |
| 22533298 | 579 | 4927, 4933 | 9365 | 13739 | 18507 | 23094700 |
| 22533299 | 581 | 4935 | 9367 | 13741 | 18509 | 23094701 |
| 22533300 | 583 | 4937 | 9369 | 13743 | 18511 | 23094702 |
| 22533301 | 585 | 4939 | 9371 | 13745, 13791 | 18513 | 23094703 |
| 22533302 | 587 | 4941 | 9373 | 13747 | 18515 | 23094704 |
| 22533303 | 589, 591 | 4943, 4945, | 9375 | 13749 | 18517 | 23094705 |
| | | 8721 | | | | |
| 22533304 | 593 | 4947 | 9377 | 13751 | 18519 | 23094706 |
| 22533305 | 595 | 4949 | 9379 | 13753 | 18521 | 23094707 |
| 22533306 | 597 | 4951 | 9381 | 13755 | 18523 | 23094708 |
| 22533308 | 599 | 4953 | 9383 | 13757 | 18525 | 23094709 |
| 22533309 | 601 | 4955 | 9385 | 13759 | 18527 | 23094710 |
| 22533310 | 603 | 4957 | 9387 | 13761 | 18529 | 23094711 |
| 22533311 | 605 | 4959 | 9389 | 13763 | 18531 | 23094712 |
| 22533312 | 607 | 4961 | 9391 | 13765, 13793 | 18533 | 23094713 |
| 22533313 | 609 | 4963 | 9393 | 13767 | 18535, 18537 | 23094714 |
| 22533314 | 611 | 4965 | 9395 | 13769 | 18539 | 23094715 |
| 22533315 | 613 | 4967 | 9397 | 13771 | 18541 | 23094716 |
| 22533317 | 615 | 4971 | 9401 | 13775 | 18545 | 23094717 |
| 22533318 | 617 | 4973 | 9403 | 13777, 13779 | 18547 | 23094718 |
| 22533319 | 619, 621 | 4975 | 9405 | 13795 | 18549 | 23094719 |
| 22533320 | 623 | 4977 | 9407 | 13797 | 18551 | 23094720 |
| 22533321 | 625 | 4979 | 9409 | 13799 | 18553, 18619 | 23094721 |
| 22533323 | 627 | 4983 | 9413 | 13803 | 18557 | 23094722 |
| 22533324 | 629 | — | 9415 | 13805 | 18559 | 23094723 |
| 22533325 | 631 | 4985 | 9417 | 13807 | 18561 | 23094724 |
| — | 633 | 4987 | 9419 | 13809 | 18563 | 23094725 |
| 22533326 | 635 | 4989 | 9421 | 13811 | 18565 | 23094726 |
| 22533327 | 637 | 4991 | 9423 | 13813 | 18567 | 23094727 |
| 22533328 | 639 | 4993 | 9425 | 13815 | 18569 | 23094728 |
| 22533330 | 641 | 4995 | 9427 | 13817 | 18571 | 23094729 |
| 22533331 | 643 | 4997 | 9429 | 13819 | 18573 | 23094730 |
| 22533332 | 645 | 4999 | 9431 | 13821 | 18575, 18621 | 23094731 |
| 22533333 | 647 | 5001 | 9433 | 13823, 13871 | 18577, 22673 | 23094732 |
| 22533334 | 649 | 5003 | 9435 | 13825, 13873 | 18579 | 23094733 |
| 22533335 | 651 | 5005 | 9437 | 13827, 13875 | 18581 | 23094734 |
| 22533336 | 653 | 5007 | 9439 | 13829, 13877, | 18583 | 23094735 |
| | | | | 13879, 13881 | | |
| 22533337 | 655 | 5009, 5043 | 9441 | 13831 | 18585 | 23094736 |
| 22533338 | 657 | 5011 | 9443 | 13833 | 18587 | 23094737 |
| 22533339 | 659 | 5013 | 9445 | 13835 | 18589, 18623 | 23094738 |
| 22533340 | 661 | 5015 | 9447 | 13837 | 18591 | 23094739 |
| 22533341 | 663 | 5017 | 9449 | 13839 | 18593 | 23094740 |
| 22533342 | 665 | 5019 | 9451 | 13841 | 18595, 18625 | 23094741 |
| 22533343 | 667 | 5021 | 9453 | 13843 | 18597, 18627 | 23094742 |
| 22533344 | 669 | 5023 | 9455 | 13845 | 18599 | 23094743 |
| 22533345 | 671 | 5025 | 9457 | 13847 | 18601 | 23094744 |
| 22533346 | 673 | 5027 | 9459 | 13849 | 18603 | 23094745 |
| 22533347 | 675 | 5029 | 9461 | 13851 | 18605, 18629 | 23094746 |
| 22533348 | 677 | 5031 | 9463 | 13853, 17831 | 18607, 18631, | 23094747 |
| | | | | | 18633 | |
| 22533350 | 679 | 5033 | 9465, 9503 | 13855 | 18635, 18645 | 23094748 |
| 22533351 | 681 | 5035 | 9467 | 13857 | 18637 | 23094749 |
| 22533352 | 683 | 5037 | 9469 | 13859, 17911 | 18639 | 23094750 |
| 22533353 | 685 | 5039 | 9471 | 13861 | 18641 | 23094751 |
| 22533354 | 687 | 5041 | 9473 | 13863 | 18643 | 23094752 |
| 22533355 | 689, 3921 | 5045 | 9275 | 13865 | 18647 | 23094753 |
| 22533356 | 691 | 5047 | 9277 | 13867 | 18649 | 23094754 |
| 22533358 | 693 | 5049, 5079 | 9279 | 13869, 13883 | 18651, 18653 | 23094755 |
| 22533359 | 695 | 5051 | 9281 | 13885, 13887 | 18655 | 23094756 |
| 22533360 | 697 | 5053 | 9283 | 13889 | 18657 | 23094757 |
| 22533361 | 699 | 5055 | 9285 | 13891 | 18659 | 23094758 |
| 22533362 | 701, 4133, | 5057 | 9287 | 13893 | 18661 | 23094759 |
| | 4135 | | | | | |
| 22533363 | 703 | 5059, 5081 | 9289 | 13895, 17153 | 18663 | 23094760 |
| 22533364 | 705 | 5061, 5083 | 9291 | 13897 | 18665 | 23094761 |
| 22533365 | 707 | 5063 | 9293 | 13899 | 18667 | 23094762 |
| 22533366 | 709 | 5065 | 9295 | 13901 | 18669 | 23094763 |
| 22533367 | 711, 723, 4301 | 5067 | 9297 | 13903 | 18671, 18695 | 23094764 |
| 22533368 | 713, 725, 4299 | 5069 | 9299 | 13905 | 18673, 18697 | 23094765 |
| 22533369 | 715, 727, 4297 | 5071, 5087 | 9301 | 13907 | 18675, 18699, | 23094766 |
| | | | | | 18701 | |
| 22533370, 22534818 | 717, 729, | 5073, 5089, | 9303, 12225 | 13909, 16863, | 18677, 18703, | 23094767, 24413404 |
| | 3261, 3263, | 5091, 7953 | | 16893, 17849 | 21667 | |
| | 4165, 4167, | | | | | |
| | 4295 | | | | | |
| 22533372 | 719, 731, 4293 | 5075, 5093 | 9305 | 13911 | 18679 | 23094768 |
| 22533373 | 721, 733, 4291 | 5095 | 9307 | 13913 | 18681 | 23094769 |
| 22533374 | 735 | 5097 | 9309 | 13915 | 18683 | 23094770 |
| 22533375 | 737 | 5099, 5105 | 9311 | 13917 | 18685 | 23094771 |
| 22533376 | 739 | 5101, 5107, | 9313 | 13919 | 18687 | 23094772 |
| | | 5109 | | | | |
| 22533377 | 741 | 5111 | 9315 | 13921 | 18705 | 23094773 |
| 22533379 | 743 | 5115 | 9507 | 13925 | 18711 | 23094775 |
| 22533380 | 745 | 5117, 5149 | 9509 | 13927 | 18713 | 23094776 |
| 22533381 | 747 | 5119, 5151 | 9511 | 13929 | 18715 | 23094777 |
| 22533382 | 749 | 5121 | 9513 | 13931 | 18717 | 23094778 |
| 22533383 | 751 | 5123 | 9515 | 13933 | 18719 | 23094779 |
| 22533384 | 753 | 5125 | 9517 | 13935 | 18721 | 23094780 |
| 22533385 | 755 | 5127 | 9519 | 13937 | 18723 | 23094781 |
| 22533386 | 757 | 5129 | 9521 | 13939 | 18725 | 23094782 |
| 22533387 | 759 | 5131 | 9523 | 13941 | 18727 | 23094783 |
| 22533388 | 761 | 5133 | 9525 | 13943 | 18729 | 23094785 |
| 22533390 | 763 | 5137 | 9529 | 13947 | 18733 | 23094786 |
| 22533391 | 765 | 5139 | 9531 | 13949 | 18735 | 23094787 |
| 22533392 | 767 | 5141 | 9533 | 13951 | 18737 | 23094837 |
| 22533393 | 769 | 5143 | 9535 | 13953 | 18739 | 23094838 |
| 22533394 | 771 | 5145 | 9537 | 13955 | 18741 | 23094839 |
| 22533395 | 773 | 5147 | 9539 | 13957 | 18743 | 23094840 |
| 22533396 | 775 | 5153 | 9541 | 13959 | 18745 | 23094841 |
| 22533397 | 777 | 5155 | 9543 | 13961 | 18747 | 23094842 |
| 22533398 | 779, 781, 783 | 5157, 5159, | 9545 | 13963 | 18749, 18751 | 23094843 |
| | | 5161 | | | | |
| 22533400 | 785 | 5163 | 9547 | 13965 | 18753 | 23094844 |
| 22533401 | 787 | 5165 | 9549 | 13967 | 18755 | 23094845 |
| 22533402 | 789 | 5167, 5201 | 9551 | 13969 | 18757 | 23094846 |
| 22533403 | 791, 2369, | 5169 | 9553 | 13971 | 18759, 18783, | 23094847 |
| | 4147, 4149, | | | | 20597 | |
| | 4179 | | | | | |
| 22533404 | 793 | 5171 | 9555 | 13973 | 18761 | 23094848 |
| 22533405 | 795 | 5173 | 9557 | 13975 | 18763 | 23094849 |
| 22533406 | 797 | 5175 | 9559 | 13977 | 18765 | 23094850 |
| 22533407 | 799 | 5177 | 9561 | 13979 | 18767, 22527 | 23094851 |
| 22533408 | 801 | 5179 | 9563 | 13981 | 18769, 22525 | 23094852 |
| 22533409 | 803 | 5181 | 9565 | 13983 | 18771 | 23094853 |
| 22533410 | 805 | 5183, 5203, | 9567 | 13985, 17809 | 18773 | 23094854 |
| | | 5205 | | | | |
| 22533411 | 807 | 5185 | 9569 | 13987 | 18775 | 23094855 |
| 22533412 | 809 | 5187 | 9571 | 13989, 13991, | 18777 | 23094856 |
| | | | | 14011 | | |
| 22533413, 22534328 | 811 | 5189 | 9573 | 13993 | 18779 | 23094857 |
| 22533414 | 813 | 5191 | 9575, 9577 | 13995 | 18781 | 23094858 |
| 22533415 | 815 | 5193 | 9579 | 13997 | 18785 | 23094859 |
| 22533416 | 817 | 5195 | 9581 | 13999 | 18787 | 23094860 |
| 22533417 | 819 | 5197 | 9583 | 14001, 14003 | 18789, 18791 | 23094861 |
| 22533418 | 821 | 5199 | 9585 | 14005 | 18793 | 23094862 |
| 22533420 | 823 | 4651 | 9589 | 14007 | 18797 | 23094863 |
| 22533421 | 825 | 4653, 5209 | 9591 | 14009 | 18799 | 23094864 |
| 22533426 | 827 | 5217 | 9599 | 14019 | 18809 | 23094868 |
| 22533422 | 829 | 5211 | 9593 | 14013 | 18801 | 23094865 |
| 22533427 | 831 | 5219 | 9601 | 14021 | 18811 | 23094869 |
| 22533428 | 833 | 5221 | 9603 | 14023, 14025 | 18813 | 23094870 |
| 22533429 | 835 | 5223 | 9605 | 14027 | 18815 | 23094871 |
| 22533430 | 837, 4049 | 4851 | 9629 | 14103 | 18817 | 23094872 |
| 22533431 | 839 | 4853 | 9631 | 14105 | 18819 | 23094873 |
| 22533432 | 841, 843 | 4855, 8777 | 9633 | 14107 | 18821 | 23094874 |
| 22533433 | 845 | 4857 | 9635 | 14109 | 18823 | 23094875 |
| 22533434 | 847 | 4859 | 9637 | 14111 | 18825 | 23094876 |
| 22533435 | 849 | 4861, 4863, | 9639 | 14113, 14115, | 18827, 18867, | 23094877 |
| | | 5225 | | 14117, 14159, | 18869 | |
| | | | | 14161 | | |
| 22533436 | 851 | 5227 | 9641 | 14119, 14163 | 18829, 18871 | 23094878 |
| 22533438 | 853 | 5229 | 9643 | 14121 | 18831 | 23094879 |
| 22533439 | 855 | 5231 | 9645 | 14123 | 18833 | 23094880 |
| 22533440 | 857 | 5233 | 9647 | 14125 | 18835 | 23094881 |
| 22533441 | 859 | 5235 | 9649 | 14127 | 18837 | 23094882 |
| 22533442 | 861 | 5237 | 9651 | 14129 | 18839 | 23094883 |
| 22533443 | 863 | 5239 | 9653 | 14135 | 18841 | 23094884 |
| 22533444 | 865 | 5241 | 9655, 9657 | 14137 | 18843, 18845 | 23094885 |
| 22533445 | 867 | 5243 | 9659 | 14139 | 18847 | 23094886 |
| 22533446 | 869 | 5245 | 9661, 9663 | 14141 | 18849 | 23094887 |
| 22533447 | 871 | 5247 | 9665 | 14143 | 18851 | 23094888 |
| 22533448 | 873 | 5249, 5251 | 9667, 9669 | 14145, 14147 | 18853, 18855 | 23094889 |
| 22533449 | 875 | 5253, 5255 | 9671 | 14149 | 18857 | 23094890 |
| 22533450 | 877 | 5257, 5641 | 9673 | 14151 | 18859 | 23094891 |
| 22533275, 22533562, | 879, 1623, | 6713, 7067 | 12307, 12559, | — | 19961, 19985, | — |
| 22533988, | 1807, 2331 | | 12755, 13113 | | 20295, 20835, | |
| 22534486, 22534579, | | | | | 21979, 22125, | |
| 22535047 | | | | | 22177, 22379, | |
| | | | | | 22649 | |
| 22533274, 22533563, | 881, 883, | 6327, 6711, | 12309, 12561, | — | 19963, 19987, | — |
| 22533989, | 1621, 1809, | 7069 | 12753, 13041, | | 20293, 20833, | |
| 22534485, 22534580, | 2333 | | 13115 | | 21977, 22127, | |
| 22535046 | | | | | 22179, 22377 | |
| 22533451 | 885 | 5259 | 9675 | 14153 | 18861 | 23094892 |
| 22533452 | 887, 3709 | 5261, 5265, | 9677, 12617 | 14155, 17403, | 18863, 22043 | 23094893 |
| | | 8417 | | 17419 | | |
| 22533453 | 889, 1187 | 5263, 5267, | ########## | 14157, 14165, | 18865, 18875, | 23094894, 23095037 |
| | | 8691, 8693, | | 14475, 17699, | 22479, 22483, | |
| | | 8701, 8711, | | 17701, 17751, | 22511, 22513, | |
| | | 8723, 8731, | | 17777, 17795, | 22517, 22539, | |
| | | 8735, 8745, | | 17799, 17837, | 22645, 22655, | |
| | | 8753, 8755, | | 17861, 17863, | 22657, 22669, | |
| | | 8761 | | 17865, 17867, | 22681, 22735 | |
| | | | | 17869, 17901, | | |
| | | | | 17917, 17937 | | |
| 22533454, 22535028 | 891 | 8345 | 9683, 12557 | 14167, 17301 | 22473 | 23094895, 24413563 |
| 22533455 | 893 | 8343 | 9685 | 14169, 17299 | — | 23094896 |
| 22533457 | 895 | — | 9687 | 14171 | — | — |
| 22535029, 22535036 | 897, 3583, | 5269, 5271, | 9691, 9895 | 14173, 17215 | 18877, 18879, | 23094663, 23095697, |
| | 4039 | 5273, 8257 | | | 20369 | 24413550 |
| — | 899, 901 | 5275, 5277 | 9693 | 14175, 14177 | 18881, 18885, | 23094907, 23094909 |
| | | | | | 22563 | |
| 22533458 | 903 | 5279 | 9695 | 14179 | 18925 | 23094910 |
| 22533459 | 905 | 5281 | 9697 | — | 18927 | 23094911 |
| 22533460, 22533461 | 907, 909 | 5283 | 9699, 9701 | 14181, 14183 | 18929 | 23094912, 23094913 |
| 22533462 | 911 | — | 9703 | 14185 | — | 23094914 |
| 22533463 | 913 | 5287 | 9705 | 14187, 17695 | 18933 | 23094915 |
| 22533464 | 915 | 5297 | 9709 | 17689 | 18935 | 23094917 |
| 22533465 | 917 | 5299 | 9711 | 17687 | 18937, 18939 | 23094918 |
| 22533466 | 919 | — | — | — | 18941 | — |
| 22533467 | 921 | 5301 | 9713 | 17807 | 18943 | 23094919 |
| 22533468 | 923 | 5303 | 9715, 9717 | 14189 | 18945, 18947 | 23094920 |
| 22533469 | 925 | 5305 | 9719 | 14191 | 18949 | 23094921 |
| 22533470 | 927 | 5307 | 9721 | 14193 | 18951 | 23094922 |
| 22533471 | 929 | 5309 | 9723 | 14195 | 18953 | 23094923, 23095104, |
| | | | | | | 23095466 |
| 22533472 | 931 | 5311 | 9725 | 14197 | 18955 | 23094924 |
| 22533473 | 933 | 5313 | 9727 | 14199, 14267 | 18957 | 23094925 |
| — | 935, 937 | 5315 | 9729 | 14201 | 18959, 18961 | 23094926 |
| 22533474 | 939 | 5317 | 9731 | 14203 | 18963 | 23094927 |
| 22533475 | 941 | 5319, 5367 | 9733 | 14205 | 18965 | 23094928 |
| 22533476 | 943 | 5321 | 9735 | 14207 | 18967 | 23094929 |
| 22533478 | 945 | 5323 | 9737 | 14209, 14269, | 18969 | 23094930 |
| | | | | 14271 | | |
| 22533479 | 947 | 5325 | 9739 | 14211 | 18971 | 23094931 |
| 22533480 | 949 | 5327 | 9741 | 14213, 14273 | 18973 | 23094932 |
| 22533481 | 951 | 5329 | 9743 | 14215 | 18975 | 23094933 |
| 22533482 | 953 | 5331 | 9745 | 14217 | 18977 | 23094934 |
| 22533483 | 955 | 5333 | 9747 | 14219 | 18979 | 23094935 |
| 22533484 | 957 | 5335 | 9749 | 14221 | 18981 | — |
| 22533485 | 959 | 5337 | 9751 | 14223 | 18983, 19025 | 23094936 |
| 22533486 | 961 | 5339 | 9753 | 14225 | 18985 | 23094937 |
| 22533487 | 963 | 5341 | 9755, 10049 | 14227 | 18987 | 23094938 |
| 22533488 | 965 | 5343 | 9757 | 14229 | 18989 | 23094939 |
| 22533489 | 967 | 5345 | 9759 | 14231 | 18991, 19027 | 23094940 |
| 22533490 | 969, 971 | 5347 | 9761 | 14233 | 18993 | 23094941 |
| 22533491 | 973 | 5349 | 9763 | 14235 | 18995 | 23094942 |
| 22533492 | 975 | 5351 | 9765 | 14237 | 18997 | 23094943 |
| 22533493 | 977 | 5353 | 9767 | 14239, 14275, | 18999 | 28094944 |
| | | | | 14277 | | |
| 22533494 | 979 | 5355 | 9769 | 14241 | 19001 | 23094945 |
| 22533495 | 981 | 5357 | 9771 | 14243 | 19003 | 23094946 |
| 22533496 | 983 | 5359 | 9773 | 14245 | 19005 | 23094947 |
| 22533497 | 985 | 5361 | 9775 | 14247 | 19007 | 23094948 |
| 22533498 | 987 | 5363 | 9777 | 14249 | 19009 | 23094949 |
| 22533499 | 989 | 5365, 5371 | 9779 | 14251 | 19011 | 23094950 |
| 22533500 | 991 | — | — | — | — | 23094951 |
| 22533501 | 993, 995 | 5373 | 9781 | 14253 | 19013, 19029 | 23094952 |
| 22533502 | 997 | 5375, 8763 | 9783 | 14255 | 19015 | 23094953 |
| 22533504 | 999, 1001 | 5377 | 9785 | 14257, 14279, | 19017 | 23094954 |
| | | | | 14281, 14283, | | |
| | | | | 14285 | | |
| 22533505 | 1003 | 5379 | 9787 | 14259 | 19019 | 23094955 |
| 22533506 | 1005 | 5381 | 9789 | 14261 | 19021 | 23094956 |
| 22533507 | 1007 | 5383 | 9791 | 14263 | 19023 | 23094957 |
| 22533509 | 1009 | 8635 | 9793 | 14265 | 19031 | 23094958 |
| 22533511, 22534495 | 1011, 2721 | 5385, 7323 | 9797, 11587 | 14289, 16195, | 19035, 21023 | 23094960, 24413115 |
| | | | | 17739 | | |
| 22533512 | 1013 | 5387 | 9799, 9801 | 14291 | 19037 | 23094962 |
| 22533513 | 1015 | 5389 | 9803 | 14293 | 19039 | 23094963 |
| 22533514 | 1017, 4075 | 5391 | 9805 | 14295 | 19041 | 23094964 |
| 22533515 | 1019, 3925, | 5393 | 9807 | 14297 | 19043 | 23094965 |
| | 4073 | | | | | |
| 22533516 | 1021, 3923 | 5395 | 9809 | 14299 | 19045 | 23094966 |
| 22533517 | 1023 | 5397 | 9811 | 14301 | 19047 | 23094967 |
| 22533518 | 1025 | 5399 | 9813 | 14303 | 19049 | 23094968 |
| 22533519 | 1027 | 5401 | 9815 | 14305 | 19051 | 23094969 |
| 22533520 | 1029 | 5403 | 9817 | 14307 | 19053 | 23094970 |
| 22533521 | 1031 | 5405 | 9819, 9821 | 14309, 17779 | 19055 | 23094971 |
| 22533522 | 1033 | 5407 | 9823 | 14311 | 19057 | 23094972 |
| 22533523 | 1035 | 5409 | 9825 | 14313 | 19059 | 23094973 |
| 22533525 | 1037 | 5411 | — | — | 19061 | 23094974 |
| 22533526 | 1039 | 5413 | 9827 | 14315 | 19173 | 23094975 |
| 22533527 | 1041 | 5415 | 9829 | 14317 | 19175 | 23094976 |
| 22533528, 22534375 | 1043 | 5417, 7081, | 9831, 11341 | 14319, 15951 | 19177, 20781 | 23094977, 24412999 |
| | | 7097 | | | | |
| 22533529 | 1045 | 5419 | 9833 | 14321 | 19179 | 23094978 |
| 22533530 | 1047 | 5421 | 9835 | 14323 | 19181 | 23094979 |
| 22533531 | 1049 | 5423 | 9837 | 14325 | 19183 | 23094980 |
| 22533532 | 1051 | 5425, 8717 | 9839 | 14327 | 19185 | 23094981 |
| 22533533 | 1053 | 5427 | 9841 | 14329 | 19187 | 23094982 |
| 22533534 | 1055 | 5429, 5431 | 9843 | 14331 | 19189 | 23094983 |
| 22533535 | 1057 | 5433 | 9845 | 14333, 14335 | 19191 | 23094984 |
| 22533536 | 1059 | 5435 | 9847 | 14337 | 19193 | 23094985 |
| 22533537 | 1061 | 5437 | 9849 | 14339 | 19195 | 23094986 |
| — | 1063 | 5439 | 9851 | 14341 | 19197 | 23094987 |
| 22533538 | 1065 | 5441 | 9853 | 14343 | 19199, 19241 | 23094988 |
| 22533539 | 1067 | 5443 | 9855 | 14345 | 19201 | 23094989 |
| 22533540 | 1069 | 5445 | 9857 | 14351 | 19203 | 23094990 |
| 22533541 | 1071 | 5447 | 9859 | 14353 | 19205 | 23094991 |
| 22533542 | 1073 | 5449 | 9861 | 14355, 14357, | 19207 | 23094992 |
| | | | | 14359 | | |
| 22533544 | 1075, 1077 | 5451, 5481 | 9863 | 14361 | 19209, 19243 | 23094993 |
| 22533545 | 1079 | 5453 | 9865 | 14363 | 19211 | 23094994 |
| 22533546 | 1081 | 5455 | 9867 | 14365 | 19213 | 23094995 |
| 22533547 | 1083, 4257 | 5457 | 9869 | 14367, 14443 | 19215 | 23094996 |
| 22533548 | 1085, 1087, | 5459 | 9871 | 14369, 14445 | 19217 | 23094997 |
| | 4259 | | | | | |
| 22533550 | 1089, 1093 | 5461 | 9873 | 14371 | 19219 | 23094998 |
| 22533551 | 1091, 1095 | 5463 | 9875 | 14373 | 19221 | 23094999 |
| 22533552 | 1097 | 5465 | 9877 | 14375 | 19223 | 23095000 |
| 22533553 | 1099 | 5467 | 9879 | 14377 | 19225 | 23095001 |
| 22533554 | 1101 | 5469 | 9881 | 14379 | 19227, 19229 | 23095002 |
| 22533555 | 1103, 1105 | 5471 | 9883, 12785 | 14381 | 19231 | 23095003 |
| 22533556 | 1107 | 5473 | 9885 | 14383 | 19233 | 23095004 |
| 22533557 | 1109, 1111 | 5475 | 9887 | 14385 | 19235 | 23095005 |
| 22533558 | 1113 | 5477 | 9889 | 14387 | 19237 | 23095006 |
| 22533559 | 1115 | 5479 | 9891 | 14389 | 19239, 19245 | 23095007 |
| 22533560 | 1117 | 5483 | 9905 | 14391 | 19247 | 23095008 |
| 22533561 | 1119 | 5485, 8669 | 9907 | 14393 | 19249, 19251 | 23095009 |
| 22533564 | 1121 | 5487 | 9909 | 14395 | 19253 | 23095010 |
| — | 1123 | 5621 | 9911 | 14397 | 19255 | — |
| 22533629 | 1125 | 5623 | 9913 | 14399 | 19257 | 23095011 |
| — | 1127 | 5625 | 9915 | 14401 | 19259 | — |
| — | 1129 | 5627 | 9917 | 14403 | 19261 | — |
| 22533631 | 1131 | 5631 | 9921 | 14407 | 19265 | 23095012 |
| 22533632 | 1133 | 5633 | 9923 | 14409 | 19267 | 23095013 |
| 22533633 | 1135, 1141 | 5635 | 9925 | 14411, 14447 | 19269 | 23095014 |
| 22533626, 22533637, | 1137, 4079 | 5615, 5651, | 9935, 11035 | 14423 | 19159, 19299, | 23095018, 23095676 |
| 22534163 | | 6749 | | | 20331 | |
| 22533627 | 1139 | 5617 | — | — | — | — |
| 22533634 | 1143 | 5637, 5643 | 9927 | 14413, 14449, | 19271, 19273 | 23095015 |
| | | | | 14451 | | |
| 22533635 | 1145 | 5639, 5645 | 9929 | 14415 | 19275 | 23095016 |
| 22533636 | 1147 | 5647 | 9931 | 14417, 14419 | 19277, 19295 | 23095017 |
| 22533628, 22533638 | 1149, 3951 | 5619, 5653 | 9937 | 14425 | 19171, 19301 | — |
| 22533639 | 1151 | 5655 | 9939 | 14427 | 19303 | 23095019 |
| 22533640 | 1153 | 5657 | 9941 | 14429, 14453 | 19305 | 23095020 |
| 22533641 | 1155, 1157 | 5659, 5661 | 9943 | 14431 | 19307 | 23095021 |
| 22533642 | 1159 | 5663 | 9945 | 14433, 14435 | 19309 | 23095022 |
| 22533643 | 1161 | 5665 | 9947 | 14437 | 19311 | 23095023 |
| 22533644 | 1163 | 5667 | 9949 | 14439 | 19313 | 23095024 |
| 22533645 | 1165 | 5669 | 9951 | 14441 | 19315 | 23095025 |
| 22533646 | 1167 | 5671 | 9953 | 14455 | 19317 | 23095026 |
| 22533647 | 1169 | 5673 | 9955 | 14457 | 19319, 19321 | 23095027 |
| 22533648 | 1171 | 5675 | 9957, 10007 | 14459 | 19323 | 23095028 |
| 22533649 | 1173 | 5677 | 9959 | 14461 | 19325 | 23095029 |
| 22533650 | 1175 | 5679, 5681 | 9961 | 14463 | 19327 | 23095030 |
| 22533652 | 1177 | 5683 | 9963 | 14465 | 19329 | 23095031 |
| 22533653 | 1179 | — | 10059 | 14467 | — | 23095032 |
| 22533654 | 1181 | — | 10061 | 14469 | — | 23095033 |
| 22533655, 22535158 | 1183 | — | 9965, 10063 | 14471 | — | 23095034 |
| — | 1185 | — | 10065 | — | — | 23095035 |
| 22533656 | 1189 | 5649, 6959 | 9933, 10069, | 14421, 14477, | 19297, 20539 | — |
| | | | 11229 | 15787 | | |
| 22533657, 22534267 | 1191, 1193, | — | 10071 | 14479, 15805 | — | 23095038 |
| | 2323, 2325 | | | | | |
| — | 1195 | — | 10073 | 14481 | — | 23095039 |
| 22534863 | 1197, 3357 | 8041 | 10075, 10077, | 14485, 14487, | 21759 | 23095040, 24413446 |
| | | | 12319 | 16967 | | |
| 22533659 | 1199 | — | 10079 | 14489 | — | 23095041 |
| 22535098 | 1201, 3701 | 8407, 8409, | 12609 | 17393 | 22035 | 24413589 |
| | | 8495 | | | | |
| 22533660 | 1203, 1205 | — | 10081 | 14491 | — | 23095042 |
| 22533661 | 1207, 1211 | — | 10083 | 14493 | — | 23095043 |
| 22533662, 22533663, | 1209, 1213, | 7203, 7205 | 10085, 10087, | 14495, 14497, | 20899, 20901 | 23095044, 23095045, |
| 22533665, | 1215, 1221, | | 10091, 11457, | 14501, 17847 | | 24413056, |
| 22534434, 22534435 | 2623, 2625 | | 11459 | | | 24413057 |
| 22533664, 22534437, | 1217, 1219, | 7209 | 10089, 11463, | 14499, 14585 | 20905, 21501, | 23095046, 24413059 |
| 22534737 | 2629, 3099 | | 12027 | | 22537 | |
| 22533666 | 1223 | — | 10093 | 14503 | 19345 | 23095047 |
| 22534312 | 1225, 2403 | 5685 | 10095 | 14505 | 19331, 20649 | 24412939 |
| — | 1227 | 5689 | 10099 | 14509 | 19335 | 23095048 |
| 22533667 | 1229 | 5691 | 10101 | 14511 | 19337 | — |
| 22533671 | 1231 | 5693 | 10103 | 14513 | 19339 | 23095049 |
| 22533672 | 1233 | 5695 | 10105 | 14515 | 19341 | 23095050 |
| 22533673 | 1235 | 5697 | 10107 | 14517, 14519 | 19343 | 23095051 |
| 22533674 | 1237 | 5699 | 10109 | 14521 | 19347 | 23095052 |
| 22533675 | 1239 | 5701 | 10111 | 14523 | 19349, 19409 | 23095053 |
| 22533677 | 1241 | 5703 | 10113 | 14525 | 19351 | 23095055 |
| 22533678 | 1243 | 5705 | 10115 | 14527 | 19353 | 23095056 |
| 22533679 | 1245 | 5707 | 10117 | 14529 | 19355 | 23095057 |
| 22533680 | 1247 | 5709 | 10119 | 14531 | 19357 | 23095058 |
| 22533681 | 1249 | 5711 | 10121 | 14533 | 19359 | 23095059 |
| 22533682 | 1251 | 5713, 5737 | 10123 | 14535, 17815 | 19361 | 23095060 |
| 22533683 | 1253 | 5715 | 10125 | 14537, 14587 | 19363 | 23095061 |
| 22533684 | 1255 | 5717 | 10127 | 14539 | 19365 | 23095062 |
| 22533685 | 1257 | 5719 | 10129 | 14541, 14589, | 19367 | 23095063 |
| | | | | 17841 | | |
| 22533592, 22533686 | 1259, 1261 | 5721 | 10131 | 14543, 14591, | 19369 | 23095064 |
| | | | | 17839 | | |
| 22533687 | 1263 | 5723 | 10133 | 14545, 14593 | 19371 | 23095065 |
| 22533688 | 1265 | — | 10135 | 14547 | 19373 | — |
| 22533689 | 1267 | — | 10137 | 14549 | 19375 | — |
| 22533690 | 1269 | — | 10139 | 14551 | 19377, 19411 | — |
| 22533692 | 1271 | — | 10141 | 14553, 14555, | 19379 | — |
| | | | | 14595 | | |
| — | 1273 | — | 10143 | 14557 | 19381, 19383 | — |
| — | 1275 | — | 10145 | 14559 | 19385 | — |
| 22534930 | 1277, 3389 | 8071 | 10147, 12347 | 14561, 16997 | 19387, 21787, | 24413460 |
| | | | | | 22625 | |
| 22533693, 22533694 | 1279, 1281 | — | 10149, 10151 | 14563, 14565, | 19389, 19391, | — |
| | | | | 14567, 14569, | 19393 | |
| | | | | 14597, 14599 | | |
| 22533695 | 1283 | — | 10153, 10155 | 14571, 14601 | 19395 | — |
| 22533696 | 1285 | 5725 | 10157 | 14573 | 19397 | — |
| — | 1287, 1289, | 5727 | 10159, 10161 | 14575, 14577 | 19399, 19401 | 23095066 |
| | 1291 | | | | | |
| — | 1293 | 5729 | 10163 | 14579 | 19403 | 23095067 |
| 22533697 | 1295 | 5731 | 10165 | 14581 | 19405 | 23095068 |
| 22533698 | 1297 | 5733, 5735 | 10167, 10169, | 14583, 14603 | 19407 | 23095069 |
| | | | 10171 | | | |
| 22533699 | 1299 | 5739 | 10173 | 14605 | 19413 | 23095070 |
| 22533700 | 1301 | 5741, 5743 | 10175 | 14607 | 19415 | 23095071 |
| 22533701 | 1303 | 5745 | 10177 | 14609 | 19417, 19419 | 23095072 |
| 22533702 | 1305 | 5747, 5803 | 10179 | 14611, 14613 | 19421 | 23095073 |
| 22533703 | 1307 | 5749 | 10181 | 14615 | 19423 | 23095074 |
| 22533704 | 1309 | 5751 | 10183 | 14617 | 19425, 19427 | 23095075 |
| 22533705 | 1311 | 5755 | 10187 | 14621 | 19431 | 23095076 |
| 22533708 | 1313 | 5757 | 10189 | 14623 | 19433 | 23095077 |
| 22533709 | 1315 | 5759, 5761 | 10191 | 14625, 14683, | 19435 | 23095078 |
| | | | | 17733 | | |
| 22533710 | 1317, 1319 | 5763 | 10193 | 14627, 14685, | 19437 | 23095079 |
| | | | | 14689, 14695 | | |
| 22533711 | 1321 | 5765 | 10195 | 14629, 14687, | 19439 | 23095080 |
| | | | | 14691, 14693, | | |
| | | | | 14697, 14699 | | |
| 22533712 | 1323 | 5767 | 10197 | 14631 | 19441 | 23095081 |
| 22533713 | 1325 | 5769 | 10199 | 14633 | 19443 | 23095082 |
| 22533714 | 1327 | 5771 | 10201 | 14635 | 19445 | 23095083 |
| 22533715 | 1329 | 5773 | 10203 | 14637 | 19447 | 23095084 |
| 22533716 | 1331 | 5775 | 10205 | 14639, 17879 | 19449 | 23095085 |
| 22533717 | 1333 | 5777 | 10207 | 14641 | 19451 | 23095086 |
| 22533718 | 1335 | 5779 | 10209 | 14643, 17909 | 19453, 19477 | 23095087 |
| 22533719 | 1337 | 5781 | 10211 | 14645 | 19455 | 23095088 |
| 22533720 | 1339 | 5783 | 10213 | 14647 | 19457 | 23095089 |
| 22533721 | 1341 | 5785 | 10215 | 14649 | 19459 | 23095090 |
| 22533722 | 1343 | 5787 | 10217 | 14651 | 19461 | 23095091 |
| 22533723 | 1345, 1347 | 5789 | 10219 | 14653 | 19463, 19479 | 23095092 |
| 22533725 | 1349 | 5791 | 10221 | 14655 | 19465 | 23095093 |
| 22533726 | 1351 | 5793 | 10223 | 14657 | 19467 | 23095094 |
| 22533728 | 1353 | 5797, 8773 | 10227 | 14661 | 19471 | 23095096 |
| 22533729 | 1355 | 5799 | 10229 | 14663 | 19473 | 23095097 |
| 22533730 | 1357 | 5801 | 10231 | 14665 | 19475, 19481 | 23095098 |
| 22533731 | 1359 | 5805 | 10233 | 14667 | 19483, 19485 | 23095099 |
| 22533732 | 1361 | 5807 | 10235 | 14669 | 19487 | 23095100 |
| 22533733 | 1363 | 5809 | 10237 | 14671 | 19489 | 23095150 |
| 22533734 | 1365 | 5811 | 10239 | 14673 | 19491, 19493 | 23095151 |
| 22533735 | 1367 | 5813 | 10241 | 14675 | 19495 | 23095152 |
| 22533736 | 1369 | 5815 | 10243 | 14677 | 19497 | 23095153 |
| 22533737 | 1371 | 5817 | 10245 | 14679 | 19499 | 23095154 |
| 22533738 | 1373, 1375 | 5819 | 10247 | 14681, 14707 | 19501, 22659 | 23095155 |
| 22533739 | 1377 | 5821 | 10249 | 14709 | 19503 | 23095156 |
| 22533740 | 1379 | 5823 | 10251 | 14701, 14711 | 19505 | 23095157 |
| 22533741 | 1381 | 5825 | 10253 | 14703, 14713 | 19507 | 23095158 |
| 22533742 | 1383 | 5827 | 10255 | 14705, 14717 | 19509 | 23095159 |
| 22533743 | 1385 | 5829, 8779 | 10257 | 14719 | 19511 | 23095160 |
| 22533744 | 1387 | 5831 | 10259 | 14721 | 19513 | 23095161 |
| 22533746 | 1389 | 5833 | 10261 | 14723 | 19515, 19521 | 23095162 |
| 22533747 | 1391 | 5835 | 10263 | 14725 | 19517, 19519, | 23095163 |
| | | | | | 19523, 19525 | |
| 22533748 | 1393 | 5837 | 10265 | 14727 | 19527 | 23095164 |
| 22533751 | 1395 | 5843 | 10271 | 14733 | 19533 | 23095166 |
| 22533752 | 1397 | 5845 | 10273 | 14735 | 19535 | 23095167 |
| 22533753 | 1399 | 5847 | 10275 | 14737 | 19537 | 23095168 |
| 22533754 | 1401 | 5849 | 10277 | 14739 | 19539 | 23095169 |
| 22533756 | 1403 | 5853 | 10281 | 14743 | 19543 | 23095171 |
| 22533757 | 1405, 1407 | 5855 | 10283 | 14745, 14749 | 19545 | 23095172 |
| 22533758 | 1409 | 5857 | 10285 | 14747, 14751 | 19547 | 23095173 |
| 22533759 | 1411 | 5859 | 10287 | 14753 | 19549 | 23095174 |
| 22533760, 22535069 | 1413, 3647, | 5861, 8355, | 10289 | 14755, 17311 | 19551 | 23095175 |
| | 3649 | 8391 | | | | |
| 22533761 | 1415 | 5863 | 10291 | 14757 | 19553 | 23095201 |
| 22533762 | 1417 | 5865 | 10293 | 14759 | 19555 | 23095202 |
| 22533763 | 1419 | 5867 | 10295 | 14761 | 19557 | 23095203 |
| 22533764 | 1421 | 5869 | 10297 | 14763 | 19559 | 23095204 |
| 22533765 | 1423 | 5871 | 10299 | 14765 | 19561 | 23095205 |
| 22533766 | 1425 | 5873 | 10301 | 14767 | 19563 | 23095206 |
| 22533767 | 1427 | 5875 | 10303 | 14769 | 19565 | 23095207 |
| 22533768 | 1429 | 5877 | 10305 | 14771 | 19567 | 23095208 |
| 22533770 | 1431 | 5879 | 10307 | 14773 | 19569, 22591 | 23095209 |
| 22533772 | 1433 | 5883 | 10311 | 14781 | 19573 | 23095211 |
| 22533773 | 1435 | 5885 | 10313 | 14783 | 19575 | 23095212 |
| 22533774 | 1437 | 5887 | 10315 | 14785 | 19577 | 23095213 |
| 22533775 | 1439 | 5889 | 10317 | 14787 | 19579 | 23095214 |
| 22533777 | 1441 | 5891 | 10319, 10321 | 14789, 14809 | 19581 | 23095215 |
| 22533778 | 1443 | 5893 | 10323 | 14791 | 19583 | 23095216 |
| 22533779 | 1445 | 5895 | 10325 | 14793 | 19585 | 23095217 |
| 22533780 | 1447 | 5897 | 10327 | 14795 | 19587 | 23095218 |
| 22533781 | 1449 | 5899 | 10329 | 14797 | 19589 | 23095219 |
| 22533782 | 1451 | 5901 | 10331 | 14799 | 19591 | 23095220 |
| 22533783 | 1453 | 5903 | 10333 | 14801 | 19593 | 23095221 |
| 22533784 | 1455 | 5905 | 10335 | 14803 | 19595 | 23095222 |
| 22533787 | 1457 | 5909 | 10339 | 14807 | 19599 | 23095224 |
| 22533789, 22534806 | 1459, 1461, | 5913, 7927 | 10345, 12199, | 14817, 16835, | 19605, 21643 | 23095226, 24413392 |
| | 3235 | | 12201 | 16837 | | |
| 22533791 | 1463 | 5917 | 10349 | 14821 | 19609 | 23095228 |
| 22533792 | 1465 | 5919 | 10351 | 14823, 14825 | 19611 | 23095229 |
| 22533793 | 1467 | 5921 | 10353 | 14827 | 19613 | 23095230 |
| 22533794 | 1469 | 5923 | 10355 | 14829 | 19615, 19625 | 23095231 |
| 22533795 | 1471 | 5925 | 10357 | 14831 | 19617 | 23095232 |
| 22533796 | 1473 | 5927 | 10359 | 14833 | 19619 | 23095233 |
| 22533797 | 1475 | 5929 | 10361 | 14835 | 19621 | 23095234 |
| 22533798 | 1477, 1479 | 5931 | 10363 | 14837 | 19623, 19627 | 23095235 |
| 22533799 | 1481 | 5933 | 10365 | 14839 | 19629 | 23095236 |
| 22533803 | 1483 | 5941 | 10373 | 14847 | 19637 | 23095240 |
| 22533804 | 1485 | 5943 | 10375 | 14849 | 19639 | 23095241 |
| 22533805 | 1487 | 5945 | 10377 | 14851 | 19641 | 23095242 |
| 22533806 | 1489 | 5947 | 10379 | 14853 | 19643 | 23095243 |
| 22533807 | 1491, 1493 | 5949 | 10381 | 14855, 14881 | 19645 | 23095244 |
| 22533808 | 1495 | 5951 | 10383 | 14857, 14885 | 19647 | 23095245 |
| 22533809 | 1497 | 5953 | 10385 | 14859 | 19649, 19651 | 23095246 |
| 22533811 | 1499 | 5955 | 10387 | 14861 | 19653 | 23095247 |
| 22533812 | 1501 | 5957 | 10389 | 14863, 14887 | 19655, 19657 | 23095248 |
| 22533813 | 1503 | 5959 | 10391 | 14865, 14889 | 19659 | 23095249 |
| 22533814 | 1505 | 5961 | 10393 | 14867 | 19661 | 23095250 |
| 22533815 | 1507 | 5963 | 10395 | 14869 | 19663 | 23095251 |
| 22533816 | 1509 | 5965 | 10397 | 14871 | 19665 | 23095252 |
| 22533817 | 1511 | 5967 | 10399 | 14873 | 19667 | 23095253 |
| 22533818 | 1513 | 5969 | 10401 | 14875 | 19669 | 23095254 |
| 22533819 | 1515 | 8653 | 10403 | 14877 | 19671 | 23095255 |
| 22533826 | 1517 | 5987 | 10415, 10417 | 14901 | 19683 | 23095261 |
| 22533827 | 1519 | 5989 | 10419 | 14903 | 19685 | 23095262 |
| 22533828 | 1521 | 5991 | 10421 | 14905, 14951 | 19687, 19689 | 23095263 |
| 22533829 | 1523 | 5993 | 10423 | 14907 | 19691 | 23095264 |
| 22533830 | 1525 | 5995 | 10425 | 14909 | 19693 | 23095265 |
| 22533833 | 1527 | 5997, 5999 | 10427 | 14911 | 19695 | 23095266 |
| 22533834 | 1529 | 4783, 6001 | 10429 | 13657, 14913 | 19697 | 23094634, 23095267 |
| 22533835 | 1531 | 6003 | 10431 | 14915 | 19699 | 23095268 |
| 22533837 | 1533 | 6009 | 10435 | 14919 | 19703 | 23095270 |
| 22533838 | 1535 | 6011 | 10437 | 14921 | 19705 | 23095271 |
| 22533839 | 1537 | 6013 | 10439 | 14923 | 19707 | 23095272 |
| 22533840 | 1539 | 6015, 6017 | 10441 | 14925 | 19709 | 23095273 |
| 22533841 | 1541, 1543 | 6019 | 10443 | 14927 | 19711, 22693 | 23095274 |
| 22533842 | 1545 | 6021 | 10445 | 14929 | 19713 | 23095275 |
| 22533843 | 1547, 1549, | 6023 | 10447 | 14931 | 19715 | 23095276 |
| | 3971 | | | | | |
| 22533844 | 1551 | 6025 | 10449, 10795 | 14933, 15361 | 19717, 20093 | 23095277 |
| 22533845 | 1553, 1555 | 6027 | 10451 | 14935 | 19719 | 23095278 |
| 22533846 | 1557 | 6029 | 10453 | 14937 | 19721 | 23095279 |
| 22533847 | 1559, 4217 | 6031 | 10455 | 14939 | 19723 | 23095280 |
| 22533849 | 1561, 4011 | 6035 | 10459 | 14943 | 19727 | 23095282 |
| 22533848 | 1563 | 6033 | 10457 | 14941 | 19725 | 23095281 |
| 22533850 | 1565 | 6037 | 10461 | 14945 | 19729 | 23095283 |
| 22533851 | 1567 | 6039 | 10463 | 14947 | 19731, 19773 | 23095284 |
| 22533852 | 1569 | 6041 | 10465 | 14949, 14953 | 19733 | 23095285 |
| 22533855 | 1571 | 6045, 8699 | 10467 | 14955 | 19735 | 23095287 |
| 22533856 | 1573 | 6047, 8697 | 10469 | 14957 | 19737, 19775 | 23095288 |
| 22533857 | 1575, 1577 | 6049 | 10471 | 14959 | 19739 | 23095289 |
| 22533858 | 1581 | 6051 | 10473 | 14961 | 19741 | 23095290 |
| 22533859 | 1583 | 6053 | 10475 | 14963 | 19743 | 23095291 |
| 22533860 | 1585, 1593 | 6055 | 10477 | 14965 | 19745 | 23095292 |
| 22533861 | 1587, 1595, | 6057 | 10479 | 14967 | 19747 | 23095293 |
| | 4285 | | | | | |
| 22533862 | 1589, 1597, | 6059 | 10481 | 14969 | 19749 | 23095294 |
| | 4283 | | | | | |
| 22533863 | 1591, 1599, | 6061, 7307 | 10483 | 14971 | 19751, 21121, | 23095295 |
| | 4281 | | | | 22615, 22689 | |
| 22533864 | 1601 | 6063 | 10485 | 14973 | 19753, 19755 | 23095296 |
| 22533865 | 1603 | 6065 | 10487 | 14975 | 19757 | 23095297 |
| 22533866 | 1605 | 6067 | 10489 | 14977 | 19759, 19777 | 23095298 |
| 22533867 | 1607, 4025 | 6069, 6071 | 10491 | 14979 | 19761 | 23095299 |
| 22533868 | 1609, 4027 | 6073 | 10493 | 14981 | 19763 | 23095300 |
| 22533869 | 1611 | 6075 | 10495 | 14983 | 19765 | 23095301 |
| 22533870 | 1613 | 6077 | 10497 | 14985 | 19767, 19779 | 23095302 |
| 22533871 | 1615 | 6079 | 10499 | 14987 | 19769 | 23095303 |
| 22533872 | 1617 | 6081 | 10501 | 14989, 15001, | 19771 | 23095304 |
| | | | | 17905 | | |
| 22533873 | 1619 | 6083 | 10503 | 14991 | 19781 | 23095305 |
| 22533874 | 1625 | 6085 | 10505 | 14993 | 19783, 19785 | 23095306 |
| — | 1627 | 6087 | 10507 | 14995, 14997 | 19787 | 23095307 |
| 22533875 | 1629 | 6089 | 10509 | 14999 | 19789 | 23095308 |
| 22533877 | 1631 | 6091 | 10511 | — | 19791 | 23095309 |
| 22533878 | 1633, 1637, | 6093 | 10513 | 15003 | 19793 | 23095310 |
| | 4105 | | | | | |
| 22533879 | 1635, 1639, | 6095 | 10515 | 15005 | 19795 | 23095311 |
| | 4107 | | | | | |
| 22533880 | 1641 | 6097 | 10517 | 15007 | 19797 | 23095312 |
| 22533881 | 1643 | 6099 | 10519 | 15009 | 19799 | 23095313 |
| 22533882 | 1645 | 6101 | 10521 | 15011 | 19801, 19813, | 23095314 |
| | | | | | 19815 | |
| 22533883 | 1647 | 6103 | 10523 | 15013, 15083 | 19803 | 23095315 |
| 22533884 | 1649 | 6105 | 10525 | 15015 | 19805 | 23095316 |
| 22533886 | 1651, 1653, | 6107, 6109 | 10527 | 15017 | 19807, 19817 | 23095317 |
| | 1655 | | | | | |
| 22533887 | 1657 | 6111 | 10529 | 15019 | 19809 | 23095318 |
| 22533888 | 1659 | 6113 | 10531 | 15021 | 19811 | 23095319 |
| 22533889 | 1661 | 6115, 6119 | 10533 | 15023 | 19821 | 23095320 |
| 22533890 | 1663 | 6117, 6121 | 10535 | 15025, 15027 | 19823 | 23095321 |
| 22533891 | 1665, 1667, | 6123, 6125 | 10537 | 15029, 15081 | 19825 | 23095322 |
| | 4161 | | | | | |
| 22533892 | 1669 | 6127 | 10539 | 15031 | 19827 | — |
| 22533893 | 1671, 1673, | 6129 | 10541, 10543 | 15033 | 19829 | 23095323 |
| | 1675, 1677, | | | | | |
| | 4129 | | | | | |
| 22533894 | 1679, 1681 | 6131 | 10545 | 15035 | 19831 | 23095324 |
| 22533895 | 1683 | 6133 | 10547 | 15037 | 19833 | 23095325 |
| 22533896 | 1685 | 6135 | 10549 | 15039 | 19835 | 23095326 |
| 22533898 | 1687 | 6137 | 10551 | 15041, 15085 | 19837 | 23095327 |
| 22533899 | 1689 | 6139 | 10553 | 15043 | 19839 | 23095328 |
| 22533900 | 1691 | 6141 | 10555 | 15045 | 19841 | 23095329 |
| 22533901 | 1693, 1695 | 6143 | 10557 | 15047 | 19843, 19899 | 23095330 |
| 22533902 | 1697 | 6145 | 10559 | 15049 | 19845 | 23095331 |
| 22533903 | 1699 | 6147 | 10561 | 15051 | 19847 | 23095332 |
| 22533906 | 1703 | 6153 | 10567 | 15059 | 19853 | 23095335 |
| 22533907 | 1705 | 6155 | 10569, 10573 | 15061 | 19855 | 23095336 |
| 22533908 | 1707, 1709 | 6157 | 10575 | 15063 | 19857 | 23095337 |
| 22533909 | 1711 | 6159 | 10577 | 15065 | 19859 | 23095338 |
| 22533911 | 1713 | 6163 | 10581 | 15069 | 19863 | 23095340 |
| 22533912 | 1715 | 6165, 8677 | 10583 | 15071, 15087 | 19865 | 23095341 |
| 22533913 | 1717 | 6167 | 10585 | 15073 | 19867 | 23095342 |
| 22533914 | 1719 | 6169 | 10587 | 15075 | 19869 | 23095343 |
| 22533915 | 1721, 1723 | 6171 | 10589 | 15077 | 19871 | 23095344 |
| 22533916 | 1725 | 6173 | 10591 | 15079, 15089 | 19873 | 23095345 |
| 22533917 | 1727 | 6175 | 10593 | 15091 | 19875 | 23095346 |
| 22533918 | 1729 | 6177 | 10595 | 15093 | 19877 | 23095347 |
| — | 1731 | 6179 | — | — | 19879 | — |
| 22533927 | 1733 | 6185 | 10599 | 15097 | 19881 | 23095370 |
| 22533928 | 1735 | 6187 | 10601 | 15099 | 19883 | 23095371 |
| 22533929 | 1737 | 6189, 6225 | 10603, 10605 | 15101, 15103 | 19885 | 23095372 |
| 22533931 | 1739 | 6229 | 10609 | 15107 | 19889 | 23095374 |
| 22533932 | 1741 | 6231 | 10611 | 15109 | 19891 | 23095375 |
| 22533933 | 1743 | 6233 | 10613, 10615 | 15111, 15139 | 19893 | 23095376 |
| 22533934 | 1745 | 6235 | 10617 | 15113 | 19895 | 23095377 |
| 22533935 | 1747 | 6237 | 10619 | 15115 | 19897 | 23095378 |
| — | 1751 | 6241 | 10623 | 15119 | 19903 | 23095380 |
| — | 1753 | 6243 | 10625 | 15121 | 19905 | 23095381 |
| 22533959 | 1755 | 6245 | 10627 | 15123 | 19907 | 23095382 |
| 22533960 | 1757 | 6247 | 10629 | 15125 | 19909 | 23095383 |
| 22533961 | 1759 | 6249, 6325 | 10631 | 15127 | 19911 | 23095384 |
| 22533962 | 1761 | 6251 | 10633 | 15129 | 19913 | 23095385 |
| 22533963 | 1763 | 6253 | 10635 | 15131 | 19915 | 23095386 |
| 22533964 | 1765 | — | 10637 | 15133 | 19917 | — |
| 22533966 | 1767 | 6257 | 10639 | 15135 | 19919 | 23095387 |
| 22533968 | 1769 | 6259 | 10641 | 15137 | 19921 | 23095388 |
| 22533969 | 1771 | 6261 | 10643 | 15141 | 19923 | 23095389 |
| 22533970 | 1773 | 6263 | 10645 | 15143 | 19925 | 23095390 |
| 22533971 | 1775 | 6265 | 10647 | 15145 | 19927 | 23095391 |
| 22533972 | 1777 | 6267 | 10649 | 15147 | 19929 | 23095392 |
| 22533973 | 1779 | 6269 | 10651 | 15149 | 19931 | 23095393 |
| 22533974 | 1781 | 6271 | 10653 | 15151 | 19933 | 23095394 |
| 22533424, 22533976 | 1783 | 5213, 6275 | 9595, 10657 | 14015, 15155 | 18803, 19937 | 23094866, 23095396 |
| 22533977 | 1785, 3955 | 6277 | 10659 | 15157 | 19939 | 23095397 |
| 22533978 | 1787, 3957 | 6279 | 10661 | 15159 | 19941 | 23095398 |
| 22533979 | 1789 | 6281 | 10663 | 15161 | 19943 | 23095399 |
| 22533980 | 1791 | 6283 | 10665 | 15163, 15167 | 19945 | 23095400 |
| 22533981 | 1793 | 6285 | 10667 | 15165 | 19947 | 23095401 |
| 22533982 | 1795, 4007, | 6287 | 10669 | 15169 | 19949, 19951 | 23095402 |
| | 4009 | | | | | |
| 22533983 | 1797 | 6289 | 10671 | 15171 | 19953 | 23095403 |
| 22533984 | 1799 | 6291 | 10673 | 15173 | 19955 | 23095404 |
| 22533986 | 1801 | 6293 | 10675, 10677 | 15175, 15177 | 19957 | 23095405 |
| 22533987 | 1803, 1805 | 6295 | 10679 | 15179, 15181 | 19959 | 23095406 |
| 22533990 | 1811 | 6329 | 10683 | 15231 | 19965 | 23095407 |
| 22533991 | 1813 | 6331 | 10685 | 15233 | 19967 | 23095408 |
| 22533992 | 1815 | 6333 | 10687 | 15235 | 19969, 20041 | 23095409 |
| 22533993 | 1817 | 6335 | 10689 | 15237 | 19971 | 23095410 |
| 22533994 | 1819 | 6337 | 10691 | 15239 | 19973 | 23095411 |
| — | 1821 | 6339 | 10693 | 15241, 15243 | 19975 | 23095412 |
| 22533995 | 1823 | 6341 | 10695, 10697 | 15245 | 19977 | 23095413 |
| 22533996 | 1825 | 6343 | 10699 | 15247, 15259 | 19979 | 23095414 |
| 22533997 | 1827 | 6345 | 10701 | 15249, 15261, | 19981 | 23095415 |
| | | | | 15263 | | |
| 22533998 | 1829 | 6347 | 10703 | 15251 | 19983 | 23095416 |
| 22533999 | 1831 | 6349 | 10705 | 15253 | 19989 | 23095417 |
| 22534000 | 1833 | 6351 | 10707 | 15255 | 19991 | 23095418 |
| 22533157, 22534001 | 1835 | 4631, 6353, | 9071, 10709 | 13491, 15257, | 19993 | 23094571, 23095419 |
| | | 6355 | | 15265, 15293, | | |
| | | | | 15295, 17951 | | |
| 22534002 | 1837 | 6357 | 10711 | 15267, 15297, | 19995, 22611 | 23095420 |
| | | | | 15299 | | |
| 22534003 | 1839 | 6359 | 10713 | 15269 | 19997 | 23095421 |
| 22534004 | 1841 | 6361, 6383 | 10715 | 15271, 15301 | 19999 | 23095470 |
| 22534005 | 1843 | 6363 | 10717 | 15273 | 20001 | 23095471 |
| 22534007 | 1845 | 6365 | 10719 | 15275 | 20003 | 23095472 |
| 22534008 | 1847 | 6367 | 10721 | 15277 | 20005 | 23095473 |
| 22534009 | 1849 | 6369 | 10723 | 15279, 15303 | 20007 | 23095474 |
| 22534010 | 1851 | 6371 | 10725 | 15281 | 20009, 20043 | 23095475 |
| 22534011 | 1853 | 6373 | 10727 | 15283 | 20011 | 23095476 |
| 22534012 | 1855 | 6375 | 10729 | 15285 | 20013 | 23095477 |
| 22534013 | 1857 | 6377 | 10731 | 15287 | 20015 | 23095478 |
| 22534014 | 1859 | 6379 | 10733 | 15289 | 20017, 20045 | 23095479 |
| 22534015, 22535008 | 1861, 3547 | 6381, 6385, | 10735, 12503 | 15291, 17187, | 20019, 20021, | 23095480, 24413534 |
| | | 8233 | | 17229 | 20023, 21927 | |
| 22534016 | 1863 | 6387, 6389, | 10737 | 15305, 17697 | 20025 | 23095481 |
| | | 6391, 6393 | | | | |
| 22534017, 22534018 | 1865, 1867 | 6395 | 10739, 10741 | 15307, 15309 | 20027, 20029 | 23095482, 23095483 |
| 22534022 | 1869 | 6403 | 10749 | 15317 | 20037 | 23095487 |
| 22534023 | 1871, 1873 | 6405 | 10751 | 15319 | 20039 | 23095488 |
| 22534025 | 1875 | 6409 | 10755 | 15323 | 20049 | 23095490 |
| 22534026 | 1877 | 6411 | 10757, 10759, | 15325, 15327, | 20051, 20053 | 23095491 |
| | | | 10763 | 15329, 17801 | | |
| 22534027 | 1879 | 6413 | 10765 | 15331 | 20055 | 23095492 |
| 22534029 | 1881 | 6415, 6451, | 10767 | 15333, 15407 | 20057, 20059 | 23095493 |
| | | 6453 | | | | |
| 22534030 | 1883 | 6455 | 10769 | 15335 | 20061 | 23095494 |
| 22534031 | 1885 | 4743, 6457 | 10771 | 15337 | 20063 | 23095495 |
| 22534032 | 1887 | 6459 | 10773 | 15339 | 20065 | 23095496 |
| 22534033 | 1889 | 6461, 6465 | 10775 | 15341 | 20067 | 23095497 |
| 22534034 | 1891 | 6463, 6467, | 10777 | 15343 | 20069 | 23095498 |
| | | 6471 | | | | |
| 22534035 | 1893 | 6469, 6473 | 10779 | 15345 | 20071, 20079 | 23095499 |
| 22534036 | 1895 | 6475 | 10781 | 15347 | 20073 | 23095500 |
| 22534037 | 1897 | 6477 | 10783 | 15349 | 20075 | 23095501 |
| 22534038 | 1899 | 6479 | 10785 | 15351 | 20077, 20081 | 23095502 |
| 22534039 | 1901 | 6481 | 10787 | 15353 | 20083 | 23095503 |
| 22534040 | 1903 | 6483 | 10789 | 15355 | 20085 | 23095504 |
| 22534041 | 1905 | 6485, 8719 | 10761, 10791 | 15357 | 20087, 20089 | 23095505 |
| 22534042 | 1907 | 6487 | 10793 | 15359 | 20091 | — |
| 22534044 | 1909 | 6491 | — | 15363 | — | 23095506, 23095507 |
| 22534045 | 1911 | 6493 | — | 15365 | — | 23095508 |
| 22534046 | 1913 | 6495 | 10797 | 15373 | — | 23095509 |
| 22534048 | 1915 | 6499 | — | — | — | 23095510 |
| 22534049, 22534057, | 1917, 1941, | 6501, 6523, | 10801, 10835 | 15377 | 20113, 20115, | 23095518, 23095519 |
| 22534058 | 1945, 1947 | 6525 | | | 22549 | |
| 22534054, 22534717, | 1919, 1921, | 6503, 6505, | 10803, 10813, | 15369, 16655, | 20095, 20107, | 23095515, 24413307 |
| 22534736 | 1931, 1935 | 6515, 7761 | 10815, 10821, | 17945 | 21461 | |
| | | | 10823, 10829, | | | |
| | | | 11993, 11995 | | | |
| — | 1923 | 6507 | — | — | — | 23095511 |
| 22534051 | 1925 | 6509 | 10825 | — | — | 23095512 |
| 22534052 | 1927 | 6511 | — | — | — | 23095513 |
| 22534053, 22534738 | 1929, 1933, | 6513 | 12029 | 16689 | 21503 | 23095514 |
| | 3101 | | | | | |
| 22534055 | 1937 | 6517 | — | — | — | 23095516 |
| 22534056 | 1939, 1943 | 6519, 6521 | 10833 | — | 20111 | 23095517 |
| 22534059 | 1949 | 6527, 6539 | 10837 | 15379 | 20117 | 23095520 |
| 22534060 | 1951 | 6529 | 10839 | 15381 | 20119 | 23095521 |
| 22534062 | 1953 | 6533, 6535 | 10843 | 14883, 15385 | 20123 | 23095523 |
| 22534063 | 1955 | 6537, 6543 | 10845, 10847 | — | 20125, 20127 | 23095524 |
| 22534064 | 1957 | 6545 | 10849 | 15387 | 20129 | 23095525 |
| 22534065 | 1959 | 6547 | 10851 | 15389 | 20131 | 23095526 |
| 22534066 | 1961 | 6549 | 10853 | 15391, 15409 | 20133, 20149 | 23095527 |
| 22534067 | 1963 | 6551 | 10855 | 15393 | 20135 | 23095528 |
| 22534068 | 1965 | 6553 | 10857 | 15395 | 20137 | 23095529 |
| 22534069 | 1967 | 6555 | 10859 | 15397 | 20139 | 23095530 |
| 22534070 | 1969 | 6557 | 10861 | 15399 | 20141 | 23095531 |
| 22534071 | 1971 | 6559 | 10863 | 15401 | 20143 | 23095532 |
| 22534073 | 1973 | 6561 | 10865 | 15403 | 20145 | 23095533 |
| 22534074 | 1975 | 6563 | 10867 | 15405, 17745 | 20147 | 23095534 |
| — | 1977 | 6565 | 10869 | 15411 | 22495 | 23095535 |
| 22534076 | 1979 | 6569 | 10873 | 15417 | 20151, 22491 | 23095537 |
| 22534078 | 1981 | 6571 | 10875 | 15419 | 20153 | 23095538 |
| 22534079 | 1983 | 6573 | 10877 | 15421 | 20155 | 23095539 |
| 22534080 | 1985 | 6575 | 10879 | 15423 | 20157 | 23095540 |
| 22534081 | 1987 | 6577 | 10881 | 15425 | 20159, 20243 | 23095541 |
| 22534082 | 1989 | 6579 | 10883 | 15427 | 20161 | 23095542 |
| 22534083 | 1991 | 6581 | 10885 | 15429 | 20163 | 23095543 |
| 22534084 | 1993 | 6583 | 10887 | 15431 | 20165 | 23095544 |
| 22534085 | 1995 | 6585 | 10889 | 15433, 17835 | 20167 | 23095545 |
| 22534086 | 1997 | 6587 | 10891 | 15435 | 20169 | 23095546 |
| 22534087 | 1999 | 6589 | 10893 | 15437 | 20171 | 23095547 |
| 22534088 | 2001 | 6591 | 10895 | 15439 | 20173 | 23095548 |
| 22534089 | 2003 | 6593 | 10897 | 15441 | 20175 | 23095549 |
| 22534090 | 2005, 4063 | 6595 | 10899 | 15443 | 20177 | 23095550 |
| 22534095 | 2007 | 6597 | 10901 | 15445 | 20179, 22633 | 23095552 |
| 22534096 | 2009, 2011 | 6599 | 10903 | 15447 | 20181 | 23095553 |
| 22534097 | 2013 | 6601 | 10905 | 15449 | 20183, 20245 | 23095554 |
| 22534098 | 2015 | 6603 | 10907 | 15451 | 20185, 20247 | 23095555 |
| 22534099 | 2017 | 6605 | 10909 | 15453 | 20187 | 23095556 |
| 22534100 | 2019 | 6607 | 10911 | 15455 | 20189 | 23095557 |
| 22534101 | 2021 | 6609 | 10913 | 15457 | 20191 | 23095558 |
| 22534102 | 2023 | 6611, 8775 | 10915 | 15459 | 20193 | 23095559 |
| 22534103 | 2025 | 6613 | 10917 | 15461 | 20195 | 23095560 |
| 22534104 | 2027 | 6615 | 10919 | 15463 | 20197 | 23095561 |
| 22534106 | 2029 | 6617 | 10921 | 15465 | 20199 | 23095562 |
| 22534107 | 2031 | 6619 | 10923 | 15467 | 20201 | 23095563 |
| 22534108 | 2033 | 6621 | 10925 | 15469 | 20203 | 23095564 |
| 22534109 | 2035 | 6623, 6641 | 10927 | 15471 | 20205 | 23095565 |
| 22534110 | 2037 | 6625, 6643, | 10929 | 15473, 15481 | 20207 | 23095566 |
| | | 8729 | | | | |
| 22534111 | 2039 | 6627 | 10931 | 15475 | 20209 | 23095567 |
| 22534112 | 2041 | 6629 | 10933 | 15477 | 20211 | 23095629 |
| 22534113 | 2043, 2045 | 6631 | 10935 | 15479, 15483 | 20213 | 23095630 |
| 22534114 | 2047, 4137, | 6633 | 10937, 12801 | 15485, 17613 | 20215, 22273 | 23095631 |
| | 4261 | | | | | |
| 22534115 | 2049, 2051, | 6635 | 10939, 10941 | 15487, 17639 | 20217, 20219, | 23095632 |
| | 3837 | | | | 22297 | |
| 22534117 | 2053, 2055 | 6637 | 10943 | 15489, 17765, | 20221 | 23095633 |
| | | | | 17767 | | |
| 22534118 | 2057 | 6647 | 10945 | 15491 | 20223 | 23095634 |
| 22534119 | 2059 | 6649 | 10947 | 15493 | 20225 | 23095635 |
| 22534120 | 2061 | 6651 | 10949, 10951 | 15495 | 20227 | 23095636 |
| 22534121 | 2063 | 6653 | 10953 | 15497 | 20229 | 23095637 |
| 22534122 | 2065 | 6655 | 10955 | 15499 | 20231 | 23095638 |
| 22534123 | 2067 | 6657 | 10957 | 15501 | 20233 | 23095639 |
| 22534124 | 2069 | 6659 | 10959 | 15503 | 20235 | 23095640 |
| 22534125 | 2071 | 6661 | 10961 | 15505 | 20237 | 23095641 |
| 22534126 | 2073 | 6663 | 10963 | 15507 | 20239 | 23095642 |
| 22534127 | 2075 | 6665 | 10965 | 15509 | 20241 | 23095643 |
| 22534128 | 2077 | 6667 | 10967 | 15511 | 20249 | 23095644 |
| 22534129 | 2079 | 6669 | 10969, 11025 | 15513, 15563 | 20251 | 23095645 |
| 22534130 | 2081 | 6671 | 10971 | 15515 | 20253 | 23095646 |
| 22534131 | 2083 | 6673 | 10973 | 15517 | 20255 | 23095647 |
| 22534132 | 2085 | 6675, 6677 | 10975 | 15519 | 20257 | 23095648 |
| 22534133 | 2087 | 6679 | 10977, 13075 | 15521 | 20259 | 23095649 |
| 22534330 | 2089, 2437, | 6997 | 11253 | 15843 | 20687 | 24412958 |
| | 2439 | | | | | |
| 22534134 | 2091 | 6639, 6681 | 10979 | 15523, 15565, | 20261 | 23095650 |
| | | | | 15571 | | |
| 22534135 | 2093 | 6683 | 10981 | 15525, 15567 | 20263 | 23095651 |
| 22534136 | 2095 | 6685 | 10983 | 15527 | 20265 | 23095652 |
| 22534137 | 2097 | 6687 | 10985 | 15529, 15573 | 20267 | 23095653 |
| 22534138 | 2099 | 6689, 6767 | 10987 | 15531 | 20269 | 23095654 |
| 22534140 | 2101 | 6691 | 10989 | 15533 | 20271 | 23095655 |
| 22534141 | 2103 | 6693, 6769 | 10991 | 15535 | 20273 | 23095656 |
| 22534142 | 2105 | 6695 | 10993 | 15537 | 20275 | 23095657 |
| 22534143 | 2107 | 6697 | 10995 | 15539 | 20277 | 23095658 |
| 22534144 | 2109 | 6699 | 10997 | 15541 | 20279 | 23095659 |
| 22534145 | 2111 | 6701 | 10999 | 15543 | 20281 | 23095660 |
| 22534146 | 2113 | 6703 | 11001 | 15545 | 20283 | 23095661 |
| 22534147 | 2115 | 6705 | 11003 | 15547 | 20285 | 23095662 |
| 22534148 | 2117 | 6707 | 11005 | 15549, 15551 | 20287 | 23095663 |
| 22534149 | 2119, 2121 | 6709, 6715, | 11007 | 15553, 15555 | 20289, 20291, | 23095664 |
| | | 6717, 6719 | | | 20297, 20299, | |
| | | | | | 20301 | |
| 22534151 | 2123 | 6721 | 11009 | 15557, 15569 | 20303 | 23095665 |
| 22534152 | 2125 | 6723 | 11011 | 15559 | 20305 | 23095666 |
| 22534170 | 2127 | 6761 | 11047 | 15591 | 20343 | 23095682 |
| 22534171 | 2129 | 6763 | 11049 | 15593 | 20345, 20347 | 23095683 |
| 22534172 | 2131 | 6765, 6771, | 11051 | 15595 | 20349 | 23095684 |
| | | 8705 | | | | |
| 22534173 | 2133 | 6773 | 11053 | 15597, 15599, | 20351 | 23095685 |
| | | | | 15601 | | |
| 22534174 | 2135 | 6775, 6777 | 11055 | 15603 | 20353 | 23095686 |
| 22534175 | 2137 | 6779 | 11057 | 15605 | 20355 | 23095687 |
| 22534176 | 2139 | 6781 | 11059 | 15607 | 20357 | 23095688 |
| 22534177 | 2141, 4145 | 6783 | 11061, 11063 | 15609 | 20359 | 23095689 |
| — | 2143 | — | — | — | — | 23095690 |
| — | 2145 | — | — | — | — | 23095691 |
| — | 2147 | — | — | — | — | 23095692 |
| — | 2151 | — | — | — | — | 23095693 |
| 22534181 | 2153 | 6795 | 11071 | 15617 | 20379 | 23095701 |
| 22534182 | 2155 | 6797 | 11073 | 15619 | 20381 | 23095702 |
| 22534183 | 2157 | 6799 | 11075 | 15621 | 20383 | 23095703 |
| 22534184 | 2159 | 6787, 6801 | 11077 | 15623 | 20385 | 23095704 |
| 22534185 | 2161 | 6803 | 11079 | 15625 | 20387 | 23095705 |
| 22534186 | 2163, 2165 | 6805 | 11081 | 15627 | 20389 | 23095706 |
| 22534187 | 2167 | 6807 | 11083 | 15629 | 20391 | 23095707 |
| 22534188 | 2169 | 6809 | 11085 | 15631, 15633 | 20393 | 23095708 |
| 22534190 | 2171 | 6811 | 11087 | 15635 | 20395 | 23095709 |
| 22534200 | 2173, 4191 | 6827, 6943 | 11103 | 15651 | 20411 | 23095717 |
| 22534201 | 2175 | 6829 | 11105 | 15653, 15655 | 20413 | 23095718 |
| 22534202 | 2177 | 6831, 6945 | 11107 | 15657 | 20415 | 23095719 |
| 22534203 | 2179 | 6833 | 11109 | 15659 | 20417 | 23095720 |
| 22534204 | 2181 | 6835 | 11111 | 15661 | 20419 | 23095721 |
| 22534205 | 2183 | 6837 | 11113 | 15663 | 20421 | 23095722 |
| 22534206 | 2185 | 6839 | 11115 | 15671 | 20423 | 23095723 |
| 22534207 | 2187 | 6841, 6947 | 11117 | 15673 | 20425 | 23095724 |
| 22534208 | 2189 | 6843 | 11119 | 15675 | 20427 | 23095725 |
| 22534209 | 2191 | 6845 | 11121 | 15677 | 20429, 20441 | 23095726 |
| 22534210 | 2193 | 6847 | 11123 | 15679 | 20431, 20443 | 23095727 |
| 22534211, 22535115 | 2195, 2197, | 5103, 6849, | 11125, 12643 | 15681, 17443 | 20433, 22067 | 23095728, 24413604 |
| | 3735, 3737, | 8443 | | | | |
| | 3739 | | | | | |
| 22534212 | 2199 | 6851 | 11127 | 15683 | 20435 | 23095729 |
| 22534214 | 2201 | 6855 | 11129 | 15685 | 20437 | 23095730 |
| 22534215 | 2203 | 6857 | 11131, 11133 | 15687 | 20445 | 23095731 |
| 22534216 | 2205, 2207 | 6859 | 11135 | 15689 | 20447, 20449 | 23095732 |
| 22534217 | 2209 | 6861, 6863 | 11137 | 15691 | 20451 | 23095733 |
| 22534218 | 2211 | 6865 | 11139 | 15693 | 20453, 20525, | 23095734 |
| | | | | | 20527 | |
| 22534219 | 2213 | 6867 | 11141 | 15695, 17919 | 20455, 20529 | 23095735 |
| 22534220 | 2215 | 6869 | 11143 | 15697 | 20457 | 23095736 |
| 22534221 | 2217 | 6871 | 11145 | 15699, 15773 | 20459 | 23095737 |
| 22534222 | 2219 | 6873 | 11147 | 15701, 17755 | 20461 | 23095738 |
| 22534223 | 2221 | 6875 | 11149 | 15703 | 20463 | 23095739 |
| 22534224 | 2223 | 6877 | 11151 | 15705, 15775 | 20465 | 23095740 |
| 22534225 | 2225 | 6879 | 11153 | 15707 | 20467 | 23095741 |
| 22534226 | 2227 | 6881 | 11155 | 15709 | 20469 | 23095742 |
| 22534227 | 2229 | 6883 | 11157 | 15711 | 20471 | 23095743 |
| 22534228 | 2231 | 6885 | 11159 | 15713 | 20473 | 23095744 |
| 22534229 | 2233 | 6889 | 11161 | 15715 | 20475 | 24412859 |
| 22534230 | 2235 | 6891 | 11163 | 15717 | 20477 | 24412860 |
| 22534231 | 2237 | 6893 | 11165 | 15719 | 20479 | 24412861 |
| 22534232 | 2239 | 6895 | 11167 | 15721 | 20481 | 24412862 |
| 22534233 | 2241 | 6897 | 11169 | 15723 | 20483 | 24412863 |
| 22534235 | 2243 | 6899 | 11171 | 15725 | 20485 | 24412864 |
| 22534236 | 2245 | 6901 | 11173 | 15727 | 20487 | 24412865 |
| 22534237 | 2247, 2249 | 6903 | 11175 | 15729 | 20489 | 24412866 |
| 22534239 | 2253, 2255 | 6905 | 11179 | 15733 | 20491 | 24412867 |
| 22534240 | 2257, 2259 | 6907 | 11181 | 15735 | 20493 | 24412868 |
| 22534241 | 2261 | 6909 | 11183 | 15737 | 20495 | 24412869 |
| 22534242 | 2263 | 6911 | 11185 | 15739 | 20497 | 24412870 |
| 22534243 | 2265 | 6913 | 11187 | 15741 | 20499 | 24412871 |
| 22534244 | 2267 | 6915 | 11189 | 15743 | 20501, 22713 | 24412872 |
| 22534245 | 2269 | 6917 | 11191 | 15745 | 20503 | 24412873 |
| 22534246 | 2271 | 6919, 6921 | 11193, 11195 | 15747, 15749 | 20505 | 24412874 |
| 22534247 | 2273, 2275, | 6923 | 11197, 11199 | 15751, 17741 | 20507 | 24412875 |
| | 2277, 2279, | | | | | |
| | 2281 | | | | | |
| — | 2283 | 6925 | 11201 | 15753 | 20509 | 24412876 |
| — | 2285 | — | — | — | — | 24413553 |
| 22534248 | 2287 | 6927 | 11203 | 15755 | 20511 | 24412877 |
| 22534249 | 2289 | 6929 | 11205 | 15757 | 20513 | 24412878 |
| 22534250 | 2291 | 6931 | 11207 | 15759 | 20515 | 24412879 |
| — | 2293 | 6933 | 11209 | 15761 | 20517 | 24412880 |
| 22534257 | 2295 | 6949 | 11219 | 15777 | 20531 | 24412886 |
| 22534258, 22534268 | 2297, 2327 | 6951, 6973 | 11221, 11241 | 15779 | 20551 | 24412887, 24412893 |
| 22534259, 22534269 | 2299, 2301, | 6953, 6965, | 11223, 11243 | 15781, 15807 | 20533 | 24412888 |
| | 2329 | 6975 | | | | |
| 22534260 | 2303 | 6955 | 11225 | 15783 | 20535 | 24412889 |
| 22534261 | 2305 | 6961 | 11231 | 15789 | 20541 | 24412890 |
| 22534262 | 2307 | 6963 | 11233 | 15791 | 20543 | 24412891 |
| 22534263 | 2311 | — | — | 14715, 15053, | — | — |
| | | | | 15793 | | |
| — | 2313 | 6967 | 11235, 11237 | 15795 | 20545, 20547 | 24412892 |
| 22534264 | 2315, 3961 | 6969, 6971 | 11239 | 15797 | 20549 | 23094836, 23095149, |
| | | | | | | 23095422, |
| | | | | | | 23095568 |
| 22534265 | 2317 | — | — | 15799 | — | — |
| 22534266 | 2319 | — | — | 15801 | — | — |
| — | 2321 | — | — | 15803 | — | — |
| 22534272 | 2335 | 6979 | 11247 | 15809 | 22489, 22497 | 24412895 |
| 22534273 | 2337 | — | 13025, 13053 | 15811 | 20565, 22499 | 24412896, 24412905 |
| 22534274 | 2339 | — | 13027, 13055 | 15813 | 20567, 22501 | 24412897, 24412906 |
| 22534275 | 2341 | — | — | — | 20569 | 24412907 |
| 22534276 | 2343 | — | — | — | 20571 | 24412918 |
| 22533658, 22534277 | 2345 | — | — | 14483 | 20573 | 24412919 |
| 22534278 | 2347 | — | — | — | 20575 | — |
| 22534282 | 2353, 2355 | — | — | — | 20585, 20603 | — |
| 22534283 | 2357 | — | — | — | 20587 | — |
| 22534285 | 2359 | — | — | — | 20589, 20605 | — |
| 22534286 | 2361 | — | — | — | 20591 | — |
| 22534287 | 2363, 2365 | — | — | — | 20593 | — |
| — | 2367 | — | — | — | 20595 | — |
| 22534288 | 2371, 4151, | — | — | — | 20599 | — |
| | 4177 | | | | | |
| 22534290 | 2373 | — | — | 15189 | 20601 | — |
| 22534291 | 2375 | — | — | — | 20607 | — |
| 22534293 | 2377, 4103 | — | 9899, 9901, | — | 20361, 20363, | 23095694 |
| | | | 9903 | | 20365, 20611 | |
| 22534294 | 2379 | — | — | — | 20613 | — |
| 22534295 | 2381 | — | — | — | 20615 | — |
| 22534296 | 2383 | — | — | — | 20617 | — |
| 22534299 | 2385 | — | — | — | 20623 | 24412926 |
| 22534300 | 2387 | — | — | — | 20625 | 24412927 |
| 22534301 | 2389 | — | — | — | 20627 | 24412928 |
| 22534305 | 2391 | — | — | — | 20633, 20635, | 24412932, 24412933 |
| | | | | | 20637, 20675, | |
| | | | | | 22543 | |
| 22534306 | 2393 | — | — | — | 20639 | 24412934 |
| 22534307 | 2395 | — | — | — | 20641 | 24412935 |
| 22534308 | 2397 | — | — | — | 20643 | 24412936 |
| 22534310 | 2399 | — | — | — | 20645 | 24412937 |
| 22534311 | 2401 | — | — | — | 20647 | 24412938 |
| 22534313 | 2405 | — | — | — | 20651 | 24412940 |
| 22534314 | 2407 | — | — | — | 20655 | 24412942 |
| 22534315 | 2409 | — | — | — | 20657 | 24412943 |
| — | 2411 | — | — | — | 20659 | 24412944 |
| 22534316 | 2413 | — | — | — | 20661 | 24412945 |
| 22534317 | 2415 | — | — | — | 20663 | — |
| 22534318 | 2417 | — | — | — | 20665 | 24412947 |
| 22534321, 22534910 | 2419 | — | — | — | 20669 | 24412950 |
| 22534322 | 2421 | — | — | — | 20671 | — |
| 22534323 | 2423 | — | — | — | 20673 | 24412952 |
| 22534324 | 2425 | — | — | — | 20677 | 24412953 |
| 22534325 | 2427, 4031 | 6981 | 13003 | 15831 | 20679 | 24412954 |
| 22534326 | 2429, 2431, | 6983 | 13001 | 15835 | 20681 | 24412955 |
| | 4029 | | | | | |
| 22534327 | 2433 | 6985, 6991, | 11249 | 15837, 15839, | 20683 | 24412956 |
| | | 6993 | | 15845 | | |
| 22534329 | 2435 | 6995 | 11251 | 15841 | 20685 | 24412957 |
| 22534332 | 2441 | 6999 | 11255 | 15847 | 20689 | 24412959 |
| 22534333 | 2443 | 7001, 7003 | 11257, 11259 | 15849, 15851, | 20691, 20693 | 24412960 |
| | | | | 15857 | | |
| 22534335 | 2445 | 7005 | 11263 | 15855, 15859 | 20697 | 24412961 |
| 22534336 | 2447 | 7007 | 11265 | 15861 | 20699 | 24412962 |
| 22534337 | 2449 | 7009 | 11267 | 15863 | 20701 | 24412963 |
| 22534339 | 2451 | 7013 | 11271 | 15867 | 20705 | 24412964 |
| 22533322, 22534340 | 2453 | 4981, 7015 | 9411, 11273 | 13801, 15869 | 18555, 20707 | 24412965 |
| 22534341 | 2455 | 7017 | 11275 | 15871, 15899 | 20709 | 24412966 |
| 22534342 | 2457 | 7019 | 11277 | 15873 | 20711, 20713 | 24412967 |
| 22534343 | 2459 | 7021 | 11279 | 15875 | 20715 | 24412968 |
| 22534344 | 2461 | 7023 | 11281 | 15877 | 20717 | 24412969 |
| 22534345 | 2463 | 7025 | 11283 | 15879 | 20719 | 24412970 |
| 22534346 | 2465 | 7027 | 11285 | 15881 | 20721 | 24412971 |
| 22534347 | 2467 | 7029 | 11287 | 15883 | 20723 | 24412972 |
| 22534348 | 2469 | 7031 | 11289 | 15885 | 20725 | 24412973 |
| 22534349 | 2471 | 7033 | 11291 | 15887 | 20727 | 24412974 |
| 22534350 | 2473 | 7035 | 11293 | 15889 | 20729 | 24412975 |
| 22534351 | 2475 | 7037 | 11295 | 15891 | 20731 | 24412976 |
| 22534352 | 2477 | 7039 | 11297 | 15893 | 20733 | 24412977 |
| 22534353 | 2479 | 8663 | 11299 | 15895 | 20735 | 24412978 |
| 22534354 | 2481 | 8661 | 11301 | 15897, 15901 | 20737 | 24412979 |
| 22534359 | 2483, 2485 | 7041, 8739 | 11309 | 15909 | 20745 | 24412983 |
| 22534360 | 2487 | 7043 | 11311 | 15911, 15913 | 20747 | 24412984 |
| 22534361 | 2489 | 7045 | 11313 | 15915 | 20749 | 24412985 |
| 22534362 | 2491 | 7047 | 11315 | 15917 | 20751 | 24412986 |
| 22534363 | 2493, 2495 | 7049 | 11317 | 15919 | 20753, 20767 | 24412987 |
| 22534364 | 2497 | 7051 | 11319 | 15921 | 20755 | 24412988 |
| 22534365 | 2499 | 7053 | 11321 | 15923, 15925 | 20757 | 24412989 |
| 22534366 | 2501 | 7055, 7057 | 11323, 11351 | 15927 | 20759 | 24412990 |
| 22534367 | 2503 | 7059 | 11325 | 15929 | 20761 | 24412991 |
| 22534368 | 2505 | 7061 | 11327 | 15931, 15935 | 20763 | 24412992 |
| 22534369 | 2507 | 7063 | 11329 | 15933, 15937 | 20765 | 24412993 |
| 22534370 | 2509 | 7065 | 11331 | 15939 | 20769 | 24412994 |
| 22534371 | 2511 | 7071 | 11333 | 15941 | 20771 | 24412995 |
| 22534372 | 2513 | 7073, 7075 | 11335 | 15943, 15945 | 20773, 20775 | 24412996 |
| 22534373, 22534971 | 2515, 3467, | 4363, 7077, | 11337, 12427 | 15947, 17083 | 20777, 21847 | 24412914, 24412997, |
| | 3469, 3471, | 8149 | | | | 24413497 |
| | 3959 | | | | | |
| 22534377 | 2517 | 7083 | 11343 | 15953 | 20783 | 24413000 |
| 22534378 | 2519 | 7085 | 11345 | 15955 | 20785 | 24413001 |
| 22534379 | 2521 | 7087 | 11347 | 15957 | 20787 | 24413002 |
| 22534380 | 2523 | 7089 | 11349, 11353, | 15959, 15965 | 20789 | 24413003 |
| | | | 13065 | | | |
| 22534381 | 2525 | 7091 | 11355 | 15961 | 20791, 20793 | 24413004 |
| 22534382 | 2527 | 7093 | 11357, 11359 | 15963 | 20795 | 24413005 |
| 22534383 | 2529 | 7101, 7103 | 11361 | 15967 | 20797, 20799 | 24413006 |
| 22534384 | 2531 | 7105 | 11363 | — | — | 24413007 |
| 22534385 | 2533 | — | 11365 | — | 20801 | 24413008 |
| 22534386 | 2535 | 7107 | 11367 | 15969, 15971 | 20803 | 24413009 |
| 22534387 | 2537 | 7109 | 11369 | 15973 | 20805 | 24413010 |
| 22534388 | 2539 | 7111, 7113 | 11371, 11373 | 15975 | 20807 | 24413011 |
| 22534389 | 2541 | 7115 | 11375 | 15977 | 20809, 20811 | 24413012 |
| 22534390 | 2543 | 7117 | 11377 | 15979 | 20813 | 24413013 |
| 22534391 | 2545 | 7119 | 11379 | 15981 | 20815, 20817 | 24413014 |
| 22534392 | 2547 | 7121 | 11381 | 15983 | 20819 | 24413015 |
| 22534393 | 2549 | 7123 | 11383 | 15985 | 20821 | 24413016 |
| 22534394 | 2551 | 7125 | 11385 | 15987 | 20823 | 24413017 |
| 22534395 | 2553 | 7127 | 11387 | 15989 | 20825 | 24413018 |
| 22534396 | 2555 | 7129 | 11389 | 15991 | 20827 | 24413019 |
| 22534397 | 2557 | 7131 | 11391 | 15993 | 20829 | 24413020 |
| 22534398 | 2559 | 7133 | 11393 | 15995 | 20831 | 24413021 |
| 22534400 | 2561 | 7135 | 11395 | 15997 | 20837 | 24413022 |
| 22534401 | 2563 | 7137 | 11397 | 15999 | 20839 | 24413023 |
| 22534402 | 2567 | — | 11399 | 16001 | 20841 | 24413024 |
| 22534403 | 2569 | 7139 | 11401 | 16003 | 20843, 20845 | 24413025 |
| 22534404 | 2571 | 5973, 7141 | 11403 | 16027 | 20847 | 24413026 |
| 22534405 | 2573 | 5971, 7143, | 11405 | 16029 | 20849, 20851 | 24413027 |
| | | 7147 | | | | |
| 22534406 | 2575 | 7149 | 11407 | 16031 | 20853 | 24413028 |
| 22534407 | 2577 | 7151 | 11409 | 16033 | 20855 | 24413029 |
| 22534408 | 2579 | 7153 | 11411 | 16035 | 20857 | 24413030 |
| 22534409 | 2581 | 7155, 7163 | 11413 | 16037 | 20859, 20861 | 24413031 |
| 22534410 | 2583 | 7157 | 11415 | 16039 | 22523 | 24413032 |
| 22534411 | 2585 | 7159 | — | 16041 | 22521 | 24413033 |
| 22534412 | 2587 | 7161 | 13069 | 16043 | 22519 | 24413034 |
| 22534416 | 2589 | 7167 | 11421, 11423 | 16047 | 20865 | 24413038 |
| 22534417 | 2591 | 7169, 7171 | 11425 | 16049 | 20867 | 24413039 |
| 22534418 | 2593 | 7173 | 11427 | 16051 | 20869 | 24413040 |
| 22534419 | 2595 | 7175 | 11429 | 16053 | 20871 | 24413041 |
| 22534420 | 2597, 3977 | 7177 | 11431 | 16055 | 20873 | 24413043 |
| 22534421 | 2599, 3979 | 7179 | 11433 | 16057, 16059 | 20875 | 24413044 |
| 22534422 | 2601 | 7181 | 11435 | 16061 | 20877 | 24413045 |
| 22534423 | 2603 | 7183 | 11437 | 16063 | 20879 | 24413046 |
| 22534424 | 2605 | 7185 | 11439 | 16065 | 20881 | 24413047 |
| 22534425 | 2607 | 7187 | 11441, 11491 | 16067 | 20883 | 24413048 |
| 22534427 | 2609 | 7189 | 11443, 11493 | 16069, 16071 | 20885 | 24413049 |
| 22534428 | 2611 | 7191 | 11445 | 16073 | 20887 | 24413050 |
| 22534429 | 2613 | 7193 | 11447 | 16077 | 20889 | 24413051 |
| 22534156, 22534430 | 2615 | 6733, 7195 | 11017, 11449 | 16079 | 20315, 20891 | 24413052 |
| 22534431 | 2617 | 7197 | 11451 | 16081 | 20893 | 24413053 |
| 22534432 | 2619 | 7199 | 11453 | 16083 | 20895 | 24413054 |
| 22534433 | 2621 | 7201 | 11455 | — | 20897 | 24413055 |
| 22534436 | 2627 | 7207 | 11461 | — | 20903 | 24413058 |
| — | 2631, 2713 | 7211, 7315 | 11465, 11575, | — | 20907, 21015 | 24413060, 24413111 |
| | | | 11577, 11579 | | | |
| 22534438 | 2633 | 7213 | 11467 | 16099, 17731 | 20909 | 24413061 |
| 22534439 | 2635 | 7215 | 11469 | 16101 | 20911 | 24413062 |
| 22534440 | 2637 | 7217 | 11471 | 16103, 16111 | 20913 | 24413063 |
| 22534441 | 2639 | 7219 | 11473 | 16105 | 20915 | 24413064 |
| 22534442 | 2641 | 7221 | 11475 | 16107 | 20917 | 24413065 |
| 22534443 | 2643 | 7223 | 11477 | 16109, 16113 | 20919 | 24413066 |
| 22534444 | 2645 | 7225, 7237 | 11479 | 16115 | 20921 | 24413067 |
| 22534445 | 2647 | 7227 | 11481 | 16117 | 20923 | 24413068 |
| 22534446 | 2649 | 7229, 7235 | 11483 | 16119, 16127, | 20925 | 24413069 |
| | | | | 16129 | | |
| 22534447 | 2651, 2653 | 7231 | 11485 | 16121 | 20927, 20929 | 24413070 |
| 22534448 | 2655 | 7233, 8759 | 11487 | 16123 | 20931 | 24413071 |
| 22534449 | 2657 | 8757 | 11489 | 16125 | 20933 | 24413072 |
| 22534455 | 2659 | 7247 | 11503 | 16139 | 20943 | 24413077 |
| 22534456 | 2661, 2663 | 7249, 8751 | 11505 | 16141 | 20945 | 24413078 |
| 22534457 | 2665 | 8749 | 11507 | 16143, 17791 | 20947 | 24413079 |
| 22534458 | 2667 | — | 11509 | — | — | 24413080 |
| 22534461 | 2669 | 7251 | 11511, 11513 | 16145, 16147 | 20953, 20955, | 24413083 |
| | | | | | 22653 | |
| 22534462 | 2671, 2673 | 7253 | 11515 | 16149 | 20957 | 24413084 |
| 22534463 | 2675 | 7255 | 11517 | 16151 | 20959 | 24413085 |
| 22534465 | 2677 | 7259 | 11521 | 16157 | 20963 | 24413087 |
| 22534474 | 2679 | 7273 | 11539, 11541 | 16179 | 20979 | 24413094 |
| — | 2681 | 7275 | 11543 | 17709 | 20981 | 24413095 |
| 22534475 | 2683 | 7277 | 11545 | — | 20983 | 24413096 |
| 22534476 | 2685 | 7279 | 11547 | — | 20985 | 24413097 |
| 22534477 | 2687 | 7281 | 11549 | 16011 | 20987 | 24413098 |
| 22534478 | 2689 | 7283 | 11551 | 16013 | 20989 | 24413099 |
| 22534479 | 2691 | 7285 | 11553 | — | 20991 | 24413100 |
| 22534481 | 2695 | 7289 | 11557 | — | 20997 | 24413102 |
| 22534482 | 2697 | 7291 | 11559 | — | 20999 | 24413103 |
| 22534483 | 2699 | 7293 | 11561 | 16005 | 21001 | 24413104 |
| 22534484 | 2701 | 7295 | 11563 | — | 21003 | 24413105 |
| — | 2703 | 7297 | 11565 | — | 21005 | 24413106 |
| 22534487 | 2705 | 7299, 7309 | 11567 | — | 21007 | 24413107 |
| 22534488 | 2707 | 7301 | 11569 | — | 21009 | 24413108 |
| 22534489 | 2709 | 7303, 7311 | 11571 | — | 21011, 21119 | 24413109 |
| 22534491 | 2711 | 7305, 7313, | 11573 | 16025 | 21013, 22661 | 24413110 |
| | | 7347 | | | | |
| 22534492 | 2715 | 7317 | 11581 | 16185, 16191 | 21017, 21123 | 24413112 |
| 22534493 | 2717 | 7319 | 11583 | 16187 | 21019 | 24413113 |
| 22534494 | 2719 | 7321, 7349, | 11585 | 16189, 16193 | 21021 | 24413114 |
| | | 7351 | | | | |
| 22534496 | 2723 | 7325 | 11589 | 16197 | 21025 | 24413116 |
| 22534497 | 2725 | 7327 | 11591 | 16199 | 21027 | 24413117 |
| 22534498 | 2727 | 7329, 8747 | 11593 | 16201, 16217 | 21029 | 24413118 |
| 22534153, 22534499 | 2729 | 6725, 7331 | 11013, 11595 | 15561, 16203, | 20307, 21031 | 23095667 |
| | | | | 17845 | | |
| 22534500 | 2731 | 7333 | 11597 | 16205 | 21035 | 24413119 |
| 22534501 | 2733 | 7335 | 11599 | 16207 | 21037 | 24413120 |
| 22534502 | 2735 | 7337, 7355, | 11601 | 16209 | 21039, 22515 | 24413121 |
| | | 8737 | | | | |
| 22534503 | 2737 | 7339 | 11603 | 16213 | 21041 | 24413122 |
| 22534504 | 2739 | 7341, 8767 | 11605 | 16215, 16219 | 21043 | 24413123 |
| 22534505 | 2741 | 7343 | 11607 | 16221, 16299 | 21045 | 24413124 |
| 22534507 | 2743 | 7345 | 11609 | 16223 | 21047 | 24413125 |
| 22534508 | 2745 | 7357 | 11611 | 16225 | 21049 | 24413126 |
| 22534509 | 2747 | 7359 | 11613 | 16227 | 21051 | 24413127 |
| 22534510 | 2749 | 7361 | 11615 | 16229 | 21053 | 24413128 |
| 22534511 | 2751 | 7363 | 11617 | 16231 | 21055, 21125 | 24413129 |
| 22534512 | 2753 | 7365 | 11619 | 16233 | 21057, 21127 | 24413130 |
| 22534514 | 2755 | 7367 | 11621 | 16235 | 21059 | 24413131 |
| 22534523 | 2757 | 7387 | 11639 | 16251 | 21077 | — |
| 22534524 | 2759 | — | — | — | — | 24413139 |
| 22534528 | 2761 | 7395 | 11641 | 16257, 16301 | 21079 | 24413141 |
| 22534529 | 2763 | 7397 | 11643 | 16259, 16303 | 21081 | 24413142 |
| 22534530 | 2765, 2767 | 7399 | 11645 | 16261 | 21083 | 24413143 |
| 22534537 | 2769 | 7409 | 11653 | 16271 | 21091 | 24413147 |
| 22534538 | 2771 | 7411 | 11655 | 16273 | 21093 | 24413148 |
| 22534540 | 2773 | 7415 | 11659 | 16277, 16305, | 21097 | 24413150 |
| | | | | 17793 | | |
| 22534541 | 2775, 2777 | 7417 | 11661 | 16279 | 21099, 21133 | 24413151 |
| 22534542 | 2779 | 7419 | 11663 | 16281 | 21101 | 24413152 |
| 22534543 | 2781 | 7421 | 11665 | 16283 | 21103 | 24413153 |
| 22534544 | 2783 | 7423 | 11667 | 16285, 16287 | 21105 | 24413154 |
| 22534545 | 2785 | 7425 | 11669 | 16289 | 21107 | 24413155 |
| 22534546 | 2787 | 7427 | 11671 | 16291 | 21109 | 24413156 |
| 22534547 | 2789 | 7429 | 11673 | 16293 | 21111 | 24413157 |
| 22534548 | 2791 | 7431 | 11675 | 16295 | 21113 | 24413158 |
| 22534549 | 2793 | 7433 | 11677 | 16297 | 21115 | 24413159 |
| 22534550 | 2795 | 7435 | 11679 | — | 21117 | 24413160 |
| 22534551, 22534833 | 2797, 2799, | 4785 | — | 13409, 13411, | 18191 | 23094635 |
| | 2901, 2903, | | | 16075, 16211, | | |
| | 3293, 4289 | | | 16409, 16899, | | |
| | | | | 16901, 17407, | | |
| | | | | 17735, 17769, | | |
| | | | | 17771, 17855 | | |
| 22534552 | 2801 | 7437, 7439 | 11681 | 16307 | 21135 | 24413161 |
| 22534553 | 2803 | 7441, 8765 | 11683 | 16309 | 21139 | 24413162 |
| 22534554 | 2805 | 7443 | 11685 | 16311 | 21141 | 24413163 |
| 22534091, 22534556 | 2807 | — | — | 14133, 14347, | — | — |
| | | | | 15669, 15765, | | |
| | | | | 16181, 16313, | | |
| | | | | 17087, 17357 | | |
| 22534092, 22534557 | 2809 | — | — | 14131, 14349, | 20583 | — |
| | | | | 15665, 15667, | | |
| | | | | 15763, 16183, | | |
| | | | | 16315, 17085, | | |
| | | | | 17355, 17711, | | |
| | | | | 17789 | | |
| 22534558 | 2811 | 7445 | 11687 | 16317 | 21143 | 24413165 |
| 22534560 | 2813, 2815 | 7447 | 11689, 11691 | 16319 | 21145 | 24413166 |
| 22534561 | 2817 | 7449 | 11693 | 16321 | 21147 | 24413167 |
| 22534562 | 2819 | 7451 | 11695 | 16323 | 21149 | 24413168 |
| 22534563 | 2821, 2823 | 7453 | 11697 | 16325 | 21151, 21153 | 24413169 |
| 22534565 | 2825 | 7457 | 11701 | 16331 | 21157 | 24413171 |
| 22534566 | 2827 | 7459 | 11703 | 16333 | 21159 | 24413172 |
| 22534567 | 2829 | 7461 | 11705 | 16335 | 21161 | 24413173 |
| 22534568 | 2831 | 7463 | 11707 | 16337 | 21163 | 24413174 |
| 22534569 | 2833 | 7465 | 11709 | 16339 | 21165 | 24413175 |
| 22534571 | 2835 | 7467 | 11711 | 16341, 16421 | 21167 | 24413176 |
| 22534572 | 2837 | 7469 | 11713 | 16343, 16345, | 21169 | 24413177 |
| | | | | 16423 | | |
| 22534573 | 2839 | 7471 | 11715 | 16347 | 21171 | 24413178 |
| — | 2841, 2843 | 7473, 7475 | 11717 | 16349 | 21173 | 24413179, 24413180 |
| 22534574 | 2845 | 7477 | 11719 | 16351 | 21175 | 24413181 |
| 22534575 | 2847 | 7479 | 11721 | 16353 | 21177 | 24413182 |
| 22534576 | 2849 | 7481 | 11723 | 16355 | 21179 | 24413183 |
| 22534577 | 2851 | 7483 | 11725 | 16357 | 21181 | 24413184 |
| 22534578, 22534581 | 2853 | 7485, 7487 | 11727 | 16359, 16361 | 21183 | 24413185 |
| 22534582 | 2855, 2857 | 7489, 7533 | 11729 | 16363, 17775 | 21185 | 24413186 |
| 22534583 | 2859 | 7491 | 11731 | 16365 | 21187 | 24413187 |
| 22534584 | 2861 | 7493 | 11733 | 16367 | 21189 | 24413188 |
| 22534585 | 2863 | 7495 | 11735 | 16369 | 21191 | 24413189 |
| 22534587 | 2865 | 7497 | 11737 | 16371, 17787 | 21193 | 24413190 |
| 22534588 | 2867, 2869 | 7499, 8689 | 11739 | 16373 | 21195 | 24413191 |
| 22534589 | 2871 | 7501 | 11741 | 16375 | 21197 | 24413192 |
| 22534590 | 2873 | 7503 | 11743 | 16377 | 21199 | 24413193 |
| 22534592 | 2875 | 7505 | 11745 | 16379 | 21203 | 24413194 |
| 22534593 | 2877 | 7507 | 11747 | 16381 | 21205 | 24413195 |
| 22534594 | 2879 | 7509 | 11749 | 16383, 16425 | 21207 | 24413196 |
| 22534595 | 2881 | 7511 | 11751 | 16385, 16427 | 21209, 21211 | 24413197 |
| 22534597 | 2883 | 7515 | 11755 | 16389, 16391 | 21215 | 24413199 |
| 22534598 | 2885 | 7517 | 11757 | 16393 | 21217 | 24413200 |
| — | 2887 | 7519 | 11759 | 16395 | 21219 | 24413201 |
| 22534599 | 2889 | 7521 | 11761 | 16397 | 21221 | 24413202 |
| 22534602 | 2891 | 7525 | 11765 | 16401 | 21225 | 24413203 |
| 22534603 | 2893 | 7527 | 11767 | 16403 | 21227 | 24413204 |
| 22534604 | 2895, 2897 | 7529 | 11769 | 16405 | 21229 | 24413205 |
| 22534605 | 2899 | 7531, 7537 | 11771 | 16407 | 21231, 21243 | 24413206 |
| 22534606 | 2905 | 7539 | 11773 | 16411 | 21233 | 24413207 |
| 22534607, 22534608 | 2907, 2909 | 7541, 7543 | 11775, 11777 | 16413 | 21235, 21237 | 24413208, 24413209 |
| 22534609 | 2911 | 7545 | 11779 | 16415 | 21239 | 24413210 |
| 22534610 | 2913 | 7547 | 11781 | 16417 | 21241 | 24413211 |
| 22534612 | 2915 | 7549 | 11783 | 16419 | 21245, 21247 | 24413212 |
| 22534613 | 2917 | 7551 | 11785 | 16429 | 21249 | 24413213 |
| 22534615 | 2919 | 7553, 7555 | 11787 | 16431, 16433 | 21251 | 24413214 |
| 22534616 | 2921 | 7557 | 11789, 11791 | 16435 | 21253 | 24413215 |
| 22534617 | 2923 | 7559 | 11793 | 16437 | 21255 | 24413216 |
| 22534618 | 2925, 2927 | 7561 | 11795 | 16439 | 21257 | 24413217 |
| 22534619 | 2929 | 7563, 7565 | 11797 | 16441 | 21259, 21261 | 24413218 |
| 22534620 | 2931 | 7567 | 11799 | 16443 | 21263 | 24413219 |
| 22534621 | 2933 | 7569 | 11801, 13037 | 16445 | 21265 | 24413220 |
| 22534622 | 2935 | 7571 | 11803 | 16447 | 21267 | 24413221 |
| 22534623 | 2937 | 7573 | 11805 | 16449 | 21269 | 24413222 |
| 22534624 | 2939 | 7575 | 11807 | 16451, 16453 | 21271 | 24413223 |
| 22534625 | 2941 | 7577 | 11809 | 16455 | 21273 | 24413224 |
| 22534626 | 2943 | 7579 | 11811 | 16457 | 21275 | 24413225 |
| 22534627 | 2945 | 7581 | 11813 | 16459 | 21277 | 24413226 |
| 22534628 | 2947 | 7583 | 11815 | 16461 | 21279 | 24413227 |
| 22534629 | 2949, 4123, | 7585, 7587 | 11817 | 16463 | 21281, 21283 | 24413228 |
| | 4125 | | | | | |
| 22534630 | 2951, 4127 | 7589 | 11819, 11821 | 16465 | 21285 | 24413229 |
| 22534631 | 2953 | 7591 | 11823 | 16467 | — | 24413230 |
| 22534632 | 2955 | 7593 | 11825 | 16469 | 21287 | 24413231 |
| 22534633 | 2957 | 7595 | 11827 | 16471 | 21289 | 24413232 |
| 22534634 | 2959 | 7597 | 11829 | 16473 | 21291 | 24413233 |
| 22534635 | 2961 | 7599, 8713 | 11831 | 16475 | 21293 | 24413234 |
| 22534636 | 2963 | 7601 | 11833 | 16477 | 21295 | 24413235 |
| 22534637 | 2965 | 7603 | 11835 | 16479 | 21297 | 24413236 |
| 22534639 | 2967 | 7605 | 11837, 11841 | 16481 | 21299 | 24413237 |
| 22534640 | 2969 | 7607, 7609 | 11839, 11843 | 16483 | 21301 | 24413238 |
| 22534641 | 2971 | 7611 | 11845 | 15205, 16485 | 21303 | 24413239 |
| 22534642 | 2973 | 7613 | 11847 | 16487, 16535 | 21305 | 24413240 |
| 22534643 | 2975 | 7615 | 11849 | 16489 | 21307 | 24413241 |
| 22534644 | 2977 | 7617 | 11851 | 16491, 16537 | 21309 | 24413242 |
| 22534645 | 2979 | 7619 | 11853 | 16493 | 21311 | 24413243 |
| 22534646 | 2981 | 7621 | 11855 | 16495 | 21313 | 24413244 |
| 22534647 | 2983 | 7623 | 11857 | 16497 | 21315 | 24413245 |
| 22534648 | 2985 | 7625 | 11859 | 16499 | 21317 | — |
| 22534649 | 2987 | 7627 | 11861 | 16501 | 21321 | 24413246 |
| 22534651 | 2989 | 7629 | 11863 | 16503 | 21323, 21359 | 24413247 |
| 22534652 | 2991 | 7631 | 11865 | 16505 | 21325 | 24413248 |
| 22534653 | 2993 | 7633 | 11867 | 16507 | 21327 | 24413249 |
| 22534654 | 2995 | 7635 | 11869 | 16509 | 21329 | 24413250 |
| 22534655 | 2997 | 7637 | 11871 | 16511 | 21331 | 24413251 |
| 22534656 | 2999 | 7639 | 11873 | 16513 | 21333 | 24413252 |
| 22534658 | 3001 | 7641 | 11875 | 16515 | 21335 | 24413253 |
| 22534659 | 3003 | 7643, 7645 | 11877 | 16517 | 21337 | 24413254 |
| 22534660 | 3005 | 7647 | 11879, 13111 | 16519 | 21339 | 24413255 |
| 22534661 | 3007 | 7649 | 11881 | 16521 | 21341 | 24413256 |
| 22534662 | 3009 | 7651 | 11883 | 16523 | 21343 | 24413257 |
| 22534668 | 3011 | 7663 | 11895 | 16541 | 21361 | 24413263 |
| 22534669 | 3013 | 7665 | 11897 | 16543 | 21363 | 24413264 |
| 22534670 | 3015 | 7667 | 11899 | 16545 | 21365 | 24413265 |
| 22534671 | 3017 | 7669 | 11901 | 16547 | 21367 | 24413266 |
| 22534672 | 3019 | 7671 | 11903 | 16549, 17843 | 21369 | 24413267 |
| 22534673 | 3021 | 7673 | 11905 | 16551 | 21371 | 24413268 |
| 22534674 | 3023 | 7675 | 11907 | 16553 | 21373 | 24413269 |
| 22534675 | 3025 | 7677 | 11909 | 16555 | 21375 | 24413270 |
| 22534677 | 3027 | 7681 | 11913 | 16559 | 21377 | 24413271 |
| 22534679 | 3029 | 7683 | 11915 | 16573 | 21379 | 24413272 |
| 22534680 | 3031 | 7685 | 11917 | 16575 | 21381 | 24413273 |
| 22534681 | 3033 | 7687 | 11919 | 16577 | 21383 | — |
| 22534682 | 3035 | 7689 | 11921 | 16579, 16581 | 21385 | 24413274 |
| 22534683 | 3037 | 7691 | 11923 | 16583 | 21387 | 24413275 |
| 22534684 | 3039 | 7693 | 11925 | 16585 | 21389 | 24413276 |
| 22534685 | 3041 | 7695 | 11927 | 16587 | 21391 | 24413277 |
| 22534687 | 3043 | 7697 | 11929 | 16589 | 21393 | 24413278 |
| 22534688, 22535015 | 3045, 3563, | 7699, 8243 | 11931, 12513 | 16591, 16593, | 21395, 21937 | 24413279, 24413539 |
| | 3565, 4071 | | | 17199, 17231 | | |
| 22534689 | 3047 | 7701 | 11933 | 16595 | 21397 | 24413280 |
| 22534690 | 3049 | 7703 | 11935 | 16597 | 21399 | 24413281 |
| 22534691 | 3051 | 7705, 7707 | 11937 | 16599 | 21401 | 24413282 |
| 22534692 | 3053 | 7709 | 11939 | 16601 | 21403 | 24413283 |
| 22534699 | 3055 | 7725 | 11953 | 16615 | 21421 | 24413290 |
| 22534700 | 3057, 4169 | 7727 | 11955 | 16617 | 21423, 21439 | 24413291 |
| 22534701 | 3059, 4171 | 7729 | 11957 | 16619 | 21425 | 24413292 |
| 22534702 | 3061 | 7731 | 11959 | 16621 | 21427 | 24413293 |
| 22534703 | 3063 | 7733 | 11961, 11963 | 16623 | 21429, 21441 | 24413294 |
| 22534704 | 3065 | 7735 | 11965 | 16625 | 21431 | 24413295 |
| 22534705 | 3067 | 7737 | 11967 | 16627 | 21433 | 24413296 |
| 22534708 | 3069 | 7743 | 11973 | 16633, 16639, | 21445 | 24413299 |
| | | | | 16641 | | |
| 22534709 | 3071 | 7745 | 11975 | 16635 | 21447, 22613 | 24413300 |
| 22534711, 22534768 | 3073, 3163 | 7747, 7873 | 11977, 12089 | 16637, 16643, | 21449, 21557 | 24413301, 24413358 |
| | | | | 16753 | | |
| 22534712 | 3075 | 7749, 7751 | 11979 | 16645 | 21451 | 24413302 |
| 22534719 | 3077 | 7765 | 11999 | 16659 | 21465 | 24413309 |
| 22534720 | 3079 | 7767, 7771 | 12001 | 16661 | 21467 | 24413310 |
| 22534721 | 3081 | 7769, 7773, | 12003 | 16663 | 21469, 21477 | 24413311 |
| | | 7775 | | | | |
| 22534722 | 3083 | 7777 | 12005 | 16665 | 21471 | 24413312 |
| 22534723 | 3085 | 7779 | 12007 | 16667 | 21473 | 24413313 |
| 22534724 | 3087 | 7781 | 12009 | 16669 | 21475, 21481 | 24413314 |
| 22534725 | 3089 | 7785 | 12011 | 16671 | 21483 | 24413315 |
| 22534726 | 3091 | 7783, 7787 | 12013 | 16673 | 21485 | 24413316 |
| 22534728 | 3093 | 7789 | 12015 | 16675 | 21487 | 24413317 |
| 22534729 | 3095 | 7791 | 12017 | 16677 | 21489 | 24413318 |
| 22534730 | 3097 | 7793 | 12019 | 16679 | 21491 | 24413319 |
| 22534739 | 3103 | 7817 | 12031 | 16691 | 21505 | 24413330 |
| — | 3105, 3107 | 7819 | 12033 | 16693 | 21507, 21509 | 24413331 |
| 22534740 | 3109 | 7821 | 12035 | 16695, 16707 | 21511, 22627 | 24413332 |
| 22534741 | 3111 | 7823 | 12037, 12039 | 16697, 16699 | 21513, 21517 | 24413333 |
| 22534743 | 3113 | 7825 | 12041 | 16701, 16709 | 19293, 21519 | 24413334 |
| 22534744 | 3115 | 7827 | 12043 | 16703, 16711 | 19291 | 24413335 |
| 22534745 | 3117 | 7829 | 12045 | 16705, 16713 | 19289 | 24413336 |
| 22534746 | 3119 | 7831 | 12047 | 17903 | 19287 | 24413337 |
| 22534748 | 3123 | 7835 | 12051 | — | 19281 | 24413339 |
| 22534749 | 3125 | 7837 | 12053 | 16715 | 19279, 21521 | 24413340 |
| 22534750 | 3127 | 7839 | 12055 | 16717 | 21523 | 24413341 |
| 22534751 | 3129 | 7841 | 12057 | 16719 | 21525 | 24413342 |
| 22534752 | 3131 | 7843, 7887 | 12059 | 16721 | 21527 | 24413343 |
| 22534753 | 3133 | 7845, 7889 | 12061 | 16723, 16735 | 21529, 21573 | 24413344 |
| 22534755 | 3135 | 7847 | 12063 | 16725 | 21531 | 24413345 |
| 22534756 | 3137 | 7849 | 12065 | 16727 | 21533 | 24413346 |
| 22534757 | 3139 | 7851 | 12067 | 16729 | 21535 | 24413347 |
| 22534758 | 3141 | 7853, 7891 | 12069 | 16731 | 21537 | 24413348 |
| 22534759 | 3143 | 7855 | 12071 | 16733 | 21539 | 24413349 |
| 22534760 | 3145 | 7857 | 12073 | 16737 | 21541 | 24413350 |
| 22534761 | 3147 | 7859 | 12075 | 16739 | 21543 | 24413351 |
| 22534762 | 3149 | 7861 | 12077 | 16741 | 21545 | 24413352 |
| 22534763 | 3151 | 7863 | 12079 | 16743 | 21547 | 24413353 |
| 22534764 | 3153 | 7865 | 12081 | 16745 | 21549 | 24413354 |
| 22534765 | 3155 | 7867 | 12083 | 16747 | 21551 | 24413355 |
| 22534766 | 3157 | 7869 | 12085 | 16749 | 21553 | 24413356 |
| 22534767 | 3159, 3161 | 7871 | 12087 | 16751 | 21555 | 24413357 |
| 22534769 | 3165, 3167 | 7875 | 12091, 12093 | 16755 | 21559 | 24413359 |
| 22534770 | 3169 | 7877 | 12095 | 16757 | 21561 | 24413360 |
| 22534771 | 3171 | 7879 | 12097 | 16759 | 21563 | 24413361 |
| 22534772 | 3173 | 7881 | 12099 | 16761 | 21565 | 24413362 |
| 22534773 | 3175, 4065 | 7883 | 12101 | 16763 | 21567 | 24413363 |
| 22534774 | 3177, 3179, | 7885, 7893 | 12103 | 16765 | 21569 | 24413364 |
| | 3683, 4067 | | | | | |
| 22534775 | 3181 | 7895 | 12105, 12159 | 16767 | 21571, 21575 | 24413365 |
| 22534776 | 3183 | 7897 | 12107 | 16769, 16795 | 21577 | 24413366 |
| 22534777 | 3185, 3187 | 7899 | 12109 | 16771, 17829 | 21579, 21595, | 24413367 |
| | | | | | 21597 | |
| 22534779 | 3189 | 7901 | 12111 | 16773 | 21581 | 24413368 |
| 22534781 | 3191 | 7145, 7905 | 12115 | 16777 | 21585 | 24413370 |
| 22534782 | 3193 | — | — | 16779 | 22583 | — |
| 22534783 | 3195 | 7907 | 12151 | 16781 | 21601 | 24413371 |
| 22534784 | 3197 | 7909 | 12153 | 16783 | 21603 | 24413372 |
| 22534785 | 3199 | 7911 | 12155 | 16785, 16787 | 21605 | 24413373 |
| 22534786 | 3201 | 7913 | 12157 | 16789 | 21607 | 24413374 |
| 22534787 | 3203 | 7915 | 12161 | 16791 | 21609 | 24413375 |
| 22534792 | 3207 | 6301 | 12169 | 16803 | 21617 | 24413379 |
| 22534793 | 3209, 3211 | 6303, 8769 | 12171 | 16805, 16827 | 21619 | 24413380 |
| 22534794 | 3213 | 6305 | 12173 | 16807 | 21621 | 24413381 |
| 22534795 | 3215 | 6307 | 12175 | 16809, 16811 | 21623 | 24413382 |
| 22534796 | 3217 | 6309 | 12177 | 16813 | 21625 | 24413383 |
| 22534797 | 3219 | 6311 | 12179 | 16815 | 21627 | 24413384 |
| 22534798 | 3221 | 6313 | 12181 | 16817 | 21629 | 24413385 |
| 22534799 | 3223 | 6315 | 12183 | 16819 | 21631 | 24413386 |
| 22534800 | 3225 | 6317 | 12185 | 16821 | 21633 | 24413387 |
| 22534801 | 3227 | 6319 | 12187 | 16823 | 21635 | 24413388 |
| 22534802 | 3229 | 6321 | 12189 | 16825, 16829 | 21637 | 24413389 |
| 22534804 | 3231 | 6323, 7921 | 12191, 12193, | 16831 | 21639 | 24413390 |
| | | | 12195 | | | |
| 22534805 | 3233 | 7923, 7925 | 12197 | 16833 | 21641 | 24413391 |
| 22534807 | 3237 | 7929, 7931 | 12203 | 16839, 16841 | 21645 | 24413393 |
| 22534808 | 3239 | 7933 | 12205 | 16843 | 21647 | 24413394 |
| 22534809 | 3241 | 7935 | 12207 | 16845 | 21649 | 24413395 |
| 22534810 | 3243 | 7937 | 12209 | 16847 | 21651 | 24413396 |
| 22534811 | 3245 | 7939 | 12211 | 16849 | 21653 | 24413397 |
| 22534812 | 3247 | 7941 | 12213 | 16851 | 21655 | 24413398 |
| 22534813 | 3249 | 7943 | 12215 | 16853 | 21657 | 24413399 |
| 22534814 | 3251 | 7945 | 12217 | 16855 | 21659 | 24413400 |
| 22534815 | 3253 | 7947 | 12219 | 16857 | 21661 | 24413401 |
| 22534816 | 3255, 3257 | 7949 | 12221 | 16859 | 21663 | 24413402 |
| 22534817 | 3259 | — | — | 16861, 16891 | — | — |
| 22534819 | 3265 | 7955 | 12227 | 16865, 16895 | 21669 | 24413405 |
| 22534820 | 3267 | 5077, 7957 | 12229 | 16867 | 21671 | 24413406 |
| 22534821 | 3269 | 7959 | 12231 | 16869 | 21673 | 24413407 |
| 22534822 | 3271 | 7961 | 12233, 12249 | 16871, 16873 | 21675 | 24413408 |
| 22534823 | 3273 | 7963 | 12235, 12251 | 16875 | 21677 | 24413409 |
| 22534824 | 3275 | 7965 | 12237 | 16877 | 21679 | 24413410 |
| 22534825 | 3277 | 7967 | 12239 | 16879 | 21681 | 24413411 |
| 22534826 | 3279 | 7969 | 12241 | 16881 | 21683 | 24413412 |
| 22534827 | 3281 | 7971 | 12243 | 16883 | 21685 | 24413413 |
| 22534829 | 3283 | 7973 | 12245 | 16885 | 21687 | 24413414 |
| 22534830 | 3285 | 7975 | 12247 | 16887 | 21689 | 24413415 |
| 22534831 | 3287 | 7977 | 12253 | 16889 | — | 24413416 |
| 22534832 | 3289, 3291 | 7979 | 12255, 12257 | 16897, 17773 | 21691 | 24413417 |
| 22534834 | 3295 | 7981 | 12259 | 16903 | 21693 | 24413418 |
| 22534835 | 3297 | 7983, 7985 | 12261 | 16905 | 21695 | 24413419 |
| 22534836 | 3299 | — | — | — | — | — |
| 22534837 | 3301, 3969, | 7987 | 12263 | 16907, 16909, | 21697 | 24413420 |
| | 3973 | | | 17749 | | |
| 22534838 | 3303 | 7989 | 12265 | 16911 | 21699 | 24413421 |
| 22534839 | 3305 | 7991 | 12267, 12301 | 16913 | 21701 | 24413422 |
| 22534840 | 3307 | 7993 | 12269 | 16915 | 21703, 21705 | 24413423 |
| 22534841 | 3309, 3311 | 7995 | 12271 | 16917 | 21707 | 24413424 |
| 22534842 | 3313 | 7997 | 12273 | 16919, 16947 | 21709 | 24413425 |
| 22534843 | 3315, 3317 | 7999 | 12275 | 16921 | 21711 | 24413426 |
| 22534844 | 3319 | 8001 | 12277 | 16923 | 21713 | 24413427 |
| 22534845 | 3321 | 8003 | 12279 | 16925 | 21715, 21717 | 24413428 |
| 22534847 | 3323 | 8005 | 12281 | 16927 | 21719 | 24413429 |
| 22534848 | 3325 | 8007 | 12123, 12283 | 16929 | 21721, 22431 | 24413430 |
| 22534849 | 3327 | 8009 | 12285 | 16931 | 21723 | 24413431 |
| 22534850 | 3329 | 8011 | 12287 | 16933 | 21725 | 24413432 |
| 22534851 | 3331 | 8013 | 12289 | 16935 | 21727 | 24413433 |
| 22534852 | 3333 | 8015 | 12291 | 16937 | 21729 | 24413434 |
| 22534853 | 3335 | 8017, 8021 | 12293 | 16939 | 21731 | 24413435 |
| 22534854 | 3337 | 8019, 8023 | 12295 | 16941, 16945, | 21733 | 24413436 |
| | | | | 16949 | | |
| 22534855 | 3339 | 8025 | 12297 | 16951 | 21735 | 24413437 |
| 22534857 | 3341 | 8029 | 12303 | 16955 | 21739, 21741 | 24413440 |
| 22534858 | 3343 | 8031 | 12305 | 16957 | 21743 | 24413441 |
| 22534859 | 3345 | 8033 | 12311 | 16959 | 21745 | 24413442 |
| 22534860 | 3347, 3349, | 8035 | 12313 | 16961 | 21747, 21749 | 24413443 |
| | 3351 | | | | | |
| 22534861 | 3353 | 8037 | 12315 | 16963 | 21751, 21755 | 24413444 |
| 22534862 | 3355 | 8039, 8059 | 12317 | 16965 | 21753, 21757 | 24413445 |
| 22534864 | 3359 | 8043 | 12321 | 16969, 17757 | 21761 | 24413447 |
| 22534865 | 3361 | 8045 | 12323 | 16971 | 21763 | 24413448 |
| 22534866 | 3363 | 8047 | 12325 | 16973 | 21765 | 24413449 |
| 22534867 | 3365 | 8049 | 12327 | 16975 | 21767 | 24413450 |
| 22534868 | 3367 | 8051 | 12329 | 16977 | 21769 | 24413451 |
| 22534870 | 3369 | 8053 | 12331 | 16979 | 21771 | 24413452 |
| 22534871 | 3371 | 8055 | 12333 | 16981, 16983 | 21773 | 24413453 |
| 22534872 | 3373 | 8057 | 12335 | 16985 | 21775 | 24413454 |
| 22534873 | 3375 | 8061 | 12337 | 16987 | 21777 | 24413455 |
| 22534874 | 3377 | 8063 | 12339 | 16989 | 21779 | 24413456 |
| 22534927 | 3379, 3381, | 8065 | 12341 | 16991 | 21781, 22593 | 24413457 |
| | 3383 | | | | | |
| 22534928 | 3385 | 8067 | 12343 | 16993 | 21783 | 24413458 |
| 22534929 | 3387 | 8069 | 12345 | 16995 | 21785 | 24413459 |
| 22534932 | 3391 | 8073 | 12349 | 16999 | 21789 | 24413461 |
| 22534933 | 3393 | 8075 | 12351 | 17001 | 21791 | 24413462 |
| 22534935 | 3395 | 8079 | 12355 | 17005 | 21795 | 24413463 |
| 22534936 | 3397 | 8081 | 12357 | 17007 | 21797 | 24413464 |
| 22534937 | 3399 | 8083 | 12359 | 17009 | 21799 | 24413465 |
| 22534938 | 3401 | 8085 | 12361 | 17011 | 21801 | 24413466 |
| 22534939 | 3403 | 8087 | 12363 | 17013 | — | 24413467 |
| 22534940 | 3405 | 8089 | 12365 | 17015 | — | 24413468 |
| 22534941 | 3407 | 8091 | 12367 | 17017 | — | 24413469 |
| 22534942 | 3409 | 8093 | 12369 | 17019 | — | 24413470 |
| 22534943 | 3411 | 8095 | 12371 | 17021 | — | 24413471 |
| 22534945 | 3413 | 8097 | 12373 | 17023 | — | 24413472 |
| 22534946 | 3415 | 8099 | 12375 | 17025 | — | 24413473 |
| 22534947 | 3417 | 8101 | 12377 | 17027 | — | 24413474 |
| 22534948 | 3419 | 8103 | 12379 | 17029 | — | 24413475 |
| 22534949 | 3421, 3423 | 8105 | — | 17031, 17033 | 21803 | 24413476 |
| 22534950 | 3425 | 8107 | 12381 | 17035 | 21805 | 24413477 |
| 22534951 | 3427 | 8109 | 12383 | 17037 | 21807 | 24413478 |
| 22534952 | 3429 | 8111, 8113 | 12385, 12399 | 17039, 17043, | 21809, 21821 | 24413479 |
| | | | | 17935 | | |
| 22534954 | 3431 | 8115 | 12387 | 17041, 17045 | 21811 | 24413480 |
| 22534955 | 3433 | 8117 | 12389 | 17047, 17049 | 21813 | 24413481 |
| 22534956 | 3435 | 8119 | 12391, 12401 | 17051 | 21815 | 24413482 |
| 22534957 | 3437 | 8121 | 12393 | 17053 | 21817 | 24413483 |
| 22534958 | 3439 | 8123 | 12395 | 17055, 17057 | 21819 | 24413484 |
| 22534960 | 3441 | 8127 | 12405 | 17061 | 21825 | 24413486 |
| 22534961 | 3443 | 8129 | 12407 | 17063 | 21827 | 24413487 |
| 22534962 | 3445 | 8131 | 12409 | 17065 | 21829 | 24413488 |
| 22534963 | 3447 | 8133 | 12411 | 17067 | 21831 | 24413489 |
| 22534964 | 3449 | 8135 | 12413 | 17069 | 21833, 21969 | 24413490 |
| 22534965 | 3451, 3455 | 8137 | 12415 | 17071 | 18919, 21835 | 24413491 |
| 22534966 | 3453, 3457 | 8139 | 12417 | 17073 | 21837 | 24413492 |
| 22534967 | 3459 | 8141 | 12419 | 17075, 17157 | 21839, 21971 | 24413493 |
| 22534968 | 3461 | 8143 | 12421 | 17077 | 21841 | 24413494 |
| 22534969 | 3463 | 8145 | 12423 | 17079 | 21843 | 24412908, 24413495 |
| 22534970 | 3465 | 8147 | 12425 | 17081 | 21845 | 24412913, 24413496 |
| 22534972 | 3473 | 8151 | 12429 | 17089 | 21849 | 24412915, 24413498 |
| 22534715, 22534973 | 3475 | 7757, 8153 | 11989, 12431 | 16651, 17091, | 21457, 21851 | 24412916, 24413305, |
| | | | | 17833 | | 24413499 |
| 22534975 | 3477 | 8155 | 12433 | 17093 | 21853 | 24413500 |
| 22534976 | 3479 | 8157, 8159, | 12435 | 17097 | 21855 | 24413501 |
| | | 8161 | | | | |
| 22534977 | 3481 | 8163 | 12437 | 17099 | 21857 | 24413502 |
| 22534978 | 3483 | 8165 | 12439 | 17101 | 21859 | 24413503 |
| — | 3485, 3489 | 8169, 8171 | 12443 | 17105 | 21863 | 24413505 |
| 22534980 | 3491 | 8173 | 12445 | 17107 | 21865 | 24413506 |
| 22534981 | 3493 | 6191 | 12447 | 17109 | 21867 | 24413507 |
| 22534982 | 3495, 3497 | 6193 | 12449 | 17111 | 21869, 21973 | 24413508 |
| 22534983 | 3499 | 8183 | 12451 | 17113, 17159 | 21871 | 24413509 |
| 22534984 | 3501 | 8185 | 12453 | 17115, 17161 | 21873 | 24413510 |
| 22534985 | 3503 | 8187 | 12455 | 17117, 17163 | 21875 | 24413511 |
| 22534986 | 3505 | 8189 | 12457 | 17119 | 21877 | 24413512 |
| 22534987 | 3507 | 8191 | 12459 | 17121 | 21879 | 24413513 |
| 22534988 | 3509 | 8193 | 12461 | 17123 | 21881 | 24413514 |
| 22534989 | 3511 | 8195 | 12463 | 17125 | 21883 | 24413515 |
| 22534991 | 3513 | 8197 | 12465 | 17127, 17165 | 21885 | 24413516 |
| 22534992 | 3515 | 8199 | 12467 | 17129, 17167 | 21887 | 24413517 |
| 22534993 | 3517 | 8201 | 12469 | 17131 | 21889 | 24413518 |
| 22534995 | 3521 | 8205 | 12473 | 17135, 17169 | 21893 | 24413520 |
| 22534997 | 3523 | 8209 | 12477 | 17139 | 21897, 21899 | 24413521 |
| 22534998 | 3525 | 8211 | 12479 | 17141 | 21901 | 24413522 |
| — | 3527 | 8213 | 12483 | 17145 | 21905, 22551 | 24413523 |
| 22534999 | 3529 | 8215 | 12485 | 17147 | 21907, 21909 | 24413524 |
| 22535000 | 3531 | 8217 | 12487 | 17149, 17171 | 21911 | 24413526 |
| 22535001 | 3533 | 8219 | 12489 | 17151, 17173 | 21913 | 24413527 |
| 22535002 | 3535 | 8221 | 12491 | 17155, 17175 | 21915 | 24413528 |
| 22535003 | 3537 | 8223 | 12493 | 17177 | 21917 | 24413529 |
| 22535004 | 3539 | 8225 | 12495 | 17179 | 21919 | 24413530 |
| 22535005 | 3541 | 8227 | 12497 | 17181 | 21921 | 24413531 |
| 22535006 | 3543 | 8229 | 12499 | 17183, 17225 | 21923 | 24413532 |
| 22535007 | 3545 | 8231 | 12501 | 17185, 17227 | 21925 | 24413533 |
| 22535009 | 3549, 4013 | 8235 | 12505 | 17189, 17191 | 21929 | 24413535 |
| 22535010 | 3551, 3553, | 8237 | 12507 | 17193 | 21931 | 24413536 |
| | 4015 | | | | | |
| 22535011 | 3555, 3559 | 8239 | 12509 | 17195 | 21933 | 24413537 |
| 22535012 | 3557, 3561 | 8241 | 12511 | 17197 | 21935 | 24413538 |
| 22535016 | 3567, 4069 | 8245 | 12515 | 17201, 17233 | 21939 | 24413540 |
| 22535017 | 3569 | 8247 | 12517 | 17203 | 21941 | 24413541 |
| 22535018 | 3571 | 8249 | 12519 | 17205 | 21943 | 24413542 |
| 22535019 | 3573, 3575 | 8251 | 12521 | 17207 | 21945 | 24413543 |
| 22535020 | 3577, 3579 | 8253 | 12529 | 17209 | 21947 | 24413544 |
| 22535021 | 3581 | 8255 | 12531 | 17211 | 21949 | 24413545 |
| 22535037 | 3585 | 8259 | — | 17217 | — | 23094905 |
| 22535038 | 3587 | 8261 | — | 17219 | — | — |
| 22535039 | 3589 | 8265, 8271 | — | 17221 | — | 23094903 |
| 22535040 | 3591 | 8273 | — | 17223, 17235 | — | 23094902 |
| 22535041 | 3593, 3595 | 8275 | — | 17237 | — | 23094901 |
| 22535044 | 3597 | 8277 | — | 17239 | — | — |
| 22535045 | 3599, 3601 | 8279 | — | 17241, 17243 | — | — |
| 22535048 | 3603 | 8281 | — | 17245 | — | — |
| 22535049 | 3605 | 8283 | — | 17247 | — | — |
| 22535050 | 3607 | 8285 | — | 17249 | — | — |
| 22535056 | 3609 | — | — | — | — | — |
| 22535057 | 3611 | — | — | 17261, 17263 | — | — |
| 22535058 | 3613 | 8299 | — | 17265 | — | — |
| 22535059 | 3615 | 8301 | — | 17267 | — | — |
| 22535060 | 3617 | 8303 | — | 17269 | — | — |
| 22534280, 22535067 | 3629, 3643, | 8351 | — | 17307 | 20579, 22701 | — |
| | 4115 | | | | | |
| 22535062 | 3633, 3635 | 6989, 8307 | — | 17273 | — | — |
| 22535063 | 3637 | 6987, 8309 | — | 17275 | — | — |
| 22535064 | 3639 | 8311 | — | 17277 | — | 23094819, 23095132, |
| | | | | | | 23095439, |
| | | | | | | 23095618 |
| 22534279, 22535065 | 3641 | 8349 | — | 17305 | 20577 | — |
| 22534281, 22535068 | 3645, 4117 | 8353 | — | 17309, 17851 | 20581 | — |
| 22535070 | 3651 | 8357 | — | 17313 | 22267 | 24413566 |
| 22535071 | 3653 | 8359 | — | 17315 | 21983, 21987 | 24413567 |
| 22535073 | 3655 | 8363 | 12563 | 17337, 17371 | 21989 | 24413568 |
| 22535075 | 3657 | — | 12565 | 17341 | 21993 | 24413570 |
| 22535076 | 3659 | 8367, 8675 | 12567 | 17343 | 21995 | 24413571 |
| 22535077 | 3661 | 8369 | 12569, 12571 | 17345 | 21997 | 24413572 |
| 22535022, 22535078 | 3663 | 8371 | 12573 | 17347 | 21999, 22019, | 24413573 |
| | | | | | 22609 | |
| 22535023, 22535079 | 3665 | 8373 | 12575 | 17349 | 22001, 22607 | 24413574 |
| 22535025, 22535081 | 3667 | 8377 | 12579 | 17353 | 22005 | 24413575 |
| 22535082 | 3669 | 8379 | 12581 | 17359 | 22007 | 24413576 |
| 22535026, 22535083 | 3671 | 8381 | 12583 | 17361 | 22009 | 24413577 |
| 22535027, 22535084 | 3673 | 8383 | 12585 | 17363 | 22011, 22677 | 24413578 |
| 22535085 | 3675, 3677, | 8385 | 12587 | 17365 | 22013 | 24413579 |
| | 4173 | | | | | |
| 22535087 | 3681 | 8347, 8389 | 12591 | 17303, 17369 | 22017 | 24413581 |
| 22535089 | 3685 | 8393 | 12593 | 17377, 17409 | — | 24413582 |
| 22535090 | 3687 | 8395 | 12595 | 17379 | 22021 | 24413583 |
| 22535092 | 3689 | 8397 | 12597 | 17381 | 22023 | 24413584 |
| 22535093 | 3691, 3693 | 8399 | 12599, 12621 | 17383, 17411, | 22025 | 24413585 |
| | | | | 17413 | | |
| 22535094 | 3695 | 8401 | 12601 | 17385, 17415 | 22027, 22053 | 24413586 |
| 22535095 | 3697 | 8403 | 12603 | 17387 | 22029 | 24413587 |
| 22535096 | 3699 | 8405 | 12607 | 17391 | 22033 | 24413588 |
| 22535099 | 3703 | 8411 | 12611 | 17395, 17397 | 22037 | 24413590 |
| 22535100 | 3705 | 8413 | 12613 | 17399 | 22039, 22055 | 24413591 |
| 22535101 | 3707 | 8415 | 12615 | 17401, 17417 | 22041 | 24413592 |
| 22535102 | 3711 | 8419 | 12619 | 17405, 17421 | 22045 | 24413593 |
| 22535103 | 3713 | 8421 | 12623 | 17423 | 22047 | 24413594 |
| 22535104 | 3715 | 8423 | 12625, 12627 | 17425 | 22049 | 24413595 |
| 22535106 | 3717 | 8425 | — | 17427 | — | 24413596 |
| 22535107 | 3719 | 8427 | — | 17429 | — | 24413597 |
| 22535108 | 3721 | 8429 | 12629 | 17431 | 22051 | 24413598 |
| 22535109 | 3723 | 8431, 8433 | 12631, 12633 | 17433 | 22057 | 24413599 |
| 22535110 | 3725 | 8435 | 12635 | 17435 | 22059 | 24413600 |
| 22535111 | 3727 | — | — | — | — | — |
| 22535112 | 3729 | 8437, 8497 | 12637 | 17437 | 22061 | 24413601 |
| 22535113 | 3731 | 8439 | 12639 | 17439 | 22063 | 24413602 |
| 22535114 | 3733 | 8441 | 12641 | 17441, 17871 | 22065 | 24413603 |
| 22535116 | 3741 | 8445 | 12645 | 17445 | 22069 | 24413605 |
| 22535117 | 3743 | 8447, 8449 | 12647, 12649 | 17447, 17457 | 22071 | 24413606 |
| 22535118 | 3745 | 8451 | 12651 | 17449, 17459 | 22073 | 24413607 |
| 22535119 | 3747 | 8453 | 12653 | 17451 | 22075 | 24413608 |
| 22535120 | 3749 | 8455 | 12655 | 17453 | 22077, 22079 | 24413610 |
| 22535121 | 3751 | 8457 | 12657 | 17455 | 22081 | 24413611 |
| 22535122 | 3753 | 8459 | 12659 | 17461 | 22083 | 24413612 |
| 22535123 | 3755 | 8461 | 12661 | 17463 | 22085, 22087 | 24413613 |
| 22535124 | 3757 | 8463 | 12663 | 17465 | 22089 | 24413614 |
| 22535126 | 3759 | 8465, 8733 | 12665 | 17467 | 22091 | 24413616 |
| 22533224, 22535134 | 3761 | 4781, 8481 | 9205, 12681, | 17485 | 18369, 22107 | 24413624 |
| | | | 12683 | | | |
| 22535135 | 3763 | 8483 | 12685 | 17487 | 22109 | — |
| 22535136 | 3765 | 8485 | 12687 | 17489 | 22111 | 24413625 |
| 22535137 | 3767 | 8487 | 12689 | 17491 | 22113 | 24413626 |
| 22535138 | 3769 | 8489 | 12691 | 17493 | 22115 | 24413627 |
| 22535139 | 3771 | 8491 | 12693 | 17495 | 22117 | 24413628 |
| 22535140 | 3773 | 6449, 8493 | 12695 | 17497 | 22119 | 24413629 |
| — | 3775, 3777 | 6445, 6447 | 12697 | 17499 | 22121 | 24413630 |
| 22535141 | 3779 | 6443, 7353, | 12699 | 17501 | 22123 | 24413631 |
| | | 8781 | | | | |
| 22535142 | 3781 | 6441 | 12701 | 17503 | 21975, 22181 | 24413632 |
| 22535143 | 3783 | 6439 | 12703 | 17505 | 22183 | 24413633 |
| 22535144 | 3785 | 6437 | 12705 | 17507 | 22185 | 24413634 |
| 22535146 | 3787 | 6433 | 12709 | 17511, 17781 | 22189 | 24413635 |
| 22535147 | 3789 | 6431 | 12711 | 17513 | 22137, 22139, | 24413636 |
| | | | | | 22191 | |
| 22535148 | 3791 | 6429 | 12713 | 17515 | 22193 | 24413637 |
| 22535150 | 3793, 4109 | 6427 | 12715 | 17517 | 22195 | 24413638 |
| 22535151 | 3795 | 6425 | 12717 | 17519 | 22197 | 24413639 |
| 22535152 | 3797 | 6423 | 12719 | 17521 | 22199 | 24413640 |
| 22535153 | 3799 | 6421 | 12721 | 17523 | 22201 | 24413641 |
| 22535154 | 3801 | 6419 | 12723 | 17525 | 22203 | 24413642 |
| 22535155 | 3803 | 6417 | 12725 | 17527 | 22141, 22205 | 24413643 |
| 22535156 | 3805 | 8645 | 12727 | 17529 | 22143, 22207 | 24413644 |
| 22535157 | 3807 | 8643 | 12729 | 17531 | 22209 | 24413645 |
| 22535168 | 3809 | 8515 | 12757 | 17553 | 22231 | 24413659 |
| 22535169 | 3811 | 8517 | 12759 | 17555 | 22233 | 24413660 |
| 22535170 | 3813 | 8519 | 12761 | 17557, 17575, | 22235 | 24413661 |
| | | | | 17813 | | |
| 22535171 | 3815 | 8521 | 12763 | 17559 | 22237 | 24413662 |
| 22535173 | 3817 | 8523 | 12765 | 17561 | 22239 | 24413663 |
| 22535174 | 3819 | 8525 | 12767 | 17563, 17577, | 22241 | 24413664 |
| | | | | 17579, 17581, | | |
| | | | | 17883 | | |
| 22535175 | 3821 | 8527 | 12769 | 17565, 17583 | 22243 | 24413665 |
| 22535177 | 3823 | 8531 | 12773 | 17569, 17585 | 22247 | 24413667 |
| 22535178 | 3825 | 8533 | 12775, 12777 | 17571 | 22249 | 24413668 |
| 22535179 | 3827 | 8535 | 12779 | 17573, 17587 | 22251, 22289, | 24413669 |
| | | | | | 22291, 22665 | |
| 22535180 | 3829 | 8537 | 12781 | 17589, 17633 | 22253 | 24413670 |
| 22535181 | 3831 | 8539 | 12783 | 17591, 17635 | 22255 | 24413671 |
| 22535182 | 3833 | 8541 | 12787 | 17593, 17899 | 22257 | 24413672 |
| — | 3835 | — | — | 17637, 17823 | 22295 | 23095622 |
| — | 3839 | — | — | 17641 | — | — |
| — | 3841 | — | — | 17643 | — | — |
| — | 3843 | — | — | 17645 | 22299 | — |
| — | 3845 | — | 12831 | 17647 | 22301 | — |
| 22535185 | 3847 | 8547 | 12833 | 17649 | 22303 | 24413675 |
| 22535186 | 3849 | 8549 | 12835 | 17651 | 22305 | 24413676 |
| 22534913, 22535187 | 3851, 3853, | 8551 | 12837, 12839 | 17653 | 22307 | 24413677 |
| | 3855, 3857 | | | | | |
| 22535188 | 3859 | 8553 | 12841, 12843 | 17655 | 22309, 22313 | 24413678 |
| 22535189 | 3861, 3863 | 8555 | 12845 | 17657 | 22311, 22315 | 24413679 |
| 22535190 | 3865 | 6941, 8557 | 12847 | 17659 | 22317 | 24413680 |
| 22535192 | 3867 | 7535, 8559 | 12849 | 17661 | 22319 | 24413681 |
| 22535193 | 3869 | 8561 | 12851, 12873 | 17663 | 22321 | 24413682 |
| 22535194 | 3871 | 8563 | 12853 | 17665 | 22323 | 24413683 |
| 22535195 | 3873 | 8565 | 12855 | 17667 | 22325 | 24413684 |
| 22535196 | 3875 | 8567 | 12857 | 17669 | 22327 | 24413685 |
| 22535197 | 3877 | 8569 | 12859 | 17671, 17673 | 22329 | 24413686 |
| 22535198 | 3879 | 8571 | 12861 | 17675 | 22331 | 24413687 |
| 22535199 | 3881 | 8573 | 12863 | 17677 | 22333 | 24413688 |
| 22535200 | 3883 | 8575 | 12865, 12867 | 17679 | 22335 | 24413689 |
| 22535201 | 3885 | 8577 | 12869 | 17681 | 22337 | 24413690 |
| 22535202 | 3887 | 8579 | 12871, 12875 | 17683 | 22339 | 24413691 |
| 22535205 | 3889 | 8587 | 12881 | 14031 | 22345 | 24413694 |
| 22535206 | 3891 | 8589 | 12883 | 14033 | 22347 | 24413695 |
| 22535207 | 3893 | 8591 | 12885 | 14035 | 22349 | 24413696 |
| 22535208 | 3895 | 8593 | 12887 | 14037 | 22351, 22353, | 24413697 |
| | | | | | 22355 | |
| 22535209 | 3897 | 8595 | 12889 | 14039 | 22357 | 24413698 |
| 22535210 | 3899 | 8597 | 12891 | 14041 | 22359 | 24413699 |
| 22535211 | 3901 | 8599 | 12893 | 14043 | 22361, 22363 | 24413700 |
| 22535212 | 3903 | 8601 | 12895 | 14045 | 22365 | 24413701 |
| 22535213 | 3905 | 8603 | 12897 | 14047, 14049 | 22367 | 24413702 |
| 22535214 | 3907 | 8605 | 12899 | 14051 | 22369 | 24413703 |
| 22535215 | 3909 | 8607 | 12901 | 14053 | 22371 | 24413704 |
| 22535216 | 3911 | 8609 | 12903 | 14055 | 22373 | 24413705 |
| 22535218 | 3913 | 8611 | 12905 | 14057 | 22375 | 24413706 |
| 22535219 | 3915 | 8613 | 12907 | 14059 | 22381 | 24413707 |
| — | 3917, 4047, | 5595 | — | — | — | — |
| | 4099, 4131, | | | | | |
| | 4223 | | | | | |
| 22533593 | 3943, 4189 | — | — | — | — | — |
| — | 3947 | 8657 | 11305 | 15905 | 20741 | 24412981 |
| 22533936 | 3953 | 6239 | 10621 | 15117 | 19901 | 23095379 |
| 22533579 | 3983 | 5523 | — | — | — | — |
| 22533577 | 3987 | — | — | — | — | — |
| 22533575 | 3997 | — | — | — | — | — |
| 22533572 | 4001 | 5501 | — | — | — | — |
| 22535183 | 4019 | 8543 | 12789 | 17595 | 22259 | 24413673 |
| 22535184 | 4021 | 8545 | 12791 | 17597 | 22261 | 24413674 |
| 22534180 | 4033 | 6793 | 11069 | 15613, 15615 | 20375, 20377 | 23095700 |
| 22534179 | 4035 | 6791 | 11067 | 17761 | 20373 | 23095699 |
| 22534178 | 4037 | 6785, 6789 | 9893, 11065 | 15611, 17763, | 20371 | 23095698 |
| | | | | 17943 | | |
| — | 4041, 4043 | — | — | — | — | 23095696 |
| 22533619 | 4093 | 5601 | — | — | — | — |
| 22533618 | 4095 | 5599, 8795 | — | — | 22481, 22739 | — |
| 22533617 | 4097 | 5597 | — | — | — | — |
| 22534519 | 4119 | 7377, 7381 | 11633 | 16245 | 21069, 21071 | 24413136 |
| — | 4139 | — | 12799 | 17611 | — | — |
| — | 4141 | — | 12797 | 17607 | 22271 | — |
| — | 4159 | — | 12793 | — | — | — |
| — | 4181, 4255 | 5559, 5561 | — | — | — | — |
| 22533599 | 4183 | 5557 | — | — | — | — |
| 22533598 | 4185 | 5551 | — | — | — | — |
| 22534199 | 4193 | 6825 | 11101 | 15649 | 20409 | 23095716 |
| 22534198 | 4195 | 6823 | 11099 | 15647 | 20407 | 23095715 |
| 22534191 | 4209 | 6813 | 11089 | 15637 | 20397 | 23095710 |
| 22533569 | 4211 | 5495 | — | — | — | — |
| — | 4219, 4229 | 5589 | — | — | — | — |
| — | 4221, 4227 | 5591 | — | — | — | — |
| — | 4225 | 5593 | — | — | — | — |
| — | 4231 | 5587 | — | — | — | — |
| — | 4233 | 5585 | — | — | — | — |
| — | 4235 | 5581 | — | — | — | — |
| — | 4237 | 5579 | — | — | — | — |
| — | 4239 | 5577 | — | — | — | — |
| — | 4241 | 5575 | — | — | — | — |
| — | 4243 | 5573 | — | — | — | — |
| — | 4245 | 5569 | — | — | — | — |
| — | 4247 | 5567 | — | — | — | — |
| — | 4249 | 5565 | — | — | — | — |
| — | 4251 | 8665 | — | — | — | — |
| — | 4253 | 8667 | — | — | — | — |
| — | 4263 | — | 12803 | — | — | — |
| — | 4265 | — | 12805 | — | — | — |
| — | 4267 | — | 12807 | — | — | — |
| — | 4269 | — | 12809 | 17623 | 22283 | — |
| — | 4271 | — | 12813 | 17625 | 22285 | — |
| — | 4273 | — | 12815 | 17627 | 22287 | — |
| — | 4275 | — | 12819 | 17631 | 22507 | — |
| — | 4277 | — | 12821 | 17825 | 22293 | — |
| — | 4287 | — | — | — | 18893, 18895 | — |
| 22533011 | — | — | — | — | 22411 | — |
| 22533087 | — | — | — | — | — | 23094507 |
| 22533109 | — | 4529 | 8975 | 13377, 13387 | 18165 | 23094527 |
| 22533110 | — | 4531 | 8977 | 13379 | 18167 | 23094528 |
| 22533111 | — | 4533 | 8979 | 13381 | 18169 | 23094529 |
| 22533112 | — | 4535 | 8981 | 13383, 13389 | 18173, 18175 | 23094530 |
| 22533113 | — | 4537, 4539 | 8983, 8985 | 13391 | 18177 | 23094531 |
| 22533114 | — | 4541, 4543, | 8987 | 13393, 13397 | 18179 | 23094532 |
| | | 4545 | | | | |
| 22533115 | — | 4547 | 8989 | 13395 | 18181 | 23094533 |
| 22533127 | — | 4575 | 9013 | 13427 | 18207 | — |
| 22533129 | — | 4579 | 9017 | 13431 | 18211 | 23094546 |
| 22533130 | — | 4581 | 9019 | 13433 | 18213 | 23094547 |
| 22533131 | — | 4583 | 9021 | 13435, 17907 | 18215 | 23094548 |
| 22533135 | — | 4589 | 9027 | 13441 | 18221 | 23094551 |
| 22533136 | — | — | 9029 | — | — | 23094552 |
| 22533137 | — | — | 9031 | 13447 | 18223 | 23094553 |
| 22533138 | — | — | 9033 | 13449 | 18225 | 23094554 |
| 22533185 | — | 4695 | 9135 | 13549 | 18295, 19819 | 23094600 |
| 22533232 | — | — | 9219 | — | — | — |
| 22533233 | — | — | 9221 | — | 18383 | 23094642 |
| 22533250 | — | 4833 | 9259 | 13165 | 18417 | — |
| 22533273 | — | 4883 | 9319 | 13693 | 18461 | 23094678 |
| z22533316 | — | 4969 | 9399 | 13773 | 18543 | — |
| 22533378 | — | 5113 | 9505 | 13923 | 18707, 18709 | 23094774 |
| 22533389 | — | 5135 | 9527 | 13945 | 18731 | — |
| 22533419 | — | — | 9587 | — | 18795 | — |
| 22533425 | — | 5215 | 9597 | 14017 | 18805, 18807 | 23094867 |
| 22533510 | — | 8633 | 9795 | 14287 | 19033 | 23094959 |
| 22533566 | — | 5489 | — | — | — | — |
| 22533578 | — | 5521 | — | — | — | — |
| 22533580 | — | 5525 | — | — | — | — |
| 22533581 | — | 5527 | — | — | — | — |
| 22533582 | — | 5529 | — | — | — | — |
| 22533584 | — | 5531 | — | — | — | — |
| 22533585 | — | 5533, 8799 | — | — | — | — |
| 22533586 | — | 5535 | — | — | — | — |
| 22533588 | — | — | — | — | 19285 | — |
| 22533589 | — | 5539 | — | — | — | — |
| 22533590 | — | 5541 | — | — | — | — |
| 22533591 | — | 5543 | — | — | — | — |
| 22533594 | — | 5545 | — | — | — | — |
| 22533595 | — | 5547 | — | — | — | — |
| 22533596 | — | — | — | — | 19109 | — |
| 22533620 | — | 5603 | — | — | — | — |
| 22533621 | — | 5605 | — | — | — | — |
| 22533622 | — | 5607 | — | — | — | — |
| 22533623, 22534878 | — | 5609 | — | — | 19155 | — |
| 22533624 | — | 5611 | — | — | 19157 | — |
| 22533625 | — | 5613 | — | — | — | — |
| 22533676 | — | — | — | — | — | 23095054 |
| 22533727 | — | 5795 | 10225 | 14659 | 19469, 22651 | 23095095 |
| 22533749 | — | 5839 | 10267 | 14729 | 19529 | 23095165 |
| 22533750 | — | 5841 | 10269 | 14731 | 19531 | — |
| 22533755 | — | 5851 | 10279 | 14741 | 19541 | 23095170 |
| 22533771 | — | 5881 | 10309 | 14775, 14777, | 19571 | 23095210 |
| | | | | 14779 | | |
| 22533785 | — | 5907 | 10337 | 14805 | 19597 | 23095223 |
| 22533788 | — | 5911 | 10341, 10343 | 14811, 14813, | 19601, 19603 | 23095225 |
| | | | | 14815 | | |
| 22533790 | — | 5915 | 10347 | 14819 | 19607 | 23095227 |
| 22533800 | — | 5935, 5975 | 10367 | 14841 | 19631 | 23095237 |
| 22533801 | — | 5937 | 10369 | 14843 | 19633 | 23095238 |
| 22533802 | — | 5939 | 10371 | 14845 | 19635 | 23095239 |
| 22533821 | — | 5977, 8651 | 10405 | 14879, 14891 | 19673 | 23095256 |
| 22533822 | — | 5979 | 10407 | 14893 | 19675 | 23095257 |
| 22533823 | — | 5981 | 10409 | 14895 | 19677 | 23095258 |
| 22533824 | — | 5983 | 10411 | 14897 | 19679 | 23095259 |
| 22533825 | — | 5985 | 10413 | 14899 | 19681 | 23095260 |
| 22533836 | — | 6005, 6007 | 10433 | 14917 | 19701 | 23095269 |
| 22533854 | — | 6043 | — | — | — | 23095286 |
| 22533905 | — | 6151 | 10565 | 15057 | 19851 | 23095334 |
| 22533910 | — | 6161 | 10579 | 15067 | 19861 | 23095339 |
| 22533926 | — | 6183 | — | 15095 | — | — |
| 22533930 | — | 6227 | 10571, 10607 | 15105 | 19887 | 23095373 |
| 22533937 | — | 6195 | 9967 | — | — | — |
| 22533938 | — | 6197 | 9969 | — | — | — |
| 22533940 | — | — | — | 15225 | — | — |
| 22533941 | — | 6199 | 9971 | 15223 | — | — |
| 22533943 | — | 6201 | 9973 | 15221 | — | — |
| 22533945 | — | 6203 | 9975 | 15219 | — | — |
| 22533948 | — | 6205 | 9977 | 15217 | — | — |
| 22533949 | — | 5369, 6207 | 9979 | 15215 | — | — |
| 22533950 | — | — | 9983 | 15213 | — | — |
| 22533951 | — | 6213, 6217 | 9987 | 15209 | — | — |
| 22533952 | — | 6215, 6219 | 9989 | 15203 | — | — |
| 22533953 | — | 6221 | 9991 | 15199 | — | — |
| 22533954 | — | 6223, 8175 | 9993 | 15195, 17857 | — | — |
| 22533955 | — | 8177 | 9995 | 15193 | — | — |
| 22533956 | — | 8179 | 9997 | 15185 | — | — |
| 22533957 | — | 8181 | 9999 | 15183 | — | — |
| 22533975 | — | 6273 | 10655 | 15153 | 19935 | 23095395 |
| 22534019 | — | 6397 | 10743 | 15311 | 20031 | 23095484 |
| 22534020 | — | 6399 | 10745 | 15313 | 20033 | 23095485 |
| 22534021 | — | 6401 | 10747 | 15315 | 20035 | 23095486 |
| 22534024 | — | 6407 | 10753 | 15321 | 20047 | 23095489 |
| 22534043, 22534733 | — | 6489 | 10817 | 16683 | 20097, 21495 | — |
| 22534047 | — | 6497 | — | — | — | — |
| 22534061 | — | 6531, 6541 | 10841 | 15383 | 20121 | 23095522 |
| 22534075 | — | 6567 | 10871 | 15413, 15415 | 22493 | 23095536 |
| 22534094 | — | — | — | — | — | 23095551 |
| 22534155 | — | — | 12527 | — | — | 23095669 |
| 22534157 | — | 6735 | 11019 | 15577 | 20317 | 23095670 |
| 22534158 | — | 6737 | 11021 | 15579 | 20319 | 23095671 |
| 22534159 | — | 6739 | 11023 | 15581 | 20321 | 23095672 |
| 22534160 | — | 6741, 6743 | 11027, 11029 | 17715, 17717 | 20323, 20325 | 23095673 |
| 22534161 | — | 6745 | 11031 | 17713 | 20327 | 23095674 |
| 22534162, 22534164 | — | 6747, 6751 | 11033, 11037 | — | 20329, 20333 | 23095675, 23095677 |
| 22534165 | — | 6753 | 11039 | 15583 | 20335 | 23095678 |
| 22534166 | — | 6755 | 11041 | 15585 | 20337 | 23095679 |
| 22534167 | — | 6757 | 11043 | 15587 | 20339 | 23095680 |
| 22534168 | — | 6759 | 11045 | 15589 | 20341 | 23095681 |
| 22534192 | — | 6815 | 11091 | 15639 | 20399 | 23095711 |
| 22534193 | — | — | 11093 | — | — | — |
| 22534194 | — | — | 11095 | — | — | — |
| 22534195 | — | — | 11097 | — | — | — |
| 22534196 | — | — | 13039 | — | — | — |
| 22534238 | — | — | 11177 | 15731 | — | — |
| 22534251 | — | 6935 | 11211 | 15767 | 20519 | 24412881 |
| 22534253 | — | 6937 | 11213 | 15769 | 20521 | 24412882 |
| 22534254 | — | 6939 | 11215, 11217 | 15771 | 20523 | 24412883 |
| 22534255 | — | — | — | — | — | 24412884 |
| 22534256 | — | — | — | — | — | 24412885 |
| 22534284, 22534297 | — | — | — | — | 20619 | — |
| 22534292 | — | — | — | — | 20609 | — |
| 22534298 | — | — | — | — | 20621 | 24412925 |
| 22534302 | — | — | — | — | 20629 | 24412929 |
| 22534303 | — | — | — | — | 20631 | 24412930 |
| 22534304 | — | 4799 | — | — | — | 24412931 |
| 22534319 | — | — | — | — | — | 24412948 |
| 22534320 | — | — | — | — | 20667 | 24412949 |
| 22534334 | — | — | 11261 | 15853 | 20695 | — |
| 22534338 | — | 7011 | 11269 | 15865 | 20703 | — |
| 22534358 | — | 8655 | 11307 | 15907 | 20743 | 24412982 |
| 22534374 | — | 7079, 7095 | 11339 | 15949 | 20779 | 24412998 |
| 22534413 | — | — | — | — | — | 24413035 |
| 22534414 | — | — | 11417 | — | — | 24413036 |
| 22534415 | — | 7165 | 11419 | 16045 | 20863 | 24413037 |
| 22534450 | — | 7239 | 11495 | 16131 | 20935 | 24413073 |
| 22534451 | — | 7241 | 11497 | 16133 | 20937 | 24413074 |
| 22534453 | — | 7243 | 11499 | 16135 | 20939 | 24413075 |
| 22534454 | — | 7245 | 11501 | 16137 | 20941 | 24413076 |
| 22534459 | — | — | 13059 | — | 20949 | 24413081 |
| 22534460 | — | — | 13057 | — | 20951 | 24413082 |
| 22534464 | — | 7257 | 11519 | 16153, 16155 | 20961 | 24413086 |
| 22534467 | — | 7261 | 11523 | 16159 | 20965, 20967 | 24413088 |
| 22534468 | — | 7263 | 11525, 11527 | 16161 | 20969 | 24413089 |
| 22534469 | — | 7265 | 11529, 11531 | 16163 | 20971 | 24413090 |
| 22534470 | — | 7267 | 11533 | 16165, 16169, | 20973 | 24413091 |
| | | | | 16171 | | |
| 22534471 | — | 7099, 7269 | 11535 | 16167, 16173, | 20975 | 24413092 |
| | | | | 16175 | | |
| 22534472 | — | 7271 | 11537 | 16177 | 20977 | 24413093 |
| 22534515 | — | 7369 | 11623, 11625 | 16237 | 21061 | 24413132 |
| 22534516 | — | 7371 | 11627 | 16239 | 21063 | 24413133 |
| 22534517 | — | 7373 | 11629 | 16241 | 21065, 21129 | 24413134 |
| 22534518 | — | 7375 | 11631 | 16243 | 21067 | 24413135 |
| 22534520 | — | 7379, 7383 | 11635 | 16247 | 21073 | 24413137 |
| 22534521 | — | 7385 | 11637 | 16249 | 21075 | — |
| 22534525 | — | 7389 | — | 16253 | — | — |
| 22534526 | — | 7391 | — | — | — | — |
| 22534527 | — | 7393 | — | 16255 | — | 24413140 |
| 22534531 | — | 7401 | 11647 | 16263 | 21085 | 24413144 |
| 22534532 | — | 7403 | — | 16265 | — | — |
| 22534534 | — | 7405 | 11649 | 16267 | 21087 | 24413145 |
| 22534536 | — | 7407 | 11651 | 16269 | 21089 | 24413146 |
| 22534539 | — | 7413 | 11657 | 16275 | 21095, 21131 | 24413149 |
| 22534555 | — | — | — | — | — | 24413164 |
| 22534564 | — | 7455 | 11699 | 16327, 16329 | 21155 | 24413170 |
| 22534591 | — | — | — | — | 21201 | — |
| 22534596 | — | 7513 | 11753 | 16387 | 21213 | 24413198 |
| 22534600 | — | 7523 | 11763 | 16399 | 21223 | — |
| 22534663 | — | 7653 | 11885 | 16525 | 21345 | 24413258 |
| 22534664 | — | 7655 | 11887 | 16527 | 21347 | 24413259 |
| 22534665 | — | 7657 | 11889 | 16529 | 21349, 21351 | 24413260 |
| 22534666 | — | 7659 | 11891 | 16531 | 21353, 21355 | 24413261 |
| 22534667 | — | 7661 | 11893 | 16533 | 21357 | 24413262 |
| 22534676 | — | 7679 | 11911 | 16557 | — | — |
| 22534693 | — | 7711 | 11941 | 16603 | 21405 | 24413284 |
| 22534694 | — | 7713 | 11943 | 16605 | 21407, 21409 | 24413285 |
| 22534695 | — | 7715, 7717 | 11945 | 16607 | 21411, 21413 | 24413286 |
| 22534696 | — | 7719 | 11947 | 16609 | 21415 | 24413287 |
| 22534697 | — | 7721 | 11949 | 16611 | 21417, 22637, | 24413288 |
| | | | | | 22639 | |
| 22534698 | — | 7723 | 11951 | 16613 | 21419 | 24413289 |
| 22534706 | — | 7739 | 11969 | 16629 | 21435 | 24413297 |
| 22534707 | — | 7741 | 11971 | 16631 | 21437, 21443 | 24413298 |
| 22534713 | — | 7753 | 11981, 11983, | 16647 | 21453 | 24413303 |
| | | | 11985 | | | |
| 22534714 | — | 7755 | 11987 | 16649 | 21455 | 24413304 |
| 22534716 | — | 7759 | 11991 | 16653 | 21459 | 24413306 |
| 22534718 | — | 7763 | 11997 | 16657 | 21463 | 24413308 |
| 22534734 | — | — | 12023 | 16685 | 21497 | — |
| 22534735 | — | — | 12025 | 16687 | 21499 | — |
| 22534780 | — | 7903 | 12113 | 16775 | 21583 | 24413369 |
| 22534788 | — | 7917, 7919 | 12163 | 16793, 16797 | 21611 | 24413376 |
| 22534789 | — | 6297 | 12165 | 16799 | 21613 | 24413377 |
| 22534856 | — | 8027 | 12299 | 16953 | 21737 | 24413439 |
| 22534883 | — | — | 10039 | — | — | — |
| 22534884 | — | — | 10037, 13021 | — | — | — |
| 22534934 | — | 8077 | 12353 | 17003 | 21793 | — |
| 22534959 | — | 8125 | 12397, 12403 | 17059 | 21823 | 24413485 |
| 22534979 | — | 8167 | 12441 | 17103 | 21861 | 24413504 |
| 22534996 | — | 8207 | 12475 | 17137 | 21895 | — |
| 22535024, 22535080 | — | 8375 | 12577 | 17351 | 22003 | — |
| 22535031, 22535161 | — | — | — | — | — | — |
| 22535032, 22535162 | — | — | — | — | — | — |
| 22535033 | — | — | — | — | — | 24413551, 24413552 |
| 22535034 | — | 8297 | — | — | — | — |
| 22535051 | — | 8287 | — | 17251 | — | — |
| 22535052 | — | 8289 | — | 17253 | — | — |
| 22535053 | — | 8291 | — | 17255 | — | — |
| 22535054 | — | 8293 | — | 17257 | — | — |
| 22535055 | — | 8295 | — | 17259 | — | — |
| 22535072 | — | 8361 | — | 17317 | 21985 | — |
| 22535074 | — | 8365 | — | 17375 | 21991 | 24413569 |
| 22535086 | — | 8387 | 12589 | 17367 | 22015 | 24413580 |
| 22535127 | — | 8467 | 12667 | 17469 | 22093 | 24413617 |
| 22535128 | — | 8469 | 12669 | 17471 | 22095 | 24413618 |
| 22535129 | — | 8471 | 12671 | 17473 | 22097 | 24413619 |
| 22535130 | — | 8473 | 12673 | 17475 | 22099 | 24413620 |
| 22535131 | — | 8475 | 12675 | 17477 | 22101, 22675 | 24413621 |
| 22535132 | — | 8477 | 12677 | 17479 | 22103 | 24413622 |
| 22535133 | — | 8479 | 12679 | 17481, 17483 | 22105 | 24413623 |
| 22535145 | — | 6435 | 12707 | 17509, 17783 | 22187 | — |
| 22535176 | — | 8529 | 12771 | 17567 | 22245 | 24413666 |
| 22535203 | — | 8581, 8583 | 12877 | 17685 | 22341 | 24413692 |
| 22535204 | — | 8585 | 12879 | 14029 | 22343 | 24413693 |
| — | — | 4401 | — | — | — | 23094471 |
| — | — | 4403 | — | — | — | 23094472 |
| — | — | — | 9109 | — | — | 23094588 |
| — | — | 4671 | 9111 | — | — | 23094589 |
| — | — | 4673 | 9113 | — | — | 23094590 |
| — | — | — | — | 16569 | — | 23094789, 23095102, |
| | | | | | | 23095468 |
| — | — | 8341 | — | 17297 | — | 23094897 |
| — | — | 8339 | — | 17295 | — | 23094898 |
| — | — | 8337 | — | 17293 | — | 23094899 |
| — | — | 8263 | — | — | — | 23094904 |
| — | — | — | — | — | 18883 | 23094908 |
| — | — | — | 9707 | — | — | 23094916 |
| — | — | — | 10003 | — | — | 23095036 |
| — | — | 8313, 8687 | — | 17279, 17873 | — | 23095620 |
| — | — | 6817 | — | 15641 | — | 23095712 |
| — | — | 6819 | — | 15643 | 20403 | 23095713 |
| — | — | — | — | 15645 | — | 23095714 |
| — | — | 6977 | 11245 | — | 22485, 22487, | 24412894 |
| | | | | | 22553 | |
| — | — | 8509 | 12745, 13029 | 17547 | 22225, 22503 | 24412898, 24413653 |
| — | — | 8505 | 12741, 13013, | 17543 | 20553, 20555, | 24412900, 24413651 |
| | | | 13015 | | 22221 | |
| — | — | 8503 | 12739, 13011 | 17541 | 20557, 22219 | 24412901, 24413650 |
| — | — | — | 13009 | — | 20559 | 24412902 |
| — | — | — | 13007 | — | 20561 | 24412903 |
| — | — | — | 13005 | — | 20563, 22581 | 24412904 |
| — | — | — | — | — | 20653 | 24412941 |
| — | — | 8659 | 11303 | 15903 | 20739 | 24412980 |
| — | — | 7797 | — | — | — | 24413321 |
| — | — | 7799, 7801 | — | — | — | 24413322 |
| — | — | 7803 | — | — | — | 24413323 |
| — | — | 7805 | — | — | — | 24413324 |
| — | — | 7807 | — | — | — | 24413325 |
| — | — | 7809 | — | — | — | 24413327 |
| — | — | 7813 | — | — | — | 24413328 |
| — | — | 7815 | — | — | — | 24413329 |
| — | — | 7951 | 12223 | — | 21665 | 24413403 |
| — | — | — | 12533 | 17323 | — | 24413546 |
| — | — | — | 12535 | 17325 | — | 24413547 |
| — | — | — | 12541 | 17333 | 21961, 22475 | 24413549, 24413557, |
| | | | | | | 24413564 |
| — | — | — | 12549 | 17329 | 21957, 22461, | 24413561 |
| | | | | | 22465 | |
| — | — | — | 12553 | — | 22469, 22471 | 24413562 |
| — | — | — | — | 17335 | 22477 | 24413565 |
| — | — | 8641 | 12731 | 17533 | 22211 | 24413646 |
| — | — | 8639 | 12733 | 17535 | 22213 | 24413647 |
| — | — | 8499, 8637 | 12735 | 17537 | 22215 | 24413648 |
| — | — | 8501 | 12737 | 17539 | 22217 | 24413649 |
| — | — | 8507 | 12743, 13017 | 17545 | 22223 | 24413652 |
| — | — | 8511 | 12747 | 17549 | 22227 | 24413654 |
| — | — | 8513 | 12749, 12751 | 17551 | 22229 | 24413655 |
| — | — | 4459 | 8901 | 13303 | 18085 | — |
| — | — | 4479 | 8921 | 13323 | 18105 | — |
| — | — | 4793 | — | 17727 | — | — |
| — | — | 4797 | — | 17723 | — | — |
| — | — | 4801 | — | 17721 | — | — |
| — | — | 5285 | — | — | 18931 | — |
| — | — | 5291, 5293 | — | 17691 | — | — |
| — | — | 5629 | 9919 | 14405 | 19263 | — |
| — | — | 5687 | 10097 | 14507 | 19333 | — |
| — | — | 5753 | 10185 | 14619 | 19429 | — |
| — | — | 6181 | 10597 | — | — | — |
| — | — | 6209 | 9981 | — | — | — |
| — | — | 6211 | 9985 | 15211 | — | — |
| — | — | 6821 | — | — | 20405 | — |
| — | — | 6957 | 11227 | 15785 | 20537 | — |
| — | — | 8315 | — | 17281 | — | — |
| — | — | 8317 | — | 17283 | — | — |
| — | — | 8319 | — | 17285 | — | — |
| — | — | 8321, 8331 | — | 17287 | — | — |
| — | — | 8333 | — | 17289 | — | — |
| — | — | 8335 | — | 17291 | — | — |
| — | — | 8673, 8791 | — | 13161 | — | — |
| — | — | — | — | 17619 | 22279 | — |
| — | — | — | — | 17605 | 22269 | — |
| — | — | — | 12551 | — | 22467 | — |
| — | — | — | 12149 | — | 21599, 22457 | — |
| — | — | — | 12147 | — | 22455 | — |
| — | — | — | 12145 | — | 22453 | — |
| — | — | — | 12139 | — | 22447 | — |
| — | — | — | 12137 | — | 22445 | — |
| — | — | — | 12133 | — | 22441 | — |
| — | — | — | 12131 | — | 22439 | — |
| — | — | — | 12129 | — | 22437 | — |
| — | — | — | 12127 | — | 22435 | — |
| — | — | — | 12125 | — | 22433 | — |
| — | — | — | 12119 | — | 21589 | — |
| — | — | — | 12117 | — | 21587 | — |
| — | — | — | — | 16093, 17805, | — | — |
| | | | | 17929, 17939 | | |
| — | — | — | — | 16085, 17881 | — | — |
| — | — | — | 10831 | — | 20109 | — |
| — | — | — | 10827 | — | 20105 | — |
| — | — | — | 10017, 10019 | — | — | — |
| — | — | — | 10009, 12953 | — | — | — |
| — | — | — | — | — | 18237, 22135, | — |
| | | | | | 22643 | |
| — | — | — | 9897 | — | 20367 | — |
| — | — | — | 10799 | 15375 | — | — |
| — | — | — | 12135 | — | 22443 | — |
| — | — | — | 12141 | — | 22449 | — |
| — | — | — | 12143 | — | 22451 | — |
| — | — | — | 12481 | 17143, 17947 | 21903 | — |
| — | — | — | 12605 | 17389 | 22031 | — |
| — | — | — | 12817 | 17629 | 22509 | — |
| — | — | — | 12929 | — | 18873 | — |
| — | — | — | 13045 | 15817 | — | — |
| — | — | — | — | 17213 | 21951 | — |
| — | — | — | — | 17615 | 22275 | — |
| — | — | — | — | 17617 | 22277 | — |
| — | — | — | — | 17621 | 22281 | — |

TABLE III
Unique coding sequences

| | |
|---|---|
| 2603V/R | 22533205, 22533568, 22533571, 22533574, 22533576, 22533597, 22533706, |
| | 22533776, 22533967, 22534356, 22534614, 22534650, 22534875, 22534876, |
| | 22534877, 22534880, 22534882, 22534885, 22534886, 22534887, 22534889, |
| | 22534891, 22534892, 22534894, 22534895, 22534898, 22534900, 22534901, |
| | 22534903, 22534906, 22534907, 22534908, 22534911, 22534912, 22534915, |
| | 22534916, 22534917, 22534919, 22534924, 22535035, 22535159, 22535160, |
| | 22535163, 22535164, 22535165, 22535166, 22535167 |
| 18RS21 | 1749, 3623, 3981, 3985, 3989, 3991, 3999, 4057, 4059, 4081, 4203, 4205, 4207 |
| 515 | 4359, 4367, 4803, 4805, 4807, 4809, 4811, 4813, 5289, 5295, 5493, 5497, 5499, |
| | 5505, 5507, 5511, 5513, 5515, 5563, 6887, 8267, 8269, 8647, 8683, 8685, 8695, |
| | 8725, 8727, 8783, 8789, 8797 |
| CJB11 | 9213, 9237, 9239, 10005, 10681, 10809, 10811, 12795, 12823, 12827, 12949, |
| | 12951, 12967, 12997, 13043, 13047, 13087, 13091, 13093, 13105 |
| COH1 | 13153, 13157, 13159, 13241, 13243, 13263, 15187, 15201, 15227, 15819, 15821, |
| | 15823, 15825, 15827, 15829, 16015, 16019, 16021, 16023, 16539, 16561, 16565, |
| | 17319, 17321, 17693, 17705, 17707, 17719, 17753, 17785, 17797, 17819, 17897, |
| | 17921, 17933 |
| H36B | 18691, 19065, 19067, 19071, 19073, 19075, 19085, 19087, 19089, 19091, 19093, |
| | 19095, 19099, 19103, 19111, 19113, 19115, 19117, 19119, 19123, 19125, 19127, |
| | 19129, 19131, 19133, 19135, 19139, 19141, 19143, 19145, 19149, 19165, 20099, |
| | 20401, 22529, 22531, 22533, 22535, 22545, 22547, 22557, 22559, 22561, 22565, |
| | 22571, 22585, 22589, 22621, 22641, 22667, 22671, 22679, 22695, 22699, 22705, |
| | 22715, 22717, 22721, 22723, 22725, 22733 |
| NEM316 | 23094662, 23094664, 23094667, 23094668, 23094669, 23094670, 23094794, |
| | 23094796, 23094797, 23094798, 23094799, 23094802, 23094803, 23094806, |
| | 23094808, 23094809, 23094810, 23094811, 23094812, 23094813, 23094814, |
| | 23094815, 23094816, 23094818, 23094820, 23094821, 23094822, 23094823, |
| | 23094824, 23094825, 23094827, 23094828, 23094829, 23094830, 23094831, |
| | 23094832, 23094833, 23094835, 23095107, 23095109, 23095110, 23095111, |
| | 23095112, 23095115, 23095116, 23095119, 23095121, 23095122, 23095123, |
| | 23095124, 23095125, 23095126, 23095127, 23095128, 23095129, 23095131, |
| | 23095133, 23095134, 23095135, 23095136, 23095137, 23095138, 23095140, |
| | 23095141, 23095142, 23095143, 23095144, 23095145, 23095146, 23095148, |
| | 23095423, 23095425, 23095426, 23095427, 23095428, 23095429, 23095430, |
| | 23095431, 23095433, 23095434, 23095435, 23095436, 23095437, 23095438, |
| | 23095440, 23095442, 23095443, 23095444, 23095445, 23095446, 23095447, |
| | 23095448, 23095449, 23095450, 23095452, 23095455, 23095456, 23095459, |
| | 23095460, 23095461, 23095462, 23095463, 23095569, 23095570, 23095571, |
| | 23095572, 23095573, 23095574, 23095575, 23095576, 23095577, 23095578, |
| | 23095579, 23095580, 23095581, 23095582, 23095583, 23095584, 23095585, |
| | 23095586, 23095587, 23095614, 23095615, 23095617, 23095623, 23095624, |
| | 23095626, 23095627, 24412909, 24412910, 24412911, 24412912, 24412921, |
| | 24412922, 24412923, 24412924, 24413555 |

TABLE IV
Sequences without homologs in 2603V/R or NEM316

| | |
|---|---|
| 18RS21 | 283, 1123, 1127, 1129, 1273, 1275, 1731, 2321, 2367, 3839, 3841, 3843, 3845, |
| | 3917, 4047, 4099, 4131, 4139, 4141, 4159, 4181, 4219, 4221, 4223, 4225, 4227, |
| | 4229, 4231, 4233, 4235, 4237, 4239, 4241, 4243, 4245, 4247, 4249, 4251, 4253, |
| | 4255, 4263, 4265, 4267, 4269, 4271, 4273, 4275, 4277, 4287 |
| 515 | 4459, 4479, 4601, 4793, 4797, 4801, 5285, 5291, 5293, 5559, 5561, 5565, 5567, |
| | 5569, 5573, 5575, 5577, 5579, 5581, 5585, 5587, 5589, 5591, 5593, 5595, 5621, |
| | 5625, 5627, 5629, 5687, 5753, 6179, 6181, 6209, 6211, 6821, 6957, 8315, 8317, |
| | 8319, 8321, 8331, 8333, 8335, 8665, 8667, 8673, 8791 |
| CJB11 | 8901, 8921, 9043, 9897, 9911, 9915, 9917, 9919, 9981, 9985, 10009, 10017, 10019, |
| | 10097, 10143, 10145, 10185, 10597, 10799, 10827, 10831, 11227, 12117, 12119, |
| | 12125, 12127, 12129, 12131, 12133, 12135, 12137, 12139, 12141, 12143, 12145, |
| | 12147, 12149, 12481, 12551, 12605, 12793, 12797, 12799, 12803, 12805, 12807, |
| | 12809, 12813, 12815, 12817, 12819, 12821, 12831, 12929, 12953, 13045 |
| COH1 | 13161, 13303, 13323, 13459, 14397, 14401, 14403, 14405, 14507, 14557, 14559, |
| | 14619, 15211, 15375, 15785, 15803, 15817, 16085, 16093, 17143, 17213, 17281, |
| | 17283, 17285, 17287, 17289, 17291, 17389, 17605, 17607, 17611, 17615, 17617, |
| | 17619, 17621, 17623, 17625, 17627, 17629, 17631, 17641, 17643, 17645, 17647, |
| | 17691, 17721, 17723, 17727, 17805, 17825, 17881, 17929, 17939, 17947 |
| H36B | 18085, 18105, 18237, 18873, 18893, 18895, 18931, 19255, 19259, 19261, 19263, |
| | 19333, 19381, 19383, 19385, 19429, 19879, 20105, 20109, 20367, 20405, 20537, |
| | 20595, 21587, 21589, 21599, 21903, 21951, 22031, 22135, 22269, 22271, 22275, |
| | 22277, 22279, 22281, 22283, 22285, 22287, 22293, 22299, 22301, 22433, 22435, |
| | 22437, 22439, 22441, 22443, 22445, 22447, 22449, 22451, 22453, 22455, 22457, |
| | 22467, 22507, 22509, 22643 |

TABLE V
‘Core’ coding sequences

| 2603vr | 18rs21 | 515 | cjb111 | coh1 | h36b | NEM316 |
|---|---|---|---|---|---|---|
| 22535220 | 1, 3919 | 8615 | 12909 | 14061 | 22383 | 24413708 |
| 22535221 | 3 | 8617 | 12911 | 14063 | 22385, 22427 | 24413709 |
| 22535222 | 5 | 8619, 8703 | 12913 | 14065 | 22387 | 24413710 |
| 22535223 | 7 | 8621 | 12915 | 14067 | 22389 | 24413711 |
| 22535224 | 9 | 8623 | 12917 | 14069 | 22391 | 24413712 |
| 22535225 | 11 | 8625 | 12919 | 14071 | 22393 | 24413713 |
| 22533003 | 13 | 8627 | 12921 | 14073 | 22395 | 23094427 |
| 22533004 | 15 | 4303, 8629 | 12923 | 14075 | 22397 | 23094428 |
| 22533005 | 17 | 4305, 8631 | 12925, 12927 | 14077 | 22399 | 23094429 |
| 22533007 | 21 | 4309 | 9607 | 14081 | 22403 | 23094431 |
| 22533008 | 23 | 4311 | 9609 | 14083 | 22405 | 23094432 |
| 22533009 | 25 | 4313 | 9611 | 14085 | 22407 | 23094433 |
| 22533010 | 27, 29 | 4315 | 9613 | 14087 | 22409, 22663 | 23094434 |
| 22533012 | 31 | 4317 | 9615 | 14089 | 22413 | 23094435 |
| 22533013 | 33 | 4319 | 9617 | 14091 | 22415 | 23094436 |
| 22533014 | 35 | 4321 | 9619 | 14093 | 22417 | 23094437 |
| 22533015 | 37 | 4323 | 9621 | 13135, 14095 | 22419 | 23094438 |
| 22533016, 22534732 | 39 | 4325 | 9623, 12021 | 13137, 14097, | 21493, 22421 | 23094439 |
| | | | | 16681 | | |
| 22533017 | 41 | 4327 | 9625 | 13139, 13143, | 22423 | 23094440 |
| | | | | 14099 | | |
| 22533018 | 43 | 4329 | 9627 | 13145, 13147, | 22425, 22623 | 23094441 |
| | | | | 13149, 14101 | | |
| 22533020 | 45, 47, 49, 51 | 4331 | 8801 | 13181 | 17963 | 23094442 |
| 22533021 | 53 | 4333, 4335 | 8803 | 13183 | 17965 | 23094443 |
| 22533022 | 55 | 4337 | 8805 | 13185 | 17967 | 23094444 |
| 22533023 | 57 | 4339, 4341 | 8807 | 13187, 13189 | 17969 | 23094445 |
| 22533024 | 59 | 4343 | 8809 | 13191 | 17971 | 23094446 |
| 22533025 | 61 | 4345 | 8811 | 13193 | 17973 | 23094447 |
| 22533026 | 63 | 4347 | 8813, 8815 | 13195 | 17975 | 23094448 |
| 22533027 | 65 | 4349 | 8817 | 13197 | 17977, 18033, | 23094449 |
| | | | | | 18035 | |
| 22533028 | 67 | 4351 | 8819 | 13199, 13245, | 17979, 18037, | 23094450 |
| | | | | 13247, 17811, | 22555 | |
| | | | | 17821, 17859 | | |
| 22533029 | 69, 71, 3965, 4017, | 4353 | 8821 | 13201, 17803, | 17981 | 23094451 |
| | 4061 | | | 17891 | | |
| 22533030 | 73, 75, 3963 | 4355 | 8823 | 13203 | 17983 | 23094452 |
| 22533032 | 77 | 4357, 4365 | 8825 | 13205 | 17985 | 23094453 |
| 22533034 | 81 | 4361, 4369, 8707 | 8829 | 13209 | 17989, 22505 | 23094455 |
| 22533035 | 83, 85 | 4371 | 8831 | 13211, 13249, | 17991 | 23094456 |
| | | | | 13251, 13253 | | |
| 22533036 | 87 | 4373 | 8833 | 13213 | 17993 | 23094457 |
| 22533037 | 89 | 4375 | 8835 | 13215, 17895 | 17995 | 23094458 |
| 22533038 | 91 | 4377, 4413, 4415, 4417 | 8837 | 13217, 13255, | 17997 | 23094459 |
| | | | | 17893 | | |
| 22533039 | 93 | 4379 | 8839 | 13219, 13257 | 17999 | 23094460 |
| 22533040 | 95 | 4381, 4419, 4421 | 8841 | 13221, 13259 | 18001 | 23094461 |
| 22533041 | 97 | 4383 | 8843 | 13223, 13261 | 18003 | 23094462 |
| 22533042 | 99 | 4385 | 8845 | 13225 | 18005 | 23094463 |
| 22533043 | 101 | 4387 | 8847 | 13227 | 18007 | 23094464 |
| 22533044 | 103 | 4389 | 8849 | 13229 | 18009 | 23094465 |
| 22533045 | 105 | 4391 | 8851 | 13231 | 18011 | 23094466 |
| 22533046 | 107 | 4393 | 8853 | 13233 | 18013 | 23094467 |
| 22533047 | 109 | 4395 | 8855 | 13235, 17875, | 18015, 18039, | 23094468 |
| | | | | 17941 | 18041, 22631 | |
| 22533048 | 111 | 4397 | 8857, 13023 | 13237 | 18017 | 23094469 |
| 22533049 | 113, 115, 117, 3949 | 4399 | 8859 | 13239 | 18019 | 23094470 |
| 22533051 | 121 | 4405 | 8863 | 13265 | 18023 | 23094473 |
| 22533054 | 125 | 4409 | 8867 | 13269 | 18027 | 23094475 |
| 22533055 | 127 | 4411 | 8869 | 13271 | 18029 | 23094476 |
| 22533056 | 129 | 4423 | 8871 | 13273 | 18031 | 23094477 |
| 22533057 | 131 | 4425, 4427 | 8873 | 13275 | 18043 | 23094478 |
| 22533058 | 133 | 4429, 4431, 4433 | 8875 | 13277, 13279 | 18045, 18047, | 23094479 |
| | | | | | 18049, 18051 | |
| 22533059 | 135 | 4435, 4437 | 8877 | 13281 | 18053 | 23094480 |
| 22533060 | 137 | 4439 | 8879 | 17759 | 18055 | 23094481 |
| 22533061 | 139 | 4441 | 8881 | 13283 | 18057 | 23094482 |
| 22533063 | 143 | 4443 | 8885 | 13285 | 18061 | 23094484 |
| 22533064 | 145 | 4445 | 8887 | 13287, 13289 | 18063, 18071 | 23094485 |
| 22533065 | 147 | 4447 | 8889 | 13291 | 18065, 18073 | 23094486 |
| 22533066 | 149 | 4449 | 8891 | 13293 | 18067, 18069, | 23094487 |
| | | | | | 18075 | |
| 22533067 | 151 | 4451 | 8893 | 13295 | 18077 | 23094488 |
| 22533068 | 153 | 4453 | 8895 | 13297 | 18079 | 23094489 |
| 22533069 | 155 | 4455 | 8897 | 13299 | 18081 | 23094490 |
| 22533070 | 157 | 4457 | 8899 | 13301 | 18083 | 23094491 |
| 22533071 | 159 | 4461 | 8903 | 13155, 13305, | 18087 | 23094492 |
| | | | | 17925 | | |
| 22533072 | 161 | 4463 | 8905 | 13307 | 18089 | 23094493 |
| 22533073 | 163 | 4465 | 8907 | 13309 | 18091 | 23094494 |
| 22533074 | 165 | 4467 | 8909 | 13311 | 18093 | 23094495 |
| 22533075 | 167 | 4469 | 8911 | 13313 | 18095 | 23094496 |
| 22533076, 22534790 | 169, 3205 | 6299 | 12167 | 16801 | 21615 | 23094497, 24413378 |
| 22533077 | 171 | 4471 | 8913 | 13315 | 18097 | 23094498 |
| 22533078 | 173 | 4473 | 8915 | 13317 | 18099 | 23094499 |
| 22533080 | 175 | 4475 | 8917 | 13319 | 18101 | 23094500 |
| 22533081 | 177 | 4477 | 8919 | 13321, 17737 | 18103 | 23094501 |
| 22533082 | 179 | 4481 | 8923 | 13325 | 18107 | 23094502 |
| 22533083 | 181 | 4483 | 8925 | 13327 | 18109 | 23094503 |
| 22533084 | 183 | 4485 | 8927 | 13329 | 18111 | 23094504 |
| 22533085 | 185 | 4487 | 8929, 8931 | 13331 | 18113 | 23094505 |
| 22533090 | 193 | 4495 | 8939 | 13333, 13335 | 18121, 18123 | 23094510 |
| 22533091 | 195 | 4497 | 8941 | 13337 | 18125 | 23094511 |
| 22533092, 22533093, | 199, 201, 503 | 4499, 4875 | 8943, 8945, 9475, | 13341, 13345, | 18127, 18135, | 23094512 |
| 22533257, | | | 9497 | 13663, 13681, | 18437, 18451 | |
| 22533270 | | | | 13685 | | |
| 22533094, 22533258, | 203, 505 | 4501 | 8947, 9477 | 13343, 13347, | 18129, 18137 | 23094513 |
| 22533260 | | | | 13665, 13687, | | |
| | | | | 17743 | | |
| 22533095 | 205 | 4503 | 8949 | 13349 | 18139 | 23094514 |
| 22533096 | 207 | 4505 | 8951 | 13339, 13351 | 18141 | 23094515 |
| 22533097 | 209 | 4507 | 8953 | 13353 | 18143 | 23094516 |
| 22533098 | 211 | 4509 | 8955 | 13355, 13357 | 18145 | 23094517 |
| 22533099 | 213 | 4511 | 8957 | 13359 | 18147 | 23094518 |
| 22533100 | 215 | 4513 | 8959 | 13361 | 18149 | 23094519 |
| 22533101 | 217 | 4515 | 8961 | 13363 | 18151, 18171 | 23094520 |
| 22533102 | 219 | 4517 | 8963 | 13365 | 18153 | 23094521 |
| 22533104 | 221 | 4519 | 8965 | 13367 | 18155 | 23094522 |
| 22533105 | 223 | 4521 | 8967 | 13369 | 18157 | 23094523 |
| 22533106 | 225 | 4523 | 8969 | 13371 | 18159 | 23094524 |
| 22533107 | 227 | 4525 | 8971 | 13373 | 18161 | 23094525 |
| 22533108 | 229 | 4527 | 8973 | 13375, 13385 | 18163 | 23094526 |
| 22533116 | 231 | 4549 | 8991 | 13399 | 18183 | 23094534 |
| 22533117 | 233 | 4551 | 8993 | 13401, 13403 | 18185 | 23094535 |
| 22533118 | 235 | 4553 | 8995 | 13405 | 18187 | 23094536 |
| 22533119 | 237 | 4555 | 8997 | 13407 | 18189 | 23094537 |
| 22533120 | 239 | 4557 | 8999 | 13413 | 18193 | 23094538 |
| 22533121 | 241 | 4559, 4561, 4563 | 9001 | 13415 | 18195 | 23094539 |
| 22533122 | 243 | 4565 | 9003 | 13417, 13443 | 18197 | 23094540 |
| 22533123 | 245 | 4567 | 9005 | 13419, 13445 | 18199 | 23094541 |
| 22533124 | 247 | 4569 | 9007 | 13421 | 18201 | 23094542 |
| 22533125 | 249, 251, 253, 4055 | 4571 | 9009 | 13423 | 18203 | 23094543 |
| 22533126 | 255 | 4573 | 9011 | 13425 | 18205 | 23094544 |
| 22533128 | 257 | 4577 | 9015 | 13429 | 18209 | 23094545 |
| 22533133 | 259, 261 | 4585 | 9023 | 13437 | 18217 | 23094549 |
| 22533134 | 263, 265, 267 | 4587 | 9025 | 13439 | 18219 | 23094550 |
| 22533139 | 269, 271 | 4591 | 9035 | 13451, 13487 | 18227 | 23094555 |
| 22533140 | 273 | 4593 | 9037 | 13453 | 18229 | 23094556 |
| 22533141, 22533904, | 275, 1701, 2693, | 4595, 6149, 7287, | 9039, 10563, 11555 | 13455, 15055, | 18231, 19849, | 23095333, 24413101 |
| 22534480 | 4111 | 8771 | | 16017 | 20993, 20995 | |
| 22533143 | 281, 285, 4051 | 4603 | 9045 | 13461 | 22173 | 23094558 |
| 22533144 | 287, 4053 | 4605 | 9047 | 13463 | 22169, 22171 | 23094559 |
| 22533145 | 289, 4163 | 4607, 4609 | 9049 | 13465 | 22165, 22167 | 23094560 |
| 22533146 | 291 | 4611 | 9051 | 13467 | 22163 | 23094561 |
| 22533147 | 293 | 4613 | 9053 | 13469 | 22161 | 23094562 |
| 22533148 | 295, 297 | 4615 | 9055 | 13471 | 22159 | 23094563 |
| 22533149 | 299 | 4617 | 9057 | 13473, 17949 | 22157, 22647 | 23094564 |
| 22533150, 22534271 | 301 | 4619 | 9059 | 13475 | 22155 | 23094565 |
| 22533151, 22534154 | 303 | 4621, 6727, 6729, | 9061, 11015 | 13477, 13489, | 20309, 20311, | 23094566, 23095668 |
| | | 6731 | | 15575 | 20313, 22153 | |
| 22533152 | 305 | 4623 | 9063 | 13479 | 22151 | 23094567 |
| 22533154 | 307 | 4625 | 9065 | 13481 | 22149 | 23094568 |
| 22533155 | 309, 311 | 4627 | 9067 | 13483 | 22147 | 23094569 |
| 22533156 | 313 | 4629 | 9069 | 13485 | 22145 | 23094570 |
| 22533158 | 315 | 4633 | 9073 | 13493 | 17955, 18239 | 23094572 |
| 22533159 | 317 | 4635 | 9075 | 13495 | 17957, 18241 | 23094573 |
| 22533160 | 319 | 4637 | 9077 | 13497 | 17959 | 23094574 |
| 22533161 | 321, 4077, 4101, | 4639, 8785 | 9079 | 13499 | 17961, 22541 | 23094575 |
| | 4113 | | | | | |
| 22533162 | 323 | 4641 | 9081 | 13501, 13503 | 18243, 18253 | 23094576 |
| 22533163 | 325 | 4643 | 9087 | 13505 | 18245 | 23094577 |
| 22533164 | 327 | 4645 | 9089 | 13507 | 18247 | 23094578 |
| 22533165 | 329 | 4647 | 9091 | 13509 | 18249 | 23094579 |
| 22533167 | 333 | 4655, 4657 | 9095 | 13513 | 18255 | 23094581 |
| 22533168 | 335 | 4659 | 9097 | 13515, 13517 | 18257 | 23094582 |
| 22533169 | 337 | 4661 | 9099, 13081 | 13519 | 18259 | 23094583 |
| 22533170 | 339, 343 | 4663, 4729 | 9083, 9085, 9101 | 13521, 17817 | 18261, 18281, | 23094584 |
| | | | | | 18283, 18285 | |
| 22533171 | 341, 345 | 4665 | 9103 | 13523 | 18263, 18287 | 23094585 |
| 22533172 | 347 | 4667 | 9105 | 13525, 13527 | 18265 | 23094586 |
| 22533173 | 349 | 4669 | 9107 | 13529 | 18267 | 23094587 |
| 22533174 | 351 | 4675 | 9115 | 13531 | 18269 | 23094591 |
| 22533176 | 355 | 4679 | 9119 | 13533 | 18273 | 23094593 |
| 22533177 | 357 | 4681 | 9121 | 13535 | 18275 | 23094594 |
| 22533178 | 359 | 4683 | 9123 | 13537 | 18277 | 23094595 |
| 22533181 | 365 | 4689 | 9129 | 13543 | 18289 | 23094597 |
| 22533182 | 367 | 4691 | 9131 | 13545 | 18291 | 23094598 |
| 22533183 | 369 | 4693 | 9133 | 13547, 13611, | 18293 | 23094599 |
| | | | | 13613 | | |
| 22533186 | 371 | 4697 | 9137 | 13551 | 18297 | 23094601 |
| 22533187 | 373 | 4699 | 9139 | 13553 | 18299 | 23094602 |
| 22533188 | 375, 377 | 4701 | 9141 | 13555, 13615, | 18301 | 23094603 |
| | | | | 13617 | | |
| 22533189 | 379 | 4703 | 9143 | 13557, 13619 | 18303 | 23094604 |
| 22533190, 22533587, | 381, 3121 | 4705, 5537, 7833 | 9145, 12049 | 13559 | 18305, 19283 | 23094605, 24413338 |
| 22534747, | | | | | | |
| 22534904 | | | | | | |
| 22533191 | 383 | 4707 | 9147 | 13561 | 18307 | 23094606 |
| 22533192 | 385 | 4709 | 9149 | 13563 | 18309 | 23094607 |
| 22533193 | 387 | 4711, 4731 | 9151 | 13565 | 18311 | 23094608 |
| 22533194 | 389 | 4713, 4733, 8679 | 9153 | 13567 | 18313 | 23094609 |
| 22533195 | 391, 393 | 4715 | 9155 | 13569 | 18315, 18319 | 23094610 |
| 22533197 | 397 | 4719 | 9159 | 13573, 13621, | 18323 | 23094611 |
| | | | | 13623, 13625 | | |
| 22533198 | 399 | 4721 | 9161 | 13575, 13627, | 18325 | 23094612 |
| | | | | 13629 | | |
| 22533199 | 401 | 4723 | 9163 | 13577, 13631 | 18327 | 23094613 |
| 22533200 | 403 | 4725 | 9165 | 13579, 13633, | 18329 | 23094614 |
| | | | | 13635 | | |
| 22533201 | 405 | 4727, 4735 | 9167 | 13581 | 18331 | 23094615 |
| 22533202 | 407 | 4737, 4739 | 9169 | 13583 | 18333, 18693 | 23094616 |
| 22533203 | 409, 411 | 4741 | 9171 | 13585 | 18335, 18431 | 23094617 |
| 22533204, 22533207 | 413 | 4745, 4749 | 9173 | 13587, 13637 | 18337 | 23094618 |
| 22533208 | 415 | 4747, 4751 | 9175 | 13589, 13639 | 18339 | 23094619 |
| 22533209 | 417 | 4753, 8715 | 9177 | 13591, 13641 | 18341 | 23094620 |
| 22533210 | 419 | 4755 | 9179 | 13593 | 18343 | 23094621 |
| 22533211 | 421 | 4757 | 9181 | 13595 | 18345 | 23094622 |
| 22533212 | 423, 425 | 4759 | 9183 | 13597 | 18347 | 23094623 |
| 22533213 | 427 | 4761 | 9185 | 13599 | 18349 | 23094624 |
| 22533214 | 429 | 4763, 8793 | 9187, 13129 | 13601, 13643 | 18351, 18433 | 23094625 |
| 22533215 | 431 | 4765 | 9189 | 13603 | 18353 | 23094626 |
| 22533216 | 433 | 4767 | 9191 | 13605 | 18355, 22597 | 23094627 |
| 22533217 | 435 | 4769 | 9193 | 13607 | 18357, 22595 | 23094628 |
| 22533218 | 437, 439 | 4771 | 9195 | 13609, 13645 | 18359 | 23094629 |
| 22533219 | 441 | 4773 | 9197 | 13647 | 18361 | 23094630 |
| 22533220 | 443 | 4775 | 9199 | 13649 | 18363, 18435, | 23094631 |
| | | | | | 22635 | |
| 22533221 | 445 | 4777 | 9201 | 13651 | 18365 | 23094632 |
| 22533222 | 447 | 4779 | 9203 | 13653, 13655 | 18367 | 23094633 |
| 22533225 | 449 | 4787 | 9207 | 13659 | 18371 | 23094636 |
| 22533226 | 451 | 4789 | 9209 | 13661 | 18373 | 23094637 |
| 22533228 | 453 | 4791 | 9211 | 17729 | 18375 | 23094638 |
| 22533231 | 459 | 4795 | 9217 | 17725 | 18381 | 23094641 |
| 22533241, 22534994 | 473, 3519 | 8203 | 9235, 12471, 12939, | 17133 | 18397, 21891 | 23094649, 24413519 |
| | | | 12941 | | | |
| 22533245 | 481 | 4821, 4823 | 9249, 12537, 12539, | 17327, 17331 | 18405, 18407, | 24413548, 24413559 |
| | | | 12543 | | 21953, 21955, | |
| | | | | | 21959, 21963 | |
| 22533251 | 491 | 4835 | 9261 | 13167, 13169 | 18419 | 23094656 |
| 22533252 | 493 | 4837, 4839, 4841, | 9263 | 13171 | 18421 | 23094657 |
| | | 6645 | | | | |
| 22533253 | 495 | 4843 | 9265 | 13173 | 18423 | 23094658 |
| 22533254 | 497 | 4845 | 9267 | 13175 | 18425 | 23094659 |
| 22533255 | 499 | 4847 | 9269, 9271 | 13177 | 18427 | 23094660 |
| 22533256 | 501, 3975, 4215 | 4849 | 9273 | 13179, 17931 | 18429 | 23094661 |
| 22533265 | 517 | 4865 | 9487 | 13671 | 18441 | 23094671 |
| 22533266 | 519 | 4867 | 9489 | 13673 | 18443 | 23094672 |
| 22533267 | 521 | 4869 | 9491 | 13675 | 18445 | 23094673 |
| 22533268 | 523 | 4871 | 9493 | 13677, 17877 | 18447 | 23094674 |
| 22533269 | 525 | 4873 | 9495 | 13679 | 18449 | 23094675 |
| 22533271 | 527 | 4877 | 9499 | 13683 | 18453 | 23094676 |
| 22533272 | 529 | 4879, 4881 | 9317, 9501 | 13691 | 18455, 18459 | 23094677 |
| 22533276 | 531 | 4885 | 9321 | 13695 | 18463 | 23094679 |
| 22533277 | 533 | 4887 | 9323 | 13697 | 18465, 18471 | 23094680 |
| 22533278 | 535 | 4889 | 9325 | 13699 | 18467 | 23094681 |
| 22533279 | 537 | 4891 | 9327 | 13701 | 18469 | 23094682 |
| 22533280 | 539 | 4893 | 9329, 9331 | 13703 | 18473, 22133 | 23094683 |
| 22533281 | 541 | 4895 | 9333 | 13705 | 18475 | 23094684 |
| 22533282 | 543 | 4897 | 9335 | 13707 | 18477 | 23094685 |
| 22533283 | 545 | 4899 | 9337 | 13709 | 18479, 18609, | 23094686 |
| | | | | | 18613 | |
| 22533284 | 547 | 4901 | 9339 | 13711 | 18481, 18611, | 23094687 |
| | | | | | 18615 | |
| 22533285 | 549 | 4903 | 9341 | 13713 | 18483, 18617 | 23094688 |
| 22533286 | 551 | 4905 | 9343 | 13715 | 18485 | 23094689 |
| 22533287 | 553 | 4907 | 9345 | 13717 | 18487 | 23094690 |
| 22533288 | 555 | 4909 | 9347 | 13719, 13781 | 18489 | 23094691 |
| 22533290 | 557 | 4911 | 9349 | 13721, 13783 | 18491 | 23094692 |
| 22533291 | 559 | 4913 | 9351 | 13723, 13785 | 18493 | 23094693 |
| 22533292 | 561, 563, 565, | 4915 | 9353, 12121 | 13725 | 18495, 21593, | 23094694 |
| | 4153, 4155 | | | | 22429 | |
| 22533293 | 567 | 4917 | 9355 | 13727 | 18497 | 23094695 |
| 22533294 | 569, 571 | 4919 | 9357 | 13729 | 18499 | 23094696 |
| 22533295 | 573 | 4921 | 9359 | 13731 | 18501 | 23094697 |
| 22533296 | 575 | 4923, 4929 | 9361 | 13733, 13735, | 18503 | 23094698 |
| | | | | 13787, 13789 | | |
| 22533297 | 577 | 4925, 4931 | 9363 | 13737 | 18505 | 23094699 |
| 22533298 | 579 | 4927, 4933 | 9365 | 13739 | 18507 | 23094700 |
| 22533299 | 581 | 4935 | 9367 | 13741 | 18509 | 23094701 |
| 22533300 | 583 | 4937 | 9369 | 13743 | 18511 | 23094702 |
| 22533301 | 585 | 4939 | 9371 | 13745, 13791 | 18513 | 23094703 |
| 22533302 | 587 | 4941 | 9373 | 13747 | 18515 | 23094704 |
| 22533303 | 589, 591 | 4943, 4945, 8721 | 9375 | 13749 | 18517 | 23094705 |
| 22533304 | 593 | 4947 | 9377 | 13751 | 18519 | 23094706 |
| 22533305 | 595 | 4949 | 9379 | 13753 | 18521 | 23094707 |
| 22533306 | 597 | 4951 | 9381 | 13755 | 18523 | 23094708 |
| 22533308 | 599 | 4953 | 9383 | 13757 | 18525 | 23094709 |
| 22533309 | 601 | 4955 | 9385 | 13759 | 18527 | 23094710 |
| 22533310 | 603 | 4957 | 9387 | 13761 | 18529 | 23094711 |
| 22533311 | 605 | 4959 | 9389 | 13763 | 18531 | 23094712 |
| 22533312 | 607 | 4961 | 9391 | 13765, 13793 | 18533 | 23094713 |
| 22533313 | 609 | 4963 | 9393 | 13767 | 18535, 18537 | 23094714 |
| 22533314 | 611 | 4965 | 9395 | 13769 | 18539 | 23094715 |
| 22533315 | 613 | 4967 | 9397 | 13771 | 18541 | 23094716 |
| 22533317 | 615 | 4971 | 9401 | 13775 | 18545 | 23094717 |
| 22533318 | 617 | 4973 | 9403 | 13777, 13779 | 18547 | 23094718 |
| 22533319 | 619, 621 | 4975 | 9405 | 13795 | 18549 | 23094719 |
| 22533320 | 623 | 4977 | 9407 | 13797 | 18551 | 23094720 |
| 22533321 | 625 | 4979 | 9409 | 13799 | 18553, 18619 | 23094721 |
| 22533323 | 627 | 4983 | 9413 | 13803 | 18557 | 23094722 |
| 22533325 | 631 | 4985 | 9417 | 13807 | 18561 | 23094724 |
| 22533326 | 635 | 4989 | 9421 | 13811 | 18565 | 23094726 |
| 22533327 | 637 | 4991 | 9423 | 13813 | 18567 | 23094727 |
| 22533328 | 639 | 4993 | 9425 | 13815 | 18569 | 23094728 |
| 22533330 | 641 | 4995 | 9427 | 13817 | 18571 | 23094729 |
| 22533331 | 643 | 4997 | 9429 | 13819 | 18573 | 23094730 |
| 22533332 | 645 | 4999 | 9431 | 13821 | 18575, 18621 | 23094731 |
| 22533333 | 647 | 5001 | 9433 | 13823, 13871 | 18577, 22673 | 23094732 |
| 22533334 | 649 | 5003 | 9435 | 13825, 13873 | 18579 | 23094733 |
| 22533335 | 651 | 5005 | 9437 | 13827, 13875 | 18581 | 23094734 |
| 22533336 | 653 | 5007 | 9439 | 13829, 13877, | 18583 | 23094735 |
| | | | | 13879, 13881 | | |
| 22533337 | 655 | 5009, 5043 | 9441 | 13831 | 18585 | 23094736 |
| 22533338 | 657 | 5011 | 9443 | 13833 | 18587 | 23094737 |
| 22533339 | 659 | 5013 | 9445 | 13835 | 18589, 18623 | 23094738 |
| 22533340 | 661 | 5015 | 9447 | 13837 | 18591 | 23094739 |
| 22533341 | 663 | 5017 | 9449 | 13839 | 18593 | 23094740 |
| 22533342 | 665 | 5019 | 9451 | 13841 | 18595, 18625 | 23094741 |
| 22533343 | 667 | 5021 | 9453 | 13843 | 18597, 18627 | 23094742 |
| 22533344 | 669 | 5023 | 9455 | 13845 | 18599 | 23094743 |
| 22533345 | 671 | 5025 | 9457 | 13847 | 18601 | 23094744 |
| 22533346 | 673 | 5027 | 9459 | 13849 | 18603 | 23094745 |
| 22533347 | 675 | 5029 | 9461 | 13851 | 18605, 18629 | 23094746 |
| 22533348 | 677 | 5031 | 9463 | 13853, 17831 | 18607, 18631, | 23094747 |
| | | | | | 18633 | |
| 22533350 | 679 | 5033 | 9465, 9503 | 13855 | 18635, 18645 | 23094748 |
| 22533351 | 681 | 5035 | 9467 | 13857 | 18637 | 23094749 |
| 22533352 | 683 | 5037 | 9469 | 13859, 17911 | 18639 | 23094750 |
| 22533353 | 685 | 5039 | 9471 | 13861 | 18641 | 23094751 |
| 22533354 | 687 | 5041 | 9473 | 13863 | 18643 | 23094752 |
| 22533355 | 689, 3921 | 5045 | 9275 | 13865 | 18647 | 23094753 |
| 22533356 | 691 | 5047 | 9277 | 13867 | 18649 | 23094754 |
| 22533358 | 693 | 5049, 5079 | 9279 | 13869, 13883 | 18651, 18653 | 23094755 |
| 22533359 | 695 | 5051 | 9281 | 13885, 13887 | 18655 | 23094756 |
| 22533360 | 697 | 5053 | 9283 | 13889 | 18657 | 23094757 |
| 22533361 | 699 | 5055 | 9285 | 13891 | 18659 | 23094758 |
| 22533362 | 701, 4133, 4135 | 5057 | 9287 | 13893 | 18661 | 23094759 |
| 22533363 | 703 | 5059, 5081 | 9289 | 13895, 17153 | 18663 | 23094760 |
| 22533364 | 705 | 5061, 5083 | 9291 | 13897 | 18665 | 23094761 |
| 22533365 | 707 | 5063 | 9293 | 13899 | 18667 | 23094762 |
| 22533366 | 709 | 5065 | 9295 | 13901 | 18669 | 23094763 |
| 22533367 | 711, 723, 4301 | 5067 | 9297 | 13903 | 18671, 18695 | 23094764 |
| 22533368 | 713, 725, 4299 | 5069 | 9299 | 13905 | 18673, 18697 | 23094765 |
| 22533369 | 715, 727, 4297 | 5071, 5087 | 9301 | 13907 | 18675, 18699, | 23094766 |
| | | | | | 18701 | |
| 22533370, 22534818 | 717, 729, 3261, | 5073, 5089, 5091, | 9303, 12225 | 13909, 16863, | 18677, 18703, | 23094767, 24413404 |
| | 3263, 4165, 4167, | 7953 | | 16893, 17849 | 21667 | |
| | 4295 | | | | | |
| 22533372 | 719, 731, 4293 | 5075, 5093 | 9305 | 13911 | 18679 | 23094768 |
| 22533373 | 721, 733, 4291 | 5095 | 9307 | 13913 | 18681 | 23094769 |
| 22533374 | 735 | 5097 | 9309 | 13915 | 18683 | 23094770 |
| 22533375 | 737 | 5099, 5105 | 9311 | 13917 | 18685 | 23094771 |
| 22533376 | 739 | 5101, 5107, 5109 | 9313 | 13919 | 18687 | 23094772 |
| 22533377 | 741 | 5111 | 9315 | 13921 | 18705 | 23094773 |
| 22533379 | 743 | 5115 | 9507 | 13925 | 18711 | 23094775 |
| 22533380 | 745 | 5117, 5149 | 9509 | 13927 | 18713 | 23094776 |
| 22533381 | 747 | 5119, 5151 | 9511 | 13929 | 18715 | 23094777 |
| 22533382 | 749 | 5121 | 9513 | 13931 | 18717 | 23094778 |
| 22533383 | 751 | 5123 | 9515 | 13933 | 18719 | 23094779 |
| 22533384 | 753 | 5125 | 9517 | 13935 | 18721 | 23094780 |
| 22533385 | 755 | 5127 | 9519 | 13937 | 18723 | 23094781 |
| 22533386 | 757 | 5129 | 9521 | 13939 | 18725 | 23094782 |
| 22533387 | 759 | 5131 | 9523 | 13941 | 18727 | 23094783 |
| 22533388 | 761 | 5133 | 9525 | 13943 | 18729 | 23094785 |
| 22533390 | 763 | 5137 | 9529 | 13947 | 18733 | 23094786 |
| 22533391 | 765 | 5139 | 9531 | 13949 | 18735 | 23094787 |
| 22533392 | 767 | 5141 | 9533 | 13951 | 18737 | 23094837 |
| 22533393 | 769 | 5143 | 9535 | 13953 | 18739 | 23094838 |
| 22533394 | 771 | 5145 | 9537 | 13955 | 18741 | 23094839 |
| 22533395 | 773 | 5147 | 9539 | 13957 | 18743 | 23094840 |
| 22533396 | 775 | 5153 | 9541 | 13959 | 18745 | 23094841 |
| 22533397 | 777 | 5155 | 9543 | 13961 | 18747 | 23094842 |
| 22533398 | 779, 781, 783 | 5157, 5159, 5161 | 9545 | 13963 | 18749, 18751 | 23094843 |
| 22533400 | 785 | 5163 | 9547 | 13965 | 18753 | 23094844 |
| 22533401 | 787 | 5165 | 9549 | 13967 | 18755 | 23094845 |
| 22533402 | 789 | 5167, 5201 | 9551 | 13969 | 18757 | 23094846 |
| 22533403 | 791, 2369, 4147, | 5169 | 9553 | 13971 | 18759, 18783, | 23094847 |
| | 4149, 4179 | | | | 20597 | |
| 22533404 | 793 | 5171 | 9555 | 13973 | 18761 | 23094848 |
| 22533405 | 795 | 5173 | 9557 | 13975 | 18763 | 23094849 |
| 22533406 | 797 | 5175 | 9559 | 13977 | 18765 | 23094850 |
| 22533407 | 799 | 5177 | 9561 | 13979 | 18767, 22527 | 23094851 |
| 22533408 | 801 | 5179 | 9563 | 13981 | 18769, 22525 | 23094852 |
| 22533409 | 803 | 5181 | 9565 | 13983 | 18771 | 23094853 |
| 22533410 | 805 | 5183, 5203, 5205 | 9567 | 13985, 17809 | 18773 | 23094854 |
| 22533411 | 807 | 5185 | 9569 | 13987 | 18775 | 23094855 |
| 22533412 | 809 | 5187 | 9571 | 13989, 13991, | 18777 | 23094856 |
| | | | | 14011 | | |
| 22533413, 22534328 | 811 | 5189 | 9573 | 13993 | 18779 | 23094857 |
| 22533414 | 813 | 5191 | 9575, 9577 | 13995 | 18781 | 23094858 |
| 22533415 | 815 | 5193 | 9579 | 13997 | 18785 | 23094859 |
| 22533416 | 817 | 5195 | 9581 | 13999 | 18787 | 23094860 |
| 22533417 | 819 | 5197 | 9583 | 14001, 14003 | 18789, 18791 | 23094861 |
| 22533418 | 821 | 5199 | 9585 | 14005 | 18793 | 23094862 |
| 22533420 | 823 | 4651 | 9589 | 14007 | 18797 | 23094863 |
| 22533421 | 825 | 4653, 5209 | 9591 | 14009 | 18799 | 23094864 |
| 22533426 | 827 | 5217 | 9599 | 14019 | 18809 | 23094868 |
| 22533422 | 829 | 5211 | 9593 | 14013 | 18801 | 23094865 |
| 22533427 | 831 | 5219 | 9601 | 14021 | 18811 | 23094869 |
| 22533428 | 833 | 5221 | 9603 | 14023, 14025 | 18813 | 23094870 |
| 22533429 | 835 | 5223 | 9605 | 14027 | 18815 | 23094871 |
| 22533430 | 837, 4049 | 4851 | 9629 | 14103 | 18817 | 23094872 |
| 22533431 | 839 | 4853 | 9631 | 14105 | 18819 | 23094873 |
| 22533432 | 841, 843 | 4855, 8777 | 9633 | 14107 | 18821 | 23094874 |
| 22533433 | 845 | 4857 | 9635 | 14109 | 18823 | 23094875 |
| 22533434 | 847 | 4859 | 9637 | 14111 | 18825 | 23094876 |
| 22533435 | 849 | 4861, 4863, 5225 | 9639 | 14113, 14115, | 18827, 18867, | 23094877 |
| | | | | 14117, 14159, | 18869 | |
| | | | | 14161 | | |
| 22533436 | 851 | 5227 | 9641 | 14119, 14163, | 18829, 18871 | 23094878 |
| 22533438 | 853 | 5229 | 9643 | 14121 | 18831 | 23094879 |
| 22533439 | 855 | 5231 | 9645 | 14123 | 18833 | 23094880 |
| 22533440 | 857 | 5233 | 9647 | 14125 | 18835 | 23094881 |
| 22533441 | 859 | 5235 | 9649 | 14127 | 18837 | 23094882 |
| 22533442 | 861 | 5237 | 9651 | 14129 | 18839 | 23094883 |
| 22533443 | 863 | 5239 | 9653 | 14135 | 18841 | 23094884 |
| 22533444 | 865 | 5241 | 9655, 9657 | 14137 | 18843, 18845 | 23094885 |
| 22533445 | 867 | 5243 | 9659 | 14139 | 18847 | 23094886 |
| 22533446 | 869 | 5245 | 9661, 9663 | 14141 | 18849 | 23094887 |
| 22533447 | 871 | 5247 | 9665 | 14143 | 18851 | 23094888 |
| 22533448 | 873 | 5249, 5251 | 9667, 9669 | 14145, 14147 | 18853, 18855 | 23094889 |
| 22533449 | 875 | 5253, 5255 | 9671 | 14149 | 18857 | 23094890 |
| 22533450 | 877 | 5257, 5641 | 9673 | 14151 | 18859 | 23094891 |
| 22533451 | 885 | 5259 | 9675 | 14153 | 18861 | 23094892 |
| 22533452 | 887, 3709 | 5261, 5265, 8417 | 9677, 12617 | 14155, 17403, | 18863, 22043 | 23094893 |
| | | | | 17419 | | |
| 22533453 | 889, 1187 | 5263, 5267, 8691, | ######### | 14157, 14165, | 18865, 18875, | 23094894, 23095037 |
| | | 8693, 8701, | | 14475, 17699, | 22479, 22483, | |
| | | 8711, 8723, 8731, | | 17701, 17751, | 22511, 22513, | |
| | | 8735, 8745, | | 17777, 17795, | 22517, 22539, | |
| | | 8753, 8755, 8761 | | 17799, 17837, | 22645, 22655, | |
| | | | | 17861, 17863, | 22657, 22669, | |
| | | | | 17865, 17867, | 22681, 22735 | |
| | | | | 17869, 17901, | | |
| | | | | 17917, 17937 | | |
| 22533454, 22535028 | 891 | 8345 | 9683, 12557 | 14167, 17301 | 22473 | 23094895, 24413563 |
| 22535029, 22535036 | 897, 3583, 4039 | 5269, 5271, 5273, | 9691, 9895 | 14173, 17215 | 18877, 18879, | 23094663, 23095697, |
| | | 8257 | | | 20369 | 24413550 |
| 22533458 | 903 | 5279 | 9695 | 14179 | 18925 | 23094910 |
| 22533460, 22533461 | 907, 909 | 5283 | 9699, 9701 | 14181, 14183 | 18929 | 23094912, 23094913 |
| 22533463 | 913 | 5287 | 9705 | 14187, 17695 | 18933 | 23094915 |
| 22533464 | 915 | 5297 | 9709 | 17689 | 18935 | 23094917 |
| 22533465 | 917 | 5299 | 9711 | 17687 | 18937, 18939 | 23094918 |
| 22533467 | 921 | 5301 | 9713 | 17807 | 18943 | 23094919 |
| 22533468 | 923 | 5303 | 9715, 9717 | 14189 | 18945, 18947 | 23094920 |
| 22533469 | 925 | 5305 | 9719 | 14191 | 18949 | 23094921 |
| 22533470 | 927 | 5307 | 9721 | 14193 | 18951 | 23094922 |
| 22533471 | 929 | 5309 | 9723 | 14195 | 18953 | 23094923, 23095104, |
| | | | | | | 23095466 |
| 22533472 | 931 | 5311 | 9725 | 14197 | 18955 | 23094924 |
| 22533473 | 933 | 5313 | 9727 | 14199, 14267 | 18957 | 23094925 |
| 22533474 | 939 | 5317 | 9731 | 14203 | 18963 | 23094927 |
| 22533475 | 941 | 5319, 5367 | 9733 | 14205 | 18965 | 23094928 |
| 22533476 | 943 | 5321 | 9735 | 14207 | 18967 | 23094929 |
| 22533478 | 945 | 5323 | 9737 | 14209, 14269, | 18969 | 23094930 |
| | | | | 14271 | | |
| 22533479 | 947 | 5325 | 9739 | 14211 | 18971 | 23094931 |
| 22533480 | 949 | 5327 | 9741 | 14213, 14273 | 18973 | 23094932 |
| 22533481 | 951 | 5329 | 9743 | 14215 | 18975 | 23094933 |
| 22533482 | 953 | 5331 | 9745 | 14217 | 18977 | 23094934 |
| 22533483 | 955 | 5333 | 9747 | 14219 | 18979 | 23094935 |
| 22533484 | 958 | 5336 | 9750 | 14222 | 18982 | |
| 22533485 | 959 | 5337 | 9751 | 14223 | 18983, 19025 | 23094936 |
| 22533486 | 961 | 5339 | 9753 | 14225 | 18985 | 23094937 |
| 22533487 | 963 | 5341 | 9755, 10049 | 14227 | 18987 | 23094938 |
| 22533488 | 965 | 5343 | 9757 | 14229 | 18989 | 23094939 |
| 22533489 | 967 | 5345 | 9759 | 14231 | 18991, 19027 | 23094940 |
| 22533490 | 969, 971 | 5347 | 9761 | 14233 | 18993 | 23094941 |
| 22533491 | 973 | 5349 | 9763 | 14235 | 18995 | 23094942 |
| 22533492 | 975 | 5351 | 9765 | 14237 | 18997 | 23094943 |
| 22533493 | 977 | 5353 | 9767 | 14239, 14275, | 18999 | 23094944 |
| | | | | 14277 | | |
| 22533494 | 979 | 5355 | 9769 | 14241 | 19001 | 23094945 |
| 22533495 | 981 | 5357 | 9771 | 14243 | 19003 | 23094946 |
| 22533496 | 983 | 5359 | 9773 | 14245 | 19005 | 23094947 |
| 22533497 | 985 | 5361 | 9775 | 14247 | 19007 | 23094948 |
| 22533498 | 987 | 5363 | 9777 | 14249 | 19009 | 23094949 |
| 22533499 | 989 | 5365, 5371 | 9779 | 14251 | 19011 | 23094950 |
| 22533501 | 993, 995 | 5373 | 9781 | 14253 | 19013, 19029 | 23094952 |
| 22533502 | 997 | 5375, 8763 | 9783 | 14255 | 19015 | 23094953 |
| 22533504 | 999, 1001 | 5377 | 9785 | 14257, 14279, | 19017 | 23094954 |
| | | | | 14281, 14283, | | |
| | | | | 14285 | | |
| 22533505 | 1003 | 5379 | 9787 | 14259 | 19019 | 23094955 |
| 22533506 | 1005 | 5381 | 9789 | 14261 | 19021 | 23094956 |
| 22533507 | 1007 | 5383 | 9791 | 14263 | 19023 | 23094957 |
| 22533509 | 1009 | 8635 | 9793 | 14265 | 19031 | 23094958 |
| 22533511, 22534495 | 1011, 2721 | 5385, 7323 | 9797, 11587 | 14289, 16195, | 19035, 21023 | 23094960, 24413115 |
| | | | | 17739 | | |
| 22533512 | 1013 | 5387 | 9799, 9801 | 14291 | 19037 | 23094962 |
| 22533513 | 1015 | 5389 | 9803 | 14293 | 19039 | 23094963 |
| 22533514 | 1017, 4075 | 5391 | 9805 | 14295 | 19041 | 23094964 |
| 22533515 | 1019, 3925, 4073 | 5393 | 9807 | 14297 | 19043 | 23094965 |
| 22533516 | 1021, 3923 | 5395 | 9809 | 14299 | 19045 | 23094966 |
| 22533517 | 1023 | 5397 | 9811 | 14301 | 19047 | 23094967 |
| 22533518 | 1025 | 5399 | 9813 | 14303 | 19049 | 23094968 |
| 22533519 | 1027 | 5401 | 9815 | 14305 | 19051 | 23094969 |
| 22533520 | 1029 | 5403 | 9817 | 14307 | 19053 | 23094970 |
| 22533521 | 1031 | 5405 | 9819, 9821 | 14309, 17779 | 19055 | 23094971 |
| 22533522 | 1033 | 5407 | 9823 | 14311 | 19057 | 23094972 |
| 22533523 | 1035 | 5409 | 9825 | 14313 | 19059 | 23094973 |
| 22533526 | 1039 | 5413 | 9827 | 14315 | 19173 | 23094975 |
| 22533527 | 1041 | 5415 | 9829 | 14317 | 19175 | 23094976 |
| 22533528, 22534375 | 1043 | 5417, 7081, 7097 | 9831, 11341 | 14319, 15951 | 19177, 20781 | 23094977, 24412999 |
| 22533529 | 1045 | 5419 | 9833 | 14321 | 19179 | 23094978 |
| 22533530 | 1047 | 5421 | 9835 | 14323 | 19181 | 23094979 |
| 22533531 | 1049 | 5423 | 9837 | 14325 | 19183 | 23094980 |
| 22533532 | 1051 | 5425, 8717 | 9839 | 14327 | 19185 | 23094981 |
| 22533533 | 1053 | 5427 | 9841 | 14329 | 19187 | 23094982 |
| 22533534 | 1055 | 5429, 5431 | 9843 | 14331 | 19189 | 23094983 |
| 22533535 | 1057 | 5433 | 9845 | 14333, 14335 | 19191 | 23094984 |
| 22533536 | 1059 | 5435 | 9847 | 14337 | 19193 | 23094985 |
| 22533537 | 1061 | 5437 | 9849 | 14339 | 19195 | 23094986 |
| 22533538 | 1065 | 5441 | 9853 | 14343 | 19199, 19241 | 23094988 |
| 22533539 | 1067 | 5443 | 9855 | 14345 | 19201 | 23094989 |
| 22533540 | 1069 | 5445 | 9857 | 14351 | 19203 | 23094990 |
| 22533541 | 1071 | 5447 | 9859 | 14353 | 19205 | 23094991 |
| 22533542 | 1073 | 5449 | 9861 | 14355, 14357, | 19207 | 23094992 |
| | | | | 14359 | | |
| 22533544 | 1075, 1077 | 5451, 5481 | 9863 | 14361 | 19209, 19243 | 23094993 |
| 22533545 | 1079 | 5453 | 9865 | 14363 | 19211 | 23094994 |
| 22533546 | 1081 | 5455 | 9867 | 14365 | 19213 | 23094995 |
| 22533547 | 1083, 4257 | 5457 | 9869 | 14367, 14443 | 19215 | 23094996 |
| 22533548 | 1085, 1087, 4259 | 5459 | 9871 | 14369, 14445 | 19217 | 23094997 |
| 22533550 | 1089, 1093 | 5461 | 9873 | 14371 | 19219 | 23094998 |
| 22533551 | 1091, 1095 | 5463 | 9875 | 14373 | 19221 | 23094999 |
| 22533552 | 1097 | 5465 | 9877 | 14375 | 19223 | 23095000 |
| 22533553 | 1099 | 5467 | 9879 | 14377 | 19225 | 23095001 |
| 22533554 | 1101 | 5469 | 9881 | 14379 | 19227, 19229 | 23095002 |
| 22533555 | 1103, 1105 | 5471 | 9883, 12785 | 14381 | 19231 | 23095003 |
| 22533556 | 1107 | 5473 | 9885 | 14383 | 19233 | 23095004 |
| 22533557 | 1109, 1111 | 5475 | 9887 | 14385 | 19235 | 23095005 |
| 22533558 | 1113 | 5477 | 9889 | 14387 | 19237 | 23095006 |
| 22533559 | 1115 | 5479 | 9891 | 14389 | 19239, 19245 | 23095007 |
| 22533560 | 1117 | 5483 | 9905 | 14391 | 19247 | 23095008 |
| 22533561 | 1119 | 5485, 8669 | 9907 | 14393 | 19249, 19251 | 23095009 |
| 22533564 | 1121 | 5487 | 9909 | 14395 | 19253 | 23095010 |
| 22533629 | 1125 | 5623 | 9913 | 14399 | 19257 | 23095011 |
| 22533631 | 1131 | 5631 | 9921 | 14407 | 19265 | 23095012 |
| 22533632 | 1133 | 5633 | 9923 | 14409 | 19267 | 23095013 |
| 22533633 | 1135, 1141 | 5635 | 9925 | 14411, 14447 | 19269 | 23095014 |
| 22533626, 22533637, | 1137, 4079 | 5615, 5651, 6749 | 9935, 11035 | 14423 | 19159, 19299, | 23095018, 23095676 |
| 22534163 | | | | | 20331 | |
| 22533634 | 1143 | 5637, 5643 | 9927 | 14413, 14449, | 19271, 19273 | 23095015 |
| | | | | 14451 | | |
| 22533635 | 1145 | 5639, 5645 | 9929 | 14415 | 19275 | 23095016 |
| 22533636 | 1147 | 5647 | 9931 | 14417, 14419 | 19277, 19295 | 23095017 |
| 22533639 | 1151 | 5655 | 9939 | 14427 | 19303 | 23095019 |
| 22533640 | 1153 | 5657 | 9941 | 14429, 14453 | 19305 | 23095020 |
| 22533641 | 1155, 1157 | 5659, 5661 | 9943 | 14431 | 19307 | 23095021 |
| 22533642 | 1159 | 5663 | 9945 | 14433, 14435 | 19309 | 23095022 |
| 22533643 | 1161 | 5665 | 9947 | 14437 | 19311 | 23095023 |
| 22533644 | 1163 | 5667 | 9949 | 14439 | 19313 | 23095024 |
| 22533645 | 1165 | 5669 | 9951 | 14441 | 19315 | 23095025 |
| 22533646 | 1167 | 5671 | 9953 | 14455 | 19317 | 23095026 |
| 22533647 | 1169 | 5673 | 9955 | 14457 | 19319, 19321 | 23095027 |
| 22533648 | 1171 | 5675 | 9957, 10007 | 14459 | 19323 | 23095028 |
| 22533649 | 1173 | 5677 | 9959 | 14461 | 19325 | 23095029 |
| 22533650 | 1175 | 5679, 5681 | 9961 | 14463 | 19327 | 23095030 |
| 22533652 | 1177 | 5683 | 9963 | 14465 | 19329 | 23095031 |
| 22534863 | 1197, 3357 | 8041 | 10075, 10077, | 14485, 14487, | 21759 | 23095040, 24413446 |
| | | | 12319 | 16967 | | |
| 22535098 | 1201, 3701 | 8407, 8409, 8495 | 12609 | 17393 | 22035 | 24413589 |
| 22533662, 22533663, | 1209, 1213, 1215, | 7203, 7205 | 10085, 10087, | 14495, 14497, | 20899, 20901 | 23095044, 23095045, |
| 22533665, | 1221, 2623, | | 10091, 11457, | 14501, 17847 | | 24413056, |
| 22534434, | 2625 | | 11459 | | | 24413057 |
| 22534435 | | | | | | |
| 22533664, 22534437, | 1217, 1219, 2629, | 7209 | 10089, 11463, | 14499, 14585 | 20905, 21501, | 23095046, 24413059 |
| 22534737 | 3099 | | 12027 | | 22537 | |
| 22534312 | 1225, 2403 | 5685 | 10095 | 14505 | 19331, 20649 | 24412939 |
| 22533671 | 1231 | 5693 | 10103 | 14513 | 19339 | 23095049 |
| 22533672 | 1233 | 5695 | 10105 | 14515 | 19341 | 23095050 |
| 22533673 | 1235 | 5697 | 10107 | 14517, 14519 | 19343 | 23095051 |
| 22533674 | 1237 | 5699 | 10109 | 14521 | 19347 | 23095052 |
| 22533675 | 1239 | 5701 | 10111 | 14523 | 19349, 19409 | 23095053 |
| 22533677 | 1241 | 5703 | 10113 | 14525 | 19351 | 23095055 |
| 22533678 | 1243 | 5705 | 10115 | 14527 | 19353 | 23095056 |
| 22533679 | 1245 | 5707 | 10117 | 14529 | 19355 | 23095057 |
| 22533680 | 1247 | 5709 | 10119 | 14531 | 19357 | 23095058 |
| 22533681 | 1249 | 5711 | 10121 | 14533 | 19359 | 23095059 |
| 22533682 | 1251 | 5713, 5737 | 10123 | 14535, 17815 | 19361 | 23095060 |
| 22533683 | 1253 | 5715 | 10125 | 14537, 14587 | 19363 | 23095061 |
| 22533684 | 1255 | 5717 | 10127 | 14539 | 19365 | 23095062 |
| 22533685 | 1257 | 5719 | 10129 | 14541, 14589, | 19367 | 23095063 |
| | | | | 17841 | | |
| 22533592, 22533686 | 1259, 1261 | 5721 | 10131 | 14543, 14591, | 19369 | 23095064 |
| | | | | 17839 | | |
| 22533687 | 1263 | 5723 | 10133 | 14545, 14593 | 19371 | 23095065 |
| 22534930 | 1277, 3389 | 8071 | 10147, 12347 | 14561, 16997 | 19387, 21787, | 24413460 |
| | | | | | 22625 | |
| 22533697 | 1295 | 5731 | 10165 | 14581 | 19405 | 23095068 |
| 22533698 | 1297 | 5733, 5735 | 10167, 10169, | 14583, 14603 | 19407 | 23095069 |
| | | | 10171 | | | |
| 22533699 | 1299 | 5739 | 10173 | 14605 | 19413 | 23095070 |
| 22533700 | 1301 | 5741, 5743 | 10175 | 14607 | 19415 | 23095071 |
| 22533701 | 1303 | 5745 | 10177 | 14609 | 19417, 19419 | 23095072 |
| 22533702 | 1305 | 5747, 5803 | 10179 | 14611, 14613 | 19421 | 23095073 |
| 22533703 | 1307 | 5749 | 10181 | 14615 | 19423 | 23095074 |
| 22533704 | 1309 | 5751 | 10183 | 14617 | 19425, 19427 | 23095075 |
| 22533705 | 1311 | 5755 | 10187 | 14621 | 19431 | 23095076 |
| 22533708 | 1313 | 5757 | 10189 | 14623 | 19433 | 23095077 |
| 22533709 | 1315 | 5759, 5761 | 10191 | 14625, 14683, | 19435 | 23095078 |
| | | | | 17733 | | |
| 22533710 | 1317, 1319 | 5763 | 10193 | 14627, 14685, | 19437 | 23095079 |
| | | | | 14689, 14695 | | |
| 22533711 | 1321 | 5765 | 10195 | 14629, 14687, | 19439 | 23095080 |
| | | | | 14691, 14693, | | |
| | | | | 14697, 14699 | | |
| 22533712 | 1323 | 5767 | 10197 | 14631 | 19441 | 23095081 |
| 22533713 | 1325 | 5769 | 10199 | 14633 | 19443 | 23095082 |
| 22533714 | 1327 | 5771 | 10201 | 14635 | 19445 | 23095083 |
| 22533715 | 1329 | 5773 | 10203 | 14637 | 19447 | 23095084 |
| 22533716 | 1331 | 5775 | 10205 | 14639, 17879 | 19449 | 23095085 |
| 22533717 | 1333 | 5777 | 10207 | 14641 | 19451 | 23095086 |
| 22533718 | 1335 | 5779 | 10209 | 14643, 17909 | 19453, 19477 | 23095087 |
| 22533719 | 1337 | 5781 | 10211 | 14645 | 19455 | 23095088 |
| 22533720 | 1339 | 5783 | 10213 | 14647 | 19457 | 23095089 |
| 22533721 | 1341 | 5785 | 10215 | 14649 | 19459 | 23095090 |
| 22533722 | 1343 | 5787 | 10217 | 14651 | 19461 | 23095091 |
| 22533723 | 1345, 1347 | 5789 | 10219 | 14653 | 19463, 19479 | 23095092 |
| 22533725 | 1349 | 5791 | 10221 | 14655 | 19465 | 23095093 |
| 22533726 | 1351 | 5793 | 10223 | 14657 | 19467 | 23095094 |
| 22533728 | 1353 | 5797, 8773 | 10227 | 14661 | 19471 | 23095096 |
| 22533729 | 1355 | 5799 | 10229 | 14663 | 19473 | 23095097 |
| 22533730 | 1357 | 5801 | 10231 | 14665 | 19475, 19481 | 23095098 |
| 22533731 | 1359 | 5805 | 10233 | 14667 | 19483, 19485 | 23095099 |
| 22533732 | 1361 | 5807 | 10235 | 14669 | 19487 | 23095100 |
| 22533733 | 1363 | 5809 | 10237 | 14671 | 19489 | 23095150 |
| 22533734 | 1365 | 5811 | 10239 | 14673 | 19491, 19493 | 23095151 |
| 22533735 | 1367 | 5813 | 10241 | 14675 | 19495 | 23095152 |
| 22533736 | 1369 | 5815 | 10243 | 14677 | 19497 | 23095153 |
| 22533737 | 1371 | 5817 | 10245 | 14679 | 19499 | 23095154 |
| 22533738 | 1373, 1375 | 5819 | 10247 | 14681, 14707 | 19501, 22659 | 23095155 |
| 22533739 | 1377 | 5821 | 10249 | 14709 | 19503 | 23095156 |
| 22533740 | 1379 | 5823 | 10251 | 14701, 14711 | 19505 | 23095157 |
| 22533741 | 1381 | 5825 | 10253 | 14703, 14713 | 19507 | 23095158 |
| 22533742 | 1383 | 5827 | 10255 | 14705, 14717 | 19509 | 23095159 |
| 22533743 | 1385 | 5829, 8779 | 10257 | 14719 | 19511 | 23095160 |
| 22533744 | 1387 | 5831 | 10259 | 14721 | 19513 | 23095161 |
| 22533746 | 1389 | 5833 | 10261 | 14723 | 19515, 19521 | 23095162 |
| 22533747 | 1391 | 5835 | 10263 | 14725 | 19517, 19519, | 23095163 |
| | | | | | 19523, 19525 | |
| 22533748 | 1393 | 5837 | 10265 | 14727 | 19527 | 23095164 |
| 22533751 | 1395 | 5843 | 10271 | 14733 | 19533 | 23095166 |
| 22533752 | 1397 | 5845 | 10273 | 14735 | 19535 | 23095167 |
| 22533753 | 1399 | 5847 | 10275 | 14737 | 19537 | 23095168 |
| 22533754 | 1401 | 5849 | 10277 | 14739 | 19539 | 23095169 |
| 22533756 | 1403 | 5853 | 10281 | 14743 | 19543 | 23095171 |
| 22533757 | 1405, 1407 | 5855 | 10283 | 14745, 14749 | 19545 | 23095172 |
| 22533758 | 1409 | 5857 | 10285 | 14747, 14751 | 19547 | 23095173 |
| 22533759 | 1411 | 5859 | 10287 | 14753 | 19549 | 23095174 |
| 22533760, 22535069 | 1413, 3647, 3649 | 5861, 8355, 8391 | 10289 | 14755, 17311 | 19551 | 23095175 |
| 22533761 | 1415 | 5863 | 10291 | 14757 | 19553 | 23095201 |
| 22533762 | 1417 | 5865 | 10293 | 14759 | 19555 | 23095202 |
| 22533763 | 1419 | 5867 | 10295 | 14761 | 19557 | 23095203 |
| 22533764 | 1421 | 5869 | 10297 | 14763 | 19559 | 23095204 |
| 22533765 | 1423 | 5871 | 10299 | 14765 | 19561 | 23095205 |
| 22533766 | 1425 | 5873 | 10301 | 14767 | 19563 | 23095206 |
| 22533767 | 1427 | 5875 | 10303 | 14769 | 19565 | 23095207 |
| 22533768 | 1429 | 5877 | 10305 | 14771 | 19567 | 23095208 |
| 22533770 | 1431 | 5879 | 10307 | 14773 | 19569, 22591 | 23095209 |
| 22533772 | 1433 | 5883 | 10311 | 14781 | 19573 | 23095211 |
| 22533773 | 1435 | 5885 | 10313 | 14783 | 19575 | 23095212 |
| 22533774 | 1437 | 5887 | 10315 | 14785 | 19577 | 23095213 |
| 22533775 | 1439 | 5889 | 10317 | 14787 | 19579 | 23095214 |
| 22533777 | 1441 | 5891 | 10319, 10321 | 14789, 14809 | 19581 | 23095215 |
| 22533778 | 1443 | 5893 | 10323 | 14791 | 19583 | 23095216 |
| 22533779 | 1445 | 5895 | 10325 | 14793 | 19585 | 23095217 |
| 22533780 | 1447 | 5897 | 10327 | 14795 | 19587 | 23095218 |
| 22533781 | 1449 | 5899 | 10329 | 14797 | 19589 | 23095219 |
| 22533782 | 1451 | 5901 | 10331 | 14799 | 19591 | 23095220 |
| 22533783 | 1453 | 5903 | 10333 | 14801 | 19593 | 23095221 |
| 22533784 | 1455 | 5905 | 10335 | 14803 | 19595 | 23095222 |
| 22533787 | 1457 | 5909 | 10339 | 14807 | 19599 | 23095224 |
| 22533789, 22534806 | 1459, 1461, 3235 | 5913, 7927 | 10345, 12199, | 14817, 16835, | 19605, 21643 | 23095226, 24413392 |
| | | | 12201 | 16837 | | |
| 22533791 | 1463 | 5917 | 10349 | 14821 | 19609 | 23095228 |
| 22533792 | 1465 | 5919 | 10351 | 14823, 14825 | 19611 | 23095229 |
| 22533793 | 1467 | 5921 | 10353 | 14827 | 19613 | 23095230 |
| 22533794 | 1469 | 5923 | 10355 | 14829 | 19615, 19625 | 23095231 |
| 22533795 | 1471 | 5925 | 10357 | 14831 | 19617 | 23095232 |
| 22533796 | 1473 | 5927 | 10359 | 14833 | 19619 | 23095233 |
| 22533797 | 1475 | 5929 | 10361 | 14835 | 19621 | 23095234 |
| 22533798 | 1477, 1479 | 5931 | 10363 | 14837 | 19623, 19627 | 23095235 |
| 22533799 | 1481 | 5933 | 10365 | 14839 | 19629 | 23095236 |
| 22533803 | 1483 | 5941 | 10373 | 14847 | 19637 | 23095240 |
| 22533804 | 1485 | 5943 | 10375 | 14849 | 19639 | 23095241 |
| 22533805 | 1487 | 5945 | 10377 | 14851 | 19641 | 23095242 |
| 22533806 | 1489 | 5947 | 10379 | 14853 | 19643 | 23095243 |
| 22533807 | 1491, 1493 | 5949 | 10381 | 14855, 14881 | 19645 | 23095244 |
| 22533808 | 1495 | 5951 | 10383 | 14857, 14885 | 19647 | 23095245 |
| 22533809 | 1497 | 5953 | 10385 | 14859 | 19649, 19651 | 23095246 |
| 22533811 | 1499 | 5955 | 10387 | 14861 | 19653 | 23095247 |
| 22533812 | 1501 | 5957 | 10389 | 14863, 14887 | 19655, 19657 | 23095248 |
| 22533813 | 1503 | 5959 | 10391 | 14865, 14889 | 19659 | 23095249 |
| 22533814 | 1505 | 5961 | 10393 | 14867 | 19661 | 23095250 |
| 22533815 | 1507 | 5963 | 10395 | 14869 | 19663 | 23095251 |
| 22533816 | 1509 | 5965 | 10397 | 14871 | 19665 | 23095252 |
| 22533817 | 1511 | 5967 | 10399 | 14873 | 19667 | 23095253 |
| 22533818 | 1513 | 5969 | 10401 | 14875 | 19669 | 23095254 |
| 22533819 | 1515 | 8653 | 10403 | 14877 | 19671 | 23095255 |
| 22533826 | 1517 | 5987 | 10415, 10417 | 14901 | 19683 | 23095261 |
| 22533827 | 1519 | 5989 | 10419 | 14903 | 19685 | 23095262 |
| 22533828 | 1521 | 5991 | 10421 | 14905, 14951 | 19687, 19689 | 23095263 |
| 22533829 | 1523 | 5993 | 10423 | 14907 | 19691 | 23095264 |
| 22533830 | 1525 | 5995 | 10425 | 14909 | 19693 | 23095265 |
| 22533833 | 1527 | 5997, 5999 | 10427 | 14911 | 19695 | 23095266 |
| 22533834 | 1529 | 4783, 6001 | 10429 | 13657, 14913 | 19697 | 23094634, 23095267 |
| 22533835 | 1531 | 6003 | 10431 | 14915 | 19699 | 23095268 |
| 22533837 | 1533 | 6009 | 10435 | 14919 | 19703 | 23095270 |
| 22533838 | 1535 | 6011 | 10437 | 14921 | 19705 | 23095271 |
| 22533839 | 1537 | 6013 | 10439 | 14923 | 19707 | 23095272 |
| 22533840 | 1539 | 6015, 6017 | 10441 | 14925 | 19709 | 23095273 |
| 22533841 | 1541, 1543 | 6019 | 10443 | 14927 | 19711, 22693 | 23095274 |
| 22533842 | 1545 | 6021 | 10445 | 14929 | 19713 | 23095275 |
| 22533843 | 1547, 1549, 3971 | 6023 | 10447 | 14931 | 19715 | 23095276 |
| 22533844 | 1551 | 6025 | 10449, 10795 | 14933, 15361 | 19717, 20093 | 23095277 |
| 22533845 | 1553, 1555 | 6027 | 10451 | 14935 | 19719 | 23095278 |
| 22533846 | 1557 | 6029 | 10453 | 14937 | 19721 | 23095279 |
| 22533847 | 1559, 4217 | 6031 | 10455 | 14939 | 19723 | 23095280 |
| 22533849 | 1561, 4011 | 6035 | 10459 | 14943 | 19727 | 23095282 |
| 22533848 | 1563 | 6033 | 10457 | 14941 | 19725 | 23095281 |
| 22533850 | 1565 | 6037 | 10461 | 14945 | 19729 | 23095283 |
| 22533851 | 1567 | 6039 | 10463 | 14947 | 19731, 19773 | 23095284 |
| 22533852 | 1569 | 6041 | 10465 | 14949, 14953 | 19733 | 23095285 |
| 22533855 | 1571 | 6045, 8699 | 10467 | 14955 | 19735 | 23095287 |
| 22533856 | 1573 | 6047, 8697 | 10469 | 14957 | 19737, 19775 | 23095288 |
| 22533857 | 1575, 1577 | 6049 | 10471 | 14959 | 19739 | 23095289 |
| 22533858 | 1581 | 6051 | 10473 | 14961 | 19741 | 23095290 |
| 22533859 | 1583 | 6053 | 10475 | 14963 | 19743 | 23095291 |
| 22533860 | 1585, 1593 | 6055 | 10477 | 14965 | 19745 | 23095292 |
| 22533861 | 1587, 1595, 4285 | 6057 | 10479 | 14967 | 19747 | 23095293 |
| 22533862 | 1589, 1597, 4283 | 6059 | 10481 | 14969 | 19749 | 23095294 |
| 22533863 | 1591, 1599, 4281 | 6061, 7307 | 10483 | 14971 | 19751, 21121, | 23095295 |
| | | | | | 22615, 22689 | |
| 22533864 | 1601 | 6063 | 10485 | 14973 | 19753, 19755 | 23095296 |
| 22533865 | 1603 | 6065 | 10487 | 14975 | 19757 | 23095297 |
| 22533866 | 1605 | 6067 | 10489 | 14977 | 19759, 19777 | 23095298 |
| 22533867 | 1607, 4025 | 6069, 6071 | 10491 | 14979 | 19761 | 23095299 |
| 22533868 | 1609, 4027 | 6073 | 10493 | 14981 | 19763 | 23095300 |
| 22533869 | 1611 | 6075 | 10495 | 14983 | 19765 | 23095301 |
| 22533870 | 1613 | 6077 | 10497 | 14985 | 19767, 19779 | 23095302 |
| 22533871 | 1615 | 6079 | 10499 | 14987 | 19769 | 23095303 |
| 22533872 | 1617 | 6081 | 10501 | 14989, 15001, | 19771 | 23095304 |
| | | | | 17905 | | |
| 22533873 | 1619 | 6083 | 10503 | 14991 | 19781 | 23095305 |
| 22533874 | 1625 | 6085 | 10505 | 14993 | 19783, 19785 | 23095306 |
| 22533875 | 1629 | 6089 | 10509 | 14999 | 19789 | 23095308 |
| 22533878 | 1633, 1637, 4105 | 6093 | 10513 | 15003 | 19793 | 23095310 |
| 22533879 | 1635, 1639, 4107 | 6095 | 10515 | 15005 | 19795 | 23095311 |
| 22533880 | 1641 | 6097 | 10517 | 15007 | 19797 | 23095312 |
| 22533881 | 1643 | 6099 | 10519 | 15009 | 19799 | 23095313 |
| 22533882 | 1645 | 6101 | 10521 | 15011 | 19801, 19813, | 23095314 |
| | | | | | 19815 | |
| 22533883 | 1647 | 6103 | 10523 | 15013, 15083 | 19803 | 23095315 |
| 22533884 | 1649 | 6105 | 10525 | 15015 | 19805 | 23095316 |
| 22533886 | 1651, 1653, 1655 | 6107, 6109 | 10527 | 15017 | 19807, 19817 | 23095317 |
| 22533887 | 1657 | 6111 | 10529 | 15019 | 19809 | 23095318 |
| 22533888 | 1659 | 6113 | 10531 | 15021 | 19811 | 23095319 |
| 22533889 | 1661 | 6115, 6119 | 10533 | 15023 | 19821 | 23095320 |
| 22533890 | 1663 | 6117, 6121 | 10535 | 15025, 15027 | 19823 | 23095321 |
| 22533891 | 1665, 1667, 4161 | 6123, 6125 | 10537 | 15029, 15081 | 19825 | 23095322 |
| 22533893 | 1671, 1673, 1675, | 6129 | 10541, 10543 | 15033 | 19829 | 23095323 |
| | 1677, 4129 | | | | | |
| 22533894 | 1679, 1681 | 6131 | 10545 | 15035 | 19831 | 23095324 |
| 22533895 | 1683 | 6133 | 10547 | 15037 | 19833 | 23095325 |
| 22533896 | 1685 | 6135 | 10549 | 15039 | 19835 | 23095326 |
| 22533898 | 1687 | 6137 | 10551 | 15041, 15085 | 19837 | 23095327 |
| 22533899 | 1689 | 6139 | 10553 | 15043 | 19839 | 23095328 |
| 22533900 | 1691 | 6141 | 10555 | 15045 | 19841 | 23095329 |
| 22533901 | 1693, 1695 | 6143 | 10557 | 15047 | 19843, 19899 | 23095330 |
| 22533902 | 1697 | 6145 | 10559 | 15049 | 19845 | 23095331 |
| 22533903 | 1699 | 6147 | 10561 | 15051 | 19847 | 23095332 |
| 22533906 | 1703 | 6153 | 10567 | 15059 | 19853 | 23095335 |
| 22533907 | 1705 | 6155 | 10569, 10573 | 15061 | 19855 | 23095336 |
| 22533908 | 1707, 1709 | 6157 | 10575 | 15063 | 19857 | 23095337 |
| 22533909 | 1711 | 6159 | 10577 | 15065 | 19859 | 23095338 |
| 22533911 | 1713 | 6163 | 10581 | 15069 | 19863 | 23095340 |
| 22533912 | 1715 | 6165, 8677 | 10583 | 15071, 15087 | 19865 | 23095341 |
| 22533913 | 1717 | 6167 | 10585 | 15073 | 19867 | 23095342 |
| 22533914 | 1719 | 6169 | 10587 | 15075 | 19869 | 23095343 |
| 22533915 | 1721, 1723 | 6171 | 10589 | 15077 | 19871 | 23095344 |
| 22533916 | 1725 | 6173 | 10591 | 15079, 15089 | 19873 | 23095345 |
| 22533917 | 1727 | 6175 | 10593 | 15091 | 19875 | 23095346 |
| 22533918 | 1729 | 6177 | 10595 | 15093 | 19877 | 23095347 |
| 22533927 | 1733 | 6185 | 10599 | 15097 | 19881 | 23095370 |
| 22533928 | 1735 | 6187 | 10601 | 15099 | 19883 | 23095371 |
| 22533929 | 1737 | 6189, 6225 | 10603, 10605 | 15101, 15103 | 19885 | 23095372 |
| 22533931 | 1739 | 6229 | 10609 | 15107 | 19889 | 23095374 |
| 22533932 | 1741 | 6231 | 10611 | 15109 | 19891 | 23095375 |
| 22533933 | 1743 | 6233 | 10613, 10615 | 15111, 15139 | 19893 | 23095376 |
| 22533934 | 1745 | 6235 | 10617 | 15113 | 19895 | 23095377 |
| 22533935 | 1747 | 6237 | 10619 | 15115 | 19897 | 23095378 |
| 22533959 | 1755 | 6245 | 10627 | 15123 | 19907 | 23095382 |
| 22533960 | 1757 | 6247 | 10629 | 15125 | 19909 | 23095383 |
| 22533961 | 1759 | 6249, 6325 | 10631 | 15127 | 19911 | 23095384 |
| 22533962 | 1761 | 6251 | 10633 | 15129 | 19913 | 23095385 |
| 22533963 | 1763 | 6253 | 10635 | 15131 | 19915 | 23095386 |
| 22533966 | 1767 | 6257 | 10639 | 15135 | 19919 | 23095387 |
| 22533968 | 1769 | 6259 | 10641 | 15137 | 19921 | 23095388 |
| 22533969 | 1771 | 6261 | 10643 | 15141 | 19923 | 23095389 |
| 22533970 | 1773 | 6263 | 10645 | 15143 | 19925 | 23095390 |
| 22533971 | 1775 | 6265 | 10647 | 15145 | 19927 | 23095391 |
| 22533972 | 1777 | 6267 | 10649 | 15147 | 19929 | 23095392 |
| 22533973 | 1779 | 6269 | 10651 | 15149 | 19931 | 23095393 |
| 22533974 | 1781 | 6271 | 10653 | 15151 | 19933 | 23095394 |
| 22533424, 22533976 | 1783 | 5213, 6275 | 9595, 10657 | 14015, 15155 | 18803, 19937 | 23094866, 23095396 |
| 22533977 | 1785, 3955 | 6277 | 10659 | 15157 | 19939 | 23095397 |
| 22533978 | 1787, 3957 | 6279 | 10661 | 15159 | 19941 | 23095398 |
| 22533979 | 1789 | 6281 | 10663 | 15161 | 19943 | 23095399 |
| 22533980 | 1791 | 6283 | 10665 | 15163, 15167 | 19945 | 23095400 |
| 22533981 | 1793 | 6285 | 10667 | 15165 | 19947 | 23095401 |
| 22533982 | 1795, 4007, 4009 | 6287 | 10669 | 15169 | 19949, 19951 | 23095402 |
| 22533983 | 1797 | 6289 | 10671 | 15171 | 19953 | 23095403 |
| 22533984 | 1799 | 6291 | 10673 | 15173 | 19955 | 23095404 |
| 22533986 | 1801 | 6293 | 10675, 10677 | 15175, 15177 | 19957 | 23095405 |
| 22533987 | 1803, 1805 | 6295 | 10679 | 15179, 15181 | 19959 | 23095406 |
| 22533990 | 1811 | 6329 | 10683 | 15231 | 19965 | 23095407 |
| 22533991 | 1813 | 6331 | 10685 | 15233 | 19967 | 23095408 |
| 22533992 | 1815 | 6333 | 10687 | 15235 | 19969, 20041 | 23095409 |
| 22533993 | 1817 | 6335 | 10689 | 15237 | 19971 | 23095410 |
| 22533994 | 1819 | 6337 | 10691 | 15239 | 19973 | 23095411 |
| 22533995 | 1823 | 6341 | 10695, 10697 | 15245 | 19977 | 23095413 |
| 22533996 | 1825 | 6343 | 10699 | 15247, 15259 | 19979 | 23095414 |
| 22533997 | 1827 | 6345 | 10701 | 15249, 15261, | 19981 | 23095415 |
| | | | | 15263 | | |
| 22533998 | 1829 | 6347 | 10703 | 15251 | 19983 | 23095416 |
| 22533999 | 1831 | 6349 | 10705 | 15253 | 19989 | 23095417 |
| 22534000 | 1833 | 6351 | 10707 | 15255 | 19991 | 23095418 |
| 22533157, 22534001 | 1835 | 4631, 6353, 6355 | 9071, 10709 | 13491, 15257, | 19993 | 23094571, 23095419 |
| | | | | 15265, 15293, | | |
| | | | | 15295, 17951 | | |
| 22534002 | 1837 | 6357 | 10711 | 15267, 15297, | 19995, 22611 | 23095420 |
| | | | | 15299 | | |
| 22534003 | 1839 | 6359 | 10713 | 15269 | 19997 | 23095421 |
| 22534004 | 1841 | 6361, 6383 | 10715 | 15271, 15301 | 19999 | 23095470 |
| 22534005 | 1843 | 6363 | 10717 | 15273 | 20001 | 23095471 |
| 22534007 | 1845 | 6365 | 10719 | 15275 | 20003 | 23095472 |
| 22534008 | 1847 | 6367 | 10721 | 15277 | 20005 | 23095473 |
| 22534009 | 1849 | 6369 | 10723 | 15279, 15303 | 20007 | 23095474 |
| 22534010 | 1851 | 6371 | 10725 | 15281 | 20009, 20043 | 23095475 |
| 22534011 | 1853 | 6373 | 10727 | 15283 | 20011 | 23095476 |
| 22534012 | 1855 | 6375 | 10729 | 15285 | 20013 | 23095477 |
| 22534013 | 1857 | 6377 | 10731 | 15287 | 20015 | 23095478 |
| 22534014 | 1859 | 6379 | 10733 | 15289 | 20017, 20045 | 23095479 |
| 22534015, 22535008 | 1861, 3547 | 6381, 6385, 8233 | 10735, 12503 | 15291, 17187, | 20019, 20021 | 23095480, 24413534 |
| | | | | 17229 | 20023, 21927 | |
| — | 1862 | 6386 | 10736 | 15292 | 20024 | |
| 22534016 | 1863 | 6387, 6389, 6391, | 10737 | 15305, 17697 | 20025 | 23095481 |
| | | 6393 | | | | |
| 22534017, 22534018 | 1865, 1867 | 6395 | 10739, 10741 | 15307, 15309 | 20027, 20029 | 23095482, 23095483 |
| 22534022 | 1869 | 6403 | 10749 | 15317 | 20037 | 23095487 |
| 22534023 | 1871, 1873 | 6405 | 10751 | 15319 | 20039 | 23095488 |
| 22534025 | 1875 | 6409 | 10755 | 15323 | 20049 | 23095490 |
| 22534026 | 1877 | 6411 | 10757, 10759, | 15325, 15327, | 20051, 20053 | 23095491 |
| | | | 10763 | 15329, 17801 | | |
| 22534027 | 1879 | 6413 | 10765 | 15331 | 20055 | 23095492 |
| 22534029 | 1881 | 6415, 6451, 6453 | 10767 | 15333, 15407 | 20057, 20059 | 23095493 |
| 22534030 | 1883 | 6455 | 10769 | 15335 | 20061 | 23095494 |
| 22534031 | 1885 | 4743, 6457 | 10771 | 15337 | 20063 | 23095495 |
| 22534032 | 1887 | 6459 | 10773 | 15339 | 20065 | 23095496 |
| 22534033 | 1889 | 6461, 6465 | 10775 | 15341 | 20067 | 23095497 |
| 22534034 | 1891 | 6463, 6467, 6471 | 10777 | 15343 | 20069 | 23095498 |
| 22534035 | 1893 | 6469, 6473 | 10779 | 15345 | 20071, 20079 | 23095499 |
| 22534036 | 1895 | 6475 | 10781 | 15347 | 20073 | 23095500 |
| 22534037 | 1897 | 6477 | 10783 | 15349 | 20075 | 23095501 |
| 22534038 | 1899 | 6479 | 10785 | 15351 | 20077, 20081 | 23095502 |
| 22534039 | 1901 | 6481 | 10787 | 15353 | 20083 | 23095503 |
| 22534040 | 1903 | 6483 | 10789 | 15355 | 20085 | 23095504 |
| 22534041 | 1905 | 6485, 8719 | 10761, 10791 | 15357 | 20087, 20089 | 23095505 |
| 22534049, 22534057, | 1917, 1941, 1945, | 6501, 6523, 6525 | 10801, 10835 | 15377 | 20113, 20115, | 23095518, 23095519 |
| 22534058 | 1947 | | | | 22549 | |
| 22534054, 22534717, | 1919, 1921, 1931, | 6503, 6505, 6515, | 10803, 10813, | 15369, 16655, | 20095, 20107, | 23095515, 24413307 |
| 22534736 | 1935 | 7761 | 10815, 10821, | 17945 | 21461 | |
| | | | 10823, 10829, | | | |
| | | | 11993, 11995 | | | |
| 22534053, 22534738 | 1929, 1933, 3101 | 6513 | 12029 | 16689 | 21503 | 23095514 |
| | 1942 | 6524 | 10836 | 15378 | 20114 | |
| 22534059 | 1949 | 6527, 6539 | 10837 | 15379 | 20117 | 23095520 |
| 22534060 | 1951 | 6529 | 10839 | 15381 | 20119 | 23095521 |
| 22534062 | 1953 | 6533, 6535 | 10843 | 14883, 15385 | 20123 | 23095523 |
| 22534064 | 1957 | 6545 | 10849 | 15387 | 20129 | 23095525 |
| 22534065 | 1959 | 6547 | 10851 | 15389 | 20131 | 23095526 |
| 22534066 | 1961 | 6549 | 10853 | 15391, 15409 | 20133, 20149 | 23095527 |
| 22534067 | 1963 | 6551 | 10855 | 15393 | 20135 | 23095528 |
| 22534068 | 1965 | 6553 | 10857 | 15395 | 20137 | 23095529 |
| 22534069 | 1967 | 6555 | 10859 | 15397 | 20139 | 23095530 |
| 22534070 | 1969 | 6557 | 10861 | 15399 | 20141 | 23095531 |
| 22534071 | 1971 | 6559 | 10863 | 15401 | 20143 | 23095532 |
| 22534073 | 1973 | 6561 | 10865 | 15403 | 20145 | 23095533 |
| 22534074 | 1975 | 6563 | 10867 | 15405, 17745 | 20147 | 23095534 |
| 22534076 | 1979 | 6569 | 10873 | 15417 | 20151, 22491 | 23095537 |
| 22534078 | 1981 | 6571 | 10875 | 15419 | 20153 | 23095538 |
| 22534079 | 1983 | 6573 | 10877 | 15421 | 20155 | 23095539 |
| 22534080 | 1985 | 6575 | 10879 | 15423 | 20157 | 23095540 |
| 22534081 | 1987 | 6577 | 10881 | 15425 | 20159, 20243 | 23095541 |
| 22534082 | 1989 | 6579 | 10883 | 15427 | 20161 | 23095542 |
| 22534083 | 1991 | 6581 | 10885 | 15429 | 20163 | 23095543 |
| 22534084 | 1993 | 6583 | 10887 | 15431 | 20165 | 23095544 |
| 22534085 | 1995 | 6585 | 10889 | 15433, 17835 | 20167 | 23095545 |
| 22534086 | 1997 | 6587 | 10891 | 15435 | 20169 | 23095546 |
| 22534087 | 1999 | 6589 | 10893 | 15437 | 20171 | 23095547 |
| 22534088 | 2001 | 6591 | 10895 | 15439 | 20173 | 23095548 |
| 22534089 | 2003 | 6593 | 10897 | 15441 | 20175 | 23095549 |
| 22534090 | 2005, 4063 | 6595 | 10899 | 15443 | 20177 | 23095550 |
| 22534095 | 2007 | 6597 | 10901 | 15445 | 20179, 22633 | 23095552 |
| 22534096 | 2009, 2011 | 6599 | 10903 | 15447 | 20181 | 23095553 |
| 22534097 | 2013 | 6601 | 10905 | 15449 | 20183, 20245 | 23095554 |
| 22534098 | 2015 | 6603 | 10907 | 15451 | 20185, 20247 | 23095555 |
| 22534099 | 2017 | 6605 | 10909 | 15453 | 20187 | 23095556 |
| 22534100 | 2019 | 6607 | 10911 | 15455 | 20189 | 23095557 |
| 22534101 | 2021 | 6609 | 10913 | 15457 | 20191 | 23095558 |
| 22534102 | 2023 | 6611, 8775 | 10915 | 15459 | 20193 | 23095559 |
| 22534103 | 2025 | 6613 | 10917 | 15461 | 20195 | 23095560 |
| 22534104 | 2027 | 6615 | 10919 | 15463 | 20197 | 23095561 |
| 22534106 | 2029 | 6617 | 10921 | 15465 | 20199 | 23095562 |
| 22534107 | 2031 | 6619 | 10923 | 15467 | 20201 | 23095563 |
| 22534108 | 2033 | 6621 | 10925 | 15469 | 20203 | 23095564 |
| 22534109 | 2035 | 6623, 6641 | 10927 | 15471 | 20205 | 23095565 |
| 22534110 | 2037 | 6625, 6643, 8729 | 10929 | 15473, 15481 | 20207 | 23095566 |
| 22534111 | 2039 | 6627 | 10931 | 15475 | 20209 | 23095567 |
| 22534112 | 2041 | 6629 | 10933 | 15477 | 20211 | 23095629 |
| 22534113 | 2043, 2045 | 6631 | 10935 | 15479, 15483 | 20213 | 23095630 |
| 22534114 | 2047, 4137, 4261 | 6633 | 10937, 12801 | 15485, 17613 | 20215, 22273 | 23095631 |
| 22534115 | 2049, 2051, 3837 | 6635 | 10939, 10941 | 15487, 17639 | 20217, 20219, | 23095632 |
| | | | | | 22297 | |
| 22534117 | 2053, 2055 | 6637 | 10943 | 15489, 17765, | 20221 | 23095633 |
| | | | | 17767 | | |
| 22534118 | 2057 | 6647 | 10945 | 15491 | 20223 | 23095634 |
| 22534119 | 2059 | 6649 | 10947 | 15493 | 20225 | 23095635 |
| 22534120 | 2061 | 6651 | 10949, 10951 | 15495 | 20227 | 23095636 |
| 22534121 | 2063 | 6653 | 10953 | 15497 | 20229 | 23095637 |
| 22534122 | 2065 | 6655 | 10955 | 15499 | 20231 | 23095638 |
| 22534123 | 2067 | 6657 | 10957 | 15501 | 20233 | 23095639 |
| 22534124 | 2069 | 6659 | 10959 | 15503 | 20235 | 23095640 |
| 22534125 | 2071 | 6661 | 10961 | 15505 | 20237 | 23095641 |
| 22534126 | 2073 | 6663 | 10963 | 15507 | 20239 | 23095642 |
| 22534127 | 2075 | 6665 | 10965 | 15509 | 20241 | 23095643 |
| 22534128 | 2077 | 6667 | 10967 | 15511 | 20249 | 23095644 |
| 22534129 | 2079 | 6669 | 10969, 11025 | 15513, 15563 | 20251 | 23095645 |
| 22534130 | 2081 | 6671 | 10971 | 15515 | 20253 | 23095646 |
| 22534131 | 2083 | 6673 | 10973 | 15517 | 20255 | 23095647 |
| 22534132 | 2085 | 6675, 6677 | 10975 | 15519 | 20257 | 23095648 |
| 22534133 | 2087 | 6679 | 10977, 13075 | 15521 | 20259 | 23095649 |
| 22534330 | 2089, 2437, 2439 | 6997 | 11253 | 15843 | 20687 | 24412958 |
| 22534134 | 2091 | 6639, 6681 | 10979 | 15523, 15565, | 20261 | 23095650 |
| | | | | 15571 | | |
| 22534135 | 2093 | 6683 | 10981 | 15525, 15567 | 20263 | 23095651 |
| 22534136 | 2095 | 6685 | 10983 | 15527 | 20265 | 23095652 |
| 22534137 | 2097 | 6687 | 10985 | 15529, 15573 | 20267 | 23095653 |
| 22534138 | 2099 | 6689, 6767 | 10987 | 15531 | 20269 | 23095654 |
| 22534140 | 2101 | 6691 | 10989 | 15533 | 20271 | 23095655 |
| 22534141 | 2103 | 6693, 6769 | 10991 | 15535 | 20273 | 23095656 |
| 22534142 | 2105 | 6695 | 10993 | 15537 | 20275 | 23095657 |
| 22534143 | 2107 | 6697 | 10995 | 15539 | 20277 | 23095658 |
| 22534144 | 2109 | 6699 | 10997 | 15541 | 20279 | 23095659 |
| 22534145 | 2111 | 6701 | 10999 | 15543 | 20281 | 23095660 |
| 22534146 | 2113 | 6703 | 11001 | 15545 | 20283 | 23095661 |
| 22534147 | 2115 | 6705 | 11003 | 15547 | 20285 | 23095662 |
| 22534148 | 2117 | 6707 | 11005 | 15549, 15551 | 20287 | 23095663 |
| 22534149 | 2119, 2121 | 6709, 6715, 6717, | 11007 | 15553, 15555 | 20289, 20291, | 23095664 |
| | | 6719 | | | 20297, 20299, | |
| | | | | | 20301 | |
| 22534151 | 2123 | 6721 | 11009 | 15557, 15569 | 20303 | 23095665 |
| 22534152 | 2125 | 6723 | 11011 | 15559 | 20305 | 23095666 |
| | | 6774 | 11030 | 17716 | 20326 | |
| 22534170 | 2127 | 6761 | 11047 | 15591 | 20343 | 23095682 |
| 22534171 | 2129 | 6763 | 11049 | 15593 | 20345, 20347 | 23095683 |
| 22534172 | 2131 | 6765, 6771, 8705 | 11051 | 15595 | 20349 | 23095684 |
| 22534173 | 2133 | 6773 | 11053 | 15597, 15599, | 20351 | 23095685 |
| | | | | 15601 | | |
| 22534174 | 2135 | 6775, 6777 | 11055 | 15603 | 20353 | 23095686 |
| 22534175 | 2137 | 6779 | 11057 | 15605 | 20355 | 23095687 |
| 22534176 | 2139 | 6781 | 11059 | 15607 | 20357 | 23095688 |
| 22534177 | 2141, 4145 | 6783 | 11061, 11063 | 15609 | 20359 | 23095689 |
| | 2142 | 6784 | 11064 | 15610 | 20360 | |
| 22534181 | 2153 | 6795 | 11071 | 15617 | 20379 | 23095701 |
| 22534182 | 2155 | 6797 | 11073 | 15619 | 20381 | 23095702 |
| 22534183 | 2157 | 6799 | 11075 | 15621 | 20383 | 23095703 |
| 22534184 | 2159 | 6787, 6801 | 11077 | 15623 | 20385 | 23095704 |
| 22534185 | 2161 | 6803 | 11079 | 15625 | 20387 | 23095705 |
| 22534186 | 2163, 2165 | 6805 | 11081 | 15627 | 20389 | 23095706 |
| 22534187 | 2167 | 6807 | 11083 | 15629 | 20391 | 23095707 |
| 22534188 | 2169 | 6809 | 11085 | 15631, 15633 | 20393 | 23095708 |
| 22534190 | 2171 | 6811 | 11087 | 15635 | 20395 | 23095709 |
| 22534200 | 2173, 4191 | 6827, 6943 | 11103 | 15651 | 20411 | 23095717 |
| 22534201 | 2175 | 6829 | 11105 | 15653, 15655 | 20413 | 23095718 |
| 22534202 | 2177 | 6831, 6945 | 11107 | 15657 | 20415 | 23095719 |
| 22534203 | 2179 | 6833 | 11109 | 15659 | 20417 | 23095720 |
| 22534204 | 2181 | 6835 | 11111 | 15661 | 20419 | 23095721 |
| 22534205 | 2183 | 6837 | 11113 | 15663 | 20421 | 23095722 |
| 22534206 | 2185 | 6839 | 11115 | 15671 | 20423 | 23095723 |
| 22534207 | 2187 | 6841, 6947 | 11117 | 15673 | 20425 | 23095724 |
| 22534208 | 2189 | 6843 | 11119 | 15675 | 20427 | 23095725 |
| 22534209 | 2191 | 6845 | 11121 | 15677 | 20429, 20441 | 23095726 |
| 22534210 | 2193 | 6847 | 11123 | 15679 | 20431, 20443 | 23095727 |
| 22534211, 22535115 | 2195, 2197, 3735, | 5103, 6849, 8443 | 11125, 12643 | 15681, 17443 | 20433, 22067 | 23095728, 24413604 |
| | 3737, 3739 | | | | | |
| 22534212 | 2199 | 6851 | 11127 | 15683 | 20435 | 23095729 |
| 22534214 | 2201 | 6855 | 11129 | 15685 | 20437 | 23095730 |
| 22534215 | 2203 | 6857 | 11131, 11133 | 15687 | 20445 | 23095731 |
| 22534216 | 2205, 2207 | 6859 | 11135 | 15689 | 20447, 20449 | 23095732 |
| 22534217 | 2209 | 6861, 6863 | 11137 | 15691 | 20451 | 23095733 |
| 22534218 | 2211 | 6865 | 11139 | 15693 | 20453, 20525, | 23095734 |
| | | | | | 20527 | |
| 22534219 | 2213 | 6867 | 11141 | 15695, 17919 | 20455, 20529 | 23095735 |
| 22534220 | 2215 | 6869 | 11143 | 15697 | 20457 | 23095736 |
| 22534221 | 2217 | 6871 | 11145 | 15699, 15773 | 20459 | 23095737 |
| 22534222 | 2219 | 6873 | 11147 | 15701, 17755 | 20461 | 23095738 |
| 22534223 | 2221 | 6875 | 11149 | 15703 | 20463 | 23095739 |
| 22534224 | 2223 | 6877 | 11151 | 15705, 15775 | 20465 | 23095740 |
| 22534225 | 2225 | 6879 | 11153 | 15707 | 20467 | 23095741 |
| 22534226 | 2227 | 6881 | 11155 | 15709 | 20469 | 23095742 |
| 22534227 | 2229 | 6883 | 11157 | 15711 | 20471 | 23095743 |
| 22534228 | 2231 | 6885 | 11159 | 15713 | 20473 | 23095744 |
| 22534229 | 2233 | 6889 | 11161 | 15715 | 20475 | 24412859 |
| 22534230 | 2235 | 6891 | 11163 | 15717 | 20477 | 24412860 |
| 22534231 | 2237 | 6893 | 11165 | 15719 | 20479 | 24412861 |
| 22534232 | 2239 | 6895 | 11167 | 15721 | 20481 | 24412862 |
| 22534233 | 2241 | 6897 | 11169 | 15723 | 20483 | 24412863 |
| 22534235 | 2243 | 6899 | 11171 | 15725 | 20485 | 24412864 |
| 22534236 | 2245 | 6901 | 11173 | 15727 | 20487 | 24412865 |
| 22534237 | 2247, 2249 | 6903 | 11175 | 15729 | 20489 | 24412866 |
| 22534239 | 2253, 2255 | 6905 | 11179 | 15733 | 20491 | 24412867 |
| 22534240 | 2257, 2259 | 6907 | 11181 | 15735 | 20493 | 24412868 |
| 22534241 | 2261 | 6909 | 11183 | 15737 | 20495 | 24412869 |
| 22534242 | 2263 | 6911 | 11185 | 15739 | 20497 | 24412870 |
| 22534243 | 2265 | 6913 | 11187 | 15741 | 20499 | 24412871 |
| 22534244 | 2267 | 6915 | 11189 | 15743 | 20501, 22713 | 24412872 |
| 22534245 | 2269 | 6917 | 11191 | 15745 | 20503 | 24412873 |
| 22534246 | 2271 | 6919, 6921 | 11193, 11195 | 15747, 15749 | 20505 | 24412874 |
| 22534247 | 2273, 2275, 2277, | 6923 | 11197, 11199 | 15751, 17741 | 20507 | 24412875 |
| | 2279, 2281 | | | | | |
| 22534248 | 2287 | 6927 | 11203 | 15755 | 20511 | 24412877 |
| 22534249 | 2289 | 6929 | 11205 | 15757 | 20513 | 24412878 |
| 22534250 | 2291 | 6931 | 11207 | 15759 | 20515 | 24412879 |
| 22534257 | 2295 | 6949 | 11219 | 15777 | 20531 | 24412886 |
| 22534258, 22534268 | 2297, 2327 | 6951, 6973 | 11221, 11241 | 15779 | 20551 | 24412887, 24412893 |
| 22534259, 22534269 | 2299, 2301, 2329 | 6953, 6965, 6975 | 11223, 11243 | 15781, 15807 | 20533 | 24412888 |
| 22534260 | 2303 | 6955 | 11225 | 15783 | 20535 | 24412889 |
| 22534261 | 2305 | 6961 | 11231 | 15789 | 20541 | 24412890 |
| 22534262 | 2307 | 6963 | 11233 | 15791 | 20543 | 24412891 |
| | 2313 | 6967 | 11235 | 15795 | 20545 | |
| 22534264 | 2315, 3961 | 6969, 6971 | 11239 | 15797 | 20549 | 23094836, 23095149, |
| | | | | | | 23095422, |
| | | | | | | 23095568 |
| 22534272 | 2335 | 6979 | 11247 | 15809 | 22489, 22497 | 24412895 |
| 22534325 | 2427, 4031 | 6981 | 13003 | 15831 | 20679 | 24412954 |
| 22534326 | 2429, 2431, 4029 | 6983 | 13001 | 15835 | 20681 | 24412955 |
| 22534327 | 2433 | 6985, 6991, 6993 | 11249 | 15837, 15839, | 20683 | 24412956 |
| | | | | 15845 | | |
| 22534329 | 2435 | 6995 | 11251 | 15841 | 20685 | 24412957 |
| 22534332 | 2441 | 6999 | 11255 | 15847 | 20689 | 24412959 |
| 22534333 | 2443 | 7001, 7003 | 11257, 11259 | 15849, 15851, | 20691, 20693 | 24412960 |
| | | | | 15857 | | |
| 22534335 | 2445 | 7005 | 11263 | 15855, 15859 | 20697 | 24412961 |
| 22534336 | 2447 | 7007 | 11265 | 15861 | 20699 | 24412962 |
| 22534337 | 2449 | 7009 | 11267 | 15863 | 20701 | 24412963 |
| 22534339 | 2451 | 7013 | 11271 | 15867 | 20705 | 24412964 |
| 22533322, 22534340 | 2453 | 4981, 7015 | 9411, 11273 | 13801, 15869 | 18555, 20707 | 24412965 |
| 22534341 | 2455 | 7017 | 11275 | 15871, 15899 | 20709 | 24412966 |
| 22534342 | 2457 | 7019 | 11277 | 15873 | 20711, 20713 | 24412967 |
| 22534343 | 2459 | 7021 | 11279 | 15875 | 20715 | 24412968 |
| 22534344 | 2461 | 7023 | 11281 | 15877 | 20717 | 24412969 |
| 22534345 | 2463 | 7025 | 11283 | 15879 | 20719 | 24412970 |
| 22534346 | 2465 | 7027 | 11285 | 15881 | 20721 | 24412971 |
| 22534347 | 2467 | 7029 | 11287 | 15883 | 20723 | 24412972 |
| 22534348 | 2469 | 7031 | 11289 | 15885 | 20725 | 24412973 |
| 22534349 | 2471 | 7033 | 11291 | 15887 | 20727 | 24412974 |
| 22534350 | 2473 | 7035 | 11293 | 15889 | 20729 | 24412975 |
| 22534351 | 2475 | 7037 | 11295 | 15891 | 20731 | 24412976 |
| 22534352 | 2477 | 7039 | 11297 | 15893 | 20733 | 24412977 |
| 22534353 | 2479 | 8663 | 11299 | 15895 | 20735 | 24412978 |
| 22534354 | 2481 | 8661 | 11301 | 15897, 15901 | 20737 | 24412979 |
| 22534359 | 2483, 2485 | 7041, 8739 | 11309 | 15909 | 20745 | 24412983 |
| 22534360 | 2487 | 7043 | 11311 | 15911, 15913 | 20747 | 24412984 |
| 22534361 | 2489 | 7045 | 11313 | 15915 | 20749 | 24412985 |
| 22534362 | 2491 | 7047 | 11315 | 15917 | 20751 | 24412986 |
| 22534363 | 2493, 2495 | 7049 | 11317 | 15919 | 20753, 20767 | 24412987 |
| 22534364 | 2497 | 7051 | 11319 | 15921 | 20755 | 24412988 |
| 22534365 | 2499 | 7053 | 11321 | 15923, 15925 | 20757 | 24412989 |
| 22534366 | 2501 | 7055, 7057 | 11323, 11351 | 15927 | 20759 | 24412990 |
| 22534367 | 2503 | 7059 | 11325 | 15929 | 20761 | 24412991 |
| 22534368 | 2505 | 7061 | 11327 | 15931, 15935 | 20763 | 24412992 |
| 22534369 | 2507 | 7063 | 11329 | 15933, 15937 | 20765 | 24412993 |
| 22534370 | 2509 | 7065 | 11331 | 15939 | 20769 | 24412994 |
| 22534371 | 2511 | 7071 | 11333 | 15941 | 20771 | 24412995 |
| 22534372 | 2513 | 7073, 7075 | 11335 | 15943, 15945 | 20773, 20775 | 24412996 |
| 22534373, 22534971 | 2515, 3467, 3469, | 4363, 7077, 8149 | 11337, 12427 | 15947, 17083 | 20777, 21847 | 24412914, 24412997, |
| | 3471, 3959 | | | | | 24413497 |
| 22534377 | 2517 | 7083 | 11343 | 15953 | 20783 | 24413000 |
| 22534378 | 2519 | 7085 | 11345 | 15955 | 20785 | 24413001 |
| 22534379 | 2521 | 7087 | 11347 | 15957 | 20787 | 24413002 |
| 22534380 | 2523 | 7089 | 11349, 11353, | 15959, 15965 | 20789 | 24413003 |
| | | | 13065 | | | |
| 22534381 | 2525 | 7091 | 11355 | 15961 | 20791, 20793 | 24413004 |
| 22534382 | 2527 | 7093 | 11357, 11359 | 15963 | 20795 | 24413005 |
| 22534383 | 2529 | 7101, 7103 | 11361 | 15967 | 20797, 20799 | 24413006 |
| 22534386 | 2535 | 7107 | 11367 | 15969, 15971 | 20803 | 24413009 |
| 22534387 | 2537 | 7109 | 11369 | 15973 | 20805 | 24413010 |
| 22534388 | 2539 | 7111, 7113 | 11371, 11373 | 15975 | 20807 | 24413011 |
| 22534389 | 2541 | 7115 | 11375 | 15977 | 20809, 20811 | 24413012 |
| 22534390 | 2543 | 7117 | 11377 | 15979 | 20813 | 24413013 |
| 22534391 | 2545 | 7119 | 11379 | 15981 | 20815, 20817 | 24413014 |
| 22534392 | 2547 | 7121 | 11381 | 15983 | 20819 | 24413015 |
| 22534393 | 2549 | 7123 | 11383 | 15985 | 20821 | 24413016 |
| 22534394 | 2551 | 7125 | 11385 | 15987 | 20823 | 24413017 |
| 22534395 | 2553 | 7127 | 11387 | 15989 | 20825 | 24413018 |
| 22534396 | 2555 | 7129 | 11389 | 15991 | 20827 | 24413019 |
| 22534397 | 2557 | 7131 | 11391 | 15993 | 20829 | 24413020 |
| 22534398 | 2559 | 7133 | 11393 | 15995 | 20831 | 24413021 |
| 22534400 | 2561 | 7135 | 11395 | 15997 | 20837 | 24413022 |
| 22534401 | 2563 | 7137 | 11397 | 15999 | 20839 | 24413023 |
| 22534403 | 2569 | 7139 | 11401 | 16003 | 20843, 20845 | 24413025 |
| 22534404 | 2571 | 5973, 7141 | 11403 | 16027 | 20847 | 24413026 |
| 22534405 | 2573 | 5971, 7143, 7147 | 11405 | 16029 | 20849, 20851 | 24413027 |
| 22534406 | 2575 | 7149 | 11407 | 16031 | 20853 | 24413028 |
| 22534407 | 2577 | 7151 | 11409 | 16033 | 20855 | 24413029 |
| 22534408 | 2579 | 7153 | 11411 | 16035 | 20857 | 24413030 |
| 22534409 | 2581 | 7155, 7163 | 11413 | 16037 | 20859, 20861 | 24413031 |
| 22534410 | 2583 | 7157 | 11415 | 16039 | 22523 | 24413032 |
| 22534412 | 2587 | 7161 | 13069 | 16043 | 22519 | 24413034 |
| 22534416 | 2589 | 7167 | 11421, 11423 | 16047 | 20865 | 24413038 |
| 22534417 | 2591 | 7169, 7171 | 11425 | 16049 | 20867 | 24413039 |
| 22534418 | 2593 | 7173 | 11427 | 16051 | 20869 | 24413040 |
| 22534419 | 2595 | 7175 | 11429 | 16053 | 20871 | 24413041 |
| 22534420 | 2597, 3977 | 7177 | 11431 | 16055 | 20873 | 24413043 |
| 22534421 | 2599, 3979 | 7179 | 11433 | 16057, 16059 | 20875 | 24413044 |
| 22534422 | 2601 | 7181 | 11435 | 16061 | 20877 | 24413045 |
| 22534423 | 2603 | 7183 | 11437 | 16063 | 20879 | 24413046 |
| 22534424 | 2605 | 7185 | 11439 | 16065 | 20881 | 24413047 |
| 22534425 | 2607 | 7187 | 11441, 11491 | 16067 | 20883 | 24413048 |
| 22534427 | 2609 | 7189 | 11443, 11493 | 16069, 16071 | 20885 | 24413049 |
| 22534428 | 2611 | 7191 | 11445 | 16073 | 20887 | 24413050 |
| 22534429 | 2613 | 7193 | 11447 | 16077 | 20889 | 24413051 |
| 22534156, 22534430 | 2615 | 6733, 7195 | 11017, 11449 | 16079 | 20315, 20891 | 24413052 |
| 22534431 | 2617 | 7197 | 11451 | 16081 | 20893 | 24413053 |
| 22534432 | 2619 | 7199 | 11453 | 16083 | 20895 | 24413054 |
| 22534438 | 2633 | 7213 | 11467 | 16099, 17731 | 20909 | 24413061 |
| 22534439 | 2635 | 7215 | 11469 | 16101 | 20911 | 24413062 |
| 22534440 | 2637 | 7217 | 11471 | 16103, 16111 | 20913 | 24413063 |
| 22534441 | 2639 | 7219 | 11473 | 16105 | 20915 | 24413064 |
| 22534442 | 2641 | 7221 | 11475 | 16107 | 20917 | 24413065 |
| 22534443 | 2643 | 7223 | 11477 | 16109, 16113 | 20919 | 24413066 |
| 22534444 | 2645 | 7225, 7237 | 11479 | 16115 | 20921 | 24413067 |
| 22534445 | 2647 | 7227 | 11481 | 16117 | 20923 | 24413068 |
| 22534446 | 2649 | 7229, 7235 | 11483 | 16119, 16127, | 20925 | 24413069 |
| | | | | 16129 | | |
| 22534447 | 2651, 2653 | 7231 | 11485 | 16121 | 20927, 20929 | 24413070 |
| 22534448 | 2655 | 7233, 8759 | 11487 | 16123 | 20931 | 24413071 |
| 22534449 | 2657 | 8757 | 11489 | 16125 | 20933 | 24413072 |
| 22534455 | 2659 | 7247 | 11503 | 16139 | 20943 | 24413077 |
| 22534456 | 2661, 2663 | 7249, 8751 | 11505 | 16141 | 20945 | 24413078 |
| 22534457 | 2665 | 8749 | 11507 | 16143, 17791 | 20947 | 24413079 |
| 22534461 | 2669 | 7251 | 11511, 11513 | 16145, 16147 | 20953, 20955, | 24413083 |
| | | | | | 22653 | |
| 22534462 | 2671, 2673 | 7253 | 11515 | 16149 | 20957 | 24413084 |
| 22534463 | 2675 | 7255 | 11517 | 16151 | 20959 | 24413085 |
| 22534465 | 2677 | 7259 | 11521 | 16157 | 20963 | 24413087 |
| 22534474 | 2679 | 7273 | 11539, 11541 | 16179 | 20979 | 24413094 |
| 22534477 | 2687 | 7281 | 11549 | 16011 | 20987 | 24413098 |
| 22534478 | 2689 | 7283 | 11551 | 16013 | 20989 | 24413099 |
| 22534483 | 2699 | 7293 | 11561 | 16005 | 21001 | 24413104 |
| 22534491 | 2711 | 7305, 7313, 7347 | 11573 | 16025 | 21013, 22661 | 24413110 |
| 22534492 | 2715 | 7317 | 11581 | 16185, 16191 | 21017, 21123 | 24413112 |
| 22534493 | 2717 | 7319 | 11583 | 16187 | 21019 | 24413113 |
| 22534494 | 2719 | 7321, 7349, 7351 | 11585 | 16189, 16193 | 21021 | 24413114 |
| 22534496 | 2723 | 7325 | 11589 | 16197 | 21025 | 24413116 |
| 22534497 | 2725 | 7327 | 11591 | 16199 | 21027 | 24413117 |
| 22534498 | 2727 | 7329, 8747 | 11593 | 16201, 16217 | 21029 | 24413118 |
| 22534153, 22534499 | 2729 | 6725, 7331 | 11013, 11595 | 15561, 16203, | 20307, 21031 | 23095667 |
| | | | | 17845 | | |
| 22534500 | 2731 | 7333 | 11597 | 16205 | 21035 | 24413119 |
| 22534501 | 2733 | 7335 | 11599 | 16207 | 21037 | 24413120 |
| 22534502 | 2735 | 7337, 7355, 8737 | 11601 | 16209 | 21039, 22515 | 24413121 |
| 22534503 | 2737 | 7339 | 11603 | 16213 | 21041 | 24413122 |
| 22534504 | 2739 | 7341, 8767 | 11605 | 16215, 16219 | 21043 | 24413123 |
| 22534505 | 2741 | 7343 | 11607 | 16221, 16299 | 21045 | 24413124 |
| 22534507 | 2743 | 7345 | 11609 | 16223 | 21047 | 24413125 |
| 22534508 | 2745 | 7357 | 11611 | 16225 | 21049 | 24413126 |
| 22534509 | 2747 | 7359 | 11613 | 16227 | 21051 | 24413127 |
| 22534510 | 2749 | 7361 | 11615 | 16229 | 21053 | 24413128 |
| 22534511 | 2751 | 7363 | 11617 | 16231 | 21055, 21125 | 24413129 |
| 22534512 | 2753 | 7365 | 11619 | 16233 | 21057, 21127 | 24413130 |
| 22534514 | 2755 | 7367 | 11621 | 16235 | 21059 | 24413131 |
| 22534528 | 2761 | 7395 | 11641 | 16257, 16301 | 21079 | 24413141 |
| 22534529 | 2763 | 7397 | 11643 | 16259, 16303 | 21081 | 24413142 |
| 22534530 | 2765, 2767 | 7399 | 11645 | 16261 | 21083 | 24413143 |
| 22534537 | 2769 | 7409 | 11653 | 16271 | 21091 | 24413147 |
| 22534538 | 2771 | 7411 | 11655 | 16273 | 21093 | 24413148 |
| 22534540 | 2773 | 7415 | 11659 | 16277, 16305, | 21097 | 24413150 |
| | | | | 17793 | | |
| 22534541 | 2775, 2777 | 7417 | 11661 | 16279 | 21099, 21133 | 24413151 |
| 22534542 | 2779 | 7419 | 11663 | 16281 | 21101 | 24413152 |
| 22534543 | 2781 | 7421 | 11665 | 16283 | 21103 | 24413153 |
| 22534544 | 2783 | 7423 | 11667 | 16285, 16287 | 21105 | 24413154 |
| 22534545 | 2785 | 7425 | 11669 | 16289 | 21107 | 24413155 |
| 22534546 | 2787 | 7427 | 11671 | 16291 | 21109 | 24413156 |
| 22534547 | 2789 | 7429 | 11673 | 16293 | 21111 | 24413157 |
| 22534548 | 2791 | 7431 | 11675 | 16295 | 21113 | 24413158 |
| 22534549 | 2793 | 7433 | 11677 | 16297 | 21115 | 24413159 |
| 22534552 | 2801 | 7437, 7439 | 11681 | 16307 | 21135 | 24413161 |
| 22534553 | 2803 | 7441, 8765 | 11683 | 16309 | 21139 | 24413162 |
| 22534554 | 2805 | 7443 | 11685 | 16311 | 21141 | 24413163 |
| 22534558 | 2811 | 7445 | 11687 | 16317 | 21143 | 24413165 |
| 22534560 | 2813, 2815 | 7447 | 11689, 11691 | 16319 | 21145 | 24413166 |
| 22534561 | 2817 | 7449 | 11693 | 16321 | 21147 | 24413167 |
| 22534562 | 2819 | 7451 | 11695 | 16323 | 21149 | 24413168 |
| 22534563 | 2821, 2823 | 7453 | 11697 | 16325 | 21151, 21153 | 24413169 |
| 22534565 | 2825 | 7457 | 11701 | 16331 | 21157 | 24413171 |
| 22534566 | 2827 | 7459 | 11703 | 16333 | 21159 | 24413172 |
| 22534567 | 2829 | 7461 | 11705 | 16335 | 21161 | 24413173 |
| 22534568 | 2831 | 7463 | 11707 | 16337 | 21163 | 24413174 |
| 22534569 | 2833 | 7465 | 11709 | 16339 | 21165 | 24413175 |
| 22534571 | 2835 | 7467 | 11711 | 16341, 16421 | 21167 | 24413176 |
| 22534572 | 2837 | 7469 | 11713 | 16343, 16345, | 21169 | 24413177 |
| | | | | 16423 | | |
| 22534573 | 2839 | 7471 | 11715 | 16347 | 21171 | 24413178 |
| 22534574 | 2845 | 7477 | 11719 | 16351 | 21175 | 24413181 |
| 22534575 | 2847 | 7479 | 11721 | 16353 | 21177 | 24413182 |
| 22534576 | 2849 | 7481 | 11723 | 16355 | 21179 | 24413183 |
| 22534577 | 2851 | 7483 | 11725 | 16357 | 21181 | 24413184 |
| 22534578, 22534581 | 2853 | 7485, 7487 | 11727 | 16359, 16361 | 21183 | 24413185 |
| 22534582 | 2855, 2857 | 7489, 7533 | 11729 | 16363, 17775 | 21185 | 24413186 |
| 22534583 | 2859 | 7491 | 11731 | 16365 | 21187 | 24413187 |
| 22534584 | 2861 | 7493 | 11733 | 16367 | 21189 | 24413188 |
| 22534585 | 2863 | 7495 | 11735 | 16369 | 21191 | 24413189 |
| | 2864 | 7496 | 11736 | 16370 | 21192 | |
| 22534587 | 2865 | 7497 | 11737 | 16371, 17787 | 21193 | 24413190 |
| 22534588 | 2867, 2869 | 7499, 8689 | 11739 | 16373 | 21195 | 24413191 |
| 22534589 | 2871 | 7501 | 11741 | 16375 | 21197 | 24413192 |
| 22534590 | 2873 | 7503 | 11743 | 16377 | 21199 | 24413193 |
| 22534592 | 2875 | 7505 | 11745 | 16379 | 21203 | 24413194 |
| 22534593 | 2877 | 7507 | 11747 | 16381 | 21205 | 24413195 |
| 22534594 | 2879 | 7509 | 11749 | 16383, 16425 | 21207 | 24413196 |
| 22534595 | 2881 | 7511 | 11751 | 16385, 16427 | 21209, 21211 | 24413197 |
| 22534597 | 2883 | 7515 | 11755 | 16389, 16391 | 21215 | 24413199 |
| 22534598 | 2885 | 7517 | 11757 | 16393 | 21217 | 24413200 |
| | 2887 | 7520 | 11760 | 16395 | 21220 | |
| 22534599 | 2889 | 7521 | 11761 | 16397 | 21221 | 24413202 |
| 22534602 | 2891 | 7525 | 11765 | 16401 | 21225 | 24413203 |
| 22534603 | 2893 | 7527 | 11767 | 16403 | 21227 | 24413204 |
| 22534604 | 2895, 2897 | 7529 | 11769 | 16405 | 21229 | 24413205 |
| 22534605 | 2899 | 7531, 7537 | 11771 | 16407 | 21231, 21243 | 24413206 |
| 22534606 | 2905 | 7539 | 11773 | 16411 | 21233 | 24413207 |
| 22534607, 22534608 | 2907, 2909 | 7541, 7543 | 11775, 11777 | 16413 | 21235, 21237 | 24413208, 24413209 |
| 22534609 | 2911 | 7545 | 11779 | 16415 | 21239 | 24413210 |
| 22534610 | 2913 | 7547 | 11781 | 16417 | 21241 | 24413211 |
| 22534612 | 2915 | 7549 | 11783 | 16419 | 21245, 21247 | 24413212 |
| 22534613 | 2917 | 7551 | 11785 | 16429 | 21249 | 24413213 |
| 22534615 | 2919 | 7553, 7555 | 11787 | 16431, 16433 | 21251 | 24413214 |
| 22534616 | 2921 | 7557 | 11789, 11791 | 16435 | 21253 | 24413215 |
| 22534617 | 2923 | 7559 | 11793 | 16437 | 21255 | 24413216 |
| 22534618 | 2925, 2927 | 7561 | 11795 | 16439 | 21257 | 24413217 |
| 22534619 | 2929 | 7563, 7565 | 11797 | 16441 | 21259, 21261 | 24413218 |
| 22534620 | 2931 | 7567 | 11799 | 16443 | 21263 | 24413219 |
| 22534621 | 2933 | 7569 | 11801, 13037 | 16445 | 21265 | 24413220 |
| 22534622 | 2935 | 7571 | 11803 | 16447 | 21267 | 24413221 |
| 22534623 | 2937 | 7573 | 11805 | 16449 | 21269 | 24413222 |
| 22534624 | 2939 | 7575 | 11807 | 16451, 16453 | 21271 | 24413223 |
| 22534625 | 2941 | 7577 | 11809 | 16455 | 21273 | 24413224 |
| 22534626 | 2943 | 7579 | 11811 | 16457 | 21275 | 24413225 |
| 22534627 | 2945 | 7581 | 11813 | 16459 | 21277 | 24413226 |
| 22534628 | 2947 | 7583 | 11815 | 16461 | 21279 | 24413227 |
| 22534629 | 2949, 4123, 4125 | 7585, 7587 | 11817 | 16463 | 21281, 21283 | 24413228 |
| 22534630 | 2951, 4127 | 7589 | 11819, 11821 | 16465 | 21285 | 24413229 |
| 22534632 | 2955 | 7593 | 11825 | 16469 | 21287 | 24413231 |
| 22534633 | 2957 | 7595 | 11827 | 16471 | 21289 | 24413232 |
| 22534634 | 2959 | 7597 | 11829 | 16473 | 21291 | 24413233 |
| 22534635 | 2961 | 7599, 8713 | 11831 | 16475 | 21293 | 24413234 |
| 22534636 | 2963 | 7601 | 11833 | 16477 | 21295 | 24413235 |
| 22534637 | 2965 | 7603 | 11835 | 16479 | 21297 | 24413236 |
| 22534639 | 2967 | 7605 | 11837, 11841 | 16481 | 21299 | 24413237 |
| 22534640 | 2969 | 7607, 7609 | 11839, 11843 | 16483 | 21301 | 24413238 |
| 22534641 | 2971 | 7611 | 11845 | 15205, 16485 | 21303 | 24413239 |
| 22534642 | 2973 | 7613 | 11847 | 16487, 16535 | 21305 | 24413240 |
| 22534643 | 2975 | 7615 | 11849 | 16489 | 21307 | 24413241 |
| 22534644 | 2977 | 7617 | 11851 | 16491, 16537 | 21309 | 24413242 |
| 22534645 | 2979 | 7619 | 11853 | 16493 | 21311 | 24413243 |
| 22534646 | 2981 | 7621 | 11855 | 16495 | 21313 | 24413244 |
| 22534647 | 2983 | 7623 | 11857 | 16497 | 21315 | 24413245 |
| 22534649 | 2987 | 7627 | 11861 | 16501 | 21321 | 24413246 |
| 22534651 | 2989 | 7629 | 11863 | 16503 | 21323, 21359 | 24413247 |
| 22534652 | 2991 | 7631 | 11865 | 16505 | 21325 | 24413248 |
| 22534653 | 2993 | 7633 | 11867 | 16507 | 21327 | 24413249 |
| 22534654 | 2995 | 7635 | 11869 | 16509 | 21329 | 24413250 |
| 22534655 | 2997 | 7637 | 11871 | 16511 | 21331 | 24413251 |
| 22534656 | 2999 | 7639 | 11873 | 16513 | 21333 | 24413252 |
| 22534658 | 3001 | 7641 | 11875 | 16515 | 21335 | 24413253 |
| 22534659 | 3003 | 7643, 7645 | 11877 | 16517 | 21337 | 24413254 |
| 22534660 | 3005 | 7647 | 11879, 13111 | 16519 | 21339 | 24413255 |
| 22534661 | 3007 | 7649 | 11881 | 16521 | 21341 | 24413256 |
| 22534662 | 3009 | 7651 | 11883 | 16523 | 21343 | 24413257 |
| 22534668 | 3011 | 7663 | 11895 | 16541 | 21361 | 24413263 |
| 22534669 | 3013 | 7665 | 11897 | 16543 | 21363 | 24413264 |
| 22534670 | 3015 | 7667 | 11899 | 16545 | 21365 | 24413265 |
| 22534671 | 3017 | 7669 | 11901 | 16547 | 21367 | 24413266 |
| 22534672 | 3019 | 7671 | 11903 | 16549, 17843 | 21369 | 24413267 |
| 22534673 | 3021 | 7673 | 11905 | 16551 | 21371 | 24413268 |
| 22534674 | 3023 | 7675 | 11907 | 16553 | 21373 | 24413269 |
| 22534675 | 3025 | 7677 | 11909 | 16555 | 21375 | 24413270 |
| 22534677 | 3027 | 7681 | 11913 | 16559 | 21377 | 24413271 |
| 22534679 | 3029 | 7683 | 11915 | 16573 | 21379 | 24413272 |
| 22534680 | 3031 | 7685 | 11917 | 16575 | 21381 | 24413273 |
| 22534682 | 3035 | 7689 | 11921 | 16579, 16581 | 21385 | 24413274 |
| 22534683 | 3037 | 7691 | 11923 | 16583 | 21387 | 24413275 |
| 22534684 | 3039 | 7693 | 11925 | 16585 | 21389 | 24413276 |
| 22534685 | 3041 | 7695 | 11927 | 16587 | 21391 | 24413277 |
| 22534687 | 3043 | 7697 | 11929 | 16589 | 21393 | 24413278 |
| 22534688, 22535015 | 3045, 3563, 3565, | 7699, 8243 | 11931, 12513 | 16591, 16593, | 21395, 21937 | 24413279, 24413539 |
| | 4071 | | | 17199, 17231 | | |
| 22534689 | 3047 | 7701 | 11933 | 16595 | 21397 | 24413280 |
| 22534690 | 3049 | 7703 | 11935 | 16597 | 21399 | 24413281 |
| 22534691 | 3051 | 7705, 7707 | 11937 | 16599 | 21401 | 24413282 |
| 22534692 | 3053 | 7709 | 11939 | 16601 | 21403 | 24413283 |
| 22534699 | 3055 | 7725 | 11953 | 16615 | 21421 | 24413290 |
| 22534700 | 3057, 4169 | 7727 | 11955 | 16617 | 21423, 21439 | 24413291 |
| 22534701 | 3059, 4171 | 7729 | 11957 | 16619 | 21425 | 24413292 |
| 22534702 | 3061 | 7731 | 11959 | 16621 | 21427 | 24413293 |
| 22534703 | 3063 | 7733 | 11961, 11963 | 16623 | 21429, 21441 | 24413294 |
| 22534704 | 3065 | 7735 | 11965 | 16625 | 21431 | 24413295 |
| 22534705 | 3067 | 7737 | 11967 | 16627 | 21433 | 24413296 |
| 22534708 | 3069 | 7743 | 11973 | 16633, 16639, | 21445 | 24413299 |
| | | | | 16641 | | |
| 22534709 | 3071 | 7745 | 11975 | 16635 | 21447, 22613 | 24413300 |
| 22534711, 22534768 | 3073, 3163 | 7747, 7873 | 11977, 12089 | 16637, 16643, | 21449, 21557 | 24413301, 24413358 |
| | | | | 16753 | | |
| 22534712 | 3075 | 7749, 7751 | 11979 | 16645 | 21451 | 24413302 |
| 22534719 | 3077 | 7765 | 11999 | 16659 | 21465 | 24413309 |
| 22534720 | 3079 | 7767, 7771 | 12001 | 16661 | 21467 | 24413310 |
| 22534721 | 3081 | 7769, 7773, 7775 | 12003 | 16663 | 21469, 21477 | 24413311 |
| 22534722 | 3083 | 7777 | 12005 | 16665 | 21471 | 24413312 |
| 22534723 | 3085 | 7779 | 12007 | 16667 | 21473 | 24413313 |
| 22534724 | 3087 | 7781 | 12009 | 16669 | 21475, 21481 | 24413314 |
| 22534725 | 3089 | 7785 | 12011 | 16671 | 21483 | 24413315 |
| 22534726 | 3091 | 7783, 7787 | 12013 | 16673 | 21485 | 24413316 |
| 22534728 | 3093 | 7789 | 12015 | 16675 | 21487 | 24413317 |
| 22534729 | 3095 | 7791 | 12017 | 16677 | 21489 | 24413318 |
| 22534730 | 3097 | 7793 | 12019 | 16679 | 21491 | 24413319 |
| 22534739 | 3103 | 7817 | 12031 | 16691 | 21505 | 24413330 |
| 22534740 | 3109 | 7821 | 12035 | 16695, 16707 | 21511, 22627 | 24413332 |
| 22534741 | 3111 | 7823 | 12037, 12039 | 16697, 16699 | 21513, 21517 | 24413333 |
| 22534743 | 3113 | 7825 | 12041 | 16701, 16709 | 19293, 21519 | 24413334 |
| 22534744 | 3115 | 7827 | 12043 | 16703, 16711 | 19291 | 24413335 |
| 22534745 | 3117 | 7829 | 12045 | 16705, 16713 | 19289 | 24413336 |
| 22534746 | 3119 | 7831 | 12047 | 17903 | 19287 | 24413337 |
| 22534749 | 3125 | 7837 | 12053 | 16715 | 19279, 21521 | 24413340 |
| 22534750 | 3127 | 7839 | 12055 | 16717 | 21523 | 24413341 |
| 22534751 | 3129 | 7841 | 12057 | 16719 | 21525 | 24413342 |
| 22534752 | 3131 | 7843, 7887 | 12059 | 16721 | 21527 | 24413343 |
| 22534753 | 3133 | 7845, 7889 | 12061 | 16723, 16735 | 21529, 21573 | 24413344 |
| 22534755 | 3135 | 7847 | 12063 | 16725 | 21531 | 24413345 |
| 22534756 | 3137 | 7849 | 12065 | 16727 | 21533 | 24413346 |
| 22534757 | 3139 | 7851 | 12067 | 16729 | 21535 | 24413347 |
| 22534758 | 3141 | 7853, 7891 | 12069 | 16731 | 21537 | 24413348 |
| 22534759 | 3143 | 7855 | 12071 | 16733 | 21539 | 24413349 |
| 22534760 | 3145 | 7857 | 12073 | 16737 | 21541 | 24413350 |
| 22534761 | 3147 | 7859 | 12075 | 16739 | 21543 | 24413351 |
| 22534762 | 3149 | 7861 | 12077 | 16741 | 21545 | 24413352 |
| 22534763 | 3151 | 7863 | 12079 | 16743 | 21547 | 24413353 |
| 22534764 | 3153 | 7865 | 12081 | 16745 | 21549 | 24413354 |
| 22534765 | 3155 | 7867 | 12083 | 16747 | 21551 | 24413355 |
| 22534766 | 3157 | 7869 | 12085 | 16749 | 21553 | 24413356 |
| 22534767 | 3159, 3161 | 7871 | 12087 | 16751 | 21555 | 24413357 |
| 22534769 | 3165, 3167 | 7875 | 12091, 12093 | 16755 | 21559 | 24413359 |
| 22534770 | 3169 | 7877 | 12095 | 16757 | 21561 | 24413360 |
| 22534771 | 3171 | 7879 | 12097 | 16759 | 21563 | 24413361 |
| 22534772 | 3173 | 7881 | 12099 | 16761 | 21565 | 24413362 |
| 22534773 | 3175, 4065 | 7883 | 12101 | 16763 | 21567 | 24413363 |
| 22534774 | 3177, 3179, 3683, | 7885, 7893 | 12103 | 16765 | 21569 | 24413364 |
| | 4067 | | | | | |
| 22534775 | 3181 | 7895 | 12105, 12159 | 16767 | 21571, 21575 | 24413365 |
| 22534776 | 3183 | 7897 | 12107 | 16769, 16795 | 21577 | 24413366 |
| 22534777 | 3185, 3187 | 7899 | 12109 | 16771, 17829 | 21579, 21595, | 24413367 |
| | | | | | 21597 | |
| 22534779 | 3189 | 7901 | 12111 | 16773 | 21581 | 24413368 |
| 22534781 | 3191 | 7145, 7905 | 12115 | 16777 | 21585 | 24413370 |
| 22534783 | 3195 | 7907 | 12151 | 16781 | 21601 | 24413371 |
| 22534784 | 3197 | 7909 | 12153 | 16783 | 21603 | 24413372 |
| 22534785 | 3199 | 7911 | 12155 | 16785, 16787 | 21605 | 24413373 |
| 22534786 | 3201 | 7913 | 12157 | 16789 | 21607 | 24413374 |
| 22534787 | 3203 | 7915 | 12161 | 16791 | 21609 | 24413375 |
| 22534792 | 3207 | 6301 | 12169 | 16803 | 21617 | 24413379 |
| 22534793 | 3209, 3211 | 6303, 8769 | 12171 | 16805, 16827 | 21619 | 24413380 |
| 22534794 | 3213 | 6305 | 12173 | 16807 | 21621 | 24413381 |
| 22534795 | 3215 | 6307 | 12175 | 16809, 16811 | 21623 | 24413382 |
| 22534796 | 3217 | 6309 | 12177 | 16813 | 21625 | 24413383 |
| 22534797 | 3219 | 6311 | 12179 | 16815 | 21627 | 24413384 |
| 22534798 | 3221 | 6313 | 12181 | 16817 | 21629 | 24413385 |
| 22534799 | 3223 | 6315 | 12183 | 16819 | 21631 | 24413386 |
| 22534800 | 3225 | 6317 | 12185 | 16821 | 21633 | 24413387 |
| 22534801 | 3227 | 6319 | 12187 | 16823 | 21635 | 24413388 |
| 22534802 | 3229 | 6321 | 12189 | 16825, 16829 | 21637 | 24413389 |
| 22534804 | 3231 | 6323, 7921 | 12191, 12193, | 16831 | 21639 | 24413390 |
| | | | 12195 | | | |
| 22534805 | 3233 | 7923, 7925 | 12197 | 16833 | 21641 | 24413391 |
| 22534807 | 3237 | 7929, 7931 | 12203 | 16839, 16841 | 21645 | 24413393 |
| 22534808 | 3239 | 7933 | 12205 | 16843 | 21647 | 24413394 |
| 22534809 | 3241 | 7935 | 12207 | 16845 | 21649 | 24413395 |
| 22534810 | 3243 | 7937 | 12209 | 16847 | 21651 | 24413396 |
| 22534811 | 3245 | 7939 | 12211 | 16849 | 21653 | 24413397 |
| 22534812 | 3247 | 7941 | 12213 | 16851 | 21655 | 24413398 |
| 22534813 | 3249 | 7943 | 12215 | 16853 | 21657 | 24413399 |
| 22534814 | 3251 | 7945 | 12217 | 16855 | 21659 | 24413400 |
| 22534815 | 3253 | 7947 | 12219 | 16857 | 21661 | 24413401 |
| 22534816 | 3255, 3257 | 7949 | 12221 | 16859 | 21663 | 24413402 |
| 22534819 | 3265 | 7955 | 12227 | 16865, 16895 | 21669 | 24413405 |
| 22534820 | 3267 | 5077, 7957 | 12229 | 16867 | 21671 | 24413406 |
| 22534821 | 3269 | 7959 | 12231 | 16869 | 21673 | 24413407 |
| 22534822 | 3271 | 7961 | 12233, 12249 | 16871, 16873 | 21675 | 24413408 |
| 22534823 | 3273 | 7963 | 12235, 12251 | 16875 | 21677 | 24413409 |
| 22534824 | 3275 | 7965 | 12237 | 16877 | 21679 | 24413410 |
| 22534825 | 3277 | 7967 | 12239 | 16879 | 21681 | 24413411 |
| 22534826 | 3279 | 7969 | 12241 | 16881 | 21683 | 24413412 |
| 22534827 | 3281 | 7971 | 12243 | 16883 | 21685 | 24413413 |
| 22534829 | 3283 | 7973 | 12245 | 16885 | 21687 | 24413414 |
| 22534830 | 3285 | 7975 | 12247 | 16887 | 21689 | 24413415 |
| 22534832 | 3289, 3291 | 7979 | 12255, 12257 | 16897, 17773 | 21691 | 24413417 |
| 22534834 | 3295 | 7981 | 12259 | 16903 | 21693 | 24413418 |
| 22534835 | 3297 | 7983, 7985 | 12261 | 16905 | 21695 | 24413419 |
| 22534837 | 3301, 3969, 3973 | 7987 | 12263 | 16907, 16909, | 21697 | 24413420 |
| | | | | 17749 | | |
| 22534838 | 3303 | 7989 | 12265 | 16911 | 21699 | 24413421 |
| 22534839 | 3305 | 7991 | 12267, 12301 | 16913 | 21701 | 24413422 |
| 22534840 | 3307 | 7993 | 12269 | 16915 | 21703, 21705 | 24413423 |
| 22534841 | 3309, 3311 | 7995 | 12271 | 16917 | 21707 | 24413424 |
| 22534842 | 3313 | 7997 | 12273 | 16919, 16947 | 21709 | 24413425 |
| 22534843 | 3315, 3317 | 7999 | 12275 | 16921 | 21711 | 24413426 |
| 22534844 | 3319 | 8001 | 12277 | 16923 | 21713 | 24413427 |
| 22534845 | 3321 | 8003 | 12279 | 16925 | 21715, 21717 | 24413428 |
| 22534847 | 3323 | 8005 | 12281 | 16927 | 21719 | 24413429 |
| 22534848 | 3325 | 8007 | 12123, 12283 | 16929 | 21721, 22431 | 24413430 |
| 22534849 | 3327 | 8009 | 12285 | 16931 | 21723 | 24413431 |
| 22534850 | 3329 | 8011 | 12287 | 16933 | 21725 | 24413432 |
| 22534851 | 3331 | 8013 | 12289 | 16935 | 21727 | 24413433 |
| 22534852 | 3333 | 8015 | 12291 | 16937 | 21729 | 24413434 |
| 22534853 | 3335 | 8017, 8021 | 12293 | 16939 | 21731 | 24413435 |
| 22534854 | 3337 | 8019, 8023 | 12295 | 16941, 16945, | 21733 | 24413436 |
| | | | | 16949 | | |
| 22534855 | 3339 | 8025 | 12297 | 16951 | 21735 | 24413437 |
| 22534857 | 3341 | 8029 | 12303 | 16955 | 21739, 21741 | 24413440 |
| 22534858 | 3343 | 8031 | 12305 | 16957 | 21743 | 24413441 |
| 22534859 | 3345 | 8033 | 12311 | 16959 | 21745 | 24413442 |
| 22534860 | 3347, 3349, 3351 | 8035 | 12313 | 16961 | 21747, 21749 | 24413443 |
| 22534861 | 3353 | 8037 | 12315 | 16963 | 21751, 21755 | 24413444 |
| 22534862 | 3355 | 8039, 8059 | 12317 | 16965 | 21753, 21757 | 24413445 |
| 22534864 | 3359 | 8043 | 12321 | 16969, 17757 | 21761 | 24413447 |
| 22534865 | 3361 | 8045 | 12323 | 16971 | 21763 | 24413448 |
| 22534866 | 3363 | 8047 | 12325 | 16973 | 21765 | 24413449 |
| 22534867 | 3365 | 8049 | 12327 | 16975 | 21767 | 24413450 |
| 22534868 | 3367 | 8051 | 12329 | 16977 | 21769 | 24413451 |
| 22534870 | 3369 | 8053 | 12331 | 16979 | 21771 | 24413452 |
| 22534871 | 3371 | 8055 | 12333 | 16981, 16983 | 21773 | 24413453 |
| 22534872 | 3373 | 8057 | 12335 | 16985 | 21775 | 24413454 |
| 22534873 | 3375 | 8061 | 12337 | 16987 | 21777 | 24413455 |
| 22534874 | 3377 | 8063 | 12339 | 16989 | 21779 | 24413456 |
| 22534927 | 3379, 3381, 3383 | 8065 | 12341 | 16991 | 21781, 22593 | 24413457 |
| 22534928 | 3385 | 8067 | 12343 | 16993 | 21783 | 24413458 |
| 22534929 | 3387 | 8069 | 12345 | 16995 | 21785 | 24413459 |
| 22534932 | 3391 | 8073 | 12349 | 16999 | 21789 | 24413461 |
| 22534933 | 3393 | 8075 | 12351 | 17001 | 21791 | 24413462 |
| 22534935 | 3395 | 8079 | 12355 | 17005 | 21795 | 24413463 |
| 22534936 | 3397 | 8081 | 12357 | 17007 | 21797 | 24413464 |
| 22534937 | 3399 | 8083 | 12359 | 17009 | 21799 | 24413465 |
| 22534938 | 3401 | 8085 | 12361 | 17011 | 21801 | 24413466 |
| 22534950 | 3425 | 8107 | 12381 | 17035 | 21805 | 24413477 |
| 22534951 | 3427 | 8109 | 12383 | 17037 | 21807 | 24413478 |
| 22534952 | 3429 | 8111, 8113 | 12385, 12399 | 17039, 17043, | 21809, 21821 | 24413479 |
| | | | | 17935 | | |
| 22534954 | 3431 | 8115 | 12387 | 17041, 17045 | 21811 | 24413480 |
| 22534955 | 3433 | 8117 | 12389 | 17047, 17049 | 21813 | 24413481 |
| 22534956 | 3435 | 8119 | 12391, 12401 | 17051 | 21815 | 24413482 |
| 22534957 | 3437 | 8121 | 12393 | 17053 | 21817 | 24413483 |
| 22534958 | 3439 | 8123 | 12395 | 17055, 17057 | 21819 | 24413484 |
| 22534960 | 3441 | 8127 | 12405 | 17061 | 21825 | 24413486 |
| 22534961 | 3443 | 8129 | 12407 | 17063 | 21827 | 24413487 |
| 22534962 | 3445 | 8131 | 12409 | 17065 | 21829 | 24413488 |
| 22534963 | 3447 | 8133 | 12411 | 17067 | 21831 | 24413489 |
| 22534964 | 3449 | 8135 | 12413 | 17069 | 21833, 21969 | 24413490 |
| 22534965 | 3451, 3455 | 8137 | 12415 | 17071 | 18919, 21835 | 24413491 |
| 22534966 | 3453, 3457 | 8139 | 12417 | 17073 | 21837 | 24413492 |
| 22534967 | 3459 | 8141 | 12419 | 17075, 17157 | 21839, 21971 | 24413493 |
| 22534968 | 3461 | 8143 | 12421 | 17077 | 21841 | 24413494 |
| 22534969 | 3463 | 8145 | 12423 | 17079 | 21843 | 24412908, 24413495 |
| 22534970 | 3465 | 8147 | 12425 | 17081 | 21845 | 24412913, 24413496 |
| 22534972 | 3473 | 8151 | 12429 | 17089 | 21849 | 24412915, 24413498 |
| 22534715, 22534973 | 3475 | 7757, 8153 | 11989, 12431 | 16651, 17091, | 21457, 21851 | 24412916, 24413305, |
| | | | | 17833 | | 24413499 |
| 22534975 | 3477 | 8155 | 12433 | 17093 | 21853 | 24413500 |
| 22534976 | 3479 | 8157, 8159, 8161 | 12435 | 17097 | 21855 | 24413501 |
| 22534977 | 3481 | 8163 | 12437 | 17099 | 21857 | 24413502 |
| 22534978 | 3483 | 8165 | 12439 | 17101 | 21859 | 24413503 |
| 22534980 | 3491 | 8173 | 12445 | 17107 | 21865 | 24413506 |
| 22534981 | 3493 | 6191 | 12447 | 17109 | 21867 | 24413507 |
| 22534982 | 3495, 3497 | 6193 | 12449 | 17111 | 21869, 21973 | 24413508 |
| 22534983 | 3499 | 8183 | 12451 | 17113, 17159 | 21871 | 24413509 |
| 22534984 | 3501 | 8185 | 12453 | 17115, 17161 | 21873 | 24413510 |
| 22534985 | 3503 | 8187 | 12455 | 17117, 17163 | 21875 | 24413511 |
| 22534986 | 3505 | 8189 | 12457 | 17119 | 21877 | 24413512 |
| 22534987 | 3507 | 8191 | 12459 | 17121 | 21879 | 24413513 |
| 22534988 | 3509 | 8193 | 12461 | 17123 | 21881 | 24413514 |
| 22534989 | 3511 | 8195 | 12463 | 17125 | 21883 | 24413515 |
| 22534991 | 3513 | 8197 | 12465 | 17127, 17165 | 21885 | 24413516 |
| 22534992 | 3515 | 8199 | 12467 | 17129, 17167 | 21887 | 24413517 |
| 22534993 | 3517 | 8201 | 12469 | 17131 | 21889 | 24413518 |
| 22534995 | 3521 | 8205 | 12473 | 17135, 17169 | 21893 | 24413520 |
| 22534997 | 3523 | 8209 | 12477 | 17139 | 21897, 21899 | 24413521 |
| 22534998 | 3525 | 8211 | 12479 | 17141 | 21901 | 24413522 |
| 22534999 | 3529 | 8215 | 12485 | 17147 | 21907, 21909 | 24413524 |
| 22535000 | 3531 | 8217 | 12487 | 17149, 17171 | 21911 | 24413526 |
| 22535001 | 3533 | 8219 | 12489 | 17151, 17173 | 21913 | 24413527 |
| 22535002 | 3535 | 8221 | 12491 | 17155, 17175 | 21915 | 24413528 |
| 22535003 | 3537 | 8223 | 12493 | 17177 | 21917 | 24413529 |
| 22535004 | 3539 | 8225 | 12495 | 17179 | 21919 | 24413530 |
| 22535005 | 3541 | 8227 | 12497 | 17181 | 21921 | 24413531 |
| 22535006 | 3543 | 8229 | 12499 | 17183, 17225 | 21923 | 24413532 |
| 22535007 | 3545 | 8231 | 12501 | 17185, 17227 | 21925 | 24413533 |
| 22535009 | 3549, 4013 | 8235 | 12505 | 17189, 17191 | 21929 | 24413535 |
| 22535010 | 3551, 3553, 4015 | 8237 | 12507 | 17193 | 21931 | 24413536 |
| 22535011 | 3555, 3559 | 8239 | 12509 | 17195 | 21933 | 24413537 |
| 22535012 | 3557, 3561 | 8241 | 12511 | 17197 | 21935 | 24413538 |
| 22535016 | 3567, 4069 | 8245 | 12515 | 17201, 17233 | 21939 | 24413540 |
| 22535017 | 3569 | 8247 | 12517 | 17203 | 21941 | 24413541 |
| 22535018 | 3571 | 8249 | 12519 | 17205 | 21943 | 24413542 |
| 22535019 | 3573, 3575 | 8251 | 12521 | 17207 | 21945 | 24413543 |
| 22535020 | 3577, 3579 | 8253 | 12529 | 17209 | 21947 | 24413544 |
| 22535021 | 3581 | 8255 | 12531 | 17211 | 21949 | 24413545 |
| 22535073 | 3655 | 8363 | 12563 | 17337, 17371 | 21989 | 24413568 |
| 22535076 | 3659 | 8367, 8675 | 12567 | 17343 | 21995 | 24413571 |
| 22535077 | 3661 | 8369 | 12569, 12571 | 17345 | 21997 | 24413572 |
| 22535022, 22535078 | 3663 | 8371 | 12573 | 17347 | 21999, 22019, | 24413573 |
| | | | | | 22609 | |
| 22535023, 22535079 | 3665 | 8373 | 12575 | 17349 | 22001, 22607 | 24413574 |
| 22535025, 22535081 | 3667 | 8377 | 12579 | 17353 | 22005 | 24413575 |
| 22535082 | 3669 | 8379 | 12581 | 17359 | 22007 | 24413576 |
| 22535026, 22535083 | 3671 | 8381 | 12583 | 17361 | 22009 | 24413577 |
| 22535027, 22535084 | 3673 | 8383 | 12585 | 17363 | 22011, 22677 | 24413578 |
| 22535085 | 3675, 3677, 4173 | 8385 | 12587 | 17365 | 22013 | 24413579 |
| 22535087 | 3681 | 8347, 8389 | 12591 | 17303, 17369 | 22017 | 24413581 |
| 22535090 | 3687 | 8395 | 12595 | 17379 | 22021 | 24413583 |
| 22535092 | 3689 | 8397 | 12597 | 17381 | 22023 | 24413584 |
| 22535093 | 3691, 3693 | 8399 | 12599, 12621 | 17383, 17411, | 22025 | 24413585 |
| | | | | 17413 | | |
| 22535094 | 3695 | 8401 | 12601 | 17385, 17415 | 22027, 22053 | 24413586 |
| 22535095 | 3697 | 8403 | 12603 | 17387 | 22029 | 24413587 |
| 22535096 | 3699 | 8405 | 12607 | 17391 | 22033 | 24413588 |
| 22535099 | 3703 | 8411 | 12611 | 17395, 17397 | 22037 | 24413590 |
| 22535100 | 3705 | 8413 | 12613 | 17399 | 22039, 22055 | 24413591 |
| 22535101 | 3707 | 8415 | 12615 | 17401, 17417 | 22041 | 24413592 |
| 22535102 | 3711 | 8419 | 12619 | 17405, 17421 | 22045 | 24413593 |
| 22535103 | 3713 | 8421 | 12623 | 17423 | 22047 | 24413594 |
| 22535104 | 3715 | 8423 | 12625, 12627 | 17425 | 22049 | 24413595 |
| 22535108 | 3721 | 8429 | 12629 | 17431 | 22051 | 24413598 |
| 22535109 | 3723 | 8431, 8433 | 12631, 12633 | 17433 | 22057 | 24413599 |
| 22535110 | 3725 | 8435 | 12635 | 17435 | 22059 | 24413600 |
| 22535112 | 3729 | 8437, 8497 | 12637 | 17437 | 22061 | 24413601 |
| 22535113 | 3731 | 8439 | 12639 | 17439 | 22063 | 24413602 |
| 22535114 | 3733 | 8441 | 12641 | 17441, 17871 | 22065 | 24413603 |
| 22535116 | 3741 | 8445 | 12645 | 17445 | 22069 | 24413605 |
| 22535117 | 3743 | 8447, 8449 | 12647, 12649 | 17447, 17457 | 22071 | 24413606 |
| 22535118 | 3745 | 8451 | 12651 | 17449, 17459 | 22073 | 24413607 |
| 22535119 | 3747 | 8453 | 12653 | 17451 | 22075 | 24413608 |
| 22535120 | 3749 | 8455 | 12655 | 17453 | 22077, 22079 | 24413610 |
| 22535121 | 3751 | 8457 | 12657 | 17455 | 22081 | 24413611 |
| 22535122 | 3753 | 8459 | 12659 | 17461 | 22083 | 24413612 |
| 22535123 | 3755 | 8461 | 12661 | 17463 | 22085, 22087 | 24413613 |
| 22535124 | 3757 | 8463 | 12663 | 17465 | 22089 | 24413614 |
| 22535126 | 3759 | 8465, 8733 | 12665 | 17467 | 22091 | 24413616 |
| 22533224, 22535134 | 3761 | 4781, 8481 | 9205, 12681, 12683 | 17485 | 18369, 22107 | 24413624 |
| 22535136 | 3765 | 8485 | 12687 | 17489 | 22111 | 24413625 |
| 22535137 | 3767 | 8487 | 12689 | 17491 | 22113 | 24413626 |
| 22535138 | 3769 | 8489 | 12691 | 17493 | 22115 | 24413627 |
| 22535139 | 3771 | 8491 | 12693 | 17495 | 22117 | 24413628 |
| 22535140 | 3773 | 6449, 8493 | 12695 | 17497 | 22119 | 24413629 |
| | 3776 | 6448 | 12698 | 17500 | 22122 | |
| 22535141 | 3779 | 6443, 7353, 8781 | 12699 | 17501 | 22123 | 24413631 |
| 22535142 | 3781 | 6441 | 12701 | 17503 | 21975, 22181 | 24413632 |
| 22535143 | 3783 | 6439 | 12703 | 17505 | 22183 | 24413633 |
| 22535144 | 3785 | 6437 | 12705 | 17507 | 22185 | 24413634 |
| 22535146 | 3787 | 6433 | 12709 | 17511, 17781 | 22189 | 24413635 |
| 22535147 | 3789 | 6431 | 12711 | 17513 | 22137, 22139, | 24413636 |
| | | | | | 22191 | |
| 22535148 | 3791 | 6429 | 12713 | 17515 | 22193 | 24413637 |
| 22535150 | 3793, 4109 | 6427 | 12715 | 17517 | 22195 | 24413638 |
| 22535151 | 3795 | 6425 | 12717 | 17519 | 22197 | 24413639 |
| 22535152 | 3797 | 6423 | 12719 | 17521 | 22199 | 24413640 |
| 22535153 | 3799 | 6421 | 12721 | 17523 | 22201 | 24413641 |
| 22535154 | 3801 | 6419 | 12723 | 17525 | 22203 | 24413642 |
| 22535155 | 3803 | 6417 | 12725 | 17527 | 22141, 22205 | 24413643 |
| 22535156 | 3805 | 8645 | 12727 | 17529 | 22143, 22207 | 24413644 |
| 22535157 | 3807 | 8643 | 12729 | 17531 | 22209 | 24413645 |
| 22535168 | 3809 | 8515 | 12757 | 17553 | 22231 | 24413659 |
| 22535169 | 3811 | 8517 | 12759 | 17555 | 22233 | 24413660 |
| 22535170 | 3813 | 8519 | 12761 | 17557, 17575, | 22235 | 24413661 |
| | | | | 17813 | | |
| 22535171 | 3815 | 8521 | 12763 | 17559 | 22237 | 24413662 |
| 22535173 | 3817 | 8523 | 12765 | 17561 | 22239 | 24413663 |
| 22535174 | 3819 | 8525 | 12767 | 17563, 17577, | 22241 | 24413664 |
| | | | | 17579, 17581, | | |
| | | | | 17883 | | |
| 22535175 | 3821 | 8527 | 12769 | 17565, 17583 | 22243 | 24413665 |
| 22535177 | 3823 | 8531 | 12773 | 17569, 17585 | 22247 | 24413667 |
| 22535178 | 3825 | 8533 | 12775, 12777 | 17571 | 22249 | 24413668 |
| 22535179 | 3827 | 8535 | 12779 | 17573, 17587 | 22251, 22289, | 24413669 |
| | | | | | 22291, 22665 | |
| 22535180 | 3829 | 8537 | 12781 | 17589, 17633 | 22253 | 24413670 |
| 22535181 | 3831 | 8539 | 12783 | 17591, 17635 | 22255 | 24413671 |
| 22535182 | 3833 | 8541 | 12787 | 17593, 17899 | 22257 | 24413672 |
| 22535185 | 3847 | 8547 | 12833 | 17649 | 22303 | 24413675 |
| 22535186 | 3849 | 8549 | 12835 | 17651 | 22305 | 24413676 |
| 22534913, 22535187 | 3851, 3853, 3855, | 8551 | 12837, 12839 | 17653 | 22307 | 24413677 |
| | 3857 | | | | | |
| 22535188 | 3859 | 8553 | 12841, 12843 | 17655 | 22309, 22313 | 24413678 |
| 22535189 | 3861, 3863 | 8555 | 12845 | 17657 | 22311, 22315 | 24413679 |
| 22535190 | 3865 | 6941, 8557 | 12847 | 17659 | 22317 | 24413680 |
| 22535192 | 3867 | 7535, 8559 | 12849 | 17661 | 22319 | 24413681 |
| 22535193 | 3869 | 8561 | 12851, 12873 | 17663 | 22321 | 24413682 |
| 22535194 | 3871 | 8563 | 12853 | 17665 | 22323 | 24413683 |
| 22535195 | 3873 | 8565 | 12855 | 17667 | 22325 | 24413684 |
| 22535196 | 3875 | 8567 | 12857 | 17669 | 22327 | 24413685 |
| 22535197 | 3877 | 8569 | 12859 | 17671, 17673 | 22329 | 24413686 |
| 22535198 | 3879 | 8571 | 12861 | 17675 | 22331 | 24413687 |
| 22535199 | 3881 | 8573 | 12863 | 17677 | 22333 | 24413688 |
| 22535200 | 3883 | 8575 | 12865, 12867 | 17679 | 22335 | 24413689 |
| 22535201 | 3885 | 8577 | 12869 | 17681 | 22337 | 24413690 |
| 22535202 | 3887 | 8579 | 12871, 12875 | 17683 | 22339 | 24413691 |
| 22535205 | 3889 | 8587 | 12881 | 14031 | 22345 | 24413694 |
| 22535206 | 3891 | 8589 | 12883 | 14033 | 22347 | 24413695 |
| 22535207 | 3893 | 8591 | 12885 | 14035 | 22349 | 24413696 |
| 22535208 | 3895 | 8593 | 12887 | 14037 | 22351, 22353, | 24413697 |
| | | | | | 22355 | |
| 22535209 | 3897 | 8595 | 12889 | 14039 | 22357 | 24413698 |
| 22535210 | 3899 | 8597 | 12891 | 14041 | 22359 | 24413699 |
| 22535211 | 3901 | 8599 | 12893 | 14043 | 22361, 22363 | 24413700 |
| 22535212 | 3903 | 8601 | 12895 | 14045 | 22365 | 24413701 |
| 22535213 | 3905 | 8603 | 12897 | 14047, 14049 | 22367 | 24413702 |
| 22535214 | 3907 | 8605 | 12899 | 14051 | 22369 | 24413703 |
| 22535215 | 3909 | 8607 | 12901 | 14053 | 22371 | 24413704 |
| 22535216 | 3911 | 8609 | 12903 | 14055 | 22373 | 24413705 |
| 22535218 | 3913 | 8611 | 12905 | 14057 | 22375 | 24413706 |
| 22535219 | 3915 | 8613 | 12907 | 14059 | 22381 | 24413707 |
| 22533936 | 3953 | 6239 | 10621 | 15117 | 19901 | 23095379 |
| 22535183 | 4019 | 8543 | 12789 | 17595 | 22259 | 24413673 |
| 22535184 | 4021 | 8545 | 12791 | 17597 | 22261 | 24413674 |
| 22534180 | 4033 | 6793 | 11069 | 15613, 15615 | 20375, 20377 | 23095700 |
| 22534179 | 4035 | 6791 | 11067 | 17761 | 20373 | 23095699 |
| 22534178 | 4037 | 6785, 6789 | 9893, 11065 | 15611, 17763, | 20371 | 23095698 |
| | | | | 17943 | | |
| 22534519 | 4119 | 7377, 7381 | 11633 | 16245 | 21069, 21071 | 24413136 |
| 22534199 | 4193 | 6825 | 11101 | 15649 | 20409 | 23095716 |
| 22534198 | 4195 | 6823 | 11099 | 15647 | 20407 | 23095715 |
| 22534191 | 4209 | 6813 | 11089 | 15637 | 20397 | 23095710 |

TABLE VI
Variable coding sequences

| 2603vr | 18rs21 | 515 | cjb111 | coh1 | h36b | NEM316 |
|---|---|---|---|---|---|---|
| 22533006 | 19, 3631 | 4307, 8305, 8323, | — | 14079, 17271 | 22401 | 23094430 |
| | | 8325, 8327, | | | | |
| | | 8329, 8787 | | | | |
| 22533033 | 79 | — | 8827 | 13207 | 17987 | 23094454 |
| 22533050 | 119 | — | 8861 | — | 18021 | — |
| 22533053 | 123 | 4407 | 8865 | 13267 | — | 23094474 |
| 22533062 | 141 | — | 8883 | — | 18059 | 23094483 |
| 22533086 | 187 | 4489 | 8933 | — | 18115 | 23094506 |
| 22533088 | 189 | 4491 | 8935 | — | 18117 | 23094508 |
| 22533089 | 191 | 4493 | 8937 | — | 18119 | 23094509 |
| 22533142 | 277 | 4597, 4599 | 9041 | 13457 | 22175 | — |
| — | 283 | 4601 | 9043 | 13459 | — | — |
| — | 331 | 4649 | 9093 | 13511 | 18251 | 23094580 |
| 22533175 | 353 | 4677 | 9117 | — | 18271 | 23094592 |
| 22533179 | 361 | 4685 | 9125 | 13539 | 18279 | — |
| 22533180 | 363 | 4687 | 9127 | 13541 | — | 23094596 |
| 22533196 | 395 | 4717 | 9157 | 13571 | 18317, 18321 | — |
| — | 455 | — | — | — | 18377 | 23094639 |
| 22533230 | 457 | — | 9215 | — | 18379 | 23094640 |
| 22533234 | 461 | — | 9223 | — | 18385 | 23094643 |
| 22533235 | 463 | — | 9225 | — | 18387 | 23094644 |
| 22533236 | 465 | — | 9227 | — | 18389 | 23094645 |
| 22533238 | 467 | — | 9229 | — | 18391 | 23094646 |
| 22533239 | 469 | — | 9231 | — | 18393 | 23094647 |
| 22533240 | 471 | — | 9233 | — | 18395 | 23094648 |
| 22533242 | 475 | 4815 | 9241, 12547 | — | 18399, 21965, | 23094650 |
| | | | | | 22459 | |
| 22533243 | 477 | 4817 | 9243 | — | 18401 | 23094651 |
| 22533244 | 479 | 4819 | 9245, 9247 | — | 18403 | 23094653 |
| 22533246 | 483 | 4825 | 9251 | — | 18409 | 23094654 |
| 22533247 | 485 | 4827 | 9253 | — | 18411 | 23094655 |
| 22533248 | 487 | 4829 | 9255 | — | 18413 | — |
| 22533249 | 489 | 4831 | 9257 | 13163 | 18415 | — |
| 22533261 | 507 | — | 9479 | 13667 | 18131 | — |
| 22533262 | 509 | — | 9481 | 13669, 13689 | 18133 | — |
| 22533263 | 513 | — | 9483 | — | — | — |
| 22533264 | 515 | — | 9485 | — | 18439 | — |
| 22533324 | 629 | — | 9415 | 13805 | 18559 | 23094723 |
| — | 633 | 4987 | 9419 | 13809 | 18563 | 23094725 |
| 22533275, 22533562, | 879, 1623, 1807, | 6713, 7067 | 12307, 12559, | — | 19961, 19985, | — |
| 22533988, 22534486, | 2331 | | 12755, 13113 | | 20295, 20835, | |
| 22534579, 22535047 | | | | | 21979, 22125, | |
| | | | | | 22177, 22379, | |
| | | | | | 22649 | |
| 22533274, 22533563, | 881, 883, 1621, | 6327, 6711, 7069 | 12309, 12561, | — | 19963, 19987, | — |
| 22533989, 22534485, | 1809, 2333 | | 12753, 13041, | | 20293, 20833, | |
| 22534580, 22535046 | | | 13115 | | 21977, 22127, | |
| | | | | | 22179, 22377 | |
| 22533455 | 893 | 8343 | 9685 | 14169, 17299 | — | 23094896 |
| 22533457 | 895 | — | 9687 | 14171 | — | — |
| — | 899, 901 | 5275, 5277 | 9693 | 14175, 14177 | 18881, 18885, | 23094907 |
| | | | | | 22563 | |
| 22533459 | 905 | 5281 | 9697 | — | 18927 | 23094911 |
| 22533462 | 911 | — | 9703 | 14185 | — | 23094914 |
| 22533466 | 919 | — | — | — | 18941 | — |
| — | 935, 937 | 5315 | 9729 | 14201 | 18959, 18961 | 23094926 |
| 22533484 | 957 | 5335 | 9749 | 14221 | 18981 | — |
| 22533500 | 991 | — | — | — | — | 23094951 |
| 22533525 | 1037 | 5411 | — | — | 19061 | 23094974 |
| — | 1063 | 5439 | 9851 | 14341 | 19197 | 23094987 |
| — | 1123 | 5621 | 9911 | 14397 | 19255 | — |
| — | 1127 | 5625 | 9915 | 14401 | 19259 | — |
| — | 1129 | 5627 | 9917 | 14403 | 19261 | — |
| 22533627 | 1139 | 5617 | — | — | — | — |
| 22533628 | 1149, 3951 | 5619, 5653 | 9937 | 14425 | 19171, 19301 | — |
| 22533653 | 1179 | — | 10059 | 14467 | — | 23095032 |
| 22533654 | 1181 | — | 10061 | 14469 | — | 23095033 |
| 22533655 | 1183 | — | 9965, 10063 | 14471 | — | 23095034 |
| — | 1185 | — | 10065 | — | — | 23095035 |
| 22533656 | 1189 | 5649, 6959 | 9933, 10069, | 14421, 14477, | 19297, 20539 | — |
| | | | 11229 | 15787 | | |
| 22533657 | 1191, 1193, 2323, | — | 10071 | 14479, 15805 | — | 23095038 |
| | 2325 | | | | | |
| — | 1195 | — | 10073 | 14481 | — | 23095039 |
| 22533659 | 1199 | — | 10079 | 14489 | — | 23095041 |
| 22533660 | 1203, 1205 | — | 10081 | 14491 | — | 23095042 |
| 22533661 | 1207, 1211 | — | 10083 | 14493 | — | 23095043 |
| 22533666 | 1223 | — | 10093 | 14503 | 19345 | 23095047 |
| — | 1227 | 5689 | 10099 | 14509 | 19335 | 23095048 |
| 22533667 | 1229 | 5691 | 10101 | 14511 | 19337 | — |
| 22533688 | 1265 | — | 10135 | 14547 | 19373 | — |
| 22533689 | 1267 | — | 10137 | 14549 | 19375 | — |
| 22533690 | 1269 | — | 10139 | 14551 | 19377, 19411 | — |
| 22533692 | 1271 | — | 10141 | 14553, 14555, | 19379 | — |
| | | | | 14595 | | |
| — | 1273 | — | 10143 | 14557 | 19381, 19383 | — |
| — | 1275 | — | 10145 | 14559 | 19385 | — |
| 22533693 | 1279, 1281 | — | 10149, 10151 | 14563, 14565, | 19389, 19391, | — |
| | | | | 14567, 14569, | 19393 | |
| | | | | 14597, 14599 | | |
| 22533695 | 1283 | — | 10153, 10155 | 14571, 14601 | 19395 | — |
| 22533696 | 1285 | 5725 | 10157 | 14573 | 19397 | — |
| — | 1287, 1289, 1291 | 5727 | 10159, 10161 | 14575, 14577 | 19399, 19401 | 23095066 |
| — | 1293 | 5729 | 10163 | 14579 | 19403 | 23095067 |
| — | 1627 | 6087 | 10507 | 14995, 14997 | 19787 | 23095307 |
| 22533877 | 1631 | 6091 | 10511 | — | 19791 | 23095309 |
| 22533892 | 1669 | 6127 | 10539 | 15031 | 19827 | — |
| — | 1731 | 6179 | — | — | 19879 | — |
| — | 1751 | 6241 | 10623 | 15119 | 19903 | 23095380 |
| — | 1753 | 6243 | 10625 | 15121 | 19905 | 23095381 |
| 22533964 | 1765 | — | 10637 | 15133 | 19917 | — |
| — | 1821 | 6339 | 10693 | 15241, 15243 | 19975 | 23095412 |
| 22534042 | 1907 | 6487 | 10793 | 15359 | 20091 | — |
| 22534044 | 1909 | 6491 | — | 15363 | — | 23095506 |
| 22534045 | 1911 | 6493 | — | 15365 | — | 23095508 |
| 22534046 | 1913 | 6495 | 10797 | 15373 | — | 23095509 |
| 22534048 | 1915 | 6499 | — | — | — | 23095510 |
| — | 1923 | 6507 | — | — | — | 23095511 |
| 22534051 | 1925 | 6509 | 10825 | — | — | 23095512 |
| 22534052 | 1927 | 6511 | — | — | — | 23095513 |
| 22534055 | 1937 | 6517 | — | — | — | 23095516 |
| 22534056 | 1939, 1943 | 6519, 6521 | 10833 | — | 20111 | 23095517 |
| 22534063 | 1955 | 6537, 6543 | 10845, 10847 | — | 20125, 20127 | 23095524 |
| — | 1977 | 6565 | 10869 | 15411 | 22495 | 23095535 |
| — | 2143 | — | — | — | — | 23095690 |
| — | 2145 | — | — | — | — | 23095691 |
| — | 2147 | — | — | — | — | 23095692 |
| — | 2151 | — | — | — | — | 23095693 |
| — | 2283 | 6925 | 11201 | 15753 | 20509 | 24412876 |
| — | 2285 | — | — | — | — | 24413553 |
| — | 2293 | 6933 | 11209 | 15761 | 20517 | 24412880 |
| 22534263 | 2311 | — | — | 14715, 15053, | — | — |
| | | | | 15793 | | |
| — | 2313 | 6967 | 11235, 11237 | 15795 | 20545, 20547 | 24412892 |
| 22534265 | 2317 | — | — | 15799 | — | — |
| 22534266 | 2319 | — | — | 15801 | — | — |
| — | 2321 | — | — | 15803 | — | — |
| 22534273 | 2337 | — | 13025, 13053 | 15811 | 20565, 22499 | 24412896 |
| 22534274 | 2339 | — | 13027, 13055 | 15813 | 20567, 22501 | 24412897 |
| 22534275 | 2341 | — | — | — | 20569 | 24412907 |
| 22534276 | 2343 | — | — | — | 20571 | 24412918 |
| 22533658 | 2345 | — | — | 14483 | 20573 | 24412919 |
| 22534278 | 2347 | — | — | — | 20575 | — |
| 22534282 | 2353, 2355 | — | — | — | 20585, 20603 | — |
| 22534283 | 2357 | — | — | — | 20587 | — |
| 22534285 | 2359 | — | — | — | 20589, 20605 | — |
| 22534286 | 2361 | — | — | — | 20591 | — |
| 22534287 | 2363, 2365 | — | — | — | 20593 | — |
| — | 2367 | — | — | — | 20595 | — |
| 22534288 | 2371, 4151, 4177 | — | — | — | 20599 | — |
| 22534290 | 2373 | — | — | 15189 | 20601 | — |
| 22534291 | 2375 | — | — | — | 20607 | — |
| 22534293 | 2377, 4103 | — | 9899, 9901, | — | 20361, 20363, | 23095694 |
| | | | 9903 | | 20365, 20611 | |
| 22534294 | 2379 | — | — | — | 20613 | — |
| 22534295 | 2381 | — | — | — | 20615 | — |
| 22534296 | 2383 | — | — | — | 20617 | — |
| 22534299 | 2385 | — | — | — | 20623 | 24412926 |
| 22534300 | 2387 | — | — | — | 20625 | 24412927 |
| 22534301 | 2389 | — | — | — | 20627 | 24412928 |
| 22534305 | 2391 | — | — | — | 20633, 20635, | 24412932 |
| | | | | | 20637, 20675, | |
| | | | | | 22543 | |
| 22534306 | 2393 | — | — | — | 20639 | 24412934 |
| 22534307 | 2395 | — | — | — | 20641 | 24412935 |
| 22534308 | 2397 | — | — | — | 20643 | 24412936 |
| 22534310 | 2399 | — | — | — | 20645 | 24412937 |
| 22534311 | 2401 | — | — | — | 20647 | 24412938 |
| 22534313 | 2405 | — | — | — | 20651 | 24412940 |
| 22534314 | 2407 | — | — | — | 20655 | 24412942 |
| 22534315 | 2409 | — | — | — | 20657 | 24412943 |
| — | 2411 | — | — | — | 20659 | 24412944 |
| 22534316 | 2413 | — | — | — | 20661 | 24412945 |
| 22534317 | 2415 | — | — | — | 20663 | — |
| 22534318 | 2417 | — | — | — | 20665 | 24412947 |
| 22534321 | 2419 | — | — | — | 20669 | 24412950 |
| 22534322 | 2421 | — | — | — | 20671 | — |
| 22534323 | 2423 | — | — | — | 20673 | 24412952 |
| 22534324 | 2425 | — | — | — | 20677 | 24412953 |
| 22534384 | 2531 | 7105 | 11363 | — | — | 24413007 |
| 22534385 | 2533 | — | 11365 | — | 20801 | 24413008 |
| 22534402 | 2567 | — | 11399 | 16001 | 20841 | 24413024 |
| 22534411 | 2585 | 7159 | — | 16041 | 22521 | 24413033 |
| 22534433 | 2621 | 7201 | 11455 | — | 20897 | 24413055 |
| 22534436 | 2627 | 7207 | 11461 | — | 20903 | 24413058 |
| — | 2631, 2713 | 7211, 7315 | 11465, 11575, | — | 20907, 21015 | 24413060 |
| | | | 11577, 11579 | | | |
| 22534458 | 2667 | — | 11509 | — | — | 24413080 |
| — | 2681 | 7275 | 11543 | 17709 | 20981 | 24413095 |
| 22534475 | 2683 | 7277 | 11545 | — | 20983 | 24413096 |
| 22534476 | 2685 | 7279 | 11547 | — | 20985 | 24413097 |
| 22534479 | 2691 | 7285 | 11553 | — | 20991 | 24413100 |
| 22534481 | 2695 | 7289 | 11557 | — | 20997 | 24413102 |
| 22534482 | 2697 | 7291 | 11559 | — | 20999 | 24413103 |
| 22534484 | 2701 | 7295 | 11563 | — | 21003 | 24413105 |
| — | 2703 | 7297 | 11565 | — | 21005 | 24413106 |
| 22534487 | 2705 | 7299, 7309 | 11567 | — | 21007 | 24413107 |
| 22534488 | 2707 | 7301 | 11569 | — | 21009 | 24413108 |
| 22534489 | 2709 | 7303, 7311 | 11571 | — | 21011, 21119 | 24413109 |
| 22534523 | 2757 | 7387 | 11639 | 16251 | 21077 | — |
| 22534524 | 2759 | — | — | — | — | 24413139 |
| 22534550 | 2795 | 7435 | 11679 | — | 21117 | 24413160 |
| 22534551 | 2797, 2799, 2901, | 4785 | — | 13409, 13411, | 18191 | 23094635 |
| | 2903, 3293, | | | 16075, 16211, | | |
| | 4289 | | | 16409, 16899, | | |
| | | | | 16901, 17407, | | |
| | | | | 17735, 17769, | | |
| | | | | 17771, 17855 | | |
| 22534091 | 2807 | — | — | 14133, 14347, | — | — |
| | | | | 15669, 15765, | | |
| | | | | 16181, 16313, | | |
| | | | | 17087, 17357 | | |
| 22534092 | 2809 | — | — | 14131, 14349, | 20583 | — |
| | | | | 15665, 15667, | | |
| | | | | 15763, 16183, | | |
| | | | | 16315, 17085, | | |
| | | | | 17355, 17711, | | |
| | | | | 17789 | | |
| — | 2841, 2843 | 7473, 7475 | 11717 | 16349 | 21173 | 24413179 |
| — | 2887 | 7519 | 11759 | 16395 | 21219 | 24413201 |
| 22534631 | 2953 | 7591 | 11823 | 16467 | — | 24413230 |
| 22534648 | 2985 | 7625 | 11859 | 16499 | 21317 | — |
| 22534681 | 3033 | 7687 | 11919 | 16577 | 21383 | — |
| — | 3105, 3107 | 7819 | 12033 | 16693 | 21507, 21509 | 24413331 |
| 22534748 | 3123 | 7835 | 12051 | — | 19281 | 24413339 |
| 22534782 | 3193 | — | — | 16779 | 22583 | — |
| 22534817 | 3259 | — | — | 16861, 16891 | — | — |
| 22534831 | 3287 | 7977 | 12253 | 16889 | — | 24413416 |
| 22534836 | 3299 | — | — | — | — | — |
| 22534939 | 3403 | 8087 | 12363 | 17013 | — | 24413467 |
| 22534940 | 3405 | 8089 | 12365 | 17015 | — | 24413468 |
| 22534941 | 3407 | 8091 | 12367 | 17017 | — | 24413469 |
| 22534942 | 3409 | 8093 | 12369 | 17019 | — | 24413470 |
| 22534943 | 3411 | 8095 | 12371 | 17021 | — | 24413471 |
| 22534945 | 3413 | 8097 | 12373 | 17023 | — | 24413472 |
| 22534946 | 3415 | 8099 | 12375 | 17025 | — | 24413473 |
| 22534947 | 3417 | 8101 | 12377 | 17027 | — | 24413474 |
| 22534948 | 3419 | 8103 | 12379 | 17029 | — | 24413475 |
| 22534949 | 3421, 3423 | 8105 | — | 17031, 17033 | 21803 | 24413476 |
| — | 3485, 3489 | 8169, 8171 | 12443 | 17105 | 21863 | 24413505 |
| — | 3527 | 8213 | 12483 | 17145 | 21905, 22551 | 24413523 |
| 22535037 | 3585 | 8259 | — | 17217 | — | 23094905 |
| 22535038 | 3587 | 8261 | — | 17219 | — | — |
| 22535039 | 3589 | 8265, 8271 | — | 17221 | — | 23094903 |
| 22535040 | 3591 | 8273 | — | 17223, 17235 | — | 23094902 |
| 22535041 | 3593, 3595 | 8275 | — | 17237 | — | 23094901 |
| 22535044 | 3597 | 8277 | — | 17239 | — | — |
| 22535045 | 3599, 3601 | 8279 | — | 17241, 17243 | — | — |
| 22535048 | 3603 | 8281 | — | 17245 | — | — |
| 22535049 | 3605 | 8283 | — | 17247 | — | — |
| 22535050 | 3607 | 8285 | — | 17249 | — | — |
| 22535056 | 3609 | — | — | — | — | — |
| 22535057 | 3611 | — | — | 17261, 17263 | — | — |
| 22535058 | 3613 | 8299 | — | 17265 | — | — |
| 22535059 | 3615 | 8301 | — | 17267 | — | — |
| 22535060 | 3617 | 8303 | — | 17269 | — | — |
| 22534280 | 3629, 3643, 4115 | 8351 | — | 17307 | 20579, 22701 | — |
| 22535062 | 3633, 3635 | 6989, 8307 | — | 17273 | — | — |
| 22535063 | 3637 | 6987, 8309 | — | 17275 | — | — |
| 22535064 | 3639 | 8311 | — | 17277 | — | 23094819, 23095132, |
| | | | | | | 23095439, 23095618 |
| 22534279 | 3641 | 8349 | — | 17305 | 20577 | — |
| 22534281 | 3645, 4117 | 8353 | — | 17309, 17851 | 20581 | — |
| 22535070 | 3651 | 8357 | — | 17313 | 22267 | 24413566 |
| 22535071 | 3653 | 8359 | — | 17315 | 21983, 21987 | 24413567 |
| 22535075 | 3657 | — | 12565 | 17341 | 21993 | 24413570 |
| 22535089 | 3685 | 8393 | 12593 | 17377, 17409 | — | 24413582 |
| 22535106 | 3717 | 8425 | — | 17427 | — | 24413596 |
| 22535107 | 3719 | 8427 | — | 17429 | — | 24413597 |
| 22535111 | 3727 | — | — | — | — | — |
| 22535135 | 3763 | 8483 | 12685 | 17487 | 22109 | — |
| — | 3775, 3777 | 6445, 6447 | 12697 | 17499 | 22121 | 24413630 |
| — | 3835 | — | — | 17637, 17823 | 22295 | 23095622 |
| — | 3839 | — | — | 17641 | — | — |
| — | 3841 | — | — | 17643 | — | — |
| — | 3843 | — | — | 17645 | 22299 | — |
| — | 3845 | — | 12831 | 17647 | 22301 | — |
| — | 3917, 4047, 4099, | 5595 | — | — | — | — |
| | 4131, 4223 | | | | | |
| 22533593 | 3943, 4189 | — | — | — | — | — |
| — | 3947 | 8657 | 11305 | 15905 | 20741 | 24412981 |
| 22533579 | 3983 | 5523 | — | — | — | — |
| 22533577 | 3987 | — | — | — | — | — |
| 22533575 | 3997 | — | — | — | — | — |
| 22533572 | 4001 | 5501 | — | — | — | — |
| — | 4041, 4043 | — | — | — | — | 23095696 |
| 22533619 | 4093 | 5601 | — | — | — | — |
| 22533618 | 4095 | 5599, 8795 | — | — | 22481, 22739 | — |
| 22533617 | 4097 | 5597 | — | — | — | — |
| — | 4139 | — | 12799 | 17611 | — | — |
| — | 4141 | — | 12797 | 17607 | 22271 | — |
| — | 4159 | — | 12793 | — | — | — |
| — | 4181, 4255 | 5559, 5561 | — | — | — | — |
| 22533599 | 4183 | 5557 | — | — | — | — |
| 22533598 | 4185 | 5551 | — | — | — | — |
| 22533569 | 4211 | 5495 | — | — | — | — |
| — | 4219, 4229 | 5589 | — | — | — | — |
| — | 4221, 4227 | 5591 | — | — | — | — |
| — | 4225 | 5593 | — | — | — | — |
| — | 4231 | 5587 | — | — | — | — |
| — | 4233 | 5585 | — | — | — | — |
| — | 4235 | 5581 | — | — | — | — |
| — | 4237 | 5579 | — | — | — | — |
| — | 4239 | 5577 | — | — | — | — |
| — | 4241 | 5575 | — | — | — | — |
| — | 4243 | 5573 | — | — | — | — |
| — | 4245 | 5569 | — | — | — | — |
| — | 4247 | 5567 | — | — | — | — |
| — | 4249 | 5565 | — | — | — | — |
| — | 4251 | 8665 | — | — | — | — |
| — | 4253 | 8667 | — | — | — | — |
| — | 4263 | — | 12803 | — | — | — |
| — | 4265 | — | 12805 | — | — | — |
| — | 4267 | — | 12807 | — | — | — |
| — | 4269 | — | 12809 | 17623 | 22283 | — |
| — | 4271 | — | 12813 | 17625 | 22285 | — |
| — | 4273 | — | 12815 | 17627 | 22287 | — |
| — | 4275 | — | 12819 | 17631 | 22507 | — |
| — | 4277 | — | 12821 | 17825 | 22293 | — |
| — | 4287 | — | — | — | 18893, 18895 | — |
| 22533011 | — | — | — | — | 22411 | — |
| 22533087 | — | — | — | — | — | 23094507 |
| 22533109 | — | 4529 | 8975 | 13377, 13387 | 18165 | 23094527 |
| 22533110 | — | 4531 | 8977 | 13379 | 18167 | 23094528 |
| 22533111 | — | 4533 | 8979 | 13381 | 18169 | 23094529 |
| 22533112 | — | 4535 | 8981 | 13383, 13389 | 18173, 18175 | 23094530 |
| 22533113 | — | 4537, 4539 | 8983, 8985 | 13391 | 18177 | 23094531 |
| 22533114 | — | 4541, 4543, 4545 | 8987 | 13393, 13397 | 18179 | 23094532 |
| 22533115 | — | 4547 | 8989 | 13395 | 18181 | 23094533 |
| 22533127 | — | 4575 | 9013 | 13427 | 18207 | — |
| 22533129 | — | 4579 | 9017 | 13431 | 18211 | 23094546 |
| 22533130 | — | 4581 | 9019 | 13433 | 18213 | 23094547 |
| 22533131 | — | 4583 | 9021 | 13435, 17907 | 18215 | 23094548 |
| 22533135 | — | 4589 | 9027 | 13441 | 18221 | 23094551 |
| 22533136 | — | — | 9029 | — | — | 23094552 |
| 22533137 | — | — | 9031 | 13447 | 18223 | 23094553 |
| 22533138 | — | — | 9033 | 13449 | 18225 | 23094554 |
| 22533185 | — | 4695 | 9135 | 13549 | 18295, 19819 | 23094600 |
| 22533232 | — | — | 9219 | — | — | — |
| 22533233 | — | — | 9221 | — | 18383 | 23094642 |
| 22533250 | — | 4833 | 9259 | 13165 | 18417 | — |
| 22533273 | — | 4883 | 9319 | 13693 | 18461 | 23094678 |
| 22533316 | — | 4969 | 9399 | 13773 | 18543 | — |
| 22533378 | — | 5113 | 9505 | 13923 | 18707, 18709 | 23094774 |
| 22533389 | — | 5135 | 9527 | 13945 | 18731 | — |
| 22533419 | — | — | 9587 | — | 18795 | — |
| 22533425 | — | 5215 | 9597 | 14017 | 18805, 18807 | 23094867 |
| 22533510 | — | 8633 | 9795 | 14287 | 19033 | 23094959 |
| 22533566 | — | 5489 | — | — | — | — |
| 22533578 | — | 5521 | — | — | — | — |
| 22533580 | — | 5525 | — | — | — | — |
| 22533581 | — | 5527 | — | — | — | — |
| 22533582 | — | 5529 | — | — | — | — |
| 22533584 | — | 5531 | — | — | — | — |
| 22533585 | — | 5533, 8799 | — | — | — | — |
| 22533586 | — | 5535 | — | — | — | — |
| 22533588 | — | — | — | — | 19285 | — |
| 22533589 | — | 5539 | — | — | — | — |
| 22533590 | — | 5541 | — | — | — | — |
| 22533591 | — | 5543 | — | — | — | — |
| 22533594 | — | 5545 | — | — | — | — |
| 22533595 | — | 5547 | — | — | — | — |
| 22533596 | — | — | — | — | 19109 | — |
| 22533620 | — | 5603 | — | — | — | — |
| 22533621 | — | 5605 | — | — | — | — |
| 22533622 | — | 5607 | — | — | — | — |
| 22533623 | — | 5609 | — | — | 19155 | — |
| 22533624 | — | 5611 | — | — | 19157 | — |
| 22533625 | — | 5613 | — | — | — | — |
| 22533676 | — | — | — | — | — | 23095054 |
| 22533727 | — | 5795 | 10225 | 14659 | 19469, 22651 | 23095095 |
| 22533749 | — | 5839 | 10267 | 14729 | 19529 | 23095165 |
| 22533750 | — | 5841 | 10269 | 14731 | 19531 | — |
| 22533755 | — | 5851 | 10279 | 14741 | 19541 | 23095170 |
| 22533771 | — | 5881 | 10309 | 14775, 14777, | 19571 | 23095210 |
| | | | | 14779 | | |
| 22533785 | — | 5907 | 10337 | 14805 | 19597 | 23095223 |
| 22533788 | — | 5911 | 10341, 10343 | 14811, 14813, | 19601, 19603 | 23095225 |
| | | | | 14815 | | |
| 22533790 | — | 5915 | 10347 | 14819 | 19607 | 23095227 |
| 22533800 | — | 5935, 5975 | 10367 | 14841 | 19631 | 23095237 |
| 22533801 | — | 5937 | 10369 | 14843 | 19633 | 23095238 |
| 22533802 | — | 5939 | 10371 | 14845 | 19635 | 23095239 |
| 22533821 | — | 5977, 8651 | 10405 | 14879, 14891 | 19673 | 23095256 |
| 22533822 | — | 5979 | 10407 | 14893 | 19675 | 23095257 |
| 22533823 | — | 5981 | 10409 | 14895 | 19677 | 23095258 |
| 22533824 | — | 5983 | 10411 | 14897 | 19679 | 23095259 |
| 22533825 | — | 5985 | 10413 | 14899 | 19681 | 23095260 |
| 22533836 | — | 6005, 6007 | 10433 | 14917 | 19701 | 23095269 |
| 22533854 | — | 6043 | — | — | — | 23095286 |
| 22533905 | — | 6151 | 10565 | 15057 | 19851 | 23095334 |
| 22533910 | — | 6161 | 10579 | 15067 | 19861 | 23095339 |
| 22533926 | — | 6183 | — | 15095 | — | — |
| 22533930 | — | 6227 | 10571, 10607 | 15105 | 19887 | 23095373 |
| 22533937 | — | 6195 | 9967 | — | — | — |
| 22533938 | — | 6197 | 9969 | — | — | — |
| 22533940 | — | — | — | 15225 | — | — |
| 22533941 | — | 6199 | 9971 | 15223 | — | — |
| 22533943 | — | 6201 | 9973 | 15221 | — | — |
| 22533945 | — | 6203 | 9975 | 15219 | — | — |
| 22533948 | — | 6205 | 9977 | 15217 | — | — |
| 22533949 | — | 5369, 6207 | 9979 | 15215 | — | — |
| 22533950 | — | — | 9983 | 15213 | — | — |
| 22533951 | — | 6213, 6217 | 9987 | 15209 | — | — |
| 22533952 | — | 6215, 6219 | 9989 | 15203 | — | — |
| 22533953 | — | 6221 | 9991 | 15199 | — | — |
| 22533954 | — | 6223, 8175 | 9993 | 15195, 17857 | — | — |
| 22533955 | — | 8177 | 9995 | 15193 | — | — |
| 22533956 | — | 8179 | 9997 | 15185 | — | — |
| 22533957 | — | 8181 | 9999 | 15183 | — | — |
| 22533975 | — | 6273 | 10655 | 15153 | 19935 | 23095395 |
| 22534019 | — | 6397 | 10743 | 15311 | 20031 | 23095484 |
| 22534020 | — | 6399 | 10745 | 15313 | 20033 | 23095485 |
| 22534021 | — | 6401 | 10747 | 15315 | 20035 | 23095486 |
| 22534024 | — | 6407 | 10753 | 15321 | 20047 | 23095489 |
| 22534043 | — | 6489 | 10817 | 16683 | 20097, 21495 | — |
| 22534047 | — | 6497 | — | — | — | — |
| 22534061 | — | 6531, 6541 | 10841 | 15383 | 20121 | 23095522 |
| 22534075 | — | 6567 | 10871 | 15413, 15415 | 22493 | 23095536 |
| 22534094 | — | — | — | — | — | 23095551 |
| 22534155 | — | — | 12527 | — | — | 23095669 |
| 22534157 | — | 6735 | 11019 | 15577 | 20317 | 23095670 |
| 22534158 | — | 6737 | 11021 | 15579 | 20319 | 23095671 |
| 22534159 | — | 6739 | 11023 | 15581 | 20321 | 23095672 |
| 22534160 | — | 6741, 6743 | 11027, 11029 | 17715, 17717 | 20323, 20325 | 23095673 |
| 22534161 | — | 6745 | 11031 | 17713 | 20327 | 23095674 |
| 22534162 | — | 6747, 6751 | 11033, 11037 | — | 20329, 20333 | 23095675 |
| 22534165 | — | 6753 | 11039 | 15583 | 20335 | 23095678 |
| 22534166 | — | 6755 | 11041 | 15585 | 20337 | 23095679 |
| 22534167 | — | 6757 | 11043 | 15587 | 20339 | 23095680 |
| 22534168 | — | 6759 | 11045 | 15589 | 20341 | 23095681 |
| 22534192 | — | 6815 | 11091 | 15639 | 20399 | 23095711 |
| 22534193 | — | — | 11093 | — | — | — |
| 22534194 | — | — | 11095 | — | — | — |
| 22534195 | — | — | 11097 | — | — | — |
| 22534196 | — | — | 13039 | — | — | — |
| 22534238 | — | — | 11177 | 15731 | — | — |
| 22534251 | — | 6935 | 11211 | 15767 | 20519 | 24412881 |
| 22534253 | — | 6937 | 11213 | 15769 | 20521 | 24412882 |
| 22534254 | — | 6939 | 11215, 11217 | 15771 | 20523 | 24412883 |
| 22534255 | — | — | — | — | — | 24412884 |
| 22534256 | — | — | — | — | — | 24412885 |
| 22534284 | — | — | — | — | 20619 | — |
| 22534292 | — | — | — | — | 20609 | — |
| 22534298 | — | — | — | — | 20621 | 24412925 |
| 22534302 | — | — | — | — | 20629 | 24412929 |
| 22534303 | — | — | — | — | 20631 | 24412930 |
| 22534304 | — | 4799 | — | — | — | 24412931 |
| 22534319 | — | — | — | — | — | 24412948 |
| 22534320 | — | — | — | — | 20667 | 24412949 |
| 22534334 | — | — | 11261 | 15853 | 20695 | — |
| 22534338 | — | 7011 | 11269 | 15865 | 20703 | — |
| 22534358 | — | 8655 | 11307 | 15907 | 20743 | 24412982 |
| 22534374 | — | 7079, 7095 | 11339 | 15949 | 20779 | 24412998 |
| 22534413 | — | — | — | — | — | 24413035 |
| 22534414 | — | — | 11417 | — | — | 24413036 |
| 22534415 | — | 7165 | 11419 | 16045 | 20863 | 24413037 |
| 22534450 | — | 7239 | 11495 | 16131 | 20935 | 24413073 |
| 22534451 | — | 7241 | 11497 | 16133 | 20937 | 24413074 |
| 22534453 | — | 7243 | 11499 | 16135 | 20939 | 24413075 |
| 22534454 | — | 7245 | 11501 | 16137 | 20941 | 24413076 |
| 22534459 | — | — | 13059 | — | 20949 | 24413081 |
| 22534460 | — | — | 13057 | — | 20951 | 24413082 |
| 22534464 | — | 7257 | 11519 | 16153, 16155 | 20961 | 24413086 |
| 22534467 | — | 7261 | 11523 | 16159 | 20965, 20967 | 24413088 |
| 22534468 | — | 7263 | 11525, 11527 | 16161 | 20969 | 24413089 |
| 22534469 | — | 7265 | 11529, 11531 | 16163 | 20971 | 24413090 |
| 22534470 | — | 7267 | 11533 | 16165, 16169, | 20973 | 24413091 |
| | | | | 16171 | | |
| 22534471 | — | 7099, 7269 | 11535 | 16167, 16173, | 20975 | 24413092 |
| | | | | 16175 | | |
| 22534472 | — | 7271 | 11537 | 16177 | 20977 | 24413093 |
| 22534515 | — | 7369 | 11623, 11625 | 16237 | 21061 | 24413132 |
| 22534516 | — | 7371 | 11627 | 16239 | 21063 | 24413133 |
| 22534517 | — | 7373 | 11629 | 16241 | 21065, 21129 | 24413134 |
| 22534518 | — | 7375 | 11631 | 16243 | 21067 | 24413135 |
| 22534520 | — | 7379, 7383 | 11635 | 16247 | 21073 | 24413137 |
| 22534521 | — | 7385 | 11637 | 16249 | 21075 | — |
| 22534525 | — | 7389 | — | 16253 | — | — |
| 22534526 | — | 7391 | — | — | — | — |
| 22534527 | — | 7393 | — | 16255 | — | 24413140 |
| 22534531 | — | 7401 | 11647 | 16263 | 21085 | 24413144 |
| 22534532 | — | 7403 | — | 16265 | — | — |
| 22534534 | — | 7405 | 11649 | 16267 | 21087 | 24413145 |
| 22534536 | — | 7407 | 11651 | 16269 | 21089 | 24413146 |
| 22534539 | — | 7413 | 11657 | 16275 | 21095, 21131 | 24413149 |
| 22534555 | — | — | — | — | — | 24413164 |
| 22534564 | — | 7455 | 11699 | 16327, 16329 | 21155 | 24413170 |
| 22534591 | — | — | — | — | 21201 | — |
| 22534596 | — | 7513 | 11753 | 16387 | 21213 | 24413198 |
| 22534600 | — | 7523 | 11763 | 16399 | 21223 | — |
| 22534663 | — | 7653 | 11885 | 16525 | 21345 | 24413258 |
| 22534664 | — | 7655 | 11887 | 16527 | 21347 | 24413259 |
| 22534665 | — | 7657 | 11889 | 16529 | 21349, 21351 | 24413260 |
| 22534666 | — | 7659 | 11891 | 16531 | 21353, 21355 | 24413261 |
| 22534667 | — | 7661 | 11893 | 16533 | 21357 | 24413262 |
| 22534676 | — | 7679 | 11911 | 16557 | — | — |
| 22534693 | — | 7711 | 11941 | 16603 | 21405 | 24413284 |
| 22534694 | — | 7713 | 11943 | 16605 | 21407, 21409 | 24413285 |
| 22534695 | — | 7715, 7717 | 11945 | 16607 | 21411, 21413 | 24413286 |
| 22534696 | — | 7719 | 11947 | 16609 | 21415 | 24413287 |
| 22534697 | — | 7721 | 11949 | 16611 | 21417, 22637, | 24413288 |
| | | | | | 22639 | |
| 22534698 | — | 7723 | 11951 | 16613 | 21419 | 24413289 |
| 22534706 | — | 7739 | 11969 | 16629 | 21435 | 24413297 |
| 22534707 | — | 7741 | 11971 | 16631 | 21437, 21443 | 24413298 |
| 22534713 | — | 7753 | 11981, 11983, | 16647 | 21453 | 24413303 |
| | | | 11985 | | | |
| 22534714 | — | 7755 | 11987 | 16649 | 21455 | 24413304 |
| 22534716 | — | 7759 | 11991 | 16653 | 21459 | 24413306 |
| 22534718 | — | 7763 | 11997 | 16657 | 21463 | 24413308 |
| 22534734 | — | — | 12023 | 16685 | 21497 | — |
| 22534735 | — | — | 12025 | 16687 | 21499 | — |
| 22534780 | — | 7903 | 12113 | 16775 | 21583 | 24413369 |
| 22534788 | — | 7917, 7919 | 12163 | 16793, 16797 | 21611 | 24413376 |
| 22534789 | — | 6297 | 12165 | 16799 | 21613 | 24413377 |
| 22534856 | — | 8027 | 12299 | 16953 | 21737 | 24413439 |
| 22534883 | — | — | 10039 | — | — | — |
| 22534884 | — | — | 10037, 13021 | — | — | — |
| 22534934 | — | 8077 | 12353 | 17003 | 21793 | — |
| 22534959 | — | 8125 | 12397, 12403 | 17059 | 21823 | 24413485 |
| 22534979 | — | 8167 | 12441 | 17103 | 21861 | 24413504 |
| 22534996 | — | 8207 | 12475 | 17137 | 21895 | — |
| 22535024 | — | 8375 | 12577 | 17351 | 22003 | — |
| 22535033 | — | — | — | — | — | 24413551 |
| 22535034 | — | 8297 | — | — | — | — |
| 22535051 | — | 8287 | — | 17251 | — | — |
| 22535052 | — | 8289 | — | 17253 | — | — |
| 22535053 | — | 8291 | — | 17255 | — | — |
| 22535054 | — | 8293 | — | 17257 | — | — |
| 22535055 | — | 8295 | — | 17259 | — | — |
| 22535072 | — | 8361 | — | 17317 | 21985 | — |
| 22535074 | — | 8365 | — | 17375 | 21991 | 24413569 |
| 22535086 | — | 8387 | 12589 | 17367 | 22015 | 24413580 |
| 22535127 | — | 8467 | 12667 | 17469 | 22093 | 24413617 |
| 22535128 | — | 8469 | 12669 | 17471 | 22095 | 24413618 |
| 22535129 | — | 8471 | 12671 | 17473 | 22097 | 24413619 |
| 22535130 | — | 8473 | 12673 | 17475 | 22099 | 24413620 |
| 22535131 | — | 8475 | 12675 | 17477 | 22101, 22675 | 24413621 |
| 22535132 | — | 8477 | 12677 | 17479 | 22103 | 24413622 |
| 22535133 | — | 8479 | 12679 | 17481, 17483 | 22105 | 24413623 |
| 22535145 | — | 6435 | 12707 | 17509, 17783 | 22187 | — |
| 22535176 | — | 8529 | 12771 | 17567 | 22245 | 24413666 |
| 22535203 | — | 8581, 8583 | 12877 | 17685 | 22341 | 24413692 |
| 22535204 | — | 8585 | 12879 | 14029 | 22343 | 24413693 |
| — | — | 4401 | — | — | — | 23094471 |
| — | — | 4403 | — | — | — | 23094472 |
| — | — | — | 9109 | — | — | 23094588 |
| — | — | 4671 | 9111 | — | — | 23094589 |
| — | — | 4673 | 9113 | — | — | 23094590 |
| — | — | — | — | 16569 | — | 23094789, 23095102, |
| | | | | | | 23095468 |
| — | — | 8341 | — | 17297 | — | 23094897 |
| — | — | 8339 | — | 17295 | — | 23094898 |
| — | — | 8337 | — | 17293 | — | 23094899 |
| — | — | 8263 | — | — | — | 23094904 |
| — | — | — | — | — | 18883 | 23094908 |
| — | — | — | 9707 | — | — | 23094916 |
| — | — | — | 10003 | — | — | 23095036 |
| — | — | 8313, 8687 | — | 17279, 17873 | — | 23095620 |
| — | — | 6817 | — | 15641 | — | 23095712 |
| — | — | 6819 | — | 15643 | 20403 | 23095713 |
| — | — | — | — | 15645 | — | 23095714 |
| — | — | 6977 | 11245 | — | 22485, 22487, | 24412894 |
| | | | | | 22553 | |
| — | — | 8509 | 12745, 13029 | 17547 | 22225, 22503 | 24412898 |
| — | — | 8505 | 12741, 13013, | 17543 | 20553, 20555, | 24412900 |
| | | | 13015 | | 22221 | |
| — | — | 8503 | 12739, 13011 | 17541 | 20557, 22219 | 24412901 |
| — | — | — | 13009 | — | 20559 | 24412902 |
| — | — | — | 13007 | — | 20561 | 24412903 |
| — | — | — | 13005 | — | 20563, 22581 | 24412904 |
| — | — | — | — | — | 20653 | 24412941 |
| — | — | 8659 | 11303 | 15903 | 20739 | 24412980 |
| — | — | 7797 | — | — | — | 24413321 |
| — | — | 7799, 7801 | — | — | — | 24413322 |
| — | — | 7803 | — | — | — | 24413323 |
| — | — | 7805 | — | — | — | 24413324 |
| — | — | 7807 | — | — | — | 24413325 |
| — | — | 7809 | — | — | — | 24413327 |
| — | — | 7813 | — | — | — | 24413328 |
| — | — | 7815 | — | — | — | 24413329 |
| — | — | 7951 | 12223 | — | 21665 | 24413403 |
| — | — | — | 12533 | 17323 | — | 24413546 |
| — | — | — | 12535 | 17325 | — | 24413547 |
| — | — | — | 12541 | 17333 | 21961, 22475 | 24413549, 24413557, |
| | | | | | | 24413564 |
| — | — | — | 12549 | 17329 | 21957, 22461, | 24413561 |
| | | | | | 22465 | |
| — | — | — | 12553 | — | 22469, 22471 | 24413562 |
| — | — | — | — | 17335 | 22477 | 24413565 |
| — | — | 8641 | 12731 | 17533 | 22211 | 24413646 |
| — | — | 8639 | 12733 | 17535 | 22213 | 24413647 |
| — | — | 8499, 8637 | 12735 | 17537 | 22215 | 24413648 |
| — | — | 8501 | 12737 | 17539 | 22217 | 24413649 |
| — | — | 8507 | 12743, 13017 | 17545 | 22223 | 24413652 |
| — | — | 8511 | 12747 | 17549 | 22227 | 24413654 |
| — | — | 8513 | 12749, 12751 | 17551 | 22229 | 24413655 |
| — | — | 4459 | 8901 | 13303 | 18085 | — |
| — | — | 4479 | 8921 | 13323 | 18105 | — |
| — | — | 4793 | — | 17727 | — | — |
| — | — | 4797 | — | 17723 | — | — |
| — | — | 4801 | — | 17721 | — | — |
| — | — | 5285 | — | — | 18931 | — |
| — | — | 5291, 5293 | — | 17691 | — | — |
| — | — | 5629 | 9919 | 14405 | 19263 | — |
| — | — | 5687 | 10097 | 14507 | 19333 | — |
| — | — | 5753 | 10185 | 14619 | 19429 | — |
| — | — | 6181 | 10597 | — | — | — |
| — | — | 6209 | 9981 | — | — | — |
| — | — | 6211 | 9985 | 15211 | — | — |
| — | — | 6821 | — | — | 20405 | — |
| — | — | 6957 | 11227 | 15785 | 20537 | — |
| — | — | 8315 | — | 17281 | — | — |
| — | — | 8317 | — | 17283 | — | — |
| — | — | 8319 | — | 17285 | — | — |
| — | — | 8321, 8331 | — | 17287 | — | — |
| — | — | 8333 | — | 17289 | — | — |
| — | — | 8335 | — | 17291 | — | — |
| — | — | 8673, 8791 | — | 13161 | — | — |
| — | — | — | — | 17619 | 22279 | — |
| — | — | — | — | 17605 | 22269 | — |
| — | — | — | 12551 | — | 22467 | — |
| — | — | — | 12149 | — | 21599, 22457 | — |
| — | — | — | 12147 | — | 22455 | — |
| — | — | — | 12145 | — | 22453 | — |
| — | — | — | 12139 | — | 22447 | — |
| — | — | — | 12137 | — | 22445 | — |
| — | — | — | 12133 | — | 22441 | — |
| — | — | — | 12131 | — | 22439 | — |
| — | — | — | 12129 | — | 22437 | — |
| — | — | — | 12127 | — | 22435 | — |
| — | — | — | 12125 | — | 22433 | — |
| — | — | — | 12119 | — | 21589 | — |
| — | — | — | 12117 | — | 21587 | — |
| — | — | — | 10831 | — | 20109 | — |
| — | — | — | 10827 | — | 20105 | — |
| — | — | — | 9897 | — | 20367 | — |
| — | — | — | 10799 | 15375 | — | — |
| — | — | — | 12135 | — | 22443 | — |
| — | — | — | 12141 | — | 22449 | — |
| — | — | — | 12143 | — | 22451 | — |
| — | — | — | 12481 | 17143, 17947 | 21903 | — |
| — | — | — | 12605 | 17389 | 22031 | — |
| — | — | — | 12817 | 17629 | 22509 | — |
| — | — | — | 12929 | — | 18873 | — |
| — | — | — | 13045 | 15817 | — | — |
| — | — | — | — | 17213 | 21951 | — |
| — | — | — | — | 17615 | 22275 | — |
| — | — | — | — | 17617 | 22277 | — |
| — | — | — | — | 17621 | 22281 | — |

TABLE VII
Phase-variable coding sequences

| | Location | |
|---|---|---|
| Variable gene⁽¹⁾ | of repeat | Position of repeat⁽²⁾ |
| SEQ ID NO: 1821 | 5′ end | 145 |
| SEQ ID NO: 1861 | 5′ end | 2 |
| SEQ ID NO: 957 | 5′ end | 116 |
| SEQ ID NO: 1941 | 5′ end | 13 |
| SEQ ID NO: 2141 | 5′ end | 11 |
| SEQ ID NO: 2863 | 5′ end | 21 |
| SEQ ID NO: 2887 | 5′ end | 295 |
| SEQ ID NO: 3191 | 5′ end | 18 |
| SEQ ID NO: 2447 | 5′ end | 3 |
| SEQ ID NO: 3775 | 5′ end | 301 |
| SEQ ID NO: 6773 | 5′ end | 76 |
| SEQ ID NO: 3723 | Middle | 1120 |
| SEQ ID NO: 2313 | 3′ end | 3185 |
| SEQ ID NO: 719 | Promoter | 40 |
| SEQ ID NO: 4631 | Promoter | 103 |
| SEQ ID NO: 2373 | Promoter | 1 |

⁽¹⁾Given for one strain only; Table II can be used to find any homologs in other strains.
⁽²⁾relative to ATG

### REFERENCES

### The Contents of which are Hereby Incorporated by Reference

[0173] [1] Tettelin et al. (2002) Proc Natl Acad Sci USA 99:12391-6.
[0174] [2] WO02/34771.
[0175] [3] Glaser et al. (2002) Mol Microbiol 45:1499-1513.
[0176] [4] WO99/54457.
[0177] [5] Geysen et al. (1984) PNAS USA 81:3998-4002.
[0178] [6] Carter (1994) Methods Mol Biol 36:207-23.
[0179] [7] Jameson, B A et al. 1988, CABIOS 4(1):181-186.
[0180] [8] Raddrizzani & Hammer (2000) Brief Bioinform 1(2):179-89.
[0181] [9] De Lalla et al. (1999) J. Immunol. 163:1725-29.
[0182] [10] Brusic et al. (1998) Bioinformatics 14(2):121-30
[0183] [11] Meister et al. (1995) Vaccine 13(6):581-91.
[0184] [12] Roberts et al. (1996) AIDS Res Hum Retroviruses 12(7):593-610.
[0185] [13] Maksyutov & Zagrebelnaya (1993) Comput Appl Biosci 9(3):291-7.
[0186] [14] Feller & de la Cruz (1991) Nature 349(6311):720-1.
[0187] [15] Hopp (1993) Peptide Research 6:183-190.
[0188] [16] Welling et al. (1985) FEBS Lett. 188:215-218.
[0189] [17] Davenport et al. (1995) Immunogenetics 42:392-297.
[0190] [18] Bodanszky (1993) Principles of Peptide Synthesis (ISBN: 0387564314).
[0191] [19] Fields et al (1997) Meth Enzymol 289: Solid-Phase Peptide Synthesis. ISBN: 0121821900.
[0192] [20] Chan & White (2000) Fmoc Solid Phase Peptide Synthesis. ISBN: 0199637245.
[0193] [21] Kullmann (1987) Enzymatic Peptide Synthesis. ISBN: 0849368413.
[0194] [22] Ibba (1996) Biotechnol Genet Eng Rev 13:197-216.
[0195] [23] Breedveld (2000) Lancet 355(9205):735-740.
[0196] [24] Gorman & Clark (1990) Semin. Immunol. 2:457-466.
[0197] [25] Sambrook et al. (1989) Molecular Cloning: A Laboratory Manual.
[0198] [26] Shortprotocols in molecular biology (4th ed, 1999) Ausubel et al. eds. ISBN 0-471-32938-X.
[0199] [27] U.S. Pat. No. 5,707,829
[0200] [28] Current Protocols in Molecular Biology (F. M. Ausubel et al. eds., 1987) Supplement 30.
[0201] [29] EP-B-0509612.
[0202] [30] EP-B-0505012.
[0203] [31] Golden et al. (2004) Diagn Microbiol InfectDis 50:7-13.
[0204] [32] Picard & Bergeron (2004) Eur J Clin Microbiol Infect Dis 23:665-71.
[0205] [33] Creti et al (2004) J Clin Microbiol 42:1326-9.
[0206] [34] Bergeron & Ke (2004) Expert Rev Mol Med 2001:1-14
[0207] [35] Tang et al. (1997) Clin. Chem. 43:2021-2038.
[0208] [36] Vaccine Design . . . (1995) eds. Powell & Newman. ISBN: 030644867X. Plenum.
[0209] [37] WO00/23105.
[0210] [38] WO90/14837.
[0211] [39] Podda (2001) Vaccine 19:2673-80.
[0212] [40] Frey et al. (2003) Vaccine 21:4234-7.
[0213] [41] U.S. Pat. No. 6,299,884.
[0214] [42] U.S. Pat. No. 6,451,325
[0215] [43] U.S. Pat. No. 5,057,540.
[0216] [44] WO96/33739.
[0217] [45] EP-A-0109942.
[0218] [46] WO96/11711.
[0219] [47] WO00/07621.
[0220] [48] Barr et al. (1998) Advanced Drug Delivery Reviews 32:247-271.
[0221] [49] Sjolanderet et al. (1998) Advanced Drug Delivery Reviews 32:321-338.
[0222] [50] NiikLira et al. (2002) Virology 293:273-280.
[0223] [51] Lenz et al. (2001) J Immunol 166:5346-5355.
[0224] [52] Pinto et al. (2003) J Infect Dis 188:327-338.
[0225] [53] Gerber et al. (2001) Virol 75:4752-4760.
[0226] [54] WO03/024480
[0227] [55] WO03/024481
[0228] [56] Gluck et al. (2002) Vaccine 20:B10-B16.
[0229] [57] EP-A-0689454.
[0230] [58] Johnson et al. (1999) Bioorg Med Chem Lett 9:2273-2278.
[0231] [59] Evans et al. (2003) Expert Rev Vaccines 2:219-229.
[0232] [60] Meraldi et al. (2003) Vaccine 21:2485-2491.
[0233] [61] Pajak et al. (2003) Vaccine 21:836-842.
[0234] [62] Kandimalla et al. (2003) Nucleic Acids Research 31:2393-2400.
[0235] [63] WO02/26757.
[0236] [64] WO99/62923.
[0237] [65] Krieg (2003) Nature Medicine 9:831-835.
[0238] [66] McCluskie et al. (2002) FEMS Immunology and Medical Microbiology 32:179-185.
[0239] [67] WO98/40100.
[0240] [68] U.S. Pat. No. 6,207,646.
[0241] [69] U.S. Pat. No. 6,239,116.
[0242] [70] U.S. Pat. No. 6,429,199.
[0243] [71] Kandimalla et al. (2003) Biochemical Society Transactions 31 (part 3):654-658.
[0244] [72] Blackwell et al. (2003) J Immunol 170:4061-4068.
[0245] [73] Krieg (2002) Trends Immunol 23:64-65.
[0246] [74] WO01/95935.
[0247] [75] Kandimalla et al. (2003) BBRC 306:948-953.
[0248] [76] Bhagat et al. (2003) BBRC 300:853-861.
[0249] [77] WO03/035836.
[0250] [78] WO95/17211.
[0251] [79] WO98/42375.
[0252] [80] Beignon et al. (2002) Infect Immun 70:3012-3019.
[0253] [81] Pizza et al. (2001) Vaccine 19:2534-2541.
[0254] [82] Pizza et al. (2000) Int J Med Microbiol 290:455-461.
[0255] [83] Scharton-Kersten et al. (2000) Infect Immun 68:5306-5313.
[0256] [84] Ryan et al. (1999) Infect Immun 67:6270-6280.
[0257] [85] Partidos et al. (1999) Immunol Lett 67:209-216.
[0258] [86] Peppoloni et al. (2003) Expert Rev Vaccines 2:285-293.
[0259] [87] Pine et al. (2002) J Control Release 85:263-270.
[0260] [88] Domenighini et al. (1995) Mol Microbiol 15:1165-1167.
[0261] [89] WO99/40936.
[0262] [90] WO99/44636.
[0263] [91] Singh et al] (2001) J Cont Release 70:267-276.
[0264] [92] WO99/27960.
[0265] [93] U.S. Pat. No. 6,090,406
[0266] [94] U.S. Pat. No. 5,916,588
[0267] [95] EP-A-0626169.
[0268] [96] WO99/52549.
[0269] [97] WO01/21207.
[0270] [98] WO01/21152.
[0271] [99] Andrianov et al (1998) Biomaterials 19:109-115.
[0272] [100] Payne et al. (1998) Adv Drug Delivery Review 31:185-196.
[0273] [101] Stanley (2002) Clin Exp Dermatol 27:571-577.
[0274] [102] Jones (2003) Curr Opin Investig Drugs 4:214-218.
[0275] [103] WO04/60308
[0276] [104] WO04/64759.
[0277] [105] WO99/11241.
[0278] [106] WO94/00153.
[0279] [107] WO98/57659.
[0280] [108] European patent applications 0835318, 0735898 and 0761231.
[0281] [109] WO03/009869.
[0282] [110] Glezen & Alpers (1999) Clin. Infect. Dis. 28:219-224.
[0283] [111] Martin et al. (2002) Infect Immun 70:4897-901.
[0284] [112] WO2004/041157.
[0285] [113] US provisional application.
[0286] [114] Almeida & Alpar (1996) J. Drug Targeting 3:455-467.
[0287] [115] Agarwal & Mishra (1999) Indian J Exp Biol 37:6-16.
[0288] [116] Costantino et al. (1992) Vaccine 10:691-698.
[0289] [117] Costantino et al. (1999) Vaccine 17:1251-1263.
[0290] [118] International patent application WO03/007985.
[0291] [119] Watson (2000) Pediatr Infect Dis J 19:331-332.
[0292] [120] Rubin (2000) Pediatr Clin North Am 47:269-285, v.
[0293] [121] Jedrzejas (2001) Microbiol Mol Biol Rev 65:187-207.
[0294] [122] Bell (2000) Pediatr Infect Dis J 19:1187-1188.
[0295] [123] Iwarson (1995) APMIS 103:321-326.
[0296] [124] Gerlich et al. (1990) Vaccine 8 Suppl:S63-68 & 79-80.
[0297] [125] Vaccines (1988) eds. Plotkin & Mortimer. ISBN 0-7216-1946-0.
[0298] [126] Del Guidice et al. (1998) Molecular Aspects of Medicine 19:1-70.
[0299] [127] Gustafsson et al. (1996) N. Engl. J. Med. 334:349-355.
[0300] [128] Rappuoli et al. (1991) TIBTECH 9:232-238.
[0301] [129] Sutter et al. (2000) Pediatr Clin North Am 47:287-308.
[0302] [1300] Zimmerman & Spann (1999) Am Fam Physician 59:113-118, 125-126.
[0303] [131] McMichael (2000) Vaccine 19 Suppl 1:S101-107.
[0304] [132] International patent application WO02/34771.
[0305] [133] Dale (1999) Infect Dis Clin North Am 13:227-43, viii.
[0306] [134] Ferretti et al. (2001) PNAS USA 98: 4658-4663.
[0307] [135] Kuroda et al. (2001) Lancet 357(9264):1225-1240; see also pages 1218-1219.
[0308] [136] EP-A-0372501
[0309] [137] EP-A-0378881
[0310] [138] EP-A-0427347
[0311] [139] WO93/17712
[0312] [140] WO94/03208
[0313] [141] WO98/58668
[0314] [142] EP-A-0471177
[0315] [143] EP-A-0594610.
[0316] [144] WO00/56360
[0317] [145] WO91/01146
[0318] [146] WO00/61761
[0319] [147] WO01/72337
[0320] [148] Falugi et al. (2001) Eur J Immunol 31:3816-3824.
[0321] [149] Baraldo et al, (2004) Infect Immun. 72:4884-7
[0322] [150] WO02/091998.
[0323] [151] Kuo et al. (1995) Infect Immun 63:2706-13.
[0324] [152] Research Disclosure, 453077 (January 2002)
[0325] [153] Needleman & Wunsch (1970) J. Mol. Biol. 48, 443-453.
[0326] [154] Rice et al. (2000) Trends Genet 16:276-277.
[0327] [155] Gennaro (2000) Remington: The Science and Practice of Pharmacy. 20th edition, ISBN: 0683306472.
[0328] [156] Methods In Enzymology (S. Colowick and N. Kaplan, eds., Academic Press, Inc.)
[0329] [157] Handbook of Experimental Immunology, Vols. I-IV (D. M. Weir and C. C. Blackwell, eds., 1986, Blackwell Scientific Publications)
[0330] [158] Sambrook, et al., Molecular Cloning: A Laboratory Manual (2nd Edition, 1989).
[0331] [159] Handbook of Surface and Colloidal Chemistry (Birdi, K. S. ed., CRC Press, 1997)
[0332] [160] Short Protocols in Molecular Biolog, 4th ed. (Ausubel et al. eds., 1999, John Wiley & Sons)
[0333] [161] Molecular Biology Techniques: An Intensive Laboratory Course, (Ream et al., eds., 1998, Academic Press)
[0334] [162] PCR (Introduction to Biotechniques Series), 2nd ed. (Newton & Graham eds., 1997, Springer Verlag)
[0335] [163] Wren (2000)
[0336] [164] Henderson (1999)
[0337] [165] Puopolo & Madoff (2003) Mol Microbiol 50:977-91.

The application's sequence listing, which the Patent Office published only in electronic form, follows.

SEQUENCE LISTING (22740 sequences)

SEQ ID NO: 1 - DNA, 873 bp, Streptococcus agalactiae
atgtctaaaaaaattaagaattttatactattaaatattggatctctaattgttgcatttggtttcaacgctttctttcttcataatcatattgtcacgggggggattagtggtttggcagttagttttcatgaagtatttggttgggattctgctttttttattatgattatcaatattccattgctccttctttgctactttggcttaggtaaacaaacctttttaaaaactgtctatggttcttggatttttcctgtttttattaagttaacacaaagtgtaccaactttgacccacaacccactcctcgcagcactttttggaggtgttattgtaggatgtggtttggggattgttttttggagcgactcttcaactggtggaacggggattatcattcaattcttaggaaaatatactcctataagccttggacaaggggttatattgattgatggacttgttacaattgttggtttcctagcttttgacagtgatacggttatgttttctattattgggttgataactattagttatattattaatgctatccaaactggatttacaaccttaagcactgtcttaatcgtttctcaagagcaccaaaaaattaagacatatatcaatactgtcgcagatagaggagtaacagaaattcccgttaaagggggatattctggaactaatcaaatcatgcttatgacaactattgctggttatgagtttgctaaattacaagaggcaatagcagaaattgacgaaacagccttcataacagtaactccaacatcacaagcttctggacgtggatttagtcttcaaaaaaatcatggacgtcttgatgaagacattcttatgccaatgtaa

SEQ ID NO: 2 - protein, 290 aa, Streptococcus agalactiae
MSKKIKNFILLNIGSLIVAFGFNAFFLHNHIVTGGISGLAVSFHEVFGWDSAFFIMIINIPLLLLCYFGLGKQTFLKTVYGSWIFPVFIKLTQSVPTLTHNPLLAALFGGVIVGCGLGIVFWSDSSTGGTGIIIQFLGKYTPISLGQGVILIDGLVTIVGFLAFDSDTVMFSIIGLITISYIINAIQTGFTTLSTVLIVSQEHQKIKTYINTVADRGVTEIPVKGGYSGTNQIMLMTTIAGYEFAKLQEAIAEIDETAFITVTPTSQASGRGFSLQKNHGRLDEDILMPM

SEQ ID NO: 3 - DNA, 1620 bp, Streptococcus agalactiae
ttgcttacagtttcagatgtttcactacgttttagtgatcgcaaattatttgatgaagttaacattaactttacagcaggaaatacctatggtcttatcggagcaaatggcgctggtaaatcaactttccttaaaattttagctggtgatattgaaccaacaacaggacatattgcacttggcccagatgaacgcctttctgtacttcgccaaaatcattttgattatgaagatgagcgcgtcattgatgtcgttatcatgggtaatgaaacactttatagtatcatgaaagaaaaggatgctatctacatgaaagaagatttttctgatgaagatggtgttcgcgctgcggaattagaaggagaatttgctgaactcggtggatgggaggctgaaagtgaggcttctcaattactccaaaatctaaatatttcagaagagcttcattatcaaaatatgagtgaactagctaatggagacaaagttaaagttctccttgcaaaagctctctttggtaaaccagatgtacttctccttgacgagcctaccaatggacttgatatccagtctattacttggttagaagatttcttgattgactttgaaaatacagttattgtagtttcccacgaccgtcatttcttgaataaagtatgtacacatatggctgaccttgattttggaaaaattaaactgttcgtcggtaactatgatttctggaaagaatcatcagaattagcagctcgtttacaagctgatcgtaatgctaaagcagaagaaaaaattaaacaacttcaagaattcgttgcacgattttcagcgaatgcttcaaaatcaaaacaagcaacttctcgtaaaaaaatgcttgataaaattgaacttgaagagattgtaccatcaagccgtaaatacccattcgttaactttaaagccgaacgcgaaatgggaaatgatttattgaccgttgaaaatctctctgtcactattgatggggaaaaaatccttgataatatcagtttcattcttcgtcctggtgataaaactgcacttattggacaaaatgatatccaaactactgcacttattcgagcattgatgggggatatcgaatatgaaggaacaatcaaatggggagtaacaactagtcgttcttaccttccaaaagacaattcacgagattttgcttctggcgagtcaatcttagaatggcttcgtcaatttgctagtaaagaagaagacgataataccttcttacgtggtttcctaggtcgtatgcttttctctggagatgaggttaacaaatctgttaatgtcttatctgggggtgaaaaagtacgcgttatgctttcgaaattaatgctattaaaatctaatgttcttgttcttgatgatccaacaaaccacttagatttggaatctatttcaagtctcaacgatggactaaaagatttcaaagaatctattatttttgcaagtcatgaccacgagtttattcaaactttagcgaaccatattattgttctttctaaaaacggagttatcgatcgtatcgatgaaacttacgatgaatttcttgaaaataccgaagtacaagctaaggtcgctcaactctggaaataa

SEQ ID NO: 4 - protein, 539 aa, Streptococcus agalactiae
MLTVSDVSLRFSDRKLFDEVNINFTAGNTYGLIGANGAGKSTFLKILAGDIEPTTGHIALGPDERLSVLRQNHFDYEDERVIDVVIMGNETLYSIMKEKDAIYMKEDFSDEDGVRAAELEGEFAELGGWEAESEASQLLQNLNISEELHYQNMSELANGDKVKVLLAKALFGKPDVLLLDEPTNGLDIQSITWLEDFLIDFENTVIVVSHDRHFLNKVCTHMADLDFGKIKLFVGNYDFWKESSELAARLQADRNAKAEEKIKQLQEFVARFSANASKSKQATSRKKMLDKIELEEIVPSSRKYPFVNFKAEREMGNDLLTVENLSVTIDGEKILDNISFILRPGDKTALIGQNDIQTTALIRALMGDIEYEGTIKWGVTTSRSYLPKDNSRDFASGESILEWLRQFASKEEDDNTFLRGFLGRMLFSGDEVNKSVNVLSGGEKVRVMLSKLMLLKSNVLVLDDPTNHLDLESISSLNDGLKDFKESIIFASHDHEFIQTLANHIIVLSKNGVIDRIDETYDEFLENTEVQAKVAQLWK

SEQ ID NO: 5 - DNA, 2580 bp, Streptococcus agalactiae
atgacaattaaccactataagcttcgtataccttactatacaataagctttctacttcccttcataatcatagtctgtatcctctttactaagaatatttattggggaagtccaacaaccatattagcaagcgatggctttcatcaatatgttatctttaatcaagcattaagaaatattcttcatggttcaaacagcttattctatacctttacaagcggtttaggtttaaatttttatgctctgagtagttactatttgggaagttttttatccccaatagtttatttctttaacctaaaaaatatgcctgatgctatctaccttttaacaatatgtaaaatagggttgataggtttgtcaatgtttgtcactctttgtaaacgtcattgtaaagttaatcgtgtcttacttttagtaatttctacttgctatagcttaatgagtttctcaattagccaaattgaaattaatatgtggctagatgtatttattctaattccccttgttgttttaggagttgatcagctactatgggaaagaaaacctatactttatttcctctctctgacagccttattcatccaaaactattattttggttttatgactgccatctttactagcctttacttcatcgtacaaataacccgtaatactgatagtaaggttgcatttaaacaatttcttcattttacctttttatctcttttagctggtatgactagtagcattatgattttgccaacttattttgatttaactactcatggtgaaaagttgacaaaggtatcgaagatgtttacagaaaattcttggtacatggatttgtttgctaaaaatatgattggagcctatgatacaacaaaatttggctctattcctatgatttatgtaggtttacttcctttactcctttctttactttactttacaataaaggaagttcctcgaaggactagattagcatatggatttttaataatatttgttattgctagtttttatataacacctctagatttattttggcaagggatgcatgctccaaatatgtttctccatcgctactcttgggtactttcagtacttatctgtctgctagctgctgaatgccttgagtatttagacaacatttcttggaaaaagattttaggggtcaatttaattttagtaagtggtttcataatcacgtttttatttaaaaagcattatcattaccttaatcttgaattacttcttttaaccttaactttcctctcagcttatattattctaactattagttttgtcagtaagcaaatccctaaattagttttttatccctttcttattggttttgttgtattagagatgacattaaacaccttttaccaactaaatagtcttaacgatgaatggatatttccatctaggcaaggatatgctaaatataatcacagcattagcaaacttgtcagaaagactgagagaaataactctacattcttccgtacagagcgctggttaggacaaaccggcaacgactctatgaaatataattataatggtatttcacaattttcatctattagaaatcgttcttcaagtcaagtgcttgatagacttggctttaaatcagatggtacaaatttaaatttacgttatcaaaataatactttgatcgcagatagtctatttggtgtgaagtataaccttacagaatatccttttgataaatttggttttatcaaaaaagctcaagataaacaaaccattctttacaaaaatcagtttgccagtcaattagctatactaacgaatcaagtatatcaagataaaccatttactgtgaatactttggataatcagacaactcttttaaatcaattaagtggtttgaaagagacgtattttgagcatcttattccaaatagcgtttctgggcaaaccactcttaataaacaagtatttgttaaaaagaataaacaagggaatactgaaattacctataacataactatccctaaaaacagtcagttatatgttagtatgccgtttataaattttaataatgaggaaaataaaattgttcaaatctccgttaataatggaccatttgtacctaatactcttgataatgcttattcattttttaatattggttcctttgctgaaaacagtcgtatcaaagtaaaatttcaatttccacacaatgatcaagtttctttcccaattcctcacttttatgggctcaagttagaagcttatcaaaaagctatgactgttattaataaacgaaaagtaaaagtaagaactgatcacaataaagttattgctaattatacaagtcctaatagaagttctcttttcttcactattccctatgataggggttggaaagcttatcaaaataataaagaaataaaaattttcaaagctcagaaaggttttatgaaaataaatattcctaaaggaaaaggcaaagtaacattaatttttatcccttacggctttaaatttggggtaggcctatctattactggaatagtattatttactgtctattattttaaatttggaaaaaataaaataggatga

SEQ ID NO: 6 - protein, 859 aa, Streptococcus agalactiae
MTINHYKLRIPYYTISFLLPFIIIVCILFTKNIYWGSPTTILASDGFHQYVIFNQALRNILHGSNSLFYTFTSGLGLNFYALSSYYLGSFLSPIVYFFNLKNMPDAIYLLTICKIGLIGLSMFVTLCKRHCKVNRVLLLVISTCYSLMSFSISQIEINMWLDVFILIPLVVLGVDQLLWERKPILYFLSLTALFIQNYYFGFMTAIFTSLYFIVQITRNTDSKVAFKQFLHFTFLSLLAGMTSSIMILPTYFDLTTHGEKLTKVSKMFTENSWYMDLFAKNMIGAYDTTKFGSIPMIYVGLLPLLLSLLYFTIKEVPRRTRLAYGFLIIFVIASFYITPLDLFWQGMHAPNMFLHRYSWVLSVLICLLAAECLEYLDNISWKKILGVNLILVSGFIITFLFKKHYHYLNLELLLLTLTFLSAYIILTISFVSKQIPKLVFYPFLIGFVVLEMTLNTFYQLNSLNDEWIFPSRQGYAKYNHSISKLVRKTERNNSTFFRTERWLGQTGNDSMKYNYNGISQFSSIRNRSSSQVLDRLGFKSDGTNLNLRYQNNTLIADSLFGVKYNLTEYPFDKFGFIKKAQDKQTILYKNQFASQLAILTNQVYQDKPFTVNTLDNQTTLLNQLSGLKETYFEHLIPNSVSGQTTLNKQVFVKKNKQGNTEITYNITIPKNSQLYVSMPFINFNNEENKIVQISVNNGPFVPNTLDNAYSFFNIGSFAENSRIKVKFQFPHNDQVSFPIPHFYGLKLEAYQKAMTVINKRKVKVRTDHNKVIANYTSPNRSSLFFTIPYDRGWKAYQNNKEIKIFKAQKGFMKINIPKGKGKVTLIFIPYGFKFGVGLSITGIVLFTVYYFKFGKNKIG

SEQ ID NO: 7 - DNA, 480 bp, Streptococcus agalactiae
atgaaattaaaaataattacagttggaaaattgaaagagaaataccttaaagaaggtgttgcagagtatcagaaacgtctgaatcgcttttctaaaattgagacaattgagctagctgatgaaaagacacctgataaagctagtatatctgaaaatcaaagaattttagatatagaaggggaacgtattttgagtaaaataggtgagagggattatgtcattggtttagctatagaagggaaacaattgccatctgaatcatttagccatctaatcgatcaaaaaatgatatccggctactctactattacttttgttattggtggtagtttgggtttatctcaaaaagtgaaaaaacgtgctgattatttaatgagttttggactgttaaccttacctcatcaacttatgaaattagtcttgatggaacaaatttatcgtgcttttatgattcgtcaaggcactccttaccacaaataa

SEQ ID NO: 8 - protein, 159 aa, Streptococcus agalactiae
MKLKIITVGKLKEKYLKEGVAEYQKRLNRFSKIETIELADEKTPDKASISENQRILDIEGERILSKIGERDYVIGLAIEGKQLPSESFSHLIDQKMISGYSTITFVIGGSLGLSQKVKKRADYLMSFGLLTLPHQLMKLVLMEQIYRAFMIRQGTPYHK

SEQ ID NO: 9 - DNA, 1230 bp, Streptococcus agalactiae
gtgaaaaaaaaattagtctcatcacttctaaagtgttctctaatcattattgttagctttgctggtggagcatttgctagttttgtcatgaatcataatgacaatattccaaatggtggtgtcactaaaactagtaaagtaaattataataacataacgcctacaacaaaagctgttaaaaaggtacaaaatagtgttgtttctgttatcaattataaacaacaagagagtcgttctgacctatcagacttctatagtcatttttttggtaatcaggggggcaacactgataagggcttacaagtttacggtgaaggctctggagtcatctataaaaaagatggtaaaaatgcctatgttgtcactaataaccacgtcattgatggggctaaacaaattgaaattcaactagctgatggctcaaaagcagttgggaaacttgttgggtcagatacctactctgatttagccgtcgtcaaaattccatcagataaggtttcaaatattgcagaatttgctgattcatcaaaactcaacattggtgaaactgctatagcgatcggaagccctcttggaactgagtatgcaaattctgtaactcaaggtattgtatctagtttaaaaagaactgtaacaatgactaatgaagaaggacaaacagtttctacaaatgctatccagactgatgctgctatcaatcctggtaattcaggtggagcacttatcaatattgaaggacaggttattggaattaattctagtaaaatttcttctacatcaaatcaaacctcaggacaatcgtcaggaaatagcgttgaaggtatgggatttgccattccttcaaatgatgttgttaagattatcaatcaacttgagagtaacggacaagtagagagacctgctctaggtatttctatggctggattaagtaatttaccatccgatgttattagtaaactgaaaatcccaagtaatgttactaatggtattgtagtagcatctatccaatctggcatgccagctcaaggcaaactaaagaaatacgatgtcattactaaagttgacgataaagaagtagtatctccaagtgatttacaaagtttactctatggccaccaggtaggggattccataacagtaaccttttatcgtggtgaaaataaacaaacagtcactataaaacttactaaaactagtaaagatttagctaaacaacgagcaaataactaa

SEQ ID NO: 10 - protein, 409 aa, Streptococcus agalactiae
MKKKLVSSLLKCSLIIIVSFAGGAFASFVMNHNDNIPNGGVTKTSKVNYNNITPTTKAVKKVQNSVVSVINYKQQESRSDLSDFYSHFFGNQGGNTDKGLQVYGEGSGVIYKKDGKNAYVVTNNHVIDGAKQIEIQLADGSKAVGKLVGSDTYSDLAVVKIPSDKVSNIAEFADSSKLNIGETAIAIGSPLGTEYANSVTQGIVSSLKRTVTMTNEEGQTVSTNAIQTDAAINPGNSGGALINIEGQVIGINSSKISSTSNQTSGQSSGNSVEGMGFAIPSNDVVKIINQLESNGQVERPALGISMAGLSNLPSDVISKLKIPSNVTNGIVVASIQSGMPAQGKLKKYDVITKVDDKEVVSPSDLQSLLYGHQVGDSITVTFYRGENKQTVTIKLTKTSKDLAKQRANN

SEQ ID NO: 11 - DNA, 774 bp, Streptococcus agalactiae
atggaatatttagaaacgatcaacatcaatcatattgctccaaatccgtatcaacctcgcctagaatttaatacaaaagaactagaagaattagccaactctattaaaattaatggccttatccaacccattattgtaagaccgtcagcagtctttggttacgaactggtagccggagaacgacggctaagagccgcaaagttagctaaattggaaagtatacctgcaattataaaatcctataataatgatgatagtatgcaattagctattgtcgaaaatttacaacgatctaatttgtcacctattgaagaggctaaagcctactctcaacttctacaaaagaaaagtatgacacatgaagagttagcaaaatatatgggaaaatctcgtccctatatatcaaatacgatacgactactaaatttaccgccactaattacttcagctattgaagaaggaaaactttcctctggtcatgcgcgtgcactactcagtctaccagatgctagtcaacagaaagattggtatcagagaatcctcactgaagatattagtgtaagacgactagagaagttattaaaacaagaaaagaaaacaaatcataagtcacttcaaaataaagatgtctttctaaaacatcaagaaaatgagttagctcaatttctaggtagcaaagtgaaacttactattaataaagatggtgctggcaatataaagattgctttcgctaaccaagaagaattaaacagaattatcaacactctaaaataa

SEQ ID NO: 12 - protein, 257 aa, Streptococcus agalactiae
MEYLETININHIAPNPYQPRLEFNTKELEELANSIKINGLIQPIIVRPSAVFGYELVAGERRLRAAKLAKLESIPAIIKSYNNDDSMQLAIVENLQRSNLSPIEEAKAYSQLLQKKSMTHEELAKYMGKSRPYISNTIRLLNLPPLITSAIEEGKLSSGHARALLSLPDASQQKDWYQRILTEDISVRRLEKLLKQEKKTNHKSLQNKDVFLKHQENELAQFLGSKVKLTINKDGAGNIKIAFANQEELNRIINTLK

SEQ ID NO: 13 - DNA, 1362 bp, Streptococcus agalactiae
atgacggaaaacgaacaactattttggaatagagtactagagctatctcgttctcaaatagcaccagcagcttatgaattttttgttctagaggctagactcctcaaaattgaacatcaaactgcagttattactttagataacattgaaatgaaaaagctattctgggaacaaaatttggggcctgttatcctaacagctggttttgaaattttcaatgctgaaattacagctaactatgtctcaaacgatttacatttacaagaaactagtttttctaactaccagcaatctagcaatgaagtaaatactttaccaattagaaaaatcgactctaaccttaaagagaaatatacttttgctaattttgttcaaggagatgaaaatagatgggctgtttcagcatcaattgctgtagctgatagtcctggcacgacttataatcctctatttatctgggggggacctggtctaggaaagacgcatctactaaatgctattggaaatcaagtcttaagagataatccaaacgcgagggttttatacatcactgctgagaattttattaatgaatttgtcagtcatattcgtttagattcgatggaagaattaaaagaaaagtttcgcaacttagacttactcctgattgatgatattcagtcgcttgctaagaaaaccttaggggggacccaagaggagttcttcaatactttcaatgctttacatacaaacgataaacaaatcgtattgaccagtgaccgaaatccaaatcaattaaatgatctagaagaacgtctagtcacgcgctttagttggggactcccagtaaatatcacaccacctgattttgaaacacgagttgctattttaaccaataaaattcaagaatatccttatgattttcctcaagataccattgaatacttagcaggagaatttgattccaacgtacgtgaattagaaggagccttgaaaaatattagtctagttgctgactttaagcatgctaaaactattacagtagatatagctgcagaagctatcagagcacgtaaaaatgatggtcctattgttactgtcattcctatagaagaaattcaaatacaagttggtaaattctatggcgtaactgtaaaagagataaaagcaactaaaagaacacaagatattgtccttgcaagacaggtagccatgtacttagctcgtgagatgacagataacagtctcccaaaaataggtaaagaatttgggggacgagatcactcaactgttctccacgcttataataaaataaaaaatatggttgctcaagatgacaacttacgaattgagatagaaactatcaaaaataaaatcagatag

SEQ ID NO: 14 - protein, 453 aa, Streptococcus agalactiae
MTENEQLFWNRVLELSRSQIAPAAYEFFVLEARLLKIEHQTAVITLDNIEMKKLFWEQNLGPVILTAGFEIFNAEITANYVSNDLHLQETSFSNYQQSSNEVNTLPIRKIDSNLKEKYTFANFVQGDENRWAVSASIAVADSPGTTYNPLFIWGGPGLGKTHLLNAIGNQVLRDNPNARVLYITAENFINEFVSHIRLDSMEELKEKFRNLDLLLIDDIQSLAKKTLGGTQEEFFNTFNALHTNDKQIVLTSDRNPNQLNDLEERLVTRFSWGLPVNITPPDFETRVAILTNKIQEYPYDFPQDTIEYLAGEFDSNVRELEGALKNISLVADFKHAKTITVDIAAEAIRARKNDGPIVTVIPIEEIQIQVGKFYGVTVKEIKATKRTQDIVLARQVAMYLAREMTDNSLPKIGKEFGGRDHSTVLHAYNKIKNMVAQDDNLRIEIETIKNKIR

SEQ ID NO: 15 - DNA, 1137 bp, Streptococcus agalactiae
atgattcatttttcaataaataaaaatttcttcttgcatgctctaacggtaaccaaacgagctattagtcataaaaatgcgattccaatcctttcaactgttaaaatagaagtgactagggatgctatcattttaacggggtcaaatggacaaatttcaattgaaaatactattcctgcttcaaatgaaaatgcaggtttactagtaacgaatccaggctctattttgttagaagctggtttctttattaatattatttcaagtttaccagatgtaactttagaatttacagagattgaacaacatcaaattgttcttactagtggaaaatcagagattactttgaaaggtaaggatgtcgatcaataccctcgtctgcaggaaatgacaacagatactccattaacattagaaactaaactgttaaaatcaattattaatgaaactgcttttgctgctagccaacaagaaagccgtccaatcttaacaggtgttcatttggttatcagtcaaaataaatactttaaggctgttgcgacagattcacaccgtatgagtcaacgcactttccaattagagaaatcggctaataattttgatttggttgttccaagtaaatcccttcgagaattttcggctgtttttacagatgatattgaaactgtagaggttttcttctcagatagtcaaatgttatttagaagtgaaaatatcagcttctatacacgtttgcttgaaggaaactaccctgatactgatcgcctcctaactaatcagtttgaaaccgaaattatctttaatacaaatgctttacgccatgctatggaacgtgcttatttaatttcgaatgcaactcagaacggtactgttcgtttagaaattcaaaatgagacagtctcagctcatgtaaactctccagaagttggtaaagttaatgaggaattggatactgttagtcttaaaggtgatagtttaaatattagctttaatccaacttacctaattgaatctttaaaagcagtaaaaagcgaaacagttacgattcgatttatttctccagtacgtccatttactttgacacctggtgaagatactgaagatttcatccaattaataactcctgttcgtactaactaa

SEQ ID NO: 16 - protein, 378 aa, Streptococcus agalactiae
MIHFSINKNFFLHALTVTKRAISHKNAIPILSTVKIEVTRDAIILTGSNGQISIENTIPASNENAGLLVTNPGSILLEAGFFINIISSLPDVTLEFTEIEQHQIVLTSGKSEITLKGKDVDQYPRLQEMTTDTPLTLETKLLKSIINETAFAASQQESRPILTGVHLVISQNKYFKAVATDSHRMSQRTFQLEKSANNFDLVVPSKSLREFSAVFTDDIETVEVFFSDSQMLFRSENISFYTRLLEGNYPDTDRLLTNQFETEIIFNTNALRHAMERAYLISNATQNGTVRLEIQNETVSAHVNSPEVGKVNEELDTVSLKGDSLNISFNPTYLIESLKAVKSETVTIRFISPVRPFTLTPGEDTEDFIQLITPVRTN

SEQ ID NO: 17 - DNA, 882 bp, Streptococcus agalactiae
atgactctatatataatagctaacccccatgctggtaataaaaatgcctccactattgttggtaaaattcaggagctttatcatactgaagatatttctgtgttctatacagaacagaaagatgatgaaaaaaaacaagtcattaatatactaaggtcttttaaagaaagtgatcatctaatgattataggaggagatggtaccttatcaaaagtaatgacttatctcccccaacatattccgtgcacttattatcctgttggttcgggaaatgattttgccagagctttgaaaattcctaacctcaaagaaacccttaccgctattcagacagaaagattaaaggaaattaattgctttatttatgataaagggctgattttgaatagtttagatttaggttttgcagcctatgtcgtttggaaagcatctaactctaaaataaaaaatattttgaatagatatcgtctaggaaaaataacttacattgttatagctatcaaatcattattacattcttctaaagtacaagtattagtggaaggagagacaggacagcagataaaactaaatgacctttattttttcgcattagcaaataacacttattttggaggtggcattactatttggcctaaagcaagtgctttaactgcagagttagatatggtttacgctaaagggcatacttttctaaaacgattaagtattttattatctttggtttttaaaaggcatactacctctaaaagtataaaacaccagactttcaaagctatgaccgtatattttcctaaaaatagtttgattgaaatagatggcgaaatagttgagttagatcagattagtttaaaatgtcaaaaaaggtatttatatatgtaa

SEQ ID NO: 18 - protein, 293 aa, Streptococcus agalactiae
MTLYIIANPHAGNKNASTIVGKIQELYHTEDISVFYTEQKDDEKKQVINILRSFKESDHLMIIGGDGTLSKVMTYLPQHIPCTYYPVGSGNDFARALKIPNLKETLTAIQTERLKEINCFIYDKGLILNSLDLGFAAYVVWKASNSKIKNILNRYRLGKITYIVIAIKSLLHSSKVQVLVEGETGQQIKLNDLYFFALANNTYFGGGITIWPKASALTAELDMVYAKGHTFLKRLSILLSLVFKRHTTSKSIKHQTFKAMTVYFPKNSLIEIDGEIVELDQISLKCQKRYLYM

SEQ ID NO: 19 - DNA, 198 bp, Streptococcus agalactiae
atgtatcaagttggatcacttgttgaaatgaaaaaacctcatgcttgtgtaattaaagaaactggtaaaaaggctaatcaatggaaggtactgagagtaggagctgatattaaaattcagtgtactaactgtcagcatgtgattatgatgagtcgttatgattttgagcgaaaattaaaaaaagtactgcaaccatga

SEQ ID NO: 20 - protein, 65 aa, Streptococcus agalactiae
MYQVGSLVEMKKPHACVIKETGKKANQWKVLRVGADIKIQCTNCQHVIMMSRYDFERKLKKVLQP

SEQ ID NO: 21 - protein, 204 aa, Streptococcus agalactiae
TTGGATAATTTAATCAGGTTAGCTGAGATTTTTGACGTGAGCTTAGATGAACATGTTTTAGCTAAAACAAATGAAGTTAAAGTTGAACGTATTTATGAAAATAAACCCCTTGATCTACGAAAATACAATAAAATTTATTGGTTTATTTTTCGAAATATTATTCGATCTCTACTAATTATTTTAGCTATATTAACTTTCTTATAA

SEQ ID NO: 22 - protein, 67 aa, Streptococcus agalactiae
MDNLIRLAEIFDVSLDEHVLAKTNEVKVERIYENKPLDLRKYNKIYWFIFRNIIRSLLIILAILTFL

SEQ ID NO: 23 - protein, 1116 aa, Streptococcus agalactiae
ATGGCTTTAACAGCAGGTATTGTAGGCTTACCAAATGTTGGTAAATCAACTTTATTTAACGCAATTACAAAAGCAGGAGCAGAAGCTGCTAATTATCCTTTTGCGACTATTGATCCCAATGTTGGTATGGTAGAAGTACCAGATGAGCGTCTACAAAAATTGACAGAATTGATTACGCCTAAAAAAACAGTTCCGACAACCTTTGAATTTACTGATATTGCAGGTATTGTTAAAGGTGCTTCGAAGGGGGAAGGTCTAGGTAATAAATTTTTAGCTAATATTCGTGAAGTGGATGCTATTGTTCATGTGGTACGTGCGTTTGATGATGAAAATGTTATGCGTGAACAAGGTCGTGAGGATGCTTTCGTTGATCCTATAGCAGATATTGATACTATTAATCTTGAATTAATCTTAGCTGATTTAGAGTCAATCAATAAACGTTATGCGCGTGTTGAAAAAATGGCACGAACTCAAAAAGATAAAGAATCAGTAGCAGAGTTCAATGTTTTACAAAAGATTAAACCTGTTTTGGAAGATGGGAAATCAGCTCGTACCATTGAGTTTACAGAAGAGGAAGCAAAAGTTGTTAAAGGTCTTTTTTTATTAACAACTAAACCTGTTTTATATGTTGCTAATGTTGATGAGGACAAAGTAGCTGATCCTGATGATATCGACTATGTTAATCAAATTCGTGCATTTGCAGAAACAGAGAATGCAGAAGTAGTCGTGATTTCTGCTCGAGCTGAAGAAGAAATATCTGAACTTGATGATGAAGATAAGTTAGAATTTTTAGAAGCTATTGGATTAACAGAATCTGGTGTTGATAAATTAACACGAGCTGCTTATCATCTTTTAGGCCTTGGAACTTACTTTACTGCTGGTGAAAAAGAGGTTCGCGCTTGGACGTTTAAGCGTGGTATAAAAGCTCCACAAGCTGCTAGTATTATCCATTCAGATTTTGAAAGAGGTTTTATTCGTGCAGTAACGATGTCATATGATGACCTTATTCAATATGGATCTGAAAAAGCAGTAAAAGAAGCTGGCCGGTTACGTGAAGAAGGAAAAGAGTATATTGTTCAAGATGGCGATATCATGGAATTCCGTTTCAATGTCTAG

SEQ ID NO: 24 - protein, 371 aa, Streptococcus agalactiae
MALTAGIVGLPNVGKSTLFNAITKAGAEAANYPFATIDPNVGMVEVPDERLQKLTELITPKKTVPTTFEFTDIAGIVKGASKGEGLGNKFLANIREVDAIVHVVRAFDDENVMREQGREDAFVDPIADIDTINLELILADLESINKRYARVEKMARTQKDKESVAEFNVLQKIKPVLEDGKSARTIEFTEEEAKVVKGLFLLTTKPVLYVANVDEDKVADPDDIDYVNQIRAFAETENAEVVVISARAEEEISELDDEDKLEFLEAIGLTESGVDKLTRAAYHLLGLGTYFTAGEKEVRAWTFKRGIKAPQAASIIHSDFERGFIRAVTMSYDDLIQYGSEKAVKEAGRLREEGKEYIVQDGDIMEFRFNV

SEQ ID NO: 25 - protein, 504 aa, Streptococcus agalactiae
ATGGCTGTTGACAGAATTGTAAAAGACCTTGACGTCAACTTTACAGAAGATAAAAATTTTAAAGCAGAGATAGGTAGTGATTTTATCAACGGTGAAAAAATTTATTTTATCAAACCGACTACTTTTATGAATAACAGTGGTATTGCTGTAAAAGCCCTGCTTACTTACTACAACATTTCTATTAAGGATATGATTATCATATATGATGATTTAGACATGGAAGTCGGTAAAATACGTTTTCGTCAAAAAGGATCTGCTGGGGGACATAATGGTATCAAGTCTATTATTGCTCATTTAGGTACTCAAGAATTTGATCGTATTAAAGTAGGTATAGGACGTCCGAATGGACGTATGACAGTTATTAATCATGTTCTAGGGAAATTTGATAAAAATGATGAAATTATGATATTAAATACCCTTGATAAGGTTGACAATGCTGTCAATTATTATTTACAGACGAATGATTTTCAAAAAACAATGCAGAAATACAACGGTTTAAAATGA

SEQ ID NO: 26 - protein, 167 aa, Streptococcus agalactiae
MAVDRIVKDLDVNFTEDKNFKAEIGSDFINGEKIYFIKPTTFMNNSGIAVKALLTYYNISIKDMIIIYDDLDMEVGKIRFRQKGSAGGHNGIKSIIAHLGTQEFDRIKVGIGRPNGRMTVINHVLGKFDKNDEIMILNTLDKVDNAVNYYLQTNDFQKTMQKYNGLK

SEQ ID NO: 27 - protein, 1355 aa, Streptococcus agalactiae
ATGAATATTATAGAATTATTTAGCCAAAATAAAGTGGTGCGGACATGGCACTCTGGATTAGTAACTAATAGTCGCCAATTAGTTATGGGGTTTTCAGGAGCAAGTAAAGCTATTGCCATAGCATCAGCCTACGAGAAGTTATCTAAAAAAATTATGGTAGTCACTGCCACTCAAACCGATTCTGATAAATTATCAAGTGATATATCAAGTTTAATTGGAGAAGATAACGTTTATCAATTTTTTGCTGATGACGTTCCTGCAGCAGAGTTTATTTTCTCTTCATTAGATAAATCAATTTCACGACTCAGTGCCCTGAGGTTTCTAAAAGATCCAGAAAAAAACGGTGTTTTGATTACTAGTATCAGTGGTTTAAGGTTACTATTACCAAATCCGGAAGTTTTCTCGAAAAGTCAATATAAGTTTGAAATCGGTCAAGAATGTTATTTAGATAAATTGTGTAAGAACCTAGTCAATTTAGGTTATCAGAAAGTTTCTCAAGTATTTAGTCCTGGTGAATTTAGCCAAAGAGGAGATATTTTAGATATTTTTGAGATGACACAAGAATATCCTTATCGCTTGGAATTCTTCGGAGATGAAATAGATGGCATCAGGCAGTTTGATATTGACACTCAAAAGTCTCTTAAACAATTAGAGTCAGTACAGATTTCGCCAGCAGATGATATTATTTTACAAGATGCAGATTTCGAGCGTGCAAAGAAAAAACTTGAGGGCTATCTAGTAACAGCTAGTGAGGTACAACGCACCTATTTGAGCGAGGTTTTATCTACAACTGAGAATCATTTTAAGCACTCAGATATTCGTCGTTTTCTAAGTATCTTTTATGAAAAAGAATGGGGAATATTAGACTATATTCCTGAGGGAACTCCACTTTTTGTTGATGATTTTCAAAAAATTGTAGATCGAAATGCTAAGTTAGATTTAGAAATAGCTAGCCTTCTGACGGAAGATTTACAACAAGGCAAGTCTCATTCTAGTTTGAACTATTTTTCAGATCCTTATAAGCAATTAAGACAATACCAACCAGCAACCTTCTTTTCAAATTTCCACAAAGGATTAGGAAATCTGAAATTTGATAAACTTCATCATTTTACTCAATATGGAATGCAAGAATTTTTTAATCAATTTCCATTGTTGGTCGATGAAATCAATCGTTATAAGAAATCTGGAGCGACAGTACTGTTGCAAGTAGATTCTCAAAAAGGTTTAAATCTCCTTCAAGAAAATTTAAAAGAATATGGGTTAGATTTAATCATTTCAGATAAAAACGATATCGTTCAAAAGGAGTCACAACTTATTGTTGGGCATCTTTCAAATGGTTTTTATTTTGCAGATGA

SEQ ID NO: 28 - protein, 451 aa, Streptococcus agalactiae
MNIIELFSQNKVVRTWHSGLVTNSRQLVMGFSGASKAIAIASAYEKLSKKIMVVTATQTDSDKLSSDISSLIGEDNVYQFFADDVPAAEFIFSSLDKSISRLSALRFLKDPEKNGVLITSISGLRLLLPNPEVFSKSQYKFEIGQECYLDKLCKNLVNLGYQKVSQVFSPGEFSQRGDILDIFEMTQEYPYRLEFFGDEIDGIRQFDIDTQKSLKQLESVQISPADDIILQDADFERAKKKLEGYLVTASEVQRTYLSEVLSTTENHFKHSDIRRFLSIFYEKEWGILDYIPEGTPLFVDDFQKIVDRNAKLDLEIASLLTEDLQQGKSHSSLNYFSDPYKQLRQYQPATFFSNFHKGLGNLKFDKLHHFTQYGMQEFFNQFPLLVDEINRYKKSGATVLLQVDSQKGLNLLQENLKEYGLDLIISDKNDIVQKESQLIVGHLSKWFLFCR

SEQ ID NO: 29 - protein, 2183 aa, Streptococcus agalactiae
TTGTTGGGCATCTTTCAAATGGTTTTTATTTTGCAGATGAGAAAATTGTTCTGATTACTGAACGTGAGATTTATCATAGGCGTGTTAAAAGGAAAATTAGACGCAGTAATATTAGTAATGCAGAACGTCTAAAAGATTATAATGAACTTTCAGTTGGCGATTATGTTGTTCATAATGTTCATGGCGTAGGAAAATTTTTAGGTATTGAAACAATTGAGATACAAGGTATTCATCGTGATTATCTGACTATTCAATATCAAAATGCTGATCGTATCTCTATCCCCGTAGAACAAATTGAACTTCTAACAAAATATGTCTCTGCAGATGGCAAAGAGCCTAAAATTAATACGTTAAATGATGGTCGCTTCAAAAAAGCAAAACAGAGAGTTGCAAAGCAAGTAGAAGATATTGCTGATGATTTGTTGAAACTTTATGCAGAGCGTAGTCAATTACAAGGATTTGCATTTTCTCCTGACGATAATATGCAAAATGACTTTGATAATGATTTTGCATATGTAGAGACAGAGGATCAATTGCGGTCTATAAAAGAAATTAAACAGGATATGGAAGGTAATCGTCCGATGGATCGATTATTGGTTGGAGACGTTGGTTTTGGTAAGACAGAGGTTGCTATGCGTGCGGCTTTCAAAGCTGTCAATGACCATAAACAAGTTGTTGTTTTAGTCCCAACAACAGTTCTAGCCCAGCAGCATTTTGAAAATTTTAAAGAACGTTTTAGCAATTATCCTGTTACAGTTGATGTACTTAGTCGTTTTCGTAGCAAAAAAGAACAAACAGATACACTAAAAAGATTATCTAAGGGCCAAGTTGATATTATTATTGGAACACATCGACTTCTCTCTCAAGATGTTGTATTTTCGGATTTAGGGTTAATAGTTATTGATGAGGAACAGCGATTTGGTGTAAAGCATAAAGAAAAGTTAAAAGAATTAAAAACAAAAGTTGATGTATTAACTTTGACAGCGACCCCAATACCTAGAACATTACATATGTCAATGCTTGGCATTAGAGACTTATCAGTCATTGAAACACCTCCAACTAATCGTTATCCTGTGCAGACTTACGTTTTGGAGACAAATCCTGGTTTAGTTAGAGAAGCTATTATTCGTGAGATAGACAGAGGAGGACAGGTTTTTTATGTTTACAATAAAGTTGACACTATTGATCAGAAAGTTTCAGAACTTCAGGAGTTAGTACCAGAAGCTAGTATTGGTTTTGTTCATGGTCAAATGTCTGAAATTCAATTAGAAAATACATTAATAGACTTTATCAATGGAGATTACGATGTTTTAGTTGCAACGACAATAATTGAGACAGGAGTCGATATTTCAAATGTTAATACCCTCTTTGTTGAAAATGCAGATCATATGGGCTTGTCAACCCTTTATCAATTAAGAGGCCGTGTGGGTAGAAGTAATCGCATTGCTTATGCTTACCTTATGTACAGACCTGATAAAGTTTTAACAGAAATTTCTGAGAAAAGACTAGATGCAATCAAAGGGTTTACAGAATTGGGATCTGGTTTTAAAATAGCGATGCGTGATTTATCTATACGTGGTGCAGGAAATATTTTAGGAGCTTCACAAAGTGGTTTTATTGATTCGGTTGGATTCGAGATGTATTCACAGCTTCTAGAGCAAGCGATTGCCACCAAACAAGGGAAATCATTAATTCGTCAAAAAGGTAATGCTGAATTAGCCTTACAAATTGACGCCTATTTACCAGCAGAATATATATCAGATGAGCGCCAAAAAATAGAAATATATAAGCGTATTCGTGAATTAGAAACTAGGGCTGATTATGAAGCCTTACAAGATGAGTTAATAGATCGTTTTGGAGAATATCCTGATCAAGTTGCATACCTTTTAGAAATAGGACTTTTAAAAGCTTATCTGGACCTTGCCTTTACTGAATTAGTAGAAAGAAAAGGTAATGAAATAAGCATCCTATTTGAAAAAGCATCTTTGAAGTATTTTTTAACTCAAGATTATTTTGAAGCACTATCAAAAACTCAACTTAAGGCTAGAATTAGCGAAACAAATGGTAAGATGGAAGTTGTTTTTAATATCAAACATAAGAAAAATTATGAAATTATTGAAGAACTTCTAAAATTTGCCGAATGTTTTATCGAGATTAAGTCACGTAAACCAGTAGAAGAATAA

SEQ ID NO: 30 - protein, 727 aa, Streptococcus agalactiae
MLGIFQNGFYFADEKIVLITEREIYHRRVKRKIRRSNISNAERLKDYNELSVGDYVVHNVHGVGKFLGIETIEIQGIHRDYLTIQYQNADRISIPVEQIELLTKYVSADGKEPKINTLNDGRFKKAKQRVAKQVEDIADDLLKLYAERSQLQGFAFSPDDNMQNDFDNDFAYVETEDQLRSIKEIKQDMEGNRPMDRLLVGDVGFGKTEVAMRAAFKAVNDHKQVVVLVPTTVLAQQHFENFKERFSNYPVTVDVLSRFRSKKEQTDTLKRLSKGQVDIIIGTHRLLSQDVVFSDLGLIVIDEEQRFGVKHKEKLKELKTKVDVLTLTATPIPRTLHMSMLGIRDLSVIETPPTNRYPVQTYVLETNPGLVREAIIREIDRGGQVFYVYNKVDTIDQKVSELQELVPEASIGFVHGQMSEIQLENTLIDFINGDYDVLVATTIIETGVDISNVNTLFVENADHMGLSTLYQLRGRVGRSNRIAYAYLMYRPDKVLTEISEKRLDAIKGFTELGSGFKIAMRDLSIRGAGNILGASQSGFIDSVGFEMYSQLLEQAIATKQGKSLIRQKGNAELALQIDAYLPAEYISDERQKIEIYKRIRELETRADYEALQDELIDRFGEYPDQVAYLLEIGLLKAYLDLAFTELVERKGNEISILFEKASLKYFLTQDYFEALSKTQLKARISETNGKMEVVFNIKHKKNYEIIEELLKFAECFIEIKSRKPVEE

SEQ ID NO: 31 - DNA, 273 bp, Streptococcus agalactiae
gtgagattagacaagtatctaaaagtgtcgcgtatcattaagcgtcgtcccgttgctaaagaagttgcagacaaaggacgtgtcaaggtgaatggcgtattagcaaagtcatcaactgacctaaagcttaatgaccaagttgaaattcgttttggtaataaattgttgaccgttaaagtattagaaatgaaagatagcactaagaaagaagatgctatcaaaatgtatgaaattattaatgaaacaaggatagaaacagatgagcaagcctaa

SEQ ID NO: 32 - protein, 90 aa, Streptococcus agalactiae
MRLDKYLKVSRIIKRRPVAKEVADKGRVKVNGVLAKSSTDLKLNDQVEIRFGNKLLTVKVLEMKDSTKKEDAIKMYEIINETRIETDEQA

SEQ ID NO: 33 - DNA, 372 bp, Streptococcus agalactiae
atgagcaagcctaatgttgttcagttaaataatcaatatattaacgatgagaatctaaaaaaacgttacgaagctgaggagttacgccgaaaaaatcgtttaatgggttgggttcttatttttgtcatgcttttatttattttacccacttataatttagttaagagttacagaactttacaagaacgtcgtcaagaagttgtaaaattaacgaaagactatcagacattaactaatagaactgagaaccagaagttgctagcaaaacaactaaaaaatccagattacgttcaaaaatatgctcgagctaagtattatttctctaagaccggcgaaatgatttacccattaccagaccttttaccaaaataa

SEQ ID NO: 34 - protein, 123 aa, Streptococcus agalactiae
MSKPNVVQLNNQYINDENLKKRYEAEELRRKNRLMGWVLIFVMLLFILPTYNLVKSYRTLQERRQEVVKLTKDYQTLTNRTENQKLLAKQLKNPDYVQKYARAKYYFSKTGEMIYPLPDLLPK

SEQ ID NO: 35 - DNA, 135 bp, Streptococcus agalactiae
atgaataatttaattgaaacaatagaacattttctagcctactcggatgacaaactagaagaattagctgataagaactatcaacttaggcaaacaattgtagaaaaagaaaagattgagagcagagaaaagtaa

SEQ ID NO: 36 - protein, 44 aa, Streptococcus agalactiae
MNNLIETIEHFLAYSDDKLEELADKNYQLRQTIVEKEKIESREK

SEQ ID NO: 37 - DNA, 1287 bp, Streptococcus agalactiae
atgaagaaagttttaaccttcttattatgtagcttatattttgtatcaatcccagctataagtaccgaggagccattaacgctttctcaaaatagacgatacgccttaactcagacagttgtggataaggaaatgtattttgatgctattccagagagaccaactacaaaaattgaaataagcagttttcaagatgaagctttaaccataacaggagagactttagttccaaatactttattgtcgattgtttctcttacaattaattcaaatggaattccagtatttactttgtccaatggacagttcataaaggctagtcgtgaagctatttttaatgatttagtttctaagcagcaatctgtctcattggattattggttaaaaccttcttttgtgacttatgaagcaccttacacaaatggtgttagtgaagttaaaaataatttaaaaccttattccagagtgcatttagtagaacaagcagaaacagaacatggtatttattataaaacggacagtggtttttggatatcagtagaagatctatcggttgctgataatcgtatggctaaggttcaagaagtattattggaaaaatataataaagataaatatggtatatacatcaaacaattaaatacacagacagtagctggtattaatattgataggtcaatgtactctgcaagtattgcaaaattagcaacactttatgctagccaagagcaagtaaaattaggaaaactgtcattggacagcaaatttgaatacaaagataatgttaatcaatttcctaatagctatgatccaagtggtagtgggaaattagagaaaaaagctgatcataaattatataccgttaaggagttacttgaagcaactgccaaggaatcagataatgttgcaacaaatatgctaggttattatgtcaataatcaatatgattcaatgtttcaaacacaagtagacacaatttctggtatgcactgggatatgaaaaaacgccagatttctccacaagctgcgggtaaaatgatggaagcaatttattatcaaaatggagatattgttaattacctatcaaagactgattttgataatacaagaatccctaaaaatataccagttaaagtagcacataaaattggagatgcttatgactacaaacatgatgcggctattgtttatgcagaacaaccttttattatgattatctttacggataaatcatcttacgatgatatcactaagattgctgacgacgtttaccaggttttaaaataa

SEQ ID NO: 38 - protein, 428 aa, Streptococcus agalactiae
MKKVLTFLLCSLYFVSIPAISTEEPLTLSQNRRYALTQTVVDKEMYFDAIPERPTTKIEISSFQDEALTITGETLVPNTLLSIVSLTINSNGIPVFTLSNGQFIKASREAIFNDLVSKQQSVSLDYWLKPSFVTYEAPYTNGVSEVKNNLKPYSRVHLVEQAETEHGIYYKTDSGFWISVEDLSVADNRMAKVQEVLLEKYNKDKYGIYIKQLNTQTVAGINIDRSMYSASIAKLATLYASQEQVKLGKLSLDSKFEYKDNVNQFPNSYDPSGSGKLEKKADHKLYTVKELLEATAKESDNVATNMLGYYVNNQYDSMFQTQVDTISGMHWDMKKRQISPQAAGKMMEAIYYQNGDIVNYLSKTDFDNTRIPKNIPVKVAHKIGDAYDYKHDAAIVYAEQPFIMIIFTDKSSYDDITKIADDVYQVLK

SEQ ID NO: 39 - DNA, 1275 bp, Streptococcus agalactiae
atgtataacactattttgaaagataccttatccaaagggttatttaccgctcatcagaaagttctaattgctgtttctggtggcattgattcaataaatttgttgcaatttttataccagtatcaaaaagagttatcgattagtattggtattgcacacataaatcatggacagcgaaaagaatcagaaaaagaagaagaatatatcagacagtggggacagatacatgatgtccctgtctttatctcttattttcaaggaatattttcagaagatagagcacgtaaccatcgctacaattttttttcaaaagttatgcgtgaagaaggttacacggctttagtaacagctcaccatgctgatgatcaagctgaaactgtatttatgagaattttaagaggaagcaggctacgctatttatcagggattaagcaagtgagtgcttttgcaaacggtcaattgattagaccatttcttccatataaaaaggagttattaccaaatatttttcattttgaagatgctagcaacgcttcgtctgattatttaagaaatcgaataagaaacgtctactttcctgctttggaaagagaaaataatcaattgaaagattctctcataactctctctgaggaaacagagtgtttattcacggctttaacagacctaacaaggagcatcgaagtaacaaactgctatgattttttaaggcaaactcattctgtccaagaatttttattgcaagattacattagcaaatttccagatttacaagtgagtaaagaacagttcagagtaatattaaaattgattagaactaaagccaatattgactatactattaaatcgggctattttcttcataaggattacgagagttttcatattacaaaaatccatcctaagacggatagttttaaggttgaaaaaagattagaattgcataatatacaaatattctcacaatatttattttcctatggaaaattcatttctcaagcagacattactattcctatttatgatacttctccgattattttaagaagaagaaaagaaggggataggatatttttaggaaatcacactaaaaaaattcgccgtctatttattgatgagaaaataactctaaaagagagagaagaagctgttattggggagcaaaataaagagttgatatttgtgattgttgcaggtagaacatatttgagaaaaccttctgaacatgatataatgaagggcaaactttatattgaaaatttagaaaaaaggtga

SEQ ID NO: 40 - protein, 424 aa, Streptococcus agalactiae
MYNTILKDTLSKGLFTAHQKVLIAVSGGIDSINLLQFLYQYQKELSISIGIAHINHGQRKESEKEEEYIRQWGQIHDVPVFISYFQGIFSEDRARNHRYNFFSKVMREEGYTALVTAHHADDQAETVFMRILRGSRLRYLSGIKQVSAFANGQLIRPFLPYKKELLPNIFHFEDASNASSDYLRNRIRNVYFPALERENNQLKDSLITLSEETECLFTALTDLTRSIEVTNCYDFLRQTHSVQEFLLQDYISKFPDLQVSKEQFRVILKLIRTKANIDYTIKSGYFLHKDYESFHITKIHPKTDSFKVEKRLELHNIQIFSQYLFSYGKFISQADITIPIYDTSPIILRRRKEGDRIFLGNHTKKIRRLFIDEKITLKEREEAVIGEQNKELIFVIVAGRTYLRKPSEHDIMKGKLYIENLEKR

SEQ ID NO: 41 - protein, 543 aa, Streptococcus agalactiae
ATGCTTGAAAATGATATAAAAAAAGTTTTATATTCAGAAGAAGATATTATTCTGAAAACGAAAGAATTAGGAGCTAAATTAACTGCAGATTATGCAGGTAAGAATCCATTATTAGTAGGTGTATTAAAGGGGTCAGTGCCTTTTATGGCTGAGCTATTAAAGCATATTGATACACATGTTGAAATTGATTTTATGGTTGTTTCAAGCTATCATGGTGGTACAACTAGTAGTGGAGAAGTTAAAATTTTAAAAGATGTTGATACTAACATTGAAGGAAGAGATGTAATCTTTATTGAAGACATCATTGATACTGGACGTACATTAAAATACCTTCGAGATATGTTTAAGTATCGCCAAGCTAACTCTGTCAAAGTTGCAACCCTTTTTGATAAGCCAGAAGGGCGATTGGTAGATATTGATGCTGATTACGTTTGTTACGATATCCCAAATGAATTTATTGTGGGATTCGGTTTAGACTATGCTGAAAACTATCGTAACTTACCTTATGTTGGTGTGTTAAAAGAAGAAATTTACTCAAAATAG

SEQ ID NO: 42 - protein, 180 aa, Streptococcus agalactiae
MLENDIKKVLYSEEDIILKTKELGAKLTADYAGKNPLLVGVLKGSVPFMAELLKHIDTHVEIDFMVVSSYHGGTTSSGEVKILKDVDTNIEGRDVIFIEDIIDTGRTLKYLRDMFKYRQANSVKVATLFDKPEGRLVDIDADYVCYDIPNEFIVGFGLDYAENYRNLPYVGVLKEEIYSK

SEQ ID NO: 43 - protein, 1977 aa, Streptococcus agalactiae
ATGAAAAATAATAAAAATAATGGTTTTCTGAAAAATTCCTTTATTTACATATTATTGATTATTGCGGTTATTACAACCTTTCAATACTATTTAAAAGGAACTAGCTCTCAAAACCAGCAAATTTCTTATACAAAACTTGTTAAACAATTAAAAGCTGGAGAAATTAAGTCTATCTCATACCAGCCAAGTGGTGGTGTTGTTGAAGTTAGTGGGACATATAAGAAAGCCAAAACAATTAAATCAGCTAATAGTTTTACTTTTTTAGGTGGTAGTGTTGCTACTAAAGTTACAGGATTTAATTCTGTTATACTACCAAATGACTCTTCAATAAAATCTCTTGTTAGCGCTGCTGAAGAAAATAACACTAATATTCAGGTCAAACATGAAAGTTCAAGTGGGACATGGATTTCTTATATTGCCAGTTTTTTACCTTTAGTTATCATGATTGGTTTCTTCATGATGATGATGAACCAAGGCGGTGGCGGTGGCGCTCGTGGTGCCATGAGCTTTGGTAAAAATAAAGCAAGATCATCTAGTAAAGATGAGGTTAAAGTTCGATTTTCGGATGTTGCTGGAGCAGAGGAAGAAAAGCAAGAATTAATAGAAGTCGTTGACTTCCTTAAAGATCCTAAACGATATAAATCTCTAGGTGCCCGAATTCCAGCAGGGGTTCTATTAGAAGGACCTCCAGGGACAGGTAAAACCCTATTAGCAAAAGCTGTTGCCGGTGAAGCAGGGGTTCCATTCTTTAGTATTTCCGGTTCAGATTTTGTTGAAATGTTTGTCGGTGTTGGAGCTAGTCGAGTACGCTCTTTGTTTGAAGATGCTAAAAAAGCTGAACGTGCTATTATTTTCATTGATGAAATTGATGCTGTTGGACGTCGACGTGGAGCTGGTATGGGTGGCGGAAACGATGAACGTGAACAAACGCTCAACCAACTTTTAATTGAAATGGATGGTTTTGAAGGAAACGAAAGTATTATCGTTATCGCTGCTACCAACCGTAGTGATGTGTTAGATCCCGCATTACTGCGTCCAGGACGTTTTGATAGAAAAGTTCTAGTTGGACAACCTGATGTAAAAGGTCGTGAAGCAATTCTGAGAGTACATGCTAAAAATAAACCATTAGCAGATAATGTTGACTTAAAAGTAGTAGCTCAACAAACCCCAGGATTTGTTGGTGCTGATTTGGAGAATGTTCTCAATGAAGCTGCTTTAGTTGCTGCGCGACGAAATAAAAAAGTTATTGATGCTTCAGATATTGATGAAGCAGAAGACCGTGTAATTGCTGGTCCTTCTAAAAAAGATCGTACTATTTCTGAAAGAGAAAGAGCTATGGTTGCTTACCATGAAGCTGGGCACACAATTGTCGGTTTGATTCTTTCAAATGCGCGAGTTGTTCATAAAGTTACTATCGTACCACGTGGTCGTGCAGGTGGATATATGATTGCTTTACCTAAAGAAGATCAAATGCTTCTTTCAAAAGATGATATGAAAGAGCAATTAGCAGGTCTTATGGGAGGACGTGTAGCGGAAGAAATTATTTTCAACGCTCAGACAACAGGTGCCTCAAATGACTTCGAACAAGCCACTGCTATGGCCCGCGCTATGGTAACTGAATATGGTATGAGCGAGAAACTTGGACCAGTTCAATACGAAGGCAACCACGCAATGATGGCTGGTCAAATGTCACCTGAAAAATCATATTCTGCTCAAACTGCACAACTTATTGATGATGAAGTTCGTCACCTTCTTAATGAAGCACGTAATAAGGCAGCTGATATTATCAACGAAAACCGTGATACTCATAAATTAATTGCAGAAGCCCTCTTAAAATATGAGACTCTTGATGCTGCTCAGATTAAATCGATTTTTGAGACAGGTAAAATGCCTGAGACAGAAAATGATGAAGATAAAGCAAGAGCGTTATCATACGATGAAATCAAAGAAAAAATGCAAGAAGAAGATAAAAAATAA

SEQ ID NO: 44 - protein, 658 aa, Streptococcus agalactiae
MKNNKNNGFLKNSFIYILLIIAVITTFQYYLKGTSSQNQQISYTKLVKQLKAGEIKSISYQPSGGVVEVSGTYKKAKTIKSANSFTFLGGSVATKVTGFNSVILPNDSSIKSLVSAAEENNTNIQVKHESSSGTWISYIASFLPLVIMIGFFMMMMNQGGGGGARGAMSFGKNKARSSSKDEVKVRFSDVAGAEEEKQELIEVVDFLKDPKRYKSLGARIPAGVLLEGPPGTGKTLLAKAVAGEAGVPFFSISGSDFVEMFVGVGASRVRSLFEDAKKAERAIIFIDEIDAVGRRRGAGMGGGNDEREQTLNQLLIEMDGFEGNESIIVIAATNRSDVLDPALLRPGRFDRKVLVGQPDVKGREAILRVHAKNKPLADNVDLKVVAQQTPGFVGADLENVLNEAALVAARRNKKVIDASDIDEAEDRVIAGPSKKDRTISERERAMVAYHEAGHTIVGLILSNARVVHKVTIVPRGRAGGYMIALPKEDQMLLSKDDMKEQLAGLMGGRVAEEIIFNAQTTGASNDFEQATAMARAMVTEYGMSEKLGPVQYEGNHAMMAGQMSPEKSYSAQTAQLIDDEVRHLLNEARNKAADIINENRDTHKLIAEALLKYETLDAAQIKSIFETGKMPETENDEDKARALSYDEIKEKMQEEDKK

SEQ ID NO: 45 - protein, 337 aa, Streptococcus agalactiae
ATGAAAAAAAGAATATTATCAGCAGTCCTTGTGAGTGGAGTAACTCTTGGAACTGCTGCCGTAACAGTAAACGCTGATGACTTTGACTCGAAAATTGCTGCTACTGATTCAGTAATCAATACTTTATCAGGGCAACAAGCAGCAGCACAAAACCAGGTGACTGCTATTAAAGGACAAGTTGGTGCTTTAGAGTCTCAACAATCAGAATTAGAAGCGCAAAATGCTCAACTTGAGGCTGTATCTCAGCAGTTAGGTCAAGAGATTCAAACTCTTTCTAATAAAATTGTTGCACGTAACGAATCTTTGAAAAGCAAGTTCGTAGTGCTCAAAAGGGTAA

SEQ ID NO: 46 - protein, 112 aa, Streptococcus agalactiae
MKKRILSAVLVSGVTLGTAAVTVNADDFDSKIAATDSVINTLSGQQAAAQNQVTAIKGQVGALESQQSELEAQNAQLEAVSQQLGQEIQTLSNKIVARNESLKKQVRSAQKG

SEQ ID NO: 47 - protein, 95 aa, Streptococcus agalactiae
GTGCTCAAAAGGGTAACTTGACTAACTATATTAATACTATTTTAAATTCGAAATCAGTATCTGATGCNNNNNCATTCCATTCATTAATTAATTAA

SEQ ID NO: 48 - protein, 31 aa, Streptococcus agalactiae
  VARIANT 24, 25: Xaa = Any Amino Acid
MLKKGNLTNYINTILNSKSVSDAXXFHSLIN

SEQ ID NO: 49 - protein, 1325 aa, Streptococcus agalactiae
ATGAAAAAAAGAATATTATCAGCAGTCCTTGTGAGTGGAGTAACTCTTGGAACTGCTGCCGTAACAGTAAACGCTGATGACTTTGACTCGAAAATTGCTGCTACTGATTCAGTAATCAATACTTTATCAGGGCAACAAGCAGCAGCACAAAACCAGGTGACTGCTATTAAAGGACAAGTTGGTGCTTTAGAGTCTCAACAATCAGAATTAGAAGCGCAAAATGCTCAACTTGAGGCTGTATCTCAGCAGTTAGGTCAAGAGATTCAAACTCTTTCTAATAAAATTGTTGCACGTAACGAATCTTTGAAAAAGCAAGTTCGTAGTGCTCAAAAGGGTAACTTGACTAACTATATTAATACTATTTTAAATTCGAAATCAGTATCTGATGCTGTTAATCGTGTTGTTGCTATTCGTGAGGTTGTTTCAGCTAATGAAAAGATGTTAGCACAACAAGAGGCTGACAAAGCGGCCTTAGAAGCTAAACAAATTGAAAATCAAAATGCTATAAATACTGTAGCAGCTAACAAGCAAGCTATCGAAAATAATAAAGCAGCCTTAGCAACACAAAGAGCACAATTAGAAGCAGCTCAATTAGAGTTATCTGCTCAATTGACTACAGTCCAAAATGAAAAAGCATCTTTAATTCAGGCAAAAGCACAAGCTGAGGAAGCTGCGCGTAAGGCAGCTGAAGCACAAGCAGCAGCTGAAGCGAAAGCACAAGCTGAAGCGAAAGCACAAGCTGAGTCTGTAGCAAAAGCACAGGCAGCAGCACAAGTTGAGTCTGCCACAGCTCCTACTGAAACAGTTCAAACACAACCGAGAACTGAAATAAAGCCTTCTAATCTTACGGCTACTTCTTCGGCAACTACTGTTGCTACAACTACAGCTACAGCTACTAATGAGCCAAAAGTTACTCAACCTTCTGTAGTAACTAAAGCAGTTGAAGCACCTAAAGCAGTTGTTTCTTCAACACCTAGAGCGGTATCAAAACCTGTTGTCAGAAGTTATGATTCAAGTAACACATACCCAATGGGACAATGTACTTGGGGAGCTAAGTCAATGGCTTCTTGGGTTGGTAACTATTGGGGAAATGCTAATCAGTGGGGTGCTAGTGCACGTGCAGCTGGTTATTCTGTAGGAACTACCCCTCGTGTTGGTGCAGTAGCTGTTTGGCCATATGATGGTGGTGGTTACGGGCACGTTGCAGTAGTAACGTCAGTGGCTAACAATTCATCTATCCAAGTTATGGAATCAACTATGCTGGAAATATGAGTATTGGCAATTACCGTGGGTCATTTAACCCTAGTGCTTCTGGCTCTGGTTAA

SEQ ID NO: 50 - protein, 441 aa, Streptococcus agalactiae
MKKRILSAVLVSGVTLGTAAVTVNADDFDSKIAATDSVINTLSGQQAAAQNQVTAIKGQVGALESQQSELEAQNAQLEAVSQQLGQEIQTLSNKIVARNESLKKQVRSAQKGNLTNYINTILNSKSVSDAVNRVVAIREVVSANEKMLAQQEADKAALEAKQIENQNAINTVAANKQAIENNKAALATQRAQLEAAQLELSAQLTTVQNEKASLIQAKAQAEEAARKAAEAQAAAEAKAQAEAKAQAESVAKAQAAAQVESATAPTETVQTQPRTEIKPSNLTATSSATTVATTTATATNEPKVTQPSVVTKAVEAPKAVVSSTPRAVSKPVVRSYDSSNTYPMGQCTWGAKSMASWVGNYWGNANQWGASARAAGYSVGTTPRVGAVAVWPYDGGGYGHVAVVTSVANNSSIQVMESNYAGNMSIGNYRGSFNPSASGSG

SEQ ID NO: 51 - DNA, 612 bp, Streptococcus agalactiae
  misc_feature 12, 13, 14, 15, 16: n = A,T,C or G
atgaatgaatgnnnnntagcaaaagcacaggcagcagcacaagttgagtctgccacagctcctactgaaacagttcaaacacaaccgagaactgaaataaagccttctaatcttacggctacttcttcggcaactactgttgctacaactacagctacagctactaatgagccaaaagttactcaaccttctgtagtaactaaagcagttgaagcacctaaagcagttgtttcttcaacacctagagcggtatcaaaacctgttgtcagaagttatgattcaagtaacacatacccaatgggacaatgtacttggggagctaagtcaatggcttcttgggttggtaactattggggaaatgctaatcagtggggtgctagtgcacgtgcagctggttattctgtaggaactacccctcgtgttggtgcagtagctgtttggccatatgatggtggtggttacgggcacgttgcagtagtaacgtcagtggctaacaattcatctatccaagttatggaatcaaactatgctggaaatatgagtattggcaattaccgtggttcatttaaccctagtgcttctggctctgtttactatatttacccaaattaa

SEQ ID NO: 52 - protein, 203 aa, Streptococcus agalactiae
  VARIANT 4, 5, 6: Xaa = Any Amino Acid
MNEXXXAKAQAAAQVESATAPTETVQTQPRTEIKPSNLTATSSATTVATTTATATNEPKVTQPSVVTKAVEAPKAVVSSTPRAVSKPVVRSYDSSNTYPMGQCTWGAKSMASWVGNYWGNANQWGASARAAGYSVGTTPRVGAVAVWPYDGGGYGHVAVVTSVANNSSIQVMESNYAGNMSIGNYRGSFNPSASGSVYYIYPN

SEQ ID NO: 53 - DNA, 969 bp, Streptococcus agalactiae
atgtcttattctaatttaaaattgtttgcactgtcatcaaacaaagaactagcgaaaaaagtgtctcagacgattggaattccgctaggtcaatcgacagttcgccaattttctgatggtgagattcaagttaatattgaagagtctattcgtggccatcatgtttttattttacaatcaacaagctcaccagttaatgataatttgatggaaattttaattatggttgacgctttaaagcgtgctagtgcggagtctgttagtgtggtaatgccttactatgggtatgctcgtcaagatcgcaaggcacgttctcgtgaacctattacttcgaaactcgttgcgaacatgctagaagttgctggtgttgatcgtcttttaacagttgatttacatgcagctcaaattcagggattctttgatattcccgttgatcaccttatgggggctccccttattgcagattactttgatcgtcagggattggttggtgatgatgttgttgtcgttagtcctgatcatggtggcgtaacacgtgcacgtaagctggcacagtgtttaaagacaccgattgctatcattgataagcgccgtagtgttactaaaatgaatacatctgaagtaatgaatattattggtaatatcaaaggtaaaaaatgtattttaattgatgatatgattgatactgcaggtactatttgccatgctgcagacgctttagctgaagcaggggcaacagcggtttatgcttcatgtactcaccctgttttatcagggccggctttggataatattcaaaattcagctattgaaaaattaattgtgttagatacgatttacctccctgaagaacgtttgattgataagattgaacaaatttcaattgcggaattgattggtgaagctattatccgtattcacgagaaacgtcctttatcaccattatttgaaatgaataaactaaaatga

SEQ ID NO: 54 - protein, 322 aa, Streptococcus agalactiae
MSYSNLKLFALSSNKELAKKVSQTIGIPLGQSTVRQFSDGEIQVNIEESIRGHHVFILQSTSSPVNDNLMEILIMVDALKRASAESVSVVMPYYGYARQDRKARSREPITSKLVANMLEVAGVDRLLTVDLHAAQIQGFFDIPVDHLMGAPLIADYFDRQGLVGDDVVVVSPDHGGVTRARKLAQCLKTPIAIIDKRRSVTKMNTSEVMNIIGNIKGKKCILIDDMIDTAGTICHAADALAEAGATAVYASCTHPVLSGPALDNIQNSAIEKLIVLDTIYLPEERLIDKIEQISIAELIGEAIIRIHEKRPLSPLFEMNKLK

SEQ ID NO: 55 - DNA, 1176 bp, Streptococcus agalactiae
atgacattagagaaacgatttaataagtacttagatagaatagaggtctccttaattcgtcagtttgatcaatctatttcagatatacctggaatggtaaaattaactcttggagaaccagattttaccactcctgatcatgttaaagaagcagctaaatcagctattgatgcgaatcaatcgtattacactggtatgagcggtttattagctctaaggcaagctgctgcagattttgcaaaggataaatataatcttacttataatcctgattgtgagatcttggttacgataggtgccacagaagctctgtctgcatctcttatagctattttagaagctggtgatgttgttctattacctgcccccgcttatccaggatatgagccaatagttaaccttgtaggagctgatatcgtagaaattgatactagagaaaatgactttagactaactcctgaaatgttagaaacggctattatccaacaaggtgaaaaattaaaggctgttttacttaattatcctactaaccctacaggtattacctattcaaggcaagaaattgctgcattagctgaagtccttaaaaaatatgatatttttgttattagtgatgaagtttattctgagttaacttacactggtcagcagcatgtttcaattgcagaatatttacctaaccaaactatcttaattaatggcttatcaaaatcacatgctatgactggttggagagttggattggtgtatgctcctgaagcatttattgctcaaatcattaaaagtcatcaatacatggtgacagctgctagtactatttcgcaatttgctggggtagaagccttatctgtgggtaaaaatgatacgttacctatgcgtcaaggatatattaaacgtagagattatatcattgataaaatgtctaaacttggtttcaaaataattaaaccgagtggcgctttttatatctttgctaaaatacctgatagctatccacaggattctttcaagttttgtcaggattttgcttatcaacaagctgtagctattattccaggagtggcttttggtaaatatggtgaaggatatatacgtctttcttatgctgctagtatggaagttattgaaacagcaatggctagattgaaagtttttatggaatcatatgagggttag

SEQ ID NO: 56 - protein, 391 aa, Streptococcus agalactiae
MTLEKRFNKYLDRIEVSLIRQFDQSISDIPGMVKLTLGEPDFTTPDHVKEAAKSAIDANQSYYTGMSGLLALRQAAADFAKDKYNLTYNPDCEILVTIGATEALSASLIAILEAGDVVLLPAPAYPGYEPIVNLVGADIVEIDTRENDFRLTPEMLETAIIQQGEKLKAVLLNYPTNPTGITYSRQEIAALAEVLKKYDIFVISDEVYSELTYTGQQHVSIAEYLPNQTILINGLSKSHAMTGWRVGLVYAPEAFIAQIIKSHQYMVTAASTISQFAGVEALSVGKNDTLPMRQGYIKRRDYIIDKMSKLGFKIIKPSGAFYIFAKIPDSYPQDSFKFCQDFAYQQAVAIIPGVAFGKYGEGYIRLSYAASMEVIETAMARLKVFMESYEG

SEQ ID NO: 57 - DNA, 663 bp, Streptococcus agalactiae
atgttttttgtaaagcatgcttcaaagtcaaaattcaatgctgtgctccaacctttgactattgctcattttattttaaaaattaatgataatggtctttcttatattgatgattataaagaagttttagcatttcaagaaaccaattcagacttgtttaagttgtcatatgcgagttatattacttctttggctgatgtggctattagtgataatgtagcggatgctcaattatttattttcctaaagaaaacgttagaattgattgaggacggtttagattatgagattctaacgaatatttttgaagtacaactactagagaggttcggtgttgctttaaattttcatgattgtgttttttgtcatagggtaggattaccttttgatttttcacacaaatattctggattattatgtccaaaccattattataaagacgagagaagaaaccacctagatcctaatatgctgtacttaatcaatcgttttcagtcaattcaatttgatgatttacaaacaatttctgtgaaacctgagatgaaacttaaaattcgtcaatttttggacatgatttacgatgaatatgtagggattcatcttaaaagtaaaaaatttattgatgatttgtctagttggggaagtattatgaaatcagattaa

SEQ ID NO: 58 - protein, 220 aa, Streptococcus agalactiae
MFFVKHASKSKFNAVLQPLTIAHFILKINDNGLSYIDDYKEVLAFQETNSDLFKLSYASYITSLADVAISDNVADAQLFIFLKKTLELIEDGLDYEILTNIFEVQLLERFGVALNFHDCVFCHRVGLPFDFSHKYSGLLCPNHYYKDERRNHLDPNMLYLINRFQSIQFDDLQTISVKPEMKLKIRQFLDMIYDEYVGIHLKSKKFIDDLSSWGSIMKSD

SEQ ID NO: 59 - DNA, 852 bp, Streptococcus agalactiae
atgaaaaaaacattatacattaccaataaactcttttttgctaactggtttgtgccagttattggtgcagttctaattcaagttatcggcatcattgtaagtagacgccttgtagtaaaattgctacctgatgattataaattcaatttatacattgcgcttttactatttgttcctattttggcaagtattttactatttttaatctattttcaaaaaagggattttacttccttgggatttactaaagataataatgttttaacaacgatctcaggatttattactggtagtttactgatgttttttatttatatttgccactggttatcaggttttgtggaaatttcttccagcaattccttttcttttggaccttttttctttttatttcttgcatactttatccaaagcttgacagaggaaattttatttagaggatatgttatgacaacagttaccaaatttaaaggtagttttgcaggtgttttatgtaattctatgttgttttcttttatccactttagaaactatggtatcacagcaatagcactttttaatttatttttacttggtattattttttctattctttttaatatgaccaaaaatattctttttgttacaggagttcatactacatggaattttactatgggatgtgtattaggtaataaggttagtgggggggattctcctgtttctctttttagaattactgaaaattctagctttgctctttggaatggtggggattttggttttgaagggggagtactatgttctttgatattagtaggttgtttagcatacttttctttggaaagcgtgagagtatctgttagatattag

SEQ ID NO: 60 - protein, 283 aa, Streptococcus agalactiae
MKKTLYITNKLFFANWFVPVIGAVLIQVIGIIVSRRLVVKLLPDDYKFNLYIALLLFVPILASILLFLIYFQKRDFTSLGFTKDNNVLTTISGFITGSLLMFFIYICHWLSGFVEISSSNSFSFGPFFFLFLAYFIQSLTEEILFRGYVMTTVTKFKGSFAGVLCNSMLFSFIHFRNYGITAIALFNLFLLGIIFSILFNMTKNILFVTGVHTTWNFTMGCVLGNKVSGGDSPVSLFRITENSSFALWNGGDFGFEGGVLCSLILVGCLAYFSLESVRVSVRY

SEQ ID NO: 61 - protein, 993 aa, Streptococcus agalactiae
ATGAAGAAAATTGCTATAGATGCTATGGGTGGAGATTACGCTCCCAAAGCTATTGTAGAGGGTGTTAATCAAGCTATTTCAGATTTTAGTGATATTGAAGTACAACTCTATGGCGATCAGAAAAAAATTGAGAAATATTTAACAGTAACGGAGCGAGTTAGTATTATTCATACTGAAGAAAAAATTAATTCTGATGATGAGCCTGCTAAAGCTGTTCGTCGTAAAAAACAGTCTTCGATGGTCTTAGGAGCTAAGGCAGTCAAAGATGGTGTTGCACAGGCCTTTATTTCTGCAGGGAATACAGGAGCTTTATTAGCTGCTGGTTTGTTTGTAGTAGGACGTATAAAAGGTGTTGATCGACCAGGCTTAATGTCAACTATGCCTACGTTAGATGGTGTGGGTTTTGATATGCTTGATTTAGGAGCTAATGCAGAAAACACAGCTTCTCATCTTCATCAATATGCTATTTTAGGGTCGTTTTATGCAAAAAATGTCCGTGGTATTGAAGTTCCTCGTGTAGGTCTCTTAAATAACGGAACGGAAGAAACAAAAGGCGATTCTCTTCATAAAGAAGCTTATGAACTGTTAGCAGCAGAGCCTTCTATTAATTTTATTGGAAATATTGAAGCACGTGATTTGATGTCTAGTGTAGCAGATGTTGTTGTCACTGATGGTTTTACTGGAAATGCTGTTCTAAAGACAATGGAAGGTACAGCTATGAGTATTATGGGAAGCCTAAAATCTTCAATTAAATCAGGTGGCGTGAAAGCTAAATTAGGAGCACTTCTATTAAAAGATAGCCTATATCAGCTAAAAGATAGTATGGACTATTCAAGCGCGGGTGGAGCGGTTCTTTTTGGTTTAAAAGCTCCAATAGTAAAATGCCATGGATCAAGTGATTCTAAAGCTGTTTATTCTACTTTGAAGCAAGTTCGTACAATGTTGGAAACTCAAGTAGTTGATCAATTAGTTGATGCCTTTACAGATGAATAG

SEQ ID NO: 62 - protein, 330 aa, Streptococcus agalactiae
MKKIAIDAMGGDYAPKAIVEGVNQAISDFSDIEVQLYGDQKKIEKYLTVTERVSIIHTEEKINSDDEPAKAVRRKKQSSMVLGAKAVKDGVAQAFISAGNTGALLAAGLFVVGRIKGVDRPGLMSTMPTLDGVGFDMLDLGANAENTASHLHQYAILGSFYAKNVRGIEVPRVGLLNNGTEETKGDSLHKEAYELLAAEPSINFIGNIEARDLMSSVADVVVTDGFTGNAVLKTMEGTAMSIMGSLKSSIKSGGVKAKLGALLLKDSLYQLKDSMDYSSAGGAVLFGLKAPIVKCHGSSDSKAVYSTLKQVRTMLETQVVDQLVDAFTDE

SEQ ID NO: 63 - protein, 240 aa, Streptococcus agalactiae
ATGTCAAGAGATGAAGTTTTTGAAAAGATGCTGGAATTATTAAGGCAGCAACTTGGTGACCCACAGTTAGATATCACACCAGAGTCATCGTTACATGATGATTTAGCAATTGACTCTATCGCTTTAACAGAGTTTATTATCAATTTGGAAGATGTGTTTCATCTAGAGATTCCAGATGAGGCTGTCGAACACATGTCAAGCGTCCAACAACTATTAGATTATATCATTGAACATAAGTAA

SEQ ID NO: 64 - protein, 79 aa, Streptococcus agalactiae
MSRDEVFEKMLELLRQQLGDPQLDITPESSLHDDLAIDSIALTEFIINLEDVFHLEIPDEAVEHMSSVQQLLDYIIEHK

SEQ ID NO: 65 - protein, 705 aa, Streptococcus agalactiae
GTGACTAACCAGCTTATTTATACAGGAAAAGCGAAAGATATTTATAGTACAAAAGATGAAAATGTGATTAGAACGGTCTATAAAGACCAAGCTACTATGTTGAATGGAGCTCGTAAGGAGACTATTGATGGCAAGGGAGCACTAAATAATCAGATTTCATCTCTTATTTTTGAGAAATTAAATATGGCTGGTGTGGTGACACATTATATTGAGCAAATTTCAAAAAACGAACAATTGAATAAAAAAGTTGATATTATTCCACTTGAGGTGGTGCTACGGAATGTGACAGCAGGCTCATTTTCAAAACGTTTTGGAGTGGAAGAAGGACACGTTCTTGAAACGCCAATCGTGGAATTTTACTACAAAAATGATAATCTGAATGATCCTTTTATCAATGATGAGCATGTGAAGTTTTTGGGTATTGTTAATGATGAGGAGATTGCTTATCTGAAAGGAGAGACTCGCCATATTAATGAACTCTTGAAAGATTGGTTTGCTCAGATTGGGCTTAACTTGATTGACTTCAAGTTGGAGTTCGGATTTGACAAGGATGGCAAAATCATCTTGGCTGATGAGTTCTCACCTGACAACTGCCGTCTCTGGGATGCTGATGGTAATCATATGGACAAGGATGTTTTTCGTAGGGATCTTGGTAGCTTGACCGATGTCTATCAAGTTGTACTTGAGAAGTTGATAGCATTGTAA

SEQ ID NO: 66 - protein, 234 aa, Streptococcus agalactiae
MTNQLIYTGKAKDIYSTKDENVIRTVYKDQATMLNGARKETIDGKGALNNQISSLIFEKLNMAGVVTHYIEQISKNEQLNKKVDIIPLEVVLRNVTAGSFSKRFGVEEGHVLETPIVEFYYKNDNLNDPFINDEHVKFLGIVNDEEIAYLKGETRHINELLKDWFAQIGLNLIDFKLEFGFDKDGKIILADEFSPDNCRLWDADGNHMDKDVFRRDLGSLTDVYQVVLEKLIAL

SEQ ID NO: 67 - protein, 3801 aa, Streptococcus agalactiae
TTGGGCTTACTGAAATCTCAATTTCAGACGTCCTCCTATTTTCGAGTCGCTCCCTTGTCGGACTTGGTATCTTATATGAATAAACGTATTTTTGTTGAGAAAAAGGCTGACTTTGGCATTAAATCGGCTAGTCTTGTGAAAGAGTTGACGCATAATCTACAACTGGCTTCTTTGAAGGATTTGCGTATCGTGCAGGTCTATGATGTCTTCAATTTGGCTGAGGATTTGCTGGCGCGTGCTGAGAAGCATATTTTCTCTGAGCAGGTGACAGACCGTCTTTTGACAGAAGCTGAAATCACTGCGGAGCTTGATAAGGTTGCCTTCTTTGCCATTGAGGCGCTTCCTGGTCAATTTGACCAACGTGCTGCTAGTTCGCAAGAAGCTTTGCTATTGCTTGGAAGTGACAGTCAGGTCAAGGTCAATACAGCTCAGCTTTACTTGGTCAATAAGGATATTGCAGAAGCAGAGCTTGAAGCCGTTAAGAACTATCTTTTGAATCCCGTTGATTCACGTTTCAAGGATATTACCTTGCCACTTGAAGTGCAGGCTTTCTCTGTGTCTGATAAGACAATCTCTAATCTTGATTTCTTCGAAACTTATCAGGCTGACGATTTTGCAGCCTATAAGGCAGAGCAGGGATTGGCTATGGAGGTCGATGACCTTCTCTTCATCCAAGATTATTTCAAATCAATCGGGCGTGTGCCAACTGAGACTGAGTTGAAAGTTTTGGATACGTATTGGTCAGACCACTGCCGTCACACAACCTTTGAAACTGAATTGAAAAACATTGATTTTTCGGCCTCTAAATTCCAAAAACAATTGCAGGCGACTTATGACAAATACATTGCCATGCGTGATGAGCTTGGTCGTTCTGAAAAGCCGCAGACACTTATGGATATGGCGACTATCTTTGGTCGTTATGAGCGTGCCAATGGTCGTCTGGACGATATGGAAGTCTCAGATGAAATCAATGCCTGCTCAGTTGAAATTGAAGTAGATGTTGATGGTGTGAAAGAGCCTTGGCTCCTCATGTTTAAGAACGAGACTCACAACCACCCAACAGAAATTGAGCCATTTGGTGGAGCGGCGACTTGTATCGGTGGTGCCATTCGTGACCCATTGTCAGGACGTTCATACGTTTATCAGGCTATGCGTATTTCAGGCGCAGGAGATATCACGACTCCGATTGCGGAAACACGTGCTGGTAAATTGCCACAACAGGTTATTTCTAAGACTGCGGCGCACGGCTATTCTTCATATGGTAACCAAATTGGGCTTGCGACAACTTATGTGCGTGAGTACTTCCACCCTGGCTTCGTAGCTAAACGCATGGAGCTTGGAGCTGTGGTTGGTGCTGCACCTAAGGAAAATGTGGTTCGTGAAAAACCAGAGGCAGGCGATGTGGTTGTCTTGCTCGGTGGTAAAACAGGTCGTGACGGTGTCGGCGGTGCGACAGGTTCATCTAAGGTTCAAACGGTTGAATCTGTGGAAACAGCTGGCGCAGAGGTACAAAAAGGGAATGCCATCGAAGAACGTAAGATTCAACGCCTTTTCCGTGATGGTAATGTCACTCGCCTAATCAAGAAATCAAATGACTTCGGTGCAGGTGGTGTCTGTGTTGCCATCGGTGAATTAGCTGATGGTCTTGAAATCGATTTGGACAAGGTGCCACTTAAATACCAAGGTCTTAATGGTACTGAAATTGCTATCTCAGAATCTCAAGAAAGGATGTCAGTTGTTGTTGGTCCAAGTGATGTGGATGCCTTCATCGCAGCCTGTAACAAGGAAAATATCGATGCAGTTGTTGTTGCGACAGTTACTGAAAAACCAAATCTTGTCATGACTTGGAATGGTGAAACAATTGTTGATTTGGAACGCTGTTTCCTTGATACCAACGGTGTTCGTGTCGTAGTTGATGCCAAAGTCGTTGACAAGGACTTAACAGTTCCAGAAGCGCGCACAACATCAGCAGAGACACTTGAAGCAGATATGCTTAAGGTCTTGTCTGACCTCAATCACGCTAGTCAAAAAGGTCTTCAAACTATCTTTGACTCATCTGTTGGTCGTTCAACCGTTAACCACCCAATCGGTGGTCGTTACCAAATCACACCGACAGAAAGTTCTGTTCAAAAATTGCCAGTTCAATATGGTGTGACAACAACAGCATCTGTTATGGCTCAAGGTTACAATCCTTATATTGCAGAGTGGTCACCTTATCACGGTGCTGCCTATGCTGTTATTGAAGCGACAGCTCGCTTGGTAGCAACGGGTGCTGACTGGTCTCGTGCACGTTTCTCTTACCAAGAGTATTTCGAGCGTATGGATAAACAGGCAGAGCGTTTTGGTCAGCCAGTATCAGCTCTTCTTGGTTCTATTGAGGCTCAGATTCAATTTGGTTTGCCATCAATCGGCGGTAAGGACTCTATGTCTGGTACTTTCGAAGAATTGACAGTACCACCAACCTTGGTAGCTTTCGGTGTGACAACAGCGGACAGCCGCAAGGTTCTCTCTCCTGAGTTTAAAGCGGCTGGTGAGAATATCTACTACATTCCAGGTCAAGCTATTTCAGAAGATATTGATTTTGACCTTATCAAGGCTAACTTTAGCCAGTTTGAGGCTATTCAAGCTCAACATAAGATTACCGCTGCCTCAGCCGTTAAATACGGTGGTGTCCTAGAAAGTCTTGCTCTCATGACTTTTGGTAACCGTATCGGTGCTTCTGTTGAAATTGCAGAGCTTGACAGCAGCTTGACAGCTCAACTCGGAGGCTTTGTCTTTACATCAGTTGAGGAAATTGCTGACGTTGTGAAGATCGGTCAAACTCAGGCAGACTTTACAGTCACTGTCAATGGAAATGACCTAGCTGGTGCAAGCCTTCTATCAGCCTTCGAAGGTAAATTAGAAGAAGTTTACCCAACAGAGTTTGAACAGGTAGATGCTATTGAGGAAGTTCCTGCTGTGGTATCAGATGTTGTTATCAAGGCTAAGGAAATTATTGAAAAACCAGTAGTTTACATCCCAGTCTTTCCTGGTACTAACTCAGAGTACGATTCAGCTAAGGCCTTTGAACAGGTTGGAGCTAGCGTCAACTTGGTGCCATTTGTAACCTTGAATGAGGCTGCTATTGCTGAGTCAGTTGATACGATGGTTGCTAATATTGCTAAGGCAAATATCATCTTCTTTGCTGGAGGTTTCTCAGCAGCGGATGAACCAGATGGCTCTGCTAAGTTTATCGTCAATATCTTGCTTAACGAGAAGGTTCGCGCAGCTATTGACAGCTTCATCGAAAAAGGTGGCCTTATCATCGGTATCTGTAATGGTTTCCAAGCCCTTGTTAAATCAGGTCTTCTTCCATACGGAAACTTCGAGGAAGCTGGTGAGACAAGTCCAACCCTCTTCTATAACGATGCTAACCAGCACGTTGCAAAGATGGTTGAGACTCGTATCGCAAATACCAATTCACCTTGGTTGGCAGGAGTTGAGGTCGGCGATATTCATGTCATTCCAGTTTCACACGGTGAAGGTAAATTTGTTGTCAGCGCTTCTGAATTTGCAGAGCTAAGAGACAATGGTCAAATCTGGAGCCAATATGTGGACTTTGACGGACAACCATCTATGGATTCTAAATACAATCCAAACGGCTCTGTCAATGCCATCGAAGGGATTACCAGCAAGAATGGTCAAATCATCGGTAAGATGGGGCACTCAGAACGCTGGGAAGACGGACTCTTCCAAAATATCCCTGGAAACAAAGACCAAAAACTCTTTGAAAGTGCTGTAAAATACTTTACAGGGAAGTGA

SEQ ID NO: 68 - protein, 1266 aa, Streptococcus agalactiae
MGLLKSQFQTSSYFRVAPLSDLVSYMNKRIFVEKKADFGIKSASLVKELTHNLQLASLKDLRIVQVYDVFNLAEDLLARAEKHIFSEQVTDRLLTEAEITAELDKVAFFAIEALPGQFDQRAASSQEALLLLGSDSQVKVNTAQLYLVNKDIAEAELEAVKNYLLNPVDSRFKDITLPLEVQAFSVSDKTISNLDFFETYQADDFAAYKAEQGLAMEVDDLLFIQDYFKSIGRVPTETELKVLDTYWSDHCRHTTFETELKNIDFSASKFQKQLQATYDKYIAMRDELGRSEKPQTLMDMATIFGRYERANGRLDDMEVSDEINACSVEIEVDVDGVKEPWLLMFKNETHNHPTEIEPFGGAATCIGGAIRDPLSGRSYVYQAMRISGAGDITTPIAETRAGKLPQQVISKTAAHGYSSYGNQIGLATTYVREYFHPGFVAKRMELGAVVGAAPKENVVREKPEAGDVVVLLGGKTGRDGVGGATGSSKVQTVESVETAGAEVQKGNAIEERKIQRLFRDGNVTRLIKKSNDFGAGGVCVAIGELADGLEIDLDKVPLKYQGLNGTEIAISESQERMSVVVGPSDVDAFIAACNKENIDAVVVATVTEKPNLVMTWNGETIVDLERCFLDTNGVRVVVDAKVVDKDLTVPEARTTSAETLEADMLKVLSDLNHASQKGLQTIFDSSVGRSTVNHPIGGRYQITPTESSVQKLPVQYGVTTTASVMAQGYNPYIAEWSPYHGAAYAVIEATARLVATGADWSRARFSYQEYFERMDKQAERFGQPVSALLGSIEAQIQFGLPSIGGKDSMSGTFEELTVPPTLVAFGVTTADSRKVLSPEFKAAGENIYYIPGQAISEDIDFDLIKANFSQFEAIQAQHKITAASAVKYGGVLESLALMTFGNRIGASVEIAELDSSLTAQLGGFVFTSVEEIADVVKIGQTQADFTVTVNGNDLAGASLLSAFEGKLEEVYPTEFEQVDAIEEVPAVVSDVVIKAKEIIEKPVVYIPVFPGTNSEYDSAKAFEQVGASVNLVPFVTLNEAAIAESVDTMVANIAKANIIFFAGGFSAADEPDGSAKFIVNILLNEKVRAAIDSFIEKGGLIIGICNGFQALVKSGLLPYGNFEEAGETSPTLFYNDANQHVAKMVETRIANTNSPWLAGVEVGDIHVIPVSHGEGKFVVSASEFAELRDNGQIWSQYVDFDGQPSMDSKYNPNGSVNAIEGITSKNGQIIGKMGHSERWEDGLFQNIPGNKDQKLFESAVKYFTGK

SEQ ID NO: 69 - protein, 992 aa, Streptococcus agalactiae
ATGACATACGAAGTAAAATCTCTAAATGAAGAATGTGGAGTCTTTGGTATCTGGGGGTATCCTCAGGCAGCTCAAGTCACTTACTTTGGGCTTCATAGCCTTCAACATCGCGGTCAAGAAGGAGCTGGTATTATTTCAAATGATAATGGGAAACTCTATGGTTATCGAAATGTTGGGCTCCTTTCTGAAGTTTTTAAGAATCAATCTGAATTAGATAATTTAACTGGGAATGCGGCTATTGGACATGTTCGGTATGCTACTGCAGGTTCTGCAGATATTCGCAATATTCAGCCTTTTCTTTATAAATTTCATGATGGGCAATTTGCTTTATGTCATAATGGTAATTTGACAAATGCTATTTCCTCAAGGAAAGAATTAGAAAAGCAAGGTGCAATTTTCAATGCCTCCTCAGATACTGAAATTTTAATGCATTTGATTCGTCGAAGCCATAACCCAAGTTTTATGGGGAAGGTAAAAGAAGCTTTAAGCACTGTAAAGGGAGGTTTCGCCTATCTACTGATGACAGAAGATAAATTAATTGCTGCTCTTGACCCTAATGCCTTTCGTCCTTTGTCAATTGGACAAATGCAAAATGGTGCCTGGGTTATTTCCAGTGAGACCTGTGCTTTTGAGGTGGTAGGCGCAAAATGGGTTAGAGATGTTGAACCTGGTGAAGTTATTCTTATAGACGATAGTGGTATTCAATGTGATCGTTATACTGATGAAACGCAACTGGCAATTTGTTCGATGGAATATGTCTATTTTGCAAGGCCGGATTCAACTATACATGGTGTTAATGTTCATACGGCTCGAAAAAATATGGGAAAGCGTCTTGCACAAGAATTTAAACAGGATGCTGATATTGTAATTGGTGTCCCAAATTCGTCCTTATCGGCTGCTATGGGCTTTGCTGAAGAATCCGGATTACCAAATGAGATGGGCCTKTMAAAAATCAGTATACGCANNNNNCATTCCATTCATTAATTAATTAA

SEQ ID NO: 70 - protein, 330 aa, Streptococcus agalactiae
  VARIANT 322, 323, 324: Xaa = Any Amino Acid
MTYEVKSLNEECGVFGIWGYPQAAQVTYFGLHSLQHRGQEGAGIISNDNGKLYGYRNVGLLSEVFKNQSELDNLTGNAAIGHVRYATAGSADIRNIQPFLYKFHDGQFALCHNGNLTNAISSRKELEKQGAIFNASSDTEILMHLIRRSHNPSFMGKVKEALSTVKGGFAYLLMTEDKLIAALDPNAFRPLSIGQMQNGAWVISSETCAFEVVGAKWVRDVEPGEVILIDDSGIQCDRYTDETQLAICSMEYVYFARPDSTIHGVNVHTARKNMGKRLAQEFKQDADIVIGVPNSSLSAAMGFAEESGLPNEMGLVKNQYTXXXFHSLIN

SEQ ID NO: 71 - DNA, 642 bp, Streptococcus agalactiae
  misc_feature 4, 5, 6, 7, 8: n = A,T,C or G
atgnnnnntgggatacgtcttgcacaagaatttaaacaggatgctgatattgtaatkggtgtcccaaattcgtccttatcggctgctatgggctttgctgaagaatccggattaccaaatgagatgggccttgtaaaaaatcagtatacgcagcgaacctttattcaaccgacacaagaattaagggaacaaggtgttcgaatgaaattatcagcggtatctggtgttgtcaaaggaaagcgcgttgttatgattgatgactcaattgtaagaggaacgacttctagaaggattgtaggattattaagagaagcaggagctactgaagtacatgttgctatagctagtccagaattaaagtatccttgtttttatggaattgatattcaaacaagacgagaattaatttcagcaaatcacgctgttgacgaagtgtgtgatattattggcgcagatagtctaacttatctatcaatcgatgggttaattaaatcaattggactcgaaacaaaagcaccaaatggtggtttatgcgtagcttactttgatggacattatccaacaccgctttatgattatgaagaagaatacctcagaagtttagaagaaaaaacaagtttttatattcaaaaagtgaaataa

SEQ ID NO: 72 - protein, 213 aa, Streptococcus agalactiae
  VARIANT 2, 3, 19: Xaa = Any Amino Acid
MXXGIRLAQEFKQDADIVXGVPNSSLSAAMGFAEESGLPNEMGLVKNQYTQRTFIQPTQELREQGVRMKLSAVSGVVKGKRVVMIDDSIVRGTTSRRIVGLLREAGATEVHVAIASPELKYPCFYGIDIQTRRELISANHAVDEVCDIIGADSLTYLSIDGLIKSIGLETKAPNGGLCVAYFDGHYPTPLYDYEEEYLRSLEEKTSFYIQKVK

SEQ ID NO: 73 - DNA, 501 bp, Streptococcus agalactiae
  misc_feature 474, 475, 476, 477, 478: n = A,T,C or G
atgtctgaaaaaaatgcttatgcccagtctggtgttgatgtagaagcgggctacgaagttgtcgaacgtatcaagaaacacgttgctcgcacagaacgtgctggtgtcatgggagctctcggtggctttggtggtatgtttgacctgtcacaaacaggtgttaaagaacctgtcttgatttcagggactgacggtgtcggaactaaactcatgcttgctatcaagtacgacaagcacgacacaatcggtcaagactgtgttgccatgtgtgtcaacgatattattgcagcaggtgctgagcccctttacttccttgactatgtcgcgactggtaaaaacgaacctgccaaattggaacaggttgtcgctggtgttgctgaaggttgtgttcaagctagcgcagctcttatcggtggtgaaacggctgagatgcctggtatgtatggcgaaatgattatgaccttgcaggctttnnnnncattccattcattaattaattaa

SEQ ID NO: 74 - protein, 166 aa, Streptococcus agalactiae
  VARIANT 158, 159, 160: Xaa = Any Amino Acid
MSEKNAYAQSGVDVEAGYEVVERIKKHVARTERAGVMGALGGFGGMFDLSQTGVKEPVLISGTDGVGTKLMLAIKYDKHDTIGQDCVAMCVNDIIAAGAEPLYFLDYVATGKNEPAKLEQVVAGVAEGCVQASAALIGGETAEMPGMYGEMIMTLQAXXXFHSLIN

SEQ ID NO: 75 - DNA, 915 bp, Streptococcus agalactiae
atgggagctctcggtggctttggtggtatgtttgacctgtcacaaacaggtgttaaagaacctgtcttgatttcagggactgacggtgtcggaactaaactcatgcttgctatcaagtacgacaagcacgacacaatcggtcaagactgtgttgccatgtgtgtcaacgatattattgcagcaggtgctgagcccctttacttccttgactatgtcgcgactggtaaaaacgaacctgccaaattggaacaggttgtcgctggtgttgctgaaggttgtgttcaagctagcgcagctcttatcggtggtgaaacggctgagatgcctggtatgtatggcgaagatgattatgaccttgcaggctttgctgttggtgtggctgaaaaatctcaaatcatcgacggttcaaaggtaaaagaaggggatattcttcttggacttgcttcaagtggtatccattcaaatggttattcattggtacgtcgtgtctttgctgactacactggtgatgaggtgcttccagagcttgaaggcaaacaactcaaggatgtccttcttgagccaactcgtatctatgttaaagcagctctgccattgatcaaggaagaactagttaacggtatcgcccacatcacgggtggtggttttatcgagaatgttcctcgtatgtttgcggatgatttggctgcggaaatcgatgaggataaggtgcctgtacttccgattttcaaggcgcttgaaaaatatggtgacatcaagcacgaagaaatgtttgaaatcttcaacatgggtgtcggtcttatgctggatgttaaccctgaaaatgttgaccgtgtcaaagaacttttggacgaaccagtctatgaaatcggtcgtatcatcaagaaagcagacgatagtgtggtgattaaataa

SEQ ID NO: 76 - protein, 304 aa, Streptococcus agalactiae
MGALGGFGGMFDLSQTGVKEPVLISGTDGVGTKLMLAIKYDKHDTIGQDCVAMCVNDIIAAGAEPLYFLDYVATGKNEPAKLEQVVAGVAEGCVQASAALIGGETAEMPGMYGEDDYDLAGFAVGVAEKSQIIDGSKVKEGDILLGLASSGIHSNGYSLVRRVFADYTGDEVLPELEGKQLKDVLLEPTRIYVKAALPLIKEELVNGIAHITGGGFIENVPRMFADDLAAEIDEDKVPVLPIFKALEKYGDIKHEEMFEIFNMGVGLMLDVNPENVDRVKELLDEPVYEIGRIIKKADDSVVIK

SEQ ID NO: 77 - DNA, 549 bp, Streptococcus agalactiae
atgaaaatcgctgtttttgcttctggtaatggttccaactttcaggtcatagcagagcagtttcaagttagttttgtcttttcagatcatcgtgatgcctatgttttagagcgtgctcagaacttagccattccaagcttcgcttttgaactcaaagagtttgagaataaggcggcttacgagcaagccgtcgttgatttgttggacaaacacgagattgacttggtctgtctggcgggctacatgaagattgtcggagaaaccttgctctcagcctatgaagggcgtatcatcaatattcacccaacctatctgcctgaatttccaggtgctcacggtatcaaggatgcttgggaggcaggtgttgaccagtctggtgtgaccatccattgggtggactctggtgtggataccggtcaggtcatccaacaagtgcacgtgccacgcctagcagatgatagtctagaaagctttgaaacccgcatccacgaaaccgaataccaactctacccagctgtcttagatagcttgggcataaagagaaaatag

SEQ ID NO: 78 - protein, 182 aa, Streptococcus agalactiae
MKIAVFASGNGSNFQVIAEQFQVSFVFSDHRDAYVLERAQNLAIPSFAFELKEFENKAAYEQAVVDLLDKHEIDLVCLAGYMKIVGETLLSAYEGRIINIHPTYLPEFPGAHGIKDAWEAGVDQSGVTIHWVDSGVDTGQVIQQVHVPRLADDSLESFETRIHETEYQLYPAVLDSLGIKRK

SEQ ID NO: 79 - DNA, 753 bp, Streptococcus agalactiae
atgaaactagtgaaaaatttagagatagtagagtctatttttggtgattgggacgagaccataatctggtcgtgtgtccaaggtattatgggagaagtttttgtagatagtttagaccaaccaaaatcttctttggcaaaattgggaaggaaatcatcttttggttttctagcaggtcagcctactttatttctactagaagtttgctctggggaggatattatccttgttcctcagcataaaggatggtcagatttgattgaatcaacttatggtcagaatgctcattcttttaagcgttatgcgacgaaaaaagatactttgtttgagcgaagtaggttagagaagtttgttactcagttgccaaatggttttgaattacgtgctattgatgagaaagtttacaactcttgcttagaaaaggaatggtcacaggatttagtagcaaattacgctacttatcagtactataaaaaacaaggtataggttatgttgtatattatcaggggaatatcattgcaggagcttcatcttattcaacctataaaaatgggattgagatagaagtagatacgcatccagattttcgtcggcgtggtttagcaacaatagttgcagctcagttaatactaacttgtttagataagggaatttatcctagctgggatgctcatacaaggacttcattgaatttatctgaaaaactcggttatgaattttctcatgaatacatagcctatgaaatagattga

SEQ ID NO: 80 - protein, 250 aa, Streptococcus agalactiae
MKLVKNLEIVESIFGDWDETIIWSCVQGIMGEVFVDSLDQPKSSLAKLGRKSSFGFLAGQPTLFLLEVCSGEDIILVPQHKGWSDLIESTYGQNAHSFKRYATKKDTLFERSRLEKFVTQLPNGFELRAIDEKVYNSCLEKEWSQDLVANYATYQYYKKQGIGYVVYYQGNIIAGASSYSTYKNGIEIEVDTHPDFRRRGLATIVAAQLILTCLDKGIYPSWDAHTRTSLNLSEKLGYEFSHEYIAYEID

SEQ ID NO: 81 - protein, 1548 aa, Streptococcus agalactiae
ATGACTAAACGTGCTTTAATCTCAGTTTCTGACAAATCAGGAATTATTGACTTTGCAAAAGAATTGAAAAACTTGGGTTGGGATATTATCTCAACTGGTGGGACTAAGGTTGCCCTTGATGATGCTGGTGTTGAGACCATTGCCATCGACGATGTGACTGGATTCCCAGAAATGATGGACGGTCGTGTTAAGACCCTCCACCCAAACATTCACGGTGGGCTTCTGGCTCGTCGCGACGCTGACAGCCACCTTCAGGCTGCTAAGGACAACAATATTGAGTTGATTGACCTCGTGGTTGTCAACCTCTATCCCTTCAAGGAGACCATCCTTCGCCCAGACGTGACCTACGATTTGGCGGTGGAAAATATCGACATCGGCGGTCCATCAATGCTTCGCTCAGCTGCTAAAAACCACGCTAGCGTAACCGTTGTGGTTGATTCAGCTGACTATGCCACTGTTTTGGGAGAATTGGCTGACGCTAGTCAGACGACATTTAAAACTCGTCAACGCTTGGCAGCTAAGGCCTTCCGTCATACGGCAGCCTACGACGCTTTGATTGCTGAGTACTTCACAGCTCAAGTGGGAGAGGCTAAGCCTGAAAAATTGACCATCACTTATGACCTTAAACAGGCTATGCGTTACGGAGAAAATCCACAGCAAGACGCTGATTTCTACCAAAAAGCCTTACCAACAGACTACTCAATCGCTTCAGCTAAACAGCTCAATGGAAAAGAATTGTCCTTCAATAATATCCGTGATGCTGATGCAGCAATCCGTATTATCCGCGATTTCAAAGACAGTCCAACGGTTGTTGCCCTCAAACACATGAACCCATGTGGTATCGGACAGGCTGATGATATTGAGACAGCTTGGGATTACGCTTATGAAGCTGATCCAGTTTCAATCTTTGGTGGAATTGTTGTCCTTAACCGTGAAGTTGACGCAGCGACAGCTGAGAAGATGCACCCTATCTTCTTGGAAATCATCATCGCACCATCATACTCAGAAGAAGCGCTAGCTATTCTCACAAATAAAAAGAAAAACTTGCGTATCCTTGAGTTGCCGTTTGATGCCCAAGCTGCCAGCGAAGTGGAAGCTGAGTACACTGGCGTAGTTGGTGGACTTTTGGTGCAAAACCAAGACGTTGTGGCTGAAAATCCATCTGACTGGCAAGTGGTGACAGACCGCCAGCCAACAGAACAAGAGGCGACTGCCCTTGAGTTTGCCTGGAAGGCTATCAAGTATGTTAAGTCTAACGGGATTATTATTACTAACGATCACATGACGCTTGGACTCGGTGCAGGTCAAACCAACCGTGTCGGCTCAGTCAAGATTGCTATCGAGCAGGCTAAGGACCACCTTGACGGTGCCGTTCTAGCATCAGATGCCTTCTTCCCATTTGCGGACAACATTGAAGAAATCGCTGCCGCAGGGATCAAAGCAATCATCCAACCAGGTGGTTCAGTTCGTGACCAAGAATCTATTGACGCCGCAAACAAACATGGCTTGACCATGATCTTCACAGGCGTGAGACATTTTAGACATTAA

SEQ ID NO: 82 - protein, 515 aa, Streptococcus agalactiae
MTKRALISVSDKSGIIDFAKELKNLGWDIISTGGTKVALDDAGVETIAIDDVTGFPEMMDGRVKTLHPNIHGGLLARRDADSHLQAAKDNNIELIDLVVVNLYPFKETILRPDVTYDLAVENIDIGGPSMLRSAAKNHASVTVVVDSADYATVLGELADASQTTFKTRQRLAAKAFRHTAAYDALIAEYFTAQVGEAKPEKLTITYDLKQAMRYGENPQQDADFYQKALPTDYSIASAKQLNGKELSFNNIRDADAAIRIIRDFKDSPTVVALKHMNPCGIGQADDIETAWDYAYEADPVSIFGGIVVLNREVDAATAEKMHPIFLEIIIAPSYSEEALAILTNKKKNLRILELPFDAQAASEVEAEYTGVVGGLLVQNQDVVAENPSDWQVVTDRQPTEQEATALEFAWKAIKYVKSNGIIITNDHMTLGLGAGQTNRVGSVKIAIEQAKDHLDGAVLASDAFFPFADNIEEIAAAGIKAIIQPGGSVRDQESIDAANKHGLTMIFTGVRHFRH

SEQ ID NO: 83 - protein, 637 aa, Streptococcus agalactiae
TTGAATAAATGGTTAGTTAAGGCAAGTTCCTTAGTTGTTTTAGGTGGTATGGTTTTATCTGCGGGTTCCCGAGTTTTAGCGGATACTTATGTCCGTCCAATTGATAATGGTAGAATTACAACAGGTTTCAATGGTTATCCTGGACATTGTGGGGTGGATTATGCTGTTCCGACTGGAACGATTATTAGGGCAGTGGCAGATGGTACTGTGAAATTTGCAGGAGCTGGAGCCAACTTTTCTTGGATGACAGACTTAGCAGGAAATTGTGTCATGATTCAACATGCGGATGGAATGCATAGTGGTTACGCTCATATGTCACGTGTGGTGGCTAGGACTGGGGAAAAAGTCAAACAAGGAGATATCATCGGTTACGTAGGAGCAACTGGTATGGCGACGGGACCTCACCTTCATTTTGAATTTTTACCAGCTAACCCTAATTTTCAAAATGGTTTCCATGGACGTATCAATCCAACGTCACTAATTGCTAATGTTGCGACCTTTAGTGGAAAAACGCAAGCATCAGCTCCAAGCATTAAGCCATTACAATCAGCTCCTGTACAGAATCAATCTAGTAAATTAAAAGTGTATCGAGTAGATGAATTACAAAAGGTTAATGGTGTTKGGTAGTCAAAAATAA

SEQ ID NO: 84 - protein, 212 aa, Streptococcus agalactiae
  VARIANT 208: Xaa = Any Amino Acid
MNKWLVKASSLVVLGGMVLSAGSRVLADTYVRPIDNGRITTGFNGYPGHCGVDYAVPTGTIIRAVADGTVKFAGAGANFSWMTDLAGNCVMIQHADGMHSGYAHMSRVVARTGEKVKQGDIIGYVGATGMATGPHLHFEFLPANPNFQNGFHGRINPTSLIANVATFSGKTQASAPSIKPLQSAPVQNQSSKLKVYRVDELQKVNGCXVSQK

SEQ ID NO: 85 - protein, 840 aa, Streptococcus agalactiae
ATGAATGNNNNNGTTTTAGCGGATACTTATGTCCGTCCAMTTSATAATGGTAGAATTACAACAGGTTTCAATGGTTATCCTGGACATTGTGGGGTGGATTATGCTGTTCCGACTGGAACGATTATTAGGGCAGTGGCAGATGGTACTGTGAAATTTGCAGGAGCTGGAGCCAACTTTTCTTGGATGACAGACTTAGCAGGAAATTGTGTCATGATTCAACATGCGGATGGAATGCATAGTGGTTACGCTCATATGTCACGTGTGGTGGCTAGGACTGGGGAAAAAGTCAAACAAGGAGATATCATCGGTTACGTAGGAGCAACTGGTATGGCGACGGGACCTCACCTTCATTTTGAATTTTTACCAGCTAACCCTAATTTTCAAAATGGTTTCCATGGACGTATCAATCCAACGTCACTAATTGCTAATGTTGCGACCTTTAGTGGAAAAACGCAAGCATCAGCTCCAAGCATTAAGCCATTACAATCAGCTCCTGTACAGAATCAATCTAGTAAATTAAAAGTGTATCGAGTAGATGAATTACAAAAGGTTAATGGTGTTTGGTTAGTCAAAAATAACACCCTAACGCCGACTGGGTTTGATTGGAACGATAATGGTATACCAGCATCAGAAATTGATGAGGTTGATGCTAATGGTAATTTGACAGCTGACCAGGTTCTTCAAAAAGGTGGTTACTTTATCTTTAATCCTAAAACTCTTAAGACTGTAGAAAAACCCATCCAAGGAACAGCTGGTTTAACTTGGGCTAAGACACGCTTTGCTAATGGTAGTTCAGTTTGGCTTCGCGTTGACAACAGTCAAGAACTGCTTTACAAATAG

SEQ ID NO: 86 - protein, 279 aa, Streptococcus agalactiae
  VARIANT 3, 4, 14, 15: Xaa = Any Amino Acid
MNXXVLADTYVRPXXNGRITTGFNGYPGHCGVDYAVPTGTIIRAVADGTVKFAGAGANFSWMTDLAGNCVMIQHADGMHSGYAHMSRVVARTGEKVKQGDIIGYVGATGMATGPHLHFEFLPANPNFQNGFHGRINPTSLIANVATFSGKTQASAPSIKPLQSAPVQNQSSKLKVYRVDELQKVNGVWLVKNNTLTPTGFDWNDNGIPASEIDEVDANGNLTADQVLQKGGYFIFNPKTLKTVEKPIQGTAGLTWAKTRFANGSSVWLRVDNSQELLYK

SEQ ID NO: 87 - protein, 1305 aa, Streptococcus agalactiae
ATGAAAATGAATAAAAAGGTACTATTGACATCGACAATGGCAGCTTCGCTATTATCAGTCGCAAGTGTTCAAGCACAAGAAACAGATACGACGTGGACAGCACGTACTGTTTCAGAGGTAAAGGCTGATTTGGTAAAGCAAGACAATAAATCATCATATACTGTGAAATATGGTGATACACTAAGCGTTATTTCAGAAGCAATGTCAATTGATATGAATGTCTTAGCAAAAATAAATAACATTGCAGATATCAATCTTATTTATCCTGAGACAACACTGACAGTAACTTACGATCAGAAGAGTCATACTGCCACTTCAATGAAAATAGAAACACCAGCAACAAATGCTGCTGGTCAAACAACAGCTACTGTGGATTTGAAAACCAATCAAGTTTCTGTTGCAGACCAAAAAGTTTCTCTCAATACAATTTCGGAAGGTATGACACCAGAAGCAGCAACAACGATTGTTTCGCCAATGAAGACATATTCTTCTGCGCCAGCTTTGAAATCAAAAGAAGTATTAGCACAAGAGCAAGCTGTTAGTCAAGCAGCAGCTAATGAACAGGTATCACCAGCTCCTGTGAAGTCGATTACTTCAGAAGTTCCAGCAGCTAAAGAGGAAGTTAAACCAACTCAGACGTCAGTCAGTCAGTCAACAACAGTATCACCAGCTTCTGTTGCCGCTGAAACACCAGCTCCAGTAGCTAAAGTAGCACCGGTAAGAACTGTAGCAGCCCCTAGAGTGGCAAGTGTTAAAGTAGTCACTCCTAAAGTAGAAACTGGTGCATCACCAGAGCATGTATCAGCTCCAGCAGTTCCTGTGACTACGACTTCACCAGCTACAGACAGTAAGTTACAAGCGACTGAAGTTAAGAGCGTTCCGGTAGCACAAAAAGCTCCAACAGCAACACCGGTAGCACAACCAGCTTCAACAACAAATGCAGTAGCTGCACATCCTGAAAATGCAGGGCTCCAACCTCATGTTGCAGCTTATAAAGAAAAAGTAGCGTCAACTTATGGAGTTAATGAATTCAGTACATACCGTGCGGGAGATCCAGGTGATCATGGTAAAGGTTTAGCAGTTGACTTTATTGTAGGTACTAATCAAGCACTTGGTAATAAAGTTGCACAGTACTCTACACAAAATATGGCAGCAAATAACATTTCATATGTTATCTGGCAACAAAAGTTTTACTCAAATACAAACAGTATTTATGGACCTGCTAATACTTGGAATGCAATGCCAGATCGTGGTGGCGTTACTGCCAACCACTATGACCACGTTCACGTATCATTTAACAAATAA

SEQ ID NO: 88 - protein, 434 aa, Streptococcus agalactiae
MKMNKKVLLTSTMAASLLSVASVQAQETDTTWTARTVSEVKADLVKQDNKSSYTVKYGDTLSVISEAMSIDMNVLAKINNIADINLIYPETTLTVTYDQKSHTATSMKIETPATNAAGQTTATVDLKTNQVSVADQKVSLNTISEGMTPEAATTIVSPMKTYSSAPALKSKEVLAQEQAVSQAAANEQVSPAPVKSITSEVPAAKEEVKPTQTSVSQSTTVSPASVAAETPAPVAKVAPVRTVAAPRVASVKVVTPKVETGASPEHVSAPAVPVTTTSPATDSKLQATEVKSVPVAQKAPTATPVAQPASTTNAVAAHPENAGLQPHVAAYKEKVASTYGVNEFSTYRAGDPGDHGKGLAVDFIVGTNQALGNKVAQYSTQNMAANNISYVIWQQKFYSNTNSIYGPANTWNAMPDRGGVTANHYDHVHVSFNK

SEQ ID NO: 89 - protein, 591 aa, Streptococcus agalactiae
ATGCCTCTTTTAGCTTTGGCAGCTCAAGAAGCAGGAGCGGTTGGTATAAGAGCCAATAGTGTCCGCGACATTAAGGAAATTCAAGAGGTTACTAATTTACCTATCATCGGCATTATTAAACGTGAATATCCTCCACAAGAACCATTTATCACTGCTACGATGACAGAGGTGGATCAATTAGCTAGTTTAGATATTGCAGTAATAGCCTTAGATTGTACACTTAGAGAGCGTCATGATGGTTTGAGTGTAGTTGAGTTTATTCAAAAGATAAAAAGGAAATATCCTGAACAGTTGTTAATGGCTGATATAAGTACTTTTGAAGAAGGCAAAAATGCTTTTGAAGCAGGAGTTGATTTTGTGGGTACAACTCTATCTGGATACACAGATTACAGCCGCCAAGAAGAAGGACCGGATATAGAACTCCTTAATAAGCTCTGTCAAGCCGGTATAGATGTGATTGCGGAAGGTAAAATTCATACTCCTAAGCAGGCTAATGAAATTAATCATATAGGTGTTGCAGGAATTGTAGTTGGTGGTGCTATCACTAGACCAAAAGAAATAGCGGAGCGTTTCATCTCAGGACTTAGTTAA

SEQ ID NO: 90 - protein, 196 aa, Streptococcus agalactiae
MPLLALAAQEAGAVGIRANSVRDIKEIQEVTNLPIIGIIKREYPPQEPFITATMTEVDQLASLDIAVIALDCTLRERHDGLSVVEFIQKIKRKYPEQLLMADISTFEEGKNAFEAGVDFVGTTLSGYTDYSRQEEGPDIELLNKLCQAGIDVIAEGKIHTPKQANEINHIGVAGIVVGGAITRPKEIAERFISGLS

SEQ ID NO: 91 - DNA, 1317 bp, Streptococcus agalactiae
atgagtatcaaaaaaagtgtgattggtttttgcctcggagctgcagcattatcaatgtttgcttgtgtagacagtagtcaatctgttatggctgacgagaaggataaagtcgaaattacgtggtgggcttttccaacctttactcaagaaaaggctaaggatggagtaggtacttatgagaaaaaagtcatcaaggcttttgaaaagaaaaatcctaatataaaagtaaaactagagacaattgatttcacatctggacctgaaaaaatcactacagcgattgaagcagggacagcacctgatgtgctttttgatgcaccagggcgaattattcaatatggtaaaaatggtaaattagcagatttgaatgatttatttacagaccaatttattaaggatgtcaataataagaatatcattcaagcttctaagtctggcgataaagcctacatgtatccaataagttctgccccattttatatggcgttcaataaaaaaatgcttaaagatgcaggagttttgaaactcgtaaaagaaggttggactactagtgattttgaaaaagtactaaaagcactaaaaaataaaggctatacaccaggttcattctttgcaaacgggcaaggaggagatcaaggaccacgtgcattttttgctaatctttatagtgctccaataacagataaagaagtaacaaaatataccactgacactaaaaattctgtaaaatcaatgaaaaaaatagttgaatggattaagaaaggctacttgatgaatgggtctcagtatgatggctcagctgacattcaaaactttgccaatggacaaactgctttcactatcctatgggctccagctcaacccaaaactcaagcaaaattattagagtcaagtaaagtggattaccttgaagtgccattcccatcagaagatggaaaaccagatttagaataccttgttaatggttttgcggtctttaataataaagatgaaaacaaagtaaaagcctctaagaaatttatcacttttattgctgacgataaaaaatggggaccaaaagatgttatacgtacaggtgctttcccagttagaacatcatttggagatctttataaaggtgataaacgtatgatgaagatttcaaaatggactcaatattattcaccatattacaacactatcgatggattttctgaaatgagaaccttatggttcccaatggttcaatctgtatccaatggtgacgaaaaaccagcagatgctttgaaagactttactcaaaaagcaaatgataccattaaaaaagcagctaaataa

SEQ ID NO: 92 - protein, 438 aa, Streptococcus agalactiae
MSIKKSVIGFCLGAAALSMFACVDSSQSVMADEKDKVEITWWAFPTFTQEKAKDGVGTYEKKVIKAFEKKNPNIKVKLETIDFTSGPEKITTAIEAGTAPDVLFDAPGRIIQYGKNGKLADLNDLFTDQFIKDVNNKNIIQASKSGDKAYMYPISSAPFYMAFNKKMLKDAGVLKLVKEGWTTSDFEKVLKALKNKGYTPGSFFANGQGGDQGPRAFFANLYSAPITDKEVTKYTTDTKNSVKSMKKIVEWIKKGYLMNGSQYDGSADIQNFANGQTAFTILWAPAQPKTQAKLLESSKVDYLEVPFPSEDGKPDLEYLVNGFAVFNNKDENKVKASKKFITFIADDKKWGPKDVIRTGAFPVRTSFGDLYKGDKRMMKISKWTQYYSPYYNTIDGFSEMRTLWFPMVQSVSNGDEKPADALKDFTQKANDTIKKAAK

SEQ ID NO: 93 - DNA, 888 bp, Streptococcus agalactiae
atgcgtactaataagttaaagatgagggaaacgatgatagcttatgcttttctagcacctattctcttatttttcttaatttttgtttttgcaccgatggttatgggctttgtcactagtttttttaattattctatgacacagttcacttttattgggttagctaattacaatcgtatgtttcatgattctattttcatgaaatccttgataaatacagtaatcattgtgattggctctgtgccagtagtggttttcttctcactttttgttgctgccaatacttatgaaaaaaatgttttttcacgctctttctaccgttgtgtcttcttcttgccagtagtaactggtagtgttgcagttacagttgtttggaaatggatttatgaccctatgtccggaattttaaattacatcttgaaatcaggtcatgtcattgaacagaatattagctggcttggggataagcactgggcattgcttgctattattattattttgctaacgacctcagttggtcaacctattattctatatattgcggcgatgggaaatattgataattctctttgcgaagctgcgcgtgttgatggagccaatgaaatgcaagttttttggcaaattaaatggccgagtctcttaccaactacactctatattgcagttataacaacaattaattcatttcaatgttttgccttaatccagctcctaacatctggtggaccaaattattcaacaagcactttgatgtattatctttatgaaaaagcctttaaactatcagaatatggctatgctaatactatgggagtattcctagcagtaatgattgctttaataagttttgctcaatttaagatcttaggaaatgatgtggaatattag

SEQ ID NO: 94 - protein, 295 aa, Streptococcus agalactiae
MRTNKLKMRETMIAYAFLAPILLFFLIFVFAPMVMGFVTSFFNYSMTQFTFIGLANYNRMFHDSIFMKSLINTVIIVIGSVPVVVFFSLFVAANTYEKNVFSRSFYRCVFFLPVVTGSVAVTVVWKWIYDPMSGILNYILKSGHVIEQNISWLGDKHWALLAIIIILLTTSVGQPIILYIAAMGNIDNSLCEAARVDGANEMQVFWQIKWPSLLPTTLYIAVITTINSFQCFALIQLLTSGGPNYSTSTLMYYLYEKAFKLSEYGYANTMGVFLAVMIALISFAQFKILGNDVEY

SEQ ID NO: 95 - DNA, 831 bp, Streptococcus agalactiae
atgaaaaagaaaacattcagtgcttataactttttaacggctcttatcctttgtcttttgacagtgctttttatctttccattttattggattatgacaggagcttttaaatctcaacctgatactattatcatccccccacaatggtggcccaaagcaccgaccttagaaaattttaaagctttaactgtacaaaacccagctttgagatggctttggaatagtgtctttatctcaattatgacaatgttcctagtttgctgtacatcgtcaatggcaggctatgttttagctaagaaacgattttacggtcaaaaaatattgttctccctttttattgctgctatggctttacctaaacaagttgttttagtgccattagttagaattatcaattttatggggatacatgataccttatgggcggttattttacctcttgttggttggccttttggggtcttcttgatgaaacagttttctgaaaatattccaacagaattactggaatcagctaaaattgatggttgtggagagattcgaacatttattaatgtagcatttccaattgtcaaacctggatttgctgccctagctattttcacatttatcaatacttggaatgactattttatgcaattagttatgctaacttctagaaataatctgaccatttctcttggggtagctactatgcaggctgaaatggcaacaaactatggcttaattatggcaggtgcagccttagctgctgttcctattgtgacagtattcttagttttccaaaaatcctttactcaggggattacaatgggagctgttaaaggatag

SEQ ID NO: 96 - protein, 276 aa, Streptococcus agalactiae
MKKKTFSAYNFLTALILCLLTVLFIFPFYWIMTGAFKSQPDTIIIPPQWWPKAPTLENFKALTVQNPALRWLWNSVFISIMTMFLVCCTSSMAGYVLAKKRFYGQKILFSLFIAAMALPKQVVLVPLVRIINFMGIHDTLWAVILPLVGWPFGVFLMKQFSENIPTELLESAKIDGCGEIRTFINVAFPIVKPGFAALAIFTFINTWNDYFMQLVMLTSRNNLTISLGVATMQAEMATNYGLIMAGAALAAVPIVTVFLVFQKSFTQGITMGAVKG

SEQ ID NO: 97 - DNA, 444 bp, Streptococcus agalactiae
atgatttacgatcatttattgaatttaacgcattataaagatattaatcctaatttagatttagcgattgattatctactaagtcatgatttaaggaatttagatataggcacctatcatattagcccagaagtgatactcatggtccaatcaaatcaacttagtgagtcatttgatcatatttttgaataccataaaaaataccttgatatacattatgtcattgaaggacatgaagttatcaaattgggaaaaggtgataaggtagaggtggaggaatacttaggcgatataggatttatcaagtgctcagaagagacttcttttgatttgagagataattatatagccttctttttcccagaagaagctcatcagccaaatggtatgggaagtctaggtaattatgtcaaaaaaggggtattgaaagtgttaatggcgtaa

SEQ ID NO: 98 - protein, 147 aa, Streptococcus agalactiae
MIYDHLLNLTHYKDINPNLDLAIDYLLSHDLRNLDIGTYHISPEVILMVQSNQLSESFDHIFEYHKKYLDIHYVIEGHEVIKLGKGDKVEVEEYLGDIGFIKCSEETSFDLRDNYIAFFFPEEAHQPNGMGSLGNYVKKGVLKVLMA

SEQ ID NO: 99 - DNA, 663 bp, Streptococcus agalactiae
gtgaaaaaagcaaatcaattaatagcagcgatttttgatgttaacaacccctttatgcaaggttgcaatgttgtttttgatctggcattactaaaccttctctttatgataacttgcctaccattggtaactattggtgctgctaaaattagtttgtatcgaacgttgtggcaaaaattagaaggtgatcagacaaatcttttaatattgtatataaaacacctaaaaaaagagtggttccaaggtatgcttttaggtttggttgaactaagtattttggttgtgatcatatttgatttaacaattcttcattatcaaataggtttcattgtgtctttcttgaagataacttgttacgcctttttgttattgactgtgatgacgagcatatacctatttcctatggctgcccgctacgaaatgtctcttttagataccgtgaaaaagagctttataatggcatgtttaaacttgaaatggactggtgtattgatgtttttattaatcatgacttggtttattatggtgcagtctagtctcttatttatgcttacagtgtcagctatatttatttttgcttataccgcctttgcttactttaaaattattattttacaaaaacaatttgcctatttcagcaaacaacaaggagattatcaatga

SEQ ID NO: 100 - protein, 220 aa, Streptococcus agalactiae
MKKANQLIAAIFDVNNPFMQGCNVVFDLALLNLLFMITCLPLVTIGAAKISLYRTLWQKLEGDQTNLLILYIKHLKKEWFQGMLLGLVELSILVVIIFDLTILHYQIGFIVSFLKITCYAFLLLTVMTSIYLFPMAARYEMSLLDTVKKSFIMACLNLKWTGVLMFLLIMTWFIMVQSSLLFMLTVSAIFIFAYTAFAYFKIIILQKQFAYFSKQQGDYQ

SEQ ID NO: 101 - protein, 918 aa, Streptococcus agalactiae
ATGAAAGATTTACAAAAATATCAAGGAATTATTCCTGCATTTTATGCTTGCTATGATGATAAGGGTGATATTTGTCCCGAACGAGTAAAAGCCCTGACCAATTATTTTATTGATAAAGGTGTTCAAGGACTTTATGTTAATGGTTCATCCGGAGAATGTATTTACCAAAGTGTAGCAGATCGTAAACTTGTACTGGAAAATGTTATGTCCGTTGCTAAGGGTAAACTAACAGTAATAGCGCATGTGGCATGTAATAATACTAAGGATAGCGTAGAGTTGGCTATGCATGCTGAAGCTATAGGTGTTGATGCTATTGCAGCAATTCCACCAATTTATTTTCGATTACCAGAGTATGCCATAGCAGATTATTGGAATACTATTAGTCAAGCAGCACCACAAACTGATTTTATTATTTACAATATTCCTCAATTGGCAGGGGTTGCTTTGACATCGGATTTATATCGAAAAATGTTACAAAATCCGCAAGTAATTGGTGTTAAAAATTCTTCCATGCCAGTTCAAGACATTCAGAATTTTGTGGCTATTGGAGGAGAAAATCATATTGTTTTTAATGGTCCAGATGAACAATTTTTGGGTGGTCGTCTCATGGGAGCCGCTGCAGGTATTGGTGGTACCTATGGCGTAATGCCAGAATTATACTTGACTTTAAATCAGTTAATTGTTGATAAAGATTTAGAAAAAGCGCGTGAACTTCAATTTACAATTAACGATATTATCACAAAGCTTTGTTCGGGTCATGGTAATATGTATGCTGTGATCAAAGCTGTATTGGAAATCAATGAGCAACTAACTATAGGTTCCGTTCGGTTACCTTTAGCATCTGTAACAGAAGAAGATAAACCTATTATTAAAGAGGCAGCAGAAATGATTAGACATGCTAAAAAACAGTTTTGTTAA

SEQ ID NO: 102 - protein, 305 aa, Streptococcus agalactiae
MKDLQKYQGIIPAFYACYDDKGDICPERVKALTNYFIDKGVQGLYVNGSSGECIYQSVADRKLVLENVMSVAKGKLTVIAHVACNNTKDSVELAMHAEAIGVDAIAAIPPIYFRLPEYAIADYWNTISQAAPQTDFIIYNIPQLAGVALTSDLYRKMLQNPQVIGVKNSSMPVQDIQNFVAIGGENHIVFNGPDEQFLGGRLMGAAAGIGGTYGVMPELYLTLNQLIVDKDLEKARELQFTINDIITKLCSGHGNMYAVIKAVLEINEQLTIGSVRLPLASVTEEDKPIIKEAAEMIRHAKKQFC

SEQ ID NO: 103 - protein, 882 aa, Streptococcus agalactiae
ATGACCAGAACAGTAGCAATTGATATTGGCGGTACAATGATTAAGCATGGCATTGTGGATAATTTAGGTTGTATTGTTGAGGCAAGTGAGCTTGCCACAGAAGCCTACAAAGGTGGTCCAGGCATTTTACAAAAAGTTTGTCAAATTATCGATAACTATCTAGCAGAAGGGAGCATTGATGGAATTGCTATCTCATCTGCTGGCATGGTAGATCCAGATGAAGGATGTATATTTTACTCTGGTCCTCAAATTCCAAACTATGCTGGGACACAATTTAAGAAAGTTTTAGAAGACACTTATCAAGTACGCACAGAAATTGAAAATGATGTTAATTGTGCAGGATTAGCTGAAGCTGTCTCAGGTAGTGCCAAAGATAGTTCAATAGCGCTTTGTCTTACTATTGGAACAGGTATTGGTGGTTGTCTGATTATTGATAAAACAGTTTTTCATGGCTTTAGTAATTCTGCTTGTGAAGTTGGCTATATGCACCTTTCAGATGGTGATTTTCAAGATTTAGCCTCTACAACTGCACTGATTGCTGATGTTGCCAAAGCGCATGGAGATGAAATTAGCCGATGGGATGGACGTCGTATTTTTCAGGAGGCTAAAAAAGGCAATGAAAAATGTATTGCAAGTATAGACCGTATGATAAACTACCTTGGCCAAGGAATCGCTAATATGGTTTATGTGGTAAATCCTGAAAAAGTTGTTTTAGGTGGTGGAATCATGGCTCAAAAAGATTATTTACAAGATAAACTTAGTGAATCTTTGAAACGAAATCTTGTGACAAGTCTTGCTGAAAAAACAGCAATAGTCTTTGCACAACACGAAAACCAAGCTGGTATGCTAGGAGCTTACTACCATTTTAAAAACAGGGGGTGA

SEQ ID NO: 104 - protein, 293 aa, Streptococcus agalactiae
MTRTVAIDIGGTMIKHGIVDNLGCIVEASELATEAYKGGPGILQKVCQIIDNYLAEGSIDGIAISSAGMVDPDEGCIFYSGPQIPNYAGTQFKKVLEDTYQVRTEIENDVNCAGLAEAVSGSAKDSSIALCLTIGTGIGGCLIIDKTVFHGFSNSACEVGYMHLSDGDFQDLASTTALIADVAKAHGDEISRWDGRRIFQEAKKGNEKCIASIDRMINYLGQGIANMVYVVNPEKVVLGGGIMAQKDYLQDKLSESLKRNLVTSLAEKTAIVFAQHENQAGMLGAYYHFKNRG

SEQ ID NO: 105 - protein, 978 aa, Streptococcus agalactiae
ATGATTGAAACAATGTCGCTAGATGACATGAGAGAATACCTAGGTCAAGACCAAATTCCCGAGGATTTTGATGACTTCTGGAAAAAACAAACAATGAAATATCAAGGGAATATTGAGTATCGTCTAGACAAAAAAGATTTCAATATTACTTTTGCACAAGCTTATGATCTTCATTTTAAAGGCAGCAATAACTCTATTGTCTATGCCAAATGTTTATTCCCTAAAACAAATAAACCCTATCCTGTAGTTTTTTATTTTCATGGTTACCAAAACCAAAGTCCTGACTGGAGTGACCAACTTAATTATGTAGCAGCAGGTTACGGCGTTGTTTCAATGGATGTTCGAGGTCAAGCTGGACAGTCTCAAGACAAGGGGCATTTTGATGGCATTACAGTTAAGGGCCAGATTGTGCGAGGAATGATCTCAGGACCAAATCATCTTTTTTATAAAGACATTTATCTTGATGTTTTCCAATTGATTGATATCATTGCTACATTAGAGAGTGTTGATAGTAATCAACTTTATAGTTATGGCTGGTCTCAAGGTGGAGCACTTGCTTTGATAGCTGCAGCTCTTAATCCCAAAATCGTCAAGACCGTTGCTGTTTACCCATTTTTGTCAGACTTTAGACGAGTATTAGATTTAGGGGGTGTCAGTGAGCCCTATGATGAACTCTTCCGCTATTTTAAATATAGTGATCCTTTTCATAAAACAGAGAATAATGTGTTAAAAACTTTGGCTTATATTGATGTTAAAAATTTTGCACATAGGATTTCTTGCCCCGTTGTTTTACTAACAGCCTTAAAAGATGATATTTGTCCTCCATCAACTCAATTTGCCATTTTTAATCGTCTGACATCAACTAAAAAGCATCTTTTATTACCAGATTATGGACATGATCCAATGACAGTGCAAGTAAAAGACCATATTTTTGATCAACTGACAGGAAGTCAATTTACAAAGCAAAAAATCGAGTAG

SEQ ID NO: 106 - protein, 325 aa, Streptococcus agalactiae
MIETMSLDDMREYLGQDQIPEDFDDFWKKQTMKYQGNIEYRLDKKDFNITFAQAYDLHFKGSNNSIVYAKCLFPKTNKPYPVVFYFHGYQNQSPDWSDQLNYVAAGYGVVSMDVRGQAGQSQDKGHFDGITVKGQIVRGMISGPNHLFYKDIYLDVFQLIDIIATLESVDSNQLYSYGWSQGGALALIAAALNPKIVKTVAVYPFLSDFRRVLDLGGVSEPYDELFRYFKYSDPFHKTENNVLKTLAYIDVKNFAHRISCPVVLLTALKDDICPPSTQFAIFNRLTSTKKHLLLPDYGHDPMTVQVKDHIFDQLTGSQFTKQKIE

SEQ ID NO: 107 - protein, 804 aa, Streptococcus agalactiae
ATGACTATTTATGACCAAATTGAGTCTGCTCTTGATTTAATGACTGATTTAGAACGTGAAATTGCTTGTTATTTTATGGGGCAGCCCATTTCAAAAGACGCTCTTGCTTCTACCATTGTCACTAAGCAACTACACATTTCACAAGCAGCCTTAACGCGTTTTGCTAAAAAATGTGGGTTTAAAGGCTATCGTGAATTTGTTTTTGAATATTTAAAAAGCCATGAGACCATCAGTCAACAATTATACGGTCTTCAAAATGACAACACTAAGAAAGTATTTATGAATTATCAAGAGATGATTTCTAAATCTGCTGATATTATTGATGAAGAACAGCTTCTAGAAGTATCACATATGATTGAGCAAGCTGATCGTGTTTATTTTTATGGCAAAGGGAGCTCATCGCTAGTAGCTAAAGAATTTAAAATACGCCTTATGAGGCTGGGAGTGATTTGTGAGGCTCTGGATGATACAGATAGTTTCTCATGGACTAATAGTATTGTTAATGATAGATGCCTCGTCATTGCCTTCTCACTTTCTGGGAACACCAACTCTGTTATTGGTGCCTTAAAAATCGCAAGTTGTCACGGAGCTAAAACCGTTCTATTTACAAAACAACCTCACACAATTGACTATGCTTTTGACAAGATTATTCAGGTGGCTTCTGCTAGGCATTTAGACTACGGCAATAGAATTTCGCCTCAGATCCCAATGTTAATCATGGTAGATATTATCTATGCACAATTTTTAGATATTAATAAAATAGAAAAAGAGCGAATTTTTAGAGAAACCATTATTCAACGCTAA

SEQ ID NO: 108 - protein, 267 aa, Streptococcus agalactiae
MTIYDQIESALDLMTDLEREIACYFMGQPISKDALASTIVTKQLHISQAALTRFAKKCGFKGYREFVFEYLKSHETISQQLYGLQNDNTKKVFMNYQEMISKSADIIDEEQLLEVSHMIEQADRVYFYGKGSSSLVAKEFKIRLMRLGVICEALDDTDSFSWTNSIVNDRCLVIAFSLSGNTNSVIGALKIASCHGAKTVLFTKQPHTIDYAFDKIIQVASARHLDYGNRISPQIPMLIMVDIIYAQFLDINKIEKERIFRETIIQR

SEQ ID NO: 109 - protein, 1266 aa, Streptococcus agalactiae
ATGAAATTGCTTGTTGTTGGTTCTGGTGGTCGTGAGCATGCGATTGCTAAGAAGTTGTTAGCGTCTAAGGATGTGGATCAGGTTTTTGTGGCACCTGGTAATGATGGTATGACCTTGGATGGTCTAGACTTGGTAAATATCGGAATTTCCGAACATTCTAGACTGATTGACTTTGTTAAGGAGAATGAGATTGCTTGGACCCTTATTGGTCCTGATGATGCGCTAGCAGCTGGTATCGTTGATGGTTTTAATAGTGCTGGACTCAGAGCATTTGGTCCAACCAAGGCAGCCGCGGAGCTAGAGTGGTCAAAAGACTTTGCCAAGGAAATCATGGTCAAATACAATGTTCCAACAGCAGCCTATGGCACATTTTCAGATTTTGAAAAAGCTAAAGCCTACATCGAAGAGCAGGGCGCACCAATCGTGGTCAAGGCTGACGGATTGGCGTTAGGCAAGGGCGTGGTCGTGGCTGAAACCGTTGAGCAGGCGGTAGAGGCGGCGCAAGAGATGCTTTTGGACAACAAGTTTGGCGACTCGGGTGCGCGCGTGGTTATCGAGGAATTCTTGGATGGTGAAGAGTTCTCCCTTTTCGCCTTCGCTAATGGCGATAAGTTCTACATCATGCCGACAGCTCAGGATCACAAGCGTGCCTATGATGGTGACAAGGGGCTAAATACCGGTGGTATGGGTGCCTATGCGCCAGTTCCCCACCTGCCTCAGAGCGTGGTGGATACAGCAGTTGAGACTATCGTTAAGCCTGTCCTTGAAGGCATGATTGCCGAAGGGCGTCCTTATCTAGGTGTCCTCTATGCTGGGCTTATCCTGACGGCTGATGGCCCTAAGGTTATCGAGTTCAACTCACGTTTTGGTGACCCTGAAACTCAGATTATCCTCCCTCGCCTGACTTCCGATTTCGCTCAGAACATCGACGACATCATGATGGGCATCGAGCCTTACATCACTTGGCAGAAGGACGGCGTGACTCTGGGCGTTGTCGTTGCCTCAGAAGGCTATCCGCTCGATTACGAGAAAGGTGTGCCACTGCCTGAAAAGACCGACGGCGACATCATCACCTACTATGCGGGAGCTAAGTTTGCGGAAAATAGCAAAGCACTGCTCTCAAACGGAGGACGTGTCTACATGCTTGTCACCACAGAAGACAGCGTCAAAGCAGGGCAGGACAAAATCTATACCCAACTCGCCCAACAAGACACAACAGGCCTCTTCTACCGAAACGACATCGGAAGCAAAGCTATTAAGGAATAA

SEQ ID NO: 110 - protein, 421 aa, Streptococcus agalactiae
MKLLVVGSGGREHAIAKKLLASKDVDQVFVAPGNDGMTLDGLDLVNIGISEHSRLIDFVKENEIAWTLIGPDDALAAGIVDGFNSAGLRAFGPTKAAAELEWSKDFAKEIMVKYNVPTAAYGTFSDFEKAKAYIEEQGAPIVVKADGLALGKGVVVAETVEQAVEAAQEMLLDNKFGDSGARVVIEEFLDGEEFSLFAFANGDKFYIMPTAQDHKRAYDGDKGLNTGGMGAYAPVPHLPQSVVDTAVETIVKPVLEGMIAEGRPYLGVLYAGLILTADGPKVIEFNSRFGDPETQIILPRLTSDFAQNIDDIMMGIEPYITWQKDGVTLGVVVASEGYPLDYEKGVPLPEKTDGDIITYYAGAKFAENSKALLSNGGRVYMLVTTEDSVKAGQDKIYTQLAQQDTTGLFYRNDIGSKAIKE

SEQ ID NO: 111 - DNA, 585 bp, Streptococcus agalactiae
gtgggtacgtcttcgaaatcaaagatttcggacttaccgcatatttttctacgaaaattttcgacaagtcgaaacgtccctttgtatcttaatattatgcaaccaattatttctattatcatgggttccaaatccgactggacaaccatgcaaaaaacggctgaagttctagataactttggcattgcttacgagaagaaagtcgtctctgcccaccgtacgccagacctcatgttcaagcatgctgaggaggcgcgtggtcgtggtatcaagattatcatcgctggagcaggtggagcagcccacttgccgggtatggtagcagctaaaacaaccctgcctgttatcggtgtgcctgtcaaatcacgtgccctctcaggtttggattcgctctactctattgtgcagatgcctggtggtgtgcctgtggcgaccatggctatcggagaagcaggagcgactaacgctgccctgacagccctccgtatcctctctatcgaggatcaaaatctggctgatgcgctagctcatttccatgaggaacaaggaaaaatcgcagaggagtcaagcaatgaactcatttaa

SEQ ID NO: 112 - protein, 194 aa, Streptococcus agalactiae
MGTSSKSKISDLPHIFLRKFSTSRNVPLYLNIMQPIISIIMGSKSDWTTMQKTAEVLDNFGIAYEKKVVSAHRTPDLMFKHAEEARGRGIKIIIAGAGGAAHLPGMVAAKTTLPVIGVPVKSRALSGLDSLYSIVQMPGGVPVATMAIGEAGATNAALTALRILSIEDQNLADALAHFHEEQGKIAEESSNELI

SEQ ID NO: 113 - DNA, 915 bp, Streptococcus agalactiae
  misc_feature 888, 889, 890, 891, 892: n = A,T,C or G
atgaactcatttaagaccattgggattattggtggtggtcagctggggcagatgatggcgattgcggctatctacatgggccacaaggtcattacgctggatccagctagcgactgccctgcctcccgcgttagcgaggtgattgtggcaccttacgatgatgttgaggctttgggaacattagctgcgcgttgcgatgttttgacctatgagtttgagaatgtcgatgccgatggtctggatgccgttgtgtcagctggtcagctaccgcaggggactgatctgctccgcatttctcaaaaccgtatctttgaaaaagactttctggcaaataaggctggcgtgactgtcgctccctataaggtggtgacatctagccttgacctagaggggcttgacttgaccaagacctatgtcctcaagacagcgacaggtggttatgacggtcatgggcaaaaggttatccgctcagcagaagacctgccagaggcgcagcaattagccaactcagctcagtgtgtcttggaagagtttgtcaacttcgaccttgaaatatcagtcatcgtgtctggaaatggtcaggatgtgacggtctttcccgttcaggaaaatatccaccgcaacaatatcctgtcaaaaaccatcgtaccagctcgcatctcagaccaactagctgacaaggctaaggaaatggctgtgcagattgccaagaaactccagctatcaggaaccctctgtgtggaaatgtttgcgaccgcagatgacatcatcgtcaatgaaattgccccacgtccccacaactcagggcactactctatcgaagcctgcgacttttcacagtttgacacccacatcttgggcgtactgggcgcaccgcttccgccatcnnnnncattccattcattaattaattaa

SEQ ID NO: 114 - protein, 304 aa, Streptococcus agalactiae
  VARIANT 297, 298: Xaa = Any Amino Acid
MNSFKTIGIIGGGQLGQMMAIAAIYMGHKVITLDPASDCPASRVSEVIVAPYDDVEALGTLAARCDVLTYEFENVDADGLDAVVSAGQLPQGTDLLRISQNRIFEKDFLANKAGVTVAPYKVVTSSLDLEGLDLTKTYVLKTATGGYDGHGQKVIRSAEDLPEAQQLANSAQCVLEEFVNFDLEISVIVSGNGQDVTVFPVQENIHRNNILSKTIVPARISDQLADKAKEMAVQIAKKLQLSGTLCVEMFATADDIIVNEIAPRPHNSGHYSIEACDFSQFDTHILGVLGAPLPPSXXFHSLIN

SEQ ID NO: 115 - DNA, 234 bp, Streptococcus agalactiae
  misc_feature 4, 5, 6, 7, 8: n = A,T,C or G
atgnnnnncgactgccctgcctcccgcgtttgcgaggtgattgtggcaccttacgatgatgttgaggctttgggaacattagctgcgcgttgcgatgttttgacctatgagtttgagaatgtcgatgccgatggtctggatgccgttgtgtcagctggtcagctaccgcaggggactgatctgctccgcatttctcaaaaccgtatctttgraaaagactttctggcaaawwaa

SEQ ID NO: 116 - protein, 78 aa, Streptococcus agalactiae
  VARIANT 2, 3, 71, 77, 78: Xaa = Any Amino Acid
MXXDCPASRVCEVIVAPYDDVEALGTLAARCDVLTYEFENVDADGLDAVVSAGQLPQGTDLLRISQNRIFXKDFLAXX

SEQ ID NO: 117 - DNA, 450 bp, Streptococcus agalactiae
ttggaagagtttgtcaacttcgaccttgaaatatcagtcatcgtgtctggaaatggtcaggatgtgacggtctttcccgttcaggaaaatatccaccgcaacaatatcctgtcaaaaaccatcgtaccagctcgcatctcagaccaactagctgacaaggctaaggaaatggctgtgcagattgccaagaaactccagctatcaggaaccctctgtgtggaaatgtttgcgaccgcagatgacatcatcgtcaatgaaattgccccacgtccccacaactcagggcactactctatcgaagcctgcgacttttcacagtttgacacccacatcttgggcgtactgggcgcaccgcttccgccaatcaaactccatgctccagccgttatgttcaatgtcctaggacaacatgtccagcaggcaattgaccatgttgcccaaaamccctag

SEQ ID NO: 118 - protein, 149 aa, Streptococcus agalactiae
  VARIANT 148: Xaa = Any Amino Acid
MEEFVNFDLEISVIVSGNGQDVTVFPVQENIHRNNILSKTIVPARISDQLADKAKEMAVQIAKKLQLSGTLCVEMFATADDIIVNEIAPRPHNSGHYSIEACDFSQFDTHILGVLGAPLPPIKLHAPAVMFNVLGQHVQQAIDHVAQXP

SEQ ID NO: 119 - DNA, 1239 bp, Streptococcus agalactiae
atgtttaatcaattaatagtaaacctcttaaatatttattattatatggaagccttcatattgggtatggacagctatttacaatataaccttccatacagttttgatttttggagtatttttgtagaggctataaatttatttgtaaaagtatttttaattgcttttattccttctgttattagaaaagtattgaaaaaagaaagttttttcaatgaagttgttattttactaggagcgattgttactataattgtaagtttccatttatatttagagatattgatagtagtgggactaatacttttattaattgcttttgtttcaataggtaagaatcgtgtttataattttgttcaaaatttaaactactttgaagaagtgatttggaattattttgaagaaaatccggttaaaataaaagaaaaatcattgattattaaatttttacttactatttcttttgtttttgtaattgattttgcaatggttagattgttgaattttaatataaaattttctacaatattagcttgttctgctattttattagcatggttataccaaaataagtctgttacagaacccttcctattaaaaaagttagttatctattttatttttttcattgccactttaattggtaatttaaaaaatgagttgtcaatcttagaaacaccattactttttattagtatattttttactatggatagaattattgctctatctaaagaaatgcgtgatttgattatatctaagagtattttattttattatgatcatgaaaatataaagccatcaatattacttagtgagataaaagaaattaagtatcttgaaaatgtagatattggagaacttgaacttgttaggcaaatggtaattaggttgcgtctagagttagaggaagaatttttgattttatcagatatatatatgaaaaatggctatgaaaaatatatacaatttgttcaaggaaatgtttattttatcaacttagaattggataaaattcccaactacactaacttgaaattaatactagaatcaatatttgatcataataatcaaaagatatttatacctaaactttatgaggaatacatatacatcttaatttctttaggagaagttgaaaaagctaaagaaatattaaaagaagtgtcggattatttaactgaagaatctttgaattattttgaaaaagaatatgataaagctaagggtagtaattag

SEQ ID NO: 120 - protein, 412 aa, Streptococcus agalactiae
MFNQLIVNLLNIYYYMEAFILGMDSYLQYNLPYSFDFWSIFVEAINLFVKVFLIAFIPSVIRKVLKKESFFNEVVILLGAIVTIIVSFHLYLEILIVVGLILLLIAFVSIGKNRVYNFVQNLNYFEEVIWNYFEENPVKIKEKSLIIKFLLTISFVFVIDFAMVRLLNFNIKFSTILACSAILLAWLYQNKSVTEPFLLKKLVIYFIFFIATLIGNLKNELSILETPLLFISIFFTMDRIIALSKEMRDLIISKSILFYYDHENIKPSILLSEIKEIKYLENVDIGELELVRQMVIRLRLELEEEFLILSDIYMKNGYEKYIQFVQGNVYFINLELDKIPNYTNLKLILESIFDHNNQKIFIPKLYEEYIYILISLGEVEKAKEILKEVSDYLTEESLNYFEKEYDKAKGSN

SEQ ID NO: 121 - protein, 1299 aa, Streptococcus agalactiae
ATGATCGAACGTTATTCACGCCCTGAGATGGCGGCAATTTGGACAGAGGAAAATAAATACCGTGCTTGGTTGGAGGTCGAGATTTTGGCTGACGAGGCATGGGCTGAGTTGGGTGAGATTCCTAAGGAGGATGTGGCTAAGATTCGTGAGAAGGCGGATTTTGACATTGACCGCATTCTTGAGATTGAGCAGGACACGCGTCACGATGTGGTGGCTTTCACTCGTGCGGTTTCTGAGACGCTTGGTGAGGAGCGCAAGTGGGTGCACTACGGTTTGACGTCGACTGACGTGGTGGACACTGCCTACGGTTACCTCTACAAGCAGGCTAACGATATTATCCGTCGTGACCTTGAGAATTTCACAAATATTGTGGCTGATAAGGCTAAGGAGCACAAGTTCACCATCATGATGGGTCGTACCCACGGTGTTCACGCTGAGCCAACGACTTTCGGTCTTAAGTTGGCGACCTGGTACAGCGAGATGAAACGTAATATTGAGCGTTTTGAACATGCTGCCGCAGGTGTGGAAGCTGGTAAGATTTCAGGTGCCGTTGGTAACTTTGCTAACATTCCTCCATTTGTGGAACAATATGTTTGTGACAAATTGGGCATCCGTCCGCAAGAGATTTCAACACAGGTTCTTCCACGTGACCTCCACGCAGAATATTTTGCAGTGCTTGCAAGCATTGCAACTTCTATCGAACGTATGGCGACAGAGATTCGTGGTCTGCAAAAATCAGAACAACGTGAAGTTGAAGAATTCTTTGCCAAAGGTCAGAAAGGTAGCTCTGCTATGCCTCACAAACGCAACCCAATCGGTTCAGAGAACATGACTGGGCTAGCGCGCGTGATTCGTGGTCACATGGTGACGGCTTATGAGAACGTGGCACTTTGGCACGAGCGTGATATTTCGCACTCATCTGCTGAGCGTATCATCACACCTGACACAACGATCTTGATTGACTACATGCTCAACCGTTTTGGCAATATCGTTAAGAACTTGACTGTCTTCCCGGAAAATATGATGCGCAATATGGAATCAACTTTTGGTTTGATTTATAGTCAACGTGTTATGCTCAAATTGATTGAAAAAGGAATGACACGAGAAGAAGCTTATGACTTAGTTCAACCTAAGACAGCTTATTCCTGGGACAATCAAGTGGATTTCAAACCACTTTTAGAAGAAGACACCAAAGTTACCTCTTGTCTTACACAGGAAGAAATTGATGAACTATTTAATCCGATTTATTACACAAAACGTGTTGATGATATTTTTGAAAGACTAGGATTAGAAAAATAA

SEQ ID NO: 122 - protein, 432 aa, Streptococcus agalactiae
MIERYSRPEMAAIWTEENKYRAWLEVEILADEAWAELGEIPKEDVAKIREKADFDIDRILEIEQDTRHDVVAFTRAVSETLGEERKWVHYGLTSTDVVDTAYGYLYKQANDIIRRDLENFTNIVADKAKEHKFTIMMGRTHGVHAEPTTFGLKLATWYSEMKRNIERFEHAAAGVEAGKISGAVGNFANIPPFVEQYVCDKLGIRPQEISTQVLPRDLHAEYFAVLASIATSIERMATEIRGLQKSEQREVEEFFAKGQKGSSAMPHKRNPIGSENMTGLARVIRGHMVTAYENVALWHERDISHSSAERIITPDTTILIDYMLNRFGNIVKNLTVFPENMMRNMESTFGLIYSQRVMLKLIEKGMTREEAYDLVQPKTAYSWDNQVDFKPLLEEDTKVTSCLTQEEIDELFNPIYYTKRVDDIFERLGLEK

SEQ ID NO: 123 - protein, 912 aa, Streptococcus agalactiae
ATGTTAAAACATTTTGGTAGTAAAGTAAGAAATTTGAGAGTAACTAGAAATATTACTCGCGAAGATTTTTGTGGTGATGAAACTGAGTTATCTGTAAGACAATTAGCTAGGATTGAAAGTGGACAGTCAATTCCAAACTTGACTAAAGCTCACTACATAGCTAAACAATTGAATGTAAAATTGGATATTTTAACAGGAGGAGAGAGCTTAGAATTACCTAAACGGTATAAAGAGTTGAAGTATTTGATTTTAAGAATTCCAACTTATGCAGATGCTGAACGATTAAAATTAAGAGAATGTCAGTTTGATCATATTTTCGAAGAATTCTATGATAATCTTCCAGAAGACGAGTGCTTAGCAATTGACAGTTTACAAGCTAAATTTGAAGTCTATCAAACAGGAGACATTAATTTTGGTGTGGAGGTTTTATGCGAATGCTTTGATAAAGTAAAATATAAAGAAAAATATACTCTTAATGATTTGATTATCATAGATTTGTTTTTAACTTGTGCAGTTGTATCTAAATTTAACAATAGAGCATTTACTAAAGAAGTATTTCAAACTATATGTAAAACTTTGATAAGTCAGAACCACAAACTTACAGCAGAAGATTTGTTTTGGTTTAATCATGTACTCCTGAATTGTGTATTTGTTGGACTTTGTTTAAATAGTGAAGAGTGTCTTGCAGAAATGTTAGAAGTTAGCCGACAAACGATGGTGTCAACACATGATTTTCATAAAATGCCTTTATATTTTATGTACCAATGGAAATACTTCATTACAATTGACAATGATATAAAGTCTGCAGAAAATGCTTACCAACAATCAATTATGTTTTCAAAAATGATTGATGACAAGCATCTAATTAAAAAATTAGAATTGGAGTGGCAAGAAGATATAACAGGACATTGA

SEQ ID NO: 124 - protein, 303 aa, Streptococcus agalactiae
MLKHFGSKVRNLRVTRNITREDFCGDETELSVRQLARIESGQSIPNLTKAHYIAKQLNVKLDILTGGESLELPKRYKELKYLILRIPTYADAERLKLRECQFDHIFEEFYDNLPEDECLAIDSLQAKFEVYQTGDINFGVEVLCECFDKVKYKEKYTLNDLIIIDLFLTCAVVSKFNNRAFTKEVFQTICKTLISQNHKLTAEDLFWFNHVLLNCVFVGLCLNSEECLAEMLEVSRQTMVSTHDFHKMPLYFMYQWKYFITIDNDIKSAENAYQQSIMFSKMIDDKHLIKKLELEWQEDITGH

SEQ ID NO: 125 - protein, 957 aa, Streptococcus agalactiae
TTGGTAGAACGTACACTTCGTCCGCAGTATTTAAGAGAGTATATTGGACAAGATAAGGTTAAAGATCAGCTAAAAATATTTATTGAAGCTGCTAAATTGCGTGATGAGTCATTGGATCATGTGTTATTATTTGGCCCTCCTGGTTTAGGGAAAACAACCATGGCATTTGTAATTGCTAATGAGTTGGGTGTCAATCTCAAACAAACATCAGGTCCCGCAATTGAAAAATCAGGGGATTTAGTAGCCATTTTAAATGATTTAGAACCAGGTGATGTTCTTTTTATTGATGAAATTCATCGTATGCCGATGGCGGTTGAAGAGGTACTTTATAGTGCAATGGAAGACTTCTATATTGACATTATGATCGGTGCAGGAGAAACTAGTAGAAGTGTTCATCTAGATTTGCCGCCCTTTACCTTAATTGGTGCAACGACACGTGCAGGTATGTTATCTAATCCCTTACGTGCTCGCTTTGGTATTACAGGGCATATGGAGTATTATGAAGAAAATGATTTGACAGAAATTATTGAGCGTACAGCAGACATTTTTGAAATGAAAATTACTTATGAAGCTGCTTCTGAATTAGCGCGTCGCAGTCGTGGAACGCCACGTATCGCTAACCGTTTATTGAAACGTGTTCGAGATTATGCTCAAATCATGGGAGATGGTTTGATAGATGACAATATTACAGATAAAGCATTAACGATGTTAGATGTTGATCACGAGGGGCTTGATTACGTCGATCAAAAAATCTTAAGAACCATGATTGAAATGTATAATGGAGGTCCTGTTGGTTTAGGAACTCTATCCGTTAATATTGCTGAAGAACGAGATACTGTTGAAGACATGTACGAACCTTATTTAATTCAAAAAGGTTTTATTATGCGTACCCGTACCGGTCGTGTAGCTACGGTTAAGGCATATGAACATTTAGGTTATCAGCGATTTGATAAATAA

SEQ ID NO: 126 - protein, 318 aa, Streptococcus agalactiae
MVERTLRPQYLREYIGQDKVKDQLKIFIEAAKLRDESLDHVLLFGPPGLGKTTMAFVIANELGVNLKQTSGPAIEKSGDLVAILNDLEPGDVLFIDEIHRMPMAVEEVLYSAMEDFYIDIMIGAGETSRSVHLDLPPFTLIGATTRAGMLSNPLRARFGITGHMEYYEENDLTEIIERTADIFEMKITYEAASELARRSRGTPRIANRLLKRVRDYAQIMGDGLIDDNITDKALTMLDVDHEGLDYVDQKILRTMIEMYNGGPVGLGTLSVNIAEERDTVEDMYEPYLIQKGFIMRTRTGRVATVKAYEHLGYQRFDK

SEQ ID NO: 127 - protein, 438 aa, Streptococcus agalactiae
ATGAAGAAAGTCTGTTTTGTTTGTCTTGGAAATATCTGCCGTAGCCCGATGGCTGAGTTTGTTATGGCGAATTTAGATAAGGAGGATAGCCTCTTGGTTGAGAGTCGTGCGACTTCAACATGGGAGCATGGAAATCCTATACATAGGGGAACGCAAGCGATTTTGCAGCGTTATCAAATTCCTTACATTAACGATAAAGGGTCACAACCTATTTCTAAAGACGATTTAGCATATTTTGATTATATCATCGGTATGGATGAGCAAAATGTCAAGGATTTAAAAGCTCTATCACAAGGAACCTATGATGATAAGATTAGTCTTTTTTGTGATGGTGGTGTTCCTGATCCATGGTATACTGGTGATTTTGAGGAAACCTATCGTCTAGTCAATGATGGCTGTAAACAGTGGTTAACGCTAATAAATAATAGTAGAGATTAA

SEQ ID NO: 128 - protein, 145 aa, Streptococcus agalactiae
MKKVCFVCLGNICRSPMAEFVMANLDKEDSLLVESRATSTWEHGNPIHRGTQAILQRYQIPYINDKGSQPISKDDLAYFDYIIGMDEQNVKDLKALSQGTYDDKISLFCDGGVPDPWYTGDFEETYRLVNDGCKQWLTLINNSRD

SEQ ID NO: 129 - protein, 381 aa, Streptococcus agalactiae
ATGAAGAATTTTAAAATAACACGAACTCATCTAGAAATATTATCTTTGATAATTATTGTTGTTTTTGGTTTATCAGTATTTACCTTAACGACTTCTAGTCAAGGAGTCTTTAGCTATGATGGCGGCAAGATAAAATATGTGGGCTCTATTGTTAATCACCATATGACTGGTAAAGGTAAATTAACCTATGAGAATGGGGATTACTATAAGGGCGATTTTGTAAATGGAGTCTTTGAAGGGAAAGGAACATTTGTTTCAGTTCATGGCTGGTCTTATACAGGTGACTTTAAAAAAGGTCAACCTGATGGACAAGGTCGCCTCAATGCTAAAAATAAGAAAGTCTATAAGGGGACATTTAAACAGGGGATTTATCAAAAATGA

SEQ ID NO: 130 - protein, 126 aa, Streptococcus agalactiae
MKNFKITRTHLEILSLIIIVVFGLSVFTLTTSSQGVFSYDGGKIKYVGSIVNHHMTGKGKLTYENGDYYKGDFVNGVFEGKGTFVSVHGWSYTGDFKKGQPDGQGRLNAKNKKVYKGTFKQGIYQK

SEQ ID NO: 131 - DNA, 1779 bp, Streptococcus agalactiae
atgagaataaaatggttttctttggtacgtataacaggactactacttgttttactttaccatttctttaagaatagttttccaggaggatttgttggcgttgacatcttctttacattttctggttttctgattacggccttattgattgatgaattttctaaaacgaaaaaaattgattttgttagtttttgtcgtagacgtttttaccgtattttcccaccattagtattgatggttttggtgacaataccttttgtatttctggttaaaagcgattttagagcaagtattggctctcaaattatgactgctttaggttttaccagcaacttttacgaaatcttgactggtggtaactacgaaagtcaatttatccctcacttatttgtgcatacctggagtctttctattgaagtccatttttatgttttatggggcttaacggtatggctcttatcgaaaagatcaaaagatcaaaagcaattgagggggactttgttccttatttccatgggaatttttggagtcagcttccttaccatgtttgttagagcctttttcgttgataatttttcaacgatatatttctctacattatcacatatatttccgttctttttaggagcgatggtggctacaatatctggtattcgagagattaccggacgattcaagaaaaatatcaaaaatctgactttgaagcataatttaatcatgatgggtagtgcttttgctggtctaatgattttaacttttgcacttgattttgataatcggctaacatatctttttggttttgtattgtctagcatttttgctagtgtaatgatttacaatgcacgtattttacacgagcatacaccagatatttcagaaccttttgtgattacttatcttgctgatatcagttacggtatgtacctttttcattggccattttatattatttttagtcgtttatccccaaactggatagctgttattttgacagtagtattatcagcagtcttctcaacattatcattttatatcattgaaccttttattttaggtagaaaacctaaattccttgattatgaatttgacttgttgccttacaaaaagtggttatttagtatcggaggggtactaactcttattactgtagtgacaatgttgacagctccaagtataggtagttttgagacagaattattgcagaattcgttacaacaagctagaacaaatactaaccgaacacatacactagccgcaggggatgcaggtgctcttagtgatgtgacagtaatcggagattcagttgccttaaggtcaagtgctgcttttaataaattgttaccagaagtacaattagatgctgcggtgagtcgtaattttagtaaatcatttgatatttttgaaaaccgtattcaaaataaagccttgtccaaaattgttgttttggcagttggtgtgaattcattagataactacaagacagacttgagccaatttattaaatctttgcctaagggacaccgtttgattatagtaacaccttataatgctaaaaatatgagtcaagttacgacagtgcgtgattatgaactctcgctaatgaaaaaatataattacataacggttgctgactggtataaggttgcgacagaacatccagaaatctggggaaatacagatggtgtgcattatagtgatagcgatactacaggggctgatttatatgttagtaacgtcaaaaaagctattcaaaaatcagctcaacgagctgcaaaataa

SEQ ID NO: 132 - protein, 592 aa, Streptococcus agalactiae
MRIKWFSLVRITGLLLVLLYHFFKNSFPGGFVGVDIFFTFSGFLITALLIDEFSKTKKIDFVSFCRRRFYRIFPPLVLMVLVTIPFVFLVKSDFRASIGSQIMTALGFTSNFYEILTGGNYESQFIPHLFVHTWSLSIEVHFYVLWGLTVWLLSKRSKDQKQLRGTLFLISMGIFGVSFLTMFVRAFFVDNFSTIYFSTLSHIFPFFLGAMVATISGIREITGRFKKNIKNLTLKHNLIMMGSAFAGLMILTFALDFDNRLTYLFGFVLSSIFASVMIYNARILHEHTPDISEPFVITYLADISYGMYLFHWPFYIIFSRLSPNWIAVILTVVLSAVFSTLSFYIIEPFILGRKPKFLDYEFDLLPYKKWLFSIGGVLTLITVVTMLTAPSIGSFETELLQNSLQQARTNTNRTHTLAAGDAGALSDVTVIGDSVALRSSAAFNKLLPEVQLDAAVSRNFSKSFDIFENRIQNKALSKIVVLAVGVNSLDNYKTDLSQFIKSLPKGHRLIIVTPYNAKNMSQVTTVRDYELSLMKKYNYITVADWYKVATEHPEIWGNTDGVHYSDSDTTGADLYVSNVKKAIQKSAQRAAK

SEQ ID NO: 133 - DNA, 2643 bp, Streptococcus agalactiae
atgactgaaaaaactaaagcagtagaaactacagatgttgctcttgcaattgatacattggttcaaaatggtttaaaagcacttgatgagatgcgtcaacttaatcaagaacaagttgattatattgtagctaaagcttctgttgcagccttggatgcccatggagaacttgctcttcatgcagtagaagaaactggtcgtggtgtctttgaagataaagcgacaaaaaatttatttgcatgtgaacacgtcgttaacaacatgcgtcatacaaagacagtgggagttattgaagaagacgatgtcacaggcttgacattaattgctgaaccagtgggagttgtctgtggtatcacgccaacaaccaacccaacttcaactgctattttcaagtcattaatctctcttaaaacacgtaatccaattatttttgccttccacccatcagcacaagaatcatcagcacatgcagcacgtattgttcgtgatgctgctattgctgctggagctcctgaaaattgtgtccaatggattgaacaaccatcaattgatgcaactaatgctttgatgaaccatgatggtattgccactatccttgcgacaggtggtaatgcgatggttaaagctgcctactcatgtgggaaacctgcccttggtgtaggtgctgggaatgttccagcttatgttgaaaaatcagctaatatccgacaagccgctcacgatattgttatgtctaaatcatttgataacggtatggtatgtgcatcagaacaggctgttattattgataaagaaatttataaagaatttgttgaagaatttaaatcttatcatacctatttcgttaataagaaagaaaaagctcttcttgaagaattctgttttggtgcaaaagcaaatagcaaaaactgtgctggtgcaaaattaaatccaaatattgttggaaaatcagcagtttggattgctgaacaagctggatttactgttccagaaggaacaaatattcttgccgcagaatgtactgaagttagtgaaaaagaacctttgacacgtgaaaaactatcacctgttattgcagtattgaaagctgaatctacagaagatggtgttgaaaaagctcgtcaaatggttgagtttaatggtctagggcactcagctgctattcatacaaaagatgcagacttagctcgtgaatttggaactagaattcgtgctatccgtgttatttggaattctccttctacttttggtggtattggggatgtttacaatgctttcttgccatcattgactcttggttgtggttcgtatggacgtaactcagttggtgataacgttagtgctataaatctcttgaatatcaaaaaagtaggaagacgtagaaataatatgcaatggtttaaagtcccttcaaaaacatacttcgaacgtgattctattcaatatttgcaaaaatgtcgcgatgttgaacgtgtcatgattgttacagatcacgccatgkttgagcttggtttcttggatcgtatcattgaacaacttgatcttcgtcgcaataaagttgtttatcagatttttgctgaagtagaaccagatccagacattacaacagtaatgaaaggaacagatttgatgcgtaccttcaaaccagacactattattgcattaggtggtggttctcctatggatgctgcgaaagttatgtggctcttctatgaacaaccagaagttgatttccatgacctcgttcaaaaattcatggatatccgtaaacgtgcgttcaaattcccagaacttggtaagaaaacaaaatttgttgctattccaacaacttctggaacaggttctgaagtgacaccatttgccgttatctctgacaaagcaaataatcgtaaatatccaatcgctgattattcattaacaccaactgtagctatcgttgatccggcccttgttatgactgttcctggttttattgcggctgatacgggtatggatgtattgacacatgcaacagaggcttatgtttcacagatggcaaatgattatacagacggacttgctcttcaagcaattaaaattgtgtttgactacttagaacgctcagtaaaagatgctgattttgaagcacgtgaaaagatgcacaatgcgtcaactatggcaggtatggctttcgccaatgcattcttaggtatttctcactcaatggcgcataaaattggcgcacaattccataccgtacacggacgtacaaatgcaattcttttgccgtatgttatccgctataatggaactcgtccagctaaaacagcaacatggcctaagtacaattactatcgtgctgacgaaaagtatcaagatatcgctaaattactcggcttaccagcagcaacaccagaagaagctgtcgaatcatatgcaaaagctgtgtatgaccttggaacacgtttaggtattaagatgaatttccgcgaccaaggcattgatgaaaaagaatggaaagaaaaatctcgtgaactagctttcttagcatatgaagatcaatgttcaccagcaaatccacgccttccgatggtagatcacatgcaagaaatcatcgaagatgcttattatggttatgaggaacgtccaggacgtcgtaagtaa

SEQ ID NO: 134 - protein, 880 aa, Streptococcus agalactiae
  VARIANT 501: Xaa = Any Amino Acid
MTEKTKAVETTDVALAIDTLVQNGLKALDEMRQLNQEQVDYIVAKASVAALDAHGELALHAVEETGRGVFEDKATKNLFACEHVVNNMRHTKTVGVIEEDDVTGLTLIAEPVGVVCGITPTTNPTSTAIFKSLISLKTRNPIIFAFHPSAQESSAHAARIVRDAAIAAGAPENCVQWIEQPSIDATNALMNHDGIATILATGGNAMVKAAYSCGKPALGVGAGNVPAYVEKSANIRQAAHDIVMSKSFDNGMVCASEQAVIIDKEIYKEFVEEFKSYHTYFVNKKEKALLEEFCFGAKANSKNCAGAKLNPNIVGKSAVWIAEQAGFTVPEGTNILAAECTEVSEKEPLTREKLSPVIAVLKAESTEDGVEKARQMVEFNGLGHSAAIHTKDADLAREFGTRIRAIRVIWNSPSTFGGIGDVYNAFLPSLTLGCGSYGRNSVGDNVSAINLLNIKKVGRRRNNMQWFKVPSKTYFERDSIQYLQKCRDVERVMIVTDHAMXELGFLDRIIEQLDLRRNKVVYQIFAEVEPDPDITTVMKGTDLMRTFKPDTIIALGGGSPMDAAKVMWLFYEQPEVDFHDLVQKFMDIRKRAFKFPELGKKTKFVAIPTTSGTGSEVTPFAVISDKANNRKYPIADYSLTPTVAIVDPALVMTVPGFIAADTGMDVLTHATEAYVSQMANDYTDGLALQAIKIVFDYLERSVKDADFEAREKMHNASTMAGMAFANAFLGISHSMAHKIGAQFHTVHGRTNAILLPYVIRYNGTRPAKTATWPKYNYYRADEKYQDIAKLLGLPAATPEEAVESYAKAVYDLGTRLGIKMNFRDQGIDEKEWKEKSRELAFLAYEDQCSPANPRLPMVDHMQEIIEDAYYGYEERPGRRK

SEQ ID NO: 135 - DNA, 969 bp, Streptococcus agalactiae
  misc_feature 8, 9, 10, 11, 12: n = A,T,C or G
atgaatgnnnnnccaaaagttggtcatggtgaagcacttgtaaaagtagaatactgtggtgtatgccatactgatttacacgttgcacatggagatttcggccaggtaccaggacgcattttgggtcacgaaggcattggtatagtagaagaaattggagaaggcgtaacgtctttgagggttggtgatcgtgtctctattgcatggttctttgaagggtgcggtcattgcgaatactgtactacaggacgtgagacactttgtcgtagtgttaaaaatgctggatacagtgttgatggtggtatgagtgaatacgctattgttaccgcggactatgcggttaaggttcctgagggattagacccagctcaagcatcatcaatcacttgtgctggagtaacaacatacaaggctatcaaagaagctggagctgctcctggtcagtggattgcagtgtatggtgcaggtggtcttggaaacttagcagtccaatatgcaaaaaaagtattcaatgctcatgttgtagctgttgatattaacgcagataaacttcaattagctaaagaggttggagcagatttgacagttaatggcaaagaaataaaagatgttgcggcatatattcaagaaaagacaggcggttgtcatggagtggttgtgactgctgtttctaaagttgcgtttaatcaggcgattgacagcgttcgtgctggaggtacagtggtagctgtcggtcttccatcagaatatatggaattgagtattgtaaaaacagtacttgatgggattcgtgtggttggttccttagttggaactcgtaaagacttagaagaagccttcgcatttggagcagaaggcttggtagtaccggtggttgaaaaagtgcctgtggatacagctcctcaagtattcgatgaaatggaaagaggattgattcaaggacgtaaagttcttgactttacaaagtga

SEQ ID NO: 136 - protein, 322 aa, Streptococcus agalactiae
  VARIANT 3, 4: Xaa = Any Amino Acid
MNXXPKVGHGEALVKVEYCGVCHTDLHVAHGDFGQVPGRILGHEGIGIVEEIGEGVTSLRVGDRVSIAWFFEGCGHCEYCTTGRETLCRSVKNAGYSVDGGMSEYAIVTADYAVKVPEGLDPAQASSITCAGVTTYKAIKEAGAAPGQWIAVYGAGGLGNLAVQYAKKVFNAHVVAVDINADKLQLAKEVGADLTVNGKEIKDVAAYIQEKTGGCHGVVVTAVSKVAFNQAIDSVRAGGTVVAVGLPSEYMELSIVKTVLDGIRVVGSLVGTRKDLEEAFAFGAEGLVVPVVEKVPVDTAPQVFDEMERGLIQGRKVLDFTK

SEQ ID NO: 137 - DNA, 1491 bp, Streptococcus agalactiae
atggcaatagtatatcaatcaacacgtgatgctagtaataaagtgacagctagtcaagcgattctaaagggattagctgacgatggaggactctttacccccatcacatttccaaaagttgatttagatttcactaaacttaaggatgcttcctaccaagaagtggctaaactcgttttgtcagctttttttgatgattttactgaacaagaattggattactgtattagtcaagcttatgatactaaatttgatacaactgaaatagccccgatagtaaagattggagaccggtatcaccttgaattatttcacggtcctacaattgcatttaaagatatggctttatccattcttccttatttgctaacaacagcagccaaaaaacaaggggttgataataaaatcgttattttaacagcaacatcaggtgacactggcaaggcagcgatggcaggttttgcagatgttccaggaactgagattattgtcttttatcctaaaaatggtgttagttatatccaagaattgcagatgataacacaagccggacaaaatactcatgttgttgcgattgaaggaaattttgatgatgcacagacttcagttaaagaaatgttcaataattcccttcttcgattaaaattatcacagcagcatatgcagttatcatcagccaattcaatgaacatcggtcgccttgttcctcaaattgtttactatatatatgcatatgctcaattagttaagtcaaaggaaatctcaattggtcaaccaattaattttagtgtacctacaggaaattttggtaatattttagcagcatattatgctagtcaaattggattacctgttaccaaactcatttgtgcctcaaatgataataacgttctaacagatttttttaagacacaaacctacgataaaaatcgagaatttaaagtgacatcaagtccctctatggatattttggtctcctctaatctagaacgattaatctttcaccttttaggcgatgatgcagaaacgactaaaaaattaatggaagatttagtgactactggggagtatgccttagaggctaggcaagcaaatattttagagagctttgtagcgggatttgcgacagaacaatttgttgaattagacatcaaacatttatttgaccagtatcagtatatagaggatccgcatacagctgtagcatcagctgtttatcaagcttatcagacagaaactaaagatcaaactccagcagtaattgtgtcaacagcaagtccttataagttcccgtgtgttgttacaaaggctattacaaataaagaagagatacaggatttcgctgctatttcaatcttaaacgatttgtcaggtgtttctttacctaaggcggttacagatctacaaaaggccgaagtaatccatagaacggtagtacctacctcaaatatgcgagaaacggttgaagagtgtctaggtttgaaacaataa

SEQ ID NO: 138 - protein, 496 aa, Streptococcus agalactiae
MAIVYQSTRDASNKVTASQAILKGLADDGGLFTPITFPKVDLDFTKLKDASYQEVAKLVLSAFFDDFTEQELDYCISQAYDTKFDTTEIAPIVKIGDRYHLELFHGPTIAFKDMALSILPYLLTTAAKKQGVDNKIVILTATSGDTGKAAMAGFADVPGTEIIVFYPKNGVSYIQELQMITQAGQNTHVVAIEGNFDDAQTSVKEMFNNSLLRLKLSQQHMQLSSANSMNIGRLVPQIVYYIYAYAQLVKSKEISIGQPINFSVPTGNFGNILAAYYASQIGLPVTKLICASNDNNVLTDFFKTQTYDKNREFKVTSSPSMDILVSSNLERLIFHLLGDDAETTKKLMEDLVTTGEYALEARQANILESFVAGFATEQFVELDIKHLFDQYQYIEDPHTAVASAVYQAYQTETKDQTPAVIVSTASPYKFPCVVTKAITNKEEIQDFAAISILNDLSGVSLPKAVTDLQKAEVIHRTVVPTSNMRETVEECLGLKQ

SEQ ID NO: 139 - DNA, 1218 bp, Streptococcus agalactiae
atgctcatgggagtagttgataattatctagtggctcagttaggtgttgtagcagtatcaggtgtttcagttgctaataatataattactatttatcaagctatttttatagctttaggggcgagtatagcaagtctattggccaagtcgttagcaggtagtaagaaggatgatgcaatttcagtatgttctcaagccatttttctaacattactgataggggcagtattaggaattatctcgattgtttttggacaaactttctttaaacttttagggacaacaaaaagtgtcgcacaagttggtggtttatatttagcaattgtgggtggaggtgttgttactttaggaatgttaaccaccctaggctcatttttacgtgtgcaagggcaacctcgtttaccaatgtatgtcagtatttttgtcaatttcctcaatgcagtcttatcaggttttgctatttttgagtggcgctatggtttggtcggagtggcagtatcaactcttatcgcaagattaattggtatttgtatccttgcgaagtatcttcctattaaaaagataataaaaagaatgacttggaaaatcagtgcacaaatttggaatcttgccttaccatcagcaggagaacgtctgatgatgcgagctggagatgttgttatagttgctattgttgttcagttaggtacaaatgttgtagcgggaaatgctattggagaaaccttgacacaatttaattatatgccaggacttggcatcgcaactgctacaattatcctaactgcaaaatatgtaggacaaaaaaacagagaatctatagaagaaactattcaaagttcgtattatattggcttagttctaatgatccttatatcaagttttatgcttcttgcaggcaaaccattgacacagttatttacaaataatccttctgccattaaaggaagtttgattgttattttgctatctttcgtaggagtacctgctactattgggaccttggtttatacagcagcttggcaaggattaggaaatgctaaactcccattttacacaacgactataggcatgtggttaatcagagtagttcttggttatttattaggaatagtttttgaattaggtttgcttggggtttggatggctacgatagcagacaatatctttaggtggctgtttttgaaagttcactatcatcgatatattcaaaaaatgtaa

SEQ ID NO: 140 - protein, 405 aa, Streptococcus agalactiae
MLMGVVDNYLVAQLGVVAVSGVSVANNIITIYQAIFIALGASIASLLAKSLAGSKKDDAISVCSQAIFLTLLIGAVLGIISIVFGQTFFKLLGTTKSVAQVGGLYLAIVGGGVVTLGMLTTLGSFLRVQGQPRLPMYVSIFVNFLNAVLSGFAIFEWRYGLVGVAVSTLIARLIGICILAKYLPIKKIIKRMTWKISAQIWNLALPSAGERLMMRAGDVVIVAIVVQLGTNVVAGNAIGETLTQFNYMPGLGIATATIILTAKYVGQKNRESIEETIQSSYYIGLVLMILISSFMLLAGKPLTQLFTNNPSAIKGSLIVILLSFVGVPATIGTLVYTAAWQGLGNAKLPFYTTTIGMWLIRVVLGYLLGIVFELGLLGVWMATIADNIFRWLFLKVHYHRYIQKM

SEQ ID NO: 141 - protein, 309 aa, Streptococcus agalactiae
ATGGCAAACAAAAAAATCCGTATCCGTTTGAAAGCGTACGAACACCGTACACTTGATACAGCGGCAGAAAAAATCGTTGAAACTGCAACACGTACAGGTGCTACAGTTGCTGGACCAGTTCCGCTTCCAACTGAACGCAGTCTTTACACAATTATTCGTGCGACTCACAAATATAAAGATTCTCGCGAACAGTTTGAAATGCGTACACACAAACGTTTGGTAGACATCATCAACCCAACACAAAAAACTGTTGATGCTTTGATGAAACTTGATCTTCCAAGTGGTGTCAACGTAGAAATCAAACTTTAA

SEQ ID NO: 142 - protein, 102 aa, Streptococcus agalactiae
MANKKIRIRLKAYEHRTLDTAAEKIVETATRTGATVAGPVPLPTERSLYTIIRATHKYKDSREQFEMRTHKRLVDIINPTQKTVDALMKLDLPSGVNVEIKL

SEQ ID NO: 143 - protein, 627 aa, Streptococcus agalactiae
ATGACAAAAGGAATCTTAGGGAAAAAAGTGGGAATGACTCAAATCTTCACTGAATCAGGCGAATTCATCCCTGTTACTGTCATTGAAGCAACTCCAAACGTTGTGCTTCAAGTTAAAACTGTTGAAACAGACGGTTACGAAGCAGTTCAGGTTGGTTTTGATGACAAACGTGAAGTATTGAGTAACAAACCTGCCAAAGGCCATGTTGCAAAAGCAAACACAGCTCCTAAGCGCTTCATTCGTGAATTCAAAAACATTGAAGGCTTAGAAGTTGGTGCAGAATTATCTGTAGAACAATTTGAAGCTGGTGATGTTGTTGACGTCACAGGGACATCAAAAGGTAAAGGTTTCCAAGGTGTTATCAAACGCCATGGTCAATCACGTGGTCCTATGGCTCACGGTTCTCGTTACCATCGTCGTCCAGGTTCTATGGGACCTGTTGCGCCTAACCGCGTTTTCAAAAACAAACGCTTGGCAGGACGTATGGGTGGTAACCGTGTAACAGTTCAAAACCTTGAAATTGTACAAGTTATCCCAGAGAAAAACGTTGTCCTCATCAAAGGTAACGTACCAGGTGCTAAGAAATCTCTTATCACTATCAAATCAGCAGTTAAAGCTGCTAAATAA

SEQ ID NO: 144 - protein, 208 aa, Streptococcus agalactiae
MTKGILGKKVGMTQIFTESGEFIPVTVIEATPNVVLQVKTVETDGYEAVQVGFDDKREVLSNKPAKGHVAKANTAPKRFIREFKNIEGLEVGAELSVEQFEAGDVVDVTGTSKGKGFQGVIKRHGQSRGPMAHGSRYHRRPGSMGPVAPNRVFKNKRLAGRMGGNRVTVQNLEIVQVIPEKNVVLIKGNVPGAKKSLITIKSAVKAAK

SEQ ID NO: 145 - protein, 624 aa, Streptococcus agalactiae
ATGGCAAACGTTAAACTATTTGACCAAACTGGTAAAGAAGTTAGCTCAGTTGAGCTTAACGAAGCTATCTTCGGTATTGAACCAAACGAATCAGTTGTTTTTGATGTTGTAATCAGCCAACGCGCTAGCCTTCGCCAAGGAACTCACGCGGTTAAAAACCGTTCAGCAGTATCTGGTGGTGGACGTAAACCATGGCGTCAAAAAGGAACTGGACGCGCTCGTCAAGGTTCTATCCGCTCACCACAATGGCGTGGTGGTGGTGTTGTCTTTGGACCAACTCCACGTTCATACGGCTACAAACTTCCACAAAAAGTTCGTCGCCTTGCGTTGAAATCAGTTTATTCAGCAAAAGTTGCTGAAGATAAATTTGTAGCTGTAGAAAACCTTTCATTTGCAGCTCCAAAAACTGCTGAATTTGCGTCAGTTCTTTCAGCACTTAGCATTGATTCAAAAGTACTTGTAATCCTTGAAGAAGGTAACGAATTTGCTGCACTTTCAGCGCGTAACCTTCCAAACGTTACAGTTGCTACTGCAACTACTGCAAGTGTTCTTGATATCGTTAACGCAGACAAACTTCTTGTTACTAAAGAAGCAATCTCTACAATCGAGGGGGTTCTTGCATAA

SEQ ID NO: 146 - protein, 207 aa, Streptococcus agalactiae
MANVKLFDQTGKEVSSVELNEAIFGIEPNESVVFDVVISQRASLRQGTHAVKNRSAVSGGGRKPWRQKGTGRARQGSIRSPQWRGGGVVFGPTPRSYGYKLPQKVRRLALKSVYSAKVAEDKFVAVENLSFAAPKTAEFASVLSALSIDSKVLVILEEGNEFAALSARNLPNVTVATATTASVLDIVNADKLLVTKEAISTIEGVLA

SEQ ID NO: 147 - protein, 297 aa, Streptococcus agalactiae
ATGAATTTGTATGACGTAATCAAAAAACCTGTTATCACTGAGAAATCAATGGTTGCTCTTGAAGCAGGGAAATATACATTTGAAGTTGACACACGTGCACACAAACTTTTGATCAAACAAGCTGTTGAAGCTGCATTTGACGGAGTAAAAGTTGCAAGTGTAAACACTGTGACAGTTAAACCCAAAGCAAAACGTGTTGGTCGTTACACAGGTTTCACTTCAAAAACTAAAAAAGCTATTATCACTCTTACAGCTGATTCAAAAGCAATCGAGTTGTTTGCTGCTGAAGCTGAATAA

SEQ ID NO: 148 - protein, 98 aa, Streptococcus agalactiae
MNLYDVIKKPVITEKSMVALEAGKYTFEVDTRAHKLLIKQAVEAAFDGVKVASVNTVTVKPKAKRVGRYTGFTSKTKKAIITLTADSKAIELFAAEAE

SEQ ID NO: 149 - protein, 834 aa, Streptococcus agalactiae
GTGGGTATTAAAGTTTATAAACCAACGACAAATGGCCGTCGTAATATGACTTCTTTGGATTTTGCAGAAATCACTACAAACACTCCTGAGAAATCATTGCTTGTTTCACTAAAGAATAAAGCAGGACGTAACAACAACGGACGTATTACTGTTCGTCACCAAGGTGGTGGACACAAACGTCATTACCGTTTGATTGACTTCAAACGTAATAAAGATGGTGTTGAAGCAGTTGTTAAAACAATTGAATACGATCCAAATCGTACTGCAAATATTGCTCTTGTACACTATACTGATGGTGTTAAAGCTTACATCCTTGCGCCTAAAGGCCTTGAAGTAGGTCAACGCATTATTTCTGGTCCAGAAGCAGACATCAAAGTTGGTAACGCACTTCCGCTTGCTAACATTCCAGTCGGTACAGTTATCCATAATATTGAATTGCAACCAGGTAAAGGTGCTGAATTGATTCGTGCCGCTGGTGCTTCTGCTCAAGTACTTGGTCAAGAAGGTAAATATGTTCTTGTTCGCCTTCAATCAGGTGAAGTACGTATGATCCTTGGTACTTGCCGTGCAACAATTGGTACTGTTGGTAATGAACAGCAATCACTTGTTAACATTGGTAAAGCAGGACGTAATCGTTGGAAAGGTGTTCGCCCTACAGTTCGTGGTTCTGTAATGAACCCTAACGATCACCCACACGGTGGTGGTGAAGGTAAAGCACCAGTTGGTCGTAAAGCACCATCTACTCCATGGGGTAAACCTGCGCTTGGACTTAAAACTCGTAATAAGAAAGCTAAATCAGACAAACTTATTGTTCGTCGTCGTAACCAAAAATAA

SEQ ID NO: 150 - protein, 277 aa, Streptococcus agalactiae
MGIKVYKPTTNGRRNMTSLDFAEITTNTPEKSLLVSLKNKAGRNNNGRITVRHQGGGHKRHYRLIDFKRNKDGVEAVVKTIEYDPNRTANIALVHYTDGVKAYILAPKGLEVGQRIISGPEADIKVGNALPLANIPVGTVIHNIELQPGKGAELIRAAGASAQVLGQEGKYVLVRLQSGEVRMILGTCRATIGTVGNEQQSLVNIGKAGRNRWKGVRPTVRGSVMNPNDHPHGGGEGKAPVGRKAPSTPWGKPALGLKTRNKKAKSDKLIVRRRNQK

SEQ ID NO: 151 - DNA, 279 bp, Streptococcus agalactiae
atgggacgtagtcttaaaaaaggacctttcgtcgacgagcatttaatgaaaaaagttgaagctcaagcaaatgacgaaaagaaaaaagtaatcaaaacttggtcacgtcgttcaacgattttcccaagtttcatcggatacacaatcgcagtttatgatggacgtaaacatgttcctgtttatatccaagaggacatggtaggtcacaaacttggtgaatttgcaccaacacgtacttacaaaggtcacgcagctgacgacaagaaaacacgtcgttaa

SEQ ID NO: 152 - protein, 92 aa, Streptococcus agalactiae
MGRSLKKGPFVDEHLMKKVEAQANDEKKKVIKTWSRRSTIFPSFIGYTIAVYDGRKHVPVYIQEDMVGHKLGEFAPTRTYKGHAADDKKTRR

SEQ ID NO: 153 - DNA, 345 bp, Streptococcus agalactiae
atggcagaaattacttcagctaaagcaatggctcgtacagtgcgtgtttcacctcgtaaaacacgtttagtacttgatcttatccgtggtaagaatgttgctgacgcaatcgcaatcttaaaattcactccaaacaaagcagctcgtgttattgagaaaactcttaactcagcaattgcaaatgcagaaaacaactttggtttggaaaaagcaaacttggtagtatctgaaacattcgctaacgaaggaccaacaatgaaacgtttccgtccacgtgcgaaaggttcagcttcaccaatcaacaaacgtacaactcacgtaactgtagttgtatcagaaaaataa

SEQ ID NO: 154 - protein, 114 aa, Streptococcus agalactiae
MAEITSAKAMARTVRVSPRKTRLVLDLIRGKNVADAIAILKFTPNKAARVIEKTLNSAIANAENNFGLEKANLVVSETFANEGPTMKRFRPRAKGSASPINKRTTHVTVVVSEK

SEQ ID NO: 155 - DNA, 627 bp, Streptococcus agalactiae
atgcgtgtcggaatcatccgtgactgggatgcgaaatggtatgctgaaaaagaatacgcggattaccttcatgaagatcttgcaatccgtaaattcattaataaagaattagctgacgcatcagtttcaactattgaaattgaacgtgcagtaaacaaagttattgtttcacttcacactgctaaaccaggtatggttatcggtaaaggtggagcaaacgttgacgctcttcgtggtcaacttaacaaattaactggaaaacaagtacacatcaacatcattgaaatcaaacaacctgatttagatgctcaccttgttggtgaaaatattgctcgtcaattagagcaacgtgttgctttccgtcgtgctcaaaaacaagcaatccaacgtacaatgcgtgcaggagctaaaggtattaaaactcaagtttctggtcgtttgaacggtgctgatatcgctcgtgctgaaggttattcagaaggaactgttccgcttcacacgcttcgtgctgatatcgactatgcttgggaagaagctgacacaacttatggtaaacttggcgttaaagtttggatttaccgtggagaagttcttccagctcgtaaaaacactaaaggaggcaaataa

SEQ ID NO: 156 - protein, 208 aa, Streptococcus agalactiae
MRVGIIRDWDAKWYAEKEYADYLHEDLAIRKFINKELADASVSTIEIERAVNKVIVSLHTAKPGMVIGKGGANVDALRGQLNKLTGKQVHINIIEIKQPDLDAHLVGENIARQLEQRVAFRRAQKQAIQRTMRAGAKGIKTQVSGRLNGADIARAEGYSEGTVPLHTLRADIDYAWEEADTTYGKLGVKVWIYRGEVLPARKNTKGGK

SEQ ID NO: 157 - DNA, 414 bp, Streptococcus agalactiae
atgttagtacctaaacgtgttaaacaccgtcgcgaattccgtggaaaaatgcgcggtgaggctaaaggtggtaaagaagtttcattcggtgaatacggacttcaagctacaactagccactggattacaaaccgtcaaatcgaagctgcccgtattgcgatgactcgttacatgaaacgtggtggtaaagtttggattaaaatcttcccacacaaatcatacactgcaaaagctatcggtgtacgtatgggttctggtaaaggggcacctgaaggttgggtagcaccagttaaacgtggtaaagtgatgtttgaaattgctggtgtttctgaagaagttgcacgtgaagcattacgtcttgctagccacaaattaccagttaaatgcaaattcgtaaaacgtgaagcagaataa

SEQ ID NO: 158 - protein, 137 aa, Streptococcus agalactiae
MLVPKRVKHRREFRGKMRGEAKGGKEVSFGEYGLQATTSHWITNRQIEAARIAMTRYMKRGGKVWIKIFPHKSYTAKAIGVRMGSGKGAPEGWVAPVKRGKVMFEIAGVSEEVAREALRLASHKLPVKCKFVKREAE

SEQ ID NO: 159 - DNA, 207 bp, Streptococcus agalactiae
atgaaacttcaagaaattaaagattttgttaaagagcttcgtggattgtctcaagaagaacttgctaagaaagaaaacgaactcaaaaaagaattgtttgatcttcgtttccaagctgcagcaggtcaacttgaaaagactgctcgccttgacgaagttaagaaacaaattgcacgtgttaaaactgtgcaatcagaaatgaaataa

SEQ ID NO: 160 - protein, 68 aa, Streptococcus agalactiae
MKLQEIKDFVKELRGLSQEELAKKENELKKELFDLRFQAAAGQLEKTARLDEVKKQIARVKTVQSEMK

SEQ ID NO: 161 - protein, 261 aa, Streptococcus agalactiae
ATGGAACGTAATCAACGTAAAACTCTTTACGGACGCGTAGTGTCTGACAAGATGGACAAAACAATCACAGTTGTAGTTGAAACTAAACGTAACCACCCAGTCTATGGTAAACGTATCAACTATTCTAAAAAATATAAAGCACATGATGAAAACAACGTTGCTAAAGAAGGCGATATCGTTCGTATCATGGAAACTCGCCCACTTTCAGCTACAAAACGTTTCCGTCTTGTGGAAGTAGTGGAAAAAGCTGTTATTATCTAA

SEQ ID NO: 162 - protein, 86 aa, Streptococcus agalactiae
MERNQRKTLYGRVVSDKMDKTITVVVETKRNHPVYGKRINYSKKYKAHDENNVAKEGDIVRIMETRPLSATKRFRLVEVVEKAVII

SEQ ID NO: 163 - protein, 369 aa, Streptococcus agalactiae
ATGATTCAACAAGAAACTCGCTTGAAAGTTGCTGATAATAGCGGTGCTCGTGAGATCTTGACTATCAAAGTACTTGGTGGTTCAGGACGTAAATTCGCTAACATCGGTGACGTAATCGTTGCTTCTGTAAAACAAGCTACTCCTGGTGGAGCAGTTAAAAAAGGTGATGTGGTTAAAGCTGTTATCGTTCGTACAAAAACTGGTGCACGCCGCCCAGACGGTTCATACATCAAATTTGACGACAATGCTGCTGTAATCATCCGTGACGATAAAACTCCTCGCGGAACTCGTATCTTTGGCCCAGTTGCACGTGAATTGCGTGAAGGTGGCTACATGAAGATCGTTTCATTGGCACCAGAAGTACTTTAA

SEQ ID NO: 164 - protein, 122 aa, Streptococcus agalactiae
MIQQETRLKVADNSGAREILTIKVLGGSGRKFANIGDVIVASVKQATPGGAVKKGDVVKAVIVRTKTGARRPDGSYIKFDDNAAVIIRDDKTPRGTRIFGPVARELREGGYMKIVSLAPEVL

SEQ ID NO: 165 - protein, 306 aa, Streptococcus agalactiae
ATGTTTGTAAAAAAAGGCGACAAAGTTCGCGTTATTGCTGGTAAGGACAAAGGCACTGAAGCTGTAGTTCTTAAAGCTCTTCCAAAAGTAAACAAAGTTGTTGTTGAAGGCGTAGCCCTCATCAAGAAACATCAAAAACCAAATAACGAAAACCCTCAAGGCGCTATCGTTGAAAAAGAAGCTCCAATCCATGTGTCAAACGTTCAAGTTCTTGATAAAAATGGTGTAGCAGGACGTGTTGGTTACAAAGTTGTTGACGGCAAAAAAGTTCGTTACAACAAAAAATCAGGCGAAGTGCTTGATTAA

SEQ ID NO: 166 - protein, 101 aa, Streptococcus agalactiae
MFVKKGDKVRVIAGKDKGTEAVVLKALPKVNKVVVEGVALIKKHQKPNNENPQGAIVEKEAPIHVSNVQVLDKNGVAGRVGYKVVDGKKVRYNKKSGEVLD

SEQ ID NO: 167 - protein, 543 aa, Streptococcus agalactiae
ATGGCAAATCGCTTAAAAGAAAAATATACTAATGAAGTTGTTCCTGCGTTGACAGAAAAATTTAACTATTCATCTGTTATGGCTGTGCCAAAAGTTGAGAAAATCGTTCTTAACATGGGTGTTGGTGATGCTGTATCAAACGCTAAAAATCTTGAGAAAGCTGCTGCTGAGTTAGCACTTATTTCAGGTCAAAAACCACTTATTACTAAAGCTAAGAAATCAATCGCTGGCTTCCGTCTTCGTGAAGGTGTAGCGATCGGTGCAAAAGTTACCCTGCGCGGTGAACGTATGTACGAATTCTTGGATAAATTAGTTTCTGTTTCACTTCCACGTGTACGTGACTTCCATGGTGTTCCAACGAAATCATTTGATGGACGTGGAAACTACACTCTTGGAGTTAAAGAACAATTGATCTTCCCAGAAATCAACTTTGATGACGTTGATAAAGTACGTGGTCTTGATATCGTTATCGTTACTACTGCTAACACTGATGAAGAGTCACGTGAATTGCTAAAAGGCCTTGGAATGCCTTTTGCAAAGTAA

SEQ ID NO: 168 - protein, 180 aa, Streptococcus agalactiae
MANRLKEKYTNEVVPALTEKFNYSSVMAVPKVEKIVLNMGVGDAVSNAKNLEKAAAELALISGQKPLITKAKKSIAGFRLREGVAIGAKVTLRGERMYEFLDKLVSVSLPRVRDFHGVPTKSFDGRGNYTLGVKEQLIFPEINFDDVDKVRGLDIVIVTTANTDEESRELLKGLGMPFAK

SEQ ID NO: 169 - protein, 171 aa, Streptococcus agalactiae
ATGATTGCTAAGAACAAACGCCCAGCGAAGTTCTCTACGCAAGCTTACACTCGTTGTGAAAAATGCGGACGTCCACACTCAGTTTACCGCAAATTCCAACTTTGCCGTGTTTGCTTCCGTGACTTGGCTTATAAAGGTCAAGTACCAGGCGTAACTAAAGCATCTTGGTAA

SEQ ID NO: 170 - protein, 56 aa, Streptococcus agalactiae
MIAKNKRPAKFSTQAYTRCEKCGRPHSVYRKFQLCRVCFRDLAYKGQVPGVTKASW

SEQ ID NO: 171 - DNA, 399 bp, Streptococcus agalactiae
atggttatgactgacccaattgcagactttttaactcgtattcgtaatgctaaccaagcaaaacatgaagtgttagaagtacctgcatcaaacattaaaaaagggattgctgatatccttaaacgtgaaggttttgtaaaaaacgttgaagttattgaagatgacaaacaaggcatcatccgtgtgttccttaaatatggacaaaatggtgaacgtgttatcactaacttgaaacgtatttcaaaaccaggtcttcgtgtttatactaaacatgaagatatgcctaaagttcttaacggacttggtattgcaattgtatcaacttctgaaggtcttttgactgacaaagaagctcgccaaaaaaatattggtggagaagtacttgcatatatttggtaa

SEQ ID NO: 172 - protein, 132 aa, Streptococcus agalactiae
MVMTDPIADFLTRIRNANQAKHEVLEVPASNIKKGIADILKREGFVKNVEVIEDDKQGIIRVFLKYGQNGERVITNLKRISKPGLRVYTKHEDMPKVLNGLGIAIVSTSEGLLTDKEARQKNIGGEVLAYIW

SEQ ID NO: 173 - DNA, 537 bp, Streptococcus agalactiae
atgtcacgtattggtaataaagtaattacattgcctgcaggtgttgaaatcattaacaaggataatgttgttactgtaaaaggacctaaaggccaactcactcgtgagtttaataaaaatattggaatcactgttgaagggactgaagtaacagttactcgtcctaacgactcaaaagaaatgaaaacaattcatggtacaactcgtgcgaacttgaacaacatggttgttggtgtttctgaaggtttcaaaaaagctcttgaaatgcgcggtgttggttaccgtgcacaacttcaaggatcaaaacttgttctttctgttggtaagtctcaccaagacgaagttgaagctccagaaggtgttacttttgaagtgccaactccaacaacaatcaacgtaatcggtatcaacaaagaaagcgttggacaaactgctgcttacgttcgtagcttacgttcaccagaaccatataaaggtaaaggtattcgttacgttggtgaattcgtacgccgtaaagaaggtaaaacaggtaaataa

SEQ ID NO: 174 - protein, 178 aa, Streptococcus agalactiae
MSRIGNKVITLPAGVEIINKDNVVTVKGPKGQLTREFNKNIGITVEGTEVTVTRPNDSKEMKTIHGTTRANLNNMVVGVSEGFKKALEMRGVGYRAQLQGSKLVLSVGKSHQDEVEAPEGVTFEVPTPTTINVIGINKESVGQTAAYVRSLRSPEPYKGKGIRYVGEFVRRKEGKTGK

SEQ ID NO: 175 - DNA, 357 bp, Streptococcus agalactiae
gtgatttcgaaaccagataaaaataaaatccgccaaaaacgccaccgtcgtgttcgcggtaaactctctggaactgctgatcgcccacgtttgaacattttccgttctaatacaggcatctacgctcaagtaattgatgacgtagcgggtgtaacgctcgcaagtgcatcaactcttgataaagaagtttctaacggaacaaaaacagaacaagccgttgttgtcggtaaacttgttgctgaacgcgcagtagctaaaggtatttctgaagtggtgtttgaccgcggtggatatctctatcacggacgtgtaaaagctttggctgactcagctcgtgaaaacggattgaaattctaa

SEQ ID NO: 176 - protein, 118 aa, Streptococcus agalactiae
MISKPDKNKIRQKRHRRVRGKLSGTADRPRLNIFRSNTGIYAQVIDDVAGVTLASASTLDKEVSNGTKTEQAVVVGKLVAERAVAKGISEVVFDRGGYLYHGRVKALADSARENGLKF

SEQ ID NO: 177 - DNA, 495 bp, Streptococcus agalactiae
atggcatttaaagataatgcagtagaacttgaagagcgcgttgttgcgattaaccgcgttacaaaagttgttaaaggtggacgtcgtctacgttttgcagctcttgtagttgttggtgaccgtaatggtcgtgttggttttggtacaggtaaagctcaagaagtaccagaagctattcgcaaagctgttgaagctgctaagaaaaacatggttgaagttcctatggtcggtacaacaattcctcacgaagttcgttcagaatttggtggagcgaaagtattgttgaaaccagctgttgagggtgctggggttgccgctgggggtgctgttcgtgccgtcatcgaattagcaggtgttgcagatattacatctaaatcacttggttcaaacactccaatcaacattgttcgcgcaactgttgagggcttgaaacaattaaaacgtgcagaagaagttgctgctttacgtggcatttctgtttctgacttagcataa

SEQ ID NO: 178 - protein, 164 aa, Streptococcus agalactiae
MAFKDNAVELEERVVAINRVTKVVKGGRRLRFAALVVVGDRNGRVGFGTGKAQEVPEAIRKAVEAAKKNMVEVPMVGTTIPHEVRSEFGGAKVLLKPAVEGAGVAAGGAVRAVIELAGVADITSKSLGSNTPINIVRATVEGLKQLKRAEEVAALRGISVSDLA

SEQ ID NO: 179 - DNA, 180 bp, Streptococcus agalactiae
atggctcaaattaaaattactttgactaagtctccaatcggtcgcaaaccagaacaacgtaaaacagttgttgcccttggacttggtaaattaaactcttcagttgttaaggaagataatgctgccatccgtggtatggttaacgctatctctcacttagtaactgttgaagaagcttaa

SEQ ID NO: 180 - protein, 59 aa, Streptococcus agalactiae
MAQIKITLTKSPIGRKPEQRKTVVALGLGKLNSSVVKEDNAAIRGMVNAISHLVTVEEA

SEQ ID NO: 181 - protein, 441 aa, Streptococcus agalactiae
ATGAAACTTCATGAATTAAAACCTGCAGAAGGATCACGTAAAGTCCGCAATCGTGTGGGTCGCGGTACATCTTCAGGTAATGGTAAAACTTCTGGACGTGGTCAAAAAGGACAAAAAGCGCGTAGTGGTGGTGGAGTACGCCTTGGTTTTGAAGGTGGACAAACTCCATTGTTCCGTCGTATGCCAAAACGTGGGTTCTCAAACATCAATGCAAAAGAATATGCTCTTGTGAACCTTGACCAATTAAATGTCTTTGAAGATGGTACTGAAGTAACTCCAGTTGTTCTTAAAGAAGCTGGAATCGTGCGTGCTGAAAAATCAGGCGTTAAAATTCTTGGTAATGGTGAATTAACTAAGAAATTGTCTGTTAAAGCAGCTAAATTTTCTAAATCTGCTGAAGCAGCTATCACTGCTAAAGGTGGTTCAATCGAAGTCATCTAA

SEQ ID NO: 182 - protein, 146 aa, Streptococcus agalactiae
MKLHELKPAEGSRKVRNRVGRGTSSGNGKTSGRGQKGQKARSGGGVRLGFEGGQTPLFRRMPKRGFSNINAKEYALVNLDQLNVFEDGTEVTPVVLKEAGIVRAEKSGVKILGNGELTKKLSVKAAKFSKSAEAAITAKGGSIEVI

SEQ ID NO: 183 - protein, 997 aa, Streptococcus agalactiae
ATGTTTTTAAAATTACTTAGAGATGCACTCAAAGTAAAGATGGTAAGAAATAAAATTTTATTTACTATCTTTATCCTTCTTGTATTTCGTATCGGAACGCATATCACAGTACCGGGCATCAATGTTAAGAGTTTAGAACAAATGGGTGAACTTCCATTTCTAAATATGCTTAACTTAGTTAGTGGTAATGCAATGAGAAACTTTTCGGTATTCTCTATGGGAGTTAGCCCTTACATTACTGCGTCTATTGTTGTTCAGTTACTTCAAATGGATATTCTTCCGAAGTTTGTTGAATGGGGAAAACAAGGAGAGGTAGGTCGTCGTAAGCTTAACCAAGCTACACGTTATATTTCTTTGTTCCTTGCATTCGTACAATCAATTGGTATTACTGCTGGTTTTAACACTCTATCAAGTGTTGCTTTAGTTAAAACTCCGAATGTACAAACATATTTGCTTATTGGTGCAATCCTTACAACAGGTAGTATGGTGGTTACTTGGCTAGGTGAACAAATTACTGATAAGGGATTCGGAAATGGAGTGTCTATGATTATCTTTGCGGGTATCATTTCTTCCATTCCAAGTGCAATTACAACTATCTACGAAGATTTCTTTGTAAATGTACGCTCTTCAGCAATTACAAATTCTTACATCTTTGTCGGGATCCTTATCGTAGCAGTATTAGCAATTGTATTTTTTACAACATTTATTCAACAAGCTGAATACAAAATTCCAATCCAATATACAAAACTTGTTCAAGGAGCTCCTACAAGTTCATATCTTCCTCTAAAAGTAAATCCAGCTGGTGTTATTCCCGTTATCTTTGCTAGCTCGATTACAACAATTCCAAGTACGATTATTCCTTTCTTTCAAAATGGCAAAGAAATTCCTTGGCTTACTAAACTCCAAGAATTACTTAATTATCAAACCCCAGTCGGTATGATTATCTATGCTATCTTGATTATTCTGTTCTCTTTCTTCTATACTTTTGTWCAAGTAA

SEQ ID NO: 184 - protein, 332 aa, Streptococcus agalactiae
MFLKLLRDALKVKMVRNKILFTIFILLVFRIGTHITVPGINVKSLEQMGELPFLNMLNLVSGNAMRNFSVFSMGVSPYITASIVVQLLQMDILPKFVEWGKQGEVGRRKLNQATRYISLFLAFVQSIGITAGFNTLSSVALVKTPNVQTYLLIGAILTTGSMVVTWLGEQITDKGFGNGVSMIIFAGIISSIPSAITTIYEDFFVNVRSSAITNSYIFVGILIVAVLAIVFFTTFIQQAEYKIPIQYTKLVQGAPTSSYLPLKVNPAGVIPVIFASSITTIPSTIIPFFQNGKEIPWLTKLQELLNYQTPVGMIIYAILIILFSFFYTFVTK

SEQ ID NO: 185 - protein, 639 aa, Streptococcus agalactiae
ATGAATCTTTTAATTATGGGTTTGCCTGGTGCTGGTAAAGGTACTCAAGCAGCTAAGATCGTTGAAGAATTTGGTGTTGCTCACATCTCAACAGGGGATATGTTCCGCGCCGCAATGGCTAATCAAACCGAAATGGGACGTTTAGCTAAAAGTTATATTGATAAAGGTGAATTGGTTCCTGATGAAGTAACAAACGGGATTGTAAAAGAGCGCTTAGCTGAGGATGATATCGCAGAAAAAGGTTTTTTACTTGATGGATATCCACGTACTATTGAACAAGCACACGCCTTAGATGCTACGCTTGAAGAACTAGGACTACGCTTAGATGGTGTTATTAATATTAAAGTGGATCCATCATGTCTTATAGAGCGTTTGAGTGGTCGTATTATCAATCGTAAAACTGGTGAAACTTTCCACAAAGTGTTCAACCCACCAGTAGATTATAAAGAAGAAGATTACTATCAACGTGAAGATGATAAGCCTGAAACTGTCAAACGTCGCTTGGACGTTAATATTGCTCAAGGAGAACCTATTCTTGAACACTATCGTAAGCTTGGTCTTGTTACAGATATTGAAGGTAATCAAGAAATAACAGAAGTTTTTGCAGATGTTGAAAAAGCGTTGCTAGAACTCAAATAA

SEQ ID NO: 186 - protein, 212 aa, Streptococcus agalactiae
MNLLIMGLPGAGKGTQAAKIVEEFGVAHISTGDMFRAAMANQTEMGRLAKSYIDKGELVPDEVTNGIVKERLAEDDIAEKGFLLDGYPRTIEQAHALDATLEELGLRLDGVINIKVDPSCLIERLSGRIINRKTGETFHKVFNPPVDYKEEDYYQREDDKPETVKRRLDVNIAQGEPILEHYRKLGLVTDIEGNQEITEVFADVEKALLELK

SEQ ID NO: 187 - protein, 219 aa, Streptococcus agalactiae
GTGGCAAAAGAAGATGTGATTGAAATTGAAGGTAAAGTTGTTGAAACTATGCCTAACGCAATGTTTACTGTTGAGTTGGAAAATGGACACCAAATTTTGGCAACTGTATCAGGAAAAATCCGTAAAAACTACATCCGTATTTTGGTAGGTGATCGTGTTACTGTTGAAATGAGCCCATACGATTTAACACGTGGACGCATCACATACCGCTTTAAATAG

SEQ ID NO: 188 - protein, 72 aa, Streptococcus agalactiae
MAKEDVIEIEGKVVETMPNAMFTVELENGHQILATVSGKIRKNYIRILVGDRVTVEMSPYDLTRGRITYRFK

SEQ ID NO: 189 - protein, 366 aa, Streptococcus agalactiae
ATGGCTCGTATTGCTGGAGTTGATATTCCAAATGACAAACGTGTAGTAATTTCACTTACTTATGTATACGGAATTGGTCTTTCTACATCTAAAAAAATCTTAGCAGCTGCAGGTATTTCTGAAGATATCCGCGTTAAAGATTTGACACCAGATCAAGAGGACGCTATCCGTCGTGAAGTTGATGCAATCAAAGTTGAAGGTGACCTACGTCGTGAGGTAAACTTGAATATTAAACGTTTGATGGAAATCGGTTCATACCGTGGAATCCGTCACCGTCGTGGACTTCCTGTCCGTGGACAAAATACTAAAAATAACGCTCGCACTCGTAAAGGTAAAGCTGTTGCGATTGCAGGTAAGAAAAAATAA

SEQ ID NO: 190 - protein, 121 aa, Streptococcus agalactiae
MARIAGVDIPNDKRVVISLTYVYGIGLSTSKKILAAAGISEDIRVKDLTPDQEDAIRREVDAIKVEGDLRREVNLNIKRLMEIGSYRGIRHRRGLPVRGQNTKNNARTRKGKAVAIAGKKK

SEQ ID NO: 191 - DNA, 357 bp, Streptococcus agalactiae
gtgaaaaagaacatcgaatctggtgttgctcatattcacgctacattcaataacactattgttatgattacagatgtgcatggtaacgctcttgcatggtcatcagctggtgctcttggatttaaaggttctcgtaaatctactccatttgctgctcaaatggctgctgaagctgctgctaaatctgcacaagaacacggtcttaaaactgttgaagttactgtaaaaggtcctggttcaggtcgtgaatctgctatccgtgcccttgctgcagctggtcttgaagtaactgcaattcgtgatgtgactcctgtaccacataatggtgctcgtcctccaaaacgtcgtcgtgtataa

SEQ ID NO: 192 - protein, 118 aa, Streptococcus agalactiae
MKKNIESGVAHIHATFNNTIVMITDVHGNALAWSSAGALGFKGSRKSTPFAAQMAAEAAAKSAQEHGLKTVEVTVKGPGSGRESAIRALAAAGLEVTAIRDVTPVPHNGARPPKRRRV

SEQ ID NO: 193 - DNA, 939 bp, Streptococcus agalactiae
atgattgagtttgaaaaaccaataataacaaaaattgatgaaaataaagattacggcagatttgtcatcgaaccactagaacgtggctacggtacaactctaggaaactctcttcgtcgtgtgcttctgtcttcacttccaggtgcagcagtcacatcaatcaaaattgatggagtattacacgaatttgatactatcccaggtgtacgtgaagatgtgatgcaaatcatccttaatgtaaaaggacttgctgtgaaatcttacgtcgaagacgaaaagattatcgaactagacgttgaaggtcctgcagaaattactgccggagatattttaacagatagtgatatcgaaattgtaaaccctgaccattatcttttcacaattgctgaaggtcacagtttgaaagcaacaatgacagttgctaaaaaccgaggttatgttccagcagaaggaaataaaaaagatgatgcaccagtgggaacattggctgtagattcaatctatacaccagtgaaaaaagttaattatcaagttgaacctgctcgtgtaggtagtaacgatggctttgataaattaactattgaaatcatgacaaatggcacaatcattcctgaggatgctcttggtctttcagctcgcgtcttaattgaacacttaaacttgtttactgatttaacagaggttgctaaagcaactgaagtaatgaaggaaacagagaaagtgaacgatgagaaagtgcttgaccggacaattgaggaacttgatttgtcagtgcgctcatataactgtttaaaacgtgctggaattaatacagtatttgatttaacagaaaaaactgagcctgaaatgatgaaagtccgaaacttaggacgtaagagtcttgaagaagttaaaatcaaacttgccgatctaggtcttggattaaaaaacgataaataa

SEQ ID NO: 194 - protein, 312 aa, Streptococcus agalactiae
MIEFEKPIITKIDENKDYGRFVIEPLERGYGTTLGNSLRRVLLSSLPGAAVTSIKIDGVLHEFDTIPGVREDVMQIILNVKGLAVKSYVEDEKIIELDVEGPAEITAGDILTDSDIEIVNPDHYLFTIAEGHSLKATMTVAKNRGYVPAEGNKKDDAPVGTLAVDSIYTPVKKVNYQVEPARVGSNDGFDKLTIEIMTNGTIIPEDALGLSARVLIEHLNLFTDLTEVAKATEVMKETEKVNDEKVLDRTIEELDLSVRSYNCLKRAGINTVFDLTEKTEPEMMKVRNLGRKSLEEVKIKLADLGLGLKNDK

SEQ ID NO: 195 - DNA, 387 bp, Streptococcus agalactiae
atggcttaccgtaaactaggacgcactagctcacaacgtaaggcaatgcttcgtgatttgacaaccgatcttcttatcaacgaatcaattgtaactactgaagcacgtgctaaagaaatccgtaaaacagttgaaaaaatgattactctaggtaaacgtggtgatttacatgctcgtcgtcaagctgctgcttatgtacgtaatgaaattgcatcagaaaactatgatgaagcttctgataaatatacatcaacaacagctcttcaaaaactttttgacgacatcgcacctcgttatgctgaacgtaacggaggatacactcgtattcttaaaacagaaccacgccgtggcgatgctgccccaatggcaattattgaattagtataa

SEQ ID NO: 196 - protein, 128 aa, Streptococcus agalactiae
MAYRKLGRTSSQRKAMLRDLTTDLLINESIVTTEARAKEIRKTVEKMITLGKRGDLHARRQAAAYVRNEIASENYDEASDKYTSTTALQKLFDDIAPRYAERNGGYTRILKTEPRRGDAAPMAIIELV

SEQ ID NO: 197 - DNA, 438 bp, Streptococcus agalactiae
atggagagagagggattcgaacccccgaacccgaaggagcggatttacagtccgccgcgtttagcctcttcgctatctctcctaaggtataaatggcgcgagacggaatcgaaccgccgacacatggagcttcaatccattgctctaccaactgagctaccgagcctattgcgggagcaggatttgaacctacgaccttcgggttatgagcccgacgagctacctagctgctccatcccgcgatatcttttaaaggaggatgtgggattcgaacccacgcacgcttttacacgcctgacggttttcaagaccgttcccttcagccggacttgggtaatcctccatataacaaaaaatagtccgtacgggattcgaacccgtgttaccgccgtgaaaaggcggtgtcttaaccccttgaccaacggaccatattcttga

SEQ ID NO: 198 - protein, 145 aa, Streptococcus agalactiae
MEREGFEPPNPKERIYSPPRLASSLSLLRYKWRETESNRRHMELQSIALPTELPSLLREQDLNLRPSGYEPDELPSCSIPRYLLKEDVGFEPTHAFTRLTVFKTVPFSRTWVILHITKNSPYGIRTRVTAVKRRCLNPLTNGPYS

SEQ ID NO: 199 - DNA, 294 bp, Streptococcus agalactiae
ttgacatgggaagtttattttctaagaaaagagagcatgttgaaaaaatatgtaaaatggttaattcccatatctattattgggatgttactagcaggctgtcaaatgaatagtgaatctaaaagtcagtcaaacgaagtaaaaaatagcaaacagtcagcagtaaagaaaggtaaaaaagtaataaaaaaagaacaagtagcttatctcaaaaagcatgaaaaagaattaactgaatatgtcaaaatccagatattagtgaaattaagtatgattggaatagtgtgcgcatag

SEQ ID NO: 200 - protein, 97 aa, Streptococcus agalactiae
MTWEVYFLRKESMLKKYVKWLIPISIIGMLLAGCQMNSESKSQSNEVKNSKQSAVKKGKKVIKKEQVAYLKKHEKELTEYVKIQILVKLSMIGIVCA

SEQ ID NO: 201 - protein, 180 aa, Streptococcus agalactiae
GTGCGCATAGTGGAAGCTAGTAGTGGAACCCCTCAAGGCGGAGAGCAACTATTATTAATTTTGGGTTATGCAAATGGCAGTGAATTAACCAATTTTACTCTAAATTTCACATTGGGTGATAATCAAATGCCTAATATTGACTCAGTTGGCTCAGATAATTTATCAACTATTGAAGATTAA

SEQ ID NO: 202 - protein, 59 aa, Streptococcus agalactiae
MRIVEASSGTPQGGEQLLLILGYANGSELTNFTLNFTLGDNQMPNIDSVGSDNLSTIED

SEQ ID NO: 203 - protein, 171 aa, Streptococcus agalactiae
ATGGCAGAAAGTGCTAATACAGGTCGATCGAATTCTTTTGTTTTAGAAGAATTAACTGAATTTCAAAGAGAAAAGTTAAAAAATGGGGAGTCAGTTAAGTTTAATTTTTCTAAAGATGTTAAGAAAGAAAATAAGGTTATCGAAGGAGGGCACCCCCAAGTCATAGGGTAA

SEQ ID NO: 204 - protein, 56 aa, Streptococcus agalactiae
MAESANTGRSNSFVLEELTEFQREKLKNGESVKFNFSKDVKKENKVIEGGHPQVIG

SEQ ID NO: 205 - protein, 552 aa, Streptococcus agalactiae
ATGACTAAAATTTATCATATGATTTTATGTAATTCTGATATAATGAAGATTTTAGCTATAATAAAATCTCTTCCACTGAATGATTGTTGGCTGTGTGCTGGCACATTGAGAAACTTTGTATGGAATAAACTTTCTGGAATAAATGAGACATTGACATCAGATATTGATGTTGTATTTTTTGATAAAAATATTTCTTATGAAGAAACGGTGGTATTAGAACAACAATTAAAGGATAACTATCCACAGTACGATTGGGAACTTAAAAATGAATTTTACATGAACACTCATTCTCCTAATACCCCAAAGTATACTAGCTCTAAAGATGCTATTTCAAAATTTCCTGAAAAGTGTACTGCAGTGGGAGCAAGGTTAGATGATAGAAATCAACTCGAACTTTACCTCCCTTATGGTGAAGAGGAAATATTAAATTTCATTGTTAGTCCTACGCCATATTTTGAAGAGGATCTATTACGTTATAATGTTTATTTGAAGCGAGTGGATAAGAAGAAATGGAATAATATTTGGCCTCGTTTAACAATCATAAAAAAATGA

SEQ ID NO: 206 - protein, 183 aa, Streptococcus agalactiae
MTKIYHMILCNSDIMKILAIIKSLPLNDCWLCAGTLRNFVWNKLSGINETLTSDIDVVFFDKNISYEETVVLEQQLKDNYPQYDWELKNEFYMNTHSPNTPKYTSSKDAISKFPEKCTAVGARLDDRNQLELYLPYGEEEILNFIVSPTPYFEEDLLRYNVYLKRVDKKKWNNIWPRLTIIKK

SEQ ID NO: 207 - protein, 420 aa, Streptococcus agalactiae
ATGAAAATGACAGTCTATTTTGATGGTAATTTTTGGTTGGGTTTGATTGAGTACGATGATGATGGTGATTACAAAGTTTTTCGGTATTTTTTTGGAAAAGAACCTAAAGATGATGATGTTTTTAATTTTATAAATCATAAACTTAATGATTTGATAAAAAAATATGAGTTTGTTAAAACGGATATTTCTCTAAAGCGTACGAATGAACACAAAAAAAGTCCTAAAAGAATGCAAAGAGAAATTAATAGAGAAAAACGTAAGCCAGTAGTATCTACAAAAGCGCAATTGGCGATGAAAACTATTCATATGAGTATAAAAAACGAACGTCAATTAAGTCAGAAATGTAAGAAAAATGAGTTAAGAAAACATCGGTACCAATTAAAACAAGAAAAACGTTACCAAAAGAAAAAAGGACATTGA

SEQ ID NO: 208 - protein, 139 aa, Streptococcus agalactiae
MKMTVYFDGNFWLGLIEYDDDGDYKVFRYFFGKEPKDDDVFNFINHKLNDLIKKYEFVKTDISLKRTNEHKKSPKRMQREINREKRKPVVSTKAQLAMKTIHMSIKNERQLSQKCKKNELRKHRYQLKQEKRYQKKKGH

SEQ ID NO: 209 - protein, 435 aa, Streptococcus agalactiae
ATGAAGCTGAGAAGAAATTATTTTGTTCAACTTTGGGAATATGATGATTGGATTCAAGAAGGACGTATTGTACTTTTTAGGTTGCTTGAAGAGCATCCGTATTTATTGGATAATGAAAGCAAACTATTCATTTACTTTAAAACAAAATTTTCAAATTATTTAAACGATGTATTAAGACACCAAGATTGTCAAAAGCGACAATTTAATAAAATGCCTTATGAAGAAATAAGTGAAGTTAGTCACTATGTTAAGAGTAAAGGACTAGTTTTAGATGACTATATTGCTTATCGTGATACTTTAACAAAAGTGGAAGAAACTTTGTCAGATATTGATAAAGAAAAATTTGAAAAACTGATTAGTGGTGAACGTTTTGCGGGGAAGAAACAATTCATACGAGATATTCAACCCTTTTTCAATGCTTTTAAAGCGGATTAA

SEQ ID NO: 210 - protein, 144 aa, Streptococcus agalactiae
MKLRRNYFVQLWEYDDWIQEGRIVLFRLLEEHPYLLDNESKLFIYFKTKFSNYLNDVLRHQDCQKRQFNKMPYEEISEVSHYVKSKGLVLDDYIAYRDTLTKVEETLSDIDKEKFEKLISGERFAGKKQFIRDIQPFFNAFKAD

SEQ ID NO: 211 - protein, 693 aa, Streptococcus agalactiae
ATGAGTAAAGTTCGTTTATATATCGCTCGTCATGGTAAAACAATGTTTAATACAATTGGTCGCGCTCAGGGGTGGAGTGATACTCCTTTAACTACTTTTGGAGAACTCGGGATTAAAGAGCTTGGTTTGGGACTAAAGGCTTCAAATATTAGTTTTAAAGAGGCTTTTTCTAGTGATAGTGGACGTACTTTACAAACTATGGAAATTATTCTCAGGGAAGTGCAACAAGAAAATATTCCCTATACGAGAGATAAACGAATCCGCGAGTGGTGCTTTGGTAGTTTGGATGGAGGATATGATGGCGACCTTTTTAATGGCGTTCTGCCTCGAGTTTCAAACGGAGATATGAGCCATTTGACACACGAAGAAATTGCTAATTTGATTTGTCAAGTTGATACGGCTGGCTGGGCAGAACCGTGGGCAATATTGAGTAACCGTATTCTGTCAGGCTTCACTGCTATAGCTAAAAAAATAGAGGATATTGGGGGAGGTAATGCGATTGTTGTCAGTCATGGGATGACTATTGCGACTTTTTTATGGTTAATCGACCATAGTACCCCTCGTAGTTTAGGCTTAGATAATGGTAGTGTCTCAGTCGTTGATTTTGAAGATGGAACATTTTCTATTCAATCTATTGGGGATATGTCCTATCGAGAAAAAGGAAGAGAAATTTTAGAAAAAACATTGCAATGA

SEQ ID NO: 212 - protein, 230 aa, Streptococcus agalactiae
MSKVRLYIARHGKTMFNTIGRAQGWSDTPLTTFGELGIKELGLGLKASNISFKEAFSSDSGRTLQTMEIILREVQQENIPYTRDKRIREWCFGSLDGGYDGDLFNGVLPRVSNGDMSHLTHEEIANLICQVDTAGWAEPWAILSNRILSGFTAIAKKIEDIGGGNAIVVSHGMTIATFLWLIDHSTPRSLGLDNGSVSVVDFEDGTFSIQSIGDMSYREKGREILEKTLQ

SEQ ID NO: 213 - protein, 753 aa, Streptococcus agalactiae
ATGAAAAAAAATAAAATTATCCGATTCAGTTTAGTTGGTGTTCTACTTGCGATACTATGCTTTAGTCTTTTTGCTTTATTGAAGCCTAACAGTCAACAATCATCATCTCAAAAGTTGAGGAATGAGGATATAAAAAAGATATCCTCTCAAAAAAGAAATAAGAAATTACAATTACCAGCTGTATCATCAAAAGATTGGAACTTGATTTTGGTCAATCGTGACCATAAACATGAAGAATTAAGTCCAGATGTGGTTCCTGTTGAAAATATTTATTTGGATAAACGTATTACGAAGCAAGCTACTCAGTTTTTAGAGGCTGCTAGAGCAATTGATTCACGAGAACATTTAATTTCGGGTTATCGTAGTGTTGCCTATCAGGAGAAGTTGTTCAATTCTTATGTTACTCAAGAGATGACTAGTAACCCTAATTTGACGAGGGGACAAGCAGAAAAGTTGGTAAAAACTTACTCTCAGCCTGCAGGTGCTAGTGAACACCAGACTGGATTAGCGATGGATATGAGTACTGTAGATTCTTTGAATGAGAGCGATCCTAGAGTAGTCAGTCAGTTGAAAAAGATAGCTCCACAATATGGTTTTGTCTTACGGTTTCCGGATGGTAAAACAGCAGAAACAGGGGTAGGTTATGAAGATTGGCATTACCGCTATGTTGGGGTAGAGTCTGCAAAATATATGGCCAAACATCATTTAACATTAGAAGAATACATAACTTTATTAAAGGAGAATAACCAATGA

SEQ ID NO: 214 - protein, 250 aa, Streptococcus agalactiae
MKKNKIIRFSLVGVLLAILCFSLFALLKPNSQQSSSQKLRNEDIKKISSQKRNKKLQLPAVSSKDWNLILVNRDHKHEELSPDVVPVENIYLDKRITKQATQFLEAARAIDSREHLISGYRSVAYQEKLFNSYVTQEMTSNPNLTRGQAEKLVKTYSQPAGASEHQTGLAMDMSTVDSLNESDPRVVSQLKKIAPQYGFVLRFPDGKTAETGVGYEDWHYRYVGVESAKYMAKHHLTLEEYITLLKENNQ

SEQ ID NO: 215 - protein, 576 aa, Streptococcus agalactiae
ATGAGGAAACGTTTTTCCTTGCTAAATTTTATTGTTGTTACTTTTATTTTCTTTTTCTTTATTCTTTTTCCGCTTTTAAACCATAAGGGAAAAGTAGATGCTAATTCTAGGCAGAGTGTTACCTACACCAAAGAAGAATTTATACAAAAAATTGTGCCAGATGCGCAAGATCTAGGAAAGTCGTACGGTATTCGTCCTTCATTTATTATTGCACAGGCGGCTTTGGATTCTGATTTCGGAGAGAAAATATTAGCTAATAAGTATCATAATCTGTTTGGTTTGCTTGCAGAACCAGGAACGCCCTCAATTACCTTAAATGATAGTAGTACAGGAAAAAAACAGGAAAAGCAATTTACTCATTATAAATCTTGGAAGTATTCAATGTATGATTACCTTGCTCATATAAAATCTGGAGCGACAGGCAAAAAAGATTCATATACTATAATGGTGTCTGTTAAAAATCCAAAAACTTTAGTGCAAAAATTACAAGATAGTGGTTTTGATAATGACAAAAAGTACGCTAAAAAAATGACGGAAATCATTGATTTGTATGATTTAACAAGATATGATAAGTGA

SEQ ID NO: 216 - protein, 191 aa, Streptococcus agalactiae
MRKRFSLLNFIVVTFIFFFFILFPLLNHKGKVDANSRQSVTYTKEEFIQKIVPDAQDLGKSYGIRPSFIIAQAALDSDFGEKILANKYHNLFGLLAEPGTPSITLNDSSTGKKQEKQFTHYKSWKYSMYDYLAHIKSGATGKKDSYTIMVSVKNPKTLVQKLQDSGFDNDKKYAKKMTEIIDLYDLTRYDK

SEQ ID NO: 217 - protein, 1083 aa, Streptococcus agalactiae
ATGTGTAAGAGTGCTAATTTCAGAAAGACCGAGAGGGGTGATGTTTTTGTGATTACACAACGTCAAAATGATATTTTGAATTTAATCGTTGAGTTATTTACACAAACTCATGAACCAGTAGGGTCTAAAGCTTTACAGAGAACGATTGATTCTAGTAGCGCCACTATTCGTAATGATATGGCAAAACTAGAGAAGTTGGGGTTATTGGAAAAAGCACACACTTCTAGTGGACGGATGCCGAGTCCAGCTGGTTTTAAGTATTTTGTAGAGCACTCCCTTAGACTAGATAGTATTGATGAGCAAGATATTTATCATGTTATAAAAGCTTTTGACTTTGAAGCATTCAAATTAGAAGACATGCTTCAAAAAGCTAGTCATATTTTATCGGAGATGACGGGCTATACATCCGTTATTTTAGATGTGGAGCCAGCTCGTCAACGTTTGACAGGGTTTGATGTTGTTCAGCTTAGCAACCATGATGCTCTAGCAGTCATGACTTTAGATGAATCTAAGCCAGTGACAGTGCAGTTTGCTATTCCAAGAAACTTTTTGACACGTGACTTGATAGCATTTAAAGCTATCGTAGAGGAGCGCTTGCTGGATGGTAGTGTCATGGATATTCATTATAAGTTGAGGACAGAAATTCCTCAGATCGTTCAGAAGTATTTTGTAACTACGGATAATGTTTTACAACTATTTGATTATGTTTTTTCAGAGCTGTTTCTGGAAACGGTATTTGTAGCTGGCAAGGTAAATTCTTTAACGTATTCAGATCTATCAACGTATCAGTTTTTGGATAATGAGCAGCAAGTAGCGATTTCTTTGAGGCAAAGTCTGAAAGAGGGTGAGATGGCTTCTGTCCAAGTGGCAGATAGTCAAGAAGCCGCACTTGCAGATGTGTCAGTTTTAACTCACAAATTTTTGATTCCTTACCGTGGATTTGGACTCCTGAGTTTGATTGGTCCTATTGATATGGATTATCGTAGGTCTGTTAGTTTGGTAAACATTATCGGAAAGGTATTGGCTGCTAAATTAGGTGATTATTATCGATACCTAAATTCTAACCATTATGAAGTTCACTGA

SEQ ID NO: 218 - protein, 360 aa, Streptococcus agalactiae
MCKSANFRKTERGDVFVITQRQNDILNLIVELFTQTHEPVGSKALQRTIDSSSATIRNDMAKLEKLGLLEKAHTSSGRMPSPAGFKYFVEHSLRLDSIDEQDIYHVIKAFDFEAFKLEDMLQKASHILSEMTGYTSVILDVEPARQRLTGFDVVQLSNHDALAVMTLDESKPVTVQFAIPRNFLTRDLIAFKAIVEERLLDGSVMDIHYKLRTEIPQIVQKYFVTTDNVLQLFDYVFSELFLETVFVAGKVNSLTYSDLSTYQFLDNEQQVAISLRQSLKEGEMASVQVADSQEAALADVSVLTHKFLIPYRGFGLLSLIGPIDMDYRRSVSLVNIIGKVLAAKLGDYYRYLNSNHYEVH

SEQ ID NO: 219 - protein, 573 aa, Streptococcus agalactiae
ATGGCAGTATTCAATAAGTTATTTAAAAGGAGGCACTCAGTGTCAGAAGAAATTAAAAAAGACGATTTACAGGAAGAAGTGGAAGCCACTGAAACTGAAGAGACAGTTGAGGAAGTTATTGAAGAAATTCCTGAAAAATCAGAGTTAGAACTCGCAAACGAGCGTGCTGATGAGTTTGAAAATAAATACTTGCGAGCTCATGCAGAAATGCAGAATATACAACGTCGCTCTAGTGAAGAACGTCAACAACTTCAACGCTATCGTTCTCAGGATCTGGCAAAAGCAATCTTACCATCGCTTGACAATCTAGAACGTGCCTTGGCTGTTGAAGGGTTGACAGATGATGTTAAAAAAGGTTTAGAAATGACTCGTGATAGCCTTATTCAAGCACTAAAGGAAGAAGGCGTAGAAGAAGTAGAAGTCGACTCATTTGACCACAACTTTCATATGGCAGTTCAGACTCTCCCAGCCGATGATGAACATCCAGCCGATAGCATTGCAGAAGTCTTTCAAAAGGGATATAAATTGCACGAGCGTCTGCTAAGACCAGCGATGGTAGTTGTCTATAACTAA

SEQ ID NO: 220 - protein, 190 aa, Streptococcus agalactiae
MAVFNKLFKRRHSVSEEIKKDDLQEEVEATETEETVEEVIEEIPEKSELELANERADEFENKYLRAHAEMQNIQRRSSEERQQLQRYRSQDLAKAILPSLDNLERALAVEGLTDDVKKGLEMTRDSLIQALKEEGVEEVEVDSFDHNFHMAVQTLPADDEHPADSIAEVFQKGYKLHERLLRPAMVVVYN

SEQ ID NO: 221 - protein, 1830 aa, Streptococcus agalactiae
ATGTCTAAAATTATTGGTATTGACTTAGGTACAACAAACTCAGCAGTAGCAGTTCTTGAAGGGACTGAATCAAAAATCATTGCTAACCCAGAAGGCAATCGTACAACTCCTTCAGTAGTATCATTCAAAAATGGTGAAATTATCGTGGGTGATGCTGCAAAACGTCAAGCGGTAACAAATCCAGATACTGTTATCTCTATCAAATCAAAGATGGGAACTTCTGAAAAAGTTTCTGCAAATGGTAAAGAATATACTCCTCAAGAAATTTCAGCAATGATTCTTCAATACCTTAAAGGTTATGCTGAAGACTATCTTGGAGAAAAAGTAGAAAAAGCAGTTATTACTGTTCCAGCTTACTTCAACGATGCACAACGTCAGGCAACTAAAGACGCTGGTAAAATTGCAGGTCTTGAAGTAGAACGTATCGTTAACGAACCAACAGCAGCCGCACTTGCTTATGGTATGGACAAGACTGACAAGGATGAAAAAATCTTAGTTTTTGACCTTGGTGGTGGTACATTTGACGTATCAATCCTTGAATTAGGTGATGGTGTCTTCGACGTTCTTGCAACAGCAGGTGATAACAAACTTGGTGGTGACGACTTTGACCAGAAAATTATTGATTTCTTGGTAGAAGAATTCAAGAAAGAAAATGGTATTGATCTTTCTCAAGACAAAATGGCTCTTCAACGCTTGAAAGATGCTGCTGAAAAAGCTAAAAAAGACCTTTCAGGTGTAACTCAAACTCAAATTTCATTACCGTTCATCACTGCTGGTTCTGCTGGTCCTCTTCACTTGGAGATGAGCTTATCACGTGCTAAATTTGACGATCTCACTCGTGACCTTGTTGAACGTACGAAAACTCCAGTTCGTCAAGCTCTTTCAGATGCAGGCTTGTCATTGTCAGAAATTGATGAAGTTATCCTCGTTGGTGGATCAACACGTATCCCAGCAGTTGTTGAAGCTGTAAAAGCTGAAACTGGTAAAGAACCAAATAAATCTGTTAACCCTGATGAAGTGGTTGCTATGGGTGCTGCTATCCAAGGTGGTGTTATCACTGGGGATGTGAAAGACGTTGTACTTCTTGACGTAACACCATTGTCACTTGGTATCGAAACAATGGGTGGTGTCTTCACTAAATTGATCGACCGCAACACAACAATCCCAACATCTAAATCACAAGTCTTCTCAACAGCAGCAGACAACCAACCAGCCGTTGATATCCATGTTCTTCAAGGTGAACGCCCAATGGCAGCAGATAACAAAACACTCGGTCGCTTCCAATTGACTGATATCCCAGCTGCACCTCGTGGAATCCCACAAATTGAAGTAACATTTGATATCGATAAAAATGGTATTGTATCTGTTAAAGCTAAAGATCTCGGTACTCAAAAAGAACAACACATTGTTATCCAATCTAATTCAGGATTAACTGATGAAGAAATTGATAAAATGATGAAAGATGCTGAAGCAAATGCTGAAGCAGATGCAAAACGTAAAGAAGAAGTTGATCTTAAAAATGAAGTTGACCAAGCCATCTTTGCAACAGAAAAAACTATTAAAGAAACTGAAGGCAAAGGCTTTGATACAGAACGTGATGCAGCGCAATCAGCACTTGATGAGTTGAAAAAAGCTCAAGAATCAGGTAACCTTGACGACATGAAAGCTAAACTTGAAGCTCTTAACGAAAAAGCACAAGCTCTTGCAGTTAAACTTTACGAACAAGCGGCTGCAGCACAACAAGCAGCTCAAGGGGCTGAAGGTGCACAATCAGCTGATTCATCAAGCAAGGGTGATGATGTTGTAGATGGCGAATTCACTGAGAAATAA

SEQ ID NO: 222 - protein, 609 aa, Streptococcus agalactiae
MSKIIGIDLGTTNSAVAVLEGTESKIIANPEGNRTTPSVVSFKNGEIIVGDAAKRQAVTNPDTVISIKSKMGTSEKVSANGKEYTPQEISAMILQYLKGYAEDYLGEKVEKAVITVPAYFNDAQRQATKDAGKIAGLEVERIVNEPTAAALAYGMDKTDKDEKILVFDLGGGTFDVSILELGDGVFDVLATAGDNKLGGDDFDQKIIDFLVEEFKKENGIDLSQDKMALQRLKDAAEKAKKDLSGVTQTQISLPFITAGSAGPLHLEMSLSRAKFDDLTRDLVERTKTPVRQALSDAGLSLSEIDEVILVGGSTRIPAVVEAVKAETGKEPNKSVNPDEVVAMGAAIQGGVITGDVKDVVLLDVTPLSLGIETMGGVFTKLIDRNTTIPTSKSQVFSTAADNQPAVDIHVLQGERPMAADNKTLGRFQLTDIPAAPRGIPQIEVTFDIDKNGIVSVKAKDLGTQKEQHIVIQSNSGLTDEEIDKMMKDAEANAEADAKRKEEVDLKNEVDQAIFATEKTIKETEGKGFDTERDAAQSALDELKKAQESGNLDDMKAKLEALNEKAQALAVKLYEQAAAAQQAAQGAEGAQSADSSSKGDDVVDGEFTEK

SEQ ID NO: 223 - protein, 1140 aa, Streptococcus agalactiae
ATGAACAATACAGAATTTTATGATCGTCTTGGCGTTTCAAAAGATGCTTCTCAGGACGAAATAAAAAAAGCTTACCGTAGGATGTCTAAGAAATACCATCCAGATATTAATAAGGAGACGGGAGCAGAGGAAAAATATAAAGAGGTTCAAGAAGCTTATGAAACCTTGAGTGATACACAAAAACGTGCTGCCTATGATCAATATGGCGCTGCTGGGGCAAATGGCGGTTTTGGTGGCTTCGATGGTGGCGGTTTTGGTGGCTTCGATGGTGGTGGCTTTGGTGGTTTTGAAGACATCTTCTCAAGCTTTTTTGGTGGAGGAGGGATGCGCAATCCTAATGCACCACGTCAAGGAGATGACCTACAATATCGTGTTAATTTAAGTTTTGAAGAAGCTATCTTTGGAGCTGAAAAAGAAGTATCTTATAATCGGGAGTCATCATGTCATACTTGTTCAGGAAGTGGAGCTAAGCCAGGTACTAGCCCTGTGACTTGTCAAAAGTGTCATGGTTCGGGTGTGATTAATGTTGATACACAAACACCTCTAGGAACAATGCGTCGCCAAGTGACTTGTGATGTTTGTCAGGGTAGTGGTCAAGAAATCAAAGAGAAATGTCCAACATGTCATGGAACTGGTCATGAGAAGAAGACGCATAAAGTATCAGTTAAAATACCTGCAGGAGTTGAAACTGGGCAACAAATTCGTTTAACAGGACAAGGTGAAGCTGGCTTCAATGGTGGTCCTTATGGTGATCTCTTTGTTATTATTAACGTTCTCCCAAGCCAACAGTTTGAGCGTAATGGATCAACAATTTATTATACTTTGAATATTAGCTTTGTCCAAGCTGCTTTGGGTGATACAATTGATATACCTACTGTCCATGGAGCGGTAGAAATGTCAATTCCTGCTGGTACTCAGACAGGAAAAACGTTTCGTCTTCGCGGAAAAGGTGCCCCTAAACTTCGAGGGGGTGGACAAGGTGATCAGCATGTTACTGTTAACATCGTAACTCCTACTAAATTGAATGATGCTCAAAAAGAGGCATTGCACGCTTTTGCAGAGGCAAGTGGAGATAAGATGGTACATCCGAAGAAGAAAGGTTTCTTTGATAAAGTCAAAGATGCTTTAGATGTTGATTAA

SEQ ID NO: 224 - protein, 379 aa, Streptococcus agalactiae
MNNTEFYDRLGVSKDASQDEIKKAYRRMSKKYHPDINKETGAEEKYKEVQEAYETLSDTQKRAAYDQYGAAGANGGFGGFDGGGFGGFDGGGFGGFEDIFSSFFGGGGMRNPNAPRQGDDLQYRVNLSFEEAIFGAEKEVSYNRESSCHTCSGSGAKPGTSPVTCQKCHGSGVINVDTQTPLGTMRRQVTCDVCQGSGQEIKEKCPTCHGTGHEKKTHKVSVKIPAGVETGQQIRLTGQGEAGFNGGPYGDLFVIINVLPSQQFERNGSTIYYTLNISFVQAALGDTIDIPTVHGAVEMSIPAGTQTGKTFRLRGKGAPKLRGGGQGDQHVTVNIVTPTKLNDAQKEALHAFAEASGDKMVHPKKKGFFDKVKDALDVD

SEQ ID NO: 225 - protein, 1248 aa, Streptococcus agalactiae
ATGGTAACCAAAGTTGAAGAGATTCGCTCATATTTGATAGCTTCTATACAAAATGGTAAGTTGGCTCCAGGAGATCGCCTACCATCTATAAGACAGTTAGCTAATCAATTTTCCTGTAACAAAGATACAGTGCAACGAGTTTTGATGGAATTGCGTTTTGATAATTATATCTATGCAAAGCCTAGGTCAGGCTATTACGTCTTTGATTCTCATCAAGAGGAAGTTGAAGAAGGGGTTAGTTTACCAAACTCTGAGATTGCAAATATAGCTTATGATGATTTTAGATTGTGTTTGAATGAGACCCTTATTGGTAGGGAAGATTACCTTTTCAATTATTACTATCGTCAAGAAGGTCTTCTTGATTTAAGTAAAGCAGTGGCTAAATTAATGGAAGAAACAGGGGTCTATGTTCCCCTTGATGATATTGTTATTACGGCTGGTACTCAACAGGCATTATTTATTTTGACACAGGTTACCTTTCCAAATCGAAAATCTCGAGTTTTAATAGAAGAACCGACCTATCCTCGTATGATTGAACTAATCAAAACACAAAATTTACCCTATGAAACTATTTCTCGAGGTACTCATGGAATTGATTTTCAGCGTTTAGAGGAGATTTTCCAGACACAATCAATTAAGTTTTTTTATGTTATACCTCGCATGCATAATCCTTTGGGAACATCCTATAATCCGGTAGAGATGAAAAGATTAATAGAGATGGCAGAGAAGTATGATGTTTATATTGTGGAAGATGACTATATGTCTGATTTTGCAAGTCAGTCACCATTACATTATTATGATACTCACGGGCGTGTTATTTATCTAAAATCTTTTTCAAAGGCTATTTTCCCTGCTTTAAGATTAGCTGCGATTTGTTTACCACAAGCTTTAAAATCAACATTTATGGCTTACAAGAAGTTGATGGATTATGATACTAATCTGATTTTACAAAAAGCATTAGCGCTTTATATTGAAAATGGCCTTTATGCTAAGAATAGTCAATATTTGAAATATCGTTATCAGAAAGACCTTGCAAATTCAAAATCTATTTTAGCTGATCACCCTAATCTACCCTCATATAGTTTACATCACGATAGTGTATTATTTGATTGTTCGAAACTCGATAACTTTAAAATATTACGGCAATACGGCGATACTTTGGAAAATTATTTTTGTCAAAAATCGCATCAATCTCTCTTACAAGTAAAAAATGATTCCTGCTTAAAGCAGTTCTTGGGATCGTTGTAG

SEQ ID NO: 226 - protein, 415 aa, Streptococcus agalactiae
MVTKVEEIRSYLIASIQNGKLAPGDRLPSIRQLANQFSCNKDTVQRVLMELRFDNYIYAKPRSGYYVFDSHQEEVEEGVSLPNSEIANIAYDDFRLCLNETLIGREDYLFNYYYRQEGLLDLSKAVAKLMEETGVYVPLDDIVITAGTQQALFILTQVTFPNRKSRVLIEEPTYPRMIELIKTQNLPYETISRGTHGIDFQRLEEIFQTQSIKFFYVIPRMHNPLGTSYNPVEMKRLIEMAEKYDVYIVEDDYMSDFASQSPLHYYDTHGRVIYLKSFSKAIFPALRLAAICLPQALKSTFMAYKKLMDYDTNLILQKALALYIENGLYAKNSQYLKYRYQKDLANSKSILADHPNLPSYSLHHDSVLFDCSKLDNFKILRQYGDTLENYFCQKSHQSLLQVKNDSCLKQFLGSL

SEQ ID NO: 227 - protein, 777 aa, Streptococcus agalactiae
ATGACAAGGTATAAGGCACAGATTTCTTATGATGGTTCAGCTTTTTCAGGCTTCCAAAGACAACCAAATTGTAGGACAGTTCAAGAAGAAATTGAGAGAACTCTTAAGCGCCTAAATAGCGGGAACGATGTGATAATCCATGGTGCTGGTCGCACAGATGTTGGTGTTCATGCTTATGGACAAGTTATCCATTTTGATTTACCACAGGCGCGTGATGTAGAAAAATTACGCTTTGGTTTAGATACACAGTGTCCAGACGATATTGATATTGTCAAAGTAGAGCAAGTGTCTGATGATTTTCATTGTCGATATGATAAACACATTAAAACTTATGAGTTTTTAGTGGATATCGGTAGGCCGAAAAATCCTATGATGAGAAACTATGCAACACATTACCCTTATCCTGTCATTATTGAGCTTATGCAAGAAGCTATTAAAGATTTAGTAGGTACCCATGACTTTACAGGCTTTACTGCTTCAGGTACGAGTGTAGAAAATAAAGTACGTACTATTTTTGATGCGAAAATTCAGTTTGAAGCGTCTAAAAATCTTTTAATTTTTACCTTTACAGGAAATGGTTTTTTGTATAAACAGGTGCGTAATATGGTTGGTACCCTGCTAAAAATTGGTAATGGACGCATGCCTATTAGCCAAATCAAAACAATTTTACAGGCTAAAAATCGGGATTTAGCAGGTCCAACTGCGGCAGGAAATGGTTTATATTTGAAGGAGATTATTTATGAAGACGAGGAATGTTTTAGCAATTTCAGGAAATGA

SEQ ID NO: 228 - protein, 258 aa, Streptococcus agalactiae
MTRYKAQISYDGSAFSGFQRQPNCRTVQEEIERTLKRLNSGNDVIIHGAGRTDVGVHAYGQVIHFDLPQARDVEKLRFGLDTQCPDDIDIVKVEQVSDDFHCRYDKHIKTYEFLVDIGRPKNPMMRNYATHYPYPVIIELMQEAIKDLVGTHDFTGFTASGTSVENKVRTIFDAKIQFEASKNLLIFTFTGNGFLYKQVRNMVGTLLKIGNGRMPISQIKTILQAKNRDLAGPTAAGNGLYLKEIIYEDEECFSNFRK

SEQ ID NO: 229 - protein, 644 aa, Streptococcus agalactiae
ATGAAGACGAGGAATGTTTTAGCAATTTCAGGAAATGATATTTTCTCTGGCGGCGGCTTGCATGCAGATTTAGCAACTTACGTTGTTAATAAATTACATGGTTTTGTGGCAGTAACATGCTTAACAGCAATGTCAGATAAAGGGTTTGAAGTCATTCCTATAGAGGCATCTATACTAAAGCAGCAACTAGAAAGTTTAAAAGATGTAGAGTTTGGGTCTATTAAACTAGGATTGCTTCCCAATGTAGAAACAGCACAAGTTGTTTTGGAATTTGTAAAATCAAAACAAGAATGTCCAGTAGTCTTAGACCCAGTCTTAGTTGTAAAGAAAATCATGATTTAGAAGTTAGCCAATTACGTGAGCAGCTAATTGCGTTTTTCCCATATGCTGATGTGATTACTCCTAATTTAGTAGAGGCTCAATTATTGACGGGTCTTTCGATTGAAAACTTAGATCAAATGAAAATTGCTGCTGAGAAACTTTACGATATGGGAGCTAAACATGTTGTTATCAAAGGGGGCAACCGTTTAAATGCTGAAGAGGCTACAGACCTTTACTATGATGGTGAACGTTTTGAAACCTATGTTTTTCCTGTAGTAGATGCCAATAATACAGGTGCTNNNNNCATTCCATTCATTAATTAA

SEQ ID NO: 230 - protein, 214 aa, Streptococcus agalactiae
  VARIANT 208, 209: Xaa = Any Amino Acid
MKTRNVLAISGNDIFSGGGLHADLATYVVNKLHGFVAVTCLTAMSDKGFEVIPIEASILKQQLESLKDVEFGSIKLGLLPNVETAQVVLEFVKSKQECPVVLDPVLVCKENHDLEVSQLREQLIAFFPYADVITPNLVEAQLLTGLSIENLDQMKIAAEKLYDMGAKHVVIKGGNRLNAEEATDLYYDGERFETYVFPVVDANNTGAXXIPFIN

SEQ ID NO: 231 - protein, 609 aa, Streptococcus agalactiae
ATGAATGAATGNNNNNGGGGATGGCGGAATTGGCAGACGCGCAAGACTAAGGATCTTGTGACCGCTTTTGGTCGTGAGGGTTCAAGTCCCTCTCTCCGCAGACTAGTCGAGTTCATTTGGAACTCGACTTTTTGCATATTTAAGATAAAGATGGAGTATCACATGTCAAAAGTACGTGGCTTTGAATTAGTTAGCCAATTTAGCAATAAAGAGTTATTACCAAAACGAGAAACAGCTCACGCAGCTGGCTATGATTTAAAAGTAGCTAAAAAAACGGYTATTGAACCTGGTGAAATTACATTGGTCCCGACCGGTATTAAAGCATACATGCAACCAGGGGAGGTCCTGTACCTTTATGATCGTTCATCGAATCCACGTAAAAAAGGGATTGTCCTAATAAATTCAGTTGGTGTTATTGATGGTGACTACTATAATAACCAAGTCAATGAAGGACATATTTTTGCACAGATGCAAAATATTACTGATCAGGCTGTTATTTTAGAAGAAGGGGAACGGATTGTTCAGGCTGTTTTTGCCCCATTCTTATTGGCAGATGACGATCAGGCTACAGGAATGCGTACAGGTGGTTTTGGTAGTACTGGAAAATAA

SEQ ID NO: 232 - protein, 202 aa, Streptococcus agalactiae
  VARIANT 4, 5, 6, 93: Xaa = Any Amino Acid
MNEXXXGWRNWQTRKTKDLVTAFGREGSSPSLRRLVEFIWNSTFCIFKIKMEYHMSKVRGFELVSQFSNKELLPKRETAHAAGYDLKVAKKTXIEPGEITLVPTGIKAYMQPGEVLYLYDRSSNPRKKGIVLINSVGVIDGDYYNNQVNEGHIFAQMQNITDQAVILEEGERIVQAVFAPFLLADDDQATGMRTGGFGSTGK

SEQ ID NO: 233 - protein, 668 aa, Streptococcus agalactiae
ATGAATGNNNNNGAAGGGGAGCGTCATCACACGTTCCGTATTTTACGGGCAGTCAAAAACCGTTTTGGTTCGACCAATGAAATAGGTATCTTTGAAATGCAGTCGGGTGGTCTAGTTGAAGTTTTGAATCCAAGTCAAGTTTTTCTTGAAGAACGTTTAGACGGTGCAACAGGATCTGCTATTGTTGTTACTATGGAAGGAACAAGGCCTATTTTAGCAGAGGTTCAAGCTTTAGTGACTCCGACTGTTTTTGGAAATGCTAAGCGTACAACAACAGGTCTTGACTTTAATCGTGTCAGTCTTATTATGGCAGTTCTAGAAAAACGTTGTGGTTTATTGCTTCAAAATCAAGATGCCTATTTAAAATCAGCGGGTGGTGTTAAATTGGATGAACCAGCAATTGATTTAGCTGTTGCTGTAGCTATTGCTTCCAGTTACAAAGAAAAACCCACAAATCCACAAGAATCATTTATTGGAGAAATTGGACTCACTGGTGAGATTCGTCGCGTGACACGTATTGAGCAACGTATTAATGAGGCTAGTAAATTGGGCTTTACTAAAATTTACGCACCAAAGAATCTCTAGCTGGGATTGAAATACCTAAAGGCATTGATGTTATTGGTGTGACAACTGTTAGTCAGGTCTTAAAAGCAGTGTTTTCAACATAA

SEQ ID NO: 234 - protein, 222 aa, Streptococcus agalactiae
  VARIANT 3, 4: Xaa = Any Amino Acid
MNXXEGERHHTFRILRAVKNRFGSTNEIGIFEMQSGGLVEVLNPSQVFLEERLDGATGSAIVVTMEGTRPILAEVQALVTPTVFGNAKRTTTGLDFNRVSLIMAVLEKRCGLLLQNQDAYLKSAGGVKLDEPAIDLAVAVAIASSYKEKPTNPQESFIGEIGLTGEIRRVTRIEQRINEASKLGFTKIYAPKNSLAGIEIPKGIDVIGVTTVSQVLKAVFST

SEQ ID NO: 235 - protein, 498 aa, Streptococcus agalactiae
ATGACCACTTATTTTGATAACTTTTTAAAAACCAATCAAGCCTATGCTGACTTACATGGAACAGCTCATCTACCTATCAAGCCAAAGACAAAGGTTGCTATTGTAACCTGTATGGATTCTCGTTTACACGTTGCTCAAGCTCTAGGGCTAGCTTTAGGAGATGCTCATATTTTACGTAATGCTGGTGGACGAGTTACAGACGATGTTCTACGTTCTTTAGTTATTTCGCAACAACAATTAGGAACACGAGAAATCGTTGTTCTACACCATACAGATTGTGGAGCACAGACGTTTACTAACGAAGCTTTTGCTGCTCAATTACAGAGAGATTTGGGTGTTGATATGCATGGACATGATTTTCTTCCTTTTAATGATATTGAAGAAAGCGTTCGTGAAGATGTGGCAAAATTACATGCTTCTCCATTAATCCCAGATGATGTTGTTATTTCTGGTGCTATTTATGATGTAGATACTGGTCGTATGGTGGAAGTTAAATAG

SEQ ID NO: 236 - protein, 165 aa, Streptococcus agalactiae
MTTYFDNFLKTNQAYADLHGTAHLPIKPKTKVAIVTCMDSRLHVAQALGLALGDAHILRNAGGRVTDDVLRSLVISQQQLGTREIVVLHHTDCGAQTFTNEAFAAQLQRDLGVDMHGHDFLPFNDIEESVREDVAKLHASPLIPDDVVISGAIYDVDTGRMVEVK

SEQ ID NO: 237 - protein, 1208 aa, Streptococcus agalactiae
ATGTACGGGGGAACATGTATCAACATTGGATGTATTCCGACAAAAACGCTTTTAGTATCAGCTAGCAAAAATCATGATTTTCAAGAAGCTATGACTACTAGAAATGAAGTTACAAGTCGTTTACGTGCTAAAAATTTTGCTATGTTGGATAATAAAGACACTGTGGATGTTTATAATGCTAAAGCCCGCTTTATATCAAATAAAGTGGTCGAATTAACAGGAGGAGCTGACAAACAAGAACTTACAGCTGATGTTATTATTATCAATACTGGTGCTAAGTCAGTACAATTACCAATCCCAGGATTAGCTGATTCTCAACATGTTTATGATTCAACGGCAATCCAAGAATTGGCTCATCTTCCTAAACGGTTAGGTATCATTGGAGGCGGTAATATTGGGCTTGAATTTGCGACTTTATATTCCGAATTAGGGAGCAAAGTGACAGTTATTGATAGTCAATCCCGTATCTTTGCGCGTGAGGAAGAGGAATTATCAGAGATGGCTCAAGATTATTTAGAAGAGATGGGGATATCTTTTAAATTATCAGCCGATATCAAATCTGTGCAAAATGAAGATGAAGACGTTGTTATTAGCTTTGAGGATGAAAAATTAAGCTTTGATGCAGTATTATATGCAACAGGACGTAAGCCAAATACAGAAGGTTTAGCACTTGAAAATACAGATATTAAATTGACAGAACGTGGAGCTATTGCTGTTGATGAATATTGCCAAACTTCTGTTGAGAATATTTTTGCAGTTGGTGATGTTAATGGCGGCCCTCAATTCACATATATTTCTTTAGATGACTCACGTATTGTCTTAAATTATTTGAATTGTGATAAGGATTATTCTCTAAAAAATCGAGGAGCAGTACCGACTTCAACCTTTACAAATCCTCCTTTAGCAACGGTAGGTCTAGATGAAAAGACCGCTAAGGAAAAAGGATATCAAGTTAAATCTAATAGCCTTCTTGTTTCTGCCATGCCACGTGCACATGTTAATAATGACCTTAGAGGTATTTTTAAAGTTGTGGTAGATACTGAGACAAATCTTATTTTGGGAGCTCGCTTATTTGGTGCAGAATCCCATGAATTAATTAATATCATCACAATGGCAATGGATAATAAAATCCCATATACTTATTTCCAAAAACAAATTTTCACTCACCCAACAATGGTAGAGAATTTTAATGATTTGTTAACTTTTAA

SEQ ID NO: 238 - protein, 402 aa, Streptococcus agalactiae
MYGGTCINIGCIPTKTLLVSASKNHDFQEAMTTRNEVTSRLRAKNFAMLDNKDTVDVYNAKARFISNKVVELTGGADKQELTADVIIINTGAKSVQLPIPGLADSQHVYDSTAIQELAHLPKRLGIIGGGNIGLEFATLYSELGSKVTVIDSQSRIFAREEEELSEMAQDYLEEMGISFKLSADIKSVQNEDEDVVISFEDEKLSFDAVLYATGRKPNTEGLALENTDIKLTERGAIAVDEYCQTSVENIFAVGDVNGGPQFTYISLDDSRIVLNYLNCDKDYSLKNRGAVPTSTFTNPPLATVGLDEKTAKEKGYQVKSNSLLVSAMPRAHVNNDLRGIFKVVVDTETNLILGARLFGAESHELINIITMAMDNKIPYTYFQKQIFTHPTMVENFNDLFNF

SEQ ID NO: 239 - protein, 1437 aa, Streptococcus agalactiae
GTGCGTTATGCACCAAGTCCAACAGGATTGTTACACATCGGAAATGCGCGTACTGCGCTCTTTAACTACCTTTATGCTCGCCATCATGGTGGGGATTTTGTTATTCGTATTGAAGATACTGACCGAAAACGCCACGTCGAAGATGGTGAACGCTCTCAATTGGAGAACTTACGTTGGCTAGGTATGGACTGGGATGAAAGTCCTGAAACACATGAAAATTATCGTCAATCAGAACGCCTTGAGCTCTACCAACGTTATATTGATCAGTTGTTAGCAGAAGGTAAAGCCTACAAGTCCTATGTGACTGAGGAAGAATTAGCAGCAGAGCGTGAACGCCAAGAATTGGCAGGCGAAACACCTCGCTATATCAACGAATTTATCGGAATGTCAGAAACTGAAAAAGAAGCTTACATTGCAGAGCGTGAAGCAGCAGGCATCATTCCGACAGTACGCCTTGCTGTTAATGAATCTGGGATTTATAAATGGACTGATATGGTAAAAGGTGACATTGAGTTTGAAGGCTCTAATATCGGCGGAGACTGGGTTATTCAGAAGAAAGATGGTTATCCAACTTACAATTTCGCAGTAGTCATTGATGATCATGACATGCAAATTTCGCATGTTATCCGTGGCGATGACCATATTGCAAATACGCCAAAACAATTAATGGTTTATGAAGCACTCGGTTGGGAAGCGCCACAATTTGGTCACATGACATTGATTATAAACTCAGAGACTGGTAAGAAATTATCAAAACGCGACACCAATACTCTTCAATTTATCGAAGACTATCGTAAAAAAGGTTATATGTCGGAAGCTGTCTTTAATTTCATTGCCCTTCTTGGCTGGAATCCTGGTGGAGAAGAAGAAATCTTCTCACGCGAGCAATTAATTAATCTATTTGATGAAAATCGTCTTAGCAAATCACCAGCAGCATTCGATCAGAAGAAAATGGATTGGATGAGTAATGATTACCTAAAAAATGCTGATTTTGAGAGTGTTTTTGCACTTTGCAAACCATTCTTAGAAGAAGCTGGTCGACTTACAGACAAAGCTGAAAAATTAGTTGAGCTTTATCAACCTCAATTAAAATCAGCTGATGAGATTGTACCATTAACAGACCTTTTCTTTGCAGATTTTCCAGAACTAACAGAAGCCGAAAAAGAAGTAATGGCAGCTGAAACAGTCCCAACAGTCTTATCTGCTTTTAAGGAAAAGTTAGTATCGCTTTCTGACGAAGAATTCACTAGAGATACTATTTTCCCTCAAATTAAGGCTGTTCAAAAAGAAACAGGTATTAAAGGTAAGAACCTATTTATGCCTATTCGTATTGCGGTTTCTGGTGAAATGCATGGACCAGAGTTACCAGATACTATTTATTTATTAGGTAAAGAAAAATCAGTTCAACATATCGATAATATGTTAGCAAAATTATAA

SEQ ID NO: 240 - protein, 478 aa, Streptococcus agalactiae
MRYAPSPTGLLHIGNARTALFNYLYARHHGGDFVIRIEDTDRKRHVEDGERSQLENLRWLGMDWDESPETHENYRQSERLELYQRYIDQLLAEGKAYKSYVTEEELAAERERQELAGETPRYINEFIGMSETEKEAYIAEREAAGIIPTVRLAVNESGIYKWTDMVKGDIEFEGSNIGGDWVIQKKDGYPTYNFAVVIDDHDMQISHVIRGDDHIANTPKQLMVYEALGWEAPQFGHMTLIINSETGKKLSKRDTNTLQFIEDYRKKGYMSEAVFNFIALLGWNPGGEEEIFSREQLINLFDENRLSKSPAAFDQKKMDWMSNDYLKNADFESVFALCKPFLEEAGRLTDKAEKLVELYQPQLKSADEIVPLTDLFFADFPELTEAEKEVMAAETVPTVLSAFKEKLVSLSDEEFTRDTIFPQIKAVQKETGIKGKNLFMPIRIAVSGEMHGPELPDTIYLLGKEKSVQHIDNMLAKL

SEQ ID NO: 241 - protein, 969 aa, Streptococcus agalactiae
ATGAAATTTGGAAAAAAACTTGGCTTTCTAGCCTTATTGATGTCTATTGTCCTCATTCTAGGTGCATGTGGTAAAACTGGACTTGGAAATTCTTCTGGGAATTCTACAAAAAATGTAACCAAAAAATCTGCTAAAGATTTGAAACTAGGTGTATCTATTTCAACAACTAACAATCCCTACTTTGTTGCGATGAAAGACGGTATTGACAAATATGCTAGCAATAAAAAAATAAGCATTAAGGTAGCTGATGCTCAAGATGACGCCGCACGTCAAGCAGATGATGTCCAAAACTTTATTAGTCAAAACGTAGATGCTATTTTGATTAATCCCGTTGACTCAAAAGCTATTGTAACAGCTATTAAGTCTGCAAACAACGCTAATATTCCTGTTATTCTAATGGACCGTGGTAGTGAGGGAGGCAAAGTATTAACTACTGTCGCTTCAGATAACGTTGCTGCTGGTAAGATGGCTGCGGATTATGCCGTTAAAAAACTAGGCAAAAAAGCAAAAGCCTTTGAATTATCTGGAGTACCAGGTGCCTCTGCTACTGTAGACCGTGGTAAAGGATTTCATTCAGTTGCAAAATCTAAACTTGACATCCTTTCAAGCCAATCTGCCAATTTTGACCGCGCCAAAGCTTTGAATACTACACAAAATATGATTCAAGGACATAAAGATGTCCAAATTATTTTCGCACAAAATGATGAAATGGCACTTGGGGCTGCACAGGCTGTCAAATCTGCTGGCTTGCAAAATGTTCTTATCGTAGGAATTGATGGTCAGCCAGATGCCCATGATGCCATTAAAAAAGGAGATATTTCAGCCACTATTGCACAACAACCAGCTAAGATGGGAGAAATAGCAATTCAAGCAGCAATTGATTATTATAAAGGCAAAAAAGTAGAGAAAGAAACAATTTCTCCAATTTACCTTGTTACCAAAGACAATGTTGAAAAATACAATTGGTAA

SEQ ID NO: 242 - protein, 322 aa, Streptococcus agalactiae
MKFGKKLGFLALLMSIVLILGACGKTGLGNSSGNSTKNVTKKSAKDLKLGVSISTTNNPYFVAMKDGIDKYASNKKISIKVADAQDDAARQADDVQNFISQNVDAILINPVDSKAIVTAIKSANNANIPVILMDRGSEGGKVLTTVASDNVAAGKMAADYAVKKLGKKAKAFELSGVPGASATVDRGKGFHSVAKSKLDILSSQSANFDRAKALNTTQNMIQGHKDVQIIFAQNDEMALGAAQAVKSAGLQNVLIVGIDGQPDAHDAIKKGDISATIAQQPAKMGEIAIQAAIDYYKGKKVEKETISPIYLVTKDNVEKYNW

SEQ ID NO: 243 - protein, 933 aa, Streptococcus agalactiae
ATGATGAAATATATATCAGAGTTAACAACCCTGATTGCGTTAGCTGGTTTAATGGTTATTATCACACTCATTAATCCTAATTTCCTCACAACCAATAATCTACTCAATTTATTATTACAAGTAACTGCAAATGGTTTTATCGCTTTCGGGATGACCTTCGTTATTTTGACTGGCGGTATTGATTTATCAGTCGGGTCCATATTAGCCCTATCTAGTGCATTAACAGCTGGATTAATCGGCCACGGAGTACCCGTTGGTATTGCTATCGTTTTATCTGTTGCCTTAGGTGGCATCTTGGGAATGCTAAACGGACTCTTCATTTCTTACGGAAAATTAGCACCATTTATCGTTACACTGGCAACAATGACTATCTTTAGAGGAGCAACGCTAGTTTATTCAAACGGCAACCCAATTACCGCTGGCTTATCCGATAGTTTTCTATTCCAATTTTTGGGACAAGGCTATATTGTTGGTATCCCATTCCCAGTCATTCTCATGTTTCTTACTTTTATTATTTTGTATATTTTGTTACATAAAACAGCCTTCGGGAAATCTGTTTACGCTTTAGGAGGTAATGAAAAAGCAGCGTATATCTCGGGTATTAAGTTAAACAAAGTTAAAATTATCATCTACACTATCTCAGGTATCATGGCTTCCATTTCTGGGTTAATTATCACATCACGCCTTAGCTCAGCACAACCAACAGCTGGAGCAAGTTATGAGATGGATGCTATTGCCGCCGTTGTCTTAGGTGGAACGTCTTTATCTGGTGGGAAAGGACGTATCATTGGAACATTGATTGGTGCTCTTATTATTGGTGTCCTGAACAATGGATTAAACATCATTGGTGTCTCTGCATTTTGGCAACAAGTTGTGAAAGGTATCGTTATTTTAATGGCTGTTTTACTTGATCGCTTTAAAGTAGCAAAATAG

SEQ ID NO: 244 - protein, 310 aa, Streptococcus agalactiae
MMKYISELTTLIALAGLMVIITLINPNFLTTNNLLNLLLQVTANGFIAFGMTFVILTGGIDLSVGSILALSSALTAGLIGHGVPVGIAIVLSVALGGILGMLNGLFISYGKLAPFIVTLATMTIFRGATLVYSNGNPITAGLSDSFLFQFLGQGYIVGIPFPVILMFLTFIILYILLHKTAFGKSVYALGGNEKAAYISGIKLNKVKIIIYTISGIMASISGLIITSRLSSAQPTAGASYEMDAIAAVVLGGTSLSGGKGRIIGTLIGALIIGVLNNGLNIIGVSAFWQQVVKGIVILMAVLLDRFKVAK

SEQ ID NO: 245 - protein, 1479 aa, Streptococcus agalactiae
ATGAAAATTGACATGAGGAATATCTCCAAATCCTTCGGTACTAATAAAGTTCTAGAAAAGATTGATTTGGAATTACAATCTGGTCAAATACACGCGCTTATGGGTGAAAATGGTGCGGGTAAATCAACCTTAATGAACATTCTAACAGGACTTTTTCCAGCAAGTACAGGAACTATTTATATTGATGGCGAGGAACGAACTTTTTCAAACCCTCAAGAAGCAGAGGAATTTGGTATTAGTTTTATTCACCAAGAGATGAATACTTGGCCGGAAATGACTGTCTTGGAAAATCTCTTTCTTGGACGTGAAATCAAGACAACTTTTGGCTTACTCAATCAAAAATTAATGAGACAAAAAGCACTTGAAACTTTTAAAAGATTAGGTGTGACTATTCCCCTAGACATCCCGATTGGTAACTTGTCTGTTGGACAACAACAAATGATTGAAATCGCCAAAAGTCTCCTAAACCAACTCTCTATTTTGGTAATGGATGAACCGACTGCTGCTTTAACAGATCGTGAAACTGAAAATCTTTTCCGAGTTATCCGAGGTTTGAAACAAGAAGGAGTGGGCGTTGTCTATATCTCCCATCGAATGGAGGAAATTTTTAAAATCACTGACTTCGTAACCGTCATGAGAGATGGTGTCATTGTAGATACAAAAGAAACATCACTCACAAATTCTGACGAATTGGTTAAAAAAATGGTTGGCCGAAAATTGGAAGATTACTATCCTGAAAAACATTCTGAAATTGGGCCTGTTGCTTTTGAAGTTAGTAACCTCTGTGGAGATAATTTCGAGGACGTTTCCTTTTATGTCCGTAAAGGCGAGATTCTTGGATTTTCTGGATTAATGGGAGCTGGGCGTACTGAAGTTATGCGAACTATCTTTGGAATTGATAAAAAGAAGTCTGGTAAGGTGAAAATTGATGACCAAGAAATCACTATTACTACCCCAAGCCAAGCTATCAAGCAGGGCATTGGTTTTTTGACCGAAAATAGAAAAGATGAAGGTCTCATCCTAGACTTCAATATCAAGGACAATATGACTCTCCCTAGCACTAAAGATTTTAGCAAACATGGTTTCTTTGATGAAAAAACAAGCACAACATTTGTGCAACAATTGATTAATCGTCTCTACATTAAATCAGGGAGACCAGATTTAGAGGTTGGAAATCTTTCTGGAGGTAACCAACAAAAGGTCGTTCTCGCTAAATGGATTGGTATTGCTCCTAAAGTCTTAATTCTTGATGAGCCAACGCGTGGTGTTGATGTCGGTGCTAAACGAGAGATTTACCAATTAATGAATGAACTAGCAGACAGAGGTGTTCCAATTGTCATGGTATCATCAGACTTACCTGAAATTCTAGGTGTTAGTGACCGCATCATGGTAATGCACGAAGGTCGAATCAGTGGAGAACTCAGTCGAAAAGAAGCTGACCAAGAAAAAGTTATGCAACTAGCCACAGGAGGTAAGTAA

SEQ ID NO: 246 - protein, 492 aa, Streptococcus agalactiae
MKIDMRNISKSFGTNKVLEKIDLELQSGQIHALMGENGAGKSTLMNILTGLFPASTGTIYIDGEERTFSNPQEAEEFGISFIHQEMNTWPEMTVLENLFLGREIKTTFGLLNQKLMRQKALETFKRLGVTIPLDIPIGNLSVGQQQMIEIAKSLLNQLSILVMDEPTAALTDRETENLFRVIRGLKQEGVGVVYISHRMEEIFKITDFVTVMRDGVIVDTKETSLTNSDELVKKMVGRKLEDYYPEKHSEIGPVAFEVSNLCGDNFEDVSFYVRKGEILGFSGLMGAGRTEVMRTIFGIDKKKSGKVKIDDQEITITTPSQAIKQGIGFLTENRKDEGLILDFNIKDNMTLPSTKDFSKHGFFDEKTSTTFVQQLINRLYIKSGRPDLEVGNLSGGNQQKVVLAKWIGIAPKVLILDEPTRGVDVGAKREIYQLMNELADRGVPIVMVSSDLPEILGVSDRIMVMHEGRISGELSRKEADQEKVMQLATGGK

SEQ ID NO: 247 - protein, 399 aa, Streptococcus agalactiae
ATGAAAAAGACTGGTATATTAAATAGTCATCTCGCTAAATTAGCAGACGACCTTGGGCATACTGATCGAGTTTGTATTGGAGATCTGGGTCTACCTGTTCCAAATGGCATTCCAAAGATTGATTTGTCTTTGACCTCTGGAATACCTAGTTTCCAAGAGGTACTTGATATCTATTTAGAGAATATCTTAGTTGAAAAAGTCATTTTAGCAGAAGAAATCAAGGAAGCAAATCCGGATCAATTATCAAGGTTATTAGCTAAACTTGATAACTCTGTTAGCATAGAGTACGTCAGTCACAATCATTTAAAACAAATGACCCAAGATGTCAAAGCAGTTATTCGTACAGGTGAAAATACACCGTATTCAAATATTATTCTACAATCTGGTGTTATCATCTAG

SEQ ID NO: 248 - protein, 132 aa, Streptococcus agalactiae
MKKTGILNSHLAKLADDLGHTDRVCIGDLGLPVPNGIPKIDLSLTSGIPSFQEVLDIYLENILVEKVILAEEIKEANPDQLSRLLAKLDNSVSIEYVSHNHLKQMTQDVKAVIRTGENTPYSNIILQSGVII

SEQ ID NO: 249 - protein, 471 aa, Streptococcus agalactiae
ATGAAAATTGCTAATTTTTGTAAAGAACATAGTATTAAATTACTCTATAATCCTGCACCATYTAGAGAGACTGATATTGAGATGCTCGATAAGGTCGATTATTTCACACCAAATGAACACGAATGTCAAGAGCTGTTCCCAAACCAAAAACTAGAGGATATATTAGCCACATATCCTGAAAAACTAATCGTAACACTCGGCACAAAAGGAGCCATCTACTCTGATGGAAAAGAAAGTCATTTAATTCCTGCTTTAGAAACTAAAGCTGTTGATACAACTGGTGCAGGTGATACTTTTAACGGTGCATTCGGTTATGCTATCTCGAAAAAATTTAAGATTGCTAAGGCCTTACGTTTTGCAACTCTAGCTGCTCACTTATCCGTGCAAAAATTTGGTGCACAGGGTGGCATGCCTACAATTAAAGAAATGGAGGACAACCAACATTATGAAAAAGACTGGTATATTAAATAG

SEQ ID NO: 250 - protein, 156 aa, Streptococcus agalactiae
  VARIANT 21: Xaa = Any Amino Acid
MKIANFCKEHSIKLLYNPAPXRETDIEMLDKVDYFTPNEHECQELFPNQKLEDILATYPEKLIVTLGTKGAIYSDGKESHLIPALETKAVDTTGAGDTFNGAFGYAISKKFKIAKALRFATLAAHLSVQKFGAQGGMPTIKEMEDNQHYEKDWYIK

SEQ ID NO: 251 - protein, 117 aa, Streptococcus agalactiae
ATGNNNNNCGGAAAAGTTGATACTAAAAAATGGTCTCAGGAGTGGTCAATAATTAAAGAAGCTGATTTAGTTGTATACAAAATGAATTCCTCATCAAGCAAATATGAAAATTGCTAA

SEQ ID NO: 252 - protein, 38 aa, Streptococcus agalactiae
  VARIANT 2, 3: Xaa = Any Amino Acid
MXXGKVDTKKWSQEWSIIKEADLVVYKMNSSSSKYENC

SEQ ID NO: 253 - protein, 579 aa, Streptococcus agalactiae
ATGNNNNNTTCAGGTGTTGCCCAAATCACTCTTTATAATAATGATAATCGAATCATTTACTGTCCTGGAGCCAACGGAAAAGTTGATACTAAAAAATGGTCTCAGGAGTGGTCAATAATTAAAGAAGCTGATTTAGTTGTATTACAAAATGAAATTCCTCATCAAGCAAATATGAAAATTGCTAATTTTTGTAAAGAACATAGTATTAAATTACTCTATAATCCTGCACCATCTAGAGAGACTGATATTGAGATGCTCGATAAGGTCGATTATTTCACACCAAATGAACACGAATGTCAAGAGCTGTTCCCAAACCAAAAACTAGAGGATATATTAGCCACATATCCTGAAAAACTAATCGTAACACTCGGCACAAAAGGAGCCATCTACTCTGATGGAAAAGAAAGTCATTTAATTCCTGCTTTAGAAACTAAAGCTGTTGATACAACTGGTGCAGGTGATACTTTTAACGGTGCATTCGGTTATGCTATCTCGAAAAAATTTAAGATTGCTAAGGCCTTACGTTTTGCAACTCTAGCTGGTAACTTATCCGTGCAAAANNNNNCATTCATTCATTAA

SEQ ID NO: 254 - protein, 192 aa, Streptococcus agalactiae
  VARIANT 2, 3, 187, 188, 189: Xaa = Any Amino Acid
MXXSGVAQITLYNNDNRIIYCPGANGKVDTKKWSQEWSIIKEADLVVLQNEIPHQANMKIANFCKEHSIKLLYNPAPSRETDIEMLDKVDYFTPNEHECQELFPNQKLEDILATYPEKLIVTLGTKGAIYSDGKESHLIPALETKAVDTTGAGDTFNGAFGYAISKKFKIAKALRFATLAGNLSVQXXXFIH

SEQ ID NO: 255 - protein, 987 aa, Streptococcus agalactiae
ATGAGTACGATTAGACAAGTCGCCGAGAAAGCTGGCGTATCAACATCTACTGTCTCAAGGTATATATCCCAAAATGGTTACGTTAGTCAAAAAGCAAGTCAAAAAATCGAGCAAGCTATCCGCGAACTCCATTATGTTCCAAATTTCCTTGCACAATCTCTGAAAACCAAAAAAAATCAACTTGTTGGATTACTACTTCCCGATATTTCAAACCCTTTCTTTCCAAGACTTGCTAGAGGAGTTGAAGAATTTCTAAAAGAACAGGGTTATCGTGTCATGCTTGGCAACACAAATAACAAGAGCCATTTAGAAGAAGAGTACTTAAATGTGCTATTACAAAGTAATGCTGCAGGGATTATTACAACACACGATTTCACCAAAAATCATCCTGAAATAGATATTCCAGTTGTAGTTGTTGACCGCGTTAATCAAGAAACACAGTACGGCGTTTTCTCTGATAATAAAGAGGGAGGAAAATTAGCAGCTCAAGCTATTTGGACAGCAGGTGCTACCAATATATTACTCATTCGTGGTCCGCTAGATAAAGCTGATAACCTTAATCAAAGGTTTCAAGGAAGCCAAAATTACCTATTAAACAAAGGGGCTTGTTTTGCTATCGAAGATAGTGCCAGTTTTGATTTTGCAGAGATTCAAATTGAAGCGAAAACTTTACTTGACCACCATCCAGACATTGATAGCATTATCGCTCCATCTGATATACATGCTATTGCCTACCTACACGAGATTCTTAATCGAGGGAAGCGAATCCCTGAAGATGTACAAATTATTGGTTATGATGATATTTTAATGAGCCAATTTATCTACCCTTCGTTGTCAACTATTCACCAATCATCATATATTATGGGACAAAAAGCAGCTGAATTAATTTTCAAAATTACTAATCAATTACCTATTACCAATAAGCGTATTAAATTACCCGTTCATTATGTCGAACGTGAAACCCTAAGGAGGAAAATAGATGAGTAA

SEQ ID NO: 256 - protein, 328 aa, Streptococcus agalactiae
MSTIRQVAEKAGVSTSTVSRYISQNGYVSQKASQKIEQAIRELHYVPNFLAQSLKTKKNQLVGLLLPDISNPFFPRLARGVEEFLKEQGYRVMLGNTNNKSHLEEEYLNVLLQSNAAGIITTHDFTKNHPEIDIPVVVVDRVNQETQYGVFSDNKEGGKLAAQAIWTAGATNILLIRGPLDKADNLNQRFQGSQNYLLNKGACFAIEDSASFDFAEIQIEAKTLLDHHPDIDSIIAPSDIHAIAYLHEILNRGKRIPEDVQIIGYDDILMSQFIYPSLSTIHQSSYIMGQKAAELIFKITNQLPITNKRIKLPVHYVERETLRRKIDE

SEQ ID NO: 257 - protein, 816 aa, Streptococcus agalactiae
ATGTCACATGCTTGGAAAGAATTAACCTTTTATAAGAAAAAATACCTCCTGATTGAATTGCTAATCATTGTTATGATGTTCATGGTAGTTTTTTTATCAGGTTTAGCAAACGGTTTAGGTAGAGCTGTTAGTGCTGCTATTGAAAATAACCCAGCTCAAACCTATATTTTGAATGAAGGTGCTGAACAAGTGATTACATCATCTGTATTGACAACTAAAGATCAGACAGATTTAAACAGTTTGAATTTAAAAGATAGTACCACTTTAAATATTCAACGTTCGAGTTTAACTCGACAAGGACACGAAAAGAAAATTGATATTTCTTATTTTGCTATTGATAAAGATTCTTTTATGGCACCTACACTTTCTGAGGGAAAACAACTGACAAGTTACAAAAAAGCTATTATTTTAAATGATAGTTTAAAAGCTGAAGGGATAAAGTTAGGTGATAAAGTGATTGATAAGTCATCATCTATATCACTAACAGTCGTTGGATTTGTCCATAATAGTATGTATGGTCACGGACCTGTGGCATTTATTGATAAAGACATTTATACCGAAATTAATAAAAAGATTAATCCTCAATACCAGTTCTTACCTCAGGCATTAGTTATGAAAAATGATAAAAGTATATCTCATTTACCAACTCAATTAGAAGCTGTTAGTAAAAAAGATGTCATTCAACATATTCCTGGTTATAGTGCCGAACAATCCACTTTGAATATGATTTTATGGGTCCTTGTCGTAGCTTCAGCTGGTATTTTAGGTGTCTTTTTCTACATCATCACNNNNNCATTCCATTCATTAATTAATTAA

SEQ ID NO: 258 - protein, 271 aa, Streptococcus agalactiae
  VARIANT 264, 265: Xaa = Any Amino Acid
MSHAWKELTFYKKKYLLIELLIIVMMFMVVFLSGLANGLGRAVSAAIENNPAQTYILNEGAEQVITSSVLTTKDQTDLNSLNLKDSTTLNIQRSSLTRQGHEKKIDISYFAIDKDSFMAPTLSEGKQLTSYKKAIILNDSLKAEGIKLGDKVIDKSSSISLTVVGFVHNSMYGHGPVAFIDKDIYTEINKKINPQYQFLPQALVMKNDKSISHLPTQLEAVSKKDVIQHIPGYSAEQSTLNMILWVLVVASAGILGVFFYIITXXFHSLIN

SEQ ID NO: 259 - protein, 678 aa, Streptococcus agalactiae
ATGGGAAAAGAAAAATTAATTTTAGCTTATTCTGGTGGTTTAGATACCTCTGTTGCTATAGCTTGGTTAAAAAAAGATTATGACGTTATTGCTGTCTGTATGGATGTTGGCGAAGGTAAAGATCTTGATTTTATTCACGATAAGGCTTTAACAATAGGTGCCATAGAATCTTATATTTTAGATGTWAAAGATGAGTTCGCTGAGCATTTTGTTTTACCAGCTTTACAGGCACATGCGATGTATGAACAAAAATACCCGCTTGTTTCAGCGCTTAGTCGTCCAATTATTGCCCAAAAATTAGTTGAAATGGCACATCAAACAGGTGCGACCACAATTGCACATGGCTGTACAGGTAAAGGAAATGACCAAGTGCGTTTTGAAGTTGCAATTGCAGCACTAGATCCTGAATTAAAAGTAATTGCCCCTGTTCGTGAGTGGAAGTGGCATCGTGAAGAGGAAATTACTTTTGCAAAAGCTAACGGCGTACCTATTCCAGCAGATTTAGATAACCCTTATTCTATAGACCAAAATTTATGGGGACGTGCCAATGAATGTGGTGTGCTTGAGAATCCTGGAATCAAGCGCCAGAMGAAGCTTTTGGTATTACAAAATCACCAGAAGAAGCTCCTGATTGTGCAGAATATATTGATATTACGTTCCAAAATGGGAAGCCTATAG

SEQ ID NO: 260 - protein, 226 aa, Streptococcus agalactiae
  VARIANT 197: Xaa = Any Amino Acid
MGKEKLILAYSGGLDTSVAIAWLKKDYDVIAVCMDVGEGKDLDFIHDKALTIGAIESYILDVKDEFAEHFVLPALQAHAMYEQKYPLVSALSRPIIAQKLVEMAHQTGATTIAHGCTGKGNDQVRFEVAIAALDPELKVIAPVREWKWHREEEITFAKANGVPIPADLDNPYSIDQNLWGRANECGVLENPWNQAPXDQLLVLQNHQKKLLIVQNILILRSKMGSL

SEQ ID NO: 261 - protein, 495 aa, Streptococcus agalactiae
ATGACACTAGCAGATTTGATTTTATCGCTAAATGAAATTGCAGGAAAACATGGTATTGGACGCATTGATCATGTTGAAAATCGTTTAGTCGGTATCAAATCACGTGAAATTTATGAATGTCCTGCGGCAATGGTACTGTTAGCTGCTCATAAAGAAATTGAAGATTTAACACTAGTTCGTGAAGTGTCTCATTTTAAACCTATCCTTGAAAATGAACTATCAAATCTTATTTATAATGCTTTATGGTTTAGTCCAGCTACAAAAGCTATCATTGCCTATGTCAAAGAAACACAAAAAGTGGTTAATGGTACTACAAAAGTTAAGTTATATAAAGGTTCTGCCCAAGTCGTTGCTCGCCACTCATCTAATTCATTATATGATGAGAATTTAGCAACCTATACAGCTGCTGATAGCTTTGATCAAGATGCAGCAGTTGGTTTTATCAAACTCTGGGGACTTCCAACCCAAGTTAATGCCCAAGTAAACAAAGGATAA

SEQ ID NO: 262 - protein, 164 aa, Streptococcus agalactiae
MTLADLILSLNEIAGKHGIGRIDHVENRLVGIKSREIYECPAAMVLLAAHKEIEDLTLVREVSHFKPILENELSNLIYNALWFSPATKAIIAYVKETQKVVNGTTKVKLYKGSAQVVARHSSNSLYDENLATYTAADSFDQDAAVGFIKLWGLPTQVNAQVNKG

SEQ ID NO: 263 - protein, 665 aa, Streptococcus agalactiae
ATGACAAAAAATCATAAGTTATGGGGTGGTCGTTTTGAAAGTAGTCTTGAAAAATGGGTTGAAGAGTTCGGTGCATCAATCAGTTTCGACCAAAAATTAGCTCCCTATGATATGAAGGCTTCTATGGCCCATGTCACAATGTTAGGCAAAACGGATATTATTAGTCAAGAAGAAGCAGGCTTGATAAAAGATGGTTTAAAAATACTGCAAGATAAATACAGAGCAGGTCAATTGACTTTTAGCATATCAAATGAAGACATTCATATGAACATAGAGAGCTTATTAACCGCTGAAATTGGAGAAGTAGCAGGTAAGCTTCATACTGCACGTTCACGAAATGATCAAGTGGCTACAGATATGCACCTTTATTTGAAAGATAAATTGCAAGAAATGATGAAGAAATTGCTTCATTTACGAACAACCTTAGTTAATTTAGCAGAAAATCATATCTATACTGTTATGCCAGGGTATACACATTTACAACATGCTCAGCCGATTTCATTTGGACATCATCTAATGGCTTACTATAATATGTTTACGCGTGATACAGAGCGATTAGAGTTTAATATGAAACACACCAATCTATCACCATTAGGAGCTGCTGCTCTAGCAGGGACAACGTTTCCTATTGACCGCCCATATGACAACTCGTTTATTAGATTTGA

SEQ ID NO: 264 - protein, 221 aa, Streptococcus agalactiae
MTKNHKLWGGRFESSLEKWVEEFGASISFDQKLAPYDMKASMAHVTMLGKTDIISQEEAGLIKDGLKILQDKYRAGQLTFSISNEDIHMNIESLLTAEIGEVAGKLHTARSRNDQVATDMHLYLKDKLQEMMKKLLHLRTTLVNLAENHIYTVMPGYTHLQHAQPISFGHHLMAYYNMFTRDTERLEFNMKHTNLSPLGAAALAGTTFPIDRPYDNSFIRF

SEQ ID NO: 265 - protein, 457 aa, Streptococcus agalactiae
ATGACAACTCGTTTATTAGATTTGAAAAACCATATAGTAATTCGCTTGATGCTGTCTCAGATCGTGACTTTATCATAGAATTTTTATCCAATGCTAGCATTTTAATGATGCATTTATCACGTTTTTGTGAAGAAATCATTAATTGGTGCAGTTATGAATATCAATTCATCACATTATCAGATACTTTCTCTACAGGATCATCTATTATGCCTCAAAAGAAAAATCCTGATATGGCAGAATTAATTCGAGGGAAGACAGGCCGTGTTTATGGAAATTTATTTAGTTTACTAACTGTTATGAAATCATTGCCGTTAGCTTATAACAAAGATTTACAAGAAGATAAAGAAGGGATGTTTGATAGCGTAGAAACAGTCAGCATAGCTATTGAAATCATGGCTAATATGCTTGAGACAATGACTGTGAATGAGCACATAATGATGACCTCAACGGAGACTGA

SEQ ID NO: 266 - protein, 152 aa, Streptococcus agalactiae
MTTRLLDFEKPYSNSLDAVSDRDFIIEFLSNASILMMHLSRFCEEIINWCSYEYQFITLSDTFSTGSSIMPQKKNPDMAELIRGKTGRVYGNLFSLLTVMKSLPLAYNKDLQEDKEGMFDSVETVSIAIEIMANMLETMTVNEHIMMTSIGD

SEQ ID NO: 267 - protein, 150 aa, Streptococcus agalactiae
TTGGTTTTAGAATGCAGTAAAAATGGTTCTTATTTACAGGATATACCTTTAAAATATTATCAAGAAATTTCAGAGTTGATAGAAAACGATATCTATGAGATATTAACTGCAAAGACAGCAGTNNNNNCATTCCATTCATTAATTAATTAA

SEQ ID NO: 268 - protein, 49 aa, Streptococcus agalactiae
  VARIANT 42, 43: Xaa = Any Amino Acid
MVLECSKNGSYLQDIPLKYYQEISELIENDIYEILTAKTAVXXFHSLIN

SEQ ID NO: 269 - protein, 809 aa, Streptococcus agalactiae
ATGNNNNNAATTTATTCCAAGAAATGGTRCAAGCTGCCCAGTACACGTCTGAGTAAACAGGCAGAGTATGTCAACTCATTAAATGTATTCCCAGTTCCAGATGGTGATACTGGTACGAATATGGGGATGACTATGGAAAACGGAGCCAAGGAAGTTTCGGACAAACCAGCGACGACTGTTGGAGAAGTTGGTCAAATTCTTTCTAAAGGTGTATTGATGGGAGCACGTGGAAATTCAGGTGTAATTACATCACAATTATTCCGTGGTTTTGGTCAAAGTATCAAGGATAAAGAAGAATTAACGGGTCAAGATTTGGCACACGCTTTCCAGAATGGTGTTGAAGTAGCTTATAAAGCCGTTATGAAACCAGTTGAAGGAACTATCTTGACAGTATCACGCGGTGCAGCTACCGCTGCTCTAAAAAAAGCTGAAGAAACTGATGATGCAGTTGAAGTTATGCGCGCAACTCTCAAAGGTGCTAAGCGTGCTCTTGCTAAAACACCGGATATGCTACCTGTTCTTAAAGAGGTTGGTGTTGTTGATTCTGGTGGTCAAGGACTCGTCTTTATTTACGAAGGTTTCCTCTCAGCACTGACTGGGGAATATATCGCATCAGAAGATTTTAAAGCAACTCCCGCAACAATGACTGAAATGGTTAATGCAGAGCACCATAAAGCTGTAGTAGGCCACGTAGCCACAGAAGATATTAAATATGGCTATTGTACAGAAGTCATGGTTGGTTTAAAGCAAGGACCAACTTACGTTAAGGAWTTAACTACGAAGAATTTCAGGTTATCTTAGCAATCTAA

SEQ ID NO: 270 - protein, 269 aa, Streptococcus agalactiae
  VARIANT 2, 3, 10, 258: Xaa = Any Amino Acid
MXXIYSKKWXKLPSTRLSKQAEYVNSLNVFPVPDGDTGTNMGMTMENGAKEVSDKPATTVGEVGQILSKGVLMGARGNSGVITSQLFRGFGQSIKDKEELTGQDLAHAFQNGVEVAYKAVMKPVEGTILTVSRGAATAALKKAEETDDAVEVMRATLKGAKRALAKTPDMLPVLKEVGVVDSGGQGLVFIYEGFLSALTGEYIASEDFKATPATMTEMVNAEHHKAVVGHVATEDIKYGYCTEVMVGLKQGPTYVKGXNYEEFQVILAI

SEQ ID NO: 271 - protein, 876 aa, Streptococcus agalactiae
ATGNNNNNTCAAGGTTATCTTAGCAATCTAGGGGATTCTTTACTAGTTGTTAATGATGATGAAATTGTCAAGGTTCATGTTCATACAGAAGATCCAGGTCTTGTTATGCAAGAAGGTTTGAAATATGGATCGCTTGTGAAGGTTAAAGTTGAAAACATGCGTAACCAACATGATGCCCAAATGCAAAAGGTTGAAGTTGAAGAAACTGTCAAAGAAACTAAAGAATATGGTATTATTGCTGTTGTAGCTGGTGACGGTCTAGCTGAGATTTTTAAATCACAAGGTGTTGATTATATCATCTCTGGCGGCCAGACTATGAACCCATCTACAGAAGATATTGTAAAAGCGATTGAAAAAGTAAACGCTAGAAATGTTATTATTTTACCAAACAATAAGAACATCTTCATGGCTGCACAGTCAGCTGCAGATGTCGTTGATATTCCAGCAGCAGTAGTAGAGACACGTACAGTTCCACAAGGATTTACTAGCTTACTTGCTTTTGATCCTGCTAAGTCTCTTGAAACTAATGTAGCTGATATGACAAATAGCCTCTCAGATGTCATTAGTGGTAGTGTGACTTTAGCTGTTCGTGATACAACGATAGATGGCCTTGAAATTCATGAAAACGACATCCTTGGGATGGTTGATGGTAAAATTCTAGTATCTACACCAGATATGGAAAAAGCACTTAAAGACACTTTTGATAAAATGATTGATGAAGATAGTGAAATCGTGACAATCTATGTTGGTGAAGATGGTAAGCAAGCATTAGCTGAGACCTTGTCGGAATATCTTGAGGAAACTTATGAAGATGTTGAAGTTGAGATCCACCAAGGAGATCAACCTGTATATCCATACCTCATGAGCGTTGAATAA

SEQ ID NO: 272 - protein, 291 aa, Streptococcus agalactiae
  VARIANT 2, 3: Xaa = Any Amino Acid
MXXQGYLSNLGDSLLVVNDDEIVKVHVHTEDPGLVMQEGLKYGSLVKVKVENMRNQHDAQMQKVEVEETVKETKEYGIIAVVAGDGLAEIFKSQGVDYIISGGQTMNPSTEDIVKAIEKVNARNVIILPNNKNIFMAAQSAADVVDIPAAVVETRTVPQGFTSLLAFDPAKSLETNVADMTNSLSDVISGSVTLAVRDTTIDGLEIHENDILGMVDGKILVSTPDMEKALKDTFDKMIDEDSEIVTIYVGEDGKQALAETLSEYLEETYEDVEVEIHQGDQPVYPYLMSVE

SEQ ID NO: 273 - protein, 885 aa, Streptococcus agalactiae
ATGTCATTAATTATTCTTACGGTTATTTTGGTTTTAGTGATTGTTCTGTTGATAACTTCTTTATACGTTGTTAAACAACAGACAGTAGCCATCATTGAACGCTTTGGTAAATATCAAAAGACTGCTACTAGCGGTATTCATATTCGTGTACCATTGGGTATCGATAAGATTGCAGCACGAGTGCAGTTACGTCTTTTACAGAGTGAAATTATCGTTGAGACAAAAACAAAAGATAATGTTTTTGTCACTTTAAATATTGCTACACAATATCGTGTCAATGAAAATAACGTTACAGACGCTTATTACAAATTAATAAAGCCAGAAGCTCAGATTAAATCTTATATCGAAGATGCTTTGCGTTCATCAGTACCTAAACTTACATTAGACGAGCTATTTGAAAAGAAAGATGAAATAGCCTTGGAAGTTCAACATCAAGTGGCAGAAGAAATGTCAACATACGGCTACATCATTGTTAAGACTTTAATTACTAAGGTTGAGCCAGATGCAGAAGTAAAACAATCCATGAACGAAATCAATGCTGCACAACGTAAACGTGTAGCAGCTCAAGAATTAGCGAATGCTGATAAGATCAAAATTGTAACTGCTGCAGAAGCAGAAGCAGAAAAAGATCGTCTACATGGTGTGGGTATTGCGCAACAACGTAAAGCAATTGTAGATGGGTTAGCTGATTCGATTCAAGAATTGAAAGATGCTAACGTGACATTGACAGAAGAACAAATCATGTCTATCTTGTTAACAAATCAATATTTAGATACTTTAAATACATTTGCTATTAATGGTAATCAAACGATTTTCTTACCAAATAACCCAGAAGGTGTTGAAGATATTCGTACACAAGTTTTATCTGCTCTTAAAACAAGATAA

SEQ ID NO: 274 - protein, 294 aa, Streptococcus agalactiae
MSLIILTVILVLVIVLLITSLYVVKQQTVAIIERFGKYQKTATSGIHIRVPLGIDKIAARVQLRLLQSEIIVETKTKDNVFVTLNIATQYRVNENNVTDAYYKLIKPEAQIKSYIEDALRSSVPKLTLDELFEKKDEIALEVQHQVAEEMSTYGYIIVKTLITKVEPDAEVKQSMNEINAAQRKRVAAQELANADKIKIVTAAEAEAEKDRLHGVGIAQQRKAIVDGLADSIQELKDANVTLTEEQIMSILLTNQYLDTLNTFAINGNQTIFLPNNPEGVEDIRTQVLSALKTR

SEQ ID NO: 275 - protein, 117 aa, Streptococcus agalactiae
ATGGCTGAAAAAACAGACCTATCGTCAGCCTATCGCAGACTTAAAAGTCCTAACATTAAAACTAGAAAACGTGCTCTGAAAATCATTCATGAGTACAAACGTTACGGTAAAAAATAA

SEQ ID NO: 276 - protein, 38 aa, Streptococcus agalactiae
MAEKTDLSSAYRRLKSPNIKTRKRALKIIHEYKRYGKK

SEQ ID NO: 277 - protein, 291 aa, Streptococcus agalactiae
ATGAAACTTAAAATCAGTGTTTTAACAGCAGCTTCAGCTGTCACTCTATTATTAGCTACTTTAGCAAGTCTTGCGAAGGCAGACACAGTGTCTTATCCTTCACGTGATGCCGGATTTGTCTACTCTCGTGGGTATGCGCCTTCTGAATCAAGCTATCCTTCACGCGATGCCGGGTTTATCTACTCTCGTGGGTATGCGCCTTCTGAATCAAGCTATCCTTCACGCGATGCCGGATTTATCTACTCTCGTGGGTATGCTCCAAAACACTTCCTAAGTGCTTACGATAAATAA

SEQ ID NO: 278 - protein, 96 aa, Streptococcus agalactiae
MKLKISVLTAASAVTLLLATLASLAKADTVSYPSRDAGFVYSRGYAPSESSYPSRDAGFIYSRGYAPSESSYPSRDAGFIYSRGYAPKHFLSAYDK

SEQ ID NO: 279 - protein, 108 aa, Streptococcus agalactiae
GTGTCTGCCTTCGCAAGACTTGCTAAAGTAGCTAATAATAGAGTGACAGCTGAAGCTGCTGTTAAAACACTGATTTTAAGTTTCATTATAAAATCCTTTCAAAGATAA

SEQ ID NO: 280 - protein, 35 aa, Streptococcus agalactiae
MSAFARLAKVANNRVTAEAAVKTLILSFIIKSFQR

SEQ ID NO: 281 - protein, 354 aa, Streptococcus agalactiae
ATGACTGAGCAATATTGGAAAGCTAAACCAAAACAATTATCAGGTGGGCAAAAGCAACGTGTCGCAATCGCCCGAGCACTTTCTGTTAACCCAGAAGCTATACTTTTTGATGAACCAACTTCAGCCTTGGATCCAGAAATGGTTGGTGAGGTCCTTAAAACAATGCAAGATCTAGCTAAATCTGGATTAACAATGATAATTGTGACACACGAGATGGAATTTGCTAAAGAAGTATCAGACCGCGTTATTTTCATGGACAAAGGAATCATTGCAGAGCAGGGTACTCCTAAACAACTTTTCGAAAATCCAACACAAGAAAGAACTAAGGAATTTCTACAACGCTTCTTAAAATAA

SEQ ID NO: 282 - protein, 117 aa, Streptococcus agalactiae
MTEQYWKAKPKQLSGGQKQRVAIARALSVNPEAILFDEPTSALDPEMVGEVLKTMQDLAKSGLTMIIVTHEMEFAKEVSDRVIFMDKGIIAEQGTPKQLFENPTQERTKEFLQRFLK

SEQ ID NO: 283 - protein, 584 aa, Streptococcus agalactiae
GTGGATTTCACTAAAGATGTAGCAATAAAAAATCCCCTCCAGTTCCATTGCAATGATGACAATGACAAAACCTGTAGGGGTATAAATAGTCTATATTTAAATGTGAATAAATTTTATTTTAAGAAGCGTTGTAGAAATTCCTTAGTTCTTTCTTGTGTTGGATTTTCGAAAAGTTGTTTAGGAGTACCCTGCTCTGCAATGATTCCTTTGTCCATGAAAATAACGCGGTCTGATACTTCTTTAGCAAATTCCATCTCGTGTGTCACAATTATCATTGTTAATCCAGATTTAGCTAGATCTTGCATTGTTTTAAGGACCTCACCAACCATTTCTGGATCCAAGGCTGAAGTTGGTTCATCAAAAAGTATAGCTTCTGGGTTAACAGAAAGTGCTCGGGCGATTGCGACACGTTGCTTTTGCCCACCTGATAATTGTTTTGGTTTAGCTTTCCAATATTGCTCAGTCATGCCAACAGCATTTAAGTTTTCTTTAGCAATCTTTTCAGCTTCTTGGCGTTCACGTTTTAGAACAGTAGTCTGTGCGACAATAGCATTCTCTAAGATATTTAAATTTTCAAAGGGTAA

SEQ ID NO: 284 - protein, 195 aa, Streptococcus agalactiae
MDFTKDVAIKNPLQFHCNDDNDKTCRGINSLYLNVNKFYFKKRCRNSLVLSCVGFSKSCLGVPCSAMIPLSMKITRSDTSLANSISCVTIIIVNPDLARSCIVLRTSPTISGSKAEVGSSKSIASGLTESARAIATRCFCPPDNCFGLAFQYCSVMPTAFKFSLAIFSASWRSRFRTVVCATIAFSKIFKFSKKV

SEQ ID NO: 285 - protein, 232 aa, Streptococcus agalactiae
ATGACACAAGCTATTTTAGAAATTAAACATTTGAAAAAATCTTACGGAAGCAATGAAGTGTTAAAAGATATTTCGCTTTCGGTCAACAAAGGCGAAGTTATTTCTATCATTGGTTCTTCTGGATCAGGAAAATCAACTTTCCTACGTTCTATTAACCTCTTAGAAGAACCAAGTGGAGGAGAATCTTATATCACGGTCACAATGTTCTTGAAAAAGGCTATGATTTAAATAA

SEQ ID NO: 286 - protein, 77 aa, Streptococcus agalactiae
MTQAILEIKHLKKSYGSNEVLKDISLSVNKGEVISIIGSSGSGKSTFLRSINLLEEPSGGEILYHGHNVLEKGYDFK

SEQ ID NO: 287 - protein, 1551 aa, Streptococcus agalactiae
ATGAAAAAAATATTACTAAGTTTATTCACTGCTTTGCTTATCACCTTTGGAGGTATGACAAGTATACAAGCAGATGAATATCTACGTGTCGGTATGGAGGCAGCCTATGCTCCTTTCAACTGGACACAAAATGATAACACAAATGGTGCAGTTCCTATTGAAGGAACTGATCAATATGCTAATGGTTATGATGTACAAGTCGCTAAAAAGTTAGCTAAAAAGTTAAATAAAAAAGTTGTTGTTGTCAAAACAAAATGGGAAGGCCTTGTTCCAGCACTAACTTCTGGAAAACTCGATATGATTATTGCAGGAATGAGTCCTACCGAAGAACGTAAAAAAGAAATTAATTTTTCAAAGCCTTACTACATTTCAGAACCTACTCTAGTTGTTAATGCTGAAGGAAAATATACTAATGCTAAAAATATTAGTGATTTCAAAAATGCTAAAGTAACTGCCCAACAAGGAGTCTACTTATACAACCTCATTGATCAAATCAATGGTGTCAAAAAAGAAGTTGCCATGGGGGACTTCAATCAATTAAGACAAGCTGTAGAATCTGGTGTTGTAGACGCCTATGTTTCAGAACGTCCAGATGCAACTTCCGCTCAAACTGCTAATCCTAAATTAAAAATGATTGAACTGCACCAAGGGTTTAAAACATCTGATGCCGATACAAATATTTCTGTTGGGATGCGTAAAGGTGACAATCGTATTAATCAAGTTAATCAAGTTCTCGAAAGCATTTCTAGAGATAAACAAATCGCCTTGATGGATAAGATGATTAAAGAACAGCCATCCGTTAAAAAAGAAAAAAATGGGAAACCAAACTTCTTTGAACAGATGGCAACTATTTTAAAAAACAATGGTTCTCAATTCCTCAGAGGAACAGCTACAACCCTCCTAATTTCTATGGTAGGAACAATCGTCGGATTATTTATCGGCCTTCTCATCGGTGTTTTCCGTACAGCACCAAAATCTGACAATAAGTTAAAGGCTGCCTTACAAAAATTATTAGGTTGGTTACTTAACATCTATATTGAGGTCTTCCGCGGGACACCTATGATTGTACAATCGATGGTTATCTACTACGGAACAGCACAAGCTTTTGGAGTTTCGCTGGACCGTACACTAGCAGCTATATTTATTGTTTCAATCAATACTGGTGCTTATATGAGCGAAATTGTACGTGGTGGTATTTTCTCTGTTGATAAAGGACAATTTGAAGCCGCAACTGCACTTGGTTTCACCCACGGACAAACCATGCGAAAAATTGTTCTACCACAAGTTGTACGTAACATACTCCCAGCTACTGGTAATGAGTTTGTTATCAATATCAAAGATACCTCTGTACTGAACGTTATCTCTGTTGTCGAACTCTACTTCTCTGGTAATACTGTTGCAACACAAACCTACCAATATTTCCAAACATTCACCATTATTGCGATTATTTACTTCATCTTAACCTTCACCGTAACACGTATCTTACGTTACATTGAAAAACGTTTTGATTCAGATAATTACACAACCGGTGCGAATCAATTACAAGTCTAG

SEQ ID NO: 288 - protein, 516 aa, Streptococcus agalactiae
MKKILLSLFTALLITFGGMTSIQADEYLRVGMEAAYAPFNWTQNDNTNGAVPIEGTDQYANGYDVQVAKKLAKKLNKKVVVVKTKWEGLVPALTSGKLDMIIAGMSPTEERKKEINFSKPYYISEPTLVVNAEGKYTNAKNISDFKNAKVTAQQGVYLYNLIDQINGVKKEVAMGDFNQLRQAVESGVVDAYVSERPDATSAQTANPKLKMIELHQGFKTSDADTNISVGMRKGDNRINQVNQVLESISRDKQIALMDKMIKEQPSVKKEKNGKPNFFEQMATILKNNGSQFLRGTATTLLISMVGTIVGLFIGLLIGVFRTAPKSDNKLKAALQKLLGWLLNIYIEVFRGTPMIVQSMVIYYGTAQAFGVSLDRTLAAIFIVSINTGAYMSEIVRGGIFSVDKGQFEAATALGFTHGQTMRKIVLPQVVRNILPATGNEFVINIKDTSVLNVISVVELYFSGNTVATQTYQYFQTFTIIAIIYFILTFTVTRILRYIEKRFDSDNYTTGANQLQV

SEQ ID NO: 289 - protein, 1884 aa, Streptococcus agalactiae
ATGAAGAAATGTTTTTTGGCTATTTGTTTAGCTCTTAGTTTTTTTATGGTTTCAGTTCAAGCAGATGAGGTGGACTATAACATTCCTCATTATGAGGGTAATCTAACTATTCACAATGATAATAGTGCTGATTTTACAGAGAAGGTTACTTACCAATTTGATTCGTCCTATAATGGACAGTATGTCACATTAGGTACGGCGGGTAAGTTACCTGACAATTTTGATATTAATAATAAGCCACAGGTTGAAGTTTCAATTAATGGTAAAGTAAGGAAAGTTAGTTACCAGATAGAAGATTTGGAGGATGGCTACCGTTTGAAAGTGTTTAATGGTGGTGAAGCAGGTGATACTGTTAAAGTCAATGTTCAGTGGAAACTAAAAAATGTTCTATTTATGCATAAGGATGTTGGTGAACTTAACTGGATTCCTATTAGCGACTGGGATAAAACGTTAGAGAAAGTAGATTTTTGGATATCAACTGACAAAAAGGTTGCTCTTTCTCGTCTTTGGGGGCACTTGGGTTATCTTAAAACTCCTCCTAAAATAAGACAAAATAATAATCGTTACCATTTGACAGCTTTTAATGTAAACAAACGATTAGAATTTCATGGTTATTGGGATAGATCTTATTTTAATCTACCTACAAACAGTAAAAATAATTACAAGAAAAAAATTGAATATCAAGAGAAGATGATAGAGCGTCATGGTTTTATCCTAAGTTTCTTGTTAAGGATATTATTACCTTCATTCTTTATTATTGTGACACTATTCATCTCAATTAGGGTGTTCCTGTTTAGAAAAAAAGTTAATAAATACGGGCAATTCCCTAAGGAACATCATTTATATGAAGCACCTGAGGACCTTTCACCACTAGAGTTAACTCAAAGCATTTATAGTATGAGTTTTAAAAATTTTCAAGATGAGGAGAAGAAAACTCACCTTATCAGTCAAGAACAACTCATTCAGTCAATTCTATTAGACTTGATTGATAGAAAAGTATTGAATTATGATGATAACTTGTTATCTCTAGCTAACTTAGATAGAGCTTCTGATGCAGAAATAGATTTTATAGAGTTTGCTTTTGCGGATTCTACGAGTTTGAAGCCAGATCAACTCTTTTCTAATTACCAATTTAGTTATAAAGAAACACTACGTGAACTGAAAAAGCAGCACAAGGCTTCAGATCTGCAAACTCAAATGAGACGCCGAGGAAGTAATGCCTTATCAAGAATTACGCGTCTCACAAGGTTGATTTCTAAAGACAATATAAACTCTCTTAGAAGAAAGGGAATTTCATCCCCTTATCGTAAAATGTCTTCAGAAGAGTCTAAAGAATTATCTAGGTTGAAAAGATTCAGTTACCTATCACCTCTTATTTCTTTTGTTGTTATAATTTATACGCTTTTTTTAAATTATTTTACCTATTTCTGTATCTATCTCTTATTGTTTGGTGTTATCCTGTTGTTGAATAAAATCATTTTTATGATGACAAGAAAAATAAGTAACGGTTATATTGTAACTGAAGATGGAGCAAGTCGTGTCTACCAATGGACTAGTTTTAGGAACATGCTAAGGGATATCAAATCGTTTGATCGTTCAGAGTTAGAAAGTATCGTATTATGGAATCGAATATTGGTTTACGCTACTTTATTCGGCTACGCTGACCGTGTTGAGAAAGCACTCAGAGTGAACCAAATAGATATTCCAGAAAGATTTGCAAACATTGATAGTCATCAATTTGCGATTTCAGTCAATCAATCTAGTAATCATTTTTCAACGATAACTGAAGATGTTAGTCACGCTTCTAATTTTAGTGTTAATTCAGGCGGTTCTTCAGGTGGTTTCTCAGGCGGCGGAGGCGGCGGAGGTGGTGGTGCCTTCTAA

SEQ ID NO: 290 - protein, 627 aa, Streptococcus agalactiae
MKKCFLAICLALSFFMVSVQADEVDYNIPHYEGNLTIHNDNSADFTEKVTYQFDSSYNGQYVTLGTAGKLPDNFDINNKPQVEVSINGKVRKVSYQIEDLEDGYRLKVFNGGEAGDTVKVNVQWKLKNVLFMHKDVGELNWIPISDWDKTLEKVDFWISTDKKVALSRLWGHLGYLKTPPKIRQNNNRYHLTAFNVNKRLEFHGYWDRSYFNLPTNSKNNYKKKIEYQEKMIERHGFILSFLLRILLPSFFIIVTLFISIRVFLFRKKVNKYGQFPKEHHLYEAPEDLSPLELTQSIYSMSFKNFQDEEKKTHLISQEQLIQSILLDLIDRKVLNYDDNLLSLANLDRASDAEIDFIEFAFADSTSLKPDQLFSNYQFSYKETLRELKKQHKASDLQTQMRRRGSNALSRITRLTRLISKDNINSLRRKGISSPYRKMSSEESKELSRLKRFSYLSPLISFVVIIYTLFLNYFTYFCIYLLLFGVILLLNKIIFMMTRKISNGYIVTEDGASRVYQWTSFRNMLRDIKSFDRSELESIVLWNRILVYATLFGYADRVEKALRVNQIDIPERFANIDSHQFAISVNQSSNHFSTITEDVSHASNFSVNSGGSSGGFSGGGGGGGGGAF

SEQ ID NO: 291 - protein, 840 aa, Streptococcus agalactiae
ATGTTAATAATTGAATTACTCAAAGCCCTATTTTTAGGAGTCGTTGAGGGAGTGACAGAATGGTTACCTGTTTCTAGTACTGGCCATTTAATCTTGGTTCAAGAGTTTATGAAGTTGAACCAAAGCAAATCCTTTGTTGAAATGTTTAATATTGTTATACAACTTGGGGCAATTATGGCAGTTATTGTCATTTATTTTAAACGCCTTAACCCATTTCAGCCAGGTAAATCTGCTAGAGAAATTCGTTTAACTTGGCAATTATGGTTAAAAGTAGTGATAGCTTGTATTCCATCTATTTTAATTGCTTTACCATTTGATAATTGGTTTGAAGCTCATTTTAATTTCATGATCCCGATTGCAATAGCCCTAATCTTTTATGGTTTTGTCTTCATATGGGTTGAAAAACGTAATGCACACCTCAAACCACAGGTAACCGAATTGGCAAGTATGTCTTACAAGACAGCTTTCTTGATTGGATGCTTCCAGGTTCTCAGTATTGTTCCGGGAACCAGTCGTTCTGGAGCTACTATTTTAGGAGCAATTATTATTGGAACTAGTCGTTCGGTCGCTGCTGACTTTACTTTCTTCCTTGCCATCCCAACTATGTTTGGTTATAGTGGACTTAAGGCGGTTAAATACTTTTTAGATGGTAACGTCTTGAGTTTAGACCAATCTTTAATACTTTTAGTAGCAAGTCTGACAGCTTTCGTAGTTAGTTTATATGTTATTCGTTTCTTGACAGACTATGTCAAACGACACGATTTCACCATCTTTGGTAAGTATCGTATAGTCTTAGGAAGTTTACTCATCCTCTACTGGTTAGTTGTTCATTTATTCTAA

SEQ ID NO: 292 - protein, 279 aa, Streptococcus agalactiae
MLIIELLKALFLGVVEGVTEWLPVSSTGHLILVQEFMKLNQSKSFVEMFNIVIQLGAIMAVIVIYFKRLNPFQPGKSAREIRLTWQLWLKVVIACIPSILIALPFDNWFEAHFNFMIPIAIALIFYGFVFIWVEKRNAHLKPQVTELASMSYKTAFLIGCFQVLSIVPGTSRSGATILGAIIIGTSRSVAADFTFFLAIPTMFGYSGLKAVKYFLDGNVLSLDQSLILLVASLTAFVVSLYVIRFLTDYVKRHDFTIFGKYRIVLGSLLILYWLVVHLF

SEQ ID NO: 293 - protein, 624 aa, Streptococcus agalactiae
ATGGATGAATTAGACTTGCCAGAAAACTTTAAAAATAGTGGTATGTTAAGTTTTCGAGTAACACCTAAAAAAGATCGCATTGATGTTTTTGTTACAAAGTCTGAATTAAGTAAAGATTTAAATTTAGAAGAATTAGCAGATTTGGGTGACATTTCAAAAATGTCTCCAGAAGACTTTTTTAAAACATTGGAACAATCGATGTTGGAAAAAGGGGATACGGATGCCCATGCCAAATTAGCAGAAATTGAAAATATGATGGATAAAGCAACTCAAGAAGTAGTTGAGGAAAATGTTTCTGAAGAACAACCTGAAAAGGAAGTAGAAACGATTGGATATGTTCACTATGTCTTTGATTTTGATAATATTGAAGCTGTAGTTCGATTTTCACAAACGATTGATTTTCCAATAGAAGCTTCTGAACTCTATAAAAATGGTAAAGGCTATCATATGACAATTTTGCTAGACTTGGAAAACCAACCAAGCTACTTTGCTAATTTGATGTATGCTCGAATGCTTGAACATGCTAATGTGGGCACAAAAACACGAGCTTACTTGAAAGAGCATAGTATTCAATTGATTCATGATGATGCTATTTCAAAATTACAAATGATTGAGATGGGATAA

SEQ ID NO: 294 - protein, 207 aa, Streptococcus agalactiae
MDELDLPENFKNSGMLSFRVTPKKDRIDVFVTKSELSKDLNLEELADLGDISKMSPEDFFKTLEQSMLEKGDTDAHAKLAEIENMMDKATQEVVEENVSEEQPEKEVETIGYVHYVFDFDNIEAVVRFSQTIDFPIEASELYKNGKGYHMTILLDLENQPSYFANLMYARMLEHANVGTKTRAYLKEHSIQLIHDDAISKLQMIEMG

SEQ ID NO: 295 - protein, 897 aa, Streptococcus agalactiae
ATGATACCTTTTACAATTGAGTATATTTTTGTATTGATTGGAGCATTTTTATTATCAATCATTCTAACTCCTATTATTCGAGTTATATCTTTGAAGGTAGGAGCGGTTGATAAACCGAACGCTCGAAGAATCAACAAAGTACCAATGCCAAGTAGTGGTGGTTTAGCAATATTTCTCTCCTTTGTTGTAACAACATTATTTTTCATGCCAATGGCGGCCAGTAGACACTTTATAGAAGTCTCTTATTTTCACTACATTTTGCCTGTAATTATTGGCGGTCTCGTAGTTACAACAACAGGATTCATAGATGACATCTTTGAATTAAGACCTCGTTATAAAATGTTGGGAATTATTATTGCAGCTATTATCATATGGAAATTTACACATTTTAGATTTGATAGTTTTAAGATTCCAATAGGTGGTCCACTCTTGGAGTTTGGTCCTATTTTAACTTTCTTTTTGACAGTTTTATGGATTATTTCAATCACTAATGCTATCAATCTGATTGATGGTCTAGATGGTCTAGTTAGTGGTGTTTCAATTATCAGTCTAGCAACGATGGCAGTGGTTTCTTATTTCTTTTTACCTAAAATAGATTTTTTTCTCACGCTAACTATTGTTATTTTAATCGCCTCAATAGTTGGTTTTTTCCCTTATAATTATCATCCAGCCATTATCTACCTAGGTGATGCTGGTGCCTTGTTTATAGGATTTATGATTGGTGTATTATCGCTTCAAGGTTTAAAAAACTCCACAGCTGTTGCAGTGATAACACCTGTCATTATTTTAGGAGTTCCTATTTTGGATACAGCTGTTGCTATTGTGAGGCGTAAATTATCAGGGAAAAAGATTTCTGAAGCTGATAAGATNNNNNCATTCCATTCATTAATTAATTAA

SEQ ID NO: 296 - protein, 298 aa, Streptococcus agalactiae
  VARIANT 290, 291, 292: Xaa = Any Amino Acid
MIPFTIEYIFVLIGAFLLSIILTPIIRVISLKVGAVDKPNARRINKVPMPSSGGLAIFLSFVVTTLFFMPMAASRHFIEVSYFHYILPVIIGGLVVTTTGFIDDIFELRPRYKMLGIIIAAIIIWKFTHFRFDSFKIPIGGPLLEFGPILTFFLTVLWIISITNAINLIDGLDGLVSGVSIISLATMAVVSYFFLPKIDFFLTLTIVILIASIVGFFPYNYHPAIIYLGDAGALFIGFMIGVLSLQGLKNSTAVAVITPVIILGVPILDTAVAIVRRKLSGKKISEADKXXXFHSLIN

SEQ ID NO: 297 - protein, 231 aa, Streptococcus agalactiae
ATGAATGNNNNNGTTATCTTTTCGCTTATCGCTTTGCTTTTAAATGTTTCTAGTCGTATTGGGGGAATTTTTCTTCTATTGGCGCTACTATTAGCGATGGAAATTTTTATAGAAGGTTTAAATATTTGGGGTGAGAATCGGACACCACTATTTAATCTCTTAAAGTTCATTGGCAACAGTGATTACAGACAAAGTGTTATTGCTAAATATAGCGATAAGCATCAAAAATAA

SEQ ID NO: 298 - protein, 76 aa, Streptococcus agalactiae
  VARIANT 3, 4: Xaa = Any Amino Acid
MNXXVIFSLIALLLNVSSRIGGIFLLLALLLAMEIFIEGLNIWGENRTPLFNLLKFIGNSDYRQSVIAKYSDKHQK

SEQ ID NO: 299 - protein, 771 aa, Streptococcus agalactiae
ATGTCTGTACTTGAAATCAAAAATCTTCATGTTTCTATTGAAGATAAAGAAATTTTAAAAGGTCTTAATTTAACGTTGAAAACAGGAGAAATTGCTGCTATCATGGGTCCAAATGGTACTGGGAAGTCGACACTTTCAGCAGCTATTATGGGAAATCCTAATTATGAAGTTACAGCAGGTGAAATTCTTTTTGATGGTGAAGATATTTTAGAGCTAGAAGTGGATGAACGTGCTCGTTTGGGTCTATTTCTTGCCATGCAATACCCTTCAGAGGTTCCAGGGATTACTAATGCTGAATTTATCCGAGCAGCTATGAATGCGGGAAAGGCTGATGATGATAAAATTTCCATCCGCCAATTTATCACTAAGTTAGATGAAAAGATGGAACTACTTGGCATGAAAGAAGAAATGGCGGAACGTTATCTTAACGAAGGTTTTTCAGGTGGTGAGAAGAAGCGCAATGAAATTTTACAACTCCTAATGTTAGAGCCTAAGTTTGCCCTCTTGGATGAGATTGACTCTGGCCTTGATATTGATGCTCTTAAAGTGGTATCAAAGGGAGTCAATGAAATGCGTGGTGAAGGTTTTGGTGCTATGATTATTACACACTATCAACGCCTTTTGAATTACATTACACCAGATAAAGTACACGTTATGATGGACGGGAAGGTAGTATTGTCAGGAGGACCAGAATTAGCGGTTCGCCTTGAGAAAGAAGGTTATGCTCAAATCGCTGAAGAGCTTGGTTTAGAGTATAAAGAAGAAGTCTAA

SEQ ID NO: 300 - protein, 256 aa, Streptococcus agalactiae
MSVLEIKNLHVSIEDKEILKGLNLTLKTGEIAAIMGPNGTGKSTLSAAIMGNPNYEVTAGEILFDGEDILELEVDERARLGLFLAMQYPSEVPGITNAEFIRAAMNAGKADDDKISIRQFITKLDEKMELLGMKEEMAERYLNEGFSGGEKKRNEILQLLMLEPKFALLDEIDSGLDIDALKVVSKGVNEMRGEGFGAMIITHYQRLLNYITPDKVHVMMDGKVVLSGGPELAVRLEKEGYAQIAEELGLEYKEEV

SEQ ID NO: 301 - protein, 1263 aa, Streptococcus agalactiae
ATGTCTAAAGAAGCTATATTAAATTTTTTACAAGCCAAAGGTGAGCCTACTTGGTTACAAGAATTACGACTAAAGGCTTTTGAAAAAATAGAAGAACTAGAATTACCAGTAATTGAACGTGTAAAATTTCATAGATGGAATTTAGGTGATGGAACCATTTTAGAGAATGACTATACAGCTAACGTTCCAGATTTCACAGAGTTAGGAAACAATCCCAAGTTGGTTCAAATTGGGACCCAAACCGTCCTTGAACAAGTTCCTATGGAATTAATAGAGAAAGGCGTTGTCTTTACAGATTTCTATTCGGCCTTGGAAGAAATTCCAGAAGTCATAGAGCGCTACTTTGGGAAAGCACGTCCTTTTGAAGAAGATAGACTTGCTGCCTATCACACAGCTTACTTCAACAGTGGTGCAGTGCTTTATATTCCAGATAATGTTGAAATTACTCAACCAATCGAAGGTCTTTTTTATCAAGATAGTCAGTCTAAAGTACCATTTAATAAGCATATCCTTCTTATTGTTGGAAAGAATGCAAAAGTTAGTTACTTAGAGCGATTTGAGTCAATTGGTGATGGGACAGAACGAACAAGTGCTAATATTTCTGTAGAAGTAATTGCCCAAGCAGGTAGCCAAATTAAATTTGCTTCAATTGATCGCCTCGGAGAAAATGTGACAACGTTTATAAGTCGTCGTGGTCGTCACAGTAGCGATGCAACAATAGATTGGGCCCTTGGGGTGATGAATGAAGGCAATGTTGTTGCTGACTTTGATTCTGATTTAATTGGTGATGGAAGTCACGCTAATTTAAAAGTAGTTGCTGCCTCGTCAGGGCGTCAAGTTCAAGGAATTGATACGCGTGTTACAAACTACGGCTGTAATTCAGTAGGACATATTTTACAGCATGGGGTTATTTTAGAGCGTGGGACTCTTACTTTTAATGGTATCGGACATATTATAAAAGGTGCAAAGGGAGCAGACGCCCAACAAGAAAGCCGAGTTCTCATGTTATCAGACAAAGCACGTTCAGATGCTAATCCTATCCTTTTGATTGATGAAAATGATGTTACAGCTGGTCACGCAGCCTCAATTGGTCAGGTTGACCCAGAGGATTTATATTATTTGATGAGCCGAGGCTTGAACCAAAAAACAGCAGAGCAATTAGTTATTCGTGGATTTTTAGGAACAGTCATTGCTGAAATACCAGTAAAAGAAGTTCGCGATGAAATGATTGCCGTTATTGATACAAAACTAGAAAAACGTTAA

SEQ ID NO: 302 - protein, 420 aa, Streptococcus agalactiae
MSKEAILNFLQAKGEPTWLQELRLKAFEKIEELELPVIERVKFHRWNLGDGTILENDYTANVPDFTELGNNPKLVQIGTQTVLEQVPMELIEKGVVFTDFYSALEEIPEVIERYFGKARPFEEDRLAAYHTAYFNSGAVLYIPDNVEITQPIEGLFYQDSQSKVPFNKHILLIVGKNAKVSYLERFESIGDGTERTSANISVEVIAQAGSQIKFASIDRLGENVTTFISRRGRHSSDATIDWALGVMNEGNVVADFDSDLIGDGSHANLKVVAASSGRQVQGIDTRVTNYGCNSVGHILQHGVILERGTLTFNGIGHIIKGAKGADAQQESRVLMLSDKARSDANPILLIDENDVTAGHAASIGQVDPEDLYYLMSRGLNQKTAEQLVIRGFLGTVIAEIPVKEVRDEMIAVIDTKLEKR

SEQ ID NO: 303 - protein, 1233 aa, Streptococcus agalactiae
ATGACATTACTAGATAGTTATAAACTAAAGCAAGATTTCCCAATTTTAAATCAATTAGTTAATGATGAGCCGCTTATCTATTTAGATAATGCAGCAACGACACAAAAACCGAATCAAGTTTTAGAAGCTTTGCGAGACTACTACCAAAACGACAATGCAAATGTCCATCGTGGTGTTCATACTTTAGCAGAACGAGCGACTGCTCAGTACGAGAATGCTCGTGAAAAAGCAAGGCAGTTTTTAAATGCTAAATTAAGTAAAGAAATTTTATTCACACGTGGCACCACAACAGGATTAAATTGGGTAGCTAAGTTTGCCGAAAGTATTTTAGAACGAGGTGATGAGGTACTTATTTCCATTATGGAGCATCATTCTAATATTATCCCATGGCAACAAGCTTGCGAGAGAACTGGCGCTAAATTGGTTTATGCCTATCTAAAAGATGGTTCTTTAGATTTAGAAGATTTCTATAATAAATTATCCTCTAAAACTAAATTTGTTAGTTTGGCACATATCTCAAATGTACTTGGCTGTGTTACACCAGTAAAAGCAATAGCAGAACGTGTACATCAAGTTGGGGCATACATGGTTGTTGATGGAGCTCAATCAGCGCCACATATGGCGATTGATGTTCAAGACCTTGATTGTGATTTCTTCGCCTTATCTGGCCATAAGATGCTTGGTCCTACTGGTATTGGTGTTCTTTATGGGAAAGAAAGCATTTTAGATAAGATGCCACCTGTCGAATTTGGTGGTGAAATGATTGATTTTGTCTATGAGCAAAGTGCAACATGGAAGGAATTGCCCTGGAAGTTTGAAGCTGGAACGCCTAATATTGCTGGAGCGATCGCTTTTGGAGAAGCTTTAGATTATTTAACGGATGTTGGTATGGATGAGATTCATCAATATGAACAAAGTTTAGTTTCTTATGTGTTGCCTAAATTACAGGCTATCGATGGTTTAACTATTTACGGACCTAGTGATGCTGAATCTCATGTAGGCGTTATTGCCTTCAATTTAGAAGGTTTACACCCACATGATGTGGCAACTGCAATGGATTACGAAGGAGTGGCTGTTCGTGCAGGTCATCATTGTGCACAACCCCTTATTAATCATCTTGGTATCCATTCGGCGGTTCGAGCAAGTTTCTATTTCTATAATACCAAAGAGGATTGCGACAAATTGGTAGACGCTATCCAAAAAACTAAGGAGTTTTTCAATGGCACTCTCTAA

SEQ ID NO: 304 - protein, 410 aa, Streptococcus agalactiae
MTLLDSYKLKQDFPILNQLVNDEPLIYLDNAATTQKPNQVLEALRDYYQNDNANVHRGVHTLAERATAQYENAREKARQFLNAKLSKEILFTRGTTTGLNWVAKFAESILERGDEVLISIMEHHSNIIPWQQACERTGAKLVYAYLKDGSLDLEDFYNKLSSKTKFVSLAHISNVLGCVTPVKAIAERVHQVGAYMVVDGAQSAPHMAIDVQDLDCDFFALSGHKMLGPTGIGVLYGKESILDKMPPVEFGGEMIDFVYEQSATWKELPWKFEAGTPNIAGAIAFGEALDYLTDVGMDEIHQYEQSLVSYVLPKLQAIDGLTIYGPSDAESHVGVIAFNLEGLHPHDVATAMDYEGVAVRAGHHCAQPLINHLGIHSAVRASFYFYNTKEDCDKLVDAIQKTKEFFNGTL

SEQ ID NO: 305 - protein, 444 aa, Streptococcus agalactiae
ATGGCACTCTCTAAATTAGATAATCTCTACATGGCAGTGGTAGCTGATCATTCAAAACACCCTCATCATCATGGATTTTTAGAAGGCGTTGAACAAGTGCAGTTAAATAATCCTACATGTGGAGATGTTATTTCCTTATCTGTTAAATTTGATGGAAATATTATTTCAGATATTGCATTTGCTGGTAATGGTTGTACAATTTCTACGGCTTCATCAAGCATGATGACAGATGCAGTTATTGGGAAAACAAAAGAAGAAGCATTGCAGCTTGCTGATGTATTCTCCAAAATGGTTCAAGGCGATCAAAATCCAAAACAAGAGAAACTTGGGGATGCAGAGTTTCTAGCTGGGGTATCAAAATTTCCACAACGTATCAAATGTGCTACGCTTTCGTGGAATGCTTTAAGAAAGGCTATTGAGAGAGATAATCAGGCAGAACTCTGA

SEQ ID NO: 306 - protein, 147 aa, Streptococcus agalactiae
MALSKLDNLYMAVVADHSKHPHHHGFLEGVEQVQLNNPTCGDVISLSVKFDGNIISDIAFAGNGCTISTASSSMMTDAVIGKTKEEALQLADVFSKMVQGDQNPKQEKLGDAEFLAGVSKFPQRIKCATLSWNALRKAIERDNQAEL

SEQ ID NO: 307 - protein, 1418 aa, Streptococcus agalactiae
ATGTCCGAAATAAATGAAAAAGTAGAACCACAGCCAATAGATCTTGGGGAATATAAATTTGGATTTCATGACGATGTAAGCCAATTTATTCTACGGGAAAAGGTCTAAATGAGGCTGTTATTCGTGAGTTATCTGCAGCTAAGGGTGAACCTGAGTGGATGTTGGACTTTCGTCTAAAATCCTTGGAAACGTTTAATAAAATGCCAATGCAGACCTGGGGAGCAGATTTATCAGATATTGATTTTGATGATATTATTTATTATCAAAAAGCATCTGATAAACCTGCGCGTGATTGGGATGATGTTCCAGAAAAAATCAAAGAAACTTTTGAAAGAATTGGGATTCCAGAAGCTGAAAGAGCTTATCTTGCAGGAGCATCAGCACAATATGAATCAGAAGTGGTTTATCATAATATGAAAGAAGAATATGATAAGCTGGGTATTGTTTTTACGGATACTGACTCTGCACTTAAAGAGTACCCAGAGCTATTCAAAAAATATTTTGCTAAACTTGTCCCTCCAACAGATAATAAATTAGCTGCTCTGAACTCTGCTGTATGGTCAGGTGGAACATTTATTTATGTCCCTAAAGGTGTTAAGGTGGATATTCCACTTCAAACTTACTTCCGTATTAATAATGAAAATACTGGACAATTTGAACGTACTCTCATTATTGTCGATGAGGGAGCAAGTGTTCACTATGTTGAAGGTTGTACCGCCCCAACTTATTCTTCAAATAGTTTACATGCAGCTATAGTTGAAATTTTTGCACTTGATGGAGCTTATATGCGCTATACGACTATTCAAAATTGGTCCGATAATGTCTATAATTTAGTGACAAAACGTGCTACCGCTAAAAAAGATGCAACAGTTGAGTGGATAGATGGAAATCTAGGTGCTAAAACAACAATGAAATACCCATCGGTTTACCTTGATGGTGAAGGAGCACGTGGCACGATGTTGTCTATTGCTTTTGCAAACAAAGGACAACACCAAGATACGGGTGCAAAGATGATTCATAATGCTCCCCATACTAGTTCATCCATTGTCTCTAAATCAATTGCTAAGGGTGGAGGAAAAGTTGATTATCGAGGTCAAGTGACATTTAATAAAGATTCCAAAAAATCAGTGTCACATATAGAATGTGACACCATATTGATGGATGATATTTCAAAATCAGATACCATACCGTTTAATGAGATTCATAATTCACAGGTTGCTTTAGAGCATGAAGCAAAGGTGTCTAAGATTTCTGAAGAGCAACTGTACTACTTGATGAGTCGAGGTTTATCTGAAGCTGAGGCAACAGAAATGATTGTTATGGGGTTTGTTGAGCCCTTTACGAAAGAATTACCAATGGAATATGCGGTAGAGTTAAACCGCTTAATTTCCTATGAAATGGAAGGTTCAGTTGGTTAA

SEQ ID NO: 308 - protein, 472 aa, Streptococcus agalactiae
MSEINEKVEPQPIDLGEYKFGFHDDVKPIYSTGKGLNEAVIRELSAAKGEPEWMLDFRLKSLETFNKMPMQTWGADLSDIDFDDIIYYQKASDKPARDWDDVPEKIKETFERIGIPEAERAYLAGASAQYESEVVYHNMKEEYDKLGIVFTDTDSALKEYPELFKKYFAKLVPPTDNKLAALNSAVWSGGTFIYVPKGVKVDIPLQTYFRINNENTGQFERTLIIVDEGASVHYVEGCTAPTYSSNSLHAAIVEIFALDGAYMRYTTIQNWSDNVYNLVTKRATAKKDATVEWIDGNLGAKTTMKYPSVYLDGEGARGTMLSIAFANKGQHQDTGAKMIHNAPHTSSSIVSKSIAKGGGKVDYRGQVTFNKDSKKSVSHIECDTILMDDISKSDTIPFNEIHNSQVALEHEAKVSKISEEQLYYLMSRGLSEAEATEMIVMGFVEPFTKELPMEYAVELNRLISYEMEGSVG

SEQ ID NO: 309 - protein, 609 aa, Streptococcus agalactiae
ATGNNNNNCAATGCTACTAACGTTACGACTGCACGTGATCTATCAATTTTAACCTATCATTTCCTTAAAAAATACCCTGATATACTGAACTATACAAAATATCCTGAAGTCAAGGCCATGGTCGGAACTCCTTATGAAGAAACATTTACAACTTATAACTACTCTACCCCCGGCGCTAAATTTGGATTAGAAGGAGTAGATGGCTTAAAAACTGGTTCTAGCCCTAGCGCTGCTTTTAATGCCTTAGTTACAGCTAAACGCCAGAATACTCGCTTGATAACTGTGGTTTTAGGAGTTGGTGATTGGTCAGACCAAGACGGAGAGTACTATCGTCATCCGTTTGTCAACGCTCTTGTAGAAAAAGGTTTTAAAGACGCTAAAAATATTTCTTCTAAAACTCCTGTATTAAAAGCCGTTAAACCTAAAAAAGAAGTTACTAAAACCAAAACCAAATCTATTCAAGAACAGCCTCAAACAAAAGAACAGTGGTGGACAAAAACAGATCAATTTATTCAATCACATTTTGTATCTATTTTAATTGTTCTGGGCACCATCGCTATCCTTTGTCTTTTAGCTGGGATAGTATTACTTATAAAGCGCTCTAGATAA

SEQ ID NO: 310 - protein, 202 aa, Streptococcus agalactiae
  VARIANT 2, 3: Xaa = Any Amino Acid
MXXNATNVTTARDLSILTYHFLKKYPDILNYTKYPEVKAMVGTPYEETFTTYNYSTPGAKFGLEGVDGLKTGSSPSAAFNALVTAKRQNTRLITVVLGVGDWSDQDGEYYRHPFVNALVEKGFKDAKNISSKTPVLKAVKPKKEVTKTKTKSIQEQPQTKEQWWTKTDQFIQSHFVSILIVLGTIAILCLLAGIVLLIKRSR

SEQ ID NO: 311 - DNA, 315 bp, Streptococcus agalactiae
  misc_feature 289, 290, 291, 292, 293: n = A,T,C or G
atgcctaaattaatcgtatctttcctctgcattttattatccctgacttgtgtaaactctgtgcaagctgaagaacataaagatattatgcaaattacccgagaagccggatatgatgttaaagatattaataaacctaaagcgtctatcgttattgacaataaaggtcatattttgtgggaagataacgctgatttagaacgtgatcccgctagcatgtctaaaatgkttactttatatttactatttgaagacttasctaaaggaaaaacaagcccccacaccacannnnncattcattcattaattaattaa

SEQ ID NO: 312 - protein, 104 aa, Streptococcus agalactiae
  VARIANT 77, 87, 97, 98: Xaa = Any Amino Acid
MPKLIVSFLCILLSLTCVNSVQAEEHKDIMQITREAGYDVKDINKPKASIVIDNKGHILWEDNADLERDPASMSKMXTLYLLFEDLXKGKTSPHTTXXIHSLIN

SEQ ID NO: 313 - DNA, 567 bp, Streptococcus agalactiae
atgctaccagatatgcctgtctttagaccaggtattacaggtttgaaaactgggacaacggaattagctggccaatcttttattgctacatctactgaaagtggaatgagactactcactgttattatgcatgctgataaggccgataaagacaaatatgctcgctttacagcaactaactctctcttgaactatatcacaaacacctacgaacctaaccttgtattagctaaaggagctgcatataaaggtaaagaagcaagtgtgagagacggaaaagaacaatcggtcatcgctgttgctaaaaacgatttgaaagtagtacagaagaaaaatatcactaaacaaaatcagttaaaaattaactttaaaaaagagcttactgctcctattacaaaaaaagagaacctagggaaagcttattacgttgaccttaataaggttggaaaaggctatctcataaaggaacctagcgttcatttagtggcaaaagatagtattgagcgcagtttcttcctcaragtgtggtggaatcattttgtgcgctacgttaacgaaaaactttaa

SEQ ID NO: 314 - protein, 188 aa, Streptococcus agalactiae
  VARIANT 174: Xaa = Any Amino Acid
MLPDMPVFRPGITGLKTGTTELAGQSFIATSTESGMRLLTVIMHADKADKDKYARFTATNSLLNYITNTYEPNLVLAKGAAYKGKEASVRDGKEQSVIAVAKNDLKVVQKKNITKQNQLKINFKKELTAPITKKENLGKAYYVDLNKVGKGYLIKEPSVHLVAKDSIERSFFLXVWWNHFVRYVNEKL

SEQ ID NO: 315 - DNA, 240 bp, Streptococcus agalactiae
atgattccaattttaactctaattggccctttggcggcgggtctgttaactggttctgcactaattgagcagattttctcgattccaggaattgggcagcagtttgttacttcgattccaacaaaagactatcctgttattatggggacaaccattgtttatgcagtaatgttgatggttgctatcttgataacagacgttgttattagtatcgtagacccacgtgttcgcttgcagtaa

SEQ ID NO: 316 - protein, 79 aa, Streptococcus agalactiae
MIPILTLIGPLAAGLLTGSALIEQIFSIPGIGQQFVTSIPTKDYPVIMGTTIVYAVMLMVAILITDVVISIVDPRVRLQ

SEQ ID NO: 317 - DNA, 1032 bp, Streptococcus agalactiae
atggcagataaaaacagaacatttaaacttgtaggtgcaggatcttctagcacacaagaaaaaattgaaaagcctgctctttcgtttatgcaagatgcgtggcgtcgcttgaaaaaaaacaaattagcagtagtttcagtctatttattagctcttttacttactttttcgttagcctcaaatttatttgtaactcagaaggatgctaatgggtttgattcgaaaaaagtaactacatatcgcaacttaccacctaaattgagttcaaaccttcctttttggaatggtagcattaagtacgctggaaatacagaatctacagacgcttataagtctcaaaatgtccctgaaaaagttaagtatgctttaggtacagattctctagggagaagtgttgctaagcgcatcatcgtaggtattcggatttccttacttgtagctattgcagctacattcattgatttaattatcggtgttacatacggtcttgtttcaggttttgctggaggacgccttgatacattaatgcaacgtatcgtagaggtaatttcatcaattccaaacttagttatcgttacaatgttaggtttggtccttggtaacggtattacggctattattatctctattgcttttaccggatggacttctatgtctcgtcaggtaaggaatttaaccctatcatatcgagaaagagagtttgtgcttgctgcacgttcacttggggaaagtccaattaaaatagccttcaaacatattttacctaacatttctggtattatcattgtacaaattatgatgacaatcccaagtgctattatgtatgaagcggtactttcagcaatcaatttaggtgttaaaccaccgacagcttcattaggatcattgatttcagatgcacaagaaaatttacaatattatccatatcaagttatcttgccagctttagcattggtaatgatttcattggcatttattttgcttggtgatgggttgcgagatgcttttgatccaaaatctagcgatgaataa

SEQ ID NO: 318 - protein, 343 aa, Streptococcus agalactiae
MADKNRTFKLVGAGSSSTQEKIEKPALSFMQDAWRRLKKNKLAVVSVYLLALLLTFSLASNLFVTQKDANGFDSKKVTTYRNLPPKLSSNLPFWNGSIKYAGNTESTDAYKSQNVPEKVKYALGTDSLGRSVAKRIIVGIRISLLVAIAATFIDLIIGVTYGLVSGFAGGRLDTLMQRIVEVISSIPNLVIVTMLGLVLGNGITAIIISIAFTGWTSMSRQVRNLTLSYREREFVLAARSLGESPIKIAFKHILPNISGIIIVQIMMTIPSAIMYEAVLSAINLGVKPPTASLGSLISDAQENLQYYPYQVILPALALVMISLAFILLGDGLRDAFDPKSSDE

SEQ ID NO: 319 - DNA, 1047 bp, Streptococcus agalactiae
atggaaaaagaaactattttaagtgttaataatcttcatgttgacttccacacatatgctggagaagtaaaagcaattcgtgatgtcaactttgaattaaaaaaaggtgagactcttgcaatcgttggtgaatctggttcaggaaaatctgtaactaccagaactttaattggtttaaatgctaaaaattcagagatatcagggaatgttcaatttaaggggcgtaaccttgttgaactatcagaagaagagtggactaaggtacgcgggaatgagatttctatgattttccaagaccctatgactagtttggatccaacgatgaaaattggcatgcaaatagcagaaccaatgatgattcatcaaaaaatttcaaaaaaggatgctttaaaattagctcttgagctaatgaaagatgtaggtatcccaaatgctgaagagcatattaatgattacccacatcagtggtctggaggaatgcgccaacgtgcggttatagcgattgctttagctgctgatcctgaaattcttattgctgatgaaccaacgactgctttagatgtaacaattcaagcacaaattttgaacttaatgaaaaaaattcaagcagaacgagactcctccattgttttcataactcatgacttaggggtcgttgcagggatggcagaccgtgtagcagttatgtatgcagggaaaattgttgaatttggaactgttgatgaagtcttttataatccacaacatccatatacttggggattattgaattcaatgccgacaaccgacacagaatcaggtagtttagagtcaattccgggaacaccaccagatttgttgaacccacctaaaggagatgcatttgcagctcgtaatgaatttgcattagatattgatcatgaagaagaaccaccgtacttcaaagtttcagaaacacatttcgctgctacatggcttttagatgaaagatcacctaaggtgcttcctccattaccgatccaaaaacgttgggaaaaatggaacgagattgaagggaggaaagcctaa

SEQ ID NO: 320 - protein, 348 aa, Streptococcus agalactiae
MEKETILSVNNLHVDFHTYAGEVKAIRDVNFELKKGETLAIVGESGSGKSVTTRTLIGLNAKNSEISGNVQFKGRNLVELSEEEWTKVRGNEISMIFQDPMTSLDPTMKIGMQIAEPMMIHQKISKKDALKLALELMKDVGIPNAEEHINDYPHQWSGGMRQRAVIAIALAADPEILIADEPTTALDVTIQAQILNLMKKIQAERDSSIVFITHDLGVVAGMADRVAVMYAGKIVEFGTVDEVFYNPQHPYTWGLLNSMPTTDTESGSLESIPGTPPDLLNPPKGDAFAARNEFALDIDHEEEPPYFKVSETHFAATWLLDERSPKVLPPLPIQKRWEKWNEIEGRKA

SEQ ID NO: 321 - protein, 933 aa, Streptococcus agalactiae
ATGACTGAAAATCGAAAAAAATTAGTTGAAGTCAAAAATGTTTCTTTGACCTTCAATAAAGGAAAAGCTAATGAAGTGAGAGCAATTGATAATGTTAGTTTTGACATTTATGAAGGTGAAGTGTTTGGATTAGTTGGGGAATCTGGATCAGGAAAGACAACCGTTGGACGTTCAATTTTAAAACTTTATGATATTTCTGATGGAGAAATTACCTTTAATGGAGAAGTGATCTCACATCTGAAAGGTAAAGCATTACATAGTTTTCGTAAAGACGCTCAGATGATTTTTCAGGATCCTCAGGCTAGCTTAAACGGCCGTATGAAGATTCGTGATATCGTAGCAGAAGGTTTAGATATACATAAATTAGCTAAATCAAAATCAGATCGTGATAGTAAAGTTCAGGCCCTATTAGATCTTGTAGGGTTAAATAAAGATCATTTAACACGTTATCCGCATGAATTTTCAGGTGGACAACGACAACGTATCGGGATTGCACGTGCTTTAGCAGTAGAGCCTAAATTTATCATTGCTGATGAACCAATATCTGCCTTAGATGTTTCAATCCAAGCACAAGTTGTTAATTTAATGCAAAAATTGCAAAGAGAACAAGGATTGACTTATTTGTTTATCGCACATGATTTGTCTATGGTAAAATACATTTCAGATCGTATCGGTGTTATGCATTGGGGGAAACTGTTAGAAGTTGGAACATCTGATGATGTTTATAACAATCCAATCCACCCTTATACGAAGAGTCTATTATCAGCTATTCCAGAACCAGATCCGGAGAGTGAACGTCAACGTGTTCACCAGCCGTATAATCCAGCTATTGAGCAAGACGGACAAGAACGTCAAATGCACGAGATTACCCCTGGTCATTTTGTTTTATCTACACCCCAAGAAGCTGAAGAATATAAAAAACAAATATTATAA

SEQ ID NO: 322 - protein, 310 aa, Streptococcus agalactiae
MTENRKKLVEVKNVSLTFNKGKANEVRAIDNVSFDIYEGEVFGLVGESGSGKTTVGRSILKLYDISDGEITFNGEVISHLKGKALHSFRKDAQMIFQDPQASLNGRMKIRDIVAEGLDIHKLAKSKSDRDSKVQALLDLVGLNKDHLTRYPHEFSGGQRQRIGIARALAVEPKFIIADEPISALDVSIQAQVVNLMQKLQREQGLTYLFIAHDLSMVKYISDRIGVMHWGKLLEVGTSDDVYNNPIHPYTKSLLSAIPEPDPESERQRVHQPYNPAIEQDGQERQMHEITPGHFVLSTPQEAEEYKKQIL

SEQ ID NO: 323 - protein, 852 aa, Streptococcus agalactiae
ATGAAAATTTTTGAGAAAGCTCCTGCCAAACTTAATTTAGGATTAGATATTAAAGGACGATGTGACGATGGTTATCATGAATTAGCTATGATTATGGTTAGTATTGATCTTAATGACTACGTTACCATTTCTGAGCTAAAGGAAGATTGTATTGTTATCGATTCTGATAGTAGCAAAATGCCTTTAAATAATGATAATGATGTGTTTAAAGCTGCAGATATAATCAAAAATCAATATGGTATTAATAAAGGTGTTCATATTAGATTAGAAAAATCCATTCCTGTCTGTGCAGGACTGGGGGGTGGTTCTACTGATGCTGCTGCTACAATAAGAGCTCTTAATCGATTATGGAATCTTCAAATGGACTATGACGAAATGGTTGCTATTGGTTTTAAAATTGGTAGTGATGTTCCTTATTGTCTTGGTGGGGGATGTTCGTTAGTATTAGGTAAAGGTGAAATTGTTAAACCCTTACCGACATTGAGACCATGTTGGATAGTTCTGGTTAAGCCGGATTTTGGTATTTCAACTAAATCCATTTTTAGAGATATTGATTGTAAGTCTATAAGTAGAGTTGATATTGATTTATTAAAGTCTGCTATTTTGTCATCAGATTATCAGTTAATGGTCAAATCTATGGGAAATTCACTCGAGGATATTACAATTACTAAAAATCCAGTTATAAGTACAATAAAAGAACGTATGTTAAATTCTGGAGCCGATGTTGCATTAATGACAGGAAGTGGACCAACTGTTTTTTCAATGTGTTCTACAGAGAAAAAAGCTGATCGTGTTTTTAATAGTATGAAAGGTTTTTGCAAAGAAGTTTATAAAGTTAGGTTGTTGAGATAA

SEQ ID NO: 324 - protein, 283 aa, Streptococcus agalactiae
MKIFEKAPAKLNLGLDIKGRCDDGYHELAMIMVSIDLNDYVTISELKEDCIVIDSDSSKMPLNNDNDVFKAADIIKNQYGINKGVHIRLEKSIPVCAGLGGGSTDAAATIRALNRLWNLQMDYDEMVAIGFKIGSDVPYCLGGGCSLVLGKGEIVKPLPTLRPCWIVLVKPDFGISTKSIFRDIDCKSISRVDIDLLKSAILSSDYQLMVKSMGNSLEDITITKNPVISTIKERMLNSGADVALMTGSGPTVFSMCSTEKKADRVFNSMKGFCKEVYKVRLLR

SEQ ID NO: 325 - protein, 443 aa, Streptococcus agalactiae
ATGACAGTTTTAGAACAAAAATTAGACCATTTAGTGAGTCAAATCTGCTTAAAGCAGAAAATCAACATGAATTATTGTTTGGTACTTGTCAAAGTGATGTTAAATTGACTAATACGCAAGAACACATTCTGATGCTTTTATCACAAGAGCAGTTGACAAATTCTGATTTAGCTAAGAAGTTAAATATTAGTCAGGCAGCTGTAACTAAAGCAGTAAAAAGTTTAATTTCTCAGGATATGTTGAAAGCGAATAAAGATTCTAAAGATGCTCGTATTACTTATTTTGAGTTATCTGAACTTGCTAAACCCATTGCAGATGAACACACACATCATCATGACAATACGTTAGGGGTTTACGGAAGATTAGTAAATCATTTTTCAAAGGACGAAAAGGTCGTTTTAGAACGTTTTCTTGATCTTTTCTCTAGAGAATTAGAAGGGTAA

SEQ ID NO: 326 - protein, 147 aa, Streptococcus agalactiae
MTVLEQKLDHLVSQILLKAENQHELLFGTCQSDVKLTNTQEHILMLLSQEQLTNSDLAKKLNISQAAVTKAVKSLISQDMLKANKDSKDARITYFELSELAKPIADEHTHHHDNTLGVYGRLVNHFSKDEKVVLERFLDLFSRELEG

SEQ ID NO: 327 - protein, 711 aa, Streptococcus agalactiae
ATGCGATATATTACAGTTAGTGGTCTTACTTTTCAGTACGATAGCGATCCTGTGCTGGAAGGGGTTAATTACCATTTAGACAGTGGGGAGTTTGTTACCTTAACAGGTGAAAATGGGGCTGCTAAATCAACTTTAATAAAGGCTACTTTAGGTATTTTAACGCCCAAAGTGGGTACAGTTAATATCTCTAAAGAAAACAAAGAAGGAAAAAAATTACGTATTGCCTATTTACCTCAACAGATTGCAAGTTTTAACGCTGGCTTTCCATCGTCAGTTTATGAATTTGTGAAATCTGGACGATACCCTAGAAATGGTTGGTTTAGAAGACTGACTAAACATGATGAAGAACATATTAGGGTTAGTTTAGAAGCTGTTGGTATGTGGGATAATCGCCATAAAAAGATAGGAAGTTTATCTGGCGGTCAAAAGCAGAGGGCTGTCATTGCTAGGATGTTTGCTTCTGATCCAGATATTTTTGTATTGGATGAGCCAACAACTGGTATGGACGCAGGGACTACTGAGAAATTTTATGAGTTAATGCATCATAATGCTCATAAGCATGGTAAGTCTGTTTTGATGATTACTCACGATCCTGATGAAGTAAAGGGGTATGCTGACCGAAATATTCATCTTGTTAGGAACCAATCTTTACCATGGCGTTGTTTCAATGTCCATACAAACGAAATGGAGGTTGAATCAGATGCTACTTGA

SEQ ID NO: 328 - protein, 236 aa, Streptococcus agalactiae
MRYITVSGLTFQYDSDPVLEGVNYHLDSGEFVTLTGENGAAKSTLIKATLGILTPKVGTVNISKENKEGKKLRIAYLPQQIASFNAGFPSSVYEFVKSGRYPRNGWFRRLTKHDEEHIRVSLEAVGMWDNRHKKIGSLSGGQKQRAVIARMFASDPDIFVLDEPTTGMDAGTTEKFYELMHHNAHKHGKSVLMITHDPDEVKGYADRNIHLVRNQSLPWRCFNVHTNEMEVESDAT

SEQ ID NO: 329 - protein, 458 aa, Streptococcus agalactiae
TTGTTACTTTGGCGGCAGTTGTATTAGAGTATTTGCGTACTGTATACAAACATTATATGGAAATATCAACTGCTATCCTGATGTCGATGGGGTTGGCTATATCTTTAATCGTTATGAGTAAAGCTCATAATGTTGGTAATGTCAGTCTTGAACAGTATTTATTTGGTTCTATTATTACTATTGGGAAGGAACAAGTGATTGCTTTGTTTGTTATTGCATTAATCACTTTTATTTTAACCATCCTATTTATTAGACCAATGTATATATTAACGTTTGATGAGGATACAGCTTTTGTAGATGGATTGCCTGTGCGTACAATGTCTATTTTGTTCAATGTTGTTACAGGTATTGCTATTGCATTAACAATTCCTGCCGCAGGTGCTCTATTGGTGTCAACTATTATGGTTTTACCAGCTAGTATTGCTATGCGNNNNNCATTCCATTCATTAATTAATTAA

SEQ ID NO: 330 - protein, 152 aa, Streptococcus agalactiae
  VARIANT 145, 146: Xaa = Any Amino Acid
MLLWRPVVLEYLRTVYKHYMEISTAILMSMGLAISLIVMSKAHNVGNVSLEQYLFGSIITIGKEQVIALFVIALITFILTILFIRPMYILTFDEDTAFVDGLPVRTMSILFNVVTGIAIALTIPAAGALLVSTIMVLPASIAMRXXFHSLIN

SEQ ID NO: 331 - DNA, 504 bp, Streptococcus agalactiae
gtgactccaatatacgaaggaaataatttagtacctagccgagttgaacttcagtatgttggaattgataaacaaggaaaacttctagaaatcaaattaggcggcggcaaagaacaagttgatgaatacggcgtcacaactgttacattagaaaatacgtctccactcgcaaaaattgattacaaaactggtatgctaatcaaagaagatgggaaacaggcagaagaaggtgaagatccaaatagcgatgctgatgaaaacgaagcagctattgaaagtgcatctgatatagaagaaaatactaacactaatacttctgaatcagatacaaataatgtagctccccaaaatagaatcgtctacgttgcaaataagggtcgttcaaatacttattggtatagtttagaaaacataaaaaatgcaaataccgctaatatcgttcaaatgactgaacaagaagcgttaaatcaacacaaacatcacagcactactgaagcacaataa

SEQ ID NO: 332 - protein, 167 aa, Streptococcus agalactiae
MTPIYEGNNLVPSRVELQYVGIDKQGKLLEIKLGGGKEQVDEYGVTTVTLENTSPLAKIDYKTGMLIKEDGKQAEEGEDPNSDADENEAAIESASDIEENTNTNTSESDTNNVAPQNRIVYVANKGRSNTYWYSLENIKNANTANIVQMTEQEALNQHKHHSTTEAQ

SEQ ID NO: 333 - DNA, 1260 bp, Streptococcus agalactiae
atgaatatttttgatgaactcaaagaacgtggactcgtttttcagacaactgacgaagatgctttacgcaaagctcttgaagaaggttctgtctcttactatactggctacgatcctacggctgacagccttcatcttggacatttagttgctattttaacctctcgtcgcttacaacttgctggtcacaagccttatgcacttgtgggaggcgcaactggacttattggggacccttcatttaaagatgttgagcgcagtttacaaacaaagaaaactgtagttagttggggtaataaaatccgcggtcaattatctaattttctagagtttgaaacaggtgataacaaagctgtattggtaaataattatgattggttcagcaatattagtttcattgatttcttacgagatgttggtaaatattttactgtcaattatatgatgagtaaagaatctgttaaaaaacgtatcgaaacagggatttcctatactgaatttgcttatcaaattatgcaaggatatgacttttacgaattaaataagaactataatgtcactttgcaaattggtggttctgaccaatggggcaacatgactgctggaaccgaacttattagacgaaaatcaaatggtgtatctcatgttatgactgttccattgataacagattctacaggaaaaaaattcggaaaatctgaaggaaatgctgtttggcttgatgctgacaaaacctctccttatgaaatgtaccaattttggctcaatgttatggatgctgatgccgttcgcttccttaagatttttacattcctaagccttaaagaaatagaagatatacgtattcaattcgaggaagcacctcaccaacgcttagcacaaaaaacactagcacgtgaagttgtaactcttgttcatggtgaaaaagcttataaggaggccgttaatatcacggaacagctatttgctggcaatataaaaggattgtctgttaaagagctcaaacaaggtttacgtggagtaccaaattatcacgttcagacggaagataacctcaatatcatagaccttctagtcacttcaggagttgtcaattctaaacgtcaagctcgagaagatgtctccaatggagctatttatattaatggagatcgtattcaagatttagaatatactatctcagaaaatgataagcttgaaaatgaaattacagtcattcgtcgtggaaagaaaaaatactttgtattaaactttaaatag

SEQ ID NO: 334 - protein, 419 aa, Streptococcus agalactiae
MNIFDELKERGLVFQTTDEDALRKALEEGSVSYYTGYDPTADSLHLGHLVAILTSRRLQLAGHKPYALVGGATGLIGDPSFKDVERSLQTKKTVVSWGNKIRGQLSNFLEFETGDNKAVLVNNYDWFSNISFIDFLRDVGKYFTVNYMMSKESVKKRIETGISYTEFAYQIMQGYDFYELNKNYNVTLQIGGSDQWGNMTAGTELIRRKSNGVSHVMTVPLITDSTGKKFGKSEGNAVWLDADKTSPYEMYQFWLNVMDADAVRFLKIFTFLSLKEIEDIRIQFEEAPHQRLAQKTLAREVVTLVHGEKAYKEAVNITEQLFAGNIKGLSVKELKQGLRGVPNYHVQTEDNLNIIDLLVTSGVVNSKRQAREDVSNGAIYINGDRIQDLEYTISENDKLENEITVIRRGKKKYFVLNFK

SEQ ID NO: 335 - DNA, 2298 bp, Streptococcus agalactiae
atgtttaaaggtaataagaagttgaatagttctaaattaggtgattacacaccacttgaatttggttctatttttttaagaattgtaaagcttttatcagatttcatctatgttattattttactatttgttatgctcggagtaggacttgcagtagggtatcttgctagtcaagttgactctgttaaagtaccaagtaaaaatagtttagtgacacaagttaatacacttactagggtgtctaggttaacttattctgataaatcacaaatttcagagattgccactgatttacaacgtacaccagtggcaaaggatgctatatctgataatattaaaaaggctatcattgcaacagaggacgaaaatttcaatgaccataaaggtgtagttcccaaagccgtactacgtgctgcagcgggatctgttctggggtttggagagagtagcggtggttcaacgctgacacaacaattattaaagcagcaaattttgggagatgatccgtcatttaaacgcaaatcaaaagaaattatttatgctctagcattagagcgttacatggataaggattcgattttatcagattatttaaatgtatcaccgtttggtcgcaataacaaaggacagaatattgcaggtattgaagaagcagcacaagggatttttggagtttccgcaaaagatttaacaattcctcaggcagctttccttgcaggtttaccgcaaagtcctattgtatattctccttatactgcagatgcccagttgaaatcagataaagatcttagttttggtataaagcgccaaaaaaatgtgttatacaatatgtatagaacgagagctttaaccaaagatgagtacaaatcctacaaagattatgacatcaaaaaagattttatcaaacctgcagtggcgacaacaaatcatcatgattatctttactactcggcattatctgaagctcaaaaagtgatgtacaattacctcattaaaaaggataatgtttcagagcatgatttaaaaaatgatgagactagagcgacgtacagacaccgcgctattgaagagattcaacagggagggtatactattaaaactactatcaataaatctgtttatcaagccatgcaggatgctgcagctcaatacggagggttgttagatgatggtactggcaaggttcaaatgggaaatgtactaacggacaattctagtggtgctattataggatttattggtggtcgtaactatagtgagaatcaaaataaccatgcttttgatacggcacgctctccagggtcaagtattaaaccgatattaccttacggaattgctattgatcaagggatgttaggaagtggtagtgttctttcaaattatccaacgacatattcaagtggcgaaaagattatgcatgcggatgaagaaggtactgctatggttaaccttcaagagtcattggacatttcttggaacattccagctttctggacttacaagatgctacgagatcgaggcgttgatgtaaaaaactatatggagaaattagactatccaattgaaaactttggtatagaaagtttaccacttggtggtggtattgatacgtcagttgctcagcaaacaaacctttatcaaatgattgcaaatggtggtgtttatcataagcagtatatgatagaaagtatagaggatagtaatgggaaagtgatttataatcacgaaagtaaacctgtccgtgtcttttcgaaagcaacagctactatcttacagcagctattacatggaccaattaactccggaaagactacaacctttaaaaatcgcttacaaggtttaaatagtggtttagctggggtagattggattggaaaaacgggtactactaactcaacttctgatgtttggttgatgctttctacacctaaagtgactttaggtggatgggcaggacatgataataatgcctctttagcgaaattgacaggttacaataataatgctaattatatggctcacttggttaatgctattaataatgcagatggcaatacttttggtaagtcagaaaggtttagacttgatgatagcgttataaaagctaaagttcttaagtctacaggtttacagccaggtgtagtaacagtaaacggtcgtcgaatcactgttggaggtgaaagcacaacaagttattgggcaaaaaatggacctggaacgatgacctatcgttttgctattgggggaactgatagtgattatcaaaaagcttggtctactttgggtggaaaacgataa

SEQ ID NO: 336 - protein, 765 aa, Streptococcus agalactiae
MFKGNKKLNSSKLGDYTPLEFGSIFLRIVKLLSDFIYVIILLFVMLGVGLAVGYLASQVDSVKVPSKNSLVTQVNTLTRVSRLTYSDKSQISEIATDLQRTPVAKDAISDNIKKAIIATEDENFNDHKGVVPKAVLRAAAGSVLGFGESSGGSTLTQQLLKQQILGDDPSFKRKSKEIIYALALERYMDKDSILSDYLNVSPFGRNNKGQNIAGIEEAAQGIFGVSAKDLTIPQAAFLAGLPQSPIVYSPYTADAQLKSDKDLSFGIKRQKNVLYNMYRTRALTKDEYKSYKDYDIKKDFIKPAVATTNHHDYLYYSALSEAQKVMYNYLIKKDNVSEHDLKNDETRATYRHRAIEEIQQGGYTIKTTINKSVYQAMQDAAAQYGGLLDDGTGKVQMGNVLTDNSSGAIIGFIGGRNYSENQNNHAFDTARSPGSSIKPILPYGIAIDQGMLGSGSVLSNYPTTYSSGEKIMHADEEGTAMVNLQESLDISWNIPAFWTYKMLRDRGVDVKNYMEKLDYPIENFGIESLPLGGGIDTSVAQQTNLYQMIANGGVYHKQYMIESIEDSNGKVIYNHESKPVRVFSKATATILQQLLHGPINSGKTTTFKNRLQGLNSGLAGVDWIGKTGTTNSTSDVWLMLSTPKVTLGGWAGHDNNASLAKLTGYNNNANYMAHLVNAINNADGNTFGKSERFRLDDSVIKAKVLKSTGLQPGVVTVNGRRITVGGESTTSYWAKNGPGTMTYRFAIGGTDSDYQKAWSTLGGKR

SEQ ID NO: 337 - DNA, 3576 bp, Streptococcus agalactiae
ttggcaggacatgaagttcagtacggaaaacaccgtacacgtcgtagcttttcaagaattaaggaagttcttgatttaccaaacttaattgaaattcaaactgattcattccaagattttcttgatgctggcttgaaagaagtatttgaggatgtacttccaatttcaaactttacagatactatggatcttgaatttgttggttatgaattaaaagaacctaaatatactttggaagaagctcgtatccatgatgctagctactcagcacctatttttgttactttccgtttagttaataaagaaactggtgaaattaaaactcaagaagttttctttggtgattttccaattatgactgaaatgggtactttcatcatcaatggtggtgaacgtatcattgtttcacaattagtccgttctcctggtgtttactttaatgataaggtagataaaaatggaaaagttggttatgggtcaactgttatccctaaccgtggagcttggttggaacttgagacagacgcaaaagatattgcttatacacgtatcgaccgcacacgtaaaattccatttacaacactagtccgtgcacttggtttctctggagacgatgaaattgttgacatctttggtgacagtgaacttgttcgcaatactattgaaaaagacattcataaaaatccaagtgattctcgtacagatgaagcacttaaagaaatctatgaacgtcttcgtccaggtgaaccaaaaactgcagacagctcacgtagtcttttagttgcacgtttctttgatccacgtcgttatgacttagcggctgttggtcgttataagattaataaaaaactgaatcttaaaacacgcctattgaaccaaacaatcgctgaaaatttagttgatggtgaaacaggagagattcttgttgaagctggaaccgttatgacacgagatgtcattgattcaattgcagagcatatcgatggagacttaaacaagtttgtctacacaccaaatgattatgctgtagttactgaaccagttattcttcaaaaattcaaagttgttgctccaactgatccagaccgtgttgttactattgttggaaactcaaatcctgaagataaagttcgtgccttaactcctgcagatattttagcagagatgtcatacttcttaaaccttgcagagggtatcggtaaggtagatgacattgaccatttaggtaaccgtcgtattcgtgcagttggtgaattacttgcgaaccaattccgtatcggacttgctcgtatggaacgcaatgtccgcgaacgtatgtctgtacaagacaatgaagtcttgacacctcaacaaatcattaacattcgtccagtgactgccgccgttaaagaattctttggttcatcacagctgtcacaattcatggaccaacacaaccctctatcagaattgtcgcacaaacgccgtctctctgccttaggacctggtggtttgacacgtgaccgtgctggatatgaagttcgtgacgtgcactatacccactatgggcgcatgtgtccgattgaaacacctgaaggtccaaacattggtttgattaataacttatcttcatttggacacctcaataaatatggatttattcaaacaccatatcgtaaagtagatcgttctactggtgcggtaacgaacgaaattgtttggttgactgctgatgaagaagatgaatttacagttgcacaagccaactctaagcttaacgaagacggtacatttgcagaagaaatcgttatgggtcgtcatcaaggtaataaccaagagtttccttcaagcattgttgactttgttgacgtgtcacctaagcaagtagttgctgtcgcaacagcatgtattcctttcttggaaaatgatgactctaaccgtgccttgatgggtgccaacatgcaacgtcaggctgtgccattgattgatccaaaagcaccatatgttggtactggtatggagtatcaagcagcccacgattcaggtgcagctgtgattgctaaacatgatggtcgtgttattttttcagatgctgaaaaagttgaagtgcgtcgcgaagatggttctcttgatgtttatcatgttcaaaaattccgccgttcaaactcaggtactgcttataaccaacgtaccttagttaaagttggtgatctcgttgaaaaaggtgattttatcgccgacggaccatctatggaaaatggtgaaatggctcttggacaaaacccagttgttgcttatatgacttgggaaggttataacttcgaggatgccgttatcatgagtgagcgccttgtgaaagaagatgtctatacatctgttcacttggaagaattcgaatctgaaacgcgtgatacaaagcttgggcctgaagaaattactcgtgaaattccaaatgttggtgaagattcactacgtgatctcgatgaaatgggaattatccgcattggtgctgaggtaaaagaaggtgacattcttgttggtaaggtaacacctaagggtgaaaaggacttatctgctgaagaacgtctcttgcatgccatttttggtgataaatcacgtgaagttcgtgatacttcactacgtgtacctcacggtggcgatggagtagttcgtgacgttaaaatctttactcgtgcaaatggtgatgaattgcaatcaggtgttaatatgcttgtccgcgtttatatcgctcaaaaacgtaaaatcaaagtcggtgataagatggccggtcgtcacggaaacaaaggtgtcgtctcacgtattgttcctgttgaagatatgccttacttaccagatggaacgccagttgatatcatgttgaacccacttggggtgccatcacgtatgaatatcggacaagttatggagcttcatttaggtatggctgctcgtaatttaggtattcatattgcaacgccagtctttgatggggcttcttcagaagacctttgggaaactgttcaagaagcaggtatggattcagatgctaagactgttctttatgatggtcgtactggtgaaccattcgataaccgtgtgtcagttggtgtcatgtacatgatcaaacttcaccacatggttgatgataaacttcatgcccgttcagtaggaccatactcacttgttactcaacaaccacttggaggtaaagctcaatttggtggacaacgttttggtgagatggaggtttgggcgcttgaagcttatggtgcttcaaatgttcttcaagaaattttaacatacaaatctgatgatgttacaggacgtcttaaagcttatgaagctatcacaaaaggtaagccaattccaaaaccaggtgttccagaatcattccgtgttcttgtaaaagaattgcaatcacttggtcttgatatgcgtgtccttgatgaagatgacaacgaagttgaactccgtgatcttgatgaaggtgaagatgatgatgtgatgcacgttgatgaccttgaaaaagcacgtgtgaaacaagaagctgaagaaaaacaagctgaacaagtatctgaagtcgttcaagaagattaa

SEQ ID NO: 338 - protein, 1191 aa, Streptococcus agalactiae
MAGHEVQYGKHRTRRSFSRIKEVLDLPNLIEIQTDSFQDFLDAGLKEVFEDVLPISNFTDTMDLEFVGYELKEPKYTLEEARIHDASYSAPIFVTFRLVNKETGEIKTQEVFFGDFPIMTEMGTFIINGGERIIVSQLVRSPGVYFNDKVDKNGKVGYGSTVIPNRGAWLELETDAKDIAYTRIDRTRKIPFTTLVRALGFSGDDEIVDIFGDSELVRNTIEKDIHKNPSDSRTDEALKEIYERLRPGEPKTADSSRSLLVARFFDPRRYDLAAVGRYKINKKLNLKTRLLNQTIAENLVDGETGEILVEAGTVMTRDVIDSIAEHIDGDLNKFVYTPNDYAVVTEPVILQKFKVVAPTDPDRVVTIVGNSNPEDKVRALTPADILAEMSYFLNLAEGIGKVDDIDHLGNRRIRAVGELLANQFRIGLARMERNVRERMSVQDNEVLTPQQIINIRPVTAAVKEFFGSSQLSQFMDQHNPLSELSHKRRLSALGPGGLTRDRAGYEVRDVHYTHYGRMCPIETPEGPNIGLINNLSSFGHLNKYGFIQTPYRKVDRSTGAVTNEIVWLTADEEDEFTVAQANSKLNEDGTFAEEIVMGRHQGNNQEFPSSIVDFVDVSPKQVVAVATACIPFLENDDSNRALMGANMQRQAVPLIDPKAPYVGTGMEYQAAHDSGAAVIAKHDGRVIFSDAEKVEVRREDGSLDVYHVQKFRRSNSGTAYNQRTLVKVGDLVEKGDFIADGPSMENGEMALGQNPVVAYMTWEGYNFEDAVIMSERLVKEDVYTSVHLEEFESETRDTKLGPEEITREIPNVGEDSLRDLDEMGIIRIGAEVKEGDILVGKVTPKGEKDLSAEERLLHAIFGDKSREVRDTSLRVPHGGDGVVRDVKIFTRANGDELQSGVNMLVRVYIAQKRKIKVGDKMAGRHGNKGVVSRIVPVEDMPYLPDGTPVDIMLNPLGVPSRMNIGQVMELHLGMAARNLGIHIATPVFDGASSEDLWETVQEAGMDSDAKTVLYDGRTGEPFDNRVSVGVMYMIKLHHMVDDKLHARSVGPYSLVTQQPLGGKAQFGGQRFGEMEVWALEAYGASNVLQEILTYKSDDVTGRLKAYEAITKGKPIPKPGVPESFRVLVKELQSLGLDMRVLDEDDNEVELRDLDEGEDDDVMHVDDLEKARVKQEAEEKQAEQVSEVVQED

SEQ ID NO: 339 - DNA, 3681 bp, Streptococcus agalactiae
atgatgataaatcgaagaaaggtaaaactagtggttgacgtaaatcgttttaaaagtatgcaaatcacattagcatcaccaagtaaggtccgttcatggtcttatggtgaagttaaaaaacctgaaacaatcaactaccgcacattgaaaccagaacgtgaaggactttttgatgaagttatttttggtccaacaaaagattgggaatgtgcgtgtggaaaatacaaacgtattcgttacaaaggaatcatttgtgaccgttgtggcgttgaagtaacccgtgcaaaagttcgtcgcgaacgtatgggacatatcgagttaaaagcaccagtatctcatatctggtatttcaaaggtatcccatcgcgtatggggctcacattggatatgagtcctcgtgcacttgaagaagttatttattttgcggcttatgttgttatcgatccaatggacacaccattagaaccgaagtcactccttactgagcgtgaataccgtgaaaaacttcaagagtacggttacggttcgtttgttgctaaaatgggtgctgaagccattcaagatcttcttaaacgcgttgatttagatgcagaaatcgcagttcttaaagaggagttgaaatcagcgacaggtcaaaaacgtgtgaaagcagttcgtcgtctggatgtgttagatgcctttaaaaaatctggaaataaaccagaatggatggttcttaacattttaccggttatcccaccggatcttcgtccgatggttcaattagatggtggtcgttttgcggcatcagacttgaatgacctttaccgccgtgttattaaccgtaacaatcgtttggcacgtttgttggaattaaatgctcctggcatcatcgttcaaaatgaaaaacgtatgttacaagaagctgttgatgcgcttatcgacaatggtcgtcgtggtcgtccaattaccggaccaggtagtcgtcctttgaaatcattaagccatatgcttaaaggtaaacaaggtcgtttccgccaaaacttgcttggtaaacgtgttgacttctctggacgttccgttattgctgttggtccaacactcaaaatgtaccaatgtggtgtaccacgtgaaatggctattgagctcttcaaaccttttgtaatgcgtgaaatcgttgctcgtgacctcgcagggaacgttaaagcagctaaacgtatggttgaacgtggggacgagcgtatttgggacatcttagaagaagttattaaagagcacccagtacttctaaaccgtgcacctactcttcacagattaggtatccaagcgtttgaacctgtccttattgatggtaaggcgcttcgtcttcacccacttgtatgtgaggcctacaatgctgactttgatggagaccaaatggccatccacgttccattgtctgaagaagcccaagcagaagctcgtcttttgatgcttgctgcagagcacatccttaaccctaaagatggtaagccagtcgtaacaccatctcaggacatggttttaggaaattactacctgactatggaagatgctggtcgtgaaggtgaaggcatgattttcaaagatcatgacgaagcagttatggcatatcaaaatggttatgttcatttacatacacgtgttggtatcgctgttgattcaatgccgaataagccttggacagaagagcaaaaacataaaatcatggttacaacagttggtaagattctcttcaacgatatcatgcctgaagatttaccgtacttaattgaacctaataatgcaaacttgacagaaaaaactccagataaatacttcttagagccaggtcaggatattcaagcagttattgataacttagagattaatattccctttaagaagaaaaatcttggtaatattatcgcagaaacttttaaacgtttccgtacaacagaaacttctgctttccttgaccgtttgaaggaccttggatattatcattcaacacttgctggtttgactgtgggtattgctgatatcccagttattgacaataaagctgagattattgatgcagctcaccacagagttgaagatatcaataaagccttccgtcgaggtttgatgactgaagaagatcgttatgttgctgttacaacaacatggcgtgaagctaaagaagcacttgaaaaacgtcttattgagacacaagatccaaagaaccctatcgttatgatgatggactcaggagctcgtggtaacatctcaaacttctcacaacttgccggtatgcgtggtttgatggctgctcctaacggacgtatcatggaattgccaatcttatcaaacttccgtgaaggtcttagtgttttggaaatgttcttctcaactcacggtgcgcgtaaaggtatgactgatacggcccttaagacagccgactcaggttaccttactcgtcgtttggttgacgttgcccaagatgttattattcgtgaagatgactgtggaacagaccgcggtttgacaatcacagcaattacagatggtaaagaggttactgagacacttgaagagcgtttgataggacgttatactaagaagtcaatcaaacatcctgagacaggtgaaattctcgttggtgcagataccttaattactgaagatatggctgctaaagttgttaaagcgggcgttgaggaagtaactatccgatcagtatttacatgtaacactcgccatggtgtttgtcgtcactgttacggtattaacttggcaacaggtgatgctgttgaggttggtgaagcagttggtactattgcagctcaatctatcggtgaaccagggacacagcttacaatgcgtaccttccataccggtggtgttgcttcaaatactgatattacacaaggtctcccacgtatccaagaaatctttgaagcacgtaaccctaaaggtgaggcagttattactgaagttaagggtgaagtcgttgcaattgaagaagactcttcaacacgtactaagaaagtattcgttaaaggtcagacaggtgagggagaatacgttgttccatttacagcacgtatgaaagttgaagttggtgatgaagtagctcgtggtgcggccttaactgaaggatctatccaaccaaaacgtctccttgaagttcgtgatactttatctgttgaaacgtacctacttgctgaagtacaaaaagtttaccgtagccaaggggtagaaatcggagataaacacgttgaggtaatggttcgtcaaatgctccgtaaagttcgtgtcatggatccaggagatacagatcttcttccaggtacacttatggatatttcagactttacagatgctaacaaagatattgttatttctggtggaatccctgcgacaagccgtcctgtccttatgggtattactaaggcttcccttgaaactaattcattcttatcagctgcatccttccaagaaacaacacgtgtccttacagatgctgctatccgtggtaagaaagatcacttacttggtcttaaagaaaatgttattatcggtaaaatcattccagcgggtactggtatggctcgttaccgtaatattgaaccacttgctgttaatgaagttgagattattgaaggaactcctgttgatgcagaagttacggaagtatcaacacctacaacagaagattaa

SEQ ID NO: 340 - protein, 1226 aa, Streptococcus agalactiae
MMINRRKVKLVVDVNRFKSMQITLASPSKVRSWSYGEVKKPETINYRTLKPEREGLFDEVIFGPTKDWECACGKYKRIRYKGIICDRCGVEVTRAKVRRERMGHIELKAPVSHIWYFKGIPSRMGLTLDMSPRALEEVIYFAAYVVIDPMDTPLEPKSLLTEREYREKLQEYGYGSFVAKMGAEAIQDLLKRVDLDAEIAVLKEELKSATGQKRVKAVRRLDVLDAFKKSGNKPEWMVLNILPVIPPDLRPMVQLDGGRFAASDLNDLYRRVINRNNRLARLLELNAPGIIVQNEKRMLQEAVDALIDNGRRGRPITGPGSRPLKSLSHMLKGKQGRFRQNLLGKRVDFSGRSVIAVGPTLKMYQCGVPREMAIELFKPFVMREIVARDLAGNVKAAKRMVERGDERIWDILEEVIKEHPVLLNRAPTLHRLGIQAFEPVLIDGKALRLHPLVCEAYNADFDGDQMAIHVPLSEEAQAEARLLMLAAEHILNPKDGKPVVTPSQDMVLGNYYLTMEDAGREGEGMIFKDHDEAVMAYQNGYVHLHTRVGIAVDSMPNKPWTEEQKHKIMVTTVGKILFNDIMPEDLPYLIEPNNANLTEKTPDKYFLEPGQDIQAVIDNLEINIPFKKKNLGNIIAETFKRFRTTETSAFLDRLKDLGYYHSTLAGLTVGIADIPVIDNKAEIIDAAHHRVEDINKAFRRGLMTEEDRYVAVTTTWREAKEALEKRLIETQDPKNPIVMMMDSGARGNISNFSQLAGMRGLMAAPNGRIMELPILSNFREGLSVLEMFFSTHGARKGMTDTALKTADSGYLTRRLVDVAQDVIIREDDCGTDRGLTITAITDGKEVTETLEERLIGRYTKKSIKHPETGEILVGADTLITEDMAAKVVKAGVEEVTIRSVFTCNTRHGVCRHCYGINLATGDAVEVGEAVGTIAAQSIGEPGTQLTMRTFHTGGVASNTDITQGLPRIQEIFEARNPKGEAVITEVKGEVVAIEEDSSTRTKKVFVKGQTGEGEYVVPFTARMKVEVGDEVARGAALTEGSIQPKRLLEVRDTLSVETYLLAEVQKVYRSQGVEIGDKHVEVMVRQMLRKVRVMDPGDTDLLPGTLMDISDFTDANKDIVISGGIPATSRPVLMGITKASLETNSFLSAASFQETTRVLTDAAIRGKKDHLLGLKENVIIGKIIPAGTGMARYRNIEPLAVNEVEIIEGTPVDAEVTEVSTPTTED

SEQ ID NO: 341 - protein, 251 aa, Streptococcus agalactiae
ATGTATCAAGTTGTAAAAATGTTTGGTGATTGGGAACCATGGTGGTTTATTGAAGGTTGGGAGGAAGATATTACTGAAATTGCTGAGTATGATACCTTATCAGAAGCTTTGCTCTATTTTCAAGAGGAGTGGGATAGGGGACAGGAAAAGTGGCCTTATTTCAAAGTAAGTCTAGTTTGTTGGCAACGTTTTGGAGTATAAAAGAAAAACGTTGTGTGAAGAANNNNNCATTCCATTCATTAATTAATTAA

SEQ ID NO: 342 - protein, 83 aa, Streptococcus agalactiae
  VARIANT 75, 76, 77: Xaa = Any Amino Acid
MYQVVKMFGDWEPWWFIEGWEEDITEIAEYDTLSEALLYFQEEWDRGQEKWPYFQSKSSLLATFWSIKEKRCVKXXXFHSLIN

SEQ ID NO: 343 - protein, 282 aa, Streptococcus agalactiae
ATGGGTATACTAAGGGCTTCCCTTGAAACTAATTCATTCTTATCAGCTGCATCCTTCCAAGAAACAACACGTGTCCTTACAGATGCTGCTATCCGTGGTAAGAAAGATCACTTACTTGGTCTTAAAGAAAATGTTATTATCGGTAAAATCATTCCAGCGGGTACTGGTATGGCTCGTTACCGTAATATTGAACCACTTGCTGTTAATGAAGTTGAGATTATTGAAGGAACTCCTGTTGATGCAGAAGTTACGGAAGTATCAACACCTACAACAGAAGATTAA

SEQ ID NO: 344 - protein, 93 aa, Streptococcus agalactiae
MGILRASLETNSFLSAASFQETTRVLTDAAIRGKKDHLLGLKENVIIGKIIPAGTGMARYRNIEPLAVNEVEIIEGTPVDAEVTEVSTPTTED

SEQ ID NO: 345 - protein, 366 aa, Streptococcus agalactiae
ATGTATCAAGTTGTAAAAATGTTTGGTGATTGGGAACCATGGTGGTTTATTGAAGGTTGGGAGGAAGATATTACTGAAATTGCTGAGTATGATACCTTATCAGAAGCTTTGCTCTATTTTCAAGAGGAGTGGGATAGGGGACAGGAAAAGTGGCCTTATTTTCAAAGTAAGTCTAGTTTGTTGGCAACGTTTTGGAGTATAAAAGAAAAACGTTGGTGTGAAGAATGTGATGAGTACCTCCAACAGTATCATTCCTTAATGTTATTGAAAGAATGGCAAGAAATTCCTAAGGAAGAATCTATTGAGCGATTTGAAGTATTTAATAAGATAGCTGAGTTGCCATCGGCATGTTCTTTAAATTTGTAA

SEQ ID NO: 346 - protein, 121 aa, Streptococcus agalactiae
MYQVVKMFGDWEPWWFIEGWEEDITEIAEYDTLSEALLYFQEEWDRGQEKWPYFQSKSSLLATFWSIKEKRWCEECDEYLQQYHSLMLLKEWQEIPKEESIERFEVFNKIAELPSACSLNL

SEQ ID NO: 347 - protein, 972 aa, Streptococcus agalactiae
ATGGTTCAATCATTAGCAAAGCAAGTCATTCATCAGGCAGTAGAAGTAAATGCTCAAGATATTTATATCATTCCCAAAGGTGATTGTTATGAACTCTATATGCGTATTGATGATGAAAGGCGGTTTATTGATGTTTTTGAGTTTAATAGGATGGCTAGTCTTATTAGTCACTTTAAATTTGTGGCAGGCATGAACGTTGGAGAAAAAAGACGAAGTCAATTAGGTTCTTGTGACTATGAACTGTCAGAGGGAAGACTGGTTTCATTACGACTATCGAGTGTGGGAGATTATCGTGGTCAAGAATCTTTAGTTATTCGTATTTTGTATTCAGGTCATCAGGACTTAAAATATTGGTTTGATAATATAAAGCAAATGAAGGAAGTACTGGGTATAAGAGGGCTATATCTTTTTTCCGGCCCTGTGGGGAGTGGTAAAACAACTCTCATGTATCAATTAGCTTCAGAAGTATTTAAAAATAAGCAAATTATCACGATTGAAGATCCGGTAGAAATCAAGAATGACAAGATGTTACAACTCCAATTGAATGAGGATATTGGAATGACTTATGATGCTTTAATCAAACTGTCTTTACGGCATCGTCCAGATATTTTAATTATCGGAGAGATTAGAGATCAAGCGACGGCCCGTGCTGTTATTCGTGCAAGTTTAACGGGAGTGATGGTTTTTTCTACTATTCATGCTAAAAGTATTCCCGGAGTCTATGATAGGCTTATAGAATTAGGGGTTAACTATCAAGAGTTAGAAAATAGTCTAAAATTAATAGCATATCAACGTTTAATTGGAGGAGGAAGCCTAATTGACTTTGAGACAGGTAATTTTAAAAAACACTCATCAGACAAGTGGAATAGACAAGTGGATATCTTGGCTGAAGAAGGACATATCAGTAAGAAACAGGCACAAGTCGAAAAAATTATCCCTCAAGAAACAACGGAAAGTAGTCCAACTTTTTAA

SEQ ID NO: 348 - protein, 323 aa, Streptococcus agalactiae
MVQSLAKQVIHQAVEVNAQDIYIIPKGDCYELYMRIDDERRFIDVFEFNRMASLISHFKFVAGMNVGEKRRSQLGSCDYELSEGRLVSLRLSSVGDYRGQESLVIRILYSGHQDLKYWFDNIKQMKEVLGIRGLYLFSGPVGSGKTTLMYQLASEVFKNKQIITIEDPVEIKNDKMLQLQLNEDIGMTYDALIKLSLRHRPDILIIGEIRDQATARAVIRASLTGVMVFSTIHAKSIPGVYDRLIELGVNYQELENSLKLIAYQRLIGGGSLIDFETGNFKKHSSDKWNRQVDILAEEGHISKKQAQVEKIIPQETTESSPTF

SEQ ID NO: 349 - protein, 849 aa, Streptococcus agalactiae
ATGAATAAGGCATTATTAGAGGGAAAAGATTTATCAAAAATGTTAGGAGAGTTAGGTTTTTCTGACACTGTTATCACACAGGTTGCATTAGCTGATTTGCATGGTAACATTTCAAGGAGCCTACTAAAGATTGAGTCTTATTTAGCTAATCTTTTGTTAGTTAGAAAAAAAGTAATAGAAGTAGCTACTTACCCATTGATATTATTGTCTTTTCTGGTGCTAATTATGATTGGCCTTAGGAATTATTTAATGCCCCAATTAGGAGAAAATAATTTTGCAACTAGACTGATTACAAATGTGCCGAATATTTTCTTATTACTTTTAGCAGTTGTACTTATTTTTAGTTTAATATTTTATATTATTCAAAAGCGATTGTCGCGCATTAAAGTAGCTTGTTTTTTAACAACAATTCCCTTAGTTGGATCATATGTTAAGCTTTATTTAACTGCTTACTATGCCCGTGAGTGGGGAAATTTATTAAGTCAAGGTATTGAATTGGACCAAATTGTTAAAGTAATGCAAAATCAGAAATCCAAACTTTTTAGGGAAATAGGATATGACATGGAAGAAGGTTTTCTATCAGGTAAAGCATTTCACCAAAAAGTATTAGACTATCCGTTTTTCTTAACTGAGCTTAGTTTAATGATTGAATATGGCCAAGTTAAGGCGAAATTAGGAACAGAGTTAGATATATATGCTGATGAGAAGTGGGAGGATTTTTTTACAAAATTAGCTAGAGCGACCCAGTTAATCCAACCCGTTATTTTTATTTTTGTAGCTCTTATCATTGTTATGATTTATGCAGCAATGCTGTTACCAATGTATCAAAATATGGAGATATTATCATGA

SEQ ID NO: 350 - protein, 282 aa, Streptococcus agalactiae
MNKALLEGKDLSKMLGELGFSDTVITQVALADLHGNISRSLLKIESYLANLLLVRKKVIEVATYPLILLSFLVLIMIGLRNYLMPQLGENNFATRLITNVPNIFLLLLAVVLIFSLIFYIIQKRLSRIKVACFLTTIPLVGSYVKLYLTAYYAREWGNLLSQGIELDQIVKVMQNQKSKLFREIGYDMEEGFLSGKAFHQKVLDYPFFLTELSLMIEYGQVKAKLGTELDIYADEKWEDFFTKLARATQLIQPVIFIFVALIIVMIYAAMLLPMYQNMEILS

SEQ ID NO: 351 - DNA, 456 bp, Streptococcus agalactiae
atgaaaaatttattgttaaaatgtaaggataagaaggttaaagcatttacacttttagaatgtttggtagcattggttacaatcacaggagctttactagtttatcaaggactgacaaaattgttggctcaacagatagtagtgatgtcttcttccagtcagtctgaatgggtgttattaactcagcaactaaatgcagaatttgaaggcgctcatctggaatatttaagacagaacaaactttatttacgtaagcaagataagattgtaacctttggcaaatctaataaagatgatttccgtaagacaggttatgatggtcgaggttatcaaccaatggtttatgggttagacaattgtcaaatgagtcagaccaaaagtatggtaaaacttgttttttattttaaggacgggttaaaaaggacattttactatgattttaaagaagaaacttaa

SEQ ID NO: 352 - protein, 151 aa, Streptococcus agalactiae
MKNLLLKCKDKKVKAFTLLECLVALVTITGALLVYQGLTKLLAQQIVVMSSSSQSEWVLLTQQLNAEFEGAHLEYLRQNKLYLRKQDKIVTFGKSNKDDFRKTGYDGRGYQPMVYGLDNCQMSQTKSMVKLVFYFKDGLKRTFYYDFKEET

SEQ ID NO: 353 - DNA, 372 bp, Streptococcus agalactiae
atgattttaaagaagaaacttaaagctggcatccttttgcaagctattgtattggctgctgtatttacactcgtcttacagttttatctagcaagaatattggcaacagaaagacagtatcatagccaaattgaagcaagtaaagcttatttaacagcgcagttagcttataaaacaatagaaggtgactccatatcaggaaaatgttattttacaggaggatatgcttcatacctccaagaagggaactatttacaagttaaggttacattggataagggaggaaactataaccataagttttatcgtaaaacagacactctccaagtacctctcaagtctaatgataataaagcaagccataaacattaa

SEQ ID NO: 354 - protein, 123 aa, Streptococcus agalactiae
MILKKKLKAGILLQAIVLAAVFTLVLQFYLARILATERQYHSQIEASKAYLTAQLAYKTIEGDSISGKCYFTGGYASYLQEGNYLQVKVTLDKGGNYNHKFYRKTDTLQVPLKSNDNKASHKH

SEQ ID NO: 355 - DNA, 975 bp, Streptococcus agalactiae
atgaattttgaaaaaattgagacagcctatgagctgattttagaaaatatccaaacgattgagaaccaattaaaaactcatatttatgatgccttaattgaacagaactcttattaccttggttcaagttgtgatttagatatggttgtggtgaataaccaaaaattacgtcaacttgacttaagtcaagaagaatggcgtcgcactttccagttcatttttatcaaatctgcgcaaacagagcaattacaagctaatcatcagtttacgccagatagtattggttttatcttgttatttcttttggaagaattaacgagtcaagagacagtggatgtcttggaaattggaagtggaactgggaatttagctcagactctcctcaataacagctcgaaagagttaaattatatgggcattgaagttgatgatcttttgattgatctatcagcaagcattgctgaaattataggttctagtgcccaatttatccaagaggatgctgttagaccacaaattttgaaagaaagcgatgtaatcattagtgatttaccagttggctattatcctaatgatggtattgctaaacgatatgctgtatcaagttctaaagagcacacctatgctcaccatctattgatggagcaatctcttaaatatttgaaaaaagatggaatcgctatatttttagcacccgaaaaccttttaacaagtccacaaagtgatttgctgaaggagtggttaaaaggatatgcagatgtcattgccgttttaactctaccagaaactatttttggaagtcgtcaaaatgcgaaatctatatttgttctcaagaagcaagcagaacaaaaaccagaaacctttgtatatccgctgacagatttgcaaaatcgtgagaatatggcaaacttcattgaaaattttcaaaaatggagcagagaaaatagtcattactcaaaaaatatgataaaatag

SEQ ID NO: 356 - protein, 324 aa, Streptococcus agalactiae
MNFEKIETAYELILENIQTIENQLKTHIYDALIEQNSYYLGSSCDLDMVVVNNQKLRQLDLSQEEWRRTFQFIFIKSAQTEQLQANHQFTPDSIGFILLFLLEELTSQETVDVLEIGSGTGNLAQTLLNNSSKELNYMGIEVDDLLIDLSASIAEIIGSSAQFIQEDAVRPQILKESDVIISDLPVGYYPNDGIAKRYAVSSSKEHTYAHHLLMEQSLKYLKKDGIAIFLAPENLLTSPQSDLLKEWLKGYADVIAVLTLPETIFGSRQNAKSIFVLKKQAEQKPETFVYPLTDLQNRENMANFIENFQKWSRENSHYSKNMIK

SEQ ID NO: 357 - DNA, 1194 bp, Streptococcus agalactiae
atgtcaaaaacaatagcaattaatgctggaagttcaagtttgaaatggcaattatatgaaatgccagaggagaaagtagttgccaaagggattatcgaacgtattggtttgaaagattctatttcgactgtaaaatttgacgataaaaaagatgaacaaattttagatatcgtagatcatacccaagctgttaaaattcttttagaagatctaacaaaacatggtattatcaaagactttaatgaaattacaggtgttggtcatcgtgtcgttgctggtggtgaatattttaaagagtctgctttagtagatgataaagttgtagaacaggttgaagaattatcagctttagctccactccacaacccagcagctgcagcagggattcgtgcgtttagagaaatcttaccagatatcacgagtgtatgtgtatttgatacagccttccatacaacaatgcaacctcatacctacttatatccaatcccacaaaagtactatactgattataaagtacgtaaatacggtgcacacgggacaagccaccaatacgttgcacaagaagcagctaagcaattaggacgtcctttagaagaattaaaattaatcacagcacatgtgggtaatggtgtttctattacagcaaattatcatggacagtctattgatacatcaatgggattcacaccacttgcaggaccaatgatgggaacacgttcaggagacattgatcctgcgattatcccttatcttgtagctaatgatccagaattggaagatgcagcagctgttgttaatatgcttaacaaacaatcaggattgcttggagtatcaggaacttcaagtgatatgcgagatattgaagcaggtcttcaaagtaaagatccaaatgcagtgttagcctataatgtctttattgaccgtattaagaaatttattggacaatacttggcagtattaaatggcgcggatgctattatttttactgcaggtatgggagaaaatgcgccattaatgcgtcaagatgttatcgcaggattatcatggtttggcattgaacttgatccagaaaaaaatgtttttggttattttggagatatcacaaaaccagattcaaaagtgaaggttttagttattcctactgatgaagaattaatgattgcgcgtgacgttgagcgccttaaagctaaataa

SEQ ID NO: 358 - protein, 397 aa, Streptococcus agalactiae
MSKTIAINAGSSSLKWQLYEMPEEKVVAKGIIERIGLKDSISTVKFDDKKDEQILDIVDHTQAVKILLEDLTKHGIIKDFNEITGVGHRVVAGGEYFKESALVDDKVVEQVEELSALAPLHNPAAAAGIRAFREILPDITSVCVFDTAFHTTMQPHTYLYPIPQKYYTDYKVRKYGAHGTSHQYVAQEAAKQLGRPLEELKLITAHVGNGVSITANYHGQSIDTSMGFTPLAGPMMGTRSGDIDPAIIPYLVANDPELEDAAAVVNMLNKQSGLLGVSGTSSDMRDIEAGLQSKDPNAVLAYNVFIDRIKKFIGQYLAVLNGADAIIFTAGMGENAPLMRQDVIAGLSWFGIELDPEKNVFGYFGDITKPDSKVKVLVIPTDEELMIARDVERLKAK

SEQ ID NO: 359 - DNA, 207 bp, Streptococcus agalactiae
atgaaaaattctctacaaaagttacgaaaatctaggaaattaagtcaagcagaacttgcagttgcacttggagttactaggcaaactattatttctctagaaaaagagaaatacacggcatctttggagctagcatttaagatagcgcgttattttgataaacaaattgaggaagtttttatttatacagaaagtgaaggaggatag

SEQ ID NO: 360 - protein, 68 aa, Streptococcus agalactiae
MKNSLQKLRKSRKLSQAELAVALGVTRQTIISLEKEKYTASLELAFKIARYFDKQIEEVFIYTESEGG

SEQ ID NO: 361 - protein, 138 aa, Streptococcus agalactiae
ATGTCAAGGATGTGGACTATTGATTTTTGTCCACCAATCGTTTACCAGCAATATGTTTTTATCATTACTATTAGTATTAGCATTGCGATGTCTATTTTTGCTATTTATCGCTATGCTTCATTGAAGAAAACGATATAA

SEQ ID NO: 362 - protein, 45 aa, Streptococcus agalactiae
MSRMWTIDFCPPIVYQQYVFIITISISIAMSIFAIYRYASLKKTI

SEQ ID NO: 363 - protein, 456 aa, Streptococcus agalactiae
ATGTTAATAAAAGGATTATTGTCACCCAATAGTAAAGTATCTCCGAAGGATTACAAAGTATATATGAGAGTTTTGTCTTTTGTTTTTAGTGTATGTAGTTTGATTATGATAGTATCATCATTTCTACATACCTTTGAATCTAATTTTACTAAAGGTTTTTCCTTTGGTTCAGGTATTGCCTTATTTGCAGGAAGTTTTTATTTTTTGGTGATAACATTTAGTGAAAAGCGATTTCAACATTACTATACCAAAGTTTTTGATGAGCGTAATCAATTTATTGCTAATATGTCTTGTCGACTTCTTTTCCTTTTATCTGTCCTTGTTTTAGTGGTATTGTGTCTGATTAATGTCTGGTTTGGTATAACTTTTTCCTATGCAAAGTTCTTGCTATTGATACTCTCTTTTATTTTATATGGTTATTTATTAATTTACTTTATTTTACAGAAGTTATTGTGA

SEQ ID NO: 364 - protein, 151 aa, Streptococcus agalactiae
MLIKGLLSPNSKVSPKDYKVYMRVLSFVFSVCSLIMIVSSFLHTFESNFTKGFSFGSGIALFAGSFYFLVITFSEKRFQHYYTKVFDERNQFIANMSCRLLFLLSVLVLVVLCLINVWFGITFSYAKFLLLILSFILYGYLLIYFILQKLL

SEQ ID NO: 365 - protein, 666 aa, Streptococcus agalactiae
GTGTCATTTATTATTAGAAAAGGCAAAATTTTAGCTTTGCTAATAGCATTTTTAGTTATTAATCAACTTGTTCCTATATTGGCTGTGTGGCTCCTAAAGAATCACTATCAAACGCCTTTTACTAGTATATTGTTGATTGGCTTAGAATTACTTATTATTGCTCTTTTCCTTTATTATGCCAAGGTTAAACAAATAATCAGATGGAAAGCATTATTGACAAGGAAAGCATTAGTTACTATTCTCTTAGGTTGGTTATCATTGAGGGTTCCACAAATTATTGGTTACCTCATTATGACTATGCAAGGGGTTAAAGATACAGCAAATCAAACAGTAATTATGGAATTAACAAAGCAACTTCCACTAGCTTTGATGTTAATTTTTGCCATAATTGGTGCCCCTATTATGGAAGAAATTATATTTCGCTATATTATCCCTAAAGAACTTTTTGCGAAACATCAAAAATGGGGTTTTGTCATCGGTACTTTAGCTTTTGCTCTTATTCATTCCCCTTCTGATATAGGTAGTTTTATTATTTATGCTGGGATGGGTGCTATTTTATCTTTTGTTTATTATAAAACTGAGCACTTAGAATATAGTATAATGATTCATTTTATTAACAATGCTCTTGCTTATAGCGTGTTAATCAGTACAATGATGAATAACTAA

SEQ ID NO: 366 - protein, 221 aa, Streptococcus agalactiae
MSFIIRKGKILALLIAFLVINQLVPILAVWLLKNHYQTPFTSILLIGLELLIIALFLYYAKVKQIIRWKALLTRKALVTILLGWLSLRVPQIIGYLIMTMQGVKDTANQTVIMELTKQLPLALMLIFAIIGAPIMEEIIFRYIIPKELFAKHQKWGFVIGTLAFALIHSPSDIGSFIIYAGMGAILSFVYYKTEHLEYSIMIHFINNALAYSVLISTMMNN

SEQ ID NO: 367 - protein, 771 aa, Streptococcus agalactiae
ATGAAAATTGGAATTATCGGCGTCGGAAAAATGGCCAGTGCAATTATTCAAGGCCTCAAACAAACCCAACATGACATTATCATATCCGGATCTTGCTTAGAGCGTTCAAAAGAAATTGCAGAAAGACTTGATGTTACTTACGCCGAATCTCATCAGTCATTAATCAATCAAGCTGATATTATCATGTTAGGTATTAAACCTCAACTATTTGAAAAGGTTCTTCTTCCACTTGATATCACAAAACCAATCATCTCAATGGCAGCAGGAATCTCCTTAGCGCGTTTAAGCCAATTAACTCGTTCTGATTTACCATTGATTCGTATTATGCCAAATATTAACGCACAAATACTTCAAAGTTGCACAGCTATTTGTTACAACAATCATGTATCAGATGAGTTACGACAATTAGCCAAAGAAATTACGGATAGTTTTGGAAGTAGCTTTGATATAGCAGAAACCAATTTTGATACCTTCACTGCTCTAGCAGGTTCTAGCCCTGCCTATATCTATCTATTTATAGAAGCCTTAGCTAAAGCAGGTGTAAAATATGGATTTCCAAAAGAACAAGCACTCTCTATTGTAGGACAGACTGTCTTAGCTTCTAGTCAAAACCTATTACAAGGACAAAATAGCACCTCTGACTTAATCGACAACATTTGTAGCCCAGGCGGAACTACTATTGCTGGCCTTTTAGACTTAGAAAAAAATGGTCTGACGCATAGTGTTATTTCTGCCATTGATGCTACTATTGAGAAAGCAAAAAAACTTTGA

SEQ ID NO: 368 - protein, 256 aa, Streptococcus agalactiae
MKIGIIGVGKMASAIIQGLKQTQHDIIISGSCLERSKEIAERLDVTYAESHQSLINQADIIMLGIKPQLFEKVLLPLDITKPIISMAAGISLARLSQLTRSDLPLIRIMPNINAQILQSCTAICYNNHVSDELRQLAKEITDSFGSSFDIAETNFDTFTALAGSSPAYIYLFIEALAKAGVKYGFPKEQALSIVGQTVLASSQNLLQGQNSTSDLIDNICSPGGTTIAGLLDLEKNGLTHSVISAIDATIEKAKKL

SEQ ID NO: 369 - protein, 1068 aa, Streptococcus agalactiae
ATGTCAGATTTATTTAACAAAATTAAAACCGTAACTGAGCTTGATGGGATTGCTGGCTATGAACACAATATCCGCAACTTCCTTCGTCAAGAAATAACTCCTTTAGTTGATCAAGTTGAGACAGACGGACTTGGTGGAATTTTTGGAGTTAAAAATACTCATGAGACTAATGCTCCTAAAGTCATGGTTGCTGCCCATATGGATGAAGTCGGCTTTATGGTTAGTCATATTCAGCCAGATGGAACATTTCGTGTACTTGAGGTTGGAGGATGGAATCCCCTAGTAGTCAGCTCACAACGCTTTACCCTCTACACACGTTCTGGTGATGCTATTCCTGTTATATCAGGCTCAGTTCCTCCTCACTTTCTTCGTGGACAAAGCGGTGGAACAACATTACCCAAAATTAGTGACATTGTTTTTGATGGAGGATTCACAGATAAAAATGAAGCTGAAAGCTTTGGCATTGCTCCTGGCGATATCATTGTTCCTAAATCTGAAACCATTTTAACTGCAAATCAAAAACATATTATGTCAAAAGCTTGGGATAATCGCTATGGTGTGCTTATGGTGACCGAATTGCTAAAAAGCTTAAAAGATCAAAGTCTTAGCAACACACTTATTGCTGGGGCAAATGTTCAAGAAGAAGTCGGACTTCGTGGCGCACATGTTTCAACAACTAAATTCAACCCAGATATCTTCTTAGCTGTCGATTGTTCCCCAGCTGGAGATATTTATGGGGAACAAGGCAAAATAGGAGAGGGAACCTTAATCCGTTTTTATGATCCCGGACATATCATGCTTAAAGATATGAGAGATTTCTTACTTACAACAGCTGAAGAAGCAGGTATAAAATACCAATATTATGCTGCAAATGGTGGTACCGATGCTGGGGCTGCTCACCTAAAAAATAGTGGTATTCCTTCTACAACTATCGGTGTCTGTGCACGCTACATTCATTCTCATCAAACACTCTACGCTATGGATGATTTTCTACAAGCACAAGCTTACCTTCAGGCCATCGTTAACAAATTAGACCGCTCGACGGTGGATATTATTAAAGGTTATTAA

SEQ ID NO: 370 - protein, 355 aa, Streptococcus agalactiae
MSDLFNKIKTVTELDGIAGYEHNIRNFLRQEITPLVDQVETDGLGGIFGVKNTHETNAPKVMVAAHMDEVGFMVSHIQPDGTFRVLEVGGWNPLVVSSQRFTLYTRSGDAIPVISGSVPPHFLRGQSGGTTLPKISDIVFDGGFTDKNEAESFGIAPGDIIVPKSETILTANQKHIMSKAWDNRYGVLMVTELLKSLKDQSLSNTLIAGANVQEEVGLRGAHVSTTKFNPDIFLAVDCSPAGDIYGEQGKIGEGTLIRFYDPGHIMLKDMRDFLLTTAEEAGIKYQYYAANGGTDAGAAHLKNSGIPSTTIGVCARYIHSHQTLYAMDDFLQAQAYLQAIVNKLDRSTVDIIKGY

SEQ ID NO: 371 - DNA, 321 bp, Streptococcus agalactiae
gtgtctaattccggggggtatggtataataacagttatgaaaaataaaaaaatcttatttgggactggccttgctggtgtgggtttactggcagctgctggttataccctaactaaaaaagtaacagattataaacgtcagcaaatcactcagaccttaagagaattttttagtcagatgggtgatattcaggtattttattttaatgaatttgaatctgatattaaaatgaccagtggtggtcttgtcttggaagatggcagaattttcgaattcatttatcgtcaaggtgttcttgattatgtggaggtgagcaaatga

SEQ ID NO: 372 - protein, 106 aa, Streptococcus agalactiae
MSNSGGYGIITVMKNKKILFGTGLAGVGLLAAAGYTLTKKVTDYKRQQITQTLREFFSQMGDIQVFYFNEFESDIKMTSGGLVLEDGRIFEFIYRQGVLDYVEVSK

SEQ ID NO: 373 - DNA, 324 bp, Streptococcus agalactiae
atgattttaccagaatcttatgaagaaatagcagcctatattgatagcactaagaaagttgttttcttttttacagcagattggtgtccagattgtcaatttatatatccagtaatgccatcaattgaaaaagatttctcagattttgtctttgtacgtgttaatcgtgatgactatatagaattagctcagcagtggaatatttttgggattccgagtttcgttgttgtggaaaatggtcaggaactgggtcgtttggttaataagaatcgcaaaacaaaggctgaaattactaaatttctcgctgaaattaactataaataa

SEQ ID NO: 374 - protein, 107 aa, Streptococcus agalactiae
MILPESYEEIAAYIDSTKKVVFFFTADWCPDCQFIYPVMPSIEKDFSDFVFVRVNRDDYIELAQQWNIFGIPSFVVVENGQELGRLVNKNRKTKAEITKFLAEINYK

SEQ ID NO: 375 - DNA, 627 bp, Streptococcus agalactiae
atgatttttacttataatagagagcatgttggtgataccttaatggttattgttaaggatagtcaaggagctaagctagatgttgatcgtcgcggacaagtagcacgcgtctatctgcaagatagtaaagaaacagttgcttggaatatctttgaagtgtcaagtttaattgttattgagggagcaggtcaaataactttatctgatcaagatattaaaatccttaatgcagaactactgaaagaaggattcgaagactctcttgttaataatattgaacctacatttgttgtggcgcaaattaaagaaatgattgatcatccagatagtgaccatttacatatctgtcaagcagaaatcaacgatgggaagacggtccaaatcgtttgtggggcacctaatgcttcagtaggtcttaaaacagttgcagctcttccaggagctatgatgccaaatggtagccttattttcccaggaaaacttcgtggagaagatagctttggaatgttatgtagtgctcgcgagttagctcttccaaatgctcctcaagtcagaggtatcattgaattatctgatcaggtaattgttggagagtctttcgacgccaataaacattggaaaaattag

SEQ ID NO: 376 - protein, 208 aa, Streptococcus agalactiae
MIFTYNREHVGDTLMVIVKDSQGAKLDVDRRGQVARVYLQDSKETVAWNIFEVSSLIVIEGAGQITLSDQDIKILNAELLKEGFEDSLVNNIEPTFVVAQIKEMIDHPDSDHLHICQAEINDGKTVQIVCGAPNASVGLKTVAALPGAMMPNGSLIFPGKLRGEDSFGMLCSARELALPNAPQVRGIIELSDQVIVGESFDANKHWKN

SEQ ID NO: 377 - DNA, 627 bp, Streptococcus agalactiae; identical to SEQ ID NO: 375

SEQ ID NO: 378 - protein, 208 aa, Streptococcus agalactiae; identical to SEQ ID NO: 376

SEQ ID NO: 379 - DNA, 717 bp, Streptococcus agalactiae
atgacaaatgtaactagttataaagaaatgctggctaaaccttggggaaaaatacaatatgaaataacttttgctcaattaagccatatcaaaaatcagaacgttttagattttggagctggtttttgtctcaccgaacaacatctagcaaaagaaaacaatgtaactgctattgaacccaatcctaaactgctttacgataatcaaagtgacaatatttataaaatcctaggttcctacgaagcattaagagatttgcctgatcaaagctttgatactattatttgtcataatgttcttgaatatatagacaaacataatcatcctgcttattttgacgaattttctcgacttctaaaacccaatggagaactatctctcatcaaacataatataaccggtaaaatattacaatcagttatttttagcaatgatacctccactgcgatggaactcttaacaggagaagcaaactttaaaagtgccagttttgaccagggaaatatttataccttagaagaactaaaacaaaatacaaatttattagttgaacgttatcagggtattcgtaccttctattcattacaaccaaaccattttaaaactgaaactggttggctaaacaaaatgcttgctatcgagctaagtgttgctgacaaagctccttataaagatattgcttttttgcaacacatcacacttaaaaagtcattgtaa

SEQ ID NO: 380 - protein, 238 aa, Streptococcus agalactiae
MTNVTSYKEMLAKPWGKIQYEITFAQLSHIKNQNVLDFGAGFCLTEQHLAKENNVTAIEPNPKLLYDNQSDNIYKILGSYEALRDLPDQSFDTIICHNVLEYIDKHNHPAYFDEFSRLLKPNGELSLIKHNITGKILQSVIFSNDTSTAMELLTGEANFKSASFDQGNIYTLEELKQNTNLLVERYQGIRTFYSLQPNHFKTETGWLNKMLAIELSVADKAPYKDIAFLQHITLKKSL

SEQ ID NO: 381 - protein, 396 aa, Streptococcus agalactiae
ATGTATAATAAAGTTATTATGATTGGGCGTCTAACAGCAAAGCCTGAGATGGTAAAAACACCAACTGACAAGTCAGTGACGCGTGCAACTGTTGCTGTTAATAGACGCTTTAAAGGAAGTAATGGTGAGCGTGAAGCAGATTTTATTAATGTGGTTATGTGGGGTCGTCTAGCGGAAACCCTTGCGAGCTATGGGACAAAGGGCTCTTTAATTTCAATAGATGGTGAATTGCGTACGCGCAAGTACGAAAAGGATGGTCAAACGCACTATATCACTGAAGTATTAGCATCATCATTTCAGTTGCTAGAAAGCCGTGCCCAACGTGCTATGCGTGAAAATAACGTTTCTGGTGATTTGTCAGATTTAGTATTGGAAGAAGAGGAGCTCCCCTTTTAA

SEQ ID NO: 382 - protein, 131 aa, Streptococcus agalactiae
MYNKVIMIGRLTAKPEMVKTPTDKSVTRATVAVNRRFKGSNGEREADFINVVMWGRLAETLASYGTKGSLISIDGELRTRKYEKDGQTHYITEVLASSFQLLESRAQRAMRENNVSGDLSDLVLEEEELPF

SEQ ID NO: 383 - protein, 729 aa, Streptococcus agalactiae
TTGCTTTTCACAGAAAGCAACCTTTTTTTATTGAAAATAGAAAGGCAAACGATTACAATAAAGGGGATAGAAAGCAGGTTTAAGATGGAAAAAGTCATTATTTTTGATATGGACGGCGTTATTGTTGATTCCGAGTACACGTTTTTAGATAATAAGACAGAAATGTTACGTGAGGAGGGTATTGATACGGACGTCTCGTATCAATACCAGTACATGGGGACTACTTTTGAATTCATGTGGCAAGCTATGAAAGAGGAGTTTGGCTTACCGAAAACAGTAAAAGAGTATATTGCTGAGATGAACAGACGTCGACAAGCGATTGTGGCGCGTGATGGTGTTAGGCCCATCAAAGGAGCTCAGCGACTGATTCATTGGTTACACCAACATGGCTATCGCTTAGCAGTTGCGTCCTCATCTCCAATGGTAGATATTAAGCGTAATCTAAAAGAGTTGGGTGTGACAGAATGCTTTGAATACATGGTTACAGGAGAAGATGTATCGTCTTCTAAACCAGCACCAGATGTTTTTCTTAGAGCTGCAGAGCTTTTAGATGTAGACCCTAAAGTTTGTATAGTTATAGAAGATACAAGAAATGGGAGTTTAGCTGCTAAGGCAGCAGGAATGTATTGCTTTGGCTTTGCTAATCCTGATTATCCACCGCAAGATTTATCAATGGCAGACAAGGTTATTTCAGATTATCAAGATATCTATATTTATCTTCCGGAGTAA

SEQ ID NO: 384 - protein, 242 aa, Streptococcus agalactiae
MLFTESNLFLLKIERQTITIKGIESRFKMEKVIIFDMDGVIVDSEYTFLDNKTEMLREEGIDTDVSYQYQYMGTTFEFMWQAMKEEFGLPKTVKEYIAEMNRRRQAIVARDGVRPIKGAQRLIHWLHQHGYRLAVASSSPMVDIKRNLKELGVTECFEYMVTGEDVSSSKPAPDVFLRAAELLDVDPKVCIVIEDTRNGSLAAKAAGMYCFGFANPDYPPQDLSMADKVISDYQDIYIYLPE

SEQ ID NO: 385 - protein, 1746 aa, Streptococcus agalactiae
ATGTTGATGGTGTTGTTATTCCAAAGGCTAGGAATTATTATGATTTTAGCCTTTTTATTGGTAAATAATAGTTATTTTAGACAGTTAATTGAAGAGCGGTCTAAACGTGAAACGGTAGTCCTTGTCATCATTTTCGGCTTGTTTGTTATTATATCTAATATAACAGGAATTGAAATAAAAGGGGATCGAAGTTTGGTCGAGCGCCCTTTTCTAACAACGATTTCTCATTCTGACTCACTTGCTAATACAAGGACTTTAGTTATTACAACGGCAAGTTTGGTTGGTGGACCTCTGGTTGGATCAATTGTTGGTTTTATTGGAGGAGTTCATCGCTTTTTTCAAGGAAGCTTTTCAGGTTCTTTCTATATTGTCAGTTCAGTTCTAGTCGGCATTGTTAGCGGAAAGATTGGTGATAAGCTTAAGGAAAACCATCTCTACCCTTCAACAAGCCAAGTTATTTTAATTAGTATTATTGCCGAAAGTATCCAGATGCTATTTGTTGGCATTTTTACAGGATGGGAACTTGTCAAAATGATTGTCATTCCAATGATGATTTTAAATAGTTTAGGTTCCACACTTTTCCTTGCGATTTTGAAAACTTATTTGTCAAATGAAAGTCAGTTACGCGCAGTTCAAACGAGAGATGTTCTTGAATTGACTCGACAGACTCTGCCCTACCTTAGACAAGGTTTGACACCGCAATCTGCTAGGAGCGTTTGCGAAATTATAAAGAGGCATACTAACTTTGATGCTGTGGGATTAACAGATCGGTCAAACGTATTAGCTCATATTGGTGTTGGCCATGATCACCATATTGCAGGACAACCGGTCAAAACAGACTTATCTAAAAGTGTTATTTTTGATGGCGAACCAAGAATTGCGCAAGATAAAGCGGCGATTTCTTGTCCAGATCACAACTGTCAGTTAAATTCTGCTATTGTAGTTCCTCTAAAAATAAATGATAAAACTGTGGGTGCCTTAAAAATGTACTTTGCAGGAGATAAGACAATGTCTGAGGTGGAGGAAAACCTAGTCCTTGGTTTAGCGCAAATATTTTCAGGACAACTGGCAATGGGGATAACAGAGGAACAAAATAAGTTAGCCAGTATGGCAGAGATAAAGGCTTTACAAGCACAAATCAACCCTCATTTCTTCTTTAATGCCATTAACACAATTAGTGCATTAATCCGTATTGATTCTGATAAAGCACGTTATGCACTGATGCAGTTAAGTACTTTTTTTAGAACAAGTTTGCAGGGTGGTCAGGATCGTGAGGTAACGCTTGAGCAAGAAAAATCACATGTGGATGCTTATATGAATGTTGAAAAATTACGTTTCCCTGATAAATATCAGTTATCTTATGATATTAGTGCACCAGAAAAAATGAAGTTACCACCTTTTGGTTTACAGGTACTGGTAGAGAATGCAGTTCGACATGCTTTCAAAGAACGTAAGACGGACAACCATATATTGGTTCAAATAAAGCCAGATGGTCATTATTATTGTGTTTCTGTTAGTGACAATGGACAAGGAATCTCAGATACTATCATTGATAAATTAGGTCAAGAAACAGTTGCAGAGAGTAAGGGTACAGGTACTGCTCTAGTTAATCTAAATAACAGGCTGAATTTATTATATGGTAGTGTAAGTTGCCTTCATTTTTCGAGCGACAAGAATGGTACAAAAGTTTGGTATCGAATACCTAATAGAATAAGGGAGGATGAGCATGAAAATTTTAATTCTTGA

SEQ ID NO: 386 - protein, 581 aa, Streptococcus agalactiae
MLMVLLFQRLGIIMILAFLLVNNSYFRQLIEERSKRETVVLVIIFGLFVIISNITGIEIKGDRSLVERPFLTTISHSDSLANTRTLVITTASLVGGPLVGSIVGFIGGVHRFFQGSFSGSFYIVSSVLVGIVSGKIGDKLKENHLYPSTSQVILISIIAESIQMLFVGIFTGWELVKMIVIPMMILNSLGSTLFLAILKTYLSNESQLRAVQTRDVLELTRQTLPYLRQGLTPQSARSVCEIIKRHTNFDAVGLTDRSNVLAHIGVGHDHHIAGQPVKTDLSKSVIFDGEPRIAQDKAAISCPDHNCQLNSAIVVPLKINDKTVGALKMYFAGDKTMSEVEENLVLGLAQIFSGQLAMGITEEQNKLASMAEIKALQAQINPHFFFNAINTISALIRIDSDKARYALMQLSTFFRTSLQGGQDREVTLEQEKSHVDAYMNVEKLRFPDKYQLSYDISAPEKMKLPPFGLQVLVENAVRHAFKERKTDNHILVQIKPDGHYYCVSVSDNGQGISDTIIDKLGQETVAESKGTGTALVNLNNRLNLLYGSVSCLHFSSDKNGTKVWYRIPNRIREDEHENFNS

SEQ ID NO: 387 - protein, 741 aa, Streptococcus agalactiae
ATGAAAATTTTAATTCTTGATGATGAAATGTTTGCCAGACAAGAATTATCGTTTTTAGTTGAACATAGCCAGGAGGTTGACAACCCTGAGATTTTTCAGGCTGAGGATATCAGTGAAGCCGAAAAAATCTTATTTAGACAGCAAATTGATTTAATTTTTTTAGATATTTCGCTTAGTGAAGAAAATGGCTTTACTTTGGCTAATCAGTTGAGCCAACTTGCACATCCCCCACTTGTTGTTTTTGCGACAGCTTATGATAACTACGCTGTGAAAGCTTTTGAAAGTAACGCTGTTGATTATATCATGAAACCGTTTGAACAACAGCGCGTTGATATGGCTCTATCAAAAGTGAAGAAATTGAGCCAACTCACCACTGCTTCAGATGTAGAGCAAGCAATACCTAAAAAAGCCAGTGTTGAATTGTTAACCTTGACATTATCAGATCGCAGTGTTGTTGTTAAAATGCAAGATATTGTTGCAGCTAGTGTTGAAGATGGCGAATTAACTGTTAGTACAGTTCAGAAAACTTACACTATTCGGAAGACACTCAATTGGTTTAAGTCACGCGCTGTAGCACCATATTTTCTCCAGATTCATCGAAACACAGTGATTAATCTAGAGATGATTGAGGAAATTCAACCTTGGTTTAATCATACTTTGTTACTAATTATGTCTAATGGAGAGAAATTTCCAGTAGGTCGATCGTATTTAAAAGACCTAAATGAGCATTTAACCATGTAA

SEQ ID NO: 388 - protein, 246 aa, Streptococcus agalactiae
MKILILDDEMFARQELSFLVEHSQEVDNPEIFQAEDISEAEKILFRQQIDLIFLDISLSEENGFTLANQLSQLAHPPLVVFATAYDNYAVKAFESNAVDYIMKPFEQQRVDMALSKVKKLSQLTTASDVEQAIPKKASVELLTLTLSDRSVVVKMQDIVAASVEDGELTVSTVQKTYTIRKTLNWFKSRAVAPYFLQIHRNTVINLEMIEEIQPWFNHTLLLIMSNGEKFPVGRSYLKDLNEHLTM

SEQ ID NO: 389 - protein, 456 aa, Streptococcus agalactiae
ATGAAACACACCAGTAAAGAAACCAAAACAAAAGAAGCTCCAATGTTTATTCAAATGTCAATATATGCAGCTATTCTATTAGTTTCACAAATGATTTCAATGTTATTACCGAAATCACTACCAATCCCAACGACGGTTATTGGTTTGGTGCTAATGTATGTATTGCTAACTGCTAAAATTATCAAGGTAGAGTGGGTTGACTCTTTTGGGGCTTTGATGATAAGCATGATTGGTTTTATGTTTGTCCCCTCAGGAATATCAGTAGCAGCGAATCTTGATATCCTAAAAGCTGAAGGCTTGCAACTAGTTGCTGTTATTACAATCTCAACTGTTGTTATGTTGGTAGTGGTAGCATATGTTGCACGATTAATACTTGCTATCAGAGAACTCAGTGTCACAGATTTATTTAAAAAGATATTACCTAACCACTATAGTAAGAAAGTAGAGGAAAAATAA

SEQ ID NO: 390 - protein, 151 aa, Streptococcus agalactiae
MKHTSKETKTKEAPMFIQMSIYAAILLVSQMISMLLPKSLPIPTTVIGLVLMYVLLTAKIIKVEWVDSFGALMISMIGFMFVPSGISVAANLDILKAEGLQLVAVITISTVVMLVVVAYVARLILAIRELSVTDLFKKILPNHYSKKVEEK

SEQ ID NO: 391 - DNA, 708 bp, Streptococcus agalactiae
atggaactcttaaaaacacccatctttggtatttgcttttctttaatactctatacgataggagaacatttatttaagaagagtaaaggtttcttccttttgcagcctcttttctttgcaatggttagtggtattgtcattctttggcttatgtcaaaaggtttaggaaccgatgttaagacattttatacacaagcttataaaccaggtggtgatttaatattttggtttttaaatccagcgacaattgcttttgcagttcctctctataagaaaaatgacgttgttaaaaaatattgggtagaaattctcagcagtttagtaatcggtatgattgtttcccttatacttatcgtcgctatttctaaaatggttgggcttagtcaagtcggaattgcttcaatgttgccacaagcagcaacaacagcaattgctcttccaataacagcagcaattggagggaacacagctgtgacagcaatggcgtgtatcttaaatgcagttattatttatgcattaggtaaaaaattagtgtcatttttccatttgaatgatagtaagattggtgcaggattaggtctagggacctctggtcatacagtcggagcagcctttgcattggaattgggagaactgcaaggtgcgatggcagctatagctgtggtggttatcggtttggtagttgatttggttattccttatctttag

SEQ ID NO: 392 - protein, 235 aa, Streptococcus agalactiae
MELLKTPIFGICFSLILYTIGEHLFKKSKGFFLLQPLFFAMVSGIVILWLMSKGLGTDVKTFYTQAYKPGGDLIFWFLNPATIAFAVPLYKKNDVVKKYWVEILSSLVIGMIVSLILIVAISKMVGLSQVGIASMLPQAATTAIALPITAAIGGNTAVTAMACILNAVIIYALGKKLVSFFHLNDSKIGAGLGLGTSGHTVGAAFALELGELQGAMAAIAVVVIGLVVDLVIPYL

SEQ ID NO: 393 - DNA, 720 bp, Streptococcus agalactiae
  misc_feature 8, 9, 10, 11, 12: n = A,T,C or G
atgaatgnnnnnatctttggtatttgcttttctttaatactctatacgataggagaacatttakttaagaagagtaaaggtttcttccttttgcagcctcttttctttgcaatggttagtggtattgtcattctttggcttatgtcaaaaggtttaggaaccgatgttaagacattttatacacaagcttataaaccaggtggtgatttaatattttggtttttaaatccagcgacaattgcttttgcagttcctctctataagaaaaatgacgttgttaaaaaatattgggtagaaattctcagcagtttagtaatcggtatgattgtttcccttatacttatcgtcgctatttctaaaatggttgggcttagtcaagtcggaattgcttcaatgttgccacaagcagcaacaacagcaattgctcttccaataacagcagcaattggagggaacacagctgtgacagcaatggcgtgtatcttaaatgcagttattatttatgcattaggtaaaaaattagtgtcatttttccatttgaatgatagtaagattggtgcaggattaggtctagggacctctggtcatacagtcggagcagcctttgcattggaattgggagaactgcaaggtgcgatggcagctatagctgtggtggttatcggtttggtagttgatttggttattcctatctttagtcatttgattggtttgctataa

SEQ ID NO: 394 - protein, 239 aa, Streptococcus agalactiae
  VARIANT 3, 4, 22: Xaa = Any Amino Acid
MNXXIFGICFSLILYTIGEHLXKKSKGFFLLQPLFFAMVSGIVILWLMSKGLGTDVKTFYTQAYKPGGDLIFWFLNPATIAFAVPLYKKNDVVKKYWVEILSSLVIGMIVSLILIVAISKMVGLSQVGIASMLPQAATTAIALPITAAIGGNTAVTAMACILNAVIIYALGKKLVSFFHLNDSKIGAGLGLGTSGHTVGAAFALELGELQGAMAAIAVVVIGLVVDLVIPIFSHLIGLL

SEQ ID NO: 395 - DNA, 111 bp, Streptococcus agalactiae
ttgataaataatatttttgacaacttttttcattataacaagaaaaaagtaggagaacaattacttaactggttaattagaaaatttgttattttatcattaataacttaa

SEQ ID NO: 396 - protein, 36 aa, Streptococcus agalactiae
MINNIFDNFFHYNKKKVGEQLLNWLIRKFVILSLIT

SEQ ID NO: 397 - DNA, 1491 bp, Streptococcus agalactiae
atgggggcaaagcttcctcatgaattcgatccaaaggaccgttatggaatccataatgaaggtaatattactcatagcaccctattgaaacgttctcctgaactagatataaaaggagagcttgctaaaaaatataaaatctctaaggatggcttaacgtggtcgttcgacttaaatgatgattttaaattctccaatggtgagcctgttactgctgacgatgttaagtttacttatgatatgttgaaagcagatggaaaagcttgggatttgacctttattaagaatgttgaagtagttgggaaaaaccaggtaaatattcatttgactgaggcgcattcgacatttacagcacagttgacagaaatcccaatcgtccctaaaaaacattacaatgataagtataagagcaatcctatcggttcaggaccttacatggtgaaagaatataaggctggagaacaagcaatcttcgttcgaaatccctattggcacggtaaaaagccttattttaaaaagtggacttgggtattacttgatgaaaatacagcactagctgctttagaatctggtgatgttgacatgatttacgcaacgccagagcttgctagcaagaaagtcaaaggaacacgtcttctagatattgcttcaaacgacgttcgcggactgtcattgccttatgtgaagaaaggtgttgtgaaaaattcaccagacggttatccagtaggaaatgatgtcactagtgatccagcaatcagaaaagccttgactattggtttaaatagacaaaaagttctggatactgttttaaatggttatggtaaaccagcttattcaattattgatagaacaccattctggaatccaaaaacagcaattaaagataataaagtagctaaagctaagcaacttttgacaaaagctggatggaaagaacaagcagacggtagccgtaaaaaaggaaatcttaaagcggaatttgacctttactaccctactaatgatcaattacgagcaaacttagccgttgaagtagcggagcaagctaaagccttaggtattactattaaactcaaggctagtaactgggatgaaatggcaactaagtcacatgattcagccttactttatgcgggaggacgtcatcatgcgcagcaattttatgaatcacattacccaagtttagctggtaaaggttggaccaatattactttttataacaatcctactgtgactaagtaccttgacaaagcaatgacatctcctgaccttgataaagctaacaaatattggaagttagctcagtgggatggcaaaacaggtgcttccactcttggagatttaccaaatgtatggttggtgagtcttaaccatacttatattggtgataaacgtatcaatgtaggtaaacaaggtgtccatagtcatggtcatgattggtcattattgactaacattgctgaatggacttgggatgaatctgctaagtaa

SEQ ID NO: 398 - protein, 496 aa, Streptococcus agalactiae
MGAKLPHEFDPKDRYGIHNEGNITHSTLLKRSPELDIKGELAKKYKISKDGLTWSFDLNDDFKFSNGEPVTADDVKFTYDMLKADGKAWDLTFIKNVEVVGKNQVNIHLTEAHSTFTAQLTEIPIVPKKHYNDKYKSNPIGSGPYMVKEYKAGEQAIFVRNPYWHGKKPYFKKWTWVLLDENTALAALESGDVDMIYATPELASKKVKGTRLLDIASNDVRGLSLPYVKKGVVKNSPDGYPVGNDVTSDPAIRKALTIGLNRQKVLDTVLNGYGKPAYSIIDRTPFWNPKTAIKDNKVAKAKQLLTKAGWKEQADGSRKKGNLKAEFDLYYPTNDQLRANLAVEVAEQAKALGITIKLKASNWDEMATKSHDSALLYAGGRHHAQQFYESHYPSLAGKGWTNITFYNNPTVTKYLDKAMTSPDLDKANKYWKLAQWDGKTGASTLGDLPNVWLVSLNHTYIGDKRINVGKQGVHSHGHDWSLLTNIAEWTWDESAK

SEQ ID NO: 399 - DNA, 978 bp, Streptococcus agalactiae
gtgaaacatattaccactgtagttatctggaagatacttaggtgtttgtcactcgtttttggagtatcaattttgacctttattttactaaaacaatcaccggttgatccagtcatggcaagtgtcaattatgacacgtcactaacccctgttcagtacaaagcgattgctcaccactatggtttggataagccagctccggtccagtattttatttggttaaaaaattttatacagggacatttagggacttcactagtttatcggcaacctgttattgatattattagatcacgggcaggtgcctctttcatacttatgggactctcctgggtcttatcgggtcttattggatttatcttaggaactttatcagctttccatcaagggaaattgcttgatcgaattgtaaggtggttttcttaccttcagatatcagtaccaactttttggattgggctcatttttttattaatcttttctgtccagctggggtggttcccgattggtatttcttccccgataggtactttgagtcaagatattacgttagctgatcgtattaagcaccttattttacctgttttcacgctaagtattctaggcattgccaatgtaactcttcatactagaactaaaatgatgtcggtactttctagtgaatatgtcttatttgccagagcgcgtggggaaacggaatggcaaatttttaaaaatcattgtcttagaaatgctatcgtaccagctattacactgcatttttcctattttggagaattgtttggaggatccgttcttgctgagcaagttttctcatatccaggactagggtctaccctaactgaagcaggacttaaaagtgatacaccgctacttctagctattgtgatgatagggacattatttgtttttgcgggcaatcttattgcggatattttaaacagcataatcaatccacagttaaggagaaaagtatga

SEQ ID NO: 400 - protein, 325 aa, Streptococcus agalactiae
MKHITTVVIWKILRCLSLVFGVSILTFILLKQSPVDPVMASVNYDTSLTPVQYKAIAHHYGLDKPAPVQYFIWLKNFIQGHLGTSLVYRQPVIDIIRSRAGASFILMGLSWVLSGLIGFILGTLSAFHQGKLLDRIVRWFSYLQISVPTFWIGLIFLLIFSVQLGWFPIGISSPIGTLSQDITLADRIKHLILPVFTLSILGIANVTLHTRTKMMSVLSSEYVLFARARGETEWQIFKNHCLRNAIVPAITLHFSYFGELFGGSVLAEQVFSYPGLGSTLTEAGLKSDTPLLLAIVMIGTLFVFAGNLIADILNSIINPQLRRKV

SEQ ID NO: 401 - protein, 822 aa, Streptococcus agalactiae
ATGATATTGAGACGTCGAACTATTGTTTTATGGCAACTGGGTATCGCCATTTCTCTCATTCTTAGTATTCTAGCCTTAAATCTTTATTTCCATAGTACTCCCTTGCAAACCAATGCAGCTTTACGGAACCTTGCTCCTTCATTAAACCATCTTTTTGGGACAGATGGTTTAGGTAGGGATATGTTTGTCAGAACGATTAAAGGACTTTATTTCTCTCTACAAGTCGGCTTATTAGGTGCCCTTATGGGGGTCATTCTGGCGACAGTTTTTGGAGTGCTTGCAGGTTTAGGAAATAGCATTATTGATAAAATAATAGCATGGTTAGTTGATTTGTTTATTGGTATGCCTCATTTGATTTTTATGATTCTCATTTCTTTTGTTGTTGGGAAAGGTGCTCAAGGGGTCATCATTGCAACGGCTGTTACACATTGGCCTTCTTTAGCAAGGCTTATCCGCAATGAAGTCTATCATCTAAAGAATAAAGAATTTGTCCAACTTTCTAAAAGTATGGGAAAAACGCCTTATTATATTGTGAGGCATCATATCCTGCCTTTGATTGCTTCTCAAATTTTCATTGGTTTTATCCTCTTATTTCCACATGTCATCCTACATGAAGCATCAATGACTTTCTTAGGATTTGGGCTCTCTGCCGAACAACCTTCGGTTGGTATCATTCTGTCAGAGGCAGCTAAGCATATCTCTCTTGGAAATTGGTGGTTGGTTATCTTTCCAGGACTTTATCTTATTTTGGTTGTCAATGCATTTGATACTATCGGAGAATCTTTAAAGAAACTCTTTTACCCTCAAACTGATCATTTTTAG

SEQ ID NO: 402 - protein, 273 aa, Streptococcus agalactiae
MILRRRTIVLWQLGIAISLILSILALNLYFHSTPLQTNAALRNLAPSLNHLFGTDGLGRDMFVRTIKGLYFSLQVGLLGALMGVILATVFGVLAGLGNSIIDKIIAWLVDLFIGMPHLIFMILISFVVGKGAQGVIIATAVTHWPSLARLIRNEVYHLKNKEFVQLSKSMGKTPYYIVRHHILPLIASQIFIGFILLFPHVILHEASMTFLGFGLSAEQPSVGIILSEAAKHISLGNWWLVIFPGLYLILVVNAFDTIGESLKKLFYPQTDHF

SEQ ID NO: 403 - protein, 804 aa, Streptococcus agalactiae
ATGACAGAAACATTATTAAGCATTAAAGACCTCTCCATCACCTTCACTCAATACGGAAGATTTTTAAAACCATTTCAATCAACACCGATACAAGCGCTGAATTTAGAAATTAAAAAAGGTGAGTTATTAGCTATTATAGGTGCTAGTGGTTCAGGGAAGAGTTTATTAGCACATGCTATTATGGATATTCTTCCTAAAAATGCATCTGTAACAGGAGATATGATTTATCGTGGTCAATCACTAAATTCTAAACGCATTAAACAGTTGCGAGGAAAAGATATTACGTTGATTCCACAATCAGTTAATTATTTAGATCCATCTACGAAAGTCAAACATCAGGTGCGCTTAGGTATCTCAGAAAATTCAAAGGCTACTCAAGAAGGATTGTTTCAACAGTTTGGTTTAAAAGAAAGTGATGGTGACTTGTATCCTTTCCAACTTTCTGGCGGAATGCTCCGACGTGTTTTGTTTACAACGTGTATTAGTGATAAGGTTTCTTTGATTATTGCGGATGAGCCCACCCCTGGATTACATCCAGATGCTCTGCAAATGGTTTTAGACCAACTACGCTCCTTTGCAGATAAAGGAATAAGCGTTATATTTATCACTCATGATATTGTAGCAGCTAGTCAAATTGCTGATCGTATTACTATTTTTAAAGAGGGAAAAGCTATTGAAACAGCTCCAGCTAGTTTCTTTAGCGGAAATGGAGAGCAGTTACAAACAGAATTTGCTAGAAGTTTATGGCGCTCTCTCCCACAGCAAGAATTTTTGAAAGGAGTTACTCATGACCTTAGAGGCTAA

SEQ ID NO: 404 - protein, 267 aa, Streptococcus agalactiae
MTETLLSIKDLSITFTQYGRFLKPFQSTPIQALNLEIKKGELLAIIGASGSGKSLLAHAIMDILPKNASVTGDMIYRGQSLNSKRIKQLRGKDITLIPQSVNYLDPSTKVKHQVRLGISENSKATQEGLFQQFGLKESDGDLYPFQLSGGMLRRVLFTTCISDKVSLIIADEPTPGLHPDALQMVLDQLRSFADKGISVIFITHDIVAASQIADRITIFKEGKAIETAPASFFSGNGEQLQTEFARSLWRSLPQQEFLKGVTHDLRG

SEQ ID NO: 405 - protein, 627 aa, Streptococcus agalactiae
ATGACCTTAGAGGCTAAAAAGCTTGGCTTTTATCATAAAAAAGATCAATGGCTTTTTAAGGAGATTAATTTAGAGGTAGCACCTGGTCAAGTTTTAGGTATATTTGGACAAAGTGGTTGTGGAAAAACTAGTTTATCCAGGGTGCTTGCAGGTTTTTTACATCCTAAATCTGGTGAAGTATTAGTTGATGGCAGTAATTTGCCTAGCAAAGCATTTAGACCTGTACAACTTATTCAACAACATCCTGAAAAAACGATGAATCCTTTATGGCCTATGAAAAAAAGTTTGGAAGAAGCCTATTACCCAAGTCGAGATTTACTAGATGCTTTTGGAATTCAAGAAAAATGGCTAAATCGTCGACCTAGTGAACTCTCGGGAGGAGAATTACAACGCTTTTCGATTGTGCGTTCATTACATCCAGAGACTAAATACCTTATTGCAGATGAAATGACTACTATGTTGGATAGCATTACACAAGCTAGTGTATGGAAAAGCCTGTTGGAGATTGTAAAGGATAGAAATTTAGGTCTCATCGTTATTAGTCATGATTTCGCTATGTTAGAGAAACTTTGTAACCAATGCTATATGATTGAAGAGAATCGTATCGTATCTTTCAATGGAGATTAA

SEQ ID NO: 406 - protein, 208 aa, Streptococcus agalactiae
MTLEAKKLGFYHKKDQWLFKEINLEVAPGQVLGIFGQSGCGKTSLSRVLAGFLHPKSGEVLVDGSNLPSKAFRPVQLIQQHPEKTMNPLWPMKKSLEEAYYPSRDLLDAFGIQEKWLNRRPSELSGGELQRFSIVRSLHPETKYLIADEMTTMLDSITQASVWKSLLEIVKDRNLGLIVISHDFAMLEKLCNQCYMIEENRIVSFNGD

SEQ ID NO: 407 - protein, 2031 aa, Streptococcus agalactiae
ATGGAACAATTTAAACATGATGCCAAAGCCTTGTTAGAGGCAATTGGGGGTAAAGAAAATATTAGTGCAGTGACACATTGTGCTACACGCATGCGATTTGTTTTGAATGACAGTAGTAAAGCTAAGGTAAAGGTAATTGAGGAGTTACCATCAGTCAAGGGTACCTTTACCAATGCTGGGCAATTTCAAGTCATTATTGGTAATGATGTCCCTATTTTTTATAATGCTTTTGTAGCCGTTTCTGGTATTGAGGGTGTGTCTAAAGAGGCGGCAAAATCGGCTGCCCAAAAAAATCAAAACCCTTTACAGCGTGTGTTGACAATGCTGGCTGAAATATTTACACCGATTATTCCAGCCATTATTGTTGGTGGTCTGATCCTTGGTTTTCGTAATATTTTAGATGCCGTTCCATTTGAATTTTTAGGTCAAAAAGTTGTTGATGGTGTCAGGCAAGTAGACTCTTCTGGGCATCCAATTTGGAATACTCTAGTAGATGTTTCAACGTTTTGGAGCGGAGTAGACTCTTTTTTATGGTTACCAGGTGAAGCTATATTTCATTTCTTACCAGTTGGTATTGTATGGTCTGTGACTCGTAAGATGGGGACTACTCAAATCCTCGGTATTGTTCTAGGTATCTGTCTAGTGTCGCCACAATTACTTAATGCTTATTCTGTAGCTAGTACTTCAGCAGCAGACATTGCTAAAAATTGGTCTTGGAATTTTGGTTACTTTACAGTACAAAAAATTGGTTATCAAGCTCAAGTTATTCCAGCTCTGTTAGCTGGTTTGAGCCTGTCTTACTTAGAAATCTTCTGGAGAAAACATATTCCTGAAGTTGTTTCAATGATTTTTGTGCCATTTCTATCCTTAGTTCCAGCTATTATCTTGGCTCATACTGTCCTTGGACCTATTGGTTGGACACTAGGTAAATGGATTTCTGCTATCGTTCTTATTGGATTGACTGGTCCTGTAAAATGGCTCTTTGGTGCTATTTTTGGTGCCCTGTATGCCCCATTTGTTATTACTGGTTTGCACCACATGACAAATGCTATCGATACTCAACTCATAGCAGATACAAAAACACATACAACTGGCCTTTGGCCGATGATTGCTCTTTCAAATATTGCTCAGGGTTCAGCTGTACTAGCTTATTATTTTATGCATCGTCATGATGAAAAAGAGGCTCAAATATCACTTCCAGCTGCTATCTCAGCCTACCTTGGTGTTACAGAGCCGGCGCTTTTTGGTGTAAACGTTAAATACATTTATCCATTTGTTGCTGGTATGATTGGTTCAAGTGTGGCAGGTCTTTTGGCGACAACTTTTAATGTCCAAGCTAACTCTATTGGTGTAGGCGGTCTTCCAGGCTTCCTGTCAATTAACGTTAAATATATGGGATATTTCTTTATCTGTATGGCAGTGGCTATCTTTATTCCTTTATTTTTGACACTATTCTTTAAAAAATCAGGTATTTTGACAAAAACTGAAGAGGAAAAATTAGTACCTGATGCTGTCATTGCTTCAACAACAGAAACAAAATCAGCAAAAGAAAAAGCTGTCGTATCAGGTACAAAGCTTAGTGTAGTAAGCCCTTTATCAGGTTTAGCTAAACCACTGGATCAAGCTAGTGATCCTGTCTTTTCACAAGGAATTATGGGGAAGGGAGTGGTTATCGATCCAAGTGATGGAGAACTAGTTTCACCGGTCGATGCGACAGTTTCAGTTCTTTTCCCTACGAAACATGCTATTGGATTGTTAACATCAGAGGGGGTTGAGTTTCTTATTCATATTGGTATGGATACTGTTAATTTAGAAGGAAAAGGGTTTACCTCTCATGTTGCTCAAGGTGACACTGTAAAAGTAGGAGATAAACTCATTACTTTCGATATTCCAATGATAAAAGAAGAAGGATACATTGTGGAAACTCCTATTCTGATTACTAATCAACAAGAATTCCGACCAGAAGAATTGATAGATTTACCCAAACAGATAAAACGTGGACAAGCATTAATGGTTGCCAAGAAAATTTAA

SEQ ID NO: 408 - protein, 676 aa, Streptococcus agalactiae
MEQFKHDAKALLEAIGGKENISAVTHCATRMRFVLNDSSKAKVKVIEELPSVKGTFTNAGQFQVIIGNDVPIFYNAFVAVSGIEGVSKEAAKSAAQKNQNPLQRVLTMLAEIFTPIIPAIIVGGLILGFRNILDAVPFEFLGQKVVDGVRQVDSSGHPIWNTLVDVSTFWSGVDSFLWLPGEAIFHFLPVGIVWSVTRKMGTTQILGIVLGICLVSPQLLNAYSVASTSAADIAKNWSWNFGYFTVQKIGYQAQVIPALLAGLSLSYLEIFWRKHIPEVVSMIFVPFLSLVPAIILAHTVLGPIGWTLGKWISAIVLIGLTGPVKWLFGAIFGALYAPFVITGLHHMTNAIDTQLIADTKTHTTGLWPMIALSNIAQGSAVLAYYFMHRHDEKEAQISLPAAISAYLGVTEPALFGVNVKYIYPFVAGMIGSSVAGLLATTFNVQANSIGVGGLPGFLSINVKYMGYFFICMAVAIFIPLFLTLFFKKSGILTKTEEEKLVPDAVIASTTETKSAKEKAVVSGTKLSVVSPLSGLAKPLDQASDPVFSQGIMGKGVVIDPSDGELVSPVDATVSVLFPTKHAIGLLTSEGVEFLIHIGMDTVNLEGKGFTSHVAQGDTVKVGDKLITFDIPMIKEEGYIVETPILITNQQEFRPEELIDLPKQIKRGQALMVAKKI

SEQ ID NO: 409 - protein, 894 aa, Streptococcus agalactiae
ATGACGATTGATAAACGTAAAGTTGTCTATCAAATTTATCCAAAATCATACAAAGACACAACTGGTAATGGGGTTGGTGATCTTCGTGGTATTATCGAAAAATTACCCTATTTAGCAGAACTTGGTATTGATATGGTTTGGCTCAACCCATTTTATCCAAGTCCACAACGAGATAATGGATATGATATCTCTGATTATACAGCTATTAACCCTGATTTTGGAACGATGGACGATTTTGAAGAAATGATTGAGGTGGGACGTCAATACCGTATAGATTTTATGCTTGATATGGTGCTTAATCATTGTTCAATAGAACATGAGTGGTTTAAAAAAGCACTTGCAGGAGATCGCTACTATCAAGATTTCTTTATCTTACGTGATAATCCAACAGATTGGGTATCTAAATTTGGTGGAAATGCTTGGGCACCATTTGGTGATACAGGGAAGTATTATCTTCATCTTTTTGATATCACTCAAGCTGACCTTAATTGGCGCAATGCCGATGTTCGCAAGGAACTTTTTAAAGTTGTCAATTTTTGGCGTGATAAAGGGGTTAAAGGTTTTCGATTTGATGTGATTAATTTAATTGGGAAAGATGAGATACTTGAGAACTGCCCAATTAATGATGGAAAACCAGCTTATACTGATCGTCCAATAACACATGATTATCTCAAGATGTTGAATAATGCTAGTTTTGGACAAGATGATTCCTTCATGACAGTTGGTGAAATGTCTTCAACGACAATTGCAAATTGCATTCTTTACACTGCACCAGAACGTGAAGAGTTATCCATGGCTTTTAATTTTCACCACCTCAAAGTAGATTATAAAGATGGGCAAAAGTGGACCATTATGGCTTTTGATTTTCCTGCATTACGTGACCTTTTCCAATAG

SEQ ID NO: 410 - protein, 297 aa, Streptococcus agalactiae
MTIDKRKVVYQIYPKSYKDTTGNGVGDLRGIIEKLPYLAELGIDMVWLNPFYPSPQRDNGYDISDYTAINPDFGTMDDFEEMIEVGRQYRIDFMLDMVLNHCSIEHEWFKKALAGDRYYQDFFILRDNPTDWVSKFGGNAWAPFGDTGKYYLHLFDITQADLNWRNADVRKELFKVVNFWRDKGVKGFRFDVINLIGKDEILENCPINDGKPAYTDRPITHDYLKMLNNASFGQDDSFMTVGEMSSTTIANCILYTAPEREELSMAFNFHHLKVDYKDGQKWTIMAFDFPALRDLFQ

SEQ ID NO: 411 - protein, 477 aa, Streptococcus agalactiae
ATGCTTGATGAAGGCAAGTCACAAGAAGAGGCATTTAGCATTATTCGAGCGAAATCTCGAGACAATTCTCGAGTACCAATGCAATGGGATGATAGTACGAATGCAGGTTTTTCTGAAGGCGCTCCATGGTTGAAAGTAGGAAAATCATATAAAGAAATCAATGTCGCAAAGGAGAAAACAGGGCTGATATTTACTTTCTATCAAGAGTTGATAAGGCTACGTAAACAACTGCCAATAATAGCTGACGGGAATTATAAAGCAGCTTTCAAAGATAATGAAAAAGTATATGCTTTTGAACGCCATCTTGATAAGGAAAAACTTCTTGTTTTAAATAATTTCTTTGCTGAGAAAGTTAAGATAAAATTACCGGAGAATTATCTCCAAGGACAAGTTCTTCTATCAAATTATAAGGATGTTACTCTTGATGAAACGGTTACTTTGCAACCTTATCAAACTTTAGCTATCTTAGTGTCATAA

SEQ ID NO: 412 - protein, 158 aa, Streptococcus agalactiae
MLDEGKSQEEAFSIIRAKSRDNSRVPMQWDDSTNAGFSEGAPWLKVGKSYKEINVAKEKTGLIFTFYQELIRLRKQLPIIADGNYKAAFKDNEKVYAFERHLDKEKLLVLNNFFAEKVKIKLPENYLQGQVLLSNYKDVTLDETVTLQPYQTLAILVS

SEQ ID NO: 413 - protein, 2037 aa, Streptococcus agalactiae
ATGGTTGATAATAAGACTGTTGTGATAATGTTGGTATTTTTAGCTCGGAAAAATCTTTCCTTGTATGAGTTAACAGTGCAAACAAAGTTTTCAATAAAAGTTATCATAGAGCAAATTAACTATCTCAATAGTTTTTTAGCAAAAAATCACCTACCAGCTATTGCTCACTCTGCTGGACGTTATCAGTTATTAGGAGATGAAAAAGAGCATGATAAAATTGTCTCCTTATTAGAAGCTGAGCAATTTTACCTAACCCAGGAAGAAAGGGTATGTCTGATTTACCTTTATAGCTTTTGCCGAAGAGAGTTTGTCTCCAATGTGCATTATCAAGATTTTTTGAAAGTAAGTAAGAATACTACTTTATCAGATATCAAGATGCTACGTTCTAAATTAGCAAAAAGAGGTATCTCACTCACTTATACAAGAGCAAAGGGATATAGTCTAGTAGGAGATGAGATGGATAAGCATCAAGTTGCTTTTCAGATGATAACTCAACTACTAGAATCTCCCATTGGTTTTTGGTCTTTGAATTATATCTTGTCTTCTTGGAAATTCGCTCTCTCATATGAGAAGTTAGAAAAGACGGTAGAATATTTCTATGAATCTTTTCAACTTTCTCCAATACAAGATAGGCTTGAGAAATCTTTATATTTTATCATTTTAATACTGTGTCGTTATCAAAGGTCAGTAGATCGTGTTTTGCAGGGTTCTCCTATTGTTTCTGAACAATTAAAAGAGTTAACGACTATTATTGTGACTAATTTAAGTCAGGATATTTCCTTATCTAAACCATTAGATCAGAAAGAAAAAGATTATATTACCTTGATCTTATCTGGCTGTTTTGAAGGTGAGGGAACTAAAGATGATGATTTCTTTGAAGCATTGGCAAAAGCAATCGTTGATGAGATGGAAACTGTTTCACTTCTTAATTTTTCCAATAAAGAAGAGTTATTACAAGGTCTGAAGCGTCATATTATTCCAGCTTATTTCCGATTGAAATATGGTTTAACTGGCGATAGTGGTTATACACAAAATATTAAAGAGCATTACAGTGATTTATTTCTATTGGTTAAAAAGGCACTACGTCCTTTGGAAGAGCAAGTAGGATTAATACCCGATAGTGAAATTTCTTACTTCGTGATTCACTTTGGAGGCTATCTTAGACAATCAGGTGGTACACAATCAATGTCTTATAAAGCTTTGATACTCTGTCCAAACGGCGTTAGTTCATCCTTAGTGATTAAGGAAAAATTGCGTGGATTATTTCCTCAAATTCATTTTCATCGTGTCTCTAAAATTGAGCAGCTGAAACTGATTGACAATCAAACTTACGATATGGTCTTTTCTACTATATTTGTAGAAACAAAAAAACCTAATTATCTAGTTTCGCTGATGATGACAGCAGAGCAAGTACAACAGCTCAAAGAACTGGTTATTTCAGATTTTCCCAAGGCTTGCCTTGACGATTTCCAACTTGATCAATTAATAGCAACTATAAAAAAATACGCTCATGTTCATTGTGAAGAGGAATTAAAATTGGCTTTGAGGACAATGGTAAAACAAGATATACTTAGAAAGGATGTGAGGCCCTTGTTGCACCAACTTATAACAGAGGAAACTTATCAGACAAGTTCTGAACAAATGAATTGGAAAGAGGCAATTCGTTTAGCGGCAAAACCCTTGTTAGCTTCTGGAAAAATTACGGAAAGTTACCCAGAAGCTATGATTGAAAAAGTCGAAGAGTTTGGTCCTTTTATCAATCTTGGTAAAGGTATTGCTATTCCACATGCCAGACCAGAAGATGGGGTAAACTCTGTCGGTATGTCAATGCTTGTTTTGGAACAGCCTATTTATTTATTGGATGACCCCAAACAGGAAATTTATCTCTTATTATGCATAGCAGCTATTGATAATGAAACGCATTTGAAAGCTCTATCGCATTTGACAACAATACTTCGTGATAATAATAATGTTAAAGCTTTGTTAGCTTCACGTAGGTATCAAGATATTGAAATGATTATAAAACAGGAGGATTAA

SEQ ID NO: 414 - protein, 678 aa, Streptococcus agalactiae
MVDNKTVVIMLVFLARKNLSLYELTVQTKFSIKVIIEQINYLNSFLAKNHLPAIAHSAGRYQLLGDEKEHDKIVSLLEAEQFYLTQEERVCLIYLYSFCRREFVSNVHYQDFLKVSKNTTLSDIKMLRSKLAKRGISLTYTRAKGYSLVGDEMDKHQVAFQMITQLLESPIGFWSLNYILSSWKFALSYEKLEKTVEYFYESFQLSPIQDRLEKSLYFIILILCRYQRSVDRVLQGSPIVSEQLKELTTIIVTNLSQDISLSKPLDQKEKDYITLILSGCFEGEGTKDDDFFEALAKAIVDEMETVSLLNFSNKEELLQGLKRHIIPAYFRLKYGLTGDSGYTQNIKEHYSDLFLLVKKALRPLEEQVGLIPDSEISYFVIHFGGYLRQSGGTQSMSYKALILCPNGVSSSLVIKEKLRGLFPQIHFHRVSKIEQLKLIDNQTYDMVFSTIFVETKKPNYLVSLMMTAEQVQQLKELVISDFPKACLDDFQLDQLIATIKKYAHVHCEEELKLALRTMVKQDILRKDVRPLLHQLITEETYQTSSEQMNWKEAIRLAAKPLLASGKITESYPEAMIEKVEEFGPFINLGKGIAIPHARPEDGVNSVGMSMLVLEQPIYLLDDPKQEIYLLLCIAAIDNETHLKALSHLTTILRDNNNVKALLASRRYQDIEMIIKQED

SEQ ID NO: 415 - protein, 285 aa, Streptococcus agalactiae
ATGTTAAGAATTGGAACAGCATGTGGATCAGGTTTAGGTTCAAGTTTTATGGTACAAATGAATATTGAGTCTATTTTGAAGGATTTGGGGGTTTCTGATGTTGAAGTTGAACATTATGATTTAGGTGGAGCAGATCCAAGTGCAGCAGATGTTTGGATTGTTGGTCGTGATTTGGAGGATTCAGCTGGTCACCTGGGGGATGTTCGTATTTTAAACAGTATCATTGATATGGATGAATTGAGAGAATTAGTGACAGGTATTTGCCAAGAAAAAGGCTTAATCTAG

SEQ ID NO: 416 - protein, 94 aa, Streptococcus agalactiae
MLRIGTACGSGLGSSFMVQMNIESILKDLGVSDVEVEHYDLGGADPSAADVWIVGRDLEDSAGHLGDVRILNSIIDMDELRELVTGICQEKGLI

SEQ ID NO: 417 - protein, 1356 aa, Streptococcus agalactiae
ATGAAAGGTCTATTGGATTTTTTAGTTAATATTGCCAGCACGCCAGCTATTTTAGTCGCCTTGATAGCCATTATCGGTTTAGTACTGCAGAAAAAAGGCGTTCCTGATATTGTAAAAGGTGGAATAAAAACATTTGTTGGCTTCTTAGTGGTTTCTGGAGGTACAGGGATAGTCCAAAATTCCTTGAATCCATTTGGAAAAATGTTTGAACATGCTTTTCATTTGGTGGGGGTAGTTCCTAATAATGAAGCCATTGTAGCAGTAGCTCTTACGAAGTATGGCTCAGCAACTGCTTTGATTATGTTAGCGGGAATGATTTTTAATATTTTAATTGCTCGTTTTACAAAATTTAAATATATTTTTCTGACAGGACATCATACATTGTATATGGCTTGTATGATTGCTGTTATTTTTGCCGTAGCAGGCTTTACTTCGTTCTCGCTCATCCTTTTTGGAGGTCTAGCGTTAGGGATTATTATGAGCGTATCTCCTGCATTTGTGCAAAAATACATGATTCAACTGACAGGTAATGATAAGGTGGCACTTGGGCACTTTGGTTCTTTAGGCTATTGGTTGAGTGGATTTATTGGTGGAATTGTTGGAGATAAATCAAAATCAACAGAAGATATTAAATTTCCAAAGAGTTTATCATTTTTACGTGACAGTACCGTAAGTATTACTATCTCAATGGCAATTATTTACCTTATCGTTGCAGTGTTTGCTGGTGAGGCTTATATTGCAAAAGAAATAAGTAACGGTGTCAATGGTCTTGTTTATGCCCTCCAACTAGCTGGGCAATTTGCGGCAGGTGTATTCGTTATTTTAGCAGGTGTACGCCTTATCCTAGGTGAAATTGTACCAGCCTTTAAGGGAATCTCAGAAAAATTGGTTCCAAATTCAAAACCAGCCTTGGATTGTCCAATTGTTTACCCTTATGCACCTAATGCAGTATTGATTGGTTTTATCTCAAGTTTTGTTGGTGGATTGGTTAGTATGATAGTCATGATTGTGACTGGCACTACTGTCATTTTACCAGGGGTCGTTCCTCATTTCTTCTGTGGGGCAACGGCAGGTGTTATCGGTAATGCTTCTGGTGGTGTGAGAGGAGCGACTATTGGTGCATTTGTTCAAGGTATCCTCATCAGTTTCTTGCCGATTTTCTTGATGCCTGTACTAGGTGGACTTGGTTTCAAAGGGTCAACATTCTCAGATGCTGATTTTGGTTTGACCGGTATCATTCTTGGCGCTCTTAATCATGTCGGCGGTGCGATAGCTATTGTTATTGGTATTGTAGTTATCTTAATTGGACTTTTTGGCATTTCATTTGTTGGAAAATCAACCCATAAGGAAGGTTAA

SEQ ID NO: 418 - protein, 451 aa, Streptococcus agalactiae
MKGLLDFLVNIASTPAILVALIAIIGLVLQKKGVPDIVKGGIKTFVGFLVVSGGTGIVQNSLNPFGKMFEHAFHLVGVVPNNEAIVAVALTKYGSATALIMLAGMIFNILIARFTKFKYIFLTGHHTLYMACMIAVIFAVAGFTSFSLILFGGLALGIIMSVSPAFVQKYMIQLTGNDKVALGHFGSLGYWLSGFIGGIVGDKSKSTEDIKFPKSLSFLRDSTVSITISMAIIYLIVAVFAGEAYIAKEISNGVNGLVYALQLAGQFAAGVFVILAGVRLILGEIVPAFKGISEKLVPNSKPALDCPIVYPYAPNAVLIGFISSFVGGLVSMIVMIVTGTTVILPGVVPHFFCGATAGVIGNASGGVRGATIGAFVQGILISFLPIFLMPVLGGLGFKGSTFSDADFGLTGIILGALNHVGGAIAIVIGIVVILIGLFGISFVGKSTHKEG

SEQ ID NO: 419 - protein, 858 aa, Streptococcus agalactiae
ATGACATCACCAGAAGAAAGATATTCATCTCTAAGACGATTTGCAACGGAGATTCGTTTAAATACTCTAGAAACGCTAAACCATTTAGGATTCGGTCACTATGGGGGTAGTTTATCAATTGTTGAGGCTTTGGCTGTTCTGTATGGTGATATTATGGATATAAATCCTGAAAAATTCAAAGAAAGTGATCGGGATTATATGGTCTTATCAAAAGGACATGCTGGTCCAGCCTTGTATAGTACACTCTATTTAAAAGGTTTTTTTGATAAAACATTCCTTCATTCGCTCAATACAAACGGTACCAAACTACCTTCGCATCCTGACCGCAATTTAACTCCTGGTATAGATGTAACGACAGGCTCGTTAGGTCAAGGCATTAGTATTGCAACGGGAATTGCTTATGCTCAAAAGATTGAGAATTCAAGCTATTATACTTATACTATTGTAGGTGATGGTGAATTAAATGAAGGACAATGTTGGGAGGCTATACAATTTGCTGCGCATCATCAACTGCACCATTTAATTGTTTTTGTAGATGATAATAAAAAACAATTAGATGGTTTGACAGCTGATATTTGTAATCCTGGAGACTTTGTTGCTAAATTTGAAGCTTTTGGATTTGATGCAGTACGTGTAAAAGGAGATGACATTGAGGCAATTGACAAAGCTATTAAAACTTTTCAAGATTCAAATAGTGTCAGACCAAAATGTATTGTTTTAGATAGCATCAAGGGACAAGGTGTGAAAGAGTTGGAGGAGTTAGCTTCTAATCATCATTTACGACCAGATTTACAACAAAAAACAATGTTAGAGCGAGCGTTGATAAGCTTGAGAGAAAGTTTGGAGGTGGTAGAATGA

SEQ ID NO: 420 - protein, 285 aa, Streptococcus agalactiae
MTSPEERYSSLRRFATEIRLNTLETLNHLGFGHYGGSLSIVEALAVLYGDIMDINPEKFKESDRDYMVLSKGHAGPALYSTLYLKGFFDKTFLHSLNTNGTKLPSHPDRNLTPGIDVTTGSLGQGISIATGIAYAQKIENSSYYTYTIVGDGELNEGQCWEAIQFAAHHQLHHLIVFVDDNKKQLDGLTADICNPGDFVAKFEAFGFDAVRVKGDDIEAIDKAIKTFQDSNSVRPKCIVLDSIKGQGVKELEELASNHHLRPDLQQKTMLERALISLRESLEVVE

SEQ ID NO: 421 - protein, 930 aa, Streptococcus agalactiae
ATGAGATGTTCAACCAAAGAAATGAGGCTTGTCTATCGTGATTTCCTCCTTCAAGCTAATCAAGAAAATAAACAAATTACCGTTTTAGAAGCCGATTTGTCGAGTTCAATGTCAACAAATGCACTGGCATCAGAATTTGGAAAACGTTATATTAATCTAGGTATTATGGAGGCTGAGATGGTAGGCCTTGCAGCAGGGCTCGCCATTAAAGGTTACAAGCCATACCTTCATACTTTTGGTCCTTTCGCGTCAAGGCGTGTCTTTGATCAAGTATTCTTATCGTTAGGTTACTCACAATTATCAGCTACGATTATTGGCTCAGATGCAGGAATTAGCGCAGAAATGAATGGCGGAACTCATATGCCTTTTGAAGAGTTAGGTCTACTAAGGTTAATTCCCAAAGCGACTATTTTTGAGGTTAGTGATGATATTCAGTTTGAAGCAATTTTAAAACAAACATTAAGTATTGATGGCCTAAAATACATTAGAACTATTCGTAAGGCCCCCACTGCAGTTTATGAGGGACGCGAAGATTTTTCAAAGGGTTTTATACAATTACGCCAGGGAAAAGATATTACTCTTGTAGCAAGTGGTATTATGGTTTCTAGAGCGATAGAAGCAGCCGACTACCTCAAAGAACTAGGGATTGAGGCCTCAGTTATCGACCTTTTTAAAATTAAGCCCCTTCCAGAAGAACTGAAACCATTACTGATAGATCAATCCATTGTAACTATTGAGAATCATAACCGTATTGGCGGTATCGGAAGTGCATTATGCGAATGGCTTAGTATGGAGAAAGACACTACTGTTAGTCGTATGGGTATTGATGAGCGATTTGGTCAGGTAGGTCAGATGGAATATTTATTAGAGGAGTATGGACTCGCTGTTAAAGATATAGTACAGCATTGCAAATCAATTTATAAATCATAA

SEQ ID NO: 422 - protein, 309 aa, Streptococcus agalactiae
MRCSTKEMRLVYRDFLLQANQENKQITVLEADLSSSMSTNALASEFGKRYINLGIMEAEMVGLAAGLAIKGYKPYLHTFGPFASRRVFDQVFLSLGYSQLSATIIGSDAGISAEMNGGTHMPFEELGLLRLIPKATIFEVSDDIQFEAILKQTLSIDGLKYIRTIRKAPTAVYEGREDFSKGFIQLRQGKDITLVASGIMVSRAIEAADYLKELGIEASVIDLFKIKPLPEELKPLLIDQSIVTIENHNRIGGIGSALCEWLSMEKDTTVSRMGIDERFGQVGQMEYLLEEYGLAVKDIVQHCKSIYKS

SEQ ID NO: 423 - protein, 537 aa, Streptococcus agalactiae
ATGCGAGCTTGGAAAGGTATTGTTTTAATTTTATCTAGCATAGTGGTGACACTAGTAGCATGGCAAAATGCAGGATTAAGTGAATTTGTTGTACCAGGATTAGCTTTGACAAGTTTATCGCTAACATTCCTCTTATCAACCAAATTTAGGATACTTGAAAGTTACTTTCAAGGTATTGAAAATATGTATTTTTACCACAAGGTAATGGCTGTATTTTCAATGATTTTGCTTCTATTGCACAAAATTGGTCTTGGACAAGGCGGACATGGAAGTGAGTTTGCAAAGACTATTGGCAGTGCGGGATTATATCTTTTTCTAAGTATTGTTTTTGTAGCTTATTTCGGAAATTTTTTAAAGTATGAAATTTGGCGTTTTATTCATCGCTTTGTTTATTTAGCTTATATTTTGGGATTGGTACATACTTTTATGATTTTAGGAGATAGGATACTAGGAAATACTTTACTCAGTTTAATCGTATTAGGTTATGCTGTCATTGGGGTTATATCTGGATTTTATATTATTTTCCCTATATTCTAG

SEQ ID NO: 424 - protein, 178 aa, Streptococcus agalactiae
MRAWKGIVLILSSIVVTLVAWQNAGLSEFVVPGLALTSLSLTFLLSTKFRILESYFQGIENMYFYHKVMAVFSMILLLLHKIGLGQGGHGSEFAKTIGSAGLYLFLSIVFVAYFGNFLKYEIWRFIHRFVYLAYILGLVHTFMILGDRILGNTLLSLIVLGYAVIGVISGFYIIFPIF

SEQ ID NO: 425 - protein, 1349 aa, Streptococcus agalactiae
ATGNNNNNCCTTTTGTATTTTCTGAAATTTTAAGTTTTGTATAAGTATCTGTGGTATTTATCCTTACTAAAAATAAAGGGGTGGTCGTTATGCGAGCTTGGAAAGGTATTGTTTTAATTTTATCTAGCATAGTGGTGACACTAGTAGCATGGCAAAATGCAGGATTAAGTGAATTTGTTGTACCAGGATTAGCTTTGACAAGTTTATCGCTAACATTCCTCTTATCAACCAAATTTAGGATACTTGAAAGTTACTTTCAAGGTATTGAAAATATGTATTTTTACCACAAGGTAATGGCTGTATTTTCAATGATTTTGCTTCTATTGCACAAAATTGGTCTTGGACAAGGCGGACATGGAAGTGAGTTTGCAAAGACTATTGGCAGTGCGGGATTATATCTTTTTCTAAGTATTGTTTTTGTAGCTTATTTCGGAAATTTTTTAAAGTATGAAATTTGGCGTTTTATTCATCGCTTTGTTTATTTAGCTTATATTTTGGGATTGGTACATACTTTTATGATTTTAGGAGATAGGATACTAGGAAATACTTTACTCAGTTTAATCGTATTAGGTTATGCTGTCATTGGGGTTATATCTGGATTTTATATTATTTTCCTATATTCTAGAATGCGTTTTCGTCGTGTAGGGTACGTTCAAAAGGTTACTCATCTTAACCATGATACAACTGAGATTGAAATAGCAATGAAGCGTCCTTATCGATATGACTATGGACAATTTACTTTTTTTAAAATTTATCAAGCTGGCTTTGAATCAGCAGCTCATCCTTTCTCGATATCAGGTGGTCATGATAGAGTGATATTTTTAACTGTTAAAGCTTCAGGAGATTATACGAAATCCATTTACAAACAGCTAAAAGTTGGGACAAAAATAGCCTTAGATAGAGCTTATGGTCATATGTTATTTGATAAAGACAAGAAAGAACAGGTTTGGATTGCAGGAGGTATCGGCATCACTCCCTTCATTTCATTTATTAGAGAAAATAGTATTTTGACTAAGAGAGTTGACTTCTTTTATACCTTTTCAAATCAAGACAATTTGATTTATCAAGATATGTTAGAATCCTATGCTAAAGCCAATCCTAATTTTAAACTTCACTTAAATAATAGTAGCCTCAAAGGAAGACTTGATTTTAGTCAGTCTGTTTTTGAAGGACAACCAACAATATTTATGTGTGGGCCAACTAGTATGACATCTACTTATGCTAAGGTCTTTCGGCAAAAAGATGCAAAGTCTCGTTTAGTCTATGAAGGATTTTCCTTTAGAGACAGTTGGTTATCCATATTTCTATTAAAAACTTTTGACAAAGTTTATTCTAATTTGATAAAATAA

SEQ ID NO: 426 - protein, 450 aa, Streptococcus agalactiae
  VARIANT 2, 3: Xaa = Any Amino Acid
MXXLLYFSEILKFCISILWYLSLLKNKGVVVMRAWKGIVLILSSIVVTLVAWQNAGLSEFVVPGLALTSLSLTFLLSTKFRILESYFQGIENMYFYHKVMAVFSMILLLLHKIGLGQGGHGSEFAKTIGSAGLYLFLSIVFVAYFGNFLKYEIWRFIHRFVYLAYILGLVHTFMILGDRILGNTLLSLIVLGYAVIGVISGFYIIFLYSRMRFRRVGYVQKVTHLNHDTTEIEIAMKRPYRYDYGQFTFFKIYQAGFESAAHPFSISGGHDRVIFLTVKASGDYTKSIYKQLKVGTKIALDRAYGHMLFDKDKKEQVWIAGGIGITPFISFIRENSILTKRVDFFYTFSNQDNLIYQDMLESYAKANPNFKLHLNNSSLKGRLDFSQSVFEGQPTIFMCGPTSMTSTYAKVFRQKDAKSRLVYEGFSFRDSWLSIFLLKTFDKVYSNLIK

SEQ ID NO: 427 - protein, 270 aa, Streptococcus agalactiae
ATGGCAATCTCAAAAGAGAAAAAAAATGAAATCATTGCTCAATATGCACGTCACGAAGGTGATACAGGATCAGTTGAAGTTCAAGTAGCAGTTCTTACTTGGGAAATCAACCACCTTAACGACCACATCAAACAACACAAAAAAGACCACGCTACTTACCGTGGATTGATGAAAAAAATTGGTCACCGTCGTAACTTATTAGCATACCTACGTCGTACAGATGTTAACCGTTACCGTGAATTGATTCAATCACTTGGACTTCGTCGTTAA

SEQ ID NO: 428 - protein, 89 aa, Streptococcus agalactiae
MAISKEKKNEIIAQYARHEGDTGSVEVQVAVLTWEINHLNDHIKQHKKDHATYRGLMKKIGHRRNLLAYLRRTDVNRYRELIQSLGLRR

SEQ ID NO: 429 - protein, 2130 aa, Streptococcus agalactiae
ATGTCAAAACAAGTCTTTGAAATGATTTTTGCTGGAAAAAAATTAGTTGTTGAAACTGGCCAAGTGGCTAAACAAGCAAATGGATCAGTTGTCGTTCGTTATGGAGATTCTACTGTACTCACAGCAGCAGTTATGTCTAAGAAAATGTCAACAGGTGATTTTTTCCCACTTCAAGTCAATTACGAAGAAAAAATGTATGCTGCTGGGAAATTTCCGGGTGGCTTTAACAAACGTGAAGGGCGTCCAAGTACGGATGCTACCTTAACAGCACGTCTTATTGATAGACCAATCCGTCCGATGTTTGCTGAGGGATTTCGTAACGAAGTACAGGTCATCAATACTGTTCTTTCATTTGATGAAAATGCTAGCGCACCAATGGCTGCTATGTTTGGTTCATCATTAGCATTATCGATTTCCGATATTCCTTTCAATGGGCCAATTGCTGGAGTTCAAGTTGCTTATGTTGATGGTAATTTTATTATTAATCCGACAGCACAAGAACAAGAGGCTTCTGCGTTAGAATTAACGGTTGCAGGTACTAAAGAAGCGATTAACATGGTTGAATCTGGAGCGAAAGAACTTTCAGAAGAAATCATGCTAGAGGCTCTTCTTAAAGGACATGAGGCTGTCTGTGAATTAATCGCCTTTCAAGAAGAGATTGTTACTGCTATTGGTAAAGAAAAAGCCGAGGTAGAACTTCTTCAAGTTGATCCAGAACTTCAAGCAGAAATTATTGCTACTCATAACATAGCTTTACAGGCTGCAGTACAAGTTGAAGAGAAAAAGGCTAGAGAAGCAGCTACAGAAGCAGTTAAAGAAGTAGTTATAGGTGAATATGAGGCACGTTACGCTGAACATGAAGAATATGATCGCATTATGCGTGATGTTGCTGAAATTTTAGAACAAATGGAACATGCAGAAGTTCGTCGCCTCATTACAGAAGATAAGATTCGTCCTGATGGACGTCGTGTGGATGAGATTCGTCCATTAGACGCAGAGATTGATTTTTTACCACAAGTTCATGGATCAGGTCTCTTTACACGAGGACAAACCCAAGCATTATCAGTATTAACGTTAGCACCTATGGGTGAAGCACAAATCATTGATGGGCTAACACCAGAGTATAAGAAACGCTTTATGCACCACTATAACTTCCCACAATATTCAGTTGGTGAGACGGGACGTTATGGAGCTGCAGGGCGTCGTGAAATTGGTCACGGTGCTTTAGGAGAGCGTGCATTAGAACAAGTCCTTCCAAGCTTGGAGGAGTTTCCGTATGCTATCCGACTAGTTGCAGAAGTTTTAGAATCAAACGGTTCATCATCTCAGGCTTCTATATGTGCTGGAACGCTTGCTCTTATGGCAGGTGGTGTGCCTATAAAAGCTCCAGTTGCTGGTATTGCCATGGGGCTCATATCAGATGGAACAAACTATACAGTCCTCACTGATATTCAAGGATTAGAAGACCATTTTGGCGATATGGACTTTAAAGTTGCGGGTACACGTGAAGGGATTACAGCACTTCAAATGGATATTAAAATTGAAGGTATTACCCCTCAAATTTTGGAAGAAGCTCTTGCGCAAGCTAAAAAAGCACGCTTTGAAATTCTTGATGTCCTTCATGGAGCTATCGCAGAGCCACGTCCACAATTAGCACCAACGGCACCTAAGATTGATATGATAAAAATCGATGTTGATAAGATTAAAGTTGTCATCGGTAAAGGTGGCGAAACTATCGATAAAATCATCGCTGAAACAGGTGTTAAGATTGATATTGATGAAGAAGGAAATGTATCTATCTTCTCTAGTGATCAGGCTGCTATTGATCGTACGAAAGACATTATTGCAAGTTTAGTACGTGAAGCAAAAGTGGGAGAAGTTTACCATGCTAAAGTAGTTCGTATCGAGAAATTCGGTGCCTTTGTCAACCTCTTTGATAAAACAGATGCATTGGTACATATTTCAGAAATTGCATGGACACGTACAGCAAATGTAGCTGATGTTCTTGAAATTGGTGAAGAAGTTGATGTGAAAGTCATCAAAATTGATGATAAAGGGCGAGTTGATGCTTCTATGAAAGCATTGTTACCACGTCCTCCAAAAGCTGACAATCCTAAAAAGGAATCTTAA

SEQ ID NO: 430 - protein, 709 aa, Streptococcus agalactiae
MSKQVFEMIFAGKKLVVETGQVAKQANGSVVVRYGDSTVLTAAVMSKKMSTGDFFPLQVNYEEKMYAAGKFPGGFNKREGRPSTDATLTARLIDRPIRPMFAEGFRNEVQVINTVLSFDENASAPMAAMFGSSLALSISDIPFNGPIAGVQVAYVDGNFIINPTAQEQEASALELTVAGTKEAINMVESGAKELSEEIMLEALLKGHEAVCELIAFQEEIVTAIGKEKAEVELLQVDPELQAEIIATHNIALQAAVQVEEKKAREAATEAVKEVVIGEYEARYAEHEEYDRIMRDVAEILEQMEHAEVRRLITEDKIRPDGRRVDEIRPLDAEIDFLPQVHGSGLFTRGQTQALSVLTLAPMGEAQIIDGLTPEYKKRFMHHYNFPQYSVGETGRYGAAGRREIGHGALGERALEQVLPSLEEFPYAIRLVAEVLESNGSSSQASICAGTLALMAGGVPIKAPVAGIAMGLISDGTNYTVLTDIQGLEDHFGDMDFKVAGTREGITALQMDIKIEGITPQILEEALAQAKKARFEILDVLHGAIAEPRPQLAPTAPKIDMIKIDVDKIKVVIGKGGETIDKIIAETGVKIDIDEEGNVSIFSSDQAAIDRTKDIIASLVREAKVGEVYHAKVVRIEKFGAFVNLFDKTDALVHISEIAWTRTANVADVLEIGEEVDVKVIKIDDKGRVDASMKALLPRPPKADNPKKES

SEQ ID NO: 431 - protein, 753 aa, Streptococcus agalactiae
ATGACAAGTACAAACGAGTTAGACATTAGATTGCGTGCTTTTATCAATGCACCGGATAATTTTTTAGATAGTATAGGTCTTGTGAATGCCTTGCACCACTCTACGGTTTGGGCAAGCAAGGAACCCTATGCTATTCAAGTAGATGGTCAAGAAGTTGTTCCTGTTTTTACGGATATTACTGACCTTAATCATTTCAAAGAGGAGCAAGAAAGTGCTCGAGATATGTTTTGGGAGAGTCGTCGTAGTTTAGACGTTCTTGATGAAGCTATTTCACATGGCTTAGCAGGATTGGTCTATAATTTAAAAAAAGAAGGCGATTTTGGGAACTCGACTATTTTCTACTGTGAAGATATGGTGCAATTTATGAATAATTACACCACAATCTTAAATCAGTTGTTAAATGAAGATAACATTGTTGCCGATATCATGGATAAAACCTACTTGGTACCTGCCTTTGTCCATCCACGTGAAGAAGGTAGTTTTGACCGTCTTTTCCCTACAATGTCTACCCCCGAAGGAAAAAGTTATGTTCCAGTATTCTCAAACCTTTTAAGTTTTGAAAAATGGTATAACCATAATGATTTTGGTGGTGCTTTTAGGAAAGCACAAGGAGTAATTTTAGCCTGGACGATTGACGATATTTATAAACCGCGTAATGGAGAAAATGAGATTGATGATACCTTTGGAGTAGCCATCAATCCATTTGATGAACAACAAGTTTTAGTTGATTGGTCTGATGTAGAAAACGATTGA

SEQ ID NO: 432 - protein, 250 aa, Streptococcus agalactiae
MTSTNELDIRLRAFINAPDNFLDSIGLVNALHHSTVWASKEPYAIQVDGQEVVPVFTDITDLNHFKEEQESARDMFWESRRSLDVLDEAISHGLAGLVYNLKKEGDFGNSTIFYCEDMVQFMNNYTTILNQLLNEDNIVADIMDKTYLVPAFVHPREEGSFDRLFPTMSTPEGKSYVPVFSNLLSFEKWYNHNDFGGAFRKAQGVILAWTIDDIYKPRNGENEIDDTFGVAINPFDEQQVLVDWSDVEND

SEQ ID NO: 433 - protein, 585 aa, Streptococcus agalactiae
ATGGGGTGGTGGAAAGAAAGTATAGCTATTGTCAAAGAACAAGATCCAGCTGCTCGTAGTTCTCTAGAAGTTATTTTAACTTATCCAGGAATAAAAGCTCTTGCAGCTCATAGGCTATCTCATTTTTTATGGAATCATAATTTTAAATTGTTAGCACGTATGCACAGTCAATTTTGGCGTTTCTGGACACAAATTGAAATTCATCCCGGAGCGACGATTTCGGAAGGGGTTTTTATTGACCACGGTTCAGGATTGGTCATTGGAGAAACTGCCATTGTAGAGAAAGGTGCTATGCTATACCATGGGGTTACATTGGGTGGCACAGGTAAAGACAAAGGCAAACGACACCCAACCATACGTAAAGGAGCGCTAATTTCAGCACATTCTCAAATCATTGGTCCAATTGAGGTTGGAGAAAATGCTAAAGTCGGTGCTGCAGCAGTTGTCCTTGCAGATGTGCCAGCAGACGTAACAGTAGTTGGTGTTCCAGCTAAAGTTGTCCGTGTCCATGGTCAAAAGGATGATCTTCAAATCCGAAGTATTGAACATGATCGAGAAGAAAGTTATTATTCGTCCAAACTTTAG

SEQ ID NO: 434 - protein, 194 aa, Streptococcus agalactiae
MGWWKESIAIVKEQDPAARSSLEVILTYPGIKALAAHRLSHFLWNHNFKLLARMHSQFWRFWTQIEIHPGATISEGVFIDHGSGLVIGETAIVEKGAMLYHGVTLGGTGKDKGKRHPTIRKGALISAHSQIIGPIEVGENAKVGAAAVVLADVPADVTVVGVPAKVVRVHGQKDDLQIRSIEHDREESYYSSKL

SEQ ID NO: 435 - protein, 183 aa, Streptococcus agalactiae
GTGAAGGATTATGTAACAACTCAAATATTATCAATCTTAGGTATACTAGCAGCAGCTTGTTTAAGCTATTTAAAGTTTGCACAAGGTAACCCTCTCTTAGGAATTATTTGGGCTGCTTTTGTTTTAATGTATGTTGTTCGTTTGTATAAAGCTTATCAAAAACAGAAAAAGGAAAAACCATGA

SEQ ID NO: 436 - protein, 60 aa, Streptococcus agalactiae
MKDYVTTQILSILGILAAACLSYLKFAQGNPLLGIIWAAFVLMYVVRLYKAYQKQKKEKP

SEQ ID NO: 437 - protein, 984 aa, Streptococcus agalactiae
ATGATAAAAATTTACGACACTATGACTCGCAGTTTACAAGATTTTATACCTCTCAATGAAGGTAAAGTCAACATGTACGTCTGTGGGCCAACAGTTTATAACTATATACACATCGGGAATGCCCGCAGTGTAGTAGCTTTTGATACTATTCGTCGTTATTTTGAGTATTGTGGTTACCAAGTCAATTATATTTCTAACTTTACTGATGTTGATGATAAAATTATAAAAGGTGCAGCTGAAGCAGGTATGGATACAAAATCCTTTTCAGATAAGTTTATTTCAGCATTTATGGAAGATGTTGCTGCATTAGGTGTCAAACCTGCTACAAAAAATCCTCGAGTTATTGACTATATGGATGAGATTATTGATTTTGTTAAAGTTTTAGTTGATAAGGAATTTGCCTATGAAGCTAATGGAGATGTTTATTTTAGAGTAAGTAAATCACATCATTATGCAAAATTAGCCAATAAAACTTTGGAAGATTTAGAGATTGGTGCAAGTGGTCGTGTTGATGGTGAAGGAGAGATTAAAGAGAATCCTTTAGATTTTGCACTTTGGAAATCAGCTAAATCTGGGGAAGTCTCATGGGAAAGTCCTTGGGGGAAAGGGCGCCCAGGGTGGCATATTGAATGTTCTGTTATGGCAACTGAGATCCTTGGTGATACTATTGATATCCATGGTGGAGGAGCTGATTTAGAATTTCCACATCACACGAATGAGATTGCACAATCTGAAGCTAAAACAGGTAAGACCTTTGCAAATTACTGGATGCATAATGGTTTTGTTAACGTTGATAACGAGAAAATGTCTAAATCTCTTGGTAACTTTATTACTGTTCACGATATGTTGAAGAGCGTTGACGGACAAGTAATACGTTTTTTCTTAGCGACACAACAGTATCGTAAACCCGTGAATTTCACTGAAAAGGCCGTTCATGATGCGGAAGTTAACCTTAATATTNNNNNCATTCCATTCATTAATTAA

SEQ ID NO: 438 - protein, 327 aa, Streptococcus agalactiae
  VARIANT 321, 322: Xaa = Any Amino Acid
MIKIYDTMTRSLQDFIPLNEGKVNMYVCGPTVYNYIHIGNARSVVAFDTIRRYFEYCGYQVNYISNFTDVDDKIIKGAAEAGMDTKSFSDKFISAFMEDVAALGVKPATKNPRVIDYMDEIIDFVKVLVDKEFAYEANGDVYFRVSKSHHYAKLANKTLEDLEIGASGRVDGEGEIKENPLDFALWKSAKSGEVSWESPWGKGRPGWHIECSVMATEILGDTIDIHGGGADLEFPHHTNEIAQSEAKTGKTFANYWMHNGFVNVDNEKMSKSLGNFITVHDMLKSVDGQVIRFFLATQQYRKPVNFTEKAVHDAEVNLNIXXIPFIN

SEQ ID NO: 439 - protein, 1056 aa, Streptococcus agalactiae
ATGGAAGATGTTGCTGCATTAGGTGTCAAACCTGCTACAAAAAATCCTCGAGTTATTGACTATATGGATGAGATTATTGATTTTGTTAAAGTTTTAGTTGATAAGGAATTTGCCTATGAAGCTAATGGAGATGTTTATTTTAGAGTAAGTAAATCACATCATTATGCAAAATTAGCCAATAAAACTTTGGAAGATTTAGAGATTGGTGCAAGTGGTCGTGTTGATGGTGAAGGAGAGATTAAAGAGAATCCTTTAGATTTTGCACTTTGGAAATCAGCTAAATCTGGGGAAGTCTCATGGGAAAGTCCTTGGGGGAAAGGGCGCCCAGGGTGGCATATTGAATGTTCTGTTATGGCAACTGAGATCCTTGGTGATACTATTGATATCCATGGTGGAGGAGCTGATTTAGAATTTCCACATCACACGAATGAGATTGCACAATCTGAAGCTAAAACAGGTAAGACCTTTGCAAATTACTGGATGCATAATGGTTTTGTTAACGTTGATAACGAGAAAATGTCTAAATCTCTTGGTAACTTTATTACTGTTCACGATATGTTGAAGAGCGTTGACGGACAAGTAATACGTTTTTTCTTAGCGACACAACAGTATCGTAAACCCGTGAATTTCACTGAAAAGGCCGTTCATGATGCGGAAGTTAACCTTAAATATTTAAAAAATACTTTCAACTTACCAATCCAAGAGAATGCTAATGATGAAGAATTAGAGCAATTTGTGAAAGCATTTCAAGGAGCGATGGATGATGATTTTAATACAGCAAACGGTATTACTGTTATCTTTGAAATGGCAAAATGGATTAATTCAGGACACTATACTTCAAGAGTTAAGGAAACCTTTGCTGAATTATTAGAAATTTTTGGTATTGTATTCCAAGAGGAAGTTCTTGATGCTGATATTGAATCTTTAATAGAACAACGTCAAGAAGCACGAGCTAATCGTGATTTTGCAACTGCTGATCGTATTAGAGATGAATTAGCAAAACAAGGAATTAAATTGTTAGATACTAAGGATGGCGTGAGGTGGACTCGTGATTGA

SEQ ID NO: 440 - protein, 351 aa, Streptococcus agalactiae
MEDVAALGVKPATKNPRVIDYMDEIIDFVKVLVDKEFAYEANGDVYFRVSKSHHYAKLANKTLEDLEIGASGRVDGEGEIKENPLDFALWKSAKSGEVSWESPWGKGRPGWHIECSVMATEILGDTIDIHGGGADLEFPHHTNEIAQSEAKTGKTFANYWMHNGFVNVDNEKMSKSLGNFITVHDMLKSVDGQVIRFFLATQQYRKPVNFTEKAVHDAEVNLKYLKNTFNLPIQENANDEELEQFVKAFQGAMDDDFNTANGITVIFEMAKWINSGHYTSRVKETFAELLEIFGIVFQEEVLDADIESLIEQRQEARANRDFATADRIRDELAKQGIKLLDTKDGVRWTRD

SEQ ID NO: 441 - protein, 387 aa, Streptococcus agalactiae
GTGATTGATGTTCGTTTGATTAATGGTATTGCTTTAGCTTTTGAAGGAGATGCAGTTTATTCTTTGTATATCCGACGCCATTTAATTATGCAGGGTTTTACCAAACCTAATCAGTTACATCGGAAAGCAACCCAATATGTTTCTGCTAATGCCCAAGCATTGTTAATTAATGCCATGTTAGAAGAAAATATTTTAACTGATGAAGAGCAGTTAATTTATAAACGAGGACGTAATGCGAATAGTCATACAAAAGCTAAAAATGCTGATATTATTACCTATCGTATGTCTACAGGTTTTGAGGCTCTTATGGGGTACTTGGATATGACTGGTCAGATAAAGCGCTTGGAAACTCTAATACAGTGGTGTATTGAAACCATTGAAAAATAA

SEQ ID NO: 442 - protein, 128 aa, Streptococcus agalactiae
MIDVRLINGIALAFEGDAVYSLYIRRHLIMQGFTKPNQLHRKATQYVSANAQALLINAMLEENILTDEEQLIYKRGRNANSHTKAKNADIITYRMSTGFEALMGYLDMTGQIKRLETLIQWCIETIEK

SEQ ID NO: 443 - protein, 756 aa, Streptococcus agalactiae
ATGACTATGAAAGATAAACAATTTAAAGAAGAATCAAGTGACCTTGTCTATGGCTTACATGCTGTGACAGAGAGTTTAAGAGCTAATACTGGTAATAAATTATACTTGCAAGATGACTTAAGAGGAAAGAACGTTGATAAAGTCAAAGCACTAGCGACTGAAAAAAAAGTATCCATTTCCTGGACTCCTAAAAAAACCTTATCAGACATGACAAATGGTGGAGTTCACCAAGGATTCGTTCTAAAAGTTTCGGAATTTGCCTATGCGGATTTATCAGAGATAATGACAAAGGCAGAGAATGAAGAAAATCCTCTCATTTTAATCCTTGATGGTCTGACCGACCCTCACAACCTAGGTTCTATTCTACGCACAGCTGATGCAACCAATGTAACAGGTATTATCATCCCCAAACATCGTTCTGTTGGAGTGACCCCAGTGGTTTCAAAGACATCTACAGGAGCTGTTGAACATGTTCCTATTGCAAGGGTAACTAATCTCAGTCAAACTTTGGATACTTTAAAAGATAAGGAGTTCTGGATATTTGGCACTGATATGAATGGGACACCATCGCATAAGTGGAATACCAAAGGTAAATTAGCCCTAGTTATTGGTAATGAAGGAAAAGGTATTTCTCATAATATCAAAAAGCAAGTAGATGAAATGATTACAATTCCCATGAATGGTCATGTTCAGAGTTTAAATGCCAGTGTCGCAGCCGCTATTTTGATGTATGAAGTATTTAGAAACCGCCTATGA

SEQ ID NO: 444 - protein, 251 aa, Streptococcus agalactiae
MTMKDKQFKEESSDLVYGLHAVTESLRANTGNKLYLQDDLRGKNVDKVKALATEKKVSISWTPKKTLSDMTNGGVHQGFVLKVSEFAYADLSEIMTKAENEENPLILILDGLTDPHNLGSILRTADATNVTGIIIPKHRSVGVTPVVSKTSTGAVEHVPIARVTNLSQTLDTLKDKEFWIFGTDMNGTPSHKWNTKGKLALVIGNEGKGISHNIKKQVDEMITIPMNGHVQSLNASVAAAILMYEVFRNRL

SEQ ID NO: 445 - protein, 519 aa, Streptococcus agalactiae
ATGAAAAAACATTCTATCTTACTCGTTGATGGCTACAATATGATTGCTTTTTGGAAAGATACTCGACAGCTTTTTAAAAGCAATCGTTTAGAAGAGGCAAGGGAAGTATTACTTAGAAAGCTAAATCATTACGCACATTTCGAACACATTGATATTATTTGTGTATTTGATGCACAGTATGTTCCTGGTGTACGTCAACGTTATGACCAATACAAAATATCCGTTATCTTTACTGAGGAGGACGAAACTGCGGATAGCTATATTGAACGAGCAGCGGCAGAACTTAATCAATCTGTGTTAAATTTAGTCTCCGTTGCTACCAGTGATTTAAATGAACAATGGACTATATTTTCTCAGGGTGCTTTACGTGTCTCGGCTAGAGAATTGGAACAGCGTGTAGCGACAGTAAAATCAGATTTGGATAAGATGTCCAGTCAAATCGATTTGAGTACGCCAAAGTTAAGGCCGTGGAATGATGAACAACTAGGAAAACTCAAGGATTTTTTAGATGGTATGTAA

SEQ ID NO: 446 - protein, 172 aa, Streptococcus agalactiae
MKKHSILLVDGYNMIAFWKDTRQLFKSNRLEEAREVLLRKLNHYAHFEHIDIICVFDAQYVPGVRQRYDQYKISVIFTEEDETADSYIERAAAELNQSVLNLVSVATSDLNEQWTIFSQGALRVSARELEQRVATVKSDLDKMSSQIDLSTPKLRPWNDEQLGKLKDFLDGM

SEQ ID NO: 447 - protein, 861 aa, Streptococcus agalactiae
ATGACTTTTAAAATACTAACGGATTCGACATCGGATTTAGATGAAAAGTGGGCTCAAGAGCACAATGTCGATATTATAGGTTTAACCATTGAACTTGATGGAAAGACTTATGAGACAGTCGGAGACGAAAAAATTACTAGTGACTTCTTGTTGGAGCGTATGCAAGAGGGAGCAAAGCCTACAACAAGCCAAATTAACGTTGGTCAGTTTGAAGAAGTTTTTTCAACCTATGCAGAAAATGACCATGCCTTGTTATATTTAGCGCTATCTTCACATTTATCAGGCACTTACCAGAGTGCAACTATTGCGCGTGAGATGGTCTTAGACAAATATCCTGATGCTCAAATTGAGATTGTGGATACGATGGCAGCTTCATGTGGTGAGGGTGTCTTAGCGATGTTAGCAACTAAAGAGCGACAAGAAGGTAAATCTTTAGAAGAAGTGAAACAAAAAATTGAATCACTTCTCCCTAAATTAAACACATACTTTTTAGTTGACGATCTCAACCATTTAATGCGTAGTGGTCGCTTATCAAAAGGTGCAGCTATCATTGGAAGTGTTGCTAAGATTAAACCATTACTTAAGTTAGATAGTGAGGGTAAATTAGTACCATTTGCCAAGACAAGGGGCCGTAAAAAAGGTATTAAAGAGATTGTGACTCAGGCAACAAAAACACTATCTTATAGCACTTTAATTATTGCTTATAGTGGAGAGAAAGATTCAGCTCAAGTTATGAAAGAACAGTTATTAGCAGATGAGCGTATTGAAGAAGTTATTATTCGTCCATTAGGGCCAGTTATTTCAGCTCATGTGGGCTCAGGTGCTTTAGCTCTATTCTCTTTAGGGGAAGAAAACCGATAA

SEQ ID NO: 448 - protein, 286 aa, Streptococcus agalactiae
MTFKILTDSTSDLDEKWAQEHNVDIIGLTIELDGKTYETVGDEKITSDFLLERMQEGAKPTTSQINVGQFEEVFSTYAENDHALLYLALSSHLSGTYQSATIAREMVLDKYPDAQIEIVDTMAASCGEGVLAMLATKERQEGKSLEEVKQKIESLLPKLNTYFLVDDLNHLMRSGRLSKGAAIIGSVAKIKPLLKLDSEGKLVPFAKTRGRKKGIKEIVTQATKTLSYSTLIIAYSGEKDSAQVMKEQLLADERIEEVIIRPLGPVISAHVGSGALALFSLGEENR

SEQ ID NO: 449 - protein, 447 aa, Streptococcus agalactiae
ATGAACAAAACAACTTTCATGGCTAAACCAGGCCAAGTTGAACGCAAATGGTACGTTGTTGACGCAGCAGATGTACCTCTTGGACGTCTTTCTGCAGTAGTTGCTAGCGTACTTCGCGGAAAAAACAAACCAACTTTCACACCACACACTGATACAGGTGACTTTGTGATTGTTATCAATGCTGAAAAAGTTAAATTAACTGGTAAAAAAGCGTCAGATAAAATCTACTACACTCACTCAATGTATCCAGGTGGTTTGAAACAAATCTCAGCAGGTGAACTTCGTTCTAAAAATGCTGTTCGTTTGATTGAAAAATCAGTTAAAGGCATGCTTCCACATAACACTCTTGGACGTGCACAAGGTATGAAATTGAAAGTATTTGTTGGCGGTGAGCATACACATGCTGCACAACAACCAGAAGTACTTGATATCTCAGGACTTATCTAA

SEQ ID NO: 450 - protein, 148 aa, Streptococcus agalactiae
MNKTTFMAKPGQVERKWYVVDAADVPLGRLSAVVASVLRGKNKPTFTPHTDTGDFVIVINAEKVKLTGKKASDKIYYTHSMYPGGLKQISAGELRSKNAVRLIEKSVKGMLPHNTLGRAQGMKLKVFVGGEHTHAAQQPEVLDISGLI

SEQ ID NO: 451 - protein, 393 aa, Streptococcus agalactiae
ATGGCACAAGCACAATATGCAGGTACTGGTCGCCGTAAAAACGCTGTTGCACGCGTTCGTTTGGTCCCAGGTACTGGTAAAATTACAATCAATAAAAAAGATGTAGAAGAGTACATCCCACACGCAGACCTTCGTCTTGTTATCAACCAACCTTTCGCAGTTACTTCAACTCAAGGTTCATACGATGTTTTTGTTAACGTTGTAGGTGGTGGATATGCAGGTCAATCAGGTGCGATCCGTCATGGTATCTCACGTGCACTTTTAGAAGTTGACCCAGATTTCCGCGATTCATTGAAACGTGCTGGACTTCTTACACGTGACGCACGTATGGTTGAACGTAAAAAACCAGGTCTTAAGAAAGCTCGTAAAGCTAGCCAGTTCTCAAAACGTTAA

SEQ ID NO: 452 - protein, 130 aa, Streptococcus agalactiae
MAQAQYAGTGRRKNAVARVRLVPGTGKITINKKDVEEYIPHADLRLVINQPFAVTSTQGSYDVFVNVVGGGYAGQSGAIRHGISRALLEVDPDFRDSLKRAGLLTRDARMVERKKPGLKKARKASQFSKR

SEQ ID NO: 453 - protein, 1155 aa, Streptococcus agalactiae
ATGTCCATTCACAAATACCCAAGCAAAAAAGCCAAAAATGGCTATTTGTATTTAGTCAAGGTCTATATGACAAGAGACGGTCAACGTGCTGACCATATCAAACGTGGCTTTCGTACTCGAAAGGAAGCCAAAGATTACGAAGCTAGGCTAATCTACCTTAAGGCTTCAGGAAAATTGGAAGAGTTCATCAAGCCAACTCATAAAACTTATAACGAGATATTCGAGAAATGGTATCAAGCCTATCAAGATACGGTAGAGCCGACCACGGCTTCTCGTACTCTTGATATGTTTAGGCTTCACATTCTGCCAGTCATGGGAGACTTACCCATCAGCAAAATATCCCCTTTAGACTGCCAGAACTTCATCATAGAAAAAGCTAAGGTATTTAAGAATATCAAGCAAATCAAGTCCTACACTGGCAAGGTCTTTGATTTTGCTATCAAGATGAAACTGCTCAAACATAACCCTATGACAGAAATCATTATGCCAAAGCGGAAAAAGACACGGATAGAAAACTATTGGACAGTTCAGGAACTTCAAGAGTTTTTAGCCATAGTGCTTCAAGAAGAGCCTTACAAGCATTATGCACTGTTCAGGCTACTAGCCTACAGTGGCTTAAGGAAAGGCGAGCTATACGCCCTTAAATGGGCTGATATAGATTTTCAGAGTGAGACACTAAGCGTCAATAAAAGCTTAGGACGATTAGACGGACAGGCAATCGAAAAAGGAACTAAAAATGATTTTTCGGTTCGAAGGATAAAGCTAGATAGTGAAACTATTTCTATTCTGCAGGAATGGAAGGCAAATTGCCAAAAAGAAAAGGCACAACTAGCAGTCGCACCTCTTTCTATCGAGCAAGATTTTATTTTTACTTACTGCACACGGTCAGGCTCAATAGAGCCACTACATGCAGACTATATCAACAATGTACTATCACGGATTATCAGGAAGCATGGCTTAAGGAAAATCAGTCCTCACGGTTTCAGGCATACCCATGCTACCTTAATGATTGAAATTGGAGTTGACCCAGTCAACACAGCAAAACGATTAGGACATGCCAGTAGTCAAATGACTTTAGATACTTACAGCCATTCAACAACTAACGGAGAAGATAAGTCCATCAAGCAATTTGCGGACTATCTCAAAGCTAAATAA

SEQ ID NO: 454 - protein, 384 aa, Streptococcus agalactiae
MSIHKYPSKKAKNGYLYLVKVYMTRDGQRADHIKRGFRTRKEAKDYEARLIYLKASGKLEEFIKPTHKTYNEIFEKWYQAYQDTVEPTTASRTLDMFRLHILPVMGDLPISKISPLDCQNFIIEKAKVFKNIKQIKSYTGKVFDFAIKMKLLKHNPMTEIIMPKRKKTRIENYWTVQELQEFLAIVLQEEPYKHYALFRLLAYSGLRKGELYALKWADIDFQSETLSVNKSLGRLDGQAIEKGTKNDFSVRRIKLDSETISILQEWKANCQKEKAQLAVAPLSIEQDFIFTYCTRSGSIEPLHADYINNVLSRIIRKHGLRKISPHGFRHTHATLMIEIGVDPVNTAKRLGHASSQMTLDTYSHSTTNGEDKSIKQFADYLKAK

SEQ ID NO: 455 - protein, 552 aa, Streptococcus agalactiae
ATGAATACAAGAATTCCATATCTAGTCGCTTTAAGCGGTAAAACACTGAAACAAATTAGCGAAGAAACCGGAATAGCTTATCCAACATTAACAAGCTATAACCAAGGTGTACGCAATCCTAAAAAAAATAACGCAGTTATTCTTGCAAAATATTTTGGAGTATCAGTTGGATACTTATTAGGAGATGAAAAAGAGCCTAACTTAATAAATCCAGGTGATGAGTCTCTAATAAAAGGTCTTTTTAGAGTGGCTCAAGGTAAAACTAATCTAGACAAAGTAACTGAGTGGACACCTTTCAAAGATGACGTCAGTTTCGTAAAAACAATGCTCCTTTCCACCCCAACACTTGAGAGAAAAATCGATGAGATTTTTGAAGGCATTGAACCTAATATAATTCAAGCACTCAAGCAAAGGATAAAAGAAGTTGCCGAAGAATTTCCTTATACAATTAACCATAGCGGAGATGAGAAATCAGATTATCACTTCGTTTGGCAAGCATGGGAAGAATCGGACGAATACAAGAAAAGAATGGCTGAAAAACACAAAAAATAA

SEQ ID NO: 456 - protein, 183 aa, Streptococcus agalactiae
MNTRIPYLVALSGKTLKQISEETGIAYPTLTSYNQGVRNPKKNNAVILAKYFGVSVGYLLGDEKEPNLINPGDESLIKGLFRVAQGKTNLDKVTEWTPFKDDVSFVKTMLLSTPTLERKIDEIFEGIEPNIIQALKQRIKEVAEEFPYTINHSGDEKSDYHFVWQAWEESDEYKKRMAEKHKK

SEQ ID NO: 457 - protein, 294 aa, Streptococcus agalactiae
ATGGCTTACACACTAGAAGAACGAGAAACGATTGTCCGTTACGATGAAATGGATAAGTGTTGGTATTTTGAAAGTAACGTTAGAAGACACGTTACAAAGATTTTGAAAATGGAGCATGCATTCGACGAAATCGAAAAAGAGCTCGAGAATGATTTTTGTATCTATGTTCGTGCAAAACTGTCTGATTTAAATAACTTTTCAGTCAATCCGTTTGTAAAGAATAAACGAAAACTATCTGACGAACAGAGATTAGAGTTAAGTCGACTTGCTAAAAAACGTTTCTCGTCTGACTAG

SEQ ID NO: 458 - protein, 97 aa, Streptococcus agalactiae
MAYTLEERETIVRYDEMDKCWYFESNVRRHVTKILKMEHAFDEIEKELENDFCIYVRAKLSDLNNFSVNPFVKNKRKLSDEQRLELSRLAKKRFSSD

SEQ ID NO: 459 - protein, 282 aa, Streptococcus agalactiae
ATGACAGAAGGATTTACCATTCAGCTCCCCAAAGTAACTGAAAAGAAGTTACTGGCTCGCTATGATGACATGCTTCAAAAGGCAATAGAAAAAGCCCTTGAGGATAAAGAACTCTATAAGCCTATAGTTCGTATGGCTGGCTTGTGCCGTTGGCTAGATGTCTCAACGACAACCGTTGTCAAATGGCAAAAACAGGGAGGGATGCCCCACATGGTGATTGATGGTGTGACCCTGTACGATAAGCACAAGGTCGCTCAATGGCTACAACAATTTGAGAGGTAA

SEQ ID NO: 460 - protein, 93 aa, Streptococcus agalactiae
MTEGFTIQLPKVTEKKLLARYDDMLQKAIEKALEDKELYKPIVRMAGLCRWLDVSTTTVVKWQKQGGMPHMVIDGVTLYDKHKVAQWLQQFER

SEQ ID NO: 461 - protein, 642 aa, Streptococcus agalactiae
ATGATAAAGATTTATTTTGGAAAAGATGCAGCACTTAACCAAGCTATTCAGTCGCGATTGGATAGTTATCAGATTGACTATCAAGCATTCTCAAGTAAAGATATAGATGCTAAAACACTGATGGAATGGCTGTTTAAGTCAACGGATATATTTGAATTACTAAGTACTAAGATGTTGAAGTATAAGCTAAATACACAAATTACCCTCAGTCAATTTGTTCGAAAGATTTTAAAAGATGTCAATAGCACCTTGAAGCTTCCCATTGTTGTGACAGATGAGGTTATTTATTCGAACATGTCCCCTGACTATGTGACAGTACTCTTGCCAAAAGAATATCGGAAAATTAAAAGAATTCAGCTGATGAGGAAGATGGAGCAGTTAGATGAGGGTCGTCTATTCTGGAAAAACTTTGAATTATTCCGTAAGCAATCAGAGCTACGTTGGTTTGAACTGAATCAGTTACTGTTTGCTGATGTATCCGACGATTTAGGAGAAATCAAAAAAGCTAAAGACCGTTTCTTTAGCTACAAGAAAAATAACCAGGTACCTCCTAATGAGATTATCGAAAGAATCCTCAAAATATTTTTGGTTGACCGAGAAGACTTTTTTAAAAAATCTCCTTCGGACTTACAAAATTTCTAG

SEQ ID NO: 462 - protein, 213 aa, Streptococcus agalactiae
MIKIYFGKDAALNQAIQSRLDSYQIDYQAFSSKDIDAKTLMEWLFKSTDIFELLSTKMLKYKLNTQITLSQFVRKILKDVNSTLKLPIVVTDEVIYSNMSPDYVTVLLPKEYRKIKRIQLMRKMEQLDEGRLFWKNFELFRKQSELRWFELNQLLFADVSDDLGEIKKAKDRFFSYKKNNQVPPNEIIERILKIFLVDREDFFKKSPSDLQNF

SEQ ID NO: 463 - protein, 876 aa, Streptococcus agalactiae
TTGGAATTAAAAGTCAGCTTAGACAATATTACGATAACAGCTTACATCAAATCATACAAGCTCCTAGGCTTAAAAAGATTGGTTGAAGGTCATACAGCTATTATTATTCAAACTGCTATGACTGATATGTTCAGAGCTTACACAAAGGATGGAGGTCAAGTTGTGCTCCACATGGAATATGACAAAATAAAAGGACAAGCCTTTAATGCTCGCCCTTTCCGTTTGGAGTTCAACCCTAATAAACTCCGTTCAGTAGATACTGAAATTATAGACACTATTATACCATATCTTGAAGATATTTCAATATCTCGTGCTGACTTAGCTTTTGATTTGTTTGAGGTTGATTGTAGTGAGTTTGTGCTAGAGAAAAAAGGGCGCCCCACTGCGACCAAAGAATTTCGTTCAGATACTGGAAAACTAGAAACGAAGTATTTAGGTGCTTCTCGCTCGGAAAAACAGGTTAGGCTGTATAACAAGAAAAAAGAGCAACTAGAAAATGGGACTGACAAAGAAAAGGAATTTGCAAGTCAATTTAAGCATTGGTGGCGATTGGAATTTCAGTTAAGAAGTCGTTCAGTTGAGGAGATATTCGAGGTTATCAATACTGTTGTTTTTAAACCATTCAAATTTGAAGGTTTACCTGTTGAAACTCAGATCTATCTTGTAGCTCTTACACGAGATAAAAATCTCTGGAAGCAACTACACAGAAACACACGAGCAAAATACAAAAAGATTTTAGAAACCTATCAAACATCAGATATTGATTATTTAGGTTTGCTGAAAGACTTGTTGAAGCATGAAAGACTAAGACTAGAAAATCAGCTCGCTTATTATGGGGGTAGGATAGACAAAAATAGCTTTCAACCCTTTTGTTGA

SEQ ID NO: 464 - protein, 291 aa, Streptococcus agalactiae
MELKVSLDNITITAYIKSYKLLGLKRLVEGHTAIIIQTAMTDMFRAYTKDGGQVVLHMEYDKIKGQAFNARPFRLEFNPNKLRSVDTEIIDTIIPYLEDISISRADLAFDLFEVDCSEFVLEKKGRPTATKEFRSDTGKLETKYLGASRSEKQVRLYNKKKEQLENGTDKEKEFASQFKHWWRLEFQLRSRSVEEIFEVINTVVFKPFKFEGLPVETQIYLVALTRDKNLWKQLHRNTRAKYKKILETYQTSDIDYLGLLKDLLKHERLRLENQLAYYGGRIDKNSFQPFC

SEQ ID NO: 465 - protein, 435 aa, Streptococcus agalactiae
ATGAGAATAAAAGATTATGCTGATAGTCTAGGAGTTAGTAGCCAATCTATCTATAAACGCATACGCTCTCCAAAATATAAAGAAAGGTTGAAAGGTCATTTATACCGAGACAACCAAAAGGTTGAAAATCTTGATTTGATAGGCATTAAGATACTTGAAGATTATCATTTTGAGAATGATGTCATTGAACTGGAAAAAACGCTGGGTGATATTCAAGAAGAATTCGAGCAAGAAAAGAAGGGAATGCAATATCGGATAGATAGACTAGCTGATAAGTTAACTCCTTTACTTGAGGATAACCAAAACTTGGTACAAAAAAATTATGAGTTACTCAACTATGTTCGGAGCTTGGAACGACAGAAGCTATTACTGATTATTGCTTTAGCTGTCATGGTAATCACTTTATTAGTGGCAATATGGCTTGCCATCTTTTGA

SEQ ID NO: 466 - protein, 144 aa, Streptococcus agalactiae
MRIKDYADSLGVSSQSIYKRIRSPKYKERLKGHLYRDNQKVENLDLIGIKILEDYHFENDVIELEKTLGDIQEEFEQEKKGMQYRIDRLADKLTPLLEDNQNLVQKNYELLNYVRSLERQKLLLIIALAVMVITLLVAIWLAIF

SEQ ID NO: 467 - protein, 1257 aa, Streptococcus agalactiae
ATGAGTTATGTTGTTGCTAGAATGGCTAAGTACAAGTCAGGTCAGTTGACGGCTATTTATAATCATAATGAACGGATTTTTAAAAATCACTCAAATAAAGAAATTGACGTTGAGAAATCTCACCTTAATTATGAACTGACAAATCGAGACCAGGCACAAAATTATCACAAACAAATAAAGGAGCATATCAATGAAAATCGCTTATCTACTCGTGGAGTCCGTAAAGATGCTATACTCTGTAACGAATGGATTATTACTTCAGATAAAACGTTTTTTAACTCGTTAGATGAGAAACAGACACGAGAGTTTTTTGATACAGCTAAAGATTATTTTGCTGAAAAATATGGTGATGCTAATATTGCTTACGCTAGAGTTCACCTTGATGAAAGTACTCCGCATATGCATTTAGGTATCGTGCCAATGAAAAATGGTAAGTTAAGTTCAAAAGCACTGTTTGGAAATAAAGAGAAACTTGTAGCAATCCAAGATGAACTTCCCAAGTACCTTAATGAGCATGGCTTTAACCTACAACGTGGCGAAATAGGCAGTAAGAAAAAACATTTGGAAACTGCTGAATTTAAAGAAAAACAACGATTACTGGATAACGCTGATAGAAAACTAGCTGATAAACATGAAGAATTGAAAGCACTTGATGATAAGATTTCAAATGTTAACGATACAATAGCTGATAAAGAAAGTAGGCTTAAAGAATTGGAAGCGAAAGAATGGGATGCTGTTGGCGATTTGAAGCAGTATGAATTAGAGAAACAGTCACTAGCTGAAAGCATTGAAGACATAAAAGACATTGAACTATTACAACTTGATAGAATTCAAAAAGAAGATTTGGTAAAACAAAGCTTTGATGGCAAATTGAAGATGGATAAAGAAACCTATAATAGACTATTTCAAACTGCTTCGAAACATGCATCTAGTAATGCTGAGTTAAAAAGAGACTTGGTTAAAGCCCAGTCGCAGAACAATCACCTTTCTAGAGAATTACTCAATCACCGTAAGACAGCTGAAAAAAATATCAAATTAAGTCAAGAAAACAGAAAATTAAAGGACAAAGTAAAAATGCTTGATGAACAAGTGAAAATTCTGAATAAAAGCCTCTCTGTTTGGAAAGAAAAAGCTAAAGAATTTATGCCTAAACAGGTTTATAGAGAAACATTATCAATCATAAACACTCTAAATCCTATTGGTTTAGCTAAAACAGCAATCAGACAAGTTAAGAAGATGGTTGATAGTAATAGTTAG

SEQ ID NO: 468 - protein, 418 aa, Streptococcus agalactiae
MSYVVARMAKYKSGQLTAIYNHNERIFKNHSNKEIDVEKSHLNYELTNRDQAQNYHKQIKEHINENRLSTRGVRKDAILCNEWIITSDKTFFNSLDEKQTREFFDTAKDYFAEKYGDANIAYARVHLDESTPHMHLGIVPMKNGKLSSKALFGNKEKLVAIQDELPKYLNEHGFNLQRGEIGSKKKHLETAEFKEKQRLLDNADRKLADKHEELKALDDKISNVNDTIADKESRLKELEAKEWDAVGDLKQYELEKQSLAESIEDIKDIELLQLDRIQKEDLVKQSFDGKLKMDKETYNRLFQTASKHASSNAELKRDLVKAQSQNNHLSRELLNHRKTAEKNIKLSQENRKLKDKVKMLDEQVKILNKSLSVWKEKAKEFMPKQVYRETLSIINTLNPIGLAKTAIRQVKKMVDSNS

SEQ ID NO: 469 - protein, 471 aa, Streptococcus agalactiae
ATGACAGATAAAAAAATTGTTTATTACTTTGACCATGACTTATCAAAAAAAGATATGGGAGGAGTAGGACCTACCTACACCGGTAAAAATCTTTTATTCCTACTTTGGTGGACATATTCTTATGTGGCAGAAGACAATTTAGACATTGATACGTCATTGTTTGAAGTCCCAGAATTCAATGATTTTTACAATAATGGTCTAGAGCTTTATCGTATAAAAAATGAACTAGCTAATTACAATATCAGATTTGGATATGAGGTTAATCCAAAAGATAGTACAAAGATGCTGATAGGTATTTTGCCAACTGATGAAGAAGATTATGTTAAGGGATATAGAAATTTTATTGCTGATATTTCCAATCCTGACACACGTTACGCAATCTATCATCGACTAATTAAAACCATGGACACAATGCTACCGATTGAACAAATTAATGTTTATAAAAGCCTTGCAAAAGGTAATAAAAAGTGA

SEQ ID NO: 470 - protein, 156 aa, Streptococcus agalactiae
MTDKKIVYYFDHDLSKKDMGGVGPTYTGKNLLFLLWWTYSYVAEDNLDIDTSLFEVPEFNDFYNNGLELYRIKNELANYNIRFGYEVNPKDSTKMLIGILPTDEEDYVKGYRNFIADISNPDTRYAIYHRLIKTMDTMLPIEQINVYKSLAKGNKK

SEQ ID NO: 471 - protein, 336 aa, Streptococcus agalactiae
TTGGACTATAAGAAATATCAGATTATCTATGCTCCTGATGTTTTAGAGAAGCTAAAAGAAATTCGTGATTATATTTCCCAAAACTATTCCTCAACATCAGGTCAGCGTAAAATGGAGCAAATCATTAATGACATAGAAAAACTTGAAGTTTTCCCAGAAGTTGGTTTTGATGCCGATGAAAAATATGGTTCAGAAATCAGCAATTATCACAGTACTAGAGGTTACACCTTAAGTAAAGATTATATTGTCCTATACCATATCGAAGAGGAAGAGAATAGGGTTGTCATTGATTACTTGCTTCCTACTCGAAGCGACTATATGAAATTGTTTAAATAG

SEQ ID NO: 472 - protein, 111 aa, Streptococcus agalactiae
MDYKKYQIIYAPDVLEKLKEIRDYISQNYSSTSGQRKMEQIINDIEKLEVFPEVGFDADEKYGSEISNYHSTRGYTLSKDYIVLYHIEEEENRVVIDYLLPTRSDYMKLFK

SEQ ID NO: 473 - protein, 288 aa, Streptococcus agalactiae
ATGGTTACAGTAGAAAAAAATAGAGCTGTCACATTCCAAGCTAACAAAGAATTGGTAAGCGAAGCAATGACAGTATTAAACAAAAAAAATTTAACCTTATCATCTGCTTTAAGATTATTCCTACAAAATGTCGTTGTCACAAACGAGGTTGACTTATTGACGGAAGAGGAGTTAGAGAAAGAAAAACTTTTCAAGCAATTTCAAGCCGAAATCAGCAAAAATATTGAGGATGTTCGTCAAGGGAAGTTTTATACCTCTGAAGAAGTGAGGGCTGAACTTGGACTATAA

SEQ ID NO: 474 - protein, 95 aa, Streptococcus agalactiae
MVTVEKNRAVTFQANKELVSEAMTVLNKKNLTLSSALRLFLQNVVVTNEVDLLTEEELEKEKLFKQFQAEISKNIEDVRQGKFYTSEEVRAELGL

SEQ ID NO: 475 - protein, 291 aa, Streptococcus agalactiae
ATGTCACAAATTAAACTAACACCTGAAGAACTCCGTATTTCAGCACAAAAATATACAACAGGATCACAATCAATTACAGATGTGTTAACAGTTTTGACTCAAGAACAAGCTGTTATTGATGAAAATTGGGATGGTACAGCATTTGATAGCTTTGAAGCCCAATTCAATGAATTATCTCCAAAAATCACACAATTTGCACAATTATTAGAAGATATAAATCAACAATTATTGAAAGTTGCGGATGTTGTCGAACAAACAGACTCAGATATTGCCTCACAAATTAATAAATAA

SEQ ID NO: 476 - protein, 96 aa, Streptococcus agalactiae
MSQIKLTPEELRISAQKYTTGSQSITDVLTVLTQEQAVIDENWDGTAFDSFEAQFNELSPKITQFAQLLEDINQQLLKVADVVEQTDSDIASQINK

SEQ ID NO: 477 - protein, 408 aa, Streptococcus agalactiae
ATGAAAAAGAGTACCCAAATAATACTACTAATAGTTGCATTATTCATACTTGTTTTTAGCGGAGGATTTTATATGAAAGAACAACAAAGAAAAGAAGAACTAAAACGGAATCGAGAATATGAAGTTAGTCTAGTCAAAGCATTGAAAAATTCCTATGAGAATATAGAAGAAATAAAAATCACACATCCTGTTTCAACTGAAATTCCTGGAGATTGGCATTGTACTGTAAAGATTTCATTTAATGATAAAAAATCTATTGTTTATAATATTACACATAATTTGGAATCGAAAAAAAATTATAGCGGAAAATTTAATGAAAAAAATATGAATTTTTTTGATTCAAGAATTGGTAAAACAAAAAAAACTATAAAAATTATTTTTTCAGATGGTCAGGAGAAGATACAATAA

SEQ ID NO: 478 - protein, 135 aa, Streptococcus agalactiae
MKKSTQIILLIVALFILVFSGGFYMKEQQRKEELKRNREYEVSLVKALKNSYENIEEIKITHPVSTEIPGDWHCTVKISFNDKKSIVYNITHNLESKKNYSGKFNEKNMNFFDSRIGKTKKTIKIIFSDGQEKIQ

SEQ ID NO: 479 - protein, 561 aa, Streptococcus agalactiae
ATGGTATTTACATATACCGAGAAAGAACTTCGTGAATTCAATATTGGAGATAATGTATATTCAGTTAACCCCGATTATGCAGAAAAAAATCATTCAACTGTCATAACGGATTTACCCCAGAAAGATAACGAAACAAATATTATTACAACAGAAGATAGAAAAAAATTTAAGGTATTAAAAACTTCTCCTGACGATATGTCTGGCTATCAGGGTATGGCAGTTGCACCAATTATCAAGGGTAAAGTAGATTATAACAGTGTTGCAGTTATATCCGCCGCAACGGATTCAAGTAATTATAAAGATTTAATTGGCGCAGTTTCATCTGCTCAACCACATCAAAGTTCGACTCAGTTAAAATCAGCTGATAAATTTTTAAAAGACGTACAGTCACATGACAAATGGACTGTGACTCAGCTTTCAGGCTATTCTCAATCTGCATATATGTTAAAATTAGGTGCTCAATATCATATCCCGACTACAGTATTTAATGGATGGTTTAGGTATAGCACTTTAAATGAAGATGAAAAAAATTCATGGCTAAGCATCCTGAATATTTTGTGA

SEQ ID NO: 480 - protein, 186 aa, Streptococcus agalactiae
MVFTYTEKELREFNIGDNVYSVNPDYAEKNHSTVITDLPQKDNETNIITTEDRKKFKVLKTSPDDMSGYQGMAVAPIIKGKVDYNSVAVISAATDSSNYKDLIGAVSSAQPHQSSTQLKSADKFLKDVQSHDKWTVTQLSGYSQSAYMLKLGAQYHIPTTVFNGWFRYSTLNEDEKNSWLSILNIL

SEQ ID NO: 481 - protein, 681 aa, Streptococcus agalactiae
ATGGCTAAGCATCCTGAATATTTTGTGAATTTTCGACATAAAGAGGATAATGTAACTTGGTGGAACGATTTTAATAAACTAGATGATAAAGATTATGGTACCGTGAAATGGGTAAATGGTAAAAGTCATAAAATAGAGAGTTGGAAATTTACTGATGATGGTAAGTTAAAAGATGAAAAAGGTAACATCGTAAATCCTAAGTCACCAGCTGTTCAGTCTGTTCTTTATGAAGAAGTTCATTTTCAAAAAGCTAAAGCTAAATTAAAAAAATCTGGAGGCAAACTTAGTCATAGTGAAAAAGTATATTTAGATTCTGAACAGGCTATATTTATTGCTAACGGTTTAACCACGGCATCTCAAACAGCTTCTGATGATATCAAGAAGAATGCTGAATTAGTTAAAGAAAAAGCATCAGAACTATTTGCAAAAACTAAAGTGATGCCTCCTGGTATAACAGATTTAAGTCCGGAAGAATTAGCTGATACATATAGTGAGGGCGGAGTTAGAGAGGACACCATAGTAACACCAATTGAAACTTTCTTTGATGAAAAAGTTACTAATGCACAAGAGATTACAACTTCATATATTAATCTTCAAAAACAAATTGAATCTGGTGTCCAAAAATTGCTAGAAGAGGACTCCAAATTAGCAGGAGAATTTAAGGAATGGTCACAGTACTAG

SEQ ID NO: 482 - protein, 226 aa, Streptococcus agalactiae
MAKHPEYFVNFRHKEDNVTWWNDFNKLDDKDYGTVKWVNGKSHKIESWKFTDDGKLKDEKGNIVNPKSPAVQSVLYEEVHFQKAKAKLKKSGGKLSHSEKVYLDSEQAIFIANGLTTASQTASDDIKKNAELVKEKASELFAKTKVMPPGITDLSPEELADTYSEGGVREDTIVTPIETFFDEKVTNAQEITTSYINLQKQIESGVQKLLEEDSKLAGEFKEWSQY

SEQ ID NO: 483 - protein, 387 aa, Streptococcus agalactiae
ATGGTCACAGTACTAGATCAAAATGAAAACAAAATTAATAGTCTAAAAATAAACCTAGGGAAATTGGAAGATAATTATCATCGCGAAAATATGGAGATAGAAGATAAATTATATAGCCTTGAGGATAAAAAGAACGAGTTAGAGACTTATTTACAAGAAGTCTATGAAGAGACAAGTCACCTTTTGAGACAAAATGATTCAGATGGTTCGACTTTTATGAGTTTAAATCGAATAATTGAAAGTTATCAAATGGAATTAATTGATGAATATGAAAACTATAAACAGACTATCATTGTCCAAGAGGAAAATAGTCGGACACAGTTTCTAAAAGACCGAGTAAAATTAGAAAATGACATTTCTAGTTTAGAAGGAAGAAAATACTACTAA

SEQ ID NO: 484 - protein, 128 aa, Streptococcus agalactiae
MVTVLDQNENKINSLKINLGKLEDNYHRENMEIEDKLYSLEDKKNELETYLQEVYEETSHLLRQNDSDGSTFMSLNRIIESYQMELIDEYENYKQTIIVQEENSRTQFLKDRVKLENDISSLEGRKYY

SEQ ID NO: 485 - protein, 282 aa, Streptococcus agalactiae
ATGAGTTTAATAGGCGCTGTATTGAAAGGAACCAAAGAAGACAAAGAATTCAAAAAGCAAATTCAAAGAGCTTTAGTAAGGATTGTCTATGCCCCTGAAATAGTAGAAGAAGCTGATTCTATTAAGATGACTTATAGTGACAAGATTGATAATGTTTCTGAGACGGCCAAATCATCAWTTAAAACGATAGCAAATCAAATAGATTCAGGACTTGTAGGACAATTTGGGGAAAAAGTAAAGGCACAGGTAGATTTAAATAAAGGTAGTTATGATGATTTATAA

SEQ ID NO: 486 - protein, 93 aa, Streptococcus agalactiae
  VARIANT 60: Xaa = Any Amino Acid
MSLIGAVLKGTKEDKEFKKQIQRALVRIVYAPEIVEEADSIKMTYSDKIDNVSETAKSSXKTIANQIDSGLVGQFGEKVKAQVDLNKGSYDDL

SEQ ID NO: 487 - protein, 99 aa, Streptococcus agalactiae
ATGAAGGATAACAAAGTTTATTATTTACATTTTGGTAAAGCAATAGATAAAAATGAAGCTAAAAATGATAAGTATCTCAATCAAATTATAAATAATTAA

SEQ ID NO: 488 - protein, 32 aa, Streptococcus agalactiae
MKDNKVYYLHFGKAIDKNEAKNDKYLNQIINN

SEQ ID NO: 489 - protein, 105 aa, Streptococcus agalactiae
ATGGAGGAATTTTGTATGGTAAGTACTCAATATATGAAAGTAACCTTACGAGAAAAATTCCCAGATAAATTAACATATGTTGATTTAGAAGAACTTGTGATATGA

SEQ ID NO: 490 - protein, 34 aa, Streptococcus agalactiae
MEEFCMVSTQYMKVTLREKFPDKLTYVDLEELVI

SEQ ID NO: 491 - protein, 861 aa, Streptococcus agalactiae
ATGTTTAAATATGTCCCTATTTTTAGGGAATTTCGACTTAATCGACAGTTTTCTCTTAAACAGGTTGCTTCAAATGAACTTTCTGTTTCTCAGTTATCACGATTTGAGAGGGGTGAATCAGATTTATCATTAACAAAATTTTTAGGGGCTTTAGAGGCAATTGATTTATCAATTAGCGAATTTATGGATAGAGTAAATAAATATCAAAAATCTGATCAGATATCTTTAATGTCTCAGATGGCTCAATATCATTATCAAAGAGACGTAGCTGGGTTAGAAAAGATGATTTCTGTGGAAGAAGGTAAACTAAAAAAGGATAGTTCAGATATACGTTGTCGTTTAAACATAGTTCTTTTTAGAGGAATGATATGTGAATGTGACTCCTCAAGAAAAATGTCGGAAGAAGACCTTTGCTTTTTGTCGGATTACCTCTTTCAAAAGGATAGTTGGGAAATTAGTGACTATATTTTGATTGGAAATCTTTACCGGTATTACAACACAAGGCATATTTGCCAACTTGTTAAAGAGGTTATCAATCAAAAGGAATATTATCGAGATATTTATACAAACCGCAATGTTGTCGAAGCAACCCTCCTAAATGTGGTAGAGACACTAATAGAACGGCGCGCTCTAGAAGAAGCAACGTTTTTTCTAGAGAAAGTTGAAGCACTTTTAAATAATGAGCGGAATGCTTATCACCGTATTATTTTACTCTATGAAAAAGGATTTCTTGCCTATGCTAAAGGGGATAGTCGAGGAATACAAAGCATGAAGCAAGCTATTTTTTGCTTCCAAGCAATTGGTTCTAAACATCATGTTGAAAATTTTCAGGAACACTTTAATAGGGTAACAAGATTATAA

SEQ ID NO: 492 - protein, 286 aa, Streptococcus agalactiae
MFKYVPIFREFRLNRQFSLKQVASNELSVSQLSRFERGESDLSLTKFLGALEAIDLSISEFMDRVNKYQKSDQISLMSQMAQYHYQRDVAGLEKMISVEEGKLKKDSSDIRCRLNIVLFRGMICECDSSRKMSEEDLCFLSDYLFQKDSWEISDYILIGNLYRYYNTRHICQLVKEVINQKEYYRDIYTNRNVVEATLLNVVETLIERRALEEATFFLEKVEALLNNERNAYHRIILLYEKGFLAYAKGDSRGIQSMKQAIFCFQAIGSKHHVENFQEHFNRVTRL

SEQ ID NO: 493 - protein, 1182 aa, Streptococcus agalactiae
ATGAATATTAATGGTATAAAATTACTATCTAGTCGAGCAGTCAGTAAACTTGGTGATGTGTTTTATGATTATGGAAATAGTACTTGGATTGCTTCGATGGGTGGTCTAGGACAAAAGATTTTAGGTATTTATCAGATAGTAGAGTTGTTGGTTTCTATTGTCCTCAACCCTTTTGGAGGCGCCTTAGCTGATCGCTTTCAACGAAGAAAAATTTTACTAATAACAGATGCTATCTGTGCTATCATGTGTTTCTTACTTTCTTTTATTGGAGATGATAAAGTAATGGTGTATGGTCTAATAGTTGCTAATGCTATCTTAGCGGTTTCCAATGCTTTTTCTTCTCCGGCTTATAAATCTTATATTCCTGAAATAGTAGATAAAGCTGATATCATTACCTATAATGCTAATCTGGAAACCATTGTGCAAATTATTAGTGTAAGTTCCCCTGTTTTAGGTTTCCTTATTTTTAATAATTTTGGTATTAGGATTACTTTAATTGTTGATGCGATTACTTTTTTGATCTCTTTCCTGTTTCTTTATGCTATTAAAGTGGAAAGGGTACAGCTTTCAAAACAAGAAAAGGTAGCGATAAAAAATATTTTAGCTGATATTGCAGATGGATTTACTTACATCAAAAAAGAAAAAGAAATTATGTTTTTTCTAATTATTGCTGCTTTATTAAACACTTTCCTAGCAATGTTCAATTATCTTTTACCTTTTACTAACTCCCTATTAAAAACTTCAGGTGCTTATGCAACAATACTTAGTATATCAGCTATCGGATCAATTATTGGAGCGCTTATTGCTAGAAAAATTAAATCTAGTATTAATTCTATGCTATCTATGCTAGTATTCAGTAGTTTGGGAGTCATAGTTATGGGATTCCCATCTCTATTTGAATTACCGATATGGATACCTTACAGTGGTAGTTTTCTTTTTAATAGTCTTCTGACAATGTTTAATATTCATTTTTTCAGTCAGGTACAAATCAGGGTCGATGAAGCGTATATGGGGCGTGTGATGTCGACTATATTTACTATTGCTATTATGTTTATGCCTATAGGAACACTATTTATGACTATCTTTTCATTTGCCTTATCAAATGTTAGCTTTATTGTTATAGGATGTGCCATTGCTATATTGGGAGGATTAGGATTTAGCTATAGTAAAAAACAATTTTAG

SEQ ID NO: 494 - protein, 393 aa, Streptococcus agalactiae
MNINGIKLLSSRAVSKLGDVFYDYGNSTWIASMGGLGQKILGIYQIVELLVSIVLNPFGGALADRFQRRKILLITDAICAIMCFLLSFIGDDKVMVYGLIVANAILAVSNAFSSPAYKSYIPEIVDKADIITYNANLETIVQIISVSSPVLGFLIFNNFGIRITLIVDAITFLISFLFLYAIKVERVQLSKQEKVAIKNILADIADGFTYIKKEKEIMFFLIIAALLNTFLAMFNYLLPFTNSLLKTSGAYATILSISAIGSIIGALIARKIKSSINSMLSMLVFSSLGVIVMGFPSLFELPIWIPYSGSFLFNSLLTMFNIHFFSQVQIRVDEAYMGRVMSTIFTIAIMFMPIGTLFMTIFSFALSNVSFIVIGCAIAILGGLGFSYSKKQF

SEQ ID NO: 495 - protein, 651 aa, Streptococcus agalactiae
ATGAAACAAATGAATACTTTCCAACAATTTATCTACTACTTCCAACATAATGGTAGTTATATCTTAGAACAATTTATCCACCACTTTTTAATTTCAGTTTACGGCGTTATTTTAGCTGCAATTGTTGGTATCCCTCTAGGTATCTTCATCGCTAGACGTGGTAAAATTAAAACCTTTGTTATGGGAATCGCAAATGTCATCCAAACCATTCCTTCTTTAGCTATGATCTCTATCATTATGTTAGGTCTAGGGCTAGGTATTAAAACAGTAGTTGCAACTGTCTTTCTTTATTCTCTTCTGCCAATCATCACAAATACTTACACTGGTATTAGAAATGTTGACTCCGACTTACTAGATGCTGCTAAAGGAATGGGCATGACTAAGCGTCAACGTTTATTTATGGTTGAGTTACCACTATCTATTTCCGTTATCATGGCTGGACTTAGAAATGCCCTTGTTGTAGCAATTGGTATTACAGCCATTGGTGCTTTCGTCGGGGGAGGCGGACTTGGAGATATCATCATAAGAGGAACTAATGCAACAAATGGTGGTGCTATTATCTTAGCAGGATCTCTTCCAACAGCCCTTATGGCAATTTTCTCTGATTTAATCCTAGGCGGTATCCAACGCATGCTTGAACCAAGAAAATAA

SEQ ID NO: 496 - protein, 216 aa, Streptococcus agalactiae
MKQMNTFQQFIYYFQHNGSYILEQFIHHFLISVYGVILAAIVGIPLGIFIARRGKIKTFVMGIANVIQTIPSLAMISIIMLGLGLGIKTVVATVFLYSLLPIITNTYTGIRNVDSDLLDAAKGMGMTKRQRLFMVELPLSISVIMAGLRNALVVAIGITAIGAFVGGGGLGDIIIRGTNATNGGAIILAGSLPTALMAIFSDLILGGIQRMLEPRK

SEQ ID NO: 497 - protein, 927 aa, Streptococcus agalactiae
ATGCTTAAAAAATCGCACTTTTTACAGATATTTACACTTTGCTTAGCCCTCTTAACGATTTCTGGTTGTCAATTAACCGATACTAAAAAGTCTGGTCATACCACAATTAAGGTTGCTGCCCAAAGTTCTACAGAGTCTAGTATTATGGCAAATATTATCACCGAATTAATTCATCACGAATTAGGATACAACACAACTTTAATAAGCAATCTTGGTTCCTCTACGGTTACTCACCAAGCTTTGCTCCGTGGTGATGCTGACATTGCTGCCACACGTTATACAGGAACAGACATCACAGGGACTCTTGGTTTAAAAGCTGTTAAAGACCCTAAAGAAGCTTCTAAGATTGTAAAAACTGAATTCCAAAAACGCTACAATCAAACTTGGTATCCTACTTATGGTTTTTCTGATACTTATGCATTCATGGTTACTAAAGAGTTTGCCAGACAGAATAAAATCACTAAGATCTCTGATCTTAAAAAATTATCAACAACTATGAAGGCAGGGGTTGATAGTTCATGGATGAATCGCGAGGGAGATGGATACACTGATTTCGCTAAAACATACGGTTTTGAATTTTCACATATTTACCCTATGCAAATTGGCTTAGTCTATGATGCGGTTGAAAGTAACAAAATGCAATCTGTATTAGGCTACTCCACTGACGGTCGTATTTCGAGCTATGATTTAGAAATTTTAAGGGATGATAAAAAATTCTTTCCTCCTTATGAAGCCTCTATGGTTGTCAACAATTCTATCATCAAAAAAGATCCTAAACTAAAAAAATTACTCCATCGACTCGATGGTAAAATCAATTTAAAAACGATGCAAAACCTTAATTATATGGTAGATGATAAACTTTTAGAACCTTCAGTTGTTGCCAAACAATTTTTAGAAAAAAACCATTATTTTAGAGGAGATAAATAA

SEQ ID NO: 498 - protein, 308 aa, Streptococcus agalactiae
MLKKSHFLQIFTLCLALLTISGCQLTDTKKSGHTTIKVAAQSSTESSIMANIITELIHHELGYNTTLISNLGSSTVTHQALLRGDADIAATRYTGTDITGTLGLKAVKDPKEASKIVKTEFQKRYNQTWYPTYGFSDTYAFMVTKEFARQNKITKISDLKKLSTTMKAGVDSSWMNREGDGYTDFAKTYGFEFSHIYPMQIGLVYDAVESNKMQSVLGYSTDGRISSYDLEILRDDKKFFPPYEASMVVNNSIIKKDPKLKKLLHRLDGKINLKTMQNLNYMVDDKLLEPSVVAKQFLEKNHYFRGDK

SEQ ID NO: 499 - protein, 636 aa, Streptococcus agalactiae
ATGGTCAATTTCTTATCACAGTATGGCATGCAAATATTAGTAAAAACATGGGAACAAGTCTATATCTCATTCTTTGCTATAGCACTTGGGATTGCAATTGCTGTTCCATTGGGTGTGGTCTTAACACGTTTTCCCAAAGTAGCCAAAATTATCATTGCTATAGCTAGCATGTTACAAACTATACCAAGTTTAGCCTTATTAGCTTTAATGATTCCATTGTTTGGAATTGGAAAAATCCCAGCTATCGTTGCTTTATTTATTTATTCCTTGCTTCCTATACTAAGGAATACTTATATAGGTATGAATAATGTCAATCCAACACTTAAAGATTGTGCTAAAGGGATGGGAATGAAACCTATTCAATCTATATTTCAAGTTGAGTTACCTTTAGCTACTCCAATTATTATGGCTGGTATTCGCTTGTCTACTATTTATGTTATTGCTTGGGCTACATTGGCTTCTTATATAGGTGCAGGTGGACTTGGTGATCTCATTTTTAGCGGGTTAAATCTTTTTCAGTCCAAATTAATTCTAGGGGGCACAATTCCTGTTATTATCCTGTCACTTATTATAGATTATCTTTTAGGATTACTGGAAACAGCTCTAACGCCCAGAACAACAAGAAGGGAGGCTTAG

SEQ ID NO: 500 - protein, 211 aa, Streptococcus agalactiae
MVNFLSQYGMQILVKTWEQVYISFFAIALGIAIAVPLGVVLTRFPKVAKIIIAIASMLQTIPSLALLALMIPLFGIGKIPAIVALFIYSLLPILRNTYIGMNNVNPTLKDCAKGMGMKPIQSIFQVELPLATPIIMAGIRLSTIYVIAWATLASYIGAGGLGDLIFSGLNLFQSKLILGGTIPVIILSLIIDYLLGLLETALTPRTTRREA

SEQ ID NO: 501 - protein, 1146 aa, Streptococcus agalactiae
ATGGGCCAAGAACCTATCATCGAATATCAAAATATCAATAAAGTGTATGGGGAAAATGTTGCGGTTGAAGACATTAACCTTAAAATTTACCCTGGTGATTTTGTTTGTTTCATCGGTACGAGTGGATCAGGTAAAACAACATTAATGCGTATGGTTAACCATATGTTAAAACCAACAAATGGTACTCTATTATTTAAGGGAAAAGATATTTCTACTATTAACCCCATTGAATTAAGACGCAGAATTGGATATGTTATCCAAAACATTGGTTTAATGCCTCATATGACCATTTACGAAAATATAGTTCTTGTACCAAAATTATTGAAATGGTCAGAAGAAGCTAAAAGAGCTAAAGCAAGGGAACTTATTAAATTAGTTGAATTACCCGAAGAATATTTGGATCGCTACCCTAGTGAGTTGTCTGGCGGTCAGCAACAACGTATCGGTGTCATTCGCGCTCTTGCAGCAGACCAAGATATTATTTTAATGGATGAGCCTTTTGGAGCTCTGGATCCTATTACTAGAGAAGGTATTCAAGACTTAGTCAAGTCTCTTCAGGAAGAAATGGGGAAAACTATCATCTTAGTTACTCATGATATGGATGAAGCCCTCAAGTTAGCAACAAAAATTATTGTTATGGACAATGGTAAAATGGTCCAAGAAGGGACACCCAATGATCTCTTACATCATCCTGCTACTAGTTTCGTTGAACAAATGATTGGAGAAGAGCGTCTCCTTCATGCGCAGGCTGATATTACTCCTGTTAAACAGATAATGTTAAATAATCCTGTTTCAATAACTGCTGAAAAAACACTAACTGAAGCTATTACACTAATGCGCCAAAAACGCGTTGACTCACTTCTAGTAACCGATAACGGTAAATTAATTGGTTTTATTGACTTAGAATCTCTAAGCAGTAAATATAAGAAAGATCGACTTGTTTCTGATATCTTAAAACATACTGATTTTTATGTTATGGAAGACGACTTACTTAGAAATACTGCTGAGCGTATTTTAAAACTTGGTTTAAAATACGCTCCAGTTGTTGACCATGAGAATAACTTAAAGGGCATTGTTACTCGTGCATCCCTAGTTGATATGTTATACGATATTATTTGGGGCGATACTGAAACGGAGGATCAATAA

SEQ ID NO: 502 - protein, 381 aa, Streptococcus agalactiae
MGQEPIIEYQNINKVYGENVAVEDINLKIYPGDFVCFIGTSGSGKTTLMRMVNHMLKPTNGTLLFKGKDISTINPIELRRRIGYVIQNIGLMPHMTIYENIVLVPKLLKWSEEAKRAKARELIKLVELPEEYLDRYPSELSGGQQQRIGVIRALAADQDIILMDEPFGALDPITREGIQDLVKSLQEEMGKTIILVTHDMDEALKLATKIIVMDNGKMVQEGTPNDLLHHPATSFVEQMIGEERLLHAQADITPVKQIMLNNPVSITAEKTLTEAITLMRQKRVDSLLVTDNGKLIGFIDLESLSSKYKKDRLVSDILKHTDFYVMEDDLLRNTAERILKLGLKYAPVVDHENNLKGIVTRASLVDMLYDIIWGDTETEDQ

SEQ ID NO: 503 - protein, 459 aa, Streptococcus agalactiae
ATGAGAAAATATATAAAATGGTTAATTCCCATATCAATTTTTGGGATGATACTTGGAGGCTGTCAAATGAATAGTGAACATAAAAGTCAGTCAAACGAAGTAAAAAATAGCAAGCAATCAGAAGTGAAGAAAGATAAAAAAATGACAAAAAAAGAACAATTAGCCTATCTCAAAGAGCATGAGCAAGAAATCATAGATTATGTAAAATTACATAACAACCAAATTGAGTCCGTTCAATTCGATTGGTCAAGTGTAAAAGTAGAACAAAGCGGGAATGGAACTCCACAAGGGGGTGATTATAATCTTTCACTGAGAGGAAAGTTTAATCATCTACAAAATTCAAAATTAATAGTTGATTTTTATTTAGCTCATAAAAATGATATCCCAAATATCAAATCAATGGGAATGCTAAATAAGCCGTATATACATAAAAATGGTATTTGGCACATTTATGAATAG

SEQ ID NO: 504 - protein, 152 aa, Streptococcus agalactiae
MRKYIKWLIPISIFGMILGGCQMNSEHKSQSNEVKNSKQSEVKKDKKMTKKEQLAYLKEHEQEIIDYVKLHNNQIESVQFDWSSVKVEQSGNGTPQGGDYNLSLRGKFNHLQNSKLIVDFYLAHKNDIPNIKSMGMLNKPYIHKNGIWHIYE

SEQ ID NO: 505 - protein, 1635 aa, Streptococcus agalactiae
TTGAGTAATTGGAACTTAGATAATTTTGATAACTTACATAGCTCTTTAGCAGAAAGTGCATATAATAGTCGACCTAATTCATTTCCTGAATTATTTGAGACTGACTCAGTAACAGAAGTAAAATTTTCTCAACCCTCAGAAGATAACAAAGGTCAAATCACACAGGGTGGCACTAACCTCCCCAATGATGGTATTGTCTACCTGCAACCAGATAAGTCCTTAAAATCTATTGATGAAAATGTAAAGGTCCTCATTCCAGATGTCAATGGAGGCTATCACACTGAGCATTATGTTACTCATTCTTATCAAAAAGGTGTGCTTACTGACGATAAGGCAGGTTTTAATGCTTACTACCTGTCAGATACTGAAAAAATAGATAGCACTACAAAGCACACTTATCTAGCCATTCGTGGTAGTGATGGGATTGGTCTAGATACACTAAACGATTGGGTTAGTAACAATGCAATGTTTGCTGTCTCTAACAAGTATATTCCACAAGCGAAATTGGCTAATAAGGCTATGAAAGAAAAAATTGCCGAGCTAAAAGGAAAAGCGCCTGGAGCTATTATAGATGTTACTGGTCACTCACTCGGTACGATTGTATCTTCTCAAGCAGTTGTTAATCTTAGCTATGCAGAATTGGAGAATGTTGGTCAAGTAGTCCTTTTCGATGGCCCTGATGTATCAAGAAGCTTGGAAAAAATGGAAGGCATTTCTGCTAAAAAAATCCAAGAAGCTGGGAAGCATGTTACCTACTATGTCAATCCCTTTGATATAGTTAGTATGCTTAATCGTGAAAAGCCATGGAAAGACCAATTCGGGAAAGTAAATGTCATTGTTCCTAGTAAATATACGGGTACTTTTGATGAGCAATCTTCTCACGATTTTGGTGCCTTCCAAATTGATAGTAGCGGAAATCCTTTAGTTGCTTCTGAAAGCTATCATCCAGAATTATTAACATCTGGTCAAGACTTAGCTAGACTCGAAAAAAAATTCATAAAGAATCTTTTAGGAGAGCATTATGATTCGGATAAGCTAGGACCAGTACTCAAAGGCGCTCTGACTGGGGACCTGACTCGACTAATTGCAACATTAAAAGCTTGTGGTATCAGTGTCACTGTAAACGAAGCTAAAAAACTGTACGATAACTTCCAAAAAGACTACAAAGCCATAATTTCCAAAGCTAAAAAAGATGGCCTCGAGTGGGATCGCAAAAACATCGCAAGCTTCCATAGTAGGATCAAATCAGCATCAGGCAGTCAACGGATTTTACTTAGAACTCAAATGCTCTATATGGCAACGCAATTAGCAGAATCAGATGTTTCAGAAAAAGTCTCTGCAACAAAAAAACATATTAGTGAAGCTAAGGATACGATTGTAGAAATATCGACATCCACTATTTCATCAGCTGAAATAATGGCTATGCACCTTGACCAATCAGAAGTTGATGCTCTGGTTTCAGATATAAAAATGTCAACAGTTTGGAATGATGGCGTAGAGACTTCTGATTATGAAGCACTTGATCACTATAAAACAAAAATGACCACATTTACGACCAATTTGGTAACAGTTGCACAAAATTTAACAGCTCAAGATGAGCAACTAGCTGGTGATATTGTCACGAACTTATCCTAA

SEQ ID NO: 506 - protein, 544 aa, Streptococcus agalactiae
MSNWNLDNFDNLHSSLAESAYNSRPNSFPELFETDSVTEVKFSQPSEDNKGQITQGGTNLPNDGIVYLQPDKSLKSIDENVKVLIPDVNGGYHTEHYVTHSYQKGVLTDDKAGFNAYYLSDTEKIDSTTKHTYLAIRGSDGIGLDTLNDWVSNNAMFAVSNKYIPQAKLANKAMKEKIAELKGKAPGAIIDVTGHSLGTIVSSQAVVNLSYAELENVGQVVLFDGPDVSRSLEKMEGISAKKIQEAGKHVTYYVNPFDIVSMLNREKPWKDQFGKVNVIVPSKYTGTFDEQSSHDFGAFQIDSSGNPLVASESYHPELLTSGQDLARLEKKFIKNLLGEHYDSDKLGPVLKGALTGDLTRLIATLKACGISVTVNEAKKLYDNFQKDYKAIISKAKKDGLEWDRKNIASFHSRIKSASGSQRILLRTQMLYMATQLAESDVSEKVSATKKHISEAKDTIVEISTSTISSAEIMAMHLDQSEVDALVSDIKMSTVWNDGVETSDYEALDHYKTKMTTFTTNLVTVAQNLTAQDEQLAGDIVTNLS

SEQ ID NO: 507 - protein, 273 aa, Streptococcus agalactiae
ATGTCCAAAGAATTGAAATTGCCCTTGAATGAAATGTTGAAAGAACAAGAAAGAATAGCTATTAAGGCAATAGTTGCTACAGCAAAAAGCACTATTACGGATACTGGAACAAATTTAAAAGCAACTTTAGAGTCAGATGCCCAAGACCTAAAAAACTATGCATCCACCTATAACGCCAATATCACGGATGGTCTTGAAGGCCAGTCAGCTCAAGCAGCATCTGATTTCTTGACACAACTTCCAAAACCAGAGTTAGATAATCCAGTCAATTAG

SEQ ID NO: 508 - protein, 90 aa, Streptococcus agalactiae
MSKELKLPLNEMLKEQERIAIKAIVATAKSTITDTGTNLKATLESDAQDLKNYASTYNANITDGLEGQSAQAASDFLTQLPKPELDNPVN

SEQ ID NO: 509 - protein, 351 aa, Streptococcus agalactiae
ATGATAGATACAAAAAAACTGCAAGAACTCGATCAAGAATATGATCAAAATCTCAGAAACATTTATCGTAACAGAGAGCAACTAGAAGATGACTTTCACTTGTTTATGGCAAGAACAGACAGCCTAAAAGAGTCTGTCTATCAAGCAACTTTAGGACAAGGTTGGGAATTACCCCAAGAAGCTCATGCACACCTATATAATATGGATGATAATAAGGATACATTCATATCAGAATTCAATGAATATATGGAAAAGCTTGAAGAAAAGGAAATAGATCTTCGAAGAGTTTATAATGATAGAGTAGATGAATTGTATCAGAAGGCTAAGCAAAACGAAGCAAAAAAAGGATAA

SEQ ID NO: 510 - protein, 116 aa, Streptococcus agalactiae
MIDTKKLQELDQEYDQNLRNIYRNREQLEDDFHLFMARTDSLKESVYQATLGQGWELPQEAHAHLYNMDDNKDTFISEFNEYMEKLEEKEIDLRRVYNDRVDELYQKAKQNEAKKG

SEQ ID NO: 511 - DNA, 99 bp, Streptococcus agalactiae
atgaaaattatgaaagaattagacaatataggaattaaccgtaagaatctttttcgggatcatgataatatagcaaaatatctaattgaaaaagtataa

SEQ ID NO: 512 - protein, 32 aa, Streptococcus agalactiae
MKIMKELDNIGINRKNLFRDHDNIAKYLIEKV

SEQ ID NO: 513 - DNA, 630 bp, Streptococcus agalactiae
atgaacaataaaaacaaatggactataattttacttatttttactatcatcgtaattgatgttagcttactatttggcgggaatcgtttaagtttaccaatcaaattattaattttattagtaaccagtatagcagaattttgttcgatttttataatgataaaagttccgactcctcaaaaatataagaaagaaccatttggattaaaagcaaaattttattctattgtactctttctctcgactattctttatacaattgggatatggaatgtgacgccagcttccccatacaatgttaaagaatcaattcttggagttggcattttaatacaagtagttttcttcatttattttctattaaaaaaaattaacgaaagtcccgatgaacgcttttatagtaatttagcattgtcagcttctttgatgtttttgatatcaataatgttattaattcttatagctatttaccttaatatatatggaacgttagagttaaaatcaggctacctttatattatggtaggtttattattactaatgtttgctgttacatattactttcttgaggggacsgarrataataatggggaaagaaacaaaaattatcagttctttaaaacaggttag

SEQ ID NO: 514 - protein, 209 aa, Streptococcus agalactiae
MNNKNKWTIILLIFTIIVIDVSLLFGGNRLSLPIKLLILLVTSIAEFCSIFIMIKVPTPQKYKKEPFGLKAKFYSIVLFLSTILYTIGIWNVTPASPYNVKESILGVGILIQVVFFIYFLLKKINESPDERFYSNLALSASLMFLISIMLLILIAIYLNIYGTLELKSGYLYIMVGLLLLMFAVTYYFLEGTEBNNGERNKNYQFFKTG

SEQ ID NO: 515 - DNA, 147 bp, Streptococcus agalactiae
twrgytattcggataggtgttaggagagaaacaattggtcatttagaaaataacaggtataatccttctctagagatggcacttaaaattgttaagattttcgacatgaagatagaagatatttttcaattaaggaaagaggattaa

SEQ ID NO: 516 - protein, 48 aa, Streptococcus agalactiae
  VARIANT 1, 2: Xaa = Any Amino Acid
XXIRIGVRRETIGHLENNRYNPSLEMALKIVKIFDMKIEDIFQLRKED

SEQ ID NO: 517 - DNA, 561 bp, Streptococcus agalactiae
ttgaataaattttttttagaatcagagagacttattataaggccactagaagaaagtgattatgatagttggtatactagttttatgaatcgtggaccatctttaactccatttgatgatgggatacttgatatgtctatgtgtgacattaattggtttaaaaatttagtaaatttacaaaggaaagaatgggaaagtgacatagtatatatatttggtgtttttctaaaaagcggtgagcacgtaggaatgttaaatattgttacccttgcaagagcagatatgcaatggggagaattgggatatgtttttcataatcaattttggagtaatggctgtgcatttgagtcaatcttggcattacttaatagtacttatgaaaaattgggttttcatcatattgaagcacagattactcctgggaatgaacgatcggaaaagttggttagaagattgggattaacctatgagacaactcgaaaagatttttcatttgagaatggaaaatggacagataaactgatttatagtataaatttacataataataatttagaataa

SEQ ID NO: 518 - protein, 186 aa, Streptococcus agalactiae
MNKFFLESERLIIRPLEESDYDSWYTSFMNRGPSLTPFDDGILDMSMCDINWFKNLVNLQRKEWESDIVYIFGVFLKSGEHVGMLNIVTLARADMQWGELGYVFHNQFWSNGCAFESILALLNSTYEKLGFHHIEAQITPGNERSEKLVRRLGLTYETTRKDFSFENGKWTDKLIYSINLHNNNLE

SEQ ID NO: 519 - DNA, 351 bp, Streptococcus agalactiae
atratkgaaaaagaatcacagaagatgataggtattattgaattagaaatcagagatgaattttctgcagaatttggttatattttaaataaaaattataatggaaaaggttatatgacagaagcttgttcaaaattgatgtcaattggatttgaacatctagacttggaaagaatttatgctagatttgacattaataataaaaaatctggaaatgttatggaacggataggtatgaaaaaagaaggcgagcttcgtcatcttgcaaaaaatccaaaaggtgagtggaaaacaagagcgtattattctattttaaaagaagaatattttaataaagttaatactaaatag

SEQ ID NO: 520 - protein, 116 aa, Streptococcus agalactiae
  VARIANT 1, 2: Xaa = Any Amino Acid
XXEKESQKMIGIIELEIRDEFSAEFGYILNKNYNGKGYMTEACSKLMSIGFEHLDLERIYARFDINNKKSGNVMERIGMKKEGELRHLAKNPKGEWKTRAYYSILKEEYFNKVNTK

SEQ ID NO: 521 - protein, 681 aa, Streptococcus agalactiae
GTGGGTGATGTCGTTGAAAATTTTACGGAAGGTAAAAATCCGAAGATTGATACACTTAATGGGAAAACAGTTAGAATAGAAAAAATAAATCCAGATCATTTTGAAGACTTATTTCAAGTTTATGGAGAATTGTCTACTGAAGATAGTTTAACTTATATATCTTTTAGCAAATTTAATAGTAAGAATGAATTTGATGTCTTTTTCCAAACTCTATTAAAATCAGAAGATCCTTATTATTTAGCTATTGTTGATAATAATACTGGTAAAGTATTAGGGACTTTTTCATTAATGCGTATTGATACAAAAAATAGAGTTGTTGAAATGGGATGGGTGGTTTATTCATCAAAACTAAAACAAACAAGGATAGCAACAGAAGCTCAATATTTGGTTATGAAATATGTTTTTGAAGAACTCTGTTACCGCCGTTATGAGTGGAAATGTGATAGTTTGAATGCACCATCTAATAATTCTGCAAAACGACTTGGTTTTACTTTTGAAGGAACTTTTAGACAAGCTGTCGTATATAAGGGTCGTAACAGAGATACAAATTGGTATTCTATTTTAGATAAAGAGTGGCCAGAGAAAAAAACACGGTTTGAAAAATGGCTAGATGATTCAAACTTTGCTGTAAATGGGTATCAAATCAGATCACTATCAAGCATTGAGCAGAAGACAAAATAG

SEQ ID NO: 522 - protein, 226 aa, Streptococcus agalactiae
MGDVVENFTEGKNPKIDTLNGKTVRIEKINPDHFEDLFQVYGELSTEDSLTYISFSKFNSKNEFDVFFQTLLKSEDPYYLAIVDNNTGKVLGTFSLMRIDTKNRVVEMGWVVYSSKLKQTRIATEAQYLVMKYVFEELCYRRYEWKCDSLNAPSNNSAKRLGFTFEGTFRQAVVYKGRNRDTNWYSILDKEWPEKKTRFEKWLDDSNFAVNGYQIRSLSSIEQKTK

SEQ ID NO: 523 - protein, 948 aa, Streptococcus agalactiae
ATGATAAAAACAAAGTTTAGTGATCCACTGGAACAATTAGCCAAAAAAAGGAAAAGGAAAACATTATTCAAGACCGTAGTATTGGCATTAATAACTGTACTATTAGTAGTTGGAATAGCTTTTAAAGGATTTACATATTTAACTTCAAAAAATGGTCAAAAAACATATCATAACTTTGAACTACTTTCTGAAATAGCATATCCAAATATTTCCTATGATAGTCTCTATTACCAGCCAAGCGGTCAGTTTACTGGTAAAGTACATGCTGATAGATTTAAAGATATCGATGGGGTTCAAATTCCATATTCTAGTTTTGAAGAAAATTATAGTATCTCAGGTACTTTTGGCACAAATGCTGATGAAAAATCAGAAAAGAATGGCTTGTATGATCGAGGTACTAGACAAAAAGTTCCACAATTTTTCAATAAAAATGTTAAGTATAAAAAAGGAGAAGCCAAAACAACTCCAACAAATGATTTAAAATATGTAAATAAATTGAATAATGATCTTATTGAAATTGCAATAACTTTTGATAAGTCCTATAGTTACAAAGAAATAAAAACAATGATACCAAATAATATAAAACAAAATTGGTTATGGATAGGTACAAGCACAGAATTAGATACATCATATTGGCCAACAAAGTATCAATTCGGTACAGATCCTGAAACTTTGAATACACCACAAATATTCATAGATAAAATAAAAGAAAACTTAAAAGGTAACTCAAAAGTATACTTTAATAATATAAATATCTACTCAGATTTAGAAAAGTATGCCAAAAAATACGACAAGGTAAATAATAGCGACAAATTAAAATTTTCGGGAATAATATTAACAGGTAAAGCCGAAAACTTTAAACAACTTAAAGAAAAAGAATGGGTACATGCTTCAAGTATAGGGGCAAACATAGAATATAAGCCCTATTATAAATTAGATAAAGAATGA

SEQ ID NO: 524 - protein, 315 aa, Streptococcus agalactiae
MIKTKFSDPLEQLAKKRKRKTLFKTVVLALITVLLVVGIAFKGFTYLTSKNGQKTYHNFELLSEIAYPNISYDSLYYQPSGQFTGKVHADRFKDIDGVQIPYSSFEENYSISGTFGTNADEKSEKNGLYDRGTRQKVPQFFNKNVKYKKGEAKTTPTNDLKYVNKLNNDLIEIAITFDKSYSYKEIKTMIPNNIKQNWLWIGTSTELDTSYWPTKYQFGTDPETLNTPQIFIDKIKENLKGNSKVYFNNINIYSDLEKYAKKYDKVNNSDKLKFSGIILTGKAENFKQLKEKEWVHASSIGANIEYKPYYKLDKE

SEQ ID NO: 525 - protein, 492 aa, Streptococcus agalactiae
ATGTCAATTTTAGATGACTATGAAAAAGAATTACTAGTTATTTCACATCAAATAATAGCTTACCTTATTAAGTCAGGTGTTAATCCTAGTCAAGCACAGGATGTTACTCAAGACGTCTTTTTACAAATACTAGAATCTGATTTCTCCCTTCCACTTGATAAAATAAAAGCTTGGATGTATCGTACTACAATTAGGAGGTATATTGATCTTTATCGAAGAAATAAACGCTATAACGAAATCCTGCAAAAAGAATTCTTTATAGAAAATAATTTGTATTACACCGAATCAGAGAAGTTTTTTGAATTACATGAAGCAATATTACACTTGAAGAAAGATTATCAAACTTTAATAGATTTATATTATTTTAATGATTTTTCAATTAAAGAAATATCTGAAATTACTGGACAATCACAAAGTACAATTAAAATAAGACTTATGCGAGCTAGAAGAGAAGTTAAAAAATATTTAGAAAAGGATAATTTTAAAATATGA

SEQ ID NO: 526 - protein, 163 aa, Streptococcus agalactiae
MSILDDYEKELLVISHQIIAYLIKSGVNPSQAQDVTQDVFLQILESDFSLPLDKIKAWMYRTTIRRYIDLYRRNKRYNEILQKEFFIENNLYYTESEKFFELHEAILHLKKDYQTLIDLYYFNDFSIKEISEITGQSQSTIKIRLMRARREVKKYLEKDNFKI

SEQ ID NO: 527 - protein, 609 aa, Streptococcus agalactiae
ATGAAAAATAATATTATTTTTTCTATTGAACAGTATATTAATGACCAAGAGATGCCAAAAGGAAAACAAAAAGTTATTTTATCCGCTATAGAGCTCTTTGCCTCACAAGGCTTCCATGGAACTTCCACTGCTCAACTAGCTAAAAATGCAGAAGTTAGCCAAGCAACTATATATAAATATTTTGAAACTAAAGACAAGCTTTTGGTCTTTATTCTCGAGTTAATCGTACAAACTATTGGACGCCCCTTCTTTACAGAATTATCTACATTTTCTACTAAAGAGGAACTAATTCATTTCTTTGTACAGGACCGTTTTAAATTTATTGAAAAAAATAATGATCTCATTAAAATATTGATGCAAGAATTATTAATCAATAGTGAAACATCAACTATTTTTACTAAGCTAATAAATTCAACTGATCCAAACATTACTAAAATTTTCAACTGTTTAAGTGAAGGAAATTCGTTGAATAAAATGGAAATACTTCGAGCAGTAATCGGACAGTTCATTACTTTCTTTATTCAATTATATATCCTTAATATAAAGCCTGAAAATCTAGAGGAAGAACTAAAACAAATAGAAAAACAAATATTAAAATTACTGAGCTAG

SEQ ID NO: 528 - protein, 202 aa, Streptococcus agalactiae
MKNNIIFSIEQYINDQEMPKGKQKVILSAIELFASQGFHGTSTAQLAKNAEVSQATIYKYFETKDKLLVFILELIVQTIGRPFFTELSTFSTKEELIHFFVQDRFKFIEKNNDLIKILMQELLINSETSTIFTKLINSTDPNITKIFNCLSEGNSLNKMEILRAVIGQFITFFIQLYILNIKPENLEEELKQIEKQILKLLS

SEQ ID NO: 529 - protein, 585 aa, Streptococcus agalactiae
ATGATACCAATACTAATGGGATTTATGGTCTTCTTCTTTGTTTTTTTAATTTCTGGAATGGCTTTATTAAAAGAGCGTACTTCTGGTACACTTGATCGACTCCTTGCAACTCCTGTTAAACGTAGTGATATTGTATTTGGATATATGTTATCATACGGCATTCTAGCAATTATTCAAACGATAGTTATCGTTTTATCAACTATTTGGCTACTAGATATTCAAGTTGTAGGTAGTATTTTTAGTGTCATCATTGTCAATTTTATTTTGGCTCTGGTTGCCTTATCATTAGGAATCTTAATGTCTACTCTAGCAAAATCAGAATTTCAAATGATGCAATTTATTCCCTTAATTATAATGCCTCAATTATTCTTTTCAGGAATAATCCCTCTAGAAAATATGGCAAGTTGGGCTCAGACAGTCGGTAAAATTCTACCGCTCTCCTACTCTGGTGATGCACTTACAAAAATAATTATGTACGGTCAAGGATTACCTAACGTTTCTTCAAATCTTCTGGTACTTCTTCTATTTTTAATTATTTTAACCATCGCAAATATCTTTGGACTAAAACGATACCGTAAAGTATAA

SEQ ID NO: 530 - protein, 194 aa, Streptococcus agalactiae
MIPILMGFMVFFFVFLISGMALLKERTSGTLDRLLATPVKRSDIVFGYMLSYGILAIIQTIVIVLSTIWLLDIQVVGSIFSVIIVNFILALVALSLGILMSTLAKSEFQMMQFIPLIIMPQLFFSGIIPLENMASWAQTVGKILPLSYSGDALTKIIMYGQGLPNVSSNLLVLLLFLIILTIANIFGLKRYRKV

SEQ ID NO: 531 - DNA, 684 bp, Streptococcus agalactiae
atggataaactgaaaaaattacaaaaagaaaatacgctattagaaggaagaattgataactctaataaccaaacctatacagatatgattgtctatttgcgaggtgctagcattagcccctaccatcaggagctcattcgaaatgatattgtcaatatgttattagaagcacaagagcgacaagcaagtttagttagtgtatttggagaagataggcatgactttataaaccaagttattaaatctacacctaaaatctctaagaaagaagaaacattacaacgttgggatttagccattttactactaactatccaaatgattatctttttaggaggatatctcattactgaagcacttcaacagtcagtaccagatctaatccctattactctattagatgttctttttgcaatctttatcagtattattgctgtcaagatagctgataccataatatatgctacatataacttcgataaatcgaaagaaaagaaatatttctttcgatatatatttctaattctttcgcttatcatagcttatatccttataggaaaatattatcatcttcctttcattaatatccccctttggatttatttaattatactgggacttagcttctctcttcatatcattgttaaaaaatacctgaataaacattattatattgaattttaa

SEQ ID NO: 532 - protein, 227 aa, Streptococcus agalactiae
MDKLKKLQKENTLLEGRIDNSNNQTYTDMIVYLRGASISPYHQELIRNDIVNMLLEAQERQASLVSVFGEDRHDFINQVIKSTPKISKKEETLQRWDLAILLLTIQMIIFLGGYLITEALQQSVPDLIPITLLDVLFAIFISIIAVKIADTIIYATYNFDKSKEKKYFFRYIFLILSLIIAYILIGKYYHLPFINIPLWIYLIILGLSFSLHIIVKKYLNKHYYIEF

SEQ ID NO: 533 - DNA, 312 bp, Streptococcus agalactiae
atgattccatcgcaaatgctaaaaggattacttgaaggagctatcctaaaaatcatacagcaagaggagacttatgcttatgaaatctcaaaaaaattaaattcttatggttttggagaaatttccgaagggacaatctaccccattatcttaagactacaaagcaataaatatataaaaggacaacaaaagccttcccctcaaggacctaagcgtaaatattatacgttaaccaatgaaggcgtggagcaattagcccaatttaaacagaattgggagtcacttagtaaagcattaaacaaactactctaa

SEQ ID NO: 534 - protein, 103 aa, Streptococcus agalactiae
MIPSQMLKGLLEGAILKIIQQEETYAYEISKKLNSYGFGEISEGTIYPIILRLQSNKYIKGQQKPSPQGPKRKYYTLTNEGVEQLAQFKQNWESLSKALNKLL

SEQ ID NO: 535 - DNA, 708 bp, Streptococcus agalactiae
atgaaaatagataaaaaagaacttttagcacttattgctagtattattttattaatttttgcttctgttacgtttttcttatttaaagatcatggcactactcaaatggatactgtagaaagcagtgttaaccatgtcagtgattctcaattaactgaggcacaagatatgttagataaatttgagaagaaaccttcagaaaaattattgaaggatgtcgaacttgctttaaataaattgtccaattcttctaaaaaagaagctttgcaaaaacgttttaagaaagcaaaagataagtatcttaaagacgaagcagataagaaagctaccaaagatgctacagatttagtagaaattctagaacaagccccttcagaagaaaatgtgttaaaagctgaagcagcagtcaataagttaactgtcaaagaatctaaagaagctttacaaaaacgtattgatactgttaagacacaatatggtttgattgggaatcaaactccctctagttcagtagctgaaactacagaacaagggacagctaatcctgctagtcaggatacttctagttacgttaatcagaatgtagcaccaacttatgagcaaccgcaagcgaataatacaccagttactccaggggttaacaatactgttccgactccaggaactggtactgtacctgctactaatgggacaggtgttgctcagtaa

SEQ ID NO: 536 - protein, 235 aa, Streptococcus agalactiae
MKIDKKELLALIASIILLIFASVTFFLFKDHGTTQMDTVESSVNHVSDSQLTEAQDMLDKFEKKPSEKLLKDVELALNKLSNSSKKEALQKRFKKAKDKYLKDEADKKATKDATDLVEILEQAPSEENVLKAEAAVNKLTVKESKEALQKRIDTVKTQYGLIGNQTPSSSVAETTEQGTANPASQDTSSYVNQNVAPTYEQPQANNTPVTPGVNNTVPTPGTGTVPATNGTGVAQ

SEQ ID NO: 537 - DNA, 1149 bp, Streptococcus agalactiae
atgacgaagtacatcaaggctgaccgattcttttatgctgatcatgtaaaggaaaacggttatttagaaataaaagataatcactttggtaaatggatagaaaatatttctggacaagaggagattttagattattcaggttatcaaatagcacctggtttagttgatacacatattcatggttttgctggcgctgatgttatggattgtgattcagaaggaattttgcgaatgagtgctggcttactatctactggagtcacatctttcttgccgacaaccctaacttcagatacaaagcgactagaagaggcgtctaaatcagttgcggcagtagcgggcaaagaacaaggagcaaaaattcaaggcatctattttgagggaccatattttactgaggaatataaaggagctcaaaatccgatttatatgagaaatccaaacttggaagagtttgctcaatggcagaaggctgcaaaaggcttgattacaaaaattgctttggcaccagaacgtgagggagttgaggaatttgtctcagcaatcacaaagcaaggtgttacggtagctttaggtcattctaatgggacatataaagaagctaaaaaggcagtgaaggcgggtgcctcagtttgggtacatgcgtataatggtatgcgtggtttgacacaccgagaaccaggtatggttggtgcggtttataatttacctaatacctatgccgaactcatttgcgatggtcatcacgttgatcctgttgcttgtgacattttaatgacacaaaaaggccataatcatgtggcattaataacagattgtatggcagctggaggtgcccctgatggagattatatgttaggggaattgcccgtggttgtgtctaatggaactgcgcgtttgaaagatggaggtaatttagctggttctattcttaagctcaaagatggattaaaaaatgttgtagaatggggaattgctactccggaagaggcagtgcgtatggcgagttatgttccggcagtgtctgtaggcattgataatgtctgtggacagataaaagaaggttatgcagcggattttattgtattagataaacatctagatttagttgcaacataccttgatggggaaaaacgttggcaatcttga

SEQ ID NO: 538 - protein, 382 aa, Streptococcus agalactiae
MTKYIKADRFFYADHVKENGYLEIKDNHFGKWIENISGQEEILDYSGYQIAPGLVDTHIHGFAGADVMDCDSEGILRMSAGLLSTGVTSFLPTTLTSDTKRLEEASKSVAAVAGKEQGAKIQGIYFEGPYFTEEYKGAQNPIYMRNPNLEEFAQWQKAAKGLITKIALAPEREGVEEFVSAITKQGVTVALGHSNGTYKEAKKAVKAGASVWVHAYNGMRGLTHREPGMVGAVYNLPNTYAELICDGHHVDPVACDILMTQKGHNHVALITDCMAAGGAPDGDYMLGELPVVVSNGTARLKDGGNLAGSILKLKDGLKNVVEWGIATPEEAVRMASYVPAVSVGIDNVCGQIKEGYAADFIVLDKHLDLVATYLDGEKRWQS

SEQ ID NO: 539 - DNA, 543 bp, Streptococcus agalactiae
atgtcaattattattgggttaatggccgctatgtttattattcgtttagcttatttaaagctatctatagctaatgaaaaggccttaagaaaaaatggtgctaaagaatatggtgtaggtgtttcaaaagcaatcacagttcttcatattatcatttatttttcatctgtaactgaggctattctaacaaaagcaagttttaattttgttagcgtaatcgggcttagcttgatgattttttctgtgtttatgttacatacagtaacacgtttacttggtcgtatttggacagtgaaattaatggtagataaaaatcatcaatttgtagatcactggttatttagggttgttaagcatcctaactatttcttaaatattgctcctgaacttttaggtgtaactttattgtgtcatgctaaatacacagcattatttgtcttgccaatttatgcttttgttatttatttaagaattcgtgaagaaaacttattattaaaaacgatcattattccaaatggaatcaaaaagtctagggtatattaa

SEQ ID NO: 540 - protein, 180 aa, Streptococcus agalactiae
MSIIIGLMAAMFIIRLAYLKLSIANEKALRKNGAKEYGVGVSKAITVLHIIIYFSSVTEAILTKASFNFVSVIGLSLMIFSVFMLHTVTRLLGRIWTVKLMVDKNHQFVDHWLFRVVKHPNYFLNIAPELLGVTLLCHAKYTALFVLPIYAFVIYLRIREENLLLKTIIIPNGIKKSRVY

SEQ ID NO: 541 - protein, 804 aa, Streptococcus agalactiae
ATGAGCCCTTATACTTTCTTACGTGCTATAGGCCCTGAGCCTTGGAATGCTGCATACGTTGAACCATCACGTCGTCCAGCTGACGGCCGCTATGGCGAAAATCCAAACCGTCTTTACCAACATCATCAATTTCAAGTGGTAATGAAGCCTTCGCCGTCAAATATTCAAGAACTTTATTTGAAGTCTTTGGAATTACTAGGTATCAATCCACTTGAGCATGATATCCGTTTTGTTGAAGATAACTGGGAAAATCCATCTACAGGTTCAGCTGGATTAGGTTGGGAAGTTTGGCTTGATGGAATGGAAATAACACAATTTACTTATTTCCAACAAGTAGGTGGACTTCAAACAGGTCCTGTAACTTCTGAAGTTACTTATGGACTAGAGCGTTTAGCCTCTTATATTCAAGAGGTAGATTCTGTTTATGATATTGAGTGGGCACCAGGTGTTAAATATGGTGAAATCTTTACTCAGCCAGAGTATGAGCATTCAAAATATTCATTTGAGATATCAGACCAAGTAATGTTACTTGAAAACTTTGAGAAATTTGAAAGAGAAGCAAAACGTGCTTTAGAAGAAGGACTTGTTCATCCAGCTTATGACTACGTCCTTAAATGTTCACACACCTTTAATTTATTAGATGCACGTGGAGCAGTATCTGTTACTGAGCGTGCAGGCTATATTGCACGTATCCGGAATTTAGCACGTGTTGTTGCTAAAACCTTTGTTGCCGAACGTAAAAAACTTGGTTTCCCACTTTTGGATGAGGAAACTCGTATCAAATTACTTGCTGAGGAAGACTAA

SEQ ID NO: 542 - protein, 267 aa, Streptococcus agalactiae
MSPYTFLRAIGPEPWNAAYVEPSRRPADGRYGENPNRLYQHHQFQVVMKPSPSNIQELYLKSLELLGINPLEHDIRFVEDNWENPSTGSAGLGWEVWLDGMEITQFTYFQQVGGLQTGPVTSEVTYGLERLASYIQEVDSVYDIEWAPGVKYGEIFTQPEYEHSKYSFEISDQVMLLENFEKFEREAKRALEEGLVHPAYDYVLKCSHTFNLLDARGAVSVTERAGYIARIRNLARVVAKTFVAERKKLGFPLLDEETRIKLLAEED

SEQ ID NO: 543 - protein, 642 aa, Streptococcus agalactiae
ATGAACACACTCATTGTTAATAGTCATCCTGATTTTTCGAATCCGTACTCATTTACAACTATTCTACAAGAAAAGTTTATTGAACTTTATAATGAGCATTTTCCTAACCATCAGTTATCTATTTTAAATTTATATGATTGTGTTTTGCCAGAAATTACGAAAGAAGTACTACTTTCGATTTGGTCTAAACAAAGAAAGGGTTTGGAATTAACAGCCGATGAGATTGTTCAAGCTAAAATCTCTAAAGATTTACTTGAACAGTTTAAGTCACATCACCGTATTGTCTTTGTTTCTCCAATGCACAATTACAATGTGACTGCTAGAGCAAAAACTTATATTGATAATATTTTTATTGCAGGTGAGACTTTCAAGTACACTGAAAATGGTTCAGTCGGATTAATGACAGATGACTATCGTCTGCTTATGTTAGAATCTGCGGGTTCTATTTATTCTAAAGGACAGTATAGTCCATATGAATTTCCTGTTCATTATTTAAAAGCTATCTTTAAAGATTTTATGGCTTTTGATGATTTCTGTGTTGTTCGTGCAGAAGGTACCGATATTTTAGATAGGCAAGTTGTTCTTGATAAGATGAATCAGGATTTAAGAGAAGCATTTGAAGCGTTTTACAGTAAGGAGTAG

SEQ ID NO: 544 - protein, 213 aa, Streptococcus agalactiae
MNTLIVNSHPDFSNPYSFTTILQEKFIELYNEHFPNHQLSILNLYDCVLPEITKEVLLSIWSKQRKGLELTADEIVQAKISKDLLEQFKSHHRIVFVSPMHNYNVTARAKTYIDNIFIAGETFKYTENGSVGLMTDDYRLLMLESAGSIYSKGQYSPYEFPVHYLKAIFKDFMAFDDFCVVRAEGTDILDRQVVLDKMNQDLREAFEAFYSKE

SEQ ID NO: 545 - protein, 2040 aa, Streptococcus agalactiae
ATGACTAAAGATTTATTATTGGAGCTTGGCCTTGAAGAGTTGCCAGCTTATGTTGTGACACCGAGTGAGAAGCAATTGGGCCAAAAAATGGTCAAGTTTTTAGAGGATCATCGTTTATCATTTGAAACTGTTCAAATTTTTTCAACTCCACGTCGTTTGGCTGTTCGTGTGAAAGGATTGGCAGACCAGCAGACAGATTTAACAGAAGATTTCAAGGGTCCTTCTAAGAAAATTGCTTTGGATGCAGAAGGGAATTTTTCTAAAGCAGCCCAAGGTTTTGTTCGCGGAAAAGGTTTAAGTGTTGATGATATCGAATTTCGTGAAGTTAAGGGAGAAGAATATGTTTATGTCACTAAGCATGAAACTGGAAAAAGTGCGATTGATGTTTTAGCGAGTGTGACAGAGGTATTAACAGAATTGACTTTCCCAGTGAACATGCATTGGGCAAATAATAGTTTTGAATATATTCGTCCAGTTCACACTTTAGTGGTATTATTAGATGATCAAGCCTTAGAGCTAGACTTCCTTGATATTCATTCAGGGCGTATTAGTCGAGGACACCGTTTCTTGGGTTCTGACACTGAAATTTCATCTGCCAGTTCGTATGAAGATGACTTGCGACAACAATTTGTTATTGCTGATGCAAAAGAACGCCAGCAAATGATTGTTAATCAAATTCATGCTATCGAAGAAAAGAAAAATATTTCAGTTGAAATTGACGAAGATTTACTAAATGAAGTGCTTAATTTAGTTGAGTATCCGACAGCATTCTTGGGTTCTTTTGACGAGAAATACCTTGATGTACCTGAAGAAGTTTTAGTCACTTCAATGAAAAATCATCAACGCTATTTTGTTGTTCGCGACAGGGATGGAAAATTGTTACCAAACTTTATTTCTGTGCGTAATGGAAATGCTGAGCATATCGAAAATGTTATAAAAGGTAATGAAAAAGTTTTAGTGGCTCGTCTTGAAGATGGTGAATTCTTCTGGCAAGAAGATCAGAAACTTAATATTGCAGATTTAGTTGAGAAATTAAAACAAGTAACTTTCCATGAAAAAATTGGTTCACTTTATGAACATATGGATCGTGTAAAAGTTATTTCACAATATTTGGCTGAGAAGGCAGATCTTTCTGATGAAGAAAAATTAGCTGTGCTTCGAGCTGCAAGTATTTATAAATTTGACCTCTTAACTGGAATGGTTGATGAGTTTGATGAATTACAAGGTATTATGGGTGAGAAATATGCCTTACTTGCAGGGGAACAGCCCGCAGTAGCAGCAGCGATACGTGAACATTATATGCCGACATCTGCAGATGGAGAGCTTCCAGAAACCAGAGTTGGTGCAATTCTAGCTTTAGCTGATAAATTTGACACCTTACTTTCATTCTTCTCAGTTGGTTTGATTCCAAGTGGTTCAAATGATCCATATGCTCTTCGTCGAGCTACTCAGGGGATTGTCCGTATTTTGGAAGCTTTTGGTTGGGATATCCCACTTGATGAATTAGTAACTAACCTTTATGGTCTATCGTTTGCTAGTTTAGATTATGCTAATCAAAAAGAGGTCATGGCCTTTATTTCAGCTCGTATTGAAAAGATGATTGGCTCTAAGGTCCCTAAAGATATTCGAGAAGCCGTTTTAGAATCAGACACTTATATTGTTAGCCTTATTCTAGAAGCTAGTCAAGCATTGGTGCAAAAGAGCAAGGATGCTCAATATAAAGTTTCCGTTGAAAGTTTGTCACGTGCATTTAATTTAGCTGAAAAAGTTACTCATTCTGTATTGGTGGACTCTTCATTGTTTGAAAATAATCAAGAGAAGGCGCTATATCAAGCTATTTTGTCACTTGAACTGACTGAGGATATGCATGACAACTTAGATAAGCTTTTCGCACTTAGTCCAATTATTAATGATTTCTTTGATAATACAATGGTAATGACAGATGATGAAAAAATGAAACAAAATCGTCTGGCTTTACTCAATAGCCTTGTTGCAAAGGCAAGAACAGTCGCTGCTTTTAACTTATTAAACACAAAATAA

SEQ ID NO: 546 - protein, 679 aa, Streptococcus agalactiae
MTKDLLLELGLEELPAYVVTPSEKQLGQKMVKFLEDHRLSFETVQIFSTPRRLAVRVKGLADQQTDLTEDFKGPSKKIALDAEGNFSKAAQGFVRGKGLSVDDIEFREVKGEEYVYVTKHETGKSAIDVLASVTEVLTELTFPVNMHWANNSFEYIRPVHTLVVLLDDQALELDFLDIHSGRISRGHRFLGSDTEISSASSYEDDLRQQFVIADAKERQQMIVNQIHAIEEKKNISVEIDEDLLNEVLNLVEYPTAFLGSFDEKYLDVPEEVLVTSMKNHQRYFVVRDRDGKLLPNFISVRNGNAEHIENVIKGNEKVLVARLEDGEFFWQEDQKLNIADLVEKLKQVTFHEKIGSLYEHMDRVKVISQYLAEKADLSDEEKLAVLRAASIYKFDLLTGMVDEFDELQGIMGEKYALLAGEQPAVAAAIREHYMPTSADGELPETRVGAILALADKFDTLLSFFSVGLIPSGSNDPYALRRATQGIVRILEAFGWDIPLDELVTNLYGLSFASLDYANQKEVMAFISARIEKMIGSKVPKDIREAVLESDTYIVSLILEASQALVQKSKDAQYKVSVESLSRAFNLAEKVTHSVLVDSSLFENNQEKALYQAILSLELTEDMHDNLDKLFALSPIINDFFDNTMVMTDDEKMKQNRLALLNSLVAKARTVAAFNLLNTK

SEQ ID NO: 547 - protein, 258 aa, Streptococcus agalactiae
ATGGATCCTAAAAAAATTGCTCGTATTAACGAGCTTTCAAAAAAGAAAAAAACAGTTGGATTGACCGGAGAAGAGAAGGTTGAACAAGCAAAGCTCCGTGAAGAGTATATTGAAGGTTTCCGCCGATCAGTCCGTCACCACGTTGAAGGAATTAAATTAGTGGATGATGAGGGCAATGATGTTACCCCGGAAAAACTTCGTCAAGTCCAGAGAGAAAAAGGACTACATGGTCGTAGTTTGGATGATCCAAATTCTTAA

SEQ ID NO: 548 - protein, 85 aa, Streptococcus agalactiae
MDPKKIARINELSKKKKTVGLTGEEKVEQAKLREEYIEGFRRSVRHHVEGIKLVDDEGNDVTPEKLRQVQREKGLHGRSLDDPNS

SEQ ID NO: 549 - protein, 321 aa, Streptococcus agalactiae
TTGGGTGGGGCAAAAGATAATCTTTGTCTCGCCTTTTTTATTAGGAAGGAAAAAATAATGATTGAATTACTATTAGCATTACTGTTATGGAATATTTTAGTATTTGCAACCTATGCTATTGATAAAAGGCGTGCAATTAGAGGGGCATGGCGTATTAGTGAGAAAACATTGATGATAGAGAGTTTATTATTAGGGGGATTTGGTGCATTCCTAGGTGGAGAAGTTTTTCGTCATAAAACGACTAAATGGTATTTCAGACTAGTTTGGTATATCGGAATGATTATTGATTTAGCTATTATTTGGCTAATTTGGTGTTATTGA

SEQ ID NO: 550 - protein, 106 aa, Streptococcus agalactiae
MGGAKDNLCLAFFIRKEKIMIELLLALLLWNILVFATYAIDKRRAIRGAWRISEKTLMIESLLLGGFGAFLGGEVFRHKTTKWYFRLVWYIGMIIDLAIIWLIWCY

SEQ ID NO: 551 - DNA, 1509 bp, Streptococcus agalactiae
atgtcttcagaagaaaaatacattatggcgattgaccagggaacaacaagctctcgagcaattatttttaataaaaaaggtgaaaaaattgcgagtagccaaaaagaatttccccaaatttttcctcaagcaggctgggtagagcataatgctaatcagatttggaattctgttcaatctgtcattgctggagcttttattgaatcaagcatcaaacctggacagatagaggctattgggattaccaatcaacgtgaaacaactgttgtttgggataaaaaaacaggtcttccaatttataatgctattgtatggcaatcgcgacaaacagccccgattgctgatcaattgaagcaagaaggtcatactaacatgattcatgaaaaaactggtcttgtcattgatgcttacttctcagcaacaaaagttcgttggattttagaccacgttcctggagcacaggaacgtgctgaaaaaggagagttgctttttggaacaattgatacttggttagtttggaagttaactgatggtctcgtccatgttacagactattcaaatgctgctcgtacgatgctttataatattaaagaacttaaatgggatgatgaaattttagagttactaaatattcctaaagcaatgttaccagaagtaaaatctaattctgaagtttatgggaaaactactccattccatttttacggtggagaggtgccaatttctggtatggctggtgaccaacaggcagcattatttggacagttggcctttgaacctggtatggtaaaaaacacttatggtacaggttccttcattatcatgaatacgggcgaagagatgcaactgtctcaaaataatctattaacaacgattggttacggcattaatggtaaggttcattatgcacttgaaggatcaatcttcattgcaggaagcgctattcaatggttacgtgatggtcttagaatgattgaaacgtcaagtgagtcagaaggccttgctcaatcatcaacaagtgacgatgaggtttatgtggttccagcttttacaggtttgggtgcaccgtattgggattcaaatgctagagggtcagtatttggattaactcgtgggacaagtaaagaagattttgttaaagctacacttcagtcaattgcttatcaagtacgagacgttattgacactatgcaagttgattcaggaattgatatccaacaacttcgtgtagatggtggagctgcaatgaataatttattaatgcaattccaagcggatattttagggattgatattgctcgtgcgaagaaccttgaaactactgccttgggtgcagctttcttagccggactttcagttggctattgggaaagtatggatgaactaaaagaactgaacgcaacaggacaacttttccaagcaacaatgaatgagtctcgaaaagaaaaactgtataaagggtggagaaaagctgtcaaagcgacacaagtatttgctcaagaggattaa

SEQ ID NO: 552 - protein, 502 aa, Streptococcus agalactiae
MSSEEKYIMAIDQGTTSSRAIIFNKKGEKIASSQKEFPQIFPQAGWVEHNANQIWNSVQSVIAGAFIESSIKPGQIEAIGITNQRETTVVWDKKTGLPIYNAIVWQSRQTAPIADQLKQEGHTNMIHEKTGLVIDAYFSATKVRWILDHVPGAQERAEKGELLFGTIDTWLVWKLTDGLVHVTDYSNAARTMLYNIKELKWDDEILELLNIPKAMLPEVKSNSEVYGKTTPFHFYGGEVPISGMAGDQQAALFGQLAFEPGMVKNTYGTGSFIIMNTGEEMQLSQNNLLTTIGYGINGKVHYALEGSIFIAGSAIQWLRDGLRMIETSSESEGLAQSSTSDDEVYVVPAFTGLGAPYWDSNARGSVFGLTRGTSKEDFVKATLQSIAYQVRDVIDTMQVDSGIDIQQLRVDGGAAMNNLLMQFQADILGIDIARAKNLETTALGAAFLAGLSVGYWESMDELKELNATGQLFQATMNESRKEKLYKGWRKAVKATQVFAQED

SEQ ID NO: 553 - DNA, 1830 bp, Streptococcus agalactiae
atggaattttcacgagaaacacgacgtttagccttacaaagaatgcaagatcgtactctggatttacttatcataggtgggggtatcacaggcgctggtgtcgctttacaagcagcagctagtggattagatactggacttattgaaatgcaagattttgcagaagggacaagtagtcgctcaacaaaattggtccatggtggtcttcgttacttgaagcaatttgatgtagaagttgtttctgatacagtatcagagcgtgcagtcgtgcagcaaattgcaccacacattcctaagccagatccaatgcttttaccggtttacgatgagccgggttctacttttagtatgtttcgccttaaagtggctatggatttatatgatttattagcaggtgtgacaaacacacccgcagccaataaagttttaagcgcagaagatgttcttaagcgtgagcctgatttacaaaaagaaggtttgctaggcggaggggtctatttagatttccgtaataacgatgcacgcctagtgattgaaaatattaaacgcgctaatagggatggagcttatattgccagtcatgtcaaagctgaggacttcttatttgatgacaacaatcaaattataggagtacgtgcgcgtgatttgttgactgaccaagttatcgatataaaagctaggcttgttattaatacaactggaccttggagtgacaccgttcgcaacttctccaatgaaggtaaacaaattcatcaattacgtccaactaagggagttcacttagttgtagatcgccaaaaattaaatatttctcaacctgtttatgttgatacaggcctgaatgatggtcgtatgatttttgttttgccacgtgaagataagacttattttggaactacagatactgattaccatggagacttagaacatcctacggtaactaaagaagatgttgactacctccttaatattgtaaacaaacgcttcccagaagcagagcttactattgatgatattgagagttcatgggcaggtttgcgtccactactatcagggaatagtgcctctgactataatggaggcaatagtggaaaactaagcgatgaaagttttgaagaattaattgattccgttaaagattatattgcacataaaaatcatcgtgaggatgttgaaaaagctatttctcatgtagaatctagtacttctgaaaaagaattggacccatcagctgtttctcgaggatcaagttttgagcgtgatgataatggcctattaacacttgctggtggtaaaattactgattatcgaaaaatggcagaaggtgccatggaaactattattaacattttggataaagaatataatcgcaagtttaaactaatcaattctaaaacctatcctgtttcaggaggagagattaacccatctaatgttgattctgaaattgaagcttatgctcaattgggcacactaagtggtttaagtattgaggatgcacgttatattgctaacctttatgggtcaaatgcaccaaaattatttgcattgacacgccaaattacagaagcagaaggtctgagcttggtagaaacgttgtcacttcactatgctatggattatgaaatggcgcttagcccaacggatttcttcttaagacgtacgaaccatatgcttttcatgagagataatttagattctttgattcagcctgttattgatgagatggctaaacattatcaatggtctgatcaagacaaaactttctatgaagaagaattacatgagactctaaaagacaatgacttggcagctttgaaggataattga

SEQ ID NO: 554 - protein, 609 aa, Streptococcus agalactiae
MEFSRETRRLALQRMQDRTLDLLIIGGGITGAGVALQAAASGLDTGLIEMQDFAEGTSSRSTKLVHGGLRYLKQFDVEVVSDTVSERAVVQQIAPHIPKPDPMLLPVYDEPGSTFSMFRLKVAMDLYDLLAGVTNTPAANKVLSAEDVLKREPDLQKEGLLGGGVYLDFRNNDARLVIENIKRANRDGAYIASHVKAEDFLFDDNNQIIGVRARDLLTDQVIDIKARLVINTTGPWSDTVRNFSNEGKQIHQLRPTKGVHLVVDRQKLNISQPVYVDTGLNDGRMIFVLPREDKTYFGTTDTDYHGDLEHPTVTKEDVDYLLNIVNKRFPEAELTIDDIESSWAGLRPLLSGNSASDYNGGNSGKLSDESFEELIDSVKDYIAHKNHREDVEKAISHVESSTSEKELDPSAVSRGSSFERDDNGLLTLAGGKITDYRKMAEGAMETIINILDKEYNRKFKLINSKTYPVSGGEINPSNVDSEIEAYAQLGTLSGLSIEDARYIANLYGSNAPKLFALTRQITEAEGLSLVETLSLHYAMDYEMALSPTDFFLRRTNHMLFMRDNLDSLIQPVIDEMAKHYQWSDQDKTFYEEELHETLKDNDLAALKDN

SEQ ID NO: 555 - DNA, 699 bp, Streptococcus agalactiae
atggatatttttggagaattcttaggaacagctctcttagtcttacttggtaatggtgttgtagcaggtgttgttttgcctaaaacgaagaatcataattctggatggattgttatcacatttggatggggacttgctgtagctattgcagcgttggtatctggcaatattagccctgcccacttgaatccagctgtgtcattagcttttgcgatcaaaggtgatttagcttggggaacagctattctttatatgattgcacagattattggtgcaatgctaggttcacttcttgtttatttgcaatttagaccccattatgaggctgcagaaaatagagcagacatccttggaacttttgcaactggtccggctttgaaggataatttttccaattttttaagtgaagtattgggaacacttgttcttgtacttactatttttgccatcggaaaatacaatatgcctccaggagttggtacgatgagtgttggtatgttagtggttgggattggtctatcgctcggtggaacaacaggttatgctattaatcctgcacgtgattttggtcctcgtttattgcatgccttgttaccgatgaagaacaaaggtgattctgattggacttattcatggattccgatagtaggacctatggtaggagctattttagcagccttaatatttgctatgatgtaa

SEQ ID NO: 556 - protein, 232 aa, Streptococcus agalactiae
MDIFGEFLGTALLVLLGNGVVAGVVLPKTKNHNSGWIVITFGWGLAVAIAALVSGNISPAHLNPAVSLAFAIKGDLAWGTAILYMIAQIIGAMLGSLLVYLQFRPHYEAAENRADILGTFATGPALKDNFSNFLSEVLGTLVLVLTIFAIGKYNMPPGVGTMSVGMLVVGIGLSLGGTTGYAINPARDFGPRLLHALLPMKNKGDSDWTYSWIPIVGPMVGAILAALIFAMM

SEQ ID NO: 557 - DNA, 1281 bp, Streptococcus agalactiae
atgacttgtgcgcagaaattacgccaattaaatcctaattgggatatcgttttgattgataaagaaattcatccagattatgttccaaatggcttaaattggtattatcgtcacgaaattagtggtttaaatcaggccatgtggcagacagaagaagagcaacggttgcagaatatacgctgtctatttggtctaaaagttgagaaaattaataaagaagatagggaattaatgttatcagatggttcttctgtctattatgatcaattgatttgtgccatgggctcccaagcagaatcaacttatattgatggggctgatgcgcaaggtgttttaacaacaaaaacttatgcaactagtcaaaatgctaagcaggtattagataaaagtcataaggtagcagttgttggggcaggtatcatcggtttagatattgcttatagtttacatgaatcagggaaggcggtcactttgttagaagctcaagaaagaccagacttcaggcatacagatcctgatatgtcccttcctttacttgatgcgatggctgaatcaaaactacattttttccaaaatcaaaaggttgagaaaattactgtaacccgagaagaaaaactttgtttgcgaacgctaacaggagacacctttacagttgatgctgtcatattagctgttaattttcgtccggatagtcgtcttttaactgggttggttgatttaagtgttgataatagtgttgttgtaaatgattatttccaaacgagtgaccctaatatctatgctattggcgatttgatttggtcgtattttaaaggtcttaatagtgcttattatatgcccttaattaaccaagcaatccgttcggcacaaatgttggcataccatttatcgggacatgctgttccaaaattaaaaataacacgcgctacaggatctaaacactttggctattatagagctaacattggattaactgaattggaagctggtttttacgaggataccgttagtgttacttatttccctaaagaacagtatgatttaaggataaaattgattgctaaccaaaaaacgggccatttattgggggctcaattaatctcaaaggaaaattgtttggctactgccaatcagcttgttcaagctatatcgtgtgatatgacagattttgatctggcttttcaagatttcatttatacagctagagaatctgagatggcttatatgttgcatcaagcagctatcaacctttatgaaaagaggattgggctatgcgaatag

SEQ ID NO: 558 - protein, 426 aa, Streptococcus agalactiae
MTCAQKLRQLNPNWDIVLIDKEIHPDYVPNGLNWYYRHEISGLNQAMWQTEEEQRLQNIRCLFGLKVEKINKEDRELMLSDGSSVYYDQLICAMGSQAESTYIDGADAQGVLTTKTYATSQNAKQVLDKSHKVAVVGAGIIGLDIAYSLHESGKAVTLLEAQERPDFRHTDPDMSLPLLDAMAESKLHFFQNQKVEKITVTREEKLCLRTLTGDTFTVDAVILAVNFRPDSRLLTGLVDLSVDNSVVVNDYFQTSDPNIYAIGDLIWSYFKGLNSAYYMPLINQAIRSAQMLAYHLSGHAVPKLKITRATGSKHFGYYRANIGLTELEAGFYEDTVSVTYFPKEQYDLRIKLIANQKTGHLLGAQLISKENCLATANQLVQAISCDMTDFDLAFQDFIYTARESEMAYMLHQAAINLYEKRIGLCE

SEQ ID NO: 559 - DNA, 1413 bp, Streptococcus agalactiae
atggaaaaagaaaggcgtgttcaatatcggctactttcttttttaagaggctctcctcaggcaatagcactgaagttagctttattagaaactggtttaagtcgagcaacttttcttaaatatatcaataatcttaatagctactttgaacaagaaaaagttaattgtcgaatcgtttattataaggataagttatttttagaagaggattataacttatccaatcaagaagtgttgaaagctctgatgaaagatagtattaaatacactatcttaatatctttatttaatcagcgtcagttcacaatcgttggtctttctcaagaattgatggttagtgaggctactttaaatcgtcatcttgctcatctcaatgaattgttagcggaatttgatattgctatttcacaaggaaaacagattggtgatgaattgcaatggcgttatttttattatgaattattcaagcaactatggtcttatgacaagtgccaaaatatgataaagaaattagacttagactcattaattctattaatagagcgcttggctcaacatactttaactcgagaagctcatcaaaatctgggactttggtttagtatttgtcatcatcgtctccttgctatggaaaaaatatctgataatctcaagcctattgtgaaacattatcaatgtaatgctttttataaacggttagacgcagccttagttttgtatatgagtcgttttgctcttgagtatagggaaggagaagttctggcaacttttgcttttctacattcacaaaatattttaccaatcaatacaatggaatacatcatgggatttggaggcccgattattgattgtgtaaccgaaacaatcatctactttaaaaaggagagtattttagctgacgagacatcagatcaggttatttaccaacttggtcagttatatagccattattatttctttaaaggtcatattttagttgaacaacctgatttagaacaaacgtatcgacttattgatcataatatgagggataagttgcatcatatttcaaagaagattattgcaaatgttaatcgaattagacctttaacagaagatggttgttctttgctgactttacatttgttggaattgcttattttctcgaaaaatagtcaaaaaatgccctttaggattggtctagatatgacaggtaatgctgtggaacagtcattgttggaatatcgcattcgacaacatttctctggtaataattctattcaagtcgaaccttatgacgaaggaaagggatttgatatggttatttatcagagtcactcaagaccttataaagccaaactaacctattgccttaataaaggtgcttcagagcgagaactacaggaaatagattcacttatttatgacaattaa

SEQ ID NO: 560 - protein, 470 aa, Streptococcus agalactiae
MEKERRVQYRLLSFLRGSPQAIALKLALLETGLSRATFLKYINNLNSYFEQEKVNCRIVYYKDKLFLEEDYNLSNQEVLKALMKDSIKYTILISLFNQRQFTIVGLSQELMVSEATLNRHLAHLNELLAEFDIAISQGKQIGDELQWRYFYYELFKQLWSYDKCQNMIKKLDLDSLILLIERLAQHTLTREAHQNLGLWFSICHHRLLAMEKISDNLKPIVKHYQCNAFYKRLDAALVLYMSRFALEYREGEVLATFAFLHSQNILPINTMEYIMGFGGPIIDCVTETIIYFKKESILADETSDQVIYQLGQLYSHYYFFKGHILVEQPDLEQTYRLIDHNMRDKLHHISKKIIANVNRIRPLTEDGCSLLTLHLLELLIFSKNSQKMPFRIGLDMTGNAVEQSLLEYRIRQHFSGNNSIQVEPYDEGKGFDMVIYQSHSRPYKAKLTYCLNKGASERELQEIDSLIYDN

SEQ ID NO: 561 - protein, 131 aa, Streptococcus agalactiae
GTGCTATCAGCTGGGCATGGTTCAGCTCTTCTTTATAGCCTACTTCATTTAGCTGGCTATGATTTATCAATTGATGATTTAAAACAATTTCGCCAAWGGGGATCAAAAACACCTGGACATCCAGAAGTTAA

SEQ ID NO: 562 - protein, 43 aa, Streptococcus agalactiae
  VARIANT 33: Xaa = Any Amino Acid
MLSAGHGSALLYSLLHLAGYDLSIDDLKQFRQXGIKNTWTSRS

SEQ ID NO: 563 - protein, 992 aa, Streptococcus agalactiae
ATGGCAATGGCTGAAGCTCATTTGGCTGCTAAATTTAATAAACCAGGCTTTGATTTAGTTGATCATTACACTTATACACTTCATGGTGATGGTTGTTTGATGGAGGGTGTTAGCCAAGAAGCTGCCAGTCTTGCTGGACACTTAAAACTTGGTAAATTGGTCCTTCTTTATGATTCAAATGATATCTCACTTGATGGTCCAACATCTCAATCATTTACAGAAGATGTTAAAGGACGTTTTGAATCATATGGTTGGCAACATATCTTAGTTAAAGATGGTAATGATTTAGAAGCGATTGCTGCAGCAATTGAAGCTGCTAAAGCTGAAACTGATAAACCAACCATTATTGAAGTTAAAACTATTATTGGATTTGGCGCAGAGAAACAGGGAACATCTTCAGTTCATGGAGCGCCACTTGGTGCAGAAGGTATTACTTTTGCCAAGAAGGCTTATGGATGGGAATATCCAGACTTTACTGTTCCTGCTGAAGTTGCAGATCGATTTGCCTCAGATCTTCAAGCGCGTGGTGCGAAGGCAGAAGAGGCATGGAATGATCTTTTTGCTAAATATGAAGTTGAGTATCCAGAATTAGCAACTGAATACAAAGAAGCTTTTGCTGGCCAAGCTGAGACAGTTGAACTGAAAGCTCATGACCTAGGTTCATCAGTGGCTAGTCGTGTTTCAAGCCAACAAGCTATTCAACAATTATCGACTCAATTACCGAACCTCTGGGGAGGGTCAGCAGACCTCTCAGCTTCTAATAACACAATGGTAGCAGCAGAAACAGATTTCCAAGCAAGTAACTACGCTGGGCGTAATATTTGGTTTGGTGTACGTGAATTTGCAATGGCTGCTGCAATGAATGGAATTGCGCTTCACGGTGGGACTCGTGTTTATGGGGGTACGTTCTTTGTCTTCTCAAACTACTTGTTACCAGCAGTACGTATGGCTGCACTTCAAAACTTGCCAACTGTCTATGTTATGACACATGA

SEQ ID NO: 564 - protein, 330 aa, Streptococcus agalactiae
MAMAEAHLAAKFNKPGFDLVDHYTYTLHGDGCLMEGVSQEAASLAGHLKLGKLVLLYDSNDISLDGPTSQSFTEDVKGRFESYGWQHILVKDGNDLEAIAAAIEAAKAETDKPTIIEVKTIIGFGAEKQGTSSVHGAPLGAEGITFAKKAYGWEYPDFTVPAEVADRFASDLQARGAKAEEAWNDLFAKYEVEYPELATEYKEAFAGQAETVELKAHDLGSSVASRVSSQQAIQQLSTQLPNLWGGSADLSASNNTMVAAETDFQASNYAGRNIWFGVREFAMAAAMNGIALHGGTRVYGGTFFVFSNYLLPAVRMAALPKLANCLCYDT

SEQ ID NO: 565 - protein, 575 aa, Streptococcus agalactiae
ATGAGCCAAWWRRAMMAWTAGCATCAGTGCGCTCAATGCCTAATTTGAACGTTATCCGTCCCGCAGACGGTAATGAAACAAACGCTGCATGGCAACGAGCTGTATCAGAGACAGATCGACCAACGATGCTTGTTTTAACACGTCAAAACTTACCAGTTCTTGAAGGAACATCAGAATTAGCCCAAGAAGGGGTTAATAAAGGTGCTTATATTTTATCAGAAGCTAAAGGTGAACTTGATGGTATCATCATTGCAACAGGTTCAGAAGTTAAATTAGCTTTAGATACTCAAGACAAACTTGAGTCAGAGGGCATCCATGTTCGCGTCGTATCTATGCCAGCACAAAACATTTTTGATGAACAAGAGGCTTCATATCAAGAGCAAGTGCTTCCATCAGCTGTTACAAAACGTCTTGCTATTGAGGCAGGATCAAGCTTCGGTTGGGGTAAATATGTTGGTTTAAATGGGCTAACACTTACTATTGATACTTGGGGAGCATCAGCACCAGGTAACAGAATTTTCGAAGAGTATGGCTTTACAGTTGAGAATGCTGTATCGCTATATAAAGAACTTTAA

SEQ ID NO: 566 - protein, 191 aa, Streptococcus agalactiae
  VARIANT 4, 5, 6: Xaa = Any Amino Acid
MSQXXXLASVRSMPNLNVIRPADGNETNAAWQRAVSETDRPTMLVLTRQNLPVLEGTSELAQEGVNKGAYILSEAKGELDGIIIATGSEVKLALDTQDKLESEGIHVRVVSMPAQNIFDEQEASYQEQVLPSAVTKRLAIEAGSSFGWGKYVGLNGLTLTIDTWGASAPGNRIFEEYGFTVENAVSLYKEL

SEQ ID NO: 567 - protein, 312 aa, Streptococcus agalactiae
TTGTTTATGAAGAAGGAGTGTCGTGATTTTTATCGGCAGATACAGCATACTTACAATGATATATCTGTCCGTGAAGATGCAGTGCTATCATCAATACTATTATCAGCATCGAATGGTTTGATAAAAACTAGCGATGTACCTCGTGTTGCTTATGAGTTAACTCAGCAATTGGAAAATAATGAGATAGAAAAATCTTTCGAGTCATTAGCTACAGTTAAGGAATTGAAAAAATCTGCTAAAAAATTGTCTGAGAGATATGAGCAAAATAAGGTAACAACGGGATTGCTTTCTAAAGTATTTGGAAATCATTAG

SEQ ID NO: 568 - protein, 103 aa, Streptococcus agalactiae
MFMKKECRDFYRQIQHTYNDISVREDAVLSSILLSASNGLIKTSDVPRVAYELTQQLENNEIEKSFESLATVKELKKSAKKLSERYEQNKVTTGLLSKVFGNH

SEQ ID NO: 569 - protein, 750 aa, Streptococcus agalactiae
ATGATTAAGTTTGAACATGTTTCGAAAGTATACGGAGAAAAAGAAGCTCTCAGTGATTTAACCCTCTCTGTTAAAGATGGTGAGATTTTTGGATTAATAGGTCACAATGGAGCAGGAAAAACAACGACAATTAGTATTCTAACATCTATTATTGATGCAACTTATGGCCAAGTCTATATTGATGACCTACTTTTGACAGAACATCGTGACCAAATTAAGAAAAAAATAGGTTATGTACCGGACTCGCCAGATATTTTCTTAAATTTAACCGCAGAGGAATACTGGTACTTTTTAGCTAAAATTTATGACGTTGCCCCAGAAGATATTGAAGCACGTATCACAAAATTGGTAGACATATTTGAACTAGAGGAGCAACGCTATAATCCTATTGAAAGTTTTTCACATGGTATGCGTCAAAAAGTCATTGTTATAGGTGCCCTTCTTCCAAATCCTGACATTTGGATTCTAGATGAGCCGTTAACTGGTTTAGACCCTCAAGCTTCTTTTGATTTGAAAGAAATGATGAAAGAACATGCTAAAAATGGAAAAACAGTTATTTTTTCAACACATGTCTTAGCAGTTGCAGAACAGTTATGCGACAGAATAGGTATTTTGAAACAAGGGAAATTAATCTTTGTCGGTAGCTTAGGTGAGTTAAAAATGAAATATCCMGATAAAGAGATTTGGAACTATCTATTTGGAATTAGCAGGACGTCAGCTAGTAGGGAGGNNNNNCATTCCATTCATTAA

SEQ ID NO: 570 - protein, 249 aa, Streptococcus agalactiae
  VARIANT 244, 245: Xaa = Any Amino Acid
MIKFEHVSKVYGEKEALSDLTLSVKDGEIFGLIGHNGAGKTTTISILTSIIDATYGQVYIDDLLLTEHRDQIKKKIGYVPDSPDIFLNLTAEEYWYFLAKIYDVAPEDIEARITKLVDIFELEEQRYNPIESFSHGMRQKVIVIGALLPNPDIWILDEPLTGLDPQASFDLKEMMKEHAKNGKTVIFSTHVLAVAEQLCDRIGILKQGKLIFVGSLGELKMKYPDKEIWNYLFGISRTSASREXXHSIH

SEQ ID NO: 571 - DNA, 327 bp, Streptococcus agalactiae
atgcgtcaaaaagtcattgttataggtgcccttcttccaaatcctgacatttggattctagatgagccgttaactggtttagaccctcaagcttcttttgatttgaaagaaatgatgaaagaacatgctaaaaatggaaaaacagttattttttcaacacatgtcttagcagttgcagaacagttatgcgacagaataggtattttgaaacaagggaaattaatctttgtcggtagcttaggtgagttaaaaatgaaatatccagataaagatttggaaactatctatttggaattagcaggacgtcaagctagtagggagggataa

SEQ ID NO: 572 - protein, 108 aa, Streptococcus agalactiae
MRQKVIVIGALLPNPDIWILDEPLTGLDPQASFDLKEMMKEHAKNGKTVIFSTHVLAVAEQLCDRIGILKQGKLIFVGSLGELKMKYPDKDLETIYLELAGRQASREG

SEQ ID NO: 573 - DNA, 1605 bp, Streptococcus agalactiae
atgaattggtcacgtatctgggaactcgtaaaaattaatatcctttattcaaaccctcagactctatcggcactaagaaaaaagcaagaaaaacatcctaaaaaagaattttcagcttataaatccatgtttagaaatcagttatttcagattttgctcttttcaataatttatgtatttctctttgtatcacttgattttaaagaatatccgggctacttcacgttctacattggtatctttacactagtatccattatctactcttttattgcgatgtacagtgttttctatgagagtgacgatgttaaacaatatgcttatttgcctattaaatctgaagagctctatgttgctaaaatttttgcaacatttgggatgtctgtaacttttctaatgccaatcctaaccttaatgattgtggcttattggcgtataataggtggcccacttgcggtcctcctagcaatcataaattttgctattttatttttatcggtaacggtgatttcattgtatattaatagtttaataggccgtgccattattcgaagtgctaatcggaaacttatttctactatattaatttcactagctacatttggagcaatagttcccttattatttgtgaatatgacgagtcaaaagatggtacaagggaaattacaagatatcgctccaatcccttatgtcagaggttattatgatattgttacagcgccatttagtatggagagtctcctcaactattatctcccgctcttaatcattttattcttgataggtgctatttataaatgggttatgccacgctactatcaggagttgttgtatggacaggtcaagcagagaaaagtccatcgtcaaatcgattttagtaaacgtgagtcaattaataaaactcttgttaaacaccatttatcaagtttacaaaatgcgacattattgacaaatacatttttaatgccactattatatctagcaatgttcattgttccaattttgaataatggtaaagagattggtcgattttttaatgaaaattattttgggatagcttttctagcaggaatattaataggtagtttatgtgtgatgccagctagcattgtaggggtaggtatttctttagaaaaaagtaatttctactttataaaaagtttgcctatatcattttcgtatttcttgaagcataaatttgtaactttgataaccttacaacttgcagttcctacttttatttatttcttggtaggattctttctacttaaactatcaatcctcgttttattgagcttcattttaggtctagtcttcatgggacttatcgaaggccagtttatttatagacgtgactataaacatttgttcttgaattggcaagaggttacgcaactatttaatagagggttaggccaatggctgttagttggttcattgtttggaatgatgataataggtagttttcttattggaataagtattttttggtcaatggtatggaatactgtagctgtcaatatcataatccttatcattgggttgctcatattatcaatttgccaatacttactgctaaaaaatttttggaagaagcttgtttag

SEQ ID NO: 574 - protein, 534 aa, Streptococcus agalactiae
MNWSRIWELVKINILYSNPQTLSALRKKQEKHPKKEFSAYKSMFRNQLFQILLFSIIYVFLFVSLDFKEYPGYFTFYIGIFTLVSIIYSFIAMYSVFYESDDVKQYAYLPIKSEELYVAKIFATFGMSVTFLMPILTLMIVAYWRIIGGPLAVLLAIINFAILFLSVTVISLYINSLIGRAIIRSANRKLISTILISLATFGAIVPLLFVNMTSQKMVQGKLQDIAPIPYVRGYYDIVTAPFSMESLLNYYLPLLIILFLIGAIYKWVMPRYYQELLYGQVKQRKVHRQIDFSKRESINKTLVKHHLSSLQNATLLTNTFLMPLLYLAMFIVPILNNGKEIGRFFNENYFGIAFLAGILIGSLCVMPASIVGVGISLEKSNFYFIKSLPISFSYFLKHKFVTLITLQLAVPTFIYFLVGFFLLKLSILVLLSFILGLVFMGLIEGQFIYRRDYKHLFLNWQEVTQLFNRGLGQWLLVGSLFGMMIIGSFLIGISIFWSMVWNTVAVNIIILIIGLLILSICQYLLLKNFWKKLV

SEQ ID NO: 575 - DNA, 1386 bp, Streptococcus agalactiae
atgtctagagaatacatcaccttgtcaaaaaatatcatcaaacaccttggtggacaaaataatattaacaatgtttaccattgtcaaacacgccttcgctttagtctcaatgatccgacgaaagtaaaccttgagcaattaaaaactttaaaagaggtaaaaactgtcgttatcagcggagggcaacatcagatagtgatagggactcatgtcgcaaaagtgtttgaagaaattaactccctcattgaaactaactcaacgactaaaatagaacaaaccaaaaaagccaaagcagttagtcgaattattgattttgtttctgggactttccaaccgattttacctgctttatcaggcgctggtatgattaaggcattgctagctttattactagtattcaaaatcttgacaccgtcatctcaaacatatatattactaaatctttttgcagatggtgttttctattttttacctatcttaatcgccatcacagctgctcaaaaattgaaagctaatcctattttagctttgggaactgttgtcatgctccttcaccctaattgggctaatttagtagcttctggtaaaccagtatccttattccatacgatcccattcacacttactaactatgcatcaagtgtcattcccattattctaattatttgtgttcaggcttatatagaaaaatatttaaagcaaattattcctaaatcactgcgtttagtgcttgttcctatgttaatatttctcagcatgggaattttgtcgttctctatattgggaccaatgggtactatcgctggccaatatttagctgttatttttacttttttatccaaatacgccagttgggcacctgcttttctagtaggagcatttgctcctatcctaatcatgtttggtgttcatagtggaattgctgcattaggaatcacacaactagcgaaattaggggttgattctatttttggaccaggcatgctctgctcaaatatcgcacaagcaactgcaggtacagtggtgactcttataacaaaagaaaaaaaacttaaagaaattgctggacctgctgccataacagcttatatgggaatcaccgaacctatcttatatggtgtcaaccttccgaaacgttatcctctaatagcctcacttattggtggtggtcttggaggactctatgccggtataatgaacgctcaccgcttcgctgtaggctcttctggtctaccaggtctgtttctttatatcagtcatacttcaacacatctttttattaccatgcttattgcagttatcattactgtaagcacaactgctatattgacattcattctagcacaatattacgaaaaacaagttagcatcagacaaagagactag

SEQ ID NO: 576 - protein, 461 aa, Streptococcus agalactiae
MSREYITLSKNIIKHLGGQNNINNVYHCQTRLRFSLNDPTKVNLEQLKTLKEVKTVVISGGQHQIVIGTHVAKVFEEINSLIETNSTTKIEQTKKAKAVSRIIDFVSGTFQPILPALSGAGMIKALLALLLVFKILTPSSQTYILLNLFADGVFYFLPILIAITAAQKLKANPILALGTVVMLLHPNWANLVASGKPVSLFHTIPFTLTNYASSVIPIILIICVQAYIEKYLKQIIPKSLRLVLVPMLIFLSMGILSFSILGPMGTIAGQYLAVIFTFLSKYASWAPAFLVGAFAPILIMFGVHSGIAALGITQLAKLGVDSIFGPGMLCSNIAQATAGTVVTLITKEKKLKEIAGPAAITAYMGITEPILYGVNLPKRYPLIASLIGGGLGGLYAGIMNAHRFAVGSSGLPGLFLYISHTSTHLFITMLIAVIITVSTTAILTFILAQYYEKQVSIRQRD

SEQ ID NO: 577 - DNA, 804 bp, Streptococcus agalactiae
atgaaaagacattttgagacaactagaagaattgttattaaagtaggaaccagttccctcgtacagacaagcgggaaaattaatttaagtaaaatagaccatttagcatttgttatttctagtcttatgaatagaggcatggaggtgattttagtatcatctggtgctatggggtttggtttagacattttgaaaatggataagcgtcctcaagaaatatcacaacaacaagcagtttctagcgtaggacaagtagccatgatgagtctttattctcagatattttcgcactatcaaactcatgtttcccaaattttattaacacgtgacgttgtggtttttccagagagtttgcaaaatgtaacaaactcttttgagagtctgctctctatgggaattttgccaatcgtcaatgagaatgatgctgtcagcgtggatgagatggatcataaaacgaagtttggggataatgaccgtctctctgctgtcgttgctaaaattactaaagcagatttattaattatgctgtcagatattgatggtctttttgataaaaatcctaatatttatgatgatgctgttttacgtagtcatgtttctgaaatcaccgatgacatcatcaagtcagctggaggagcaggaagtaaatttggtactgggggcatgcttagtaaaattaaaagtgcacaaatggtgtttgataacaatggacaaatgatattgatgaatggcgccaatcctcgtgatattttaaaggtgttagatgggcataatattggaacttattttgctcaaggaaagtga

SEQ ID NO: 578 - protein, 267 aa, Streptococcus agalactiae
MKRHFETTRRIVIKVGTSSLVQTSGKINLSKIDHLAFVISSLMNRGMEVILVSSGAMGFGLDILKMDKRPQEISQQQAVSSVGQVAMMSLYSQIFSHYQTHVSQILLTRDVVVFPESLQNVTNSFESLLSMGILPIVNENDAVSVDEMDHKTKFGDNDRLSAVVAKITKADLLIMLSDIDGLFDKNPNIYDDAVLRSHVSEITDDIIKSAGGAGSKFGTGGMLSKIKSAQMVFDNNGQMILMNGANPRDILKVLDGHNIGTYFAQGK

SEQ ID NO: 579 - DNA, 1254 bp, Streptococcus agalactiae
atgacgtatattgaaatattagggcaaaatgctaaaaaagctagtcaatcagtagcacgattaagtacagctagtaaaaatgagatactcagggacttagcgagaaacatagtggctgatactgaaaccattttgactgagaatgctcgcgatgttgttaaggcaaaagataatggtatctcagaaattatggtggaccgtctacgactaaacaaagaccgcatacaggcgatagcaaacggtatttatcaggtagcagatttggcagatccgattggtcaagttgttagtggttatacaaatttagatggtttaaaaatccttaaaaaaagagtgcctttaggggttattgcaatgatatttgaaagtcgtcccaatgtatcggtggatgcctttagtttagcttttaaaacagggaacgctattattttgcgtggtggtaaagatgctattttttcaaatactgccttggttaattgtatgcgccaaacattgcaagatacaggccacaacccagatatagtacaattagttgaagatactagtcacgttgtagcagaggagttaatgcaggcaacagactacgtggacgtcttaattccaagaggtggtgcaaaattaattcaaacggtgaaggaaaagtcaaagattcctgttatcgaaacaggtgttggaaatgttcatatctatattgatgaatttgcagatttagatatggcagctaagattgttattaatgctaaaacccaacgccctagtgtctgtaatgctgccgaagggttagttgttcatcaagctattgctaagggatttttatctcaattggagaaaatgctcaaagaatcgaaccagtcagttgaatttcgtgccgatgaggaagctttgcaacttttagaaaatgctgttgctgcaagtgagtctgattatgctactgaatttttagactatattatgtcagtaaaagtagtagattcttttgaacaagcaattagctggattaataaatacagtagtcatcactcagaagctatcattactaataatatcagtagggcagaaatttttcaggatatggtagatgcagcggcagtttatgttaatgcttcaacacgttttacagatggtttcgtttttggactcggagcagagattggtatttcgactcaaaaattacacgcgcgtggaccgatgggattagaagctttaacaagtacaaaatactatattaatggaactggtcaagtaagggaatag

SEQ ID NO: 580 - protein, 417 aa, Streptococcus agalactiae
MTYIEILGQNAKKASQSVARLSTASKNEILRDLARNIVADTETILTENARDVVKAKDNGISEIMVDRLRLNKDRIQAIANGIYQVADLADPIGQVVSGYTNLDGLKILKKRVPLGVIAMIFESRPNVSVDAFSLAFKTGNAIILRGGKDAIFSNTALVNCMRQTLQDTGHNPDIVQLVEDTSHVVAEELMQATDYVDVLIPRGGAKLIQTVKEKSKIPVIETGVGNVHIYIDEFADLDMAAKIVINAKTQRPSVCNAAEGLVVHQAIAKGFLSQLEKMLKESNQSVEFRADEEALQLLENAVAASESDYATEFLDYIMSVKVVDSFEQAISWINKYSSHHSEAIITNNISRAEIFQDMVDAAAVYVNASTRFTDGFVFGLGAEIGISTQKLHARGPMGLEALTSTKYYINGTGQVRE

SEQ ID NO: 581 - protein, 897 aa, Streptococcus agalactiae
ATGCTTGATATTAAGCCGGATGGTATCTATGTAGATGCTACTTTAGGTGGGGCAGGACACAGCGAATATCTTCTTTCACAATTAGGCCCAGATGGGCACCTTTACGCATTTGACCAAGACCAGAAGGCTATTGACAATGCTCATATACGTTTAAAGAAATATGTGGATACCGGTCAAGTAACCTTTATCAAAGATAATTTCAGAAATCTATCTTCTAACTTAAAAGCATTAGGAGTGTCGGAAATTAATGGTATTTGTTATGATTTAGGTGTATCAAGCCCACAGCTGGACGAGCGTGAACGCGGTTTCTCATATAAACAAGACGCCCCCCTTGATATGCGAATGAATAGAGAGCAGAGTCTTACAGCTTATGACGTTGTGAACACTTATAGTTATCATGATTTAGTAAGGATTTTCTTTAAGTATGGCGAAGATAAATTTTCAAAACAAATTGCTCGAAAAATTGAGCAAGTACGAGCTGAAAAAACAATATCTACAACAACAGAATTGGCTGAGATTATCAAATCGTCTAAATCTGCCAAAGAACTGAAGAAAAAAGGTCACCCAGCTAAACAAATTTTTCAAGCTATTCGTATTGAAGTCAATGACGAACTAGGAGCTGCAGATGAATCTATACAACAAGCAATGGACTTATTAGCTGTTGATGGTCGTATATCTGTCATCACTTTTCATTCTTTAGAAGATCGTCTTACTAAGCAACTTTTTAAAGAAGCATCAACAGTAGAAGTACCTAAAGGTCTTCCTTTTATACCAGATGATTTACAACCTAAGATGGAGCTCGTTAATCGTAAACCCATCTTACCAAGTCAAGAAGAACTAGAAGCGAACAATCGTGCCCATTCAGCGAAATTGAGAGTAGCGCGTCGTATTCGATAA

SEQ ID NO: 582 - protein, 298 aa, Streptococcus agalactiae
MLDIKPDGIYVDATLGGAGHSEYLLSQLGPDGHLYAFDQDQKAIDNAHIRLKKYVDTGQVTFIKDNFRNLSSNLKALGVSEINGICYDLGVSSPQLDERERGFSYKQDAPLDMRMNREQSLTAYDVVNTYSYHDLVRIFFKYGEDKFSKQIARKIEQVRAEKTISTTTELAEIIKSSKSAKELKKKGHPAKQIFQAIRIEVNDELGAADESIQQAMDLLAVDGRISVITFHSLEDRLTKQLFKEASTVEVPKGLPFIPDDLQPKMELVNRKPILPSQEELEANNRAHSAKLRVARRIR

SEQ ID NO: 583 - protein, 327 aa, Streptococcus agalactiae
ATGACAAATGAAAAACGAACTGAAGCAGTAACACAAACTTTACAACGTCACATCAAGACTTTCTCTCGTATTGAGAAAGCTTTTTATGGTGCTATTGTAATTACTGCTATTATCATGGCAGTCGGTATTATTTACTTGCAAAGTAATAGTTTACAAGTTAAACAAGAAGTAAATCAATTAAATAGTAAAATCAACGATAAACAGACAGAATTTGACAATGCTAAACAAGAAGTAAATGAGCTTTCTAATCGTGATCGAATTACTAAAATTGCTAAAGATGCTGGTTTAACAATTCAAAACGACAATATTTATCGGAAGGTGGACTAG

SEQ ID NO: 584 - protein, 108 aa, Streptococcus agalactiae
MTNEKRTEAVTQTLQRHIKTFSRIEKAFYGAIVITAIIMAVGIIYLQSNSLQVKQEVNQLNSKINDKQTEFDNAKQEVNELSNRDRITKIAKDAGLTIQNDNIYRKVD

SEQ ID NO: 585 - protein, 2259 aa, Streptococcus agalactiae
GTGACTTTTTTTAAAAAGCTAAAAAAAATCTTCCTTGATTATGTGATCCATATAAGAGATAGGCGTTCGCCGCAGAAAAATAGGGAAAGAGTAGGTCAAAATCTGATGATTTTAACCATTTTCCTATTTTTCATTTTTATCATCAACTTTGTCATCATCGTTGGTACAGATAGTAAATTTGGGGTTAATTTATCCAAGGAAGCCAAGAAAGTCTATCAACAAAGTATGACAGTACAGGCGAAGCGTGGGACAATTTACGACCGTAATGGAAATCCTATCGCTGAGGATGCTACGACCTATAGTCTCTACGCTATTATCTCAAAGAACTATACGACAGCTACAGGTCAAAAACTATATGTACAACCTTCTCAGTATGAAAAAGTAGCTAGTATCTTAGAGAATAAATTGGGCATGAAGAAAAATCTTGTCCTAAAACAACTCAATCAAAAGAAATTGTTTCAAGTTTCCTTTGGAAGTTCAGGTTCAGGATTGTCTTATACCAAGATGGCTGACATCAAGAAAACGATGGAAAAGTCAGATATCAAAGGAATTGGTTTTTCTACCAGTCCGGGGCGTATTTATCCAAATGGGATATTTGCTTCACAATTTATAGGATTTACTCTTCCTCAGGATGATGGAGATGGAAAAAAATTAGTTGGTAATACAGGCCTTGAAGCGGCACTTAACAAGGTATTATCAGGTACTGATGGTAAAGTAACATACGAAAAAGACCGTAGTGGGAATGTTCTTTTAGGTACTGCAACAACAGAACGTAGGGCGGTTAATGGTAAGGATATCTACACAACTTTATCAGAGCCTATTCAGACTGTTTTAGAGACTCAGATGGATGTTTTCGCAGAAAAAACCAAAGGAAAATTTGCGAGTGCTACAGTTGTCAACGCTAAAACGGGTGAAATTCTAGCAACGAGTCAGCGTCCTACTTATAATCCTTCTACCCTTAAAGGTTACGATAAGAAAAATTTGGGTACCTATAACACACTACTATATGATAACTTTTTTGAACCTGGTTCAACAATGAAGGTAATGACTCTAGCCTCTGCAATTGATTCTAAGCATTTTAACTCTACTGAAGTGTATAACAGTGCACAATATAAAATTGCAGATGCGATTATTCGAGATTGGGATGTCAATGAAGGGTTATCATCTGGTAGTTATATGACTTTTCCACAAGGGTTTGCACATTCCAGTAACGTTGGTATGGTAACCTTGGAACAAAAAATGGGACGAGATAAATGGTTAAACTATCTTTCTAAGTTTAAATTTGGTTACCCAACACGTTTTGGGATGCTTCATGAAAGTGGAGGTTTGTTCCCATCTGACAATGAAGTAACTATCGCTATGAGCTCATTTGGTCAAGGTATTGGTGTAACGCAAGTTCAAATGTTGCGCGCATTTACGTCTATCTCGAATGATGGTGTTATGTTACAACCACAGTTTATTAGCAGTATTTATGATCCAAATACAGGGACTTCTCGTACAGCACGAAAAGAAGTCGTTGGAAAACCAGTTTCCAAAGAAGCAGCTAGTAAAACACGTGATTATATGGTTACTGTTGGGACAGATCCTTATTATGGTACATTATACGCAGCAGGTGCCCCAGTTATTCAGGTGGGGAATCAATCAGTTGCAGTAAAATCTGGTACTGCCCAAATCGCCCAGGAAGGTGGTGGTGGTTATCTGCAAGGAAAAAATGATACTATTAACTCAGTTGTGGCTATGGTGCCATCGGAAAATCCTGACTTCATCATGTATGTTACCATCCAACAACCCGAAAAATTTAGTATCACATTCTGGAAAGATGTTGTTAATCCTGTTTTAGAACAAGCAACAGCAATGAAAGAAACGATATTAAAACCGGGATTGAATGACTCAGAACATCAGACAAAATATAAACTATCAAAAATAGTTGGTGAAAATCCAGGTCATGTAGCGGAAGAATTACGTCGTAATCTGGTTCAGCCAATTATTTTAGGAAATGGTAGTAAAGTTTCTAAAGTATCTAAAAGACCAGGAGCTAATCTTGCTGAGAATGAACAGCTACTAGTATTAACAAATAAACTGACTGAATTACCTGATATGTATGGTTGGTCTAAAGCAAACGTTGAACAGTTTGCTAAATGGACAGGTATAAAAGTGACCTATAAAGGTTCAACCTCAGGTAAAGTAAGAAAACAAAGTATTGATGTTGGAAAATCCATCAATAAAATTAAAAAAATCAAAATTACAATAGGAGATTAA

SEQ ID NO: 586 - protein, 752 aa, Streptococcus agalactiae
MTFFKKLKKIFLDYVIHIRDRRSPQKNRERVGQNLMILTIFLFFIFIINFVIIVGTDSKFGVNLSKEAKKVYQQSMTVQAKRGTIYDRNGNPIAEDATTYSLYAIISKNYTTATGQKLYVQPSQYEKVASILENKLGMKKNLVLKQLNQKKLFQVSFGSSGSGLSYTKMADIKKTMEKSDIKGIGFSTSPGRIYPNGIFASQFIGFTLPQDDGDGKKLVGNTGLEAALNKVLSGTDGKVTYEKDRSGNVLLGTATTERRAVNGKDIYTTLSEPIQTVLETQMDVFAEKTKGKFASATVVNAKTGEILATSQRPTYNPSTLKGYDKKNLGTYNTLLYDNFFEPGSTMKVMTLASAIDSKHFNSTEVYNSAQYKIADAIIRDWDVNEGLSSGSYMTFPQGFAHSSNVGMVTLEQKMGRDKWLNYLSKFKFGYPTRFGMLHESGGLFPSDNEVTIAMSSFGQGIGVTQVQMLRAFTSISNDGVMLQPQFISSIYDPNTGTSRTARKEVVGKPVSKEAASKTRDYMVTVGTDPYYGTLYAAGAPVIQVGNQSVAVKSGTAQIAQEGGGGYLQGKNDTINSVVAMVPSENPDFIMYVTIQQPEKFSITFWKDVVNPVLEQATAMKETILKPGLNDSEHQTKYKLSKIVGENPGHVAEELRRNLVQPIILGNGSKVSKVSKRPGANLAENEQLLVLTNKLTELPDMYGWSKANVEQFAKWTGIKVTYKGSTSGKVRKQSIDVGKSINKIKKIKITIGD

SEQ ID NO: 587 - protein, 1011 aa, Streptococcus agalactiae
ATGTTTTTAAGTATAATGGCAGGTGTCATAGCATTTGTCCTGACAGTTATTGCCATTCCGCGCTTCATTAAGTTTTACCAATTGAAGAAAATTGGCGGGCAACAAATGCATGAAGATGTCAAACAACATCTAGCCAAAGCAGGTACGCCGACAATGGGAGGAACGGTATTTTTGATTGTTGCTCTTCTTGTCTCACTTATTTTTAGTATTATTTTATCTAAAGAAAATAGTGGTAATTTAGGTGCAACTTTTGGTATTTTATCTGTTGTTCTCATCTATGGAATTATTGGTTTTTTAGATGATTTTTTGAAAATTTTTAAACAAATCAATGAGGGCTTGACTCCAAAGCAAAAAATGTCGCTCCAACTAATTGCGGGTCTAATTTTTTATTTTGTCCATGTGTTACCAAGTGGCACATCTGCGATAAATATTTTTGGTTTTTACCTTGAAGTAGGATACTTATACGCTTTTTTTGTTCTTTTCTGGGTTGTTGGTTTTTCAAATGCTGTGAACCTAACAGATGGAATTGATGGTCTAGCTTCTATTTCGGTTGTTATCAGTTTGATTACTTATGGAATCATTGCTTATAATCAAACGCAATTTGATATTTTATTGATTATCGTTATCATGATTGGTGCTTTACTTGGCTTTTTTGTCTTTAATCATAAACCAGCTAAAGTCTTTATGGGAGATGTTGGTTCACTTGCATTGGGTGCTATGTTAGCAGCCATTTCAATTGCCTTACGTCAGGAATGGACCTTGCTTTTTATCGGCTTTGTCTATGTTTTTGAGACGTCTTCAGTGATGTTGCAAGTAGCATACTTTAAGTATACTAAGAAGAAAACTGGTGTTGGGAAACGTATCTTCCGCATGACACCATTTCATCACCATTTAGAATTAGGTGGTGTGTCTGGCAAAGGTAATAAATGGAGCGAATGGAAAGTAGATGCTTTTTTATGGGCTATTGGTATTTTCATGAGCGCTATTACACTTGCTATTTTATATCTTTAA

SEQ ID NO: 588 - protein, 336 aa, Streptococcus agalactiae
MFLSIMAGVIAFVLTVIAIPRFIKFYQLKKIGGQQMHEDVKQHLAKAGTPTMGGTVFLIVALLVSLIFSIILSKENSGNLGATFGILSVVLIYGIIGFLDDFLKIFKQINEGLTPKQKMSLQLIAGLIFYFVHVLPSGTSAINIFGFYLEVGYLYAFFVLFWVVGFSNAVNLTDGIDGLASISVVISLITYGIIAYNQTQFDILLIIVIMIGALLGFFVFNHKPAKVFMGDVGSLALGAMLAAISIALRQEWTLLFIGFVYVFETSSVMLQVAYFKYTKKKTGVGKRIFRMTPFHHHLELGGVSGKGNKWSEWKVDAFLWAIGIFMSAITLAILYL

SEQ ID NO: 589 - protein, 1080 aa, Streptococcus agalactiae
ATGTCATTTAAAGATTTTAATTTTAAACCATACATTCAGAGGGCTCTCGATGAGTTAAAATTCGTCGATCCAACTGATGTTCAAGCTAAATTGATTCCAGTTGTTCGTTCAGGCCGCGATCTTGTGGGGGAATCGAAAACTGGTTCTGGTAAAACCCACACCTTTTTACTTCCTATTTTTGAGAAGCTAGATGAAAGTAGTGATGATGTTCAAGTTGTTATTACTGCACCAAGTAGAGAGTTGGGAACACAAATTTATCAGGCAACTAAACAAATTGCTGAGCATTCAGAGCAAGAAATACGGGTGGTTAACTATGTTGGTGGTACTGACAAATTACGTCAAATTGAAAAGTTGAAAGTAAGCCAACCTCATATTGTCATTGGAACCCCAGGACGAATTTATGATTTGGTGAAGTCAGGTGATTTAGCTATTCATAAGGCGCATACTTTTGTTGTTGATGAAGCAGATATGACTCTAGATATGGGATTTCTTGATACCGTTGATAAGATTGCAGGGTCTTTACCCAAGGATGTCCAAATTTTAGTCTTTTCAGCAACGATTCCACAAAAATTACAGCCATTTTTAAAGAAATATTTGACCAATCCTGTAATGGAAAAAATCAAAACAGCAACAGTTATCGCTGATACCATCGATAACTGGCTTTTGTCCACTAAAGGACGTGATAAAAATGCACAAATTTTGGAACTCTCTAAACTAATGCAGCCCTATCTTGCAATGATATTTGTTAATACGAAAGAGCGTGCAGACGAATTACATTCGTACCTTTCTAGTAATGGCTTAAAAGTAGCTAAAATTCATGGTGGGATTGCACCTCGTGAACGTAAACGTATTATGAATCAGGTTAAAAACCTCGAATTTGAATATATCGTTGCAACAGATTTAGCAGCGCGTGGTATTGATATTGAAGGTGTTAGCCATGTTATCAATGATGCCATACCTCAAGACCTATCTTTCTTTGTCCACCGTGTCGGTCGCACAGGCCGTAATGGCTTATCTGGTACTGCTATAACTTTATATCAGCCAAGTGACGATTCTGATATTCGTGAACTTGAAAACTAG

SEQ ID NO: 590 - protein, 359 aa, Streptococcus agalactiae
MSFKDFNFKPYIQRALDELKFVDPTDVQAKLIPVVRSGRDLVGESKTGSGKTHTFLLPIFEKLDESSDDVQVVITAPSRELGTQIYQATKQIAEHSEQEIRVVNYVGGTDKLRQIEKLKVSQPHIVIGTPGRIYDLVKSGDLAIHKAHTFVVDEADMTLDMGFLDTVDKIAGSLPKDVQILVFSATIPQKLQPFLKKYLTNPVMEKIKTATVIADTIDNWLLSTKGRDKNAQILELSKLMQPYLAMIFVNTKERADELHSYLSSNGLKVAKIHGGIAPRERKRIMNQVKNLEFEYIVATDLAARGIDIEGVSHVINDAIPQDLSFFVHRVGRTGRNGLSGTAITLYQPSDDSDIRELEN

SEQ ID NO: 591 - DNA, 846 bp, Streptococcus agalactiae
  misc_feature 12, 13, 14, 15, 16: n = A,T,C or G
atgaatgaatgnnnnnggtctttacccaaggatgtcctaattttagtcttttcagcaacgattccacaaaaattacagccatttttaaagaaatatttgaccaatcctgtaatggaaaaaatcaaaacagcaacagttatcgctgataccatcgataactggcttttgtccactaaaggacgtgataaaaatgcacaaattttggaactctctaaactaatgcagccctatcttgcaatgatatttgttaatacgaaagagcgtgcagacgaattacattcgtacctttctagtaatggcttaaaagtagctaaaattcatggtgggattgcacctcgtgaacgtaaacgtattatgaatcaggttaaaaacctcgaatttgaatatatcgttgcaacagatttagcagcgcgtggtattgatattgaaggtgttagccatgttatcaatgatgccatacctcaagacctatctttctttgtccaccgtgtcggtcgcacaggccgtaatggcttatctggtactgctataactttatatcagccaagtgacgattctgatattcgtgaacttgaaaaactaggtattaattttattcctaaagtcattaaaaacggtgaatttcaagatacatacgaccgtgatcgtcgtaataaccgtgaaaagtcctatcaaaaattagatacagaaatgattggacttgtgaaaaagaaaaagaaaaaaataaaaccaggttacaagaaaaaaattcaatggaaagttgatgaaaagcgtcgcaaagagcgtagagcaagtaatcgtgctaaggggcgtgcggagcgcaaagctaaaaaacaaagtttttaa

SEQ ID NO: 592 - protein, 281 aa, Streptococcus agalactiae
  VARIANT 4, 5, 6: Xaa = Any Amino Acid
MNEXXXSLPKDVLILVFSATIPQKLQPFLKKYLTNPVMEKIKTATVIADTIDNWLLSTKGRDKNAQILELSKLMQPYLAMIFVNTKERADELHSYLSSNGLKVAKIHGGIAPRERKRIMNQVKNLEFEYIVATDLAARGIDIEGVSHVINDAIPQDLSFFVHRVGRTGRNGLSGTAITLYQPSDDSDIRELEKLGINFIPKVIKNGEFQDTYDRDRRNNREKSYQKLDTEMIGLVKKKKKKIKPGYKKKIQWKVDEKRRKERRASNRAKGRAERKAKKQSF

SEQ ID NO: 593 - DNA, 813 bp, Streptococcus agalactiae
atgtttaaaaaaataatattatctattgcaactatagccgcaaccgccagcctagcagtatcagttcaggcgtcagagaaagtagaacttaaagtagctacagattctgacacggcaccatttacttatcaaaaagacgggaaattcaaaggttatgatgttgatgttgtcaaagctgtttttaaaggtagtaagtacaaagtaaccttcaagacagttccttttgatactatttcaacaggtattgatgcagggaaatttgatttatcagctaatgatttttcatacaataaagaaagagcagaaaaatatctcttctcagatcctatatcccgttcaaattatgccgtagtagggaagaaggggagccattacaaatcattaagtgacctctctggaaaatcaaccgaagttttatctggcgttaactatgcacaggttctagaaaattggaataaaaatcatcctaataaaaaaccaataaaaatcaaatatgtttctgggacaactggtgttactagcagattaaaaaatattgagagtgggaaaattgactttatcctatatgatgccatttcatccgactatattgtaaaagaccaatcattaaacttaagcgtttctcctttgaaaggtaaaattggtaataataaggatggactagaatacctccttttaccaaaagataaaaaaggtaaaactctacagaaatttataaataagcgtattaaagttttgaaagaaaatggtactttggcacgtttaagtaaacaatatttcggtggagattacgtttcaaacattgataaataa

SEQ ID NO: 594 - protein, 270 aa, Streptococcus agalactiae
MFKKIILSIATIAATASLAVSVQASEKVELKVATDSDTAPFTYQKDGKFKGYDVDVVKAVFKGSKYKVTFKTVPFDTISTGIDAGKFDLSANDFSYNKERAEKYLFSDPISRSNYAVVGKKGSHYKSLSDLSGKSTEVLSGVNYAQVLENWNKNHPNKKPIKIKYVSGTTGVTSRLKNIESGKIDFILYDAISSDYIVKDQSLNLSVSPLKGKIGNNKDGLEYLLLPKDKKGKTLQKFINKRIKVLKENGTLARLSKQYFGGDYVSNIDK

SEQ ID NO: 595 - DNA, 804 bp, Streptococcus agalactiae
atgaatcaatttatcttgacgggtggatggtcttggtataataatttggttagtcaggttccagcggggaaattatttagttggaaggctgttttagatgcaataccctcaattttagagcgattacccataacactattattgacagtagcaggagccttatttggactcattttagctttgatttttgcagtagtgaaaattaaccgtgtcaaaattttatatccgattcaagctttatttgttagttttttacgtgggactccaatacttgttcaattaatgctgagttattatggaattccacttttcttgaaatttttaaaccaaaaatatggttttgattggaacattaatgctataccggcttctgtatttgctattactgcatttgcttttaatgaagcggcttatacaagtgaaactatacgagcggcgattttgtcggttgatcaaggtgaaattgaggcagcacgtagtttagggatgacctcagcgcaagtttatcgtcgtgttattattccaaacgcagcagtagtcgcaacacctactttgataaacacgttaattggtctaactaagggaacctctttagcttttaatgctggtattgttgaaatgtttgcccaagcacaaattatgggtggtagcgattatcgctattttgaacgttatatctctgtggcacttgtttactgggcggttagtttcttaattgaacaattgggaaatgctattgaacgaaaaatggcaattaaggctccacgccatttaactgatgagattccaggaggagtacgctaa

SEQ ID NO: 596 - protein, 267 aa, Streptococcus agalactiae
MNQFILTGGWSWYNNLVSQVPAGKLFSWKAVLDAIPSILERLPITLLLTVAGALFGLILALIFAVVKINRVKILYPIQALFVSFLRGTPILVQLMLSYYGIPLFLKFLNQKYGFDWNINAIPASVFAITAFAFNEAAYTSETIRAAILSVDQGEIEAARSLGMTSAQVYRRVIIPNAAVVATPTLINTLIGLTKGTSLAFNAGIVEMFAQAQIMGGSDYRYFERYISVALVYWAVSFLIEQLGNAIERKMAIKAPRHLTDEIPGGVR

SEQ ID NO: 597 - DNA, 744 bp, Streptococcus agalactiae
atgataaaattgagacaattgactaaatcattttctggtcaaaaagtgttagacaaacttgatttagatattgaaaaaggtcaagttgttgctctagtaggtgcttcaggtgcaggaaaatcaacctttcttcgtagtatgaattatttagaagagcctgattatggaacaattgaaattgatgattttaaagttgattttaaatcaatcagtaaagatgacatactaacattacgccgtaagttagccatggtttttcaacaattcaatctatttgagcgtcgtacagctttggataatgtaaaagaaggtttgaaaattgtcaaaaagatgtcagatcaagaggcaacacggattgcaagagacgaactggcaaaggtcggacttgcagatcgtgaaaaatattatccaagacatttatcaggtggacagaaacaacgtgttgctttggcacgcgcattagccatgaaacctgatgttcttcttttagacgaaccgacatcagcacttgatccagaattagttggagaagttgaaaaatctattgcagatgctgctaagcaggggcaaaccatggtacttgttagtcatgatatgaattttgtttaccaagtagcagataaagttttatttttggaaaaaggtcgtattttagagtctgggacgcctgaacaattatttaaccatcctttagaagaacgtacaaaagaattcttcgctagttataacaaatcgtacctataa

SEQ ID NO: 598 - protein, 247 aa, Streptococcus agalactiae
MIKLRQLTKSFSGQKVLDKLDLDIEKGQVVALVGASGAGKSTFLRSMNYLEEPDYGTIEIDDFKVDFKSISKDDILTLRRKLAMVFQQFNLFERRTALDNVKEGLKIVKKMSDQEATRIARDELAKVGLADREKYYPRHLSGGQKQRVALARALAMKPDVLLLDEPTSALDPELVGEVEKSIADAAKQGQTMVLVSHDMNFVYQVADKVLFLEKGRILESGTPEQLFNHPLEERTKEFFASYNKSYL

SEQ ID NO: 599 - DNA, 249 bp, Streptococcus agalactiae
ttgacaatcgcttgttggatagagatgtttttagaaatagcaaaagtttatttacaaggtttagggcttgccagcataactgttattttagttggtataatttgggtcttttggcgtgccaagaaaaacatagataaaacagctagagaacgccaatctgttctttatgatgtccttctgatagctcttatgacagctccaatacttgcctttgcatttgtagctatcattttaatgataaaagcttag

SEQ ID NO: 600 - protein, 82 aa, Streptococcus agalactiae
MTIACWIEMFLEIAKVYLQGLGLASITVILVGIIWVFWRAKKNIDKTARERQSVLYDVLLIALMTAPILAFAFVAIILMIKA

SEQ ID NO: 601 - protein, 915 aa, Streptococcus agalactiae
ATGTATGATACTTTAATAATAGGTTCAGGTCCTGGTGGTATGACAGCAGCGCTTTACGCTGCACGTTCAAACCTTAAAGTTGGGTTAATTGAACAAGGTGCTCCAGGTGGACAGATGAATAATACTGCTGAAATTGAGAACTATCCAGGCTACGATCATATCTCAGGTCCAGAATTATCAATGAAGATGTATGAGCCGTTGGAAAAATTTGAAGTAGAGCATATTTATGGTATAGTTCAAAGAGTTGAGAACGATGGTGATGTAAAGCGTGTTATCACCGAAGATGAATCGTATGAAGCCAAAACAGTAATCCTTGCTACCGGAGCTAAAAACAGCCTTTTAGGAGTTCCGGGTGAAGAGGAATATACTAGTCGTGGCGTTTCTTACTGTGCGGTTTGTGATGGTGCATTTTTCCGTGATCAGGATCTTTTAGTTGTGGGTGGCGGTGATTCTGCTGTTGAAGAAGCTGTCTTCTTAACTCAATTTGCTAAAAGTGTTACTATTATTCACCGACGTGATCAATTGAGAGCTCAAAAAGTACTTCAAGACCGAGCTTTTGCTAACGAAAAAATAAAATTTGTATGGGATTCAGTGGTCAAAGAGATTAAAGGAAATGAGATTAAAGTATCTGGTGTAACTGTTGAAAATCTAAAGACTGGAGAAATCTCAGAGATGACTTTCGGAGGTGTTTTCATTTACGTTGGTTTGAAACCACATTCTAGCATGGTCTCAGAATTAGGTATTACGGACGAGACTGGCTGGGTCTTAACTGATACAAATATGAAAACATCAATTCCAGGACTATATGCTATTGGGGATGTTCGTCAAAAAGATCTACGTCAGATTGCGACTGCTGTTGGTGAAGGTGCTATCGCTGGACAGGGTGTCTATAACTATATAACTGAGCATTTCTAA

SEQ ID NO: 602 - protein, 304 aa, Streptococcus agalactiae
MYDTLIIGSGPGGMTAALYAARSNLKVGLIEQGAPGGQMNNTAEIENYPGYDHISGPELSMKMYEPLEKFEVEHIYGIVQRVENDGDVKRVITEDESYEAKTVILATGAKNSLLGVPGEEEYTSRGVSYCAVCDGAFFRDQDLLVVGGGDSAVEEAVFLTQFAKSVTIIHRRDQLRAQKVLQDRAFANEKIKFVWDSVVKEIKGNEIKVSGVTVENLKTGEISEMTFGGVFIYVGLKPHSSMVSELGITDETGWVLTDTNMKTSIPGLYAIGDVRQKDLRQIATAVGEGAIAGQGVYNYITEHF

SEQ ID NO: 603 - protein, 1461 aa, Streptococcus agalactiae
ATGTATAAAGACGATAGTTTAACACTACATACTGATTTATATCAAATCAATATGATGCAAGTTTATTTTAATAAAGGTATTCACAATAAAAGAGCGGTGTTTGAAGCTTACTTTCGCAAGGTTCCATTTGAAAATGGTTATGCTGTTTTTGCAGGTTTAGAGCGTATTGTTCGTTATTTAGAAAATCTGAGCTTTTCTGATAGTGATTTATCCTATTTAGAAGAGTTAGGTTATCCTGAAGAATTTTTAGATTACTTAAAAAATTTAAAAATGGAACTGACTGTCAAATCAGCCAAGGAAGGTGACCTTGTATTTGCTAATGAACCATTAGTTCAAATTGAAGGTCCTTTAGCACAATGTCAGTTAGTAGAGACAGCGATTTTAAATATCATCAACTACCAGACACTTGTTGCTACAAAAGCAGCTCGTATTCGTTCTGTTATTGAAGATGAACCGCTATTAGAGTTTGGGACACGACGTGCTCAAGAAATGGATGCAGCCATTTGGGGTACTAGGGCAGCGATTATTGGTGGTGCTAACGCAACGAGCAATGTTCGTGCTGGTAAAATCTTTAATATTCCAGTATCAGGAACGCATGCACATGCTTTAGTTCAAACTTATGGCGATGATTACCAGGCATTTAAAGCTTACGCAGAAACTCATAAAGATTGCGTCTTTTTAGTGGATACTTATGATACCCTTCGTGTAGGTGTGCCTAATGCTATTCGAGTTGCAAAAGAGATGGGCGAAAAGATTAATTTCTTGGGAGTTCGCCTTGATTCAGGTGATTTAGCTTATTTGTCTAAGAAAGTTCGTCAGCAGTTAGATGACGCCGGTTTTCCTAATGCAAAGATTTATGCTTCGAATGATCTAGATGAAAATACAATCCTCAACCTAAAAATGCAAAAAGCTAAAATTGATGTTTGGGGTGTCGGAACAAAATTAATTACAGCCTATGATCAGCCTGCGCTAGGTGCTGTTTATAAAATTGTTTCTATTGAGACTGACGCCGGTAGTATGCGAGATACAATTAAACTATCAAACAATGCTGAAAAAGTATCAACACCTGGGAAAAAGCAAGTTTGGCGTATCACCAGTCGAGCTAAAGGGAAATCTGAGGGTGATTACATCACATTTGCAGACACTGATGTGACACAATTAGATGAAATTGAAATGTTTCATCCAACTTATACTTATATCAATAAAACAGTCCGTGATTTTGACGCAGTACCCTTACTGGTAGATATCTTTGACAAAGGGAAATTAGTTTATCAATTACCAAGTCTTCAAGAAATTCAAGAGTACGGACGCAAAGAATTTGATCAGCTTTGGGATGAGTATAAACGTGTTCTGAATCCACAGGATTACCCAGTTGATTTGGCACGCGATGTTTGGCAAAATAAAATGGACCTGATTGATCGTATCCGTAAAGAAGCTTTGGCAAAAGGAGAAGTAAGATGA

SEQ ID NO: 604 - protein, 486 aa, Streptococcus agalactiae
MYKDDSLTLHTDLYQINMMQVYFNKGIHNKRAVFEAYFRKVPFENGYAVFAGLERIVRYLENLSFSDSDLSYLEELGYPEEFLDYLKNLKMELTVKSAKEGDLVFANEPLVQIEGPLAQCQLVETAILNIINYQTLVATKAARIRSVIEDEPLLEFGTRRAQEMDAAIWGTRAAIIGGANATSNVRAGKIFNIPVSGTHAHALVQTYGDDYQAFKAYAETHKDCVFLVDTYDTLRVGVPNAIRVAKEMGEKINFLGVRLDSGDLAYLSKKVRQQLDDAGFPNAKIYASNDLDENTILNLKMQKAKIDVWGVGTKLITAYDQPALGAVYKIVSIETDAGSMRDTIKLSNNAEKVSTPGKKQVWRITSRAKGKSEGDYITFADTDVTQLDEIEMFHPTYTYINKTVRDFDAVPLLVDIFDKGKLVYQLPSLQEIQEYGRKEFDQLWDEYKRVLNPQDYPVDLARDVWQNKMDLIDRIRKEALAKGEVR

SEQ ID NO: 605 - protein, 822 aa, Streptococcus agalactiae
ATGACTTTGCAAGATCAAATTATCAAAGAACTCGGTGTAAAACCTGTTATTAATCCAAGTCAAGAAATCCGTCGTTCCGTAGAATTTTTAAAAGACTATCTATTAAAACATAGTTTTCTAAAGACCTATGTACTGGGTATTTCAGGGGGGCAAGATTCAACTTTAGCAGGACGTCTAGCTCAACTAGCAGTTGAAGAGTTGCGTGCTGATACAGGGGAAAACTATCAATTTATAGCTATTCGTTTACCATATGGTATTCAGGCCGATGAAGAAGATGCACAAAAAGCATTAGATTTTATCAAGCCAGATATTGCTTTGACCATTAATATTAAAGAAGCTGTTGATGGCCAAGTTAGAGCTCTTAATGCAGCAGGAGTAGAGATTACAGACTTTAATAAAGGAAATATTAAAGCTCGTCAAAGAATGATTAGTCAATATGCAGTTGCAGGTCAATATGCTGGAGCGGTTATTGGTACTGATCATGCTGCAGAAAATATTACAGGTTTTTTCACCAAATTTGGTGATGGAGGTGCTGACTTATTACCTCTCTTTAGACTTAATAAAAGTCAGGGGAAACAGTTATTAGCTGAACTTGGTGCTGATAAAGCCTTGTACGAAAAGATTCCAACCGCAGATTTAGAAGAAAATAAACCAGGAATCGCTGATGAAATAGCCCTTGGAGTAACCTACCAAGAAATTGATGCTTATCTTGAAGGGAAGGTGGTTTCGGACAAGTCTCGAGGTATCATTGAAAATTGGTGGTATAAGGGTCAACATAAACGTCATCTTCCAATCACAATTTTTGATGATTTCTGGAAATAA

SEQ ID NO: 606 - protein, 273 aa, Streptococcus agalactiae
MTLQDQIIKELGVKPVINPSQEIRRSVEFLKDYLLKHSFLKTYVLGISGGQDSTLAGRLAQLAVEELRADTGENYQFIAIRLPYGIQADEEDAQKALDFIKPDIALTINIKEAVDGQVRALNAAGVEITDFNKGNIKARQRMISQYAVAGQYAGAVIGTDHAAENITGFFTKFGDGGADLLPLFRLNKSQGKQLLAELGADKALYEKIPTADLEENKPGIADEIALGVTYQEIDAYLEGKVVSDKSRGIIENWWYKGQHKRHLPITIFDDFWK

SEQ ID NO: 607 - protein, 1335 aa, Streptococcus agalactiae
ATGTCAAAATTAACTCAAACATTTACAGATAAGTTATTTGCTGATTACCAAGCAAATACAAAATTTAGCGCTATTGAAAATGCAGTAACTCACAATGGTTTATTGAAGTCTCTAGAGACTCGTCAAAGTGAGATTGAGAACGACTATGTCTTTTCAATTGATTTGACCAAAGATGAAGTTTCTAATCAGAAACAATCAGGACGTTGCTGGATGTTTGCTGCACTGAATACATTTCGTCATAAACTGATTTCAGATTTTAAACTTGAGAATTTTGAATTATCTCAGGCACATACATTTTTCTGGGATAAGTATGAAAAATCAAATTGGTTTATGGAACAAATTATTGCGACTGCAAATCAGGAATTGAGTAGTCGTAAGGTGAAATTCCTATTAGATGTACCTCAACAAGATGGAGGACAATGGGACATGGTGGTTGCTCTGTTTGAGAAATATGGTGTCGTTCCTAAAACAGTTTATCCTGAATCTGTTTCATCAAGTGCTAGTCGTGAACTAAATCAATATTTGAATAAACTCTTACGCCAAGATGCACAGATTCTACGAGAATTAATAGCACAGGGAGCAGATGGGGCAACTGTTCAAAATAAAAAGGAAGAATTGCTTCAAGAAATTTTTAACTTTTTAGCAATGAACCTTGGCTTGCCACCGCAATCTTTTGATTTTGCTTATCGTGATAAAGACAATCATTATCAGTCTGATAAAAATATTACACCGAAAGCATTTTATCAAAAATATGTTAATCTTGACCTATCAGATTATGTTTCTATTATCAATGCTCCAACTGTAGATAAGCCTTATGGACAATCCTATACAGTTGAGATGCTTGGAAATGTTGTCGGAGGGCCAGCTGTTAAATATTTAAACCTTGATATGAAACGGTTTAAAGAGTTAGCGATTGCGCAAATGAAATCAGGAGAAACTGTGTGGTTTGGTTCAGACGTAGGTCAAGTATCAAATCGTCAAAAGGGTATCCTAGCAACTACGACTTATGATTTTAATTCATCTATGGATATTAAACTTAGCCAAGACAAAGCGGGCCGCCTAGATTATAGTGAAAGTTTAATGACACATGCTATGGTCTTAACGGGAGTAGACCTTGATGAATCTGGACAACCTTTAAAATGGAAAGTTGAGAACTCTTGGGGAGAGAAAGTTGGTAAGGATGGTTATTTTGTAGCTTCAGATGCTTGGATGGATGAATATACTTACCAAATAGTCGTTCGTAAAGAATTGCTTACTAAAGAAGAATTAGAGGCTTACAACGCAGAGCCAATTACTTTAGCGCCGTGGGATCCGATGGGAGCATTAGCTAATTAG

SEQ ID NO: 608 - protein, 444 aa, Streptococcus agalactiae
MSKLTQTFTDKLFADYQANTKFSAIENAVTHNGLLKSLETRQSEIENDYVFSIDLTKDEVSNQKQSGRCWMFAALNTFRHKLISDFKLENFELSQAHTFFWDKYEKSNWFMEQIIATANQELSSRKVKFLLDVPQQDGGQWDMVVALFEKYGVVPKTVYPESVSSSASRELNQYLNKLLRQDAQILRELIAQGADGATVQNKKEELLQEIFNFLAMNLGLPPQSFDFAYRDKDNHYQSDKNITPKAFYQKYVNLDLSDYVSIINAPTVDKPYGQSYTVEMLGNVVGGPAVKYLNLDMKRFKELAIAQMKSGETVWFGSDVGQVSNRQKGILATTTYDFNSSMDIKLSQDKAGRLDYSESLMTHAMVLTGVDLDESGQPLKWKVENSWGEKVGKDGYFVASDAWMDEYTYQIVVRKELLTKEELEAYNAEPITLAPWDPMGALAN

SEQ ID NO: 609 - protein, 2187 aa, Streptococcus agalactiae
ATGGGATTTATTATCTTAGCTATTGTAATAGGTGGGCTCCTATTTGCATACTACGTTAGTCGTTCTCCGAAATTAACCGATCAAGCTTTAAAATCCGTTAACTCTAGTTTGGTTTATGATGGTAATAATAAACTTATTGCCGATTTAGGCTCAGAAAAGCGTGAAAGTGTTAGTGCGGATAGCATTCCACTAAATTTGGTTAACGCTATCACTTCTATCGAAGATAAACGTTTCTTTAAACATAGAGGTGTCGATATTTATCGTATTTTAGGTGCAGCTTGGCATAATCTTGTTAGTAGTAATACGCAAGGTGGTTCAACCCTTGATCAACAGTTGATTAAACTGGCTTACTTTTCTACCAATAAATCTGACCAAACGTTAAAACGTAAATCACAGGAAGTTTGGCTTGCGCTTCAAATGGAGCGTAAATACACCAAAGAAGAAATTCTTACTTTCTATATTAATAAAGTTTATATGGGAAATGGGAATTATGGTATGAGAACAACAGCTAAATCATACTTTGGTAAAGACCTAAAGGAATTATCTATTGCACAACTTGCTTTGCTCGCTGGTATTCCTCAAGCACCTACACAATATGACCCTTATAAAAACCCAGAATCTGCTCAAACAAGACGTAATACCGTTCTTCAGCAGATGTATCAAGATAAAAACATTTCTAAAAAGGAATACGACCAAGCTGTTGCAACTCCAGTAACTGATGGCTTAAAAGAATTAAAGCAAAAATCTACTTATCCAAAATATATGGATAACTACTTAAAACAAGTTATTAGTGAAGTTAAACAAAAAACTGGTAAAGATATCTTTACTGCTGGGCTAAAAGTGTATACTAATATCAACACTGATGCACAAAAACAACTATATGACATCTACAACAGTGACACTTACATCGCTTATCCAAACAATGAATTACAAATAGCATCTACCATCATGGATGCGACTAATGGTAAAGTCATTGCACAATTAGGCGGGCGTCATCAGAATGAAAATATTTCATTTGGGACAAATCAATCTGTCTTAACAGACCGCGATTGGGGTTCTACAATGAAACCTATCTCAGCTTATGCACCTGCTATTGATAGTGGTGTCTATAATTCAACAGGTCAATCATTAAACGACTCAGTTTACTACTGGCCTGGTACTTCTACTCAACTATATGACTGGGATCGTCAATATATGGGTTGGATGAGTATGCAGACCGCTATTCAACAATCACGTAACGTCCCTGCTGTCAGAGCACTTGAAGCCGCTGGATTAGACGAAGCAAAATCTTTCCTTGAAAAATTAGGCATATACTATCCAGAAATGAACTATTCAAATGCTATTTCAAGTAACAACAGTAGCAGTGATGCAAAATATGGTGCAAGTAGTGAGAAAATGGCAGCGGCTTACTCGGCTTTTGCAAACGGCGGAACTTACTATAAACCGCAATATGTTAATAAAATTGAATTTAGCGATGGAACCAATGATACTTATGCAGCGTCTGGTAGCCGTGCGATGAAAGAGACTACTGCCTACATGATGACGGATATGCTGAAAACAGTACTAACATTTGGTACTGGTACTAAAGCAGCTATCCCTGGTGTTGCACAAGCTGGTAAGACTGGTACTTCCAACTATACGGAAGATGAGTTAGCTAAAATTGAAGCAACTACTGGTATCTACAATAGCGCCGTTGGTACAATGGCTCCTGATGAAAACTTTGTCGGCTATACTTCTAAGTACACAATGGCAATTTGGACTGGTTATAAAAATCGCCTTACACCACTTTATGGTAGCCAACTGGATATTGCTACTGAGGTTTATCGTGCAATGATGTCCTACCTAACTGGCGGATACAGTGCAGATTGGACAATGCCAGAAGGGCTCTATCGAAGCGGAAGCTACTTGTATATCAATGGGACAACTACAACCGGCACTTACTCTTCTTCTGTCTATAAGAATATCTATCAAAATTCTGGACAGTCAAGTCAAAGCAGTAGTTCGACATCCTCTGAGAAACAAAAAGAGGATAAGAATACAGCAAATGATGCCAATTCATCATCCCCACAAGTCGAAACACCTAATAATGGTAATGCTACTACCCCTAATAATTCCAATCAAACTGTGCCAGGAACTGGACATGGTAATGGTAATGGTAACAACAATACAGTACCTAACGGTAATTAA

SEQ ID NO: 610 - protein, 728 aa, Streptococcus agalactiae
MGFIILAIVIGGLLFAYYVSRSPKLTDQALKSVNSSLVYDGNNKLIADLGSEKRESVSADSIPLNLVNAITSIEDKRFFKHRGVDIYRILGAAWHNLVSSNTQGGSTLDQQLIKLAYFSTNKSDQTLKRKSQEVWLALQMERKYTKEEILTFYINKVYMGNGNYGMRTTAKSYFGKDLKELSIAQLALLAGIPQAPTQYDPYKNPESAQTRRNTVLQQMYQDKNISKKEYDQAVATPVTDGLKELKQKSTYPKYMDNYLKQVISEVKQKTGKDIFTAGLKVYTNINTDAQKQLYDIYNSDTYIAYPNNELQIASTIMDATNGKVIAQLGGRHQNENISFGTNQSVLTDRDWGSTMKPISAYAPAIDSGVYNSTGQSLNDSVYYWPGTSTQLYDWDRQYMGWMSMQTAIQQSRNVPAVRALEAAGLDEAKSFLEKLGIYYPEMNYSNAISSNNSSSDAKYGASSEKMAAAYSAFANGGTYYKPQYVNKIEFSDGTNDTYAASGSRAMKETTAYMMTDMLKTVLTFGTGTKAAIPGVAQAGKTGTSNYTEDELAKIEATTGIYNSAVGTMAPDENFVGYTSKYTMAIWTGYKNRLTPLYGSQLDIATEVYRAMMSYLTGGYSADWTMPEGLYRSGSYLYINGTTTTGTYSSSVYKNIYQNSGQSSQSSSSTSSEKQKEDKNTANDANSSSPQVETPNNGNATTPNNSNQTVPGTGHGNGNGNNNTVPNGN

SEQ ID NO: 611 - protein, 600 aa, Streptococcus agalactiae
ATGGTTAACTATCCACATCAGCTTATTCGGAAAACAACAGTTACAAAATCAAAGAAAAAGAAAATCGATTTTGCCAACCGTGGTATGTCATTTGAAGCTGCTATCAATGCAACCAATGACTACTATTTGTCTCACGAATTAGCTGTCATTCATAAGAAACCAACGCCAGTACAAATCGTCAAGGTAGATTATCCTAAACGTAGTCGTGCTAAGATTGTAGAAGCTTATTTTAGACAAGCTTCTACTACTGATTATTCTGGTGTTTACAAAGGTTACTATATTGACTTTGAAGCCAAAGAAACCCGGCAGAAAACTGCTATGCCTATGAAAAATTTTCATGCTCACCAAATAGAGCACATGGCAAATGTATTACAGCAAAAAGGGATTTGCTTTGTCTTGCTTCATTTTTCCACACTTAAGGAAACCTATCTACTCCCTGCTAATGAGTTAATTTCATTTTATCAGATTGATAAAGGCAATAAATCAATGCCTATTGATTATATCAGAAAAAATGGATTTTTCGTAAAGGAGAGTGCCTTTCCTCAAGTCCCTTACTTAGATATTATTGAAGAAAAATTATTAGGCGGTGATTACAATTAA

SEQ ID NO: 612 - protein, 199 aa, Streptococcus agalactiae
MVNYPHQLIRKTTVTKSKKKKIDFANRGMSFEAAINATNDYYLSHELAVIHKKPTPVQIVKVDYPKRSRAKIVEAYFRQASTTDYSGVYKGYYIDFEAKETRQKTAMPMKNFHAHQIEHMANVLQQKGICFVLLHFSTLKETYLLPANELISFYQIDKGNKSMPIDYIRKNGFFVKESAFPQVPYLDIIEEKLLGGDYN

SEQ ID NO: 613 - protein, 519 aa, Streptococcus agalactiae
ATGAAGTCAACTATTCTTGTAACAGGTTACAAAAATTTTGAATTAGGGATTTTCCAGGATAAGGATCCTCGGATTACTATTATAAAAAAGGCTATTGATAAGGATTTTAGACGCTTCTTGGAAAATGGAGCAGACTGGTTTATTTTTATGGGAAATTTAGGGTTTGAGTACTGGGCTTTGGAAGTTGCTCTTGATTTACAAAAAGAATATGATTTTCAAATTGCGACAATTTTTACCTTTGAGAACCATGGCCAAAATTGGAATGAGGCTAATAAAGCTAAGTTGGCACTCTTTAAGCAAGTTGACTTTGTTAAATATACTTTCCCAAGCTATGAAAACCCGGGTCAATTTAAACAATACAATCATTTTCTCATTAACAACACACAAGGTGCATATCTTTTTTATGATTCTGAAAATGAAACTAATTTAAAATTTTTGCTAGAAATGATGGAGAAAAAGGAAGCTTATGATATTTCTTTCCTAACTTTTGATCGCTTAAATGAAATATATGAGGAATGA

SEQ ID NO: 614 - protein, 172 aa, Streptococcus agalactiae
MKSTILVTGYKNFELGIFQDKDPRITIIKKAIDKDFRRFLENGADWFIFMGNLGFEYWALEVALDLQKEYDFQIATIFTFENHGQNWNEANKAKLALFKQVDFVKYTFPSYENPGQFKQYNHFLINNTQGAYLFYDSENETNLKFLLEMMEKKEAYDISFLTFDRLNEIYEE

SEQ ID NO: 615 - protein, 332 aa, Streptococcus agalactiae
ATGGCAAGTATTATTTATAGCCCAAAAGATATTTTTGAGCAAGATTTTAAAGTTAGTATGCGGGGATATGACAAGAAAGAAGTCGATGTATTTCTGGATGATGTCATCAAAGATTACGAAAATTATCTTGAGCAAATTGAGAAGCTCCAAATGGAAAATAGACGTCTACAACAAGCTTTAGACAAAAAGAAAGCGAAGCTTCAAATGTAAGAAATTCAGGGACAGCTATGTATAATCAAAAACCGATTGCCCAATCTGCAACCAATTTTGATATTTTAAAACGCATTAGCCGCCTTGAGAAAGAAGTTTTTGGAAGACAAATTAGAGAATAA

SEQ ID NO: 616 - protein, 110 aa, Streptococcus agalactiae
MASIIYSPKDIFEQDFKVSMRGYDKKEVDVFLDDVIKDYENYLEQIEKLQMENRRLQQALDKKESEASNVRNSGTAMYNQKPIAQSATNFDILKRISRLEKEVFGRQIRE

SEQ ID NO: 617 - protein, 564 aa, Streptococcus agalactiae
TTGATTGATCCAACTTGTGGTTCAGGTACTTTTTGTATTGAAGCTGCTATGATTGGAATGAATATAGCTCCTGGTTTTAATCGTGATTTTGCCTTTGAGGCGTGGCCATGGGTAGATCAAAGTCAAGTACAAAAGGTTCGTGATGAAGCTGAGAGTAAAGCAAACTATGATATTGATTTAGATATTTCAGGTTTTGATTTAGACGGTCGTATGGTAGAAATTGCTAGAAAAAATGCAGAAGAAGCAGGACTTGGAGATGTTATCAAATTGAAACAAATGCGTCTTCAAGATTTAAAAACAGATAAAATTAACGGTGTTATTATCTCCAACCCACCATATGGTGAACGACTCCTGGATGACAAAGCAGTGGACATTTTGTATAATGAGATGGGACAAACATTTGCGCCTTTAAAAACTTGGAGCAAGTTTATCCTAACTAGTGACGAAGGATTTGAAAAAAAATACGGCTCACAAGCTGATAAAAAACGTAAGCTTTACAATGGTACTTTAAAAGTTGATTTGTACCAATATTACGGTGAACGTGTGAGACGTCAAGTAAAATAA

SEQ ID NO: 618 - protein, 187 aa, Streptococcus agalactiae
MIDPTCGSGTFCIEAAMIGMNIAPGFNRDFAFEAWPWVDQSQVQKVRDEAESKANYDIDLDISGFDLDGRMVEIARKNAEEAGLGDVIKLKQMRLQDLKTDKINGVIISNPPYGERLLDDKAVDILYNEMGQTFAPLKTWSKFILTSDEGFEKKYGSQADKKRKLYNGTLKVDLYQYYGERVRRQVK

SEQ ID NO: 619 - protein, 289 aa, Streptococcus agalactiae
ATGTCAGAAGATCAAAAACACCCATTTTTTGAACCAAAAAAAGAAACTGATGGTCTTGAATTTAAAGATGCTAAAGAAATGACAGTAGAAGAGGCTGTTAGAAAAGATTCTGAAATTAAGGCTGGTATTACCGAAGAAGATAGTATTCTTGATAAATACATCAAACAACATCGTGATGAAGTAGCTTCACAAAAGTTTGAGACAAAATCAAGCGATTTTGCAAACCTTGATACGGCATCTTTAGATGATTTTATCAAGAAACAGCGCGAAGAATTATCAGCGATGTTAG

SEQ ID NO: 620 - protein, 96 aa, Streptococcus agalactiae
MSEDQKHPFFEPKKETDGLEFKDAKEMTVEEAVRKDSEIKAGITEEDSILDKYIKQHRDEVASQKFETKSSDFANLDTASLDDFYQETARRIIQRC

SEQ ID NO: 621 - protein, 1182 aa, Streptococcus agalactiae
ATGTTAGCTGCAGAAGAGCTTTCTAAAAAGTTGGATAATTCAGTCTCTCAAGAMCAAGATACAGAAGCTAATGCTGTCTCACCTAAAGAAGAATCTTCACAAGAACAAGAAAATAGTGTAACCCCAGTTCCTCCTCTGAATACGGAAGCAGAACCAACTGCAACAGAACCAGATTCGACTATTGCTGATTCAGAGGAGTATAAATCCTCTTCTAAGAAGCGTGGAGGTATCGTAGGAACATTGATTGCTCTTATTTTACTTCTAATAGTAGCAATCTTTGGTTACAACTATTTCAAGAATAATAATTCGACAAATTCTCAAACTGCAACAAGTCAAAGTTCTAGTTCTAAGGCTACGACGACTTCATCAGAAGAAGATAAAAAAGCTAGTCAGAACTTAGATAATTTCAACAAATCTTATGCTAACTTTTTTGTTGATGATAAGAAAACCCAACTCAAAAATAGCGAATTTGATAAATTGTCAGAATTAGAAAAGAAAGTTGATGCTTTAAAAGGAACTAAATACTACGGTAAAGTAAAAGTTAAATTTGATAGTCTAAAACGTCAAATTGATGCTGTTAAAGCTGTTAACGACAAGTTTAAGTCGCCTGCTGTAGTTGATGGTAAGAAGAGTGAAAAATTAGAGGTAAAAGATGGAGCGAATTTTGACTCTTTAGATAGTAAAACTCTTAATACTGGTAATGCTAGTCTAGATAGTTTACTTCACTCCATCGTTTCAACTGGTCGTAATCAGGTAAAACAATCCGAAGAACAGGCTTCGTCTAATAAGGTTTCAGACACTCAAATAACTGAACAACCAAACGTAACTAACGGTCAATCTTCCTCATCAGCTGCTACAATAAATAATCAGGCAGCTGGCACTGCATCAGGTAATTTGGAACGTAACCGTAGTCGAGTACCGTATAATAATGCTGCTATTGCGGATACAGGAAATCCTGCCTGGATATTTAACCCAGGAGTATTAGAGAAAATCGTGGCCACTTCACAGGCGCGAGGCTATTTCTCTGGAAATAACTATATTCTTGAACCTGTAAATATTATCAATGGTAATGGTTATTACAATATGTTTAAATTAGATGGCACTTATTTGTTCTCTATCAATGCCAAGACAGGTTACTTTGTAGGTAACGCTCCTGGAAGAGCTGATAGTTTAGATTATTAA

SEQ ID NO: 622 - protein, 393 aa, Streptococcus agalactiae
  VARIANT 18: Xaa = Any Amino Acid
MLAAEELSKKLDNSVSQXQDTEANAVSPKEESSQEQENSVTPVPPLNTEAEPTATEPDSTIADSEEYKSSSKKRGGIVGTLIALILLLIVAIFGYNYFKNNNSTNSQTATSQSSSSKATTTSSEEDKKASQNLDNFNKSYANFFVDDKKTQLKNSEFDKLSELEKKVDALKGTKYYGKVKVKFDSLKRQIDAVKAVNDKFKSPAVVDGKKSEKLEVKDGANFDSLDSKTLNTGNASLDSLLHSIVSTGRNQVKQSEEQASSNKVSDTQITEQPNVTNGQSSSSAATINNQAAGTASGNLERNRSRVPYNNAAIADTGNPAWIFNPGVLEKIVATSQARGYFSGNNYILEPVNIINGNGYYNMFKLDGTYLFSINAKTGYFVGNAPGRADSLDY

SEQ ID NO: 623 - protein, 483 aa, Streptococcus agalactiae
ATGACAAAAGAAGTTGTCGTAGAGAGTTTTGAATTAGATCACACCATCGTTAAAGCACCCTACGTTCGTTTAATTTCAGAAGAAGTTGGACCGGTCGGAGACATCATTACTAACTTTGATATCCGCCTTATTCAGCCTAATGAAAATGCTATTGATACTGCTGGTTTACATACTATCGAGCACCTTCTGGCGAAGTTAATCCGCCAACGAATTAATGGTTTGATTGATTGTTCTCCTTTTGGTTGTAGAACTGGTTTTCACATGATTATGTGGGGAAAACAGGATGCTACTGAAATTGCTAAAGTCATCAAATCTAGTCTAGAGGCTATTGCTGGTGGGGTCACTTGGGAAGACGTTCCTGGAACAACCATTGAATCTTGTGGAAATTATAAAGACCACAGTCTCCACTCTGCTCAAGAATGGGCGAAATTAATTCTTTCCCAAGGGATTTCTGACAATGCTTTTGAGCGCCACATTGTCTGA

SEQ ID NO: 624 - protein, 160 aa, Streptococcus agalactiae
MTKEVVVESFELDHTIVKAPYVRLISEEVGPVGDIITNFDIRLIQPNENAIDTAGLHTIEHLLAKLIRQRINGLIDCSPFGCRTGFHMIMWGKQDATEIAKVIKSSLEAIAGGVTWEDVPGTTIESCGNYKDHSLHSAQEWAKLILSQGISDNAFERHIV

SEQ ID NO: 625 - protein, 1608 aa, Streptococcus agalactiae
ATGTTTAATATTATATTAGCAATGGTTTGTGCACTCATTGGTTTGATTATTGGTTATGTGGCTATTTCAATGAAAATGAAATCATCAAAAGAAGCTGCAGAACTAACTCTTTTAAATGCAGAACAAGATGCCGTTGATTTACGTGGTAAAGCAGAAATTGAAGCAGAACACATCCGTAAAGCAGCGGAACGTGAAAGTAAAGCTCACCAAAAAGAATTACTTTTAGAAGCAAAAGAAGAGGCTAGAAAATATCGTGAAGAGATCGAAAAGGAATTTAAATCTGATAGACAAGAGTTGAAACAGATGGAGGCACGTTTAACAGATCGTGCATCATCTCTTGATCGTAAAGATGAAAATCTATCTAACAAAGAAAAAATGTTAGATAGCAAAGAACAAAGTCTAACCGATAAATCTAGACATATTAATGAGCGCGAACAGGAAATTGCTACTTTAGAAACAAAAAAAGTAGAAGAATTGTCACGCATCGCAGAGCTTAGTCAAGAAGAAGCTAAAGATATCATTTTAGCTGATACCGAAAAAGATTTAGCTCATGATATTGCGACACGTATTAAAGAAGCAGAACGTGAAGTAAAAGATCGATCAAACAAGATAGCAAAAGACTTGCTAGCCCAAGCTATGCAACGTTTAGCTGGTGAATATGTTACTGAACAAACAATTACAACTGTTCATCTCCCTGATGATAATATGAAGGGACGTATCATTGGTCGTGAAGGACGTAATATTCGTACTCTGGAAAGTTTGACAGGTATTGATGTTATCATAGATGATACGCCAGAAGTCGTTGTCTTATCAGGTTTCGACCCCATTCGTCGTGAAATTGCTCGTATGACTTTAGAATCTTTGATTCAAGATGGACGTATCCATCCAGCTCGTATTGAAGAGTTGGTTGAAAAAAATCGTTTGGAAATGGATCAACGTATCCGTGAGTATGGTGAGGCAGCAGCTTATGAGATTGGTGCACCAAATCTGCATCCTGATTTGATAAAAATTATGGGACGTTTGCAGTTCCGTACATCATATGGTCAAAATGTACTTCGTCATTCAGTTGAAGTTGGTAAACTTGCAGGTATTTTGGCTGGAGAACTAGGAGAAAATGTTGATTTAGCTCGTCGGGCTGGATTCCTCCATGATATGGGGAAAGCTATTGATCGCGAAGTTGAAGGCAGTCACGTTGAAATTGGTATGGAATTTGCTCGTAAGTACAAAGAGCATCCGATTGTTGTTAATACTATTGCAAGCCACCATGGTGATGTAGAACCTGACAGCGTTATTGCAGTAATTGTTGCTGCTGCAGACGCCCTTAGTTCAGCACGACCAGGTGCGCGTAATGAGTCAATGGAAAATTATATCAAACGTCTGCGTGATTTAGAAGAAATTGCTAATGGCTTTGAGGGAGTGCAAAATGCCTTTGCACTTCAAGCCGGACGTGAAATTCGTATCATGGTACAACCTGGTAAAGTTTCTGATGATCAAGTAGTTATTATGTCGCATAAGGTACGTGAAAAAATCGAACAAAACTTGGATTATCCAGGTAATATTAAGGTAACAGTTATTCGTGAAATGCGAGCTGTTGATTTTGCAAAATAG

SEQ ID NO: 626 - protein, 535 aa, Streptococcus agalactiae
MFNIILAMVCALIGLIIGYVAISMKMKSSKEAAELTLLNAEQDAVDLRGKAEIEAEHIRKAAERESKAHQKELLLEAKEEARKYREEIEKEFKSDRQELKQMEARLTDRASSLDRKDENLSNKEKMLDSKEQSLTDKSRHINEREQEIATLETKKVEELSRIAELSQEEAKDIILADTEKDLAHDIATRIKEAEREVKDRSNKIAKDLLAQAMQRLAGEYVTEQTITTVHLPDDNMKGRIIGREGRNIRTLESLTGIDVIIDDTPEVVVLSGFDPIRREIARMTLESLIQDGRIHPARIEELVEKNRLEMDQRIREYGEAAAYEIGAPNLHPDLIKIMGRLQFRTSYGQNVLRHSVEVGKLAGILAGELGENVDLARRAGFLHDMGKAIDREVEGSHVEIGMEFARKYKEHPIVVNTIASHHGDVEPDSVIAVIVAAADALSSARPGARNESMENYIKRLRDLEEIANGFEGVQNAFALQAGREIRIMVQPGKVSDDQVVIMSHKVREKIEQNLDYPGNIKVTVIREMRAVDFAK

SEQ ID NO: 627 - protein, 897 aa, Streptococcus agalactiae
ATGGCAAAAGATATAATTAAGGTTGATCATATATTTAAAAGCATCGGGCAAAAAACGATTTTAGAAGATATATCATTTAGTATAGCTTCTAACCAATGTGTAGCATTGATTGGACCTAATGGTGCAGGGAAAACAACTCTGATGTCAACTTTGTTAGGTGATATTAGTATTTCTTCAGGATCATTGACGATTTTTAATCTGCCTGCACACCACAATAGGTTAAAATATAAGGTGGCCATCTTACCACAAGAAAATGTATTGCCCTCAAAGTTTACAGTGAGAGAACTCATTGATTTCCAAAGGTGTTTATTTCCAGAAGTGCTGCCAATGTCTCTGATTTTAGACTATCTACAGTGGAGTGATACGCACTTGCAACAATTTACAGAGACTTTATCTGGAGGGCAAAAACGACTTTTAGCTTTTGTTTTAACTTTGGTTGGTAAGCCCCAATTACTATTTTTAGATGAACCTACTTCCGGAATGGATACTTCCACACGTCAACGATTTTGGGAGCTGATTGCGACACTAAAAAAAGAAGGTGTCACAATTGTCTATTCTAGTCATTATATCGAAGAGGTAGAACATACAGCTGATAGGATTTTAGTACTTCATAAAGGAAAGTTATTACGCGATACAACCCCCTTTGCCATGAAGCAAGAAAAAACCGAAAAGTTATTCACCGTTCCGCTTAGTTATCAAAAATTATTACCTACCTATTTGATTACAGAGTGTGAAGCCAAGAGTGATAGTATAACGTTTGTTACTGGGGAGGCTGAAGCTGTATGGAAAATACTGGCAGATAATGGTTGTCCTATTGAAGCTATTGAGATGACCAATAGAACTTTGTTAAATCGTATTTTTGAGACTACTAAGGAGGTAAAACATGAGAATCTTTAA

SEQ ID NO: 628 - protein, 298 aa, Streptococcus agalactiae
MAKDIIKVDHIFKSIGQKTILEDISFSIASNQCVALIGPNGAGKTTLMSTLLGDISISSGSLTIFNLPAHHNRLKYKVAILPQENVLPSKFTVRELIDFQRCLFPEVLPMSLILDYLQWSDTHLQQFTETLSGGQKRLLAFVLTLVGKPQLLFLDEPTSGMDTSTRQRFWELIATLKKEGVTIVYSSHYIEEVEHTADRILVLHKGKLLRDTTPFAMKQEKTEKLFTVPLSYQKLLPTYLITECEAKSDSITFVTGEAEAVWKILADNGCPIEAIEMTNRTLLNRIFETTKEVKHENL

SEQ ID NO: 629 - protein, 741 aa, Streptococcus agalactiae
ATGAGAATCTTTAAAGCATTATTGAAAATGGAATTTCTTTTGACAAAACGTCAACTTGCCAATCTCATTATGGCTATAGGTATGCCAGTGGCTTTTTTTCTATTTTTTTCAGGATTTATGGGCGAAGGACTCACTAAAGCCATCGAAGCTATCTACGTTCGTAATTATATGATAACGATGGCAGGATTCTCAAGTCTTAGCTTTGCTTTTTTTACTTTTCCATTTTCTATGAAAGATGATCAACTCTCAAACCGAATGCAATTATTAAGACACTCACCAGTACCAATGTGGCAATATTATCTAGCAAAAATTATTCGTATTTTATTTTACTATTGCCTAGCAATAACTGTTGTTTTCCTAACTGGGCATATTTTAAGGCAAGTTAGTATGCCAATAGAACAATGGATGCAGAGCTTTTTATTGCTATTAGGAGGAGCAACATGTTTTATTCCTTTTGGATTGCTCGTCTCCTACTTTAAAAATACTGAACTAATGTCAATGGTAGCCAATATTTGTTATATGTCATTAGCTGTTCTTGGTGGCATGTGGATGCCAATTACAATGTTCCCAAAATGGTTGCAAGCTTTATCAAAGTTAACCCCTACTTACCATTTGACTCAAGTTATCCTTAGTCCGTTTGCTAATAGTTTTGCTGGTTTTTCTCTTATTATTCTGATAGGCTATGGTATTATAATGTTAGTTATCGCTTATCTACTATCTCAGAAGAGGCATTCAATTTGA

SEQ ID NO: 630 - protein, 246 aa, Streptococcus agalactiae
MRIFKALLKMEFLLTKRQLANLIMAIGMPVAFFLFFSGFMGEGLTKAIEAIYVRNYMITMAGFSSLSFAFFTFPFSMKDDQLSNRMQLLRHSPVPMWQYYLAKIIRILFYYCLAITVVFLTGHILRQVSMPIEQWMQSFLLLLGGATCFIPFGLLVSYFKNTELMSMVANICYMSLAVLGGMWMPITMFPKWLQALSKLTPTYHLTQVILSPFANSFAGFSLIILIGYGIIMLVIAYLLSQKRHSI

SEQ ID NO: 631 - protein, 738 aa, Streptococcus agalactiae
ATGTATTTTATTCCGTTAGTATTTTTGATTTACCCCATAGGAGGGATTCTCTATTATCACTACCCTTTTTGGACTTTATTTTTTACGCTAGCTTTTGTAGGAGCATATTTATACTCTGTTATTATCAGGGGCGAATCAAAGTATCACATGATTGCCTGGTCTACAATGTTGACATATATTTTCTACATGACAATTTTTATAAATAGTGGTTTCATCTGGTATATTTACTTTCTGAGTAATTTACTCGTCTATCGCTTTAGAGATAAATTGAAGTCTTTTAGATTCATTAGTTTTGCTTGTACTCTAGCCACAGTGGTATTTTTATGCTTCTTTAAGGCATCAGACTTTGGTGATAGAATCATGTTTCTAATTGTTCCTATTTTTTGTATCGGTTACATGTGGATTGCTATTGAAAATAGAAATAGCGAAGAACAAAGAGAAAAAATTGCAGAGCAAAATCAGTATATCAATATTTTGTCAGCTGAAAATGAACGTAACCGTATAGGGCGTGATTTGCATGATAGTTTAGGACATACATTTGCTATGATGACACTAAAGACAGAACTAGCGTTAAAGTTGTTAGAAAAAAGGAACTATGATAAGGTACAAAAAGAACTATCAGAATTAAATCATATTAGTCATCAATCGATGAGTGAGGTCCGTCAAATTGTTTCTAACCTCAAGTATCGTACAGTAGTGGAAGAAATTGATGAGNNNNNCATTCCATTCATTAATTAA

SEQ ID NO: 632 - protein, 245 aa, Streptococcus agalactiae
  VARIANT 239, 240: Xaa = Any Amino Acid
MYFIPLVFLIYPIGGILYYHYPFWTLFFTLAFVGAYLYSVIIRGESKYHMIAWSTMLTYIFYMTIFINSGFIWYIYFLSNLLVYRFRDKLKSFRFISFACTLATVVFLCFFKASDFGDRIMFLIVPIFCIGYMWIAIENRNSEEQREKIAEQNQYINILSAENERNRIGRDLHDSLGHTFAMMTLKTELALKLLEKRNYDKVQKELSELNHISHQSMSEVRQIVSNLKYRTVVEEIDEXXIPFIN

SEQ ID NO: 633 - protein, 561 aa, Streptococcus agalactiae
ATGCTACGAGATGCTATGTGCCAATTACTTTTGATGGAAGAAAGTGTTTCTACTATTGATCAAGCTGGAAATGGTGGAGAAGCTATTGCCATTTTATCCAATAAAGCCATAGATGTTGCAATATTGGATGTTGAGATGCCGATATTATCAGGTTTAGATGTCTTAGAGTGGGTTAGAAAATACCAGAATGTTAAGGTCATAATTGTAACAACCTTTAAGCGGTCAGGTTATTTCCAAAGGGCTATTCGTTCAAATGTAGATGCTTATGTTTTGAAAGACCGCTCAGTAGCTGATTTGATGAAAACGATTCAAAAAGTTTTATCTGGGGGTAAAGAATATTCGCCTGAATTAATGGAAAACGTTATATCTAATCCTTTGAGTGAGCAAGAAATAAAAATTCTTTCCCTAATTGCTCAAGGGAAGACCAGCAAAGAAATTGCATGCACTTTATTTTTATCGAATGGTACAGTTCGTAATTACACGTCAAATATTTTTGATAAATTAGGAGTTAATAATCGTTTGGAGGCACTTAAAATAGCACGAGAAAAGGATTGGCTGTGA

SEQ ID NO: 634 - protein, 186 aa, Streptococcus agalactiae
MLRDAMCQLLLMEESVSTIDQAGNGGEAIAILSNKAIDVAILDVEMPILSGLDVLEWVRKYQNVKVIIVTTFKRSGYFQRAIRSNVDAYVLKDRSVADLMKTIQKVLSGGKEYSPELMENVISNPLSEQEIKILSLIAQGKTSKEIACTLFLSNGTVRNYTSNIFDKLGVNNRLEALKIAREKDWL

SEQ ID NO: 635 - protein, 705 aa, Streptococcus agalactiae
ATGCAAAAATTTAAAGAACGTTTTGATACGCTTAGTGATGCAATTTTGGCCATTGCTATGACGATTTTAGTTTTGGAGATAAAAACTCCGGCTACGATGGGTGATATTGGTGACTTTACACGGAACATAGGTTTATTTATTGTTAGCTTTGTTGTTGTTTTTAATTTTTGGTACGAAAGGGCACAAAATAGCCTAGATGCTCAAAAGACTAATGATGAAATTATAGCTCTTGATATCATTGAACACCTAGGTATTTGTTTGATTCCTCTCTTTACTAAATTTATGATTTCTTTTGAGAATCATAATTTTGCTGTTATGGCTTATGGACTCTTAACGTTATTAGTTGGTCTCACATCAGACATTATTCGGATTCGTTTGGCAAGTTATGATTTAGTGACCATTCCTAGTGAATTGAAAGAGCGGGTTATAAAAGTCATGACAACTTTTGCCATTCGTTCAGTTGTGGTTCGCTTTATCATCATTATCCTCGCTTATTTTCTACCTGAGGTAGGGATATTTGCATATTTAGTCATACCGCTCTTTATGTTTTGGCGTCGCTCTAGAGCAGGAAAATACTATGCTAAAAAGGGCATTGAGGCACCATCTTATATCAAGCTTTTTATCCAAATTGGAGAGAGAGCTCCTGAGGATTTTACTAATTCAAGTAGTGGAATAGGTGGGGTAAAAAGACTCTATAAAAAATAA

SEQ ID NO: 636 - protein, 234 aa, Streptococcus agalactiae
MQKFKERFDTLSDAILAIAMTILVLEIKTPATMGDIGDFTRNIGLFIVSFVVVFNFWYERAQNSLDAQKTNDEIIALDIIEHLGICLIPLFTKFMISFENHNFAVMAYGLLTLLVGLTSDIIRIRLASYDLVTIPSELKERVIKVMTTFAIRSVVVRFIIIILAYFLPEVGIFAYLVIPLFMFWRRSRAGKYYAKKGIEAPSYIKLFIQIGERAPEDFTNSSSGIGGVKRLYKK

SEQ ID NO: 637 - protein, 630 aa, Streptococcus agalactiae
ATGTCTGAACGTGGTTTGCTAATTGTTTTCTCAGGACCATCTGGTGTTGGTAAGGGGACAGTTAGGCAAGAAATTTTTTCAACCCCTGACCATAAATTTGATTATTCCGTTTCAATGACTACTCGTCCACAACGCCCAGGCGAAGTTGATGGAGTTGATTATTTCTTCCGTACACGTGAAGAGTTTGAAGCGTTGATTAAAGAAGGTCAAATGCTTGAGTATGCGGAGTATGTTGGTAACTACTATGGAACTCCTTTAAGTTATGTCAACGAGACTTTAGACAAAGGGATTGATGTTTTTCTTGAAATAGAAGTTCAGGGAGCGCTTCAAGTTAAATCGAAGGTTCCGGACGGTGTTTTCATTTTCTTAACACCACCAGATTTAGAGGAATTAGAAGAGCGTTTAGTAGGACGTGGGACAGATAGTCCAGAAGTGATTGCCCAACGTATTGAACGTGCCAAAGAAGAAATTGCTTTGATGAGGGAGTATGACTATGCTGTTGTCAATGATCAAGTGTCATTAGCAGCAGAACGTGTTAAACGTGTCATTGAAGCAGAACATTATCGTGTGGATCGTGTTATTGGGCGTTATACCAACATGGTCAAAGAAACTGATAAAAAATTAAGTTAA

SEQ ID NO: 638 - protein, 209 aa, Streptococcus agalactiae [sequence omitted]

SEQ ID NO: 639 - protein, 315 aa, Streptococcus agalactiae
ATGATGTTAAAACCTTCTATCGACACTTTGTTGGATAAAGTTCCTTCAAAATATTCTTTAGTTATTTTACAAGCTAAGCGTGCTCATGAATTGGAAGCTGGTGAGAAAGCCACTCAAGATTTTAAATCTGTGAAATCAACACTTCGCGCTTTAGAAGAAATCGAGTCAGGTAATGTTGTAATTCACCCAGATCCATCAGCAAAACGTGCCTCAGTTCGCGCTCGTATCGAAGCTGAACGCCTTGCTAAAGAAGAAGAAGAACGTAAAATCAAAGAGCAAATTGCTAAAGAAAAAGAAGACGGCGAAAAAATTTAA

SEQ ID NO: 640 - protein, 104 aa, Streptococcus agalactiae
MMLKPSIDTLLDKVPSKYSLVILQAKRAHELEAGEKATQDFKSVKSTLRALEEIESGNVVIHPDPSAKRASVRARIEAERLAKEEEERKIKEQIAKEKEDGEKI

SEQ ID NO: 641 - protein, 2391 aa, Streptococcus agalactiae
ATGGCAAGAAAATTAGCACAGGTTATTGTTGATATTCCTCTGATGCAGACAGATAAACCATTTTCGTATGCCATTCCTAAAGATTTGGAAGATTTGGTACAAGTAGGAGTACGCGTTCATGTTCCTTTTGGAAGAGGAAATCGTCTTTTGCAAGGCTTTGTTGTCGGTTTCAGAGATGATGATGAATTAGAGACTAAGGATATTGCGGAGGTCCTAGATTTTGAACCTGTTTTAAATCAGGAACAACTAGACTTAGCTGATCAGATGCGCCATACTGTCTTTTCTTATAAAATATCTATTTTGAAATCAATGTTACCAAGTCTTTTGAATTCGCAATATGATAAACTCTTGTTAGCAACAGACACATTACCATCAGAAGATAGAGAAGATCTATTTGGTCATAAAACGGAAATTGTCTTTTCAAGTTTGTCTTCTCAAGATGCCAAAAAAGCAGGCAGATTAATTCAAAAAGGTTTCATAGAAGTTCAATATTTAGCCAAAGATAAGAAAACAATAAAAACAGAAAAGATTTACAAAATCAACAGAACTCTGTTAGAAAAGAGCCAAATAGCAGCAAGAGCGAAAAAGAGACTGGAGTTGAAAGAATTCCTGTTAGAAAATCCTCAACCAGGGCGCCTCACAGCTTTAAACAAACAATTTTCATCTCCTGTGGTTAATTTTTTCAGAGAAGAAGGAATCATTGAAGTCATTGAAAAAGAAGCTAGTAGATCTGATAATTATTTTAAAGGAATCCTAAAAACGGATTTTTTGGATTTAAATCAGGAACAAGCTAAAGTAGTTAAAATAGTTGTTGACCAAATTGGTAAGGAACAGAATAAACCCTTCTTGTTGGAGGGGATTACAGGGTCTGGTAAGACAGAGGTATATCTTCATATCATTGATAACGTTTTAAAGTTGGGAAAAACAGCGATTGTTCTCGTTCCAGAAATTTCTTTAACTCCCCAGATGACGAATCGTTTTATTTCTCGTTTTGGAAAGCAAGTTGCTATTATGCACTCGGGCTTGTCAGAAGGTGAAAAATTTGATGAGTGGCGAAAGATAAAATCAGGTCAAGCTAAAGTTGTCGTTGGAGCTCGTTCAGCAATTTTTGCTCCTTTGGAAAATATCGGAGCCATCATTATAGATGAGGAACATGAATCAACTTATAAGCAAGAATCTAACCCAAGGTATCATGCGCGCGATGTGGCCTTGCTACGTGCAGAATATTATAAAGCTGTGTTACTAATGGGATCAGCAACTCCAAGTATCGAAAGCCGAGCTAGAGCTAGTCGGGATGTTTATAAATTTTTAGAATTAAAACATCGTGCTAATCCTAAAGCACGTATTCCTCAGGTTGAAATTATTGATTTTAGAAATTTTATTGGTCAACAAGAAGTTAGTAATTTCACATCATATTTACTAGATAAAATCCGAGATAGATTAGATAAGAAAGAGCAAGTGGTTCTTATGCTCAATCGTAGAGGTTATTCTAGTTTTATTATGTGTCGAGACTGCGGCTACGTTGATCAATGTCCTAATTGTGACATTTCTCTGACTTTACATATGGCTACAAAGACCATGAATTGTCATTATTGTGGGTTTGAAAAGCCTATTCCAAGAACATGTCCAAATTGCAATAGTAAAAGTATCTCTTACTATGGTACTGGAACCCAAAAAGCTTATGAAGAACTTTTGAAAGTTATCCCAGACGCAAAGATTTTACGGATGGATGTTGATACGACAAGGCAAAAAGGCGGTCATGAGTCTATTTTGAAGCGTTTCGGAAATCATGAAGCTGATATTTTATTGGGAACACAGATGATTGCTAAGGGATTGGATTTTCCAAATGTTACTTTAGTTGGAGTACTAAATGCAGATACTTCTCTGAATTTACCTGATTTTCGATCATCAGAGCGAACTTTTCAGCTATTAACTCAAGTGGCTGGACGTGCTGGGCGTGCTGAAAAAGAAGGAGAGGTTGTCATTCAAACTTATAATCCTAATCATTATGCTATTCAATTAGCCCAAAAGCAAGATTTTGAAGCTTTTTATCAATATGAAATGAATATCCGTCGACAACTTGGTTATCCTCCTTATTATTTTACAGTTGGTTTAACATTATCGCATAAAGATGAAGAGTGGTTAATACGAAAATCTTATGAAGTATTAAGTTTATTGAAGCAAGGCTTTAGTGATAAAGTAAAGTTGTTAGGTCCAACGCCAAAACCAATTGCAAGAACACATAACCTTTATCACTACCAAATTATTATCAAGTATCGATTTGAGGACAACCTTGAACTTGTTTTGAATCGCTTATTAGACATGACTCAAGACAAGGAGAATAGAGATCTTCGCTTAGCAATAGACCACGAACCGCAAAATATGATGTAG

SEQ ID NO: 642 - protein, 796 aa, Streptococcus agalactiae
MARKLAQVIVDIPLMQTDKPFSYAIPKDLEDLVQVGVRVHVPFGRGNRLLQGFVVGFRDDDELETKDIAEVLDFEPVLNQEQLDLADQMRHTVFSYKISILKSMLPSLLNSQYDKLLLATDTLPSEDREDLFGHKTEIVFSSLSSQDAKKAGRLIQKGFIEVQYLAKDKKTIKTEKIYKINRTLLEKSQIAARAKKRLELKEFLLENPQPGRLTALNKQFSSPVVNFFREEGIIEVIEKEASRSDNYFKGILKTDFLDLNQEQAKVVKIVVDQIGKEQNKPFLLEGITGSGKTEVYLHIIDNVLKLGKTAIVLVPEISLTPQMTNRFISRFGKQVAIMHSGLSEGEKFDEWRKIKSGQAKVVVGARSAIFAPLENIGAIIIDEEHESTYKQESNPRYHARDVALLRAEYYKAVLLMGSATPSIESRARASRDVYKFLELKHRANPKARIPQVEIIDFRNFIGQQEVSNFTSYLLDKIRDRLDKKEQVVLMLNRRGYSSFIMCRDCGYVDQCPNCDISLTLHMATKTMNCHYCGFEKPIPRTCPNCNSKSISYYGTGTQKAYEELLKVIPDAKILRMDVDTTRQKGGHESILKRFGNHEADILLGTQMIAKGLDFPNVTLVGVLNADTSLNLPDFRSSERTFQLLTQVAGRAGRAEKEGEVVIQTYNPNHYAIQLAQKQDFEAFYQYEMNIRRQLGYPPYYFTVGLTLSHKDEEWLIRKSYEVLSLLKQGFSDKVKLLGPTPKPIARTHNLYHYQIIIKYRFEDNLELVLNRLLDMTQDKENRDLRLAIDHEPQNMM

SEQ ID NO: 643 - protein, 936 aa, Streptococcus agalactiae
ATGACAAAATTATTATTCATGGGGACCCCTGATTTTTCAGCGACGGTTTTAAAAGGTATTTTAGCAGATGGTAAGTATGATGTTTTAGCTGTTGTGACGCAACCAGATCGTGCTGTAGGTCGTAAAAAAGAAATTAAAATGACCCCTGTAAAAGAAGTGGCCTTGGAAAACAACATTCCTGTGTATCAGCCGGAAAAACTATCTGGAAGTCCAGAATTAGAACAACTAATGACCCTAGGTGCAGATGGTATTGTAACAGCTGCTTTTGGTCAATTCTTACCAACAAAGCTTTTGGAATCGGTAGGTTTTGCAATTAATGTACATGCTTCTCTATTGCCAAAATATCGTGGTGGGGCACCAATTCATTATGCCATTATTAATGGCGAAAAAGAAGCTGGGGTTACCATCATGGAAATGGTTGCAAAGATGGATGCAGGGGATATGGTATCAAAAGCTTCCGTTGAGATAACTGATGAAGACAATGTAGGGACAATGTTTGATAGACTCGCCGTTGTTGGTCGTGACCTTTTATTAGATACGCTTCCAGGTTATCTATCAGGTGATATTAAGCCGATACCACAAAATGAAGAAGAGGTAAGTTTTTCTCCTAATATTAGTCCAGATGAAGAGAGAATTGATTGGAATAAATCATCGCGCGACATTTTTAACCATGTTCGAGGGATGTATCCATGGCCAGTTGCACATACCCTTTTGGAGGGAAATCGTTTTAAACTTTATGAAGTAACAATGTCAGAAGGAAAGGGCTCACCGGGTCAAGTGATCGCTAAGACAAAGAACTCATTGACAGTAGCAACTGGTGACGGAGCTATTGAACTCAAATCAGTTCAACCAGCAGGGAAACCTCGTATGGATATAAAAGACTTTTTAAATGGTGTTGGTCGTAATTTAGAAATAGGAGATAAATTTGGCGAATGA

SEQ ID NO: 644 - protein, 311 aa, Streptococcus agalactiae
MTKLLFMGTPDFSATVLKGILADGKYDVLAVVTQPDRAVGRKKEIKMTPVKEVALENNIPVYQPEKLSGSPELEQLMTLGADGIVTAAFGQFLPTKLLESVGFAINVHASLLPKYRGGAPIHYAIINGEKEAGVTIMEMVAKMDAGDMVSKASVEITDEDNVGTMFDRLAVVGRDLLLDTLPGYLSGDIKPIPQNEEEVSFSPNISPDEERIDWNKSSRDIFNHVRGMYPWPVAHTLLEGNRFKLYEVTMSEGKGSPGQVIAKTKNSLTVATGDGAIELKSVQPAGKPRMDIKDFLNGVGRNLEIGDKFGE

SEQ ID NO: 645 - protein, 1281 aa, Streptococcus agalactiae
ATGACTTTAGAGGAAGTTTTTGATAAAGGAGCTTATTCTAATATCGCACTTAATAAGAGTTTAAAAAAATCTAGACTATCAGATAAAGATCGTGCCTTAGTAACAGAAATTGTCTATGGAACTGTGGCTAGAAAAATAACGCTAGAATGGTATCTATCACACTTTATAGTTGATCGTGATAAGCTTGAATTATGGGTATATCATCTCTTGCTACTGAGCCTTTATCAACTACTCTATCTGGACAACATCCCAGATCACGCTATTGTTAATGATGCTGTCACTATTGCTAAGAATCGAGGCAATAAAAAGGGTGCTGAAAAGTTAATTAATGCCGTTTTACGAAGAGTAAGTTCGGAGACGCTCCCTGAAATTGCATCAATAAAACGCCAAAACAAACGTTACTCTGTTGCTTATTCCATGCCAGTGTGGCTCGTAAAAAAATTAATTGACCAATATGGTGAGACAAGAGCTTTAGCTATTATGGAGAGTTTATTTGAGCGAAATAAAGCCAGTCTTCGTGTGACTGACTTATCGCAAAAACAAACTATCAAAGAAACTTTAAATGTTAGAGATTCACATATTGCAGAGACAGCTTTAGTTGCAGACTCAGGAAATTTTGCATCGACATCATTTTTCCAAGATGGCCTCATTACTATCCAAGATGAATCTAGTCAATTAGTTGCTCCAACACTCAAAGTCTCAGGTAATGACCAAGTATTGGATGCATGTAGTGCACCAGGAGGAAAAACAAGTCATATCGCCTCATATTTGACTACAGGGGCAGTAACTGCTTTAGATTTGTATGATCATAAATTGGAATTGGTTATGGAAAATGCAAAACGCCTAGGTCTGTCAGATAAGATAAAAACTAAAAAGTTAGATGCAAGTAAAGCTCATGAGTATTTTCTTGAGGATACTTTTGACAAAATTTTAGTAGACGCACCTTGTTCAGGTATCGGGCTAATTCGCCGTAAACCAGATATTAAGTACAATAAAGCTAATCAAGACTTTGAAGCACTCCAAGAGATTCAATTGTCTATCCTATCTAGCGTTTGTCAAACGCTACGTAAAGGTGGTATAATAACCTATAGCACTTGTACCATTTTTGAGGAAGAAAATTTTCAAGTTATTGAAAAATTCTTAGAAAACCACCCCAATTTTGAGCAAGTAGAACTGAGTCATACACAAGAGGATATTGTAAAGAGAGGCTGTATTAGTATAAGCCCTGAACAATATCATACAGATGGCTTTTTTATTGGACAAGTCAAACGTATCTTGTAG

SEQ ID NO: 646 - protein, 426 aa, Streptococcus agalactiae
MTLEEVFDKGAYSNIALNKSLKKSRLSDKDRALVTEIVYGTVARKITLEWYLSHFIVDRDKLELWVYHLLLLSLYQLLYLDNIPDHAIVNDAVTIAKNRGNKKGAEKLINAVLRRVSSETLPEIASIKRQNKRYSVAYSMPVWLVKKLIDQYGETRALAIMESLFERNKASLRVTDLSQKQTIKETLNVRDSHIAETALVADSGNFASTSFFQDGLITIQDESSQLVAPTLKVSGNDQVLDACSAPGGKTSHIASYLTTGAVTALDLYDHKLELVMENAKRLGLSDKIKTKKLDASKAHEYFLEDTFDKILVDAPCSGIGLIRRKPDIKYNKANQDFEALQEIQLSILSSVCQTLRKGGIITYSTCTIFEEENFQVIEKFLENHPNFEQVELSHTQEDIVKRGCISISPEQYHTDGFFIGQVKRIL

SEQ ID NO: 647 - protein, 738 aa, Streptococcus agalactiae
ATGGAAATATCTCTTTTAACAGATATTGGGCAACGTCGTTCCAATAATCAAGATTTTATTAATCAATTTGAAAATAAAGCCGGCGTCCCACTAATCATCTTAGCAGATGGTATGGGAGGACATCGTGCAGGAAATATTGCTAGCGAGATGACTGTAACTGATCTAGGAAGTGATTGGGCGGAGACAGATTTTTCTGAGTTATCAGAAATTCGTGATTGGATGCTTGTCTCTATTGAAACAGAGAATCGCAAAATATATGAATTAGGTCAGTCAGATGATTACAAAGGTATGGGAACTACCATTGAAGCAGTTGCCATTGTAGGAGATAATATTATTTTCGCACATGTAGGAGATTCACGTATCGGTATCGTTCGTCAAGGAGAGTATCATTTATTGACGAGTGATCATTCTCTTGTTAATGAATTGGTAAAAGCTGGCCAATTAACAGAAGAAGAAGCTGCTAGTCATCCTCAAAAAAATATTATTACGCAATCAATTGGTCAAGCCAATCCAGTCGAACCTGATTTAGGAGTTCATCTACTTGAAGAAGGTGACTACCTTGTAGTTAATAGTGATGGACTAACTAATATGTTGAGTAATGCCGATATTGCTACAGTACTAACACAAGAAAAAACCTTAGATGATAAGAATCAAGATTTAATCACTCTAGCAAACCATAGAGGAGGTCTTGATAATATCACTGTGGCACTAGTTTACGTTGAAAGTGAGGCGGTTTAA

SEQ ID NO: 648 - protein, 245 aa, Streptococcus agalactiae
MEISLLTDIGQRRSNNQDFINQFENKAGVPLIILADGMGGHRAGNIASEMTVTDLGSDWAETDFSELSEIRDWMLVSIETENRKIYELGQSDDYKGMGTTIEAVAIVGDNIIFAHVGDSRIGIVRQGEYHLLTSDHSLVNELVKAGQLTEEEAASHPQKNIITQSIGQANPVEPDLGVHLLEEGDYLVVNSDGLTNMLSNADIATVLTQEKTLDDKNQDLITLANHRGGLDNITVALVYVESEAV

SEQ ID NO: 649 - protein, 1890 aa, Streptococcus agalactiae
ATGGCGGATGTTTATCTAGCTCGAGATCTAATTTTAGATAATGAAGAGGTCGCAATAAAAGTATTGCGAACCAATTATCAAACAGATCAGATTGCGGTTGCTCGCTTCCAGAGAGAAGCACGAGCAATGGCTGAGCTGACACATCCTAATATTGTCGCTATTCGTGATATAGGTGAAGAAGACGGACAGCAGTTCTTAGTAATGGAATATGTTGATGGATTCGATTTAAAAAAGTATATTCAAGACAATGCACCCCTATCAAATAATGAAGTTGTTCGAATCATGAATGAAGTCCTTTCAGCCATGTCACTGGCACATCAGAAAGGTATCGTACACCGTGATTTAAAACCTCAAAATATTTTATTAACTAAAAAAGGGACTGTAAAAGTTACAGATTTCGGTATTGCGGTAGCGTTTGCTGAAACTAGTTTAACGCAAACGAATTCTATGTTAGGTAGTGTTCATTATTTATCGCCAGAGCAGGCGCGTGGTTCAAAAGCGACTGTTCAGAGTGATATTTATGCCATGGGAATCATGCTTTTTGAAATGTTAACTGGCCATATTCCTTATGATGGGGATAGTGCAGTTACTATTGCCCTACAGCACTTCCAAAAACCACTACCATCAATCCTTGCAGAAAATAAAAGCGTTCCACAAGCTTTGGAAAACATTGTCATTAAAGCAACAGCTAAAAAGCTAACAGATCGCTATAAGACAACTTATGAGATGGGACGTGATTTATCAACTGCTCTAAGCTCGACACGTCACCGTGAACCAAAACTTGTTTTTAATGATACTGAGAGTACTAAGACACTACCCAAAGTAACATCTACAGTATCATCTCTAACGACAGAACAACTGTTGCGTAATCAAAAACAGGCCAAAACAACAGAAAAAATAACTCCTGATTCTGCGAGTAACGATAAAACGAAGTCTAAAAAGAAGGCTTCTCATCGACTTCTTGGTACAATCATGAAATTATTCTTTGCACTCTGTGTTGTAGGAATAATTGTATTTGCTTATAAAATTTTAGTAAGTCCTACGACTATTCGTGTTCCAGATGTTAGCAACAAAACAGTAGCTCAAGCAAAAATGACATTGGAAAATTCTGGATTGAAAGTAGGAGCTATTCGTAATATTGAGAGTGATAGTGTTTCAGAAGGACTTGTCGTAAAAACAGACCCTGCTGCAGGACGTTCTCGCAGAGAAGGGGCTAAAGTTAATCTTTATATTGCCACTCCAAACAAGAGTTTCACTCTAGGTAATTATAAGGAACATAATTACAAAGATATCCTCAAAGATCTTCAAGGCAAAGGTGTTAAAAAATCTTTAATCAAGGTTAAGCGTAAAATTAATAATGATTATACTACTGGTACAATCTTAGCACAGTCGCTTCCAGAAGGAACATCTTTTAATCCTGATGGTAATAAGAAATTAACACTTACGGTTGCTGTTAATGATCCAATGATTATGCCTGATGTAACAGGTATGACTGTTGGAGAAGTAATAGAAACCTTGACAGACCTCGGATTAGATGCAGATAATCTTGTCTTCTATCAAATGCAAAATGGCGTTTATCAAACAGTAGTAACACCTCCATCTTCAAGTAAGATAGCAAGTCAGGATCCTTATTACGGAGGAGAAGTTGGATTAAGGAGAGGAGATAAAGTTAAGCTGTATCTTCTTGGTTCTAAAACAACGAATAACTCATCATCTACGCCAATAGATTCTTCGGCTTCAAGCTCAACAGGAACAACTACCTCGGATTCTGTAAGCTCATCAACGGATGCTAGCACTTCTGATAGTAGTAGCACTTCTACAAGTAGTTCAACACTACCAAGTGATAGTACAACTAATACAGGAACAGCTAACAATCCATTAACTCAATAA

SEQ ID NO: 650 - protein, 629 aa, Streptococcus agalactiae
MADVYLARDLILDNEEVAIKVLRTNYQTDQIAVARFQREARAMAELTHPNIVAIRDIGEEDGQQFLVMEYVDGFDLKKYIQDNAPLSNNEVVRIMNEVLSAMSLAHQKGIVHRDLKPQNILLTKKGTVKVTDFGIAVAFAETSLTQTNSMLGSVHYLSPEQARGSKATVQSDIYAMGIMLFEMLTGHIPYDGDSAVTIALQHFQKPLPSILAENKSVPQALENIVIKATAKKLTDRYKTTYEMGRDLSTALSSTRHREPKLVFNDTESTKTLPKVTSTVSSLTTEQLLRNQKQAKTTEKITPDSASNDKTKSKKKASHRLLGTIMKLFFALCVVGIIVFAYKILVSPTTIRVPDVSNKTVAQAKMTLENSGLKVGAIRNIESDSVSEGLVVKTDPAAGRSRREGAKVNLYIATPNKSFTLGNYKEHNYKDILKDLQGKGVKKSLIKVKRKINNDYTTGTILAQSLPEGTSFNPDGNKKLTLTVAVNDPMIMPDVTGMTVGEVIETLTDLGLDADNLVFYQMQNGVYQTVVTPPSSSKIASQDPYYGGEVGLRRGDKVKLYLLGSKTTNNSSSTPIDSSASSSTGTTTSDSVSSSTDASTSDSSSTSTSSSTLPSDSTTNTGTANNPLTQ

SEQ ID NO: 651 - protein, 696 aa, Streptococcus agalactiae
ATGAAAAAATTTCAGTTTTTTCTACTTGTTGAAGCCGTTGTCTTAGTTATGGGATTAATGAAAATTTTATCTGATGACTGGACAAGTTTTATTTTTATTCTCGCTTTGATTCTTTTAGCCTTAAGATTTTATAACAACGATAGTCGTCATAATTTTCTGTTAACGACAAGTTTGTTATTACTATTTTTAATCTTTATGCTTAACCCTTACATTATTGCAGCCGTTGTTTTTGCAGTTTTGTATGTTCTAATCAATCATTTCTCGCAAGTTAAGAAAAAAAATCGTTATGCTTTGATTCAATTTAAGAATCATCAATTAGATGTTAAGACAACACGAAACCAATGGTTAGGTACTGATCAACACGAAAGTGACTTTTATGCTTTTGAAGATATTAATATTATAAGAATCTCTGGGACTGATACAATTGATTTAACAAATGTTATTGTATCTGGGCAGGATAATGTTATTATAATTCAAAAAGTTTTTGGTGATACTAAAGTATTGGTTCCTTTAGACGTTGCCGTAAAGGCTGATATTAGTTCTGTTTACGGTAGTGTACAGTACTTTGATTTTGAGGAGTATGATCTAAGAAATGAATCTATAAAATTGTCACAAGAGGAAGAATATTACCTTTTGAAACGTGTCAAATTAGTTGTAAACACTATCGCTGGGAAAGTTGAGGTTAGTCGTAAATGA

SEQ ID NO: 652 - protein, 231 aa, Streptococcus agalactiae
MKKFQFFLLVEAVVLVMGLMKILSDDWTSFIFILALILLALRFYNNDSRHNFLLTTSLLLLFLIFMLNPYIIAAVVFAVLYVLINHFSQVKKKNRYALIQFKNHQLDVKTTRNQWLGTDQHESDFYAFEDINIIRISGTDTIDLTNVIVSGQDNVIIIQKVFGDTKVLVPLDVAVKADISSVYGSVQYFDFEEYDLRNESIKLSQEEEYYLLKRVKLVVNTIAGKVEVSRK

SEQ ID NO: 653 - protein, 1020 aa, Streptococcus agalactiae
ATGAAAAAGCACCACTACTTTTTAGCTTTCTTCTATGGAAGTGTCATTATATTTGCCATTTGTTTTGTCATTATTGATAGTTTGGGTGTTAATTTGGTGCACCTCTATCAAACGTCTCGTTTGTGGCTGATTGAACAATTGATTTTCTCTATTTTCTTTCTATCTTTAGCGGTAACTATCCTTTTATTGCTAACTTGGTTTTTATTAGATGATAATAGTAAACGTCAAATTAACCATAATTTACGTCGCATTTTAAATAACCAATCAATAAATGTTACCGATGATGGTACTGAAATATCGACCAATATTCAACGGCTCTCTAAAAAAATGAATTTAATGACAGCAAGTCTACAATCTAAGGAAAATAGTCGTATTTTAAAAAGCCAAGAAATTGTGAAACAAGAACGTAAGCGTATTGCACGTGATTTACACGACACAGTTAGTCAGGATTTGTTCGCTGCTTCCATGGTTTTGTCAGGGATAGCACAGAATGTTTCTCAGCTAGACGTTGATCAGGTTGGCTCGCAATTATTAGCAGTAGAAGAAATGCTTCAGCATGCACAAAATGATTTGAGAATTCTGCTACTTCATTTGAGGCCAGTTGAATTAGAAAATAAGACCCTATCTGAAGGATTCAGAATGATATTGAAAGAATTGACCGATAAGAGCGACATTGAAGTTGTTTATCATGAATCAATTCTAACCTTACCCAAAAAGATTGAAGACAATATTTTTAGAATTGGTCAAGAATTTATCAGTAATACTTTAAAGCATTCACAAGCCAGTCGTCTCGAAGTTTACCTTAATCAAACAGAGAATGAATTGCAGTTAAAAATGATTGATAATGGTATTGGATTTGATATGGATTCTGTCTATGATTTAAGTTATGGGTTAAAAAATATTGAAGATCGAGTAGAAGATTTAGCAGGAAATTTACAGCTTCTCAGTCAGCCTGGTAAAGGAGTTGCTATGGATATAAGATTACCTTTAGTAAATCAGAGTGAGGATAAAAATGGATAA

SEQ ID NO: 654 - protein, 339 aa, Streptococcus agalactiae
MKKHHYFLAFFYGSVIIFAICFVIIDSLGVNLVHLYQTSRLWLIEQLIFSIFFLSLAVTILLLLTWFLLDDNSKRQINHNLRRILNNQSINVTDDGTEISTNIQRLSKKMNLMTASLQSKENSRILKSQEIVKQERKRIARDLHDTVSQDLFAASMVLSGIAQNVSQLDVDQVGSQLLAVEEMLQHAQNDLRILLLHLRPVELENKTLSEGFRMILKELTDKSDIEVVYHESILTLPKKIEDNIFRIGQEFISNTLKHSQASRLEVYLNQTENELQLKMIDNGIGFDMDSVYDLSYGLKNIEDRVEDLAGNLQLLSQPGKGVAMDIRLPLVNQSEDKNG

SEQ ID NO: 655 - protein, 642 aa, Streptococcus agalactiae
ATGGATAAAATAAAAATTGTACTTGTTGATGACCATGAGATGGTTCGTCTCGGTTTAAAAAGTTTTTTAAACTTACAAGCTGATGTTGAAGTAATAGGTGAGGCCTCAAATGGTTTAGAAGGCATAAAAAAAGCACTGGAGTTACGTCCAGACGTTGTTGTTATGGACTTAGTAATGCCTGAAATGGACGGTGTAGAAGCAACCTTAGCATTATTGAAGGATTGGCCAGAAGCTGCCATTTTAGTCTTAACATCTTACTTGGATAATGAAAAAATTTACCCTGTTATTGAAGCAGGTGCCAAAGGCTATATGTTAAAGACCTCAAGCGCAGCAGAGATTCTTAATGCCATTCGTAAAGTTTCAAGGGGAGAACAAGCTATTGAAAATGAAGTAGATAAGAAAATTAAGGCTCATGATAAATGTCCAGCTTTACATGAGGGCTTAACAGCAAGGGAACGTGATATCCTTAATTTATTAGCCAAAGGTTATGACAATCAAAGGATTGCTGATGAATTATTTATCTCGTTAAAGACTGTTAAAACTCATGTTTCTAATATTTTGGGAAAACTAAATGTAGCAGATCGAACTCAAGCAGTTGTCTATGCTTTCCAACACCATTTGGTACCACAAGATGATGAATAA

SEQ ID NO: 656 - protein, 213 aa, Streptococcus agalactiae
MDKIKIVLVDDHEMVRLGLKSFLNLQADVEVIGEASNGLEGIKKALELRPDVVVMDLVMPEMDGVEATLALLKDWPEAAILVLTSYLDNEKIYPVIEAGAKGYMLKTSSAAEILNAIRKVSRGEQAIENEVDKKIKAHDKCPALHEGLTARERDILNLLAKGYDNQRIADELFISLKTVKTHVSNILGKLNVADRTQAVVYAFQHHLVPQDDE

SEQ ID NO: 657 - protein, 1401 aa, Streptococcus agalactiae
ATGGACGCAAAAACTAAATATAAAGCAAAAAAAATAAAGGCAGTGTTTTTTGATATTGATGACACGCTTCGTGTTAAAGATACAGGTTATATGCCACCATCAATCTTAAAAGTTTTTAAAGCTTTGAAAGATAAAGGAATCGTTGTAGGTATTGCTTCAGGAAGAGCACGATATGGCGTTCCAAAAGAAGTTCAAGATTTAAATGCCGATTATTGTGTAAAATTAAATGGAGCTTACGTTAAGGACAAGGATAAGAATATTATCTTCCATCGTCCTATTCCAGCTGAATATGTAGAGCAATATAAGAAATGGGCGGACACTGTTGGTATTAAGTACGGTTTAGCTGGTCGTCATGAGGCAGTTTTATCAGATCGTGATGATTTGGTAAATGATGCGATTGATATTGTGTATTCTGATCTCGAAGTTAATCCAGATTTCAATAAAGAACATGATATTTATCAGATGTGGACATTTGAAGATAAAGGAGATAGCCTTCATCTACCTGAACCGTTAGCTGAACATCTTCGCTTGATACGTTGGCATGATCATTCTTCAGATGTTGTGTTAAAAGGAACATCGAAGGCTTTAGGTGTTTCTAAAGTTGTTGAACATTTGGGCTTAAAGCCAGAGAATATCTTGGTTTTCGGAGATGAGCTCAATGATTTAGAACTCTTTGATTATGCTGGACTAGCTGTGGCGATGGGAGTGTCACACCCAGAAGCTCAAAAAAAAGCAGATTTTATCACAAAAAAAGTAGAAGAAGATGGCATTTTGTATGCCCTGGAGGAACTAGGTTTGATAGAAAAAGAATTAACATTTCCACAAGTAGATATTGAAAATACAGAAGGTCCTGTGGCTGTCATTAAAACAAATCACGGGGATATGACTGTAAAACTCTTCCCGGATCATGCTCCTAAAACGGTAGCAAACTTTATTGGTTTAGCTAAACAAGGTTATTATGATGGTATTATCTTCCATCGTATTATTCCAGATTTTATGATTCAGGGTGGTGATCCAACTGGTACAGGTATGGGTGGTGAATCTATCTATGGGGAAAGTTTTGAAGACGAATTTTCCGAGGAATTATATAATGTTCGCGGAGCTCTTTCAATGGCTAATGCTGGACCAAATACGAATGGCAGCCAATTTTTCATCGTCCAAAATACAAAAATTCCTTATGCGAAAAAGGAATTAGAGCGAGGTGGTTGGCCAACACCAATTGCTGAGTTGTATGCTGGACAAGGTGGTACACCGCATCTAGATCGTCGCCACAGTGTATTTGGACAATTAGTAGACCAAAGTTCTTTTGAGGTACTTGATGAGATTGCGGCAGTAGAGACTGGTTCTCAAGACAAACCATTGGAAGATGTTGTTATTTTAACGATTGAGGTTAAAGAATAA

SEQ ID NO: 658 - protein, 466 aa, Streptococcus agalactiae
MDAKTKYKAKKIKAVFFDIDDTLRVKDTGYMPPSILKVFKALKDKGIVVGIASGRARYGVPKEVQDLNADYCVKLNGAYVKDKDKNIIFHRPIPAEYVEQYKKWADTVGIKYGLAGRHEAVLSDRDDLVNDAIDIVYSDLEVNPDFNKEHDIYQMWTFEDKGDSLHLPEPLAEHLRLIRWHDHSSDVVLKGTSKALGVSKVVEHLGLKPENILVFGDELNDLELFDYAGLAVAMGVSHPEAQKKADFITKKVEEDGILYALEELGLIEKELTFPQVDIENTEGPVAVIKTNHGDMTVKLFPDHAPKTVANFIGLAKQGYYDGIIFHRIIPDFMIQGGDPTGTGMGGESIYGESFEDEFSEELYNVRGALSMANAGPNTNGSQFFIVQNTKIPYAKKELERGGWPTPIAELYAGQGGTPHLDRRHSVFGQLVDQSSFEVLDEIAAVETGSQDKPLEDVVILTIEVKE

SEQ ID NO: 659 - protein, 375 aa, Streptococcus agalactiae
TTGAGGTTAAAGAATAAAATGAAGATTGGCGATAAGTTAAAGGGAACAGTCACTGGCATTAGGCCTTATGGAGCCTTTGTTTCTCTTGAGGATGGTAGGACTGGACTTATCCATATTTCTGAAATTAAAACAGGTTACATTGATAATATTTATGATGTTCTTAGTGTAGGTGATGAAGTCTATGTTCAGGTTATAGATGTAGATGAATTTACACAAAAAGCAAGTTTATCGCTTCGGACCCTTGAAGAAGAGAGACATCATATTCAGCATCGTCATCGATTTTCTAACAATCGTCTTAAGATAGGTTTCAAACCACTTGAGGAAAATTTACCTAGTTGGGTTGAGGAAGGTCTAGCCTACTTGAATAATAAATAA

SEQ ID NO: 660 - protein, 124 aa, Streptococcus agalactiae
MRLKNKMKIGDKLKGTVTGIRPYGAFVSLEDGRTGLIHISEIKTGYIDNIYDVLSVGDEVYVQVIDVDEFTQKASLSLRTLEEERHHIQHRHRFSNNRLKIGFKPLEENLPSWVEEGLAYLNNK

SEQ ID NO: 661 - protein, 777 aa, Streptococcus agalactiae
ATGACAAATGAAAAAGGTATTGTATTCAACATTCAACATTTTAGTATTCACGATGGTCCAGGTATTCGAACAACCGTTTTCTTAAAGGGTTGTCCTCTTAGATGTCCTTGGTGTGCTAATCCCGAGTCGCAAAAAATGGTTCCAGAAACAATGAGAGATGCCATTACTAATGAAAGCGTCATCGTGGGCGAAGAAAAATCGGTTGATGATATTATTGAAGAAGTTTTAAAAGATATTGATTTTTACGAAGAATCTGGTGGGGGCATAACGCTATCTGGCGGTGAAATATTTGCACAATTTGAATTTGCCAAGGCAATTTTAAAACGTGCTAAATCACTGGGAATCCACACGGCTATTGAAACAACTGCTTATACTAGACATGAACAATTCATAGATCTTATCCAATACGTTGATTTTATTTACACCGATTTAAAACATTACAATAGCCTCAAACACCAAGAAAAGACGATGGTTAAGAATGCTTCAATCATCAAAAACATTCATTATGCTTTTGCCAACGGTAAAACGATTGTGCTACGTATTCCTGTCATACCTAATTTTAACGATTCATTAGAAGATGCTGAAGAATTTGCTTGTTTATTTGATCGCCTAGATATCCGTCAAGTGCAACTCTTACCTTTCCACCAATTTGGGCAAAACAAATATCAATTACTTAATCGTCAATATGAAATGGAAGAGATCGCTGCACTACACCCAGAGGATCTACTCGATTATCAAGCTATTTTTAGCAAGTATAATATTCACTGCTACTTTTAA

SEQ ID NO: 662 - protein, 258 aa, Streptococcus agalactiae
MTNEKGIVFNIQHFSIHDGPGIRTTVFLKGCPLRCPWCANPESQKMVPETMRDAITNESVIVGEEKSVDDIIEEVLKDIDFYEESGGGITLSGGEIFAQFEFAKAILKRAKSLGIHTAIETTAYTRHEQFIDLIQYVDFIYTDLKHYNSLKHQEKTMVKNASIIKNIHYAFANGKTIVLRIPVIPNFNDSLEDAEEFACLFDRLDIRQVQLLPFHQFGQNKYQLLNRQYEMEEIAALHPEDLLDYQAIFSKYNIHCYF

SEQ ID NO: 663 - protein, 756 aa, Streptococcus agalactiae
ATGAATAGATTAGAAAATATTATTAGTTTAGTATCCCAGTACCAAAAAATAGATGTTAATACACTCTCGGAGTTGTTGCAAGTTTCTAAAGTAACGATACGTAAAGATTTAGATAAACTAGAAGGCAAAGGGCTTTTGCATAGAGAGCACGGTTATGCAGTTTTAAACAGTGGGGATGACCTTAATGTTAGGTTATCTTTTAACCATAAAACTAAAAAAGAAATTGCTGCCTTAGCTGCAAATATGGTGTCTGACAATGACACTATCTTAATAGAATCAGGCTCTACTTGTGCTCTTTTAGCAGAAAATATCTGTCAGACAAAGCGAAATGTCACTATTTTGACCAACTCTTGCTTTATTGCTAACTATTTACGAGAGTATGATTCATGCCAAATTGTCTTACTTGGTGGTGAGTATCAATCAAGTTCACAGGTTACGGTAGGTCCTCTCTTGAAAAAGATGATTTCACTTTTTCATGTCTCGTTAGCTTTTGTTGGGACTGATGGTTTTGATCCAAAACTAGGATTTATGGGTAGAGATTTAATGCGTTCTGAAGTTGCACAAGAGATGGCGAATGCTGCCGATGAAGTCATTATTTTAACAGATTCTAGTAAGTTTAATCAGACTGCATTGGTGGAACAGCTTCCGTTGTCAACTGTATCACAAGTTATTACAGATAAACATCCAAATTCGGAAATTGCTAATTTGTTCCAAGAAGCAGAGATTACCATTCAATCTTTATTACAAGTACCATAA

SEQ ID NO: 664 - protein, 251 aa, Streptococcus agalactiae
MNRLENIISLVSQYQKIDVNTLSELLQVSKVTIRKDLDKLEGKGLLHREHGYAVLNSGDDLNVRLSFNHKTKKEIAALAANMVSDNDTILIESGSTCALLAENICQTKRNVTILTNSCFIANYLREYDSCQIVLLGGEYQSSSQVTVGPLLKKMISLFHVSLAFVGTDGFDPKLGFMGRDLMRSEVAQEMANAADEVIILTDSSKFNQTALVEQLPLSTVSQVITDKHPNSEIANLFQEAEITIQSLLQVP

SEQ ID NO: 665 - protein, 984 aa, Streptococcus agalactiae
ATGAAATTAGAGCGTCAAAAATTGTTAGCTAAAGTAGCTTACCTTTACTATATGGAAGGGAAAAGCCAATCTGAGATTGCCAATGAATTAGGAATTTATCGTACAACAATAAGTCGTATGTTAGCCAAAGCGAGAGAAGAAGGTCTTGTTAGAATCGAAATTTCAGATTTTAATCCAGAAATTTTTCAGTTAGAATCCTATTTTAAAAGTAAATATCACCTTAAAGATATTGAGATTGTTTCTTCGCGAAAAGATAGCGATACTTCAGAGATAGAGAAGGATTTAGCACATGTAGCTGCAGCTATGATTCGAAAAAAAATTAAAGAGAATGACAAGGTGGGGATTGCTTGGGGGAGGACACTTAGTAAAGTAGTTGAAGCAATGCGTCCTCATCCGGTTTCTCAAGTTTCTTTTGTTCCTTTGGCCGGAGGTCCAAGTCATATTAATGCACGCTATCACGTTAATACTCTGGTTTACGAAATGTCAAGGCGTTTCCAAGGAAGTTGTACTTTCATTAATGCAACTCTAGTTCAAGAAAACGCTAATTTAGCGAAAGGAATATTAACTTCAAAATATTTTGAGGGGCTAATGGATAATTGGGAAAAACTTGATGTGGCAATTGTGGGCGTTGGTGGTAAACCTAAAAGCAATGAACAACAGTGGCTTGACCTTTTAAATCAAGATGATTTTCAATGCTTGGATGAAGAAGCAGCTGTAGGTGAAATTACTTGTCGTTTTTTTAATCATTCAGGTGATCCTGTGAATCAACATTTAGCTAAAAGGACAATAGGAATTACCTTAGAACAACTACAGAAAGTTCCTAATAGAATAGCGGTTGCTCATGGCAATTATAAGGCTGCGGCACTCTTAGCCGTTTTAAAAAAGGGGTATATTAATCATTTAGTTACTGATTTTTCCACAGCCTTAAATATTTTAAGATTAGATAAAGACACCTTTGTGGATACTATATATCAAAAGAGCTAG

SEQ ID NO: 666 - protein, 327 aa, Streptococcus agalactiae
MKLERQKLLAKVAYLYYMEGKSQSEIANELGIYRTTISRMLAKAREEGLVRIEISDFNPEIFQLESYFKSKYHLKDIEIVSSRKDSDTSEIEKDLAHVAAAMIRKKIKENDKVGIAWGRTLSKVVEAMRPHPVSQVSFVPLAGGPSHINARYHVNTLVYEMSRRFQGSCTFINATLVQENANLAKGILTSKYFEGLMDNWEKLDVAIVGVGGKPKSNEQQWLDLLNQDDFQCLDEEAAVGEITCRFFNHSGDPVNQHLAKRTIGITLEQLQKVPNRIAVAHGNYKAAALLAVLKKGYINHLVTDFSTALNILRLDKDTFVDTIYQKS

SEQ ID NO: 667 - protein, 324 aa, Streptococcus agalactiae
ATGGAAATCATAGTCGCAGACCAAATTATTATGGGGCTCATTTTGAATGCTGGGGATGCTAAACAACATATCTATCAAGCCTTAAAACTTGCAAAAGAAGGAAATTTTGCAGAAAGTAAGATTGAAATAGAACTAGCAGATAGTGCACTCCTAGAAGCTCATAATCTTCAAACACAATTCCTTGCACAAGAAGCAGGAGGGACAAGGACAGATATCTCAGCACTCTTTATTCATTCTCAGGATCATTTGATGACAAGTATTACTGAGATTAACTTGATTAAAGAAATTATTGATTTACGCCAGGAATTACATATTCAAAAATAA

SEQ ID NO: 668 - protein, 107 aa, Streptococcus agalactiae
MEIIVADQIIMGLILNAGDAKQHIYQALKLAKEGNFAESKIEIELADSALLEAHNLQTQFLAQEAGGTRTDISALFIHSQDHLMTSITEINLIKEIIDLRQELHIQK

SEQ ID NO: 669 - protein, 321 aa, Streptococcus agalactiae
ATGATAAAAATTGGTTTATTCTGTGCAGCAGGTTTTTCAACAGGTATGTTAGTAAACAATATGAAAATCGCAGCGGATAAAGAAGGGATAGAGGCACATATTGAAGCTTATTCACAAGGAAAAATTGCAGATTATGCTAAAGATTTAGATGTTGCATTACTTGGTCCACAAGTTAGCTATACTCTAGATAAATCAAAATCAATCTGTGATGAATACGGTGTACCGATAGCAGTTATTCCAATGGCAGATTATGGTATGTTGGATGGTGTAAAAGTTTTGAAACTTGCTTTGAGTTTATTGGAAACAAGAAAAGAGGCTTGA

SEQ ID NO: 670 - protein, 106 aa, Streptococcus agalactiae
MIKIGLFCAAGFSTGMLVNNMKIAADKEGIEAHIEAYSQGKIADYAKDLDVALLGPQVSYTLDKSKSICDEYGVPIAVIPMADYGMLDGVKVLKLALSLLETRKEA

SEQ ID NO: 671 - protein, 1302 aa, Streptococcus agalactiae
ATGTCAAAGTTTGATAGTCAGAAAATAATTACTCCGATTATGAAGTTTGTCAATATGCGAGGGATTATTGCACTCAAAGATGGCATGCTAGCAATTCTACCACTAACAGTTGTTGGGAGTCTCTTTTTAATATTAGGGCAGCTTCCATTTAAAGGTCTTAATCAAGCCATAGCTAATGTTTTTGGACCAGAATGGACAGAACCATTTATGCAAGTTTATTCAGGAACTTTTGCGATTATGGGCTTGATTTCCTGTTTTGCAATTGCTTATGCTTATGCTAAAAATAGTAGTGTAGAACCGTTACCTGCTGGCGTTTTATCACTTTCGTCTTTCTTTATTTTAATGAAATCATCTTATATTCCTGTAAAAGGAGAAGCAATAGCGGATGCTATTTCTAAGGTTTGGTTTGGCGGTCAGGGGATTATTGGAGCAATTATTATTGGCTTAGTAGTTGGTGCTATCTATACATGGTTTATCCAACATCATATTGTTATAAAAATGCCAGAGCAAGTACCACAGGCAATAGCAAAACAATTTGAAGCTATGATTCCAGCTTTTGTTATCTTTCTTTTATCGATGATTGTTTATTTGATTGCTAAGGTAACAACTGGAGGTACCTTTATTGAGATGATTTATGATATCATTCAAGTACCGTTGCAAGGCTTAACAGGCTCACTTTATGGAGCAATTGGGATTGCTTTCTTTATTTCATTCTTATGGTGGTTTGGTGTCCATGGCCAATCTGTGGTGAATGGTATTGTGACTGCTTTGTTACTATCCAATTTAGATGCCAATAAGTCTTTATTAGCAGCAAATCGCTTAACATTAGATAATGGCGCTCACATTGTAACACAGCAGTTTTTGGATAGTTTCTTGATTTTATCGGGCTCAGGAATAACTTTTGGACTAGTTATTGCGATGCTTTTTGCAGCAAAATCAAAACAATACAAGGCACTTGGGAAAGTGGCCGCTTTTCCCGCAATTTTCAATGTTAACGAGCCAATCGTCTTTGGCTTTCCAATCGTAATGAATCCTGTGATGTTTCTGCCTTTTATTTTAGTACCAGTTTTGGCAGCTTTAATTGTTTATGGAGCTATTGCGGGTGGTTTTATGCAACCATTCTCAGGTGTTACTTTACCATGGAGTACTCCAGCAATTATTTCTGGATTCATGGTAGGTGGTTGGCAAGGTGCACTCGTCCAAATAGTCATTTTAGCTATCTCAACTGCTGTTTACTTCCCATTCTTTAAAATCCAAGATAATATTACTTACAAAAATGAATGTGAAATGGAAAGGGGATAG

SEQ ID NO: 672 - protein, 433 aa, Streptococcus agalactiae
MSKFDSQKIITPIMKFVNMRGIIALKDGMLAILPLTVVGSLFLILGQLPFKGLNQAIANVFGPEWTEPFMQVYSGTFAIMGLISCFAIAYAYAKNSSVEPLPAGVLSLSSFFILMKSSYIPVKGEAIADAISKVWFGGQGIIGAIIIGLVVGAIYTWFIQHHIVIKMPEQVPQAIAKQFEAMIPAFVIFLLSMIVYLIAKVTTGGTFIEMIYDIIQVPLQGLTGSLYGAIGIAFFISFLWWFGVHGQSVVNGIVTALLLSNLDANKSLLAANRLTLDNGAHIVTQQFLDSFLILSGSGITFGLVIAMLFAAKSKQYKALGKVAAFPAIFNVNEPIVFGFPIVMNPVMFLPFILVPVLAALIVYGAIAGGFMQPFSGVTLPWSTPAIISGFMVGGWQGALVQIVILAISTAVYFPFFKIQDNITYKNECEMERG

SEQ ID NO: 673 - protein, 2457 aa, Streptococcus agalactiae
ATGACCAAACAATTACTCACTCAAAAATATACAAATGATGTTCAACAAAATTCTCAAAAGCATTTTGGCTATTTGACAGAGCGCATGTATTCTTATCGCGATAAGGTTCTTGATAAGAAACCATTCATAGATGCAGAACGTGCTATCTTGGTAACTGAAGCCTATCAAAAGCATCAGGAAAAACCTAATGTTTTAAAGAGAGCTTACATGTTGCAAAATATTTTGGAAAAAATGACAATCTATATTGACGATGAGACAATGATTGTCGGTAACCAAGCTTCATCTGATAAAGATGCTCCTATTTTTCCAGAATACACTCTAGAATTTGTTGTAAATGAACTAGACCTTTTTGAAAAACGAGATGGTGATGTCTTTTACATTACAGAAGAAACCAAAGAACAAATTAGAAATATTGCACCTTTCTGGGAAAATAATAATTTACGGGCTCGTGCGGGCGTTATGCTTCCAGAAGAAGTTCAAGTTTATATGGAGACAGGCTTCTTTGGGATGGAAGGTAAGATGAATTCTGGGGATGCTCACTTAGCTGTCAACTATCAGAAGTTACTAGAAGAAGGGCTTATTGGCTTTGAAAAAAAAGCAAGAAAAGCTAAAGCTGACTTAGATTTAACAAAGCCTGAGAGTATTGACAAATATCATTTCTATGATTCTATTTTAATTACAATAGAAGCTGTTAAAACCTATGCAGAGCGTTTTGCTATCCTAGCAAAAAAACAAGCTAAAACAGCAAATGCTAAGAGACGTCAGGAATTGTTAGATATCGCTAGTATTTGTGAACGAGTGCCCTATTACCCAGCTGAAACGTTTGCAGAAGCCGTTCAATCGGTTTGGTTTATTCAGTGTATTCTTCAAATAGAATCAAACGGTCATTCTCTATCTTATGGACGCTTTGATCAATACATGTATCCATATGTTAAATCTGACTTAGAAGCTGGACGTGAGACTGAGGATTCGATCGTTGAGCGCCTAACTAACCTATGGATTAAAACAATAACTATTAATAAGGTTCGTAGCCAAGCTCATACGTTTTCGTCTGCTGGTAGTCCTCTTTACCAAAATGTAACGATTGGAGGACAAACACGACATAAGGAAGATGCTGTTAATCCTTTATCATTTCTAGTACTAAAATCAGTCGCTCAGACACACTTACCACAGCCTAATCTAACGGTTCGTTATCATGCTAACCTAGACAAGTCATTCATGAATGAAGCTATTGAAGTTATGAAATTAGGCTTTGGTATGCCAGCTTTTAATAATGATGAAATTATTATTCCATCATTTATTAAAAAAGGAGTTTCCGAAGAAGATGCCTATGATTATTCAGCGATTGGTTGTGTCGAAACAGCAGTTCCTGGGAAATGGGGTTATCGTTGTACCGGCATGAGCTATATCAACTTCCCTAAAGTGTTATTAATTACAATGAATGACGGTATTGACCCGGCTTCTGGGAAGAGATTTGCGCCTTCTTATGGGCATTTCACCCAGATGACCTCATATAAAGAACTTAAAGAAGCTTGGGACAAAACACTTCGTTACTTAACTCGAATGAGCGTTATTGTTGAAAATGCTATTGATATTAGTCTCGAAAGAGAAGTACCTGATATTCTTTGTTCAGCTTTAACTGATGATTGTATTGGACGAGGTAAGCACTTAAAAGAAGGTGGTGCAGTATATGACTACATATCTGGTCTACAAGTTGGAATCGCTAATCTTTCAGACTCACTTGCTGCGCTTAAAAAATTAGTATTTGAAGAAAAACGCCTAACCACATTAGAAGTATGGCAAGCATTGCAGAGTGATTACGCAGGTCCGCGTGGTGAAGAAATTCGTCAAATGTTGATCAATGAAGCACCAAAATATGGAAATGATGATGACTACGCGGATAGTTTAGTACGTGAGTGTTATGATGTTTATGTTGAAGAAATTGCTAAATATCCCAACACACGCTATGGACGTGGACCAATCGGTGGTATTCGCTATTCAGGAACGTCCTCTATTTCAGCAAATGTAGGCCAAGGACGAGGTACTTTAGCAACTCCAGATGGTAGGCATGCAGGAACTCCATTAGCTGAAGGTTGTTCACCATCTCATAATATGGACAAAAAGGGACCTACCTCTGTTTTGAAATCAGTTTCGAAGTTACCAACTGATGAGATTGTCGGCGGTGTACTCCTTAACCAAAAAGTCAACCCTCAAACCTTGGCAAAAGAAGAAGATAAACAAAAATTAATTGCCTTACTTAGAACATTCTTCAATCGCCTTTATGGTTACCATATCCAGTATAATGTTGTCTCACGTGAGACTTTGATTGATGCTCAGAAGCACCCTGAAAAACACCGCGATTTGATTGTGCGTGTAGCAGGTTATTCTGCATTCTTTAATGTCCTATCTAAGGCAACTCAAGATGATATTATTGCACGTACAGAACATGCTCTTTAG

SEQ ID NO: 674 - protein, 818 aa, Streptococcus agalactiae
MTKQLLTQKYTNDVQQNSQKHFGYLTERMYSYRDKVLDKKPFIDAERAILVTEAYQKHQEKPNVLKRAYMLQNILEKMTIYIDDETMIVGNQASSDKDAPIFPEYTLEFVVNELDLFEKRDGDVFYITEETKEQIRNIAPFWENNNLRARAGVMLPEEVQVYMETGFFGMEGKMNSGDAHLAVNYQKLLEEGLIGFEKKARKAKADLDLTKPESIDKYHFYDSILITIEAVKTYAERFAILAKKQAKTANAKRRQELLDIASICERVPYYPAETFAEAVQSVWFIQCILQIESNGHSLSYGRFDQYMYPYVKSDLEAGRETEDSIVERLTNLWIKTITINKVRSQAHTFSSAGSPLYQNVTIGGQTRHKEDAVNPLSFLVLKSVAQTHLPQPNLTVRYHANLDKSFMNEAIEVMKLGFGMPAFNNDEIIIPSFIKKGVSEEDAYDYSAIGCVETAVPGKWGYRCTGMSYINFPKVLLITMNDGIDPASGKRFAPSYGHFTQMTSYKELKEAWDKTLRYLTRMSVIVENAIDISLEREVPDILCSALTDDCIGRGKHLKEGGAVYDYISGLQVGIANLSDSLAALKKLVFEEKRLTTLEVWQALQSDYAGPRGEEIRQMLINEAPKYGNDDDYADSLVRECYDVYVEEIAKYPNTRYGRGPIGGIRYSGTSSISANVGQGRGTLATPDGRHAGTPLAEGCSPSHNMDKKGPTSVLKSVSKLPTDEIVGGVLLNQKVNPQTLAKEEDKQKLIALLRTFFNRLYGYHIQYNVVSRETLIDAQKHPEKHRDLIVRVAGYSAFFNVLSKATQDDIIARTEHAL

SEQ ID NO: 675 - protein, 669 aa, Streptococcus agalactiae
ATGGAATTTTTACTTGACACTTTAAATTTAGAAGCTATAAAAAAATGGCATCATATACTGCCACTAGCAGGTGTAACTTCAAATCCCACCATTGCTAAGAAAGAAGGAGATATACATTTTTTCCAACGCATTCGTGATGTTCGAGAAATTATTGGACGTGAAGCAAGTTTGCATGTTCAAGTAGTGGCCAAAGATTATCAAGGAATATTGGATGATGCTGCTAAAATACGCCAAGAAACGGACGATGACATTTATATCAAAGTCCCAGTTACGCCAGATGGATTAGCAGCAATTAAAACGTTAAAAGCAGAAGGTTATAATATTACAGCCACAGCAATATACACCAGTATGCAAGGTCTTTTGGCTATATCAGCTGGAGCAGACTACCTAGCACCTTACTTTAACCGAATGGAGAACCTTGATATTGATGCGACACAAGTTATTAAGGAATTAGCGCAAGCAATAGAGCGGACAGGTTCTTCTAGCAAAATTTTAGCAGCTAGTTTTAAAAACGCTTCACAAGTAACGAAGGCCTTATCACAGGGTGCTCAATCAATCACCGCGGGACCAGATATTTTTGAATCAGTCTTTGCGATGCCATCTATTGCAAAAGCTGTTAACGACTTTGCAGATGATTGGAAAGCCAGTCAACACTCAGAACATATTTAA

SEQ ID NO: 676 - protein, 222 aa, Streptococcus agalactiae
MEFLLDTLNLEAIKKWHHILPLAGVTSNPTIAKKEGDIHFFQRIRDVREIIGREASLHVQVVAKDYQGILDDAAKIRQETDDDIYIKVPVTPDGLAAIKTLKAEGYNITATAIYTSMQGLLAISAGADYLAPYFNRMENLDIDATQVIKELAQAIERTGSSSKILAASFKNASQVTKALSQGAQSITAGPDIFESVFAMPSIAKAVNDFADDWKASQHSEHI

SEQ ID NO: 677 - protein, 1089 aa, Streptococcus agalactiae
ATGAAAGTTTTCGCAAGTCCATCGCGCTATATACAAGGAAAGGATGCTTTATTCCAAAGTATTGAACATATCAAATCTTTAGGTCAGACTCCACTTATCCTTTGTGATGATGTTGTTTATAATATCGTTGGAGAAAGGTTTTTATCTTATCTACAAGACGATTTGTTACCACATCGTGTTTCCTTTAACGGAGAAGCATCTGATAATGAAATCAATCGTGTCGTTGCTGTTGCGAAAGAAAAGAATAGTGACCTTATTATTGGACTTGGTGGTGGAAAAACTATTGACTCTGCAAAGGCAATTGCAGATAAAGTTAATTTACCAGTGGTCATTGCACCAACAGTAGCTTCAACAGATGCCCCAACATCAGCGTTATCAGTAATCTATACAGATGAAGGAGCTTTTGAAAAATATATTTTTTATTCAAAGAATCCAGACTTAGTTTTAGTTGATACTCAAGTAATTGCCCAAGCGCCAAAACGTTTACTAGCTTCTGGGATAGCAGATGGCTTAGCTACTTGGGTTGAAGCGAGAGCAGTCTTACAAAAAAATGGGATAGCGATGGCTGGCGGTAGACAGACTTTAGCGGGCGTGGCAATTGCCCAAGCATGTGAGCGTACTTTATTTAATGATAGTTTACAAGCTTTAGCGGCTTGTGATGCCAAAGTGGTTACAAAAGCTTTAGAAAATGTTATTGAAGCTAATACCTTACTTAGTGGTTTAGGTTTTGAAAGTGCAGGATTAGCTGCAGCTCATGCTATTCATAATGGTTTTACTGCCTTGAGTGGAGATATTCATCACTTAACCCATGGTGAAAAAGTTGCCTATGGAACGTTGACGCAACTTTTCCTCGAAAATAGACCAAAGGAAGAAATTGATCGCTACATTAATCTTTACCAAGCGATTGGAATGCCAACTACACTTGCAGAACTCCATTTGGGTGATGCAACATATGAAGAACTTTTAAAAGTTGGTCAGCAAGCAACAATTGAAGGTGAAACAATACATGAAATGCCATTCAAAATTAGTGCAGAGGATGTCGCTGCAGCCCTGTTAACGGTTGACCGTTATGTTTCAAATCATCAATAA

SEQ ID NO: 678 - protein, 362 aa, Streptococcus agalactiae
MKVFASPSRYIQGKDALFQSIEHIKSLGQTPLILCDDVVYNIVGERFLSYLQDDLLPHRVSFNGEASDNEINRVVAVAKEKNSDLIIGLGGGKTIDSAKAIADKVNLPVVIAPTVASTDAPTSALSVIYTDEGAFEKYIFYSKNPDLVLVDTQVIAQAPKRLLASGIADGLATWVEARAVLQKNGIAMAGGRQTLAGVAIAQACERTLFNDSLQALAACDAKVVTKALENVIEANTLLSGLGFESAGLAAAHAIHNGFTALSGDIHHLTHGEKVAYGTLTQLFLENRPKEEIDRYINLYQAIGMPTTLAELHLGDATYEELLKVGQQATIEGETIHEMPFKISAEDVAAALLTVDRYVSNHQ

SEQ ID NO: 679 - protein, 927 aa, Streptococcus agalactiae
ATGTCAAAAATTTATAATTCTATTACAGACTTAATCGGAAATACACCCATTATTCAATTACATCATATTGTTCCAGAAGGAGCTGCAGAGGTGTACGTTAAGTTAGAATCCTTTAACCCAGGTTCATCTGTCAAAGATCGTATCGCTCTAGCTATGATTGAAGATGCAGAGCAAAAAGGGATTCTTAAAGCCGGAGATACAATCGTAGAACCTACATCTGGTAATACAGGTATCGGTTTGGCTTGGGTAGGAAAAGCTAAAGGGTATAATGTTATTATTGTTATGCCAGAAACCATGTCAATTGAACGTCGTAAAATCATTCAAGCCTATGGTGCTCAATTAGTACTAACACCTGGTAGTGAAGGGATGAAGGGAGCTATTGCTAAGGCAAAAGAAATTTCTGCAGAGCAAAATGCTTGGCTACCCCTGCAATTTAATAATCAAGCCAATCCAGAAATCCACGAAAAAACGACTGGTAGGGAAATTATCGAGACTTTTGGTGAAAAAGGTTTAGATGCTTTTATCGCAGGTGTGGGAACTGGTGGGACAATTACTGGTGTCTCTCGTGCATTAAAAAAAGTCAATCCTGATGTCGCTATTTATGCTGTAGAAGCTGATGAATCTGCAATCCTTTCTGGTGAGCAACCTGGGCCTCATAAAATACAAGGGATTTCTGCAGGTTTCATTCCAGAAACATTGGCTACAGATTCTTATGATCATATCATTCGCGTTACATCTGACGATGCTATTGAAACAGGACGTATCATCGGCGGACTAGAAGGTTTCCTCGCAGGAATTTCTGCTTCAGCTGCTATTTATGCTGCTATTGAAGTGGCCAAACAACTAGGAAAAGGGAAAAAGGTTTTAGCTCTTCTCCCTGATAATGGCGAACGTTACTTATCAACAAGCCTGTATGATTTTGAATAA

SEQ ID NO: 680 - protein, 308 aa, Streptococcus agalactiae
MSKIYNSITDLIGNTPIIQLHHIVPEGAAEVYVKLESFNPGSSVKDRIALAMIEDAEQKGILKAGDTIVEPTSGNTGIGLAWVGKAKGYNVIIVMPETMSIERRKIIQAYGAQLVLTPGSEGMKGAIAKAKEISAEQNAWLPLQFNNQANPEIHEKTTGREIIETFGEKGLDAFIAGVGTGGTITGVSRALKKVNPDVAIYAVEADESAILSGEQPGPHKIQGISAGFIPETLATDSYDHIIRVTSDDAIETGRIIGGLEGFLAGISASAAIYAAIEVAKQLGKGKKVLALLPDNGERYLSTSLYDFE

SEQ ID NO: 681 - protein, 645 aa, Streptococcus agalactiae
ATGAACTATAAAACGATAAAATCAGACGGAATTGTCGAAGAAGAAATTAAAAAATCGCGATTTATTTGTCATCTAAAGCGAGTAGAGTCCGAAGAGGAGGGGCGTAATTATATTACGCAAATCAAGAAAGCGCACTACAAAGCCAATCATTCGTGTTCAGCTATGGTTATTGGCGAAAAAGGGGATATAAAACGATCTAGTGATGATGGAGAACCTAGTGGTACAGCAGGTATCCCTATGCTAACCGTACTTGAAAAGCAAGGCCTGACAAATGTTGTTGCCGTCGTTACACGGTATTTTGGAGGTATCAAATTAGGCGCAGGGGGGCTTATTCGTGCCTACTCTGGTAGCGTAGCTAATACCATCAAAGAGATCGGGGTAGTAGAAGTTAAAGAACAAATTGGTATTCGTATTCAATTAACTTATCCTCAATATCAAACTTTTGACAACTTCCTAAAAGAGCACCACCTTCAGGAGTTTGAAACAGAATTTTTAGAAGCTGTAACCTGTAAAATATACGTTGACCCTAAGGAATTTGAACACACAATAACTAATTTGACAGAGTTCTACCAAGGAAAAGCTTTGTTAACTGAAGAAGGGAGTCAAATTGTTGAAATTCCCTTTAAGGCTGAAACCGATAAATAA

SEQ ID NO: 682 - protein, 214 aa, Streptococcus agalactiae
MNYKTIKSDGIVEEEIKKSRFICHLKRVESEEEGRNYITQIKKAHYKANHSCSAMVIGEKGDIKRSSDDGEPSGTAGIPMLTVLEKQGLTNVVAVVTRYFGGIKLGAGGLIRAYSGSVANTIKEIGVVEVKEQIGIRIQLTYPQYQTFDNFLKEHHLQEFETEFLEAVTCKIYVDPKEFEHTITNLTEFYQGKALLTEEGSQIVEIPFKAETDK

SEQ ID NO: 683 - protein, 1290 aa, Streptococcus agalactiae
ATGGAAAATTATTTAGGTAGGCTTTGGACAAAAGCACAATTATCTGAGCAACTTAGAAAAATTGCAATTAGCTTGCCATCTTTTATAAAGAAAGGAAGCGACTATATTTGTACCCGATGCTCTAGTTCTGTTGCTAAAAATTGCCAATTACCAACTGGAAATTATTATTGTAGAGAATGTATAGTTTTTGGAAGAGTTACTAGTAATGAAAATTTATATTATTTCCCACAAAAAACATTTTCTAAAACGAATTCTTTAAAATGGAAAGGGGAACTGACACCTTATCAAAATGAGGTTTCAGAAGAGTTGTTGAAAGGTATTTCAAGTAAGGAAAATCTTCTTGTTCATGCTGTGACAGGGGCTGGTAAAACAGAAATGATATACCACTCTGTCGCCAAAGTAATTGATACTGGAGGAAGCGTTTGTATTGCCAGTCCTAGAATTGATGTTTGTTTAGAATTGTATAAGCGACTTTCAAACGATTTTAGATGTGCCATAACATTAATGCATGGAGAATCTCCTTTTTATCAGAGATCCCCTTTAACTATTGCCACAACACATCAATTGTTAAAATTTTATCATGCTTTTGATTTGCTAATTGTTGATGAAGTTGATGCTTTTCCGTATGTCGACAACCCGATACTATACCAGGGTGTAAAACAGGCCTTAAAGGAAAACGGAACAAGTATTTTTCTGACTGCAACTTCAACGACTGAGTTAGAAAGAAAAGTTGCAAGAAAAGAACTAAAAAAATTGCATCTAGCTAGGAGATTTCATGCCAATCCGTTAGTGATACCCGAGATGGTTTGGGTAAGTGGTATCCAGAAAAGCTTGCAGACACAAAAACTACCTCCCAAATTATATCAGTTGATAAATAAACAGCGACAAACGAGATATCCTTTGTTATTATTTTTCCCCCATATTTCAGAAGGTCAGGTATTCACCGAAATTTTAAGACAAGCCTTTCCTATGGAAAAAATTGGTTTTGTTTCAAGTAAGAGCACATCTAGGTTAAAGTTAGTGCAAGATTTTCGAGATAACAAATTGTCTATCCTAGTGTCAACTACCATTCTAGAGAGAGGAGTAACTTTCCCTAGCGTCGACGTTTTTGTTATACAAGCAAATCATCATTTGTTTACGAAAAGTTCCTTGGTACAAATTTCAGGAAGAGTTGGAAGAGCATTAGAAAGGCCCGAAGGGCTCCTTTACTTCCTTCATGATGGGAAAAGTAAATCGATGCACCAAGCTATAAAGGAGATTAAAAACATGAATCATATAGGAGGATTTTAA

SEQ ID NO: 684 - protein, 429 aa, Streptococcus agalactiae
MENYLGRLWTKAQLSEQLRKIAISLPSFIKKGSDYICTRCSSSVAKNCQLPTGNYYCRECIVFGRVTSNENLYYFPQKTFSKTNSLKWKGELTPYQNEVSEELLKGISSKENLLVHAVTGAGKTEMIYHSVAKVIDTGGSVCIASPRIDVCLELYKRLSNDFRCAITLMHGESPFYQRSPLTIATTHQLLKFYHAFDLLIVDEVDAFPYVDNPILYQGVKQALKENGTSIFLTATSTTELERKVARKELKKLHLARRFHANPLVIPEMVWVSGIQKSLQTQKLPPKLYQLINKQRQTRYPLLLFFPHISEGQVFTEILRQAFPMEKIGFVSSKSTSRLKLVQDFRDNKLSILVSTTILERGVTFPSVDVFVIQANHHLFTKSSLVQISGRVGRALERPEGLLYFLHDGKSKSMHQAIKEIKNMNHIGGF

SEQ ID NO: 685 - protein, 666 aa, Streptococcus agalactiae
ATGACTTGTTTGTTATGTCATGAAATAGATTTATCGCAATTAACTTTTGTGGAACTTATGCTTCTAAAACCAAAGCAAAACGTAATTTGTCAAACGTGCAAGGGTAGTTTTGAAGCACTTAGTAGGGAGATGGGTTGCCAAACATGTTGCAAGCAAATTCCCCAAAAACAATGTCAAGATTGTATTTATTGGGGTAAAAAAGGTATAGAGGTAAATCATTTTTCCCTTTATAGATACAATGAAGCAATGAAAAAATATTTTTCTCTTTTTAAATTTCAAGGGGATTATTTGTTGAAAGATGTTTTTACAAAAGAAATAAAAGCTGCTCTAAAAAAGTATAAGGGCTACACTATAGTGCCAGTTCCCTTGAGTCATGAAGGATACCAAAATAGGCAATTTAATCAAGTGATTGCTTTTCTACAATCGGCAAATATACCTTACAAAAATATTCTTTCTAAAAAAGATGGAGGTAAGCAATCGGCTAATAATAAAGAAGAAAGACTCAAACAAGTTCAGCAATTTACATTAAAAAATGAGGCTGAGTTAGGGGACAACCTTTTAATTGTTGATGATATTTATACAACAGGCGCAACAATAGCACAAATCAGGAAACTATTAGAAGAAAAAGGTATAAAAAATATAAAAAGTTTTTCATTAGCACGCTAA

SEQ ID NO: 686 - protein, 221 aa, Streptococcus agalactiae
MTCLLCHEIDLSQLTFVELMLLKPKQNVICQTCKGSFEALSREMGCQTCCKQIPQKQCQDCIYWGKKGIEVNHFSLYRYNEAMKKYFSLFKFQGDYLLKDVFTKEIKAALKKYKGYTIVPVPLSHEGYQNRQFNQVIAFLQSANIPYKNILSKKDGGKQSANNKEERLKQVQQFTLKNEAELGDNLLIVDDIYTTGATIAQIRKLLEEKGIKNIKSFSLAR

SEQ ID NO: 687 - protein, 555 aa, Streptococcus agalactiae
ATGATTAAATACAGTATTCGTGGTGAAAACATCGAAGTAACAGAAGCTATTCGTGAGTATGTTGAGACCAAACTCTCTAAAGTTGAAAAATACTTTAATGAAGCACAAGAATTAGATACTAGAGTCAACCTCAAAGTATACAGAGAGAAGACCGCAAAAGTTGAAGTAACAATCTTAATAGATTCTATTACTTTACGAGCAGAAGATGTTTCACAAGATATGTATGGGTCAATTGACTTAGTTGTTGATAAAATTGAGCGTCAAATTCGTAAAAATAAAACTAAAATTGCGAAAAAATATCGTGAAAAGATTCCAGCAAGTCAAGTTTTCACAACAGAATTTGAGGCTGAGCCAGATGAAGAAGCAGTAAGCCAAAGAATTGTACGTACTAAGAATGTTAATCTAAAACCAATGGATGTTGAGGAAGCATTGTTGCAAATGGAACTTTTAGGTCATGATTTCTTTATCTATACAGATGCAGAAGATAATACGACAAATGTCCTTTACAAGCGTGAAGATGGCGAACTAGGTTTAATTGAAGCTAAAGGAAATTAA

SEQ ID NO: 688 - protein, 184 aa, Streptococcus agalactiae
MIKYSIRGENIEVTEAIREYVETKLSKVEKYFNEAQELDTRVNLKVYREKTAKVEVTILIDSITLRAEDVSQDMYGSIDLVVDKIERQIRKNKTKIAKKYREKIPASQVFTTEFEAEPDEEAVSQRIVRTKNVNLKPMDVEEALLQMELLGHDFFIYTDAEDNTTNVLYKREDGELGLIEAKGN

SEQ ID NO: 689 - protein, 1353 aa, Streptococcus agalactiae
ATGAAAGTAGTCAAATTTGGAGGAAGTTCTTTAGCATCTTCCCAACAATTATACAAAGTACTAAATATTATCAAATCAGACTACACTAGACGGTTTGTTGTCGTTTCAGCTCCAGGGAAACGCTACGAAGAAGACTTAAAAATGACAGATGCTTTGATACAATATTATCAAAATTATATTAACGGTAAAGATATTGTTAAAGACCAAACTTGGATTATCAATCGTTATCAAGAAATTATTAGTGATTTGTCTTTAGGAAGCACTATTGCAGAAGAAATTACTCGCTCTATAGAGCAGCTAGCTTCACTTCCCATAGAAAATAATCAGTTTTTATATGATTGTTTTTTAGCAGCCGGTGAAGATAACAACGCAAAGTTAGTTGCAACGTTTTTTAATCAAAATGACATTCCTGCAAGATATGTTCATCCAAACGAAGCAGGAATTATTGTAACTAAAGAACCATGTAATGCACGAATTATTCCAGGAAGTTATGATAAGATTGAGAACTTATGTCTATACAATGAGGTTCTTGTTATCCCTGGATTTTTTGGAGTCACAGAAGATAACCAAATTTGTACCTTTTCAAGAGGGGGATCTGACATTACTGGATCCCTAATTGCAGCAGGCATAAAAGCAGACCTTTATGAGAACTTCACAGATGTTGATGGTATATTTGCAGCACATCCAGGTGTAGTTAAGAACCCTCACGCTATCCCTGAGCTTACTTATAAAGAAATGCGTGAATTAGCCTATGCGGGTTTTTCGGTTTTACATGATGAAGCTTTACTTCCTGCCTATCGTGGCAGAATCCCTCTTGTTATTAAAAATACAAATAATCCCCAACAGCCTGGTACAAAAATAGTTTTAAAGCATACTCGTAGTAACATAGCAGTAACTGGGATCGCTTCTGATAGCCGTTTTGCTAGCATAAACGTATCTAAATACTTAATGAATAGAGAAGTAGGTTTCGGCCGAAAAGTACTACAAATTTTAGAGGATTTAAATATTAGTTTTGAACATATGCCAACTGGCATAGATGATCTATCCATTGTCTTACGTGAAAAAGAATTGACACCAATCAAAGAACAAGAAATCTTAAATTACCTAACTCGTAAACTAGAAGTAGATTACGTTGACATCCAACACAATCTATCTACAATCGTAATTGTAGGTGAAAATATGAAAAGTCAGATTGGAGTCACTGCAACAGCGACACAAGCCTTATCAAGAGAAAAAATCAATATCACCATGATATCACAAGGTTCAAGCGAAGTCTCCATTATGTTCGTTATAAACAGTAAGGATGAAAAAAGAGCTATTAAAGCACTATATGAAACATTCTTCCAAAAATAG

SEQ ID NO: 690 - protein, 450 aa, Streptococcus agalactiae
MKVVKFGGSSLASSQQLYKVLNIIKSDYTRRFVVVSAPGKRYEEDLKMTDALIQYYQNYINGKDIVKDQTWIINRYQEIISDLSLGSTIAEEITRSIEQLASLPIENNQFLYDCFLAAGEDNNAKLVATFFNQNDIPARYVHPNEAGIIVTKEPCNARIIPGSYDKIENLCLYNEVLVIPGFFGVTEDNQICTFSRGGSDITGSLIAAGIKADLYENFTDVDGIFAAHPGVVKNPHAIPELTYKEMRELAYAGFSVLHDEALLPAYRGRIPLVIKNTNNPQQPGTKIVLKHTRSNIAVTGIASDSRFASINVSKYLMNREVGFGRKVLQILEDLNISFEHMPTGIDDLSIVLREKELTPIKEQEILNYLTRKLEVDYVDIQHNLSTIVIVGENMKSQIGVTATATQALSREKINITMISQGSSEVSIMFVINSKDEKRAIKALYETFFQK

SEQ ID NO: 691 - protein, 651 aa, Streptococcus agalactiae
ATGTGTAAATATAAAGCAATAATATTTGATATGGATGGTGTTCTATTTGACACTGAATTATTTTATTATAAAAGGCGAGAGCGTTTTTTAAAACAACATGGAATTACAATTGACCATTTACCAATGAATTTTTTTATTGGAGGAAATATGAAGCAGGTTTGGAAATCTGTTTTAGGTGATCAATATGATACCTGGGATATTGATAAGCTCCAACAAGATTATAGTCGCTATAAAGAGGATAATCCCTTGCCATACAAAGATTTAATTTTTCAGGATTGTAAAAGAGTCATTGAAAAGCTTCATCACAAAGGCTATCTTTTGGGTCTAGCTTCAAGTTCTACTAGACATGATATCATGTTAGCATTAGAAAGTTTTAATCTGGATACATATTTTAAGGTAATTCTGTCTGGTGAGGAATTTTCAGAAAGTAAACCTAATCCAGCTATTTATAATAGAGCAGCAGAACTTTTAGATATTCCTAAACAGCAAATTCTTATTGTAGAAGACAGTGAGAAGGGGATTACAGCTGGTATTGCAGCCGGTATTGATGTGTGGGCTATTGAAGATAAATACTTTGGAATGAATCAGTCGCAGGCTAATGTATTAGTGAGCGATCTGAGTCAATTTTTTGTGAAATTAGATAACTATTAA

SEQ ID NO: 692 - protein, 216 aa, Streptococcus agalactiae
MCKYKAIIFDMDGVLFDTELFYYKRRERFLKQHGITIDHLPMNFFIGGNMKQVWKSVLGDQYDTWDIDKLQQDYSRYKEDNPLPYKDLIFQDCKRVIEKLHHKGYLLGLASSSTRHDIMLALESFNLDTYFKVILSGEEFSESKPNPAIYNRAAELLDIPKQQILIVEDSEKGITAGIAAGIDVWAIEDKYFGMNQSQANVLVSDLSQFFVKLDNY

SEQ ID NO: 693 - protein, 752 aa, Streptococcus agalactiae
GTGGCCACTATTATGCTTAATCGACCAGATATTTCAAATGGTTTTAACATCCCAATGTGTCAAGAAATTATTGATGCAATAAGGCTTGTGTCTGAAAATAAAGATGTCATGTTTTTAGTGATTGAAGCACAAGGACCAATCTTTTCAATCGGAGGAGATTTAAAAGTGATGAAAGCTGCTGTTGAGAGCGATGATATTAGCTCATTAACTAAAATTGCTGAGTTAGTTAATCAGATATCGTATGATTTACTACAGCTAGAGAAACCTGTTGTTATGTGTGTAGATGGGGCTGTAGCTGGTGCCGCAGCTAATATTGCATTAGCAGCTGATTTTGTTATCGCAAGCAAGAAGAGTAAATTTATCCAGGCTTTTGTGGGTGTCGGTTTAGCTCCAGATGCAGGAGGTTTATTGTTACTTAGTAAATCAATCGGTATAACTCGTGCAGTGCAACTAGCTTTAACTGGAGAAAGCTTATTGCTGAAAAAGCTGAAGCTTTGGGAATTGTTTATAAACTTTGTGAATCAGATAAAATAGGTAAAATTAAGGATCAACTATTAAAGCGTTTAAGTAGACATTCTATAAACTCATATCAAGCCATAAAATCATTAGCTTGGGAAGCTGCTTTTAAAGATTGGGAACAATATAAAAAGCTTGAATTACAACTGCAAGAATCATTAGCCTTTAAGCAAGATTTTAAAGAAGGTGTTCGGGCACACGCTGATAGAAGGCGTCCTAATTTTTTAGGCAAATAG

SEQ ID NO: 694 - protein, 250 aa, Streptococcus agalactiae
MATIMLNRPDISNGFNIPMCQEIIDAIRLVSENKDVMFLVIEAQGPIFSIGGDLKVMKAAVESDDISSLTKIAELVNQISYDLLQLEKPVVMCVDGAVAGAAANIALAADFVIASKKSKFIQAFVGVGLAPDAGGLLLLSKSIGITRAVQLALTGESLSAEKAEALGIVYKLCESDKIGKIKDQLLKRLSRHSINSYQAIKSLAWEAAFKDWEQYKKLELQLQESLAFKQDFKEGVRAHADRRRPNFLGK

SEQ ID NO: 695 - protein, 435 aa, Streptococcus agalactiae
TTGGAATACGATCAGATTAATAGTTATTTAGTTGACATTTTTAATAGAATCATGATTATTGAGGAAATGAGTTTAAAGACTAGCCAATTTAGCGATGTATCTTTAAAAGAAATGCATACTATTGAAATTATTGGGAAACATTCTGAGGTAACTCCTAGCGATGTCGCTCGAGAATTAATGTTAACTTTGGGAACTGTAACAACCAGCCTTAATAAGTTAGAAAAAAAAGGCTACATTGAGCGTAAACGGTCAAGTATTGATCGTCGAGTTGTTCACTTGAGTCTTACTAAGAGAGGTAGGTTATTAGATCGATTGCATAGTAAATTTCATAAATCTATGGTATCTCATATTATTGAAGACCTAGGTGAAGAAGACATAAAAATGTTGACGAGCGCTTTAGGGAATCTTCATAAATTTTTGGAGGACTTAGTCTAG

SEQ ID NO: 696 - protein, 144 aa, Streptococcus agalactiae
MEYDQINSYLVDIFNRIMIIEEMSLKTSQFSDVSLKEMHTIEIIGKHSEVTPSDVARELMLTLGTVTTSLNKLEKKGYIERKRSSIDRRVVHLSLTKRGRLLDRLHSKFHKSMVSHIIEDLGEEDIKMLTSALGNLHKFLEDLV

SEQ ID NO: 697 - protein, 972 aa, Streptococcus agalactiae
GTGGTTTTTGCTAAAATTAGTCAACTTGCACATTATGCACCTTCTCAAATTATTAAAAATGAGGATTTATCATTAATCATGGATACCAGTGATGACTGGATTTCGTCACGTACTGGTATAAAACAACGTCATATTAGTAAAAATGAAACAACAGCTGATTTGGCAAATAAGGTCGCAGAACAACTTATTGAAAAATCCGGTTATTCCGCTAGTCAAATTGACTTTATTATTGTTGCAACGATGACACCAGACTCTATGATGCCTTCTACTGCTGCAAGAGTGCAAGCTCATATTGGAGCGAGTAATGCTTTTGCCTTTGACTTGAGTGCAGCATGTAGTGGTTTTGTTTTTGCCTTGTCTACCGCCGAAAAATTGATATCATCAGGTAGCTATCAAAAAGGTTTAGTAATAGGAGCAGAAACTGTTTCTAAAGTATTAGACTGGACTGATAGAGGGACAGCAGTTTTATTTGGAGATGGAGCTGGAGGTGTCTTGCTAGAAGCTTCTAAGGAAAAACATTTTCTTGCAGAGTCTCTCAATACAGATGGTAGTCGTCAGGGACTTCAATCCAGTCAAGTCGGGTTAAATTCACCTTTCTCAGATGAAGTACTTGATGATAAATTTTTGAAAATGGATGGTAGAGCAATCTTTGATTTTGCTATCAAAGAAGTTTCAAAAAGTATCAATCATCTTATAGAAACATCTTATTTGGAAAAAGAAGATATTGATTATCTTTTCTTACACCAAGCGAATCGAAGGATTTTAGATAAGATGTCTCGAAAAATTGATATAGCACGTGATAAATTTCCAGAGAATATGATGGATTATGGTAATACTAGTGCAGCTAGTATCCCTATTTTACTTTCAGAATCTTATGAGAACGGTTTGTTGAAACTAGATGGTAACCAAACAATCCTCTTATCGGGTTTCGGTGGAGGTTTGACATGGGGAAGTCTAATTGTTAAAATTTAG

SEQ ID NO: 698 - protein, 323 aa, Streptococcus agalactiae
MVFAKISQLAHYAPSQIIKNEDLSLIMDTSDDWISSRTGIKQRHISKNETTADLANKVAEQLIEKSGYSASQIDFIIVATMTPDSMMPSTAARVQAHIGASNAFAFDLSAACSGFVFALSTAEKLISSGSYQKGLVIGAETVSKVLDWTDRGTAVLFGDGAGGVLLEASKEKHFLAESLNTDGSRQGLQSSQVGLNSPFSDEVLDDKFLKMDGRAIFDFAIKEVSKSINHLIETSYLEKEDIDYLFLHQANRRILDKMSRKIDIARDKFPENMMDYGNTSAASIPILLSESYENGLLKLDGNQTILLSGFGGGLTWGSLIVKI

SEQ ID NO: 699 - protein, 273 aa, Streptococcus agalactiae
GTGCATAGCACATTTATAAAAGATTATTTAAAATTTAAGGAGCTAAAAATGGCAGTATTTGAAAAAGTACAAGAAATTATTGTTGAAGAACTTGGTAAAGATGCAGAAGAAGTAACGTTGAACACTACTTTTGACGATCTTGATGCTGATTCGCTTGATGTTTTCCAAGTGATTTCAGAAATTGAAGATGCATTTGATATCCAAATTGAGACAGAAGAAGGACTAAATACTGTTGGTGATTTAGTTGCTTATGTTGAAGAAAAAGTAAAATAA

SEQ ID NO: 700 - protein, 90 aa, Streptococcus agalactiae
MHSTFIKDYLKFKELKMAVFEKVQEIIVEELGKDAEEVTLNTTFDDLDADSLDVFQVISEIEDAFDIQIETEEGLNTVGDLVAYVEEKVK

SEQ ID NO: 701 - protein, 960 aa, Streptococcus agalactiae
ATGAAAACACGTATAACAGAATTACTAAATATAAAATATCCAATTTTTCAAGGGGGTATGGCGTGGGTCGCTGATGGAGATCTTGCAGGAGCAGTTTCTAAGGCAGGTGGTCTAGGTATTATTGGTGGAGGAAATGCCCCTAAAGAGGTTGTCAAAGCAAATATTGATAAAATAAAATCTATGACTGATAAACCCTTTGGTGTGAATATTATGCTTTTATCACCTTTTGTAGATGATATTGTTGATTTGGTTATTGAAGAAGGTGTAAAAGTTGTAACGACGGGTGCAGGTAATCCTGGTAAGTACATGGAGCGCTTTCATGAAGCAGGTATAACAGTAATCCCTGTTGTTCCTAGTGTTGCATTAGCAAAACGTATGGAGAAATTAGGGGCTGATGCTATCATTACAGAAGGAATGGAAGCGGGTGGTCACATCGGAAAACTGACCACGATGACATTAGTACGACAGGTTGTTGATGCTGTTACAATTCCAGTCATTGCCGCAGGTGGTATAGCAGATGGGCGTGGGGCTGCTGCGGGTTTCATGTTAGGAGCTGATGCTGTTCAGGTAGGAACTCGTTTTGTTGTTGCTAAAGAATCTAATGCTCACCCTAATTACAAAGCAAAAATCTTAAAAGCAAAAGATATCGACACTGCTGTTTCTGCTCAGGTAGTAGGTCATCCAGTTCGTGCCTTAAAAAATAAACTAGTAACAACCTATAGCCAAGCAGAAAAAGATTATTTAGCTGGCCGTATTTCAATCAATGAGATTGAAGAATTAGGAGCGGGAGCTCTTCGCAATGCAGTTGTTGATGGGGATGTTATTAATGGTTCAGTTATGGCAGGACAAATTGCAGGATTAATTAAATCAGAAGAGACTTGTCAAGAGATTCTTGAAGATATTTATTCAGGAGCGCGTCAAGTTATTCTTTCTGAGGCAAGCCGCTGGTCAGATTTATAA

SEQ ID NO: 702 - protein, 319 aa, Streptococcus agalactiae
MKTRITELLNIKYPIFQGGMAWVADGDLAGAVSKAGGLGIIGGGNAPKEVVKANIDKIKSMTDKPFGVNIMLLSPFVDDIVDLVIEEGVKVVTTGAGNPGKYMERFHEAGITVIPVVPSVALAKRMEKLGADAIITEGMEAGGHIGKLTTMTLVRQVVDAVTIPVIAAGGIADGRGAAAGFMLGADAVQVGTRFVVAKESNAHPNYKAKILKAKDIDTAVSAQVVGHPVRALKNKLVTTYSQAEKDYLAGRISINEIEELGAGALRNAVVDGDVINGSVMAGQIAGLIKSEETCQEILEDIYSGARQVILSEASRWSDL

SEQ ID NO: 703 - protein, 927 aa, Streptococcus agalactiae
ATGAATAAAGTTTCATTTCTATTTGCTGGTCAAGGTGCTCAAAAGTTAGGAATGGCTAGAGATTTATATGAAACTTTCCCGATTGTTAAAGAAACTTTTGATAAGGCAAGTCATGTTTTAGGATATGATTTGAGAGAATTGATTGATAAAGACTTAGACAAATTAAATCAGACGAAATATACGCAACCAGCTATTCTAACGACTTCGACTGCTATTTATCGTTTAATTCTTAAAGAAATTGAACTTAGACCAGATATGGTTGCAGGACTTTCTTTGGGAGAATACAGTGCTTTAGTTGCTTCAGGTGCTATAAGATTTGAAGATGCTGTAGTACTTGTTGCTAGACGAGGCCAACTAATGGAAGCAGCAGCACCTGCTGGTAGTGGCAAAATGGTAGCAGTTTTAAATGCTGATCGTCAAATAATTGAAGATGCTTGTAAGAAGGCTTCTCAGTTTGGTATTGTTAGTCCTGCAAATTATAATACTCCAAAGCAAATTGTTATAGGGGGAGAGTCAATCGCTGTAAATGCAGCTGTAGAAGAATTAAAACAACAAGGAGTAAAACGTTTAATTCCTCTGAATGTTTCAGGTCCTTTTCACACTGCTTTATTGAAACCTGCAAGTCAGAAATTGAGCGATGTTTTAGATAAAGTTCATTTTTCAGTTTCTGAAATCCCTGTAATTGGAAATACAGAGGCGCAGATAATGAAAAAAGACGATATCAAATCTTTATTGGCACGCCAAGTTATGGAACCTGTACGCTTTGATGAGTCTATTGAAACCATGAAAAAAATGGGAATGACACAGGTTGTTGAAATTGGTCCAGGGAAGGTACTCTCAGGTTTCTTGAAAAAAATAGATAGCTCATTATCAGTACATTCTGTTGAAGATAAAATTGGATTTAATAATCTTAAGGAATTAAACTAG

SEQ ID NO: 704 - protein, 308 aa, Streptococcus agalactiae
MNKVSFLFAGQGAQKLGMARDLYETFPIVKETFDKASHVLGYDLRELIDKDLDKLNQTKYTQPAILTTSTAIYRLILKEIELRPDMVAGLSLGEYSALVASGAIRFEDAVVLVARRGQLMEAAAPAGSGKMVAVLNADRQIIEDACKKASQFGIVSPANYNTPKQIVIGGESIAVNAAVEELKQQGVKRLIPLNVSGPFHTALLKPASQKLSDVLDKVHFSVSEIPVIGNTEAQIMKKDDIKSLLARQVMEPVRFDESIETMKKMGMTQVVEIGPGKVLSGFLKKIDSSLSVHSVEDKIGFNNLKELN

SEQ ID NO: 705 - protein, 735 aa, Streptococcus agalactiae
ATGCAATTAAAAGATAAGAACATTTTTATTACGGGTTCAAGTAGAGGAATCGGCCTTGCAATTGCCCATCAATTTGCACAATTAGGTGCTAATATTGTTTTAAATGGACGTTCTGAAATATCAGAAGACTTAATAGCTGAATTTGCTGATTATGGTGTAAAAGTTATTGCTATTTCAGGAGATGTTTCTTCTTTTGAAGATGCTAATCGCATGATTAAAGAAGCTATTGCAAGTCTAGGTAGCGTGGATGTGCTCGTTAACAACGCTGGTATTACTAATGATAAATTGATGCTTAAAATGACTGTTGAAGATTTTGAGAGCGTTCTTAAAATTAATTTAACAGGTGCATTTAATATGACACAATCAGTCTTGAAACCGATGACAAAAGCGCGTCAAGGTGCTATTATTAATATCTCTAGCGTCGTTGGATTAACTGGAAATGTAGGGCAAGCTAATTACGCAGCCTCTAAAGCAGGTTTAATTGGCTTTACAAAATCAGTTGCCAGAGAAGTAGCAGCACGAGGCATTCGTGTCAATGCCATTGCTCCAGGCTTTATCGAATCTGATATGACAGATGTTATCCCAGAAAAAATGCAAGAAGCTATTTTAGCTCAAATTCCAATGAAACGTATTGGAAAAGGTAAAGAAGTAGCGCAGGTAGCGTCTTTCTTAGCAGAACAAGAATACCTTACAGGACAAGTTATTGCCATTGATGGCGGTATGACGATGCAATGA

SEQ ID NO: 706 - protein, 244 aa, Streptococcus agalactiae
MQLKDKNIFITGSSRGIGLAIAHQFAQLGANIVLNGRSEISEDLIAEFADYGVKVIAISGDVSSFEDANRMIKEAIASLGSVDVLVNNAGITNDKLMLKMTVEDFESVLKINLTGAFNMTQSVLKPMTKARQGAIINISSVVGLTGNVGQANYAASKAGLIGFTKSVAREVAARGIRVNAIAPGFIESDMTDVIPEKMQEAILAQIPMKRIGKGKEVAQVASFLAEQEYLTGQVIAIDGGMTMQ

SEQ ID NO: 707 - protein, 1233 aa, Streptococcus agalactiae
ATGACATTACAGCGAGTAGTAGTAACAGGTTACGGTGTAACCTCACCTATTGGAAACACACCAGAAGAATTTTGGAATAGTCTTAAAGAAGGAAATGTTGGTATTGGACCTATCACTAAATTTGATTCAAGTGATTTCATGGTCAAAAATGCTGCTGAAATTCATGATTTTCCATTTGATAAATATTTTGTCAAAAAAGATCTGAACAGATTTGATATGTATTCCCTTTATGCCTTATATGCTTCAAGTGAAGCTATTCAACATGCTAATTTAAATTTAGATGAAATTGATGCAGATCGATTTGGTGTCATCGTTGCATCAGGTATTGGAGGGATTCAAGAGATTGAAGAACAAGTGATTCGTCTTCATGAAAAAGGGCCAAAACGCGTAAAACCAATGACGCTTCCAAAAGCTCTACCAAATATGGCAGCTGGAAATGTTGCGATGAGGTTAGGCGCTCATGGTGTATGTAAATCAATTAATACAGCTTGTGCTTCTTCTAATGATGCTATTGGAGATGCTTTCCGTAATATAAAATTTGGTATTCAAGATATTATGGTAGTCGGTGGTGCAGAAGCTGCTATTACAAAATTTGCCATTGCTGGATTCCAAAGTCTTACAGCATTATCAACAACTGAAGATCCATCAAGAGCATCTATTCCATTTGATAAAGATCGCAATGGATTTATCATGGGAGAAGGTTCTGGAATGTTGGTCTTAGAAAGTTTAGAACACGCTGAAAAACGAGGAGCTACTATTCTTGCAGAAGTTGTTGGTTATGGTAACACTTGTGACGCATATCATATGACTTCACCACATCCAGAAGGTTTAGGAGCCACTAAAGCTATTCAACTTGCACTGGTTGAAGCTAATATTAAACCTGAAGAAGTTAACTATGTAAATGCTCATGGAACTTCAACACCTGCTAACGAAAAAGGAGAGAGTCAAGCTATTGTTGCTGCACTTGGGACAGACGTTCCAGTTTCTTCGACTAAATCTTTTACTGGTCATCTTTTGGGTGCCGCGGGAGCTGTTGAGGCAATTGCAACTATTGAAGCGATACGTCATAGTTATGTTCCAATGACTGCTGGAACGACAGAATTATCAGAAGATATTACAGCGAATGTTATTTTTGGTCAAGGGCAAGACGCTGATATTCGTTATGCCATTTCAAATACATTTGGTTTTGGAGGACACAATGCAGTTCTGGCCTTCAAACGCTGGGAGGATTAA

SEQ ID NO: 708 - protein, 410 aa, Streptococcus agalactiae
MTLQRVVVTGYGVTSPIGNTPEEFWNSLKEGNVGIGPITKFDSSDFMVKNAAEIHDFPFDKYFVKKDLNRFDMYSLYALYASSEAIQHANLNLDEIDADRFGVIVASGIGGIQEIEEQVIRLHEKGPKRVKPMTLPKALPNMAAGNVAMRLGAHGVCKSINTACASSNDAIGDAFRNIKFGIQDIMVVGGAEAAITKFAIAGFQSLTALSTTEDPSRASIPFDKDRNGFIMGEGSGMLVLESLEHAEKRGATILAEVVGYGNTCDAYHMTSPHPEGLGATKAIQLALVEANIKPEEVNYVNAHGTSTPANEKGESQAIVAALGTDVPVSSTKSFTGHLLGAAGAVEAIATIEAIRHSYVPMTAGTTELSEDITANVIFGQGQDADIRYAISNTFGFGGHNAVLAFKRWED

SEQ ID NO: 709 - protein, 537 aa, Streptococcus agalactiae
ATGCAGTTCTGGCCTTCAAACGCTGGGAGGATTAAATTGGATATTCAAGAGATTAAGGATTTAATGACTCAATTTGATGAGTCAAGTCTGAGAGAATTTTCATTCAAAACAAGTGACGGTGAGCTGTCTTTTAGTAAAAATGAGGGAAAAGCTCCACTTGTCCCAACTATGTCTCCTATGAGTCATCAACCTGAAGCGACTCCAACTATAGCAACTCCTGTCTCTAATGAAGCAGGTGAGCAAACGAAACAAGCTACTGAAGTAGTTTCAGAAATCCCAGAGTCGACTGTGACTGTTGCAGAAGGTGACGTTGTCGAAAGTCCTTTAGTTGGGGTTGCTTATTTAGCTTCTGGACCAGATAAACCTAACTTTGTTTCAGTAGGTGATAGCGTGAAGAAGGGACAAACTTTGATGATTATTGAGGCAATGAAGGTGATGAATGAAGTGCCTGCCCCCCATGATGGTGTAGTTACTGAAATTCTTGTAGCCAATGAAGAAGTTATTGAATTTGGTAAAGGATTGGTACGAATCAAATGA

SEQ ID NO: 710 - protein, 178 aa, Streptococcus agalactiae
MQFWPSNAGRIKLDIQEIKDLMTQFDESSLREFSFKTSDGELSFSKNEGKAPLVPTMSPMSHQPEATPTIATPVSNEAGEQTKQATEVVSEIPESTVTVAEGDVVESPLVGVAYLASGPDKPNFVSVGDSVKKGQTLMIIEAMKVMNEVPAPHDGVVTEILVANEEVIEFGKGLVRIK

SEQ ID NO: 711 - DNA, 306 bp, Streptococcus agalactiae
atgagcctttttttcaatggtcattttccagaatatcctgtaatgccaggcgttttaattatggaagctttggctcaaactgcaggtgttttagaattatctaaagaagaaaacaaaggaaagcttgttttttatgcaggtatggataaagtgaaatttaaaaagcaagttgttccaggagatcaattagttatgactgctaagtttgtcaaacgtagaggaactatagccgttgttgaagcaatagcagaagttgatgggaaattagctgccagtggaacgttaacatttgcaataggcaattga

SEQ ID NO: 712 - protein, 101 aa, Streptococcus agalactiae
MSLFFNGHFPEYPVMPGVLIMEALAQTAGVLELSKEENKGKLVFYAGMDKVKFKKQVVPGDQLVMTAKFVKRRGTIAVVEAIAEVDGKLAASGTLTFAIGN

SEQ ID NO: 713 - DNA, 1371 bp, Streptococcus agalactiae
atgtttaagaaaatattgattgctaatcgcggagaaattgcagtacgtatcattcgtgcagcccgtgaaatgggaatttcgacagttgctatctattcggaggctgacaaggaatcattgcacacaattttagcagatgaagctatttgtgttggaccagccaaatcagcagaatcttatttaaacgttaatgctatattatctgctgctattgtgactggagcggaagctgttcatccaggttttgggtttttgagtgaaaattctaaatttgctactatgtgtgaagagatgaacttaaaattcattggtccatctggagaagttatggataaaatgggtgataaaatcaatgctcgtacagagatgataaaagctgatgttccggttatcccaggatcagatggtcaagttacaagtgtagaagaagctgtatcaattgctgaggaaatcggctatccattgatgttaaaagcctcagccggtggcggtggaaaaggaattaggaaggtcaaatcagcagatgaattgaagcctgcttttgagtctgcttcacaggaggctttggctgcgttcggtaatggtgctatgtatattgaaaaagttatatacccagctagacatattgaagtacaaatacttggagatagctttggtaagatagttcacctaggagaacgtgattgttctctgcagcgtaacaatcagaaggtattggaagaaagtccgtctgtggcaataggtaacactctgcgtcaacaaattggtgaagcagctgttcgtgcagctgaggctgtatcttatgaaaatgcaggaacaattgagtttttgttagatgagaatagcggacagttctatttcatggaaatgaatactcgtgttcaagtagaacaccctgttacagaatttgtaacgggtgttgacatcgttaaagagcagattcgtatcgctgctggaattcctttatcagtttctcaaaatgatattaagttaactggtcatgcgattgaatgtcgtattaacgcagagaatccacaatttaattttgcgccatgtccaggtaccattaatgggttacatctacctgctggcggtatgggcttacgtgtcgattcagcggtttacacaggctacactattcctccttattacgatagtatgattgcgaaagtaattgttcacggagaaaatcgttttgatgcacttatgaaaatgcaacgtgccttatatgagcttgaaattgatggtattgtaacaaatacagaatttcaaatggatctcatttctgataaaaaagtcttggctggggattatgatacttcattcctgatggaagactttttaccaaggtattatggtaacaatcaatag

SEQ ID NO: 714 - protein, 456 aa, Streptococcus agalactiae
MFKKILIANRGEIAVRIIRAAREMGISTVAIYSEADKESLHTILADEAICVGPAKSAESYLNVNAILSAAIVTGAEAVHPGFGFLSENSKFATMCEEMNLKFIGPSGEVMDKMGDKINARTEMIKADVPVIPGSDGQVTSVEEAVSIAEEIGYPLMLKASAGGGGKGIRKVKSADELKPAFESASQEALAAFGNGAMYIEKVIYPARHIEVQILGDSFGKIVHLGERDCSLQRNNQKVLEESPSVAIGNTLRQQIGEAAVRAAEAVSYENAGTIEFLLDENSGQFYFMEMNTRVQVEHPVTEFVTGVDIVKEQIRIAAGIPLSVSQNDIKLTGHAIECRINAENPQFNFAPCPGTINGLHLPAGGMGLRVDSAVYTGYTIPPYYDSMIAKVIVHGENRFDALMKMQRALYELEIDGIVTNTEFQMDLISDKKVLAGDYDTSFLMEDFLPRYYGNNQ

SEQ ID NO: 715 - DNA, 876 bp, Streptococcus agalactiae
atggctttatttagtaaaaaggataaatatatccgtattagtccaaacaaagcattagggtcttctgataaacgtagtcttcctgaggttcctgatgaactctttgctaagtgtccttcttgtaaacatatgatttatcagaaagatttaggattagcaaagatttgtccagcttgttcttacaactttagaatttcagcgcaagaacgtctgttgctaacagttgacgaagatagttttgaggaattatttacaggaattgaaactaaggatcctttgaattttccaaactaccgtgaaaaactggctgctacacgtcaaaagactaacttagatgaagcggtggtgacaggtttagctaaaataaaaggacaaactacggccttagctattatggattctcattttataatggcgtctatgggaacggtcgtaggcgaaaagttgacaagattatttgagctagcaactgaaaagaaattacctattgttatttttacagcgtcagggggcgccagaatgcaagaaggtattatgagtttgatgcaaatggcaaaagtatcggcagcagttaaacgccattctaaccagggattgttttatttaacaattttaacagacccaacaaccggcggcgttactgcgagttttgctatggaaggtgatattattctggctgagccacaagcgttggttggttttgctggtcgtcgtgttatcgaaacaacagtgagagaagatttacctgaaggctttcaaaaggcagagtttttgttagaacatggttttgtcgatgctattataaatcgaacagaattacgcgactgcattgctcaactaattgctttccatggaaatgaggttggtcatgaataa

SEQ ID NO: 716 - protein, 291 aa, Streptococcus agalactiae
MALFSKKDKYIRISPNKALGSSDKRSLPEVPDELFAKCPSCKHMIYQKDLGLAKICPACSYNFRISAQERLLLTVDEDSFEELFTGIETKDPLNFPNYREKLAATRQKTNLDEAVVTGLAKIKGQTTALAIMDSHFIMASMGTVVGEKLTRLFELATEKKLPIVIFTASGGARMQEGIMSLMQMAKVSAAVKRHSNQGLFYLTILTDPTTGGVTASFAMEGDIILAEPQALVGFAGRRVIETTVREDLPEGFQKAEFLLEHGFVDAIINRTELRDCIAQLIAFHGNEVGHE

SEQ ID NO: 717 - DNA, 774 bp, Streptococcus agalactiae
atgaataatgatgtgacaagaattttaaaagatgcgcgtgatcaagggaggctaactgctcttgactacgctgaattgatttttgataattttatggaacttcatggtgatcgccagttcgcagatgacaaatcaattataggaggtttggggtacttggcagggcgtcctgtgacgattgtcggtattcaaaaaggtaagaaccttcaagataatttagaccgtcattttggtcaaccacatcctgaaggttatcgtaaggctttacgtttaatgaaacaagctgagaagtttggaagacctgttataaccttcatcaatactgctggagcatatcctggggtaggtgctgaggagcgaggtcagggtgaagcaattgctagaaacctcttagaaatgagtgatttaaaagtccctattatagctattattattggtgaagggggttctggaggagcattagctttagctgttgccgataaggtttggatgttggaacatactgtttattctattttaagtcctgagggctttgcctctattttatggaaagatggtacaagaacaacagaagcagcacaattaatgaagatgactgctggagaactttaccatatggaagttgtagacaaagtaatccctgaacatggttatttttcaagtgagattgtcgatatgattaagacaagtttaatttcagagttagaagtgctctcacaattatctcttgaggatttattggaacaacgttaccaacgttttagaaaatattaa

SEQ ID NO: 718 - protein, 257 aa, Streptococcus agalactiae
MNNDVTRILKDARDQGRLTALDYAELIFDNFMELHGDRQFADDKSIIGGLGYLAGRPVTIVGIQKGKNLQDNLDRHFGQPHPEGYRKALRLMKQAEKFGRPVITFINTAGAYPGVGAEERGQGEAIARNLLEMSDLKVPIIAIIIGEGGSGGALALAVADKVWMLEHTVYSILSPEGFASILWKDGTRTTEAAQLMKMTAGELYHMEVVDKVIPEHGYFSSEIVDMIKTSLISELEVLSQLSLEDLLEQRYQRFRKY

SEQ ID NO: 719 - DNA, 633 bp, Streptococcus agalactiae
atgtatcaagaattaaatgattatttagaattccaatcaatgaagtatattatgcctgagaaggcaggccctttaaaggacgatatgcaaacttttaaggcaaagggccaacttgctaggaatagctttacagagttatcaagagccttagaacaacgtatggatggctttaaaatgcaaagagtgagtaattgggctaatcaagctcaagtagggcgtccacatttttgggtttattatcgaaaggatacagaccaattagatgatgtggctgttgcgctaagggtttatggtgtaaaagatagttttggggttagccttgaggtaagctttgtagagaggcaaaaatctgataagacactcgagaagcaggctagagtgttatcgattccgattgcctctccattgtattttatggtccaaaggcaaggtgaaactcatcgagaagaaggcaatgaggaaaatcgtcaacgtttaatgcaagaaattaagtcagggaaggtaaggaaagtattggtaaaatatgacgttcttttgactgaaaaccagagcttagaaaatattctgcaacgattgttagaaggctttgagaaagtgttaccttactatcaagtttgtcaaactattagctaa

SEQ ID NO: 720 - protein, 210 aa, Streptococcus agalactiae
MYQELNDYLEFQSMKYIMPEKAGPLKDDMQTFKAKGQLARNSFTELSRALEQRMDGFKMQRVSNWANQAQVGRPHFWVYYRKDTDQLDDVAVALRVYGVKDSFGVSLEVSFVERQKSDKTLEKQARVLSIPIASPLYFMVQRQGETHREEGNEENRQRLMQEIKSGKVRKVLVKYDVLLTENQSLENILQRLLEGFEKVLPYYQVCQTIS

SEQ ID NO: 721 - protein, 1155 aa, Streptococcus agalactiae
ATGNNNNNAGCTGAAGAGGCGAAAGCGCAACGTAATGTTGCTTCTGCTGCCATTGCTCAAGCAAAACGAAATAAAGAGAATGCAGACGAGCAAATCGCAGCTATGCAAACACTTTCCGCTGATATCAAAGCAATTGATGCGGAATTGGCAGATGTGGATGCTAATTTACAATCAATGGTGACCGTACTTCCTAATACACCAGCTGATGATGTGCCGCTTGGAGCAGACGAGGATGAAAATGTTGAAGTTCGTCGCTGGGGAACTCCTCGTGAATTTGATTTTGAGACCAAAGCTCACTGGGATTTAGGTGAAAGCCTTGGAATTCTCGATTGGGAACGTGGTGCAAAAGTTACTGGCTCTCGCTTCCTCTTCTACAAAGGTCTAGGTGCTCGTTTAGAGCGTGCTATCTACAGCTTCATGCTGGATGAACACGCTAAGGAGGGGTACACTGAAGTGATCCCTCCTTATATGGTTAACCACGATTCAATGTTCGGTACGGGACAATATCCAAAGTTCAAGGAAGATACTTTCGAATTAGCAGATAGCCCATTCGTACTTATCCCAACAGCTGAAGTTCCTTTAACAAACTATTATCGTGATGAAATTATCGATGGGAAAGAATTACCTATATACTTTACTGCCATGAGTCCATCATTCCGTTCAGAAGCAGGCTCTGCAGGACGTGACACACGTGGATTAATTCGCCTTCATCAATTCCATAAAGTAGAAATGGTGAAATTTGCCAAGCCTGAGGAATCATACCAAGAATTAGAAAAAATGACAGCAAATGCTGAAAATATTCTTCAAAAACTTAATCTCCCATACCGTGTCATTACCTTGTGTACAGGAGATATGGGATTCTCAGCAGCTAAAACGTATGACTTAGAGGTATGGATTCCCGCTCAAAATACTTATCGAGAAATTTCTTCATGTTCTAATACTGAAGATTTCCAAGCACGTCGTGCTCAAATTCGTTACCGTGACGAAGTTGATGGCAAAGTTAGGTTGCTTCATACTTTAAATGGTTCAGGACTTGCAGTTGGACGTACTGTAGCAGCAATCCTCGAAAATTATCAAAATGAAGATGGTTCTGTGACTATCCCAGAAGTTCTTCGTCCATATATGGGTAATATCGATATTATTAAACCAAATTAG

SEQ ID NO: 722 - protein, 384 aa, Streptococcus agalactiae
  VARIANT 2, 3: Xaa = Any Amino Acid
MXXAEEAKAQRNVASAAIAQAKRNKENADEQIAAMQTLSADIKAIDAELADVDANLQSMVTVLPNTPADDVPLGADEDENVEVRRWGTPREFDFETKAHWDLGESLGILDWERGAKVTGSRFLFYKGLGARLERAIYSFMLDEHAKEGYTEVIPPYMVNHDSMFGTGQYPKFKEDTFELADSPFVLIPTAEVPLTNYYRDEIIDGKELPIYFTAMSPSFRSEAGSAGRDTRGLIRLHQFHKVEMVKFAKPEESYQELEKMTANAENILQKLNLPYRVITLCTGDMGFSAAKTYDLEVWIPAQNTYREISSCSNTEDFQARRAQIRYRDEVDGKVRLLHTLNGSGLAVGRTVAAILENYQNEDGSVTIPEVLRPYMGNIDIIKPN

SEQ ID NO: 723 - protein, 366 aa, Streptococcus agalactiae
ATGAATGNNNNNTTAGAGGTATCAGAAGATGAGATAGTCGCTATCAAAAATGTTAGTATCAATGAGCCTTTTTTCAATGGTCATTTTCCAGAATATCCTGTAATGCCAGGCGTTTTAATTATGGAAGCTTTGGCTCAAACTGCAGGTGTTTTAGAATTATCTAAAGAAGAAAACAAAGGAAAGCTTGTTTTTTATGCAGGTATGGATAAAGTGAAATTTAAAAAGCAAGTTGTTCCAGGAGATCAATTAGTTATGACTGCTAAGTTTGTCAAACGTAGAGGAACTATAGCCGTTGTTGAAGCAATAGCAGAAGTTGATGGGAAATTAGCTGCCAGTGGAACGTTAACATTTGCAATAGGCAATTGA

SEQ ID NO: 724 - protein, 121 aa, Streptococcus agalactiae
  VARIANT 3, 4: Xaa = Any Amino Acid
MNXXLEVSEDEIVAIKNVSINEPFFNGHFPEYPVMPGVLIMEALAQTAGVLELSKEENKGKLVFYAGMDKVKFKKQVVPGDQLVMTAKFVKRRGTIAVVEAIAEVDGKLAASGTLTFAIGN

SEQ ID NO: 725 - protein, 1371 aa, Streptococcus agalactiae
ATGTTTAAGAAAATATTGATTGCTAATCGCGGAGAAATTGCAGTACGTATCATTCGTGCAGCCCGTGAAATGGGAATTTCGACAGTTGCTATCTATTCGGAGGCTGACAAGGAATCATTGCACACAATTTTAGCAGATGAAGCTATTTGTGTTGGACCAGCCAAATCAGCAGAATCTTATTTAAACGTTAATGCTATATTATCTGCTGCTATTGTGACTGGAGCGGAAGCTGTTCATCCAGGTTTTGGGTTTTTGAGTGAAAATTCTAAATTTGCTACTATGTGTGAAGAGATGAACTTAAAATTCATTGGTCCATCTGGAGAAGTTATGGATAAAATGGGTGATAAAATCAATGCTCGTACAGAGATGATAAAAGCTGATGTTCCGGTTATCCCAGGATCAGATGGTCAAGTTACAAGTGTAGAAGAAGCTGTATCAATTGCTGAGGAAATCGGCTATCCATTGATGTTAAAAGCCTCAGCCGGTGGCGGTGGAAAAGGAATTAGGAAGGTCAAATCAGCAGATGAATTGAAGCCTGCTTTTGAGTCTGCTTCACAGGAGGCTTTGGCTGCGTTCGGTAATGGTGCTATGTATATTGAAAAAGTTATATACCCAGCTAGACATATTGAAGTACAAATACTTGGAGATAGCTTTGGTAAGATAGTTCACCTAGGAGAACGTGATTGTTCTCTGCAGCGTAACAATCAGAAGGTATTGGAAGAAAGTCCGTCTGTGGCAATAGGTAACACTCTGCGTCAACAAATTGGTGAAGCAGCTGTTCGTGCAGCTGAGGCTGTATCTTATGAAAATGCAGGAACAATTGAGTTTTTGTTAGATGAGAATAGCGGACAGTTCTATTTCATGGAAATGAATACTCGTGTTCAAGTAGAACACCCTGTTACAGAATTTGTAACGGGTGTTGACATCGTTAAAGAGCAGATTCGTATCGCTGCTGGAATTCCTTTATCAGTTTCTCAAAATGATATTAAGTTAACTGGTCATGCGATTGAATGTCGTATTAACGCAGAGAATCCACAATTTAATTTTGCGCCATGTCCAGGTACCATTAATGGGTTACATCTACCTGCTGGCGGTATGGGCTTACGTGTCGATTCAGCGGTTTACACAGGCTACACTATTCCTCCTTATTACGATAGTATGATTGCGAAAGTAATTGTTCACGGAGAAAATCGTTTTGATGCACTTATGAAAATGCAACGTGCCTTATATGAGCTTGAAATTGATGGTATTGTAACAAATACAGAATTTCAAATGGATCTCATTTCTGATAAAAAAGTCTTGGCTGGGGATTATGATACTTCATTCCTGATGGAAGACTTTTTACCAAGGTATTATGGTAACAATCAATAG

SEQ ID NO: 726 - protein, 456 aa, Streptococcus agalactiae; identical to SEQ ID NO: 714

SEQ ID NO: 727 - protein, 876 aa, Streptococcus agalactiae
ATGGCTTTATTTAGTAAAAAGGATAAATATATCCGTATTAGTCCAAACAAAGCATTAGGGTCTTCTGATAAACGTAGTCTTCCTGAGGTTCCTGATGAACTCTTTGCTAAGTGTCCTTCTTGTAAACATATGATTTATCAGAAAGATTTAGGATTAGCAAAGATTTGTCCAGCTTGTTCTTACAACTTTAGAATTTCAGCGCAAGAACGTCTGTTGCTAACAGTTGACGAAGATAGTTTTGAGGAATTATTTACAGGAATTGAAACTAAGGATCCTTTGAATTTTCCAAACTACCGTGAAAAACTGGCTGCTACACGTCAAAAGACTAACTTAGATGAAGCGGTGGTGACAGGTTTAGCTAAAATAAAAGGACAAACTACGGCCTTAGCTATTATGGATTCTCATTTTATAATGGCGTCTATGGGAACGGTCGTAGGCGAAAAGTTGACAAGATTATTTGAGCTAGCAACTGAAAAGAAATTACCTATTGTTATTTTTACAGCGTCAGGGGGCGCCAGAATGCAAGAAGGTATTATGAGTTTGATGCAAATGGCAAAAGTATCGGCAGCAGTTAAACGCCATTCTAACCAGGGATTGTTTTATTTAACAATTTTAACAGACCCAACAACCGGCGGCGTTACTGCGAGTTTTGCTATGGAAGGTGATATTATTCTGGCTGAGCCACAAGCGTTGGTTGGTTTTGCTGGTCGTCGTGTTATCGAAACAACAGTGAGAGAAGATTTACCTGAAGGCTTTCAAAAGGCAGAGTTTTTGTTAGAACATGGTTTTGTCGATGCTATTATAAATCGAACAGAATTACGCGACTGCATTGCTCAACTAATTGCTTTCCATGGAAATGAGGTTGGTCATGAATAA

SEQ ID NO: 728 - protein, 291 aa, Streptococcus agalactiae; identical to SEQ ID NO: 716

SEQ ID NO: 729 - protein, 774 aa, Streptococcus agalactiae
ATGAATAATGATGTGACAAGAATTTTAAAAGATGCGCGTGATCAAGGGAGGCTAACTGCTCTTGACTACGCTGAATTGATTTTTGATAATTTTATGGAACTTCATGGTGATCGCCAGTTCGCAGATGACAAATCAATTATAGGAGGTTTGGGGTACTTGGCAGGGCGTCCTGTGACGATTGTCGGTATTCAAAAAGGTAAGAACCTTCAAGATAATTTAGACCGTCATTTTGGTCAACCACATCCTGAAGGTTATCGTAAGGCTTTACGTTTAATGAAACAAGCTGAGAAGTTTGGAAGACCTGTTATAACCTTCATCAATACTGCTGGAGCATATCCTGGGGTAGGTGCTGAGGAGCGAGGTCAGGGTGAAGCAATTGCTAGAAACCTCTTAGAAATGAGTGATTTAAAAGTCCCTATTATAGCTATTATTATTGGTGAAGGGGGTTCTGGAGGAGCATTAGCTTTAGCTGTTGCCGATAAGGTTTGGATGTTGGAACATACTGTTTATTCTATTTTAAGTCCTGAGGGCTTTGCCTCTATTTTATGGAAAGATGGTACAAGAACAACAGAAGCAGCACAATTAATGAAGATGACTGCTGGAGAACTTTACCATATGGAAGTTGTAGACAAAGTAATCCCTGAACATGGTTATTTTTCAAGTGAGATTGTCGATATGATTAAGACAAGTTTAATTTCAGAGTTAGAAGTGCTCTCACAATTATCTCTTGAGGATTTATTGGAACAACGTTACCAACGTTTTAGAAAATATTAA

SEQ ID NO: 730 - protein, 257 aa, Streptococcus agalactiae; identical to SEQ ID NO: 718

SEQ ID NO: 731 - DNA, 633 bp, Streptococcus agalactiae; identical to SEQ ID NO: 719

SEQ ID NO: 732 - protein, 210 aa, Streptococcus agalactiae; identical to SEQ ID NO: 720

SEQ ID NO: 733 - DNA, 1278 bp, Streptococcus agalactiae
atgttagacttaaaacgtattcgtacagattttgatgttgtcgctaaaaaattggccacgcgtggtgttgaccaagaaacattaacaacccttaaagaacttgatataaaacgccgtgaactacttatcaaagctgaagaggcgaaagcgcaacgtaatgttgcttctgctgccattgctcaagcaaaacgaaataaagagaatgcagacgagcaaatcgcagctatgcaaacactttccgctgatatcaaagcaattgatgcggaattggcagatgtggatgctaatttacaatcaatggtgaccgtacttcctaatacaccagctgatgatgtgccgcttggagcagacgaggatgaaaatgttgaagttcgtcgctggggaactcctcgtgaatttgattttgagaccaaagctcactgggatttaggtgaaagccttggaattctcgattgggaacgtggtgcaaaagttactggctctcgcttcctcttctacaaaggtctaggtgctcgtttagagcgtgctatctacagcttcatgctggatgaacacgctaaggaggggtacactgaagtgatccctccttatatggttaaccacgattcaatgttcggtacgggacaatatccaaagttcaaggaagatactttcgaattagcagatagcccattcgtacttatcccaacagctgaagttcctttaacaaactattatcgtgatgaaattatcgatgggaaagaattacctatatactttactgccatgagtccatcattccgttcagaagcaggctctgcaggacgtgacacacgtggattaattcgccttcatcaattccataaagtagaaatggtgaaatttgccaagcctgaggaatcataccaagaattagaaaaaatgacagcaaatgctgaaaatattcttcaaaaacttaatctcccataccgtgtcattaccttgtgtacaggagatatgggattctcagcagctaaaacgtatgacttagaggtatggattcccgctcaaaatacttatcgagaaatttcttcatgttctaatactgaagatttccaagcacgtcgtgctcaaattcgttaccgtgacgaagttgatggcaaagttaggttgcttcatactttaaatggttcaggacttgcagttggacgtactgtagcagcaatcctcgaaaattatcaaaatgaagatggttctgtgactatcccagaagttcttcgtccatatatgggtaatatcgatattattaaaccaaattag

SEQ ID NO: 734 - protein, 425 aa, Streptococcus agalactiae
MLDLKRIRTDFDVVAKKLATRGVDQETLTTLKELDIKRRELLIKAEEAKAQRNVASAAIAQAKRNKENADEQIAAMQTLSADIKAIDAELADVDANLQSMVTVLPNTPADDVPLGADEDENVEVRRWGTPREFDFETKAHWDLGESLGILDWERGAKVTGSRFLFYKGLGARLERAIYSFMLDEHAKEGYTEVIPPYMVNHDSMFGTGQYPKFKEDTFELADSPFVLIPTAEVPLTNYYRDEIIDGKELPIYFTAMSPSFRSEAGSAGRDTRGLIRLHQFHKVEMVKFAKPEESYQELEKMTANAENILQKLNLPYRVITLCTGDMGFSAAKTYDLEVWIPAQNTYREISSCSNTEDFQARRAQIRYRDEVDGKVRLLHTLNGSGLAVGRTVAAILENYQNEDGSVTIPEVLRPYMGNIDIIKPN

SEQ ID NO: 735 - DNA, 993 bp, Streptococcus agalactiae
atgttcatgattgttattacgcatgttcttggaaaaggtggtctgagatcttcggttgagggacacgcagactcctattttatagtaacgtggattatccaagtcttagtttatggggccgttaactgttacgcactaataagtggttatgtgggaattaattcgcgttatcgttactcaaaattactgtctatctgggcacaggtttttttctacacctttacaataacagcactttttgcaatcacaggtcatgaagtgaccttgcttaattggagagatgcttttttccctattgtcagtgggcagtattggtacattactgcttactttggtctattggtttttatgcctgttattaataatggattaaatgccttgactgataaacaattaaaacaattggttttgttaatgtttattattttttcaattttaccagctgttttaaataatcgtgttccagaattttcattgagcaagggttttgaaatgacttggctactgattttatatattattggtgcctatttgaaacgtattgatttaaatatatttaaaacgtcatatttacttataatttatctattatcattggttgctacttatgccatgaagtttagcgttggtgatatttggtattggtatgtttcgcctactttaactttaggggcggtaagtttgtttatattatttgctagagcaagcattaagccctcgggattcttaaagaaaataattgttgtattagccccttcaaccttgggagtttatctctgtcatctccacccactaatagtaaaatattttgtaagagattttgcagagacgtttgtttatgagtccatttatctttacccatttttaattttaggagcagggattttaatttatttgttggcttttattgtagaacgtattagattacgaatatttaaagcaatccatttttctaactttttgagatggtttgatgacaagttcccatattaa

SEQ ID NO: 736 - protein, 330 aa, Streptococcus agalactiae
MFMIVITHVLGKGGLRSSVEGHADSYFIVTWIIQVLVYGAVNCYALISGYVGINSRYRYSKLLSIWAQVFFYTFTITALFAITGHEVTLLNWRDAFFPIVSGQYWYITAYFGLLVFMPVINNGLNALTDKQLKQLVLLMFIIFSILPAVLNNRVPEFSLSKGFEMTWLLILYIIGAYLKRIDLNIFKTSYLLIIYLLSLVATYAMKFSVGDIWYWYVSPTLTLGAVSLFILFARASIKPSGFLKKIIVVLAPSTLGVYLCHLHPLIVKYFVRDFAETFVYESIYLYPFLILGAGILIYLLAFIVERIRLRIFKAIHFSNFLRWFDDKFPY

SEQ ID NO: 737 - DNA, 303 bp, Streptococcus agalactiae
atggggaataaagttggaaaatttttagttggtgaccaggcattagaattctataacgataaaaatgtcaacgactatattcaaattccatggacatcaatcaatcaaattggagctaatgttagtcgaaaaaaaattagtcgtcactttgaggtctttacagaccaaggaaaatttttattcgcctctaaagactctggaacgatattaaagcatgcgagacgacatattggagacgataaagttgttaagcttcctaccctcatccagaccattttaaaaatattcaagtttaaaaaataa

SEQ ID NO: 738 - protein, 100 aa, Streptococcus agalactiae
MGNKVGKFLVGDQALEFYNDKNVNDYIQIPWTSINQIGANVSRKKISRHFEVFTDQGKFLFASKDSGTILKHARRHIGDDKVVKLPTLIQTILKIFKFKK

SEQ ID NO: 739 - DNA, 912 bp, Streptococcus agalactiae
atgactgaacaaattaaattatcaaaatcagatcgtcaaaaagtttggtggcgttcacaattccttcaaggttcttggaactatgagcgtatgcaaaatatggggtgggcctatgctcttatcccagcattgaaaaaactttacactactaaagaagatcgtgctgctgcgcttgagcgccatatggaattctttaacacacatccatacgttgctgctccaattatcggtgtaacccttgctcttgaggaagaaaaagcaagcggtacacctgtcgaagacaaagcaattcaaggggttaaaatcggtatgatgggacctcttgctggtattggtgatccagtattctggtttactgtacgtcctatcttaggtgctcttggtgcttcacttgcctctgctggtaatatcctcggaccaatcatcttctttgttggttggaacctcattcgtatgtcattcttatggtacacacaagagttaggttacaaatcaggtaaagaaattactaaagatatgtctggtggtatcctccaagatattactaaaggtgcttcaatccttggtatgttcatccttgctgtccttgttaagcgttgggtagcaattaactttactgtagaccttcctaaaaagacattgtcagaaggggcatacatcaatttccctaaagaccatgttagtggacaacaattgcatgatatcctaggacaagttcagagtggcttaagccttgataaaatgcaaccacaaacacttcaaggacaacttgactcacttattcctggtttagctggattacttcttacattcttctgtatgtggttacttaagaagaaagtatcaccaattacaattatcatcggtttgtttatcgttggtattctagctcgccttgcaggtgtgatgtaa

SEQ ID NO: 740 - protein, 303 aa, Streptococcus agalactiae
MTEQIKLSKSDRQKVWWRSQFLQGSWNYERMQNMGWAYALIPALKKLYTTKEDRAAALERHMEFFNTHPYVAAPIIGVTLALEEEKASGTPVEDKAIQGVKIGMMGPLAGIGDPVFWFTVRPILGALGASLASAGNILGPIIFFVGWNLIRMSFLWYTQELGYKSGKEITKDMSGGILQDITKGASILGMFILAVLVKRWVAINFTVDLPKKTLSEGAYINFPKDHVSGQQLHDILGQVQSGLSLDKMQPQTLQGQLDSLIPGLAGLLLTFFCMWLLKKKVSPITIIIGLFIVGILARLAGVM

SEQ ID NO: 741 - protein, 813 aa, Streptococcus agalactiae
ATGGCGGATATTTCAATTATCTCAATGATTTTGGTCGTTATCGTTGCCTTCTTTGCTGGTCTTGAAGGTATCCTCGACCAATTCCAAATCCATCAACCTCTTGTTGCTTGTACTTTAATCGGTCTTGTAACTGGTCACCTCGAAGCGGGTATTATTCTTGGTGGTAGTCTCCAAATGATTGCTCTTGCTTGGGCAAATATCGGAGCTGCCGTAGCACCAGACGCTGCACTTGCCTCTGTTGCTGCTGCTATTATTTTGGTTAAAAGTGGTGACTTCACTCAAAAAGGTATCAACTTTGCCTTCTCTACTGCTGTACCTCTAGCTATTGCTGGACTTTTCCTTACAATGATTGTTCGTACAATCTCAACTGCACTTGTTCACGCTGGTGACAAAGCTGCTTCTGAAGGAAACTTCGCAGCAATTGAACGTTTTCACTTTATCGCCCTCCTTCTCCAAGGATTACGTATTGCATTCCCAGCTGCGCTTCTTTTAGCTATTCCATCTTCTTCAGTACAAAGTATTCTTGAAGCAATGCCTGATTGGTTAAATGGTGGTATGCAAGTTGGTGGTGCCATGGTTGTTGCCGTTGGTTACGCTATGGTTATCAATATGATGGCTACTCGCGAAGTTTGGCCTTTCTTTGCTCTTGGATTTGCTCTAGCAGCTTTGAACCAGTTAACTCTTATTGCAATGGGTACTATTGGTGTTGCTATCGCCCTCATCTACATCAGTTTATCAAAAATGGGTGGAAGCAAAGGTACTTCTAACGCAGGTTCTAACGATCCTATCGGCGATATCTTAGAGGACTACTAG

SEQ ID NO: 742 - protein, 270 aa, Streptococcus agalactiae
MADISIISMILVVIVAFFAGLEGILDQFQIHQPLVACTLIGLVTGHLEAGIILGGSLQMIALAWANIGAAVAPDAALASVAAAIILVKSGDFTQKGINFAFSTAVPLAIAGLFLTMIVRTISTALVHAGDKAASEGNFAAIERFHFIALLLQGLRIAFPAALLLAIPSSSVQSILEAMPDWLNGGMQVGGAMVVAVGYAMVINMMATREVWPFFALGFALAALNQLTLIAMGTIGVAIALIYISLSKMGGSKGTSNAGSNDPIGDILEDY

SEQ ID NO: 743 - protein, 252 aa, Streptococcus agalactiae
ATGACAAAGAAAATTATCGCCGTAGATTTAGACGGTACTCTATTACATAATAATAACACTATTTCTGACTACACCGCTGATACACTTCGAAAAGTTCAAGCTCAAGGACACAAAGTAATTATTACAACCGGACGCCCATACCGTATGGCACTCGCTCATTATTTACGCCTAGATTTAAAAACACCAATGATAAATTTTAATGGTGCTTTAACTCATATCCCCGAAAAAAAGTGNNNNNCATTCATTCATTAA

SEQ ID NO: 744 - protein, 83 aa, Streptococcus agalactiae
  VARIANT 78, 79, 80: Xaa = Any Amino Acid
MTKKIIAVDLDGTLLHNNNTISDYTADTLRKVQAQGHKVIITTGRPYRMALAHYLRLDLKTPMINFNGALTHIPEKKXXXFIH

SEQ ID NO: 745 - protein, 585 aa, Streptococcus agalactiae
ATGAAAAAGTTAATTTGGAGTCATCTTTTTGCCATAGTCAGTATTTTAGGGATATGGTATTATCATGTAAAAATTGATCATTTGATGGTAATTCTATTGGCATCAGTCTTGTCGTTAGAGATGGGATTCATTGCTTATTATAGTCGTAATATTTTTATTCGTCTTTTAGCAAGTTTAGGTCTTTTATTTTTTTACCCACAGAGTTTAGGGATTTTTCTTAGTTTGGTGAGCTTAGAGTGGTCAACAAAAGACATTTGGCAGTCTAATCACTTTATGCAATATATGGCATACCTTCTTGCAATTCTTTTTATTATCTCTTCAGCTTTACTAAGCTTGAAGCTATTGGTAAATGCATATGATATTAGTAAAAGGTATCAATTAGCAACTGTTATACCTGTAATGCTTTTTAGTAGTTTTGCCTTTTGCTTAGAAAAATCAGGATCATTAGGTTTAGAAGGAATCATTTTAAATCCGTCAGCATTTTTTAATGGAATACAGACTAATATGGCTAACCTTGATTTTAAAGCCTTGTCTTGCCTTTTTTTAGTACAATTATTACTTTGGGGAATATTAATGGAAGACTAA

SEQ ID NO: 746 - protein, 194 aa, Streptococcus agalactiae
MKKLIWSHLFAIVSILGIWYYHVKIDHLMVILLASVLSLEMGFIAYYSRNIFIRLLASLGLLFFYPQSLGIFLSLVSLEWSTKDIWQSNHFMQYMAYLLAILFIISSALLSLKLLVNAYDISKRYQLATVIPVMLFSSFAFCLEKSGSLGLEGIILNPSAFFNGIQTNMANLDFKALSCLFLVQLLLWGILMED

SEQ ID NO: 747 - protein, 612 aa, Streptococcus agalactiae
ATGAAAGTAAAACTATTTGCGATACATCTATTTTTTATTGTTATTTCTTTTGGGATTAAATATTATCATTTGCAGGGACCAAATTTGATTTGGAATATGACTCTAGCCCTAATAGCGTTAGATTTTGCATACCTTACTAGTTTATTTAAGAAAAAAATTCTTATCGGTCTTTTTGCACTTGCTTGGTTTTTTTTCTATCCTAATACCTTTTATATGTTGACGGATATCATTCATATGCATTTTGTCGGAGACGTTCTTTATAATAAGACAAATTTAATACTTTATATCTTGTATGTATCTAGTATCTTGTTTGGTTTTTTATCAGGTATCGAAAGTTTTTCTGTGATTATGCGTAAATTTAGAATTAGCAATATATTTTTAAGATGGGGAATTATTGGAATTGTATCATTTGTTTCAAGTTTTGGTATTCATATTGGTCGTTATGCCCGTCTAAATTCATGGGATATCTTAACGAAGCCACAAGTGGTAATTAACGAACTTTTAGCGGTTCCGAGTAGGGATTCATTCCACTTTATTTTAGGATTTACATTTTTACAGGTATTGTGTCTTATTTTTATGGATTATTCTGCAGGGAAAAAGCTTGAAAAGTGA

SEQ ID NO: 748 - protein, 203 aa, Streptococcus agalactiae
MKVKLFAIHLFFIVISFGIKYYHLQGPNLIWNMTLALIALDFAYLTSLFKKKILIGLFALAWFFFYPNTFYMLTDIIHMHFVGDVLYNKTNLILYILYVSSILFGFLSGIESFSVIMRKFRISNIFLRWGIIGIVSFVSSFGIHIGRYARLNSWDILTKPQVVINELLAVPSRDSFHFILGFTFLQVLCLIFMDYSAGKKLEK

SEQ ID NO: 749 - protein, 1421 aa, Streptococcus agalactiae
ATGGAAAAGTTTTTTAAGCTAAAGGAACACGGGACGACAATTCGGACTGAAATCACTGCTGGTCTAACGACTTTCTTTGCAATGTCGTACATTTTGTTTGTAATCCAGCTATTTTATCTCAGACTGGGATGCCAGCACAAGGAGTTTTCTTAGCGACGATTATTGGTGCCGTTGTAGCTACATCTGTTATGGCTTTCTATGCTAACCTTCCCTATGCACAAGCTCCTGGGATGGGATTAAATGCTTTCTTTACATATACAGTTGTCTTTGCATTGGGATATACATGGCAAGAAGCCTTAGCTATGGTATTTATTTGTGGTTTGATTTCTCTGATTATTACTTTAACGAAAGTTAGAAAGATGATTATTGAGTCTATCCCAACAACTTTAAAATCAGCCATTACAGCAGGAATCGGAACTTTTTTAGCATACGTTGGGATTAAAAATGCTGGTTTTTTGAAATTTTCAATTGATCCTGGGACGTATGATGTTGTTGGAAAGGGTGCTGCGAAAGGATTGGCTACTATTACAGCAAATTCTTCAGCAACGCCAGGGCTAGTGTCGTTTGATAATCCAGCCATTTTATTATCTTTGATTGGTTTAAGCATTACCATCTTCTTTATTGTAAAGGGTATCCGTGGAGGGATTATTCTATCGATATTAACAACGACCCTCTTAGGTATTTTAATGGGAGTGGTTAAGTTAGATGCTATTAATTGGGAAGCAACTAACCTCTCGGCCTCTTTTAGAGATTTGAAGCAAGTATTTGGAGTTGCATTAGGAGAGAAAGGATTAATTTCTTTATTTTCTAATCCTTCACGTCTACCAAGTGTATTAATGGCCATTCTTGCTTTTTCACTGACTGATATTTTTGATACCATTGGAACGCTCATTGGTACCGGAGAAAAAGTTGGTATCTTAGCAACGACTGGTGATAATCATGAATCTAAGAGTTTAGACAAAGCACTCTATTCAGACTTAATTGGGACAACTTTTGGTGCTATTTGTGGAACATCTAACGTTACAACCTATGTTGAGTCAGCAGCAGGAATCGGAGCTGGTGGTCGTACAGGATTGACAGCCTTAGTAGTTGCTGGTTTGTTTGCTATATCTAGTTTTTTTAGTCCACTAGTATCTATCGTTCCGAGTCAAGCTACTGCACCAATATTGGTTATTGTTGGTATTATGATGCTTTCAAATTTAAAAGATATCAAATGGGATGATATGTCAGAAGCTATCCCAGCTTTCTTTACTTCTCTTTTTATGGGGTTTACTTATAGCATTACTTATGGTATTGCAGCTGGTTTCTTGACCTATACACTAGCTAAAGTCATCAAAGGACAAGCAAAAGATATTCATGTGGTACTGTGGATTTTAGATATATTATTTATTCTAAACTTTATCAGCTTGGCTATTTTGTAA

SEQ ID NO: 750 - protein, 473 aa, Streptococcus agalactiae
MEKFFKLKEHGTTIRTEITAGLTTFFAMSYILFVNPAILSQTGMPAQGVFLATIIGAVVATSVMAFYANLPYAQAPGMGLNAFFTYTVVFALGYTWQEALAMVFICGLISLIITLTKVRKMIIESIPTTLKSAITAGIGTFLAYVGIKNAGFLKFSIDPGTYDVVGKGAAKGLATITANSSATPGLVSFDNPAILLSLIGLSITIFFIVKGIRGGIILSILTTTLLGILMGVVKLDAINWEATNLSASFRDLKQVFGVALGEKGLISLFSNPSRLPSVLMAILAFSLTDIFDTIGTLIGTGEKVGILATTGDNHESKSLDKALYSDLIGTTFGAICGTSNVTTYVESAAGIGAGGRTGLTALVVAGLFAISSFFSPLVSIVPSQATAPILVIVGIMMLSNLKDIKWDDMSEAIPAFFTSLFMGFTYSITYGIAAGFLTYTLAKVIKGQAKDIHVVLWILDILFILNFISLAIL

SEQ ID NO: 751 - DNA, 510 bp, Streptococcus agalactiae
atgctatggggctgtcagaatcagcaaactgttggaagacagagatatttctggtataatatctctatgttttatactcaaaatgaagaagagcttattgccctagggcaaaaactgggtactgttttaaagtcaggagatatcgtattattgactggtaatttaggtgcaggcaaaacaactcttacaaaaggtattgcaaagggattagacataaaacaaatgattaagagcccaacttacactattgttagagaatatgaagggcgtgtaccactttaccatttggatgtttatcgtattggagatgatcctgattctattgacttagatgacttcttgtttggtcaaggagtaacagttattgaatggggagagttgcttagtgataaccttatcaataactacttagaaattgttattacgaggagcaatcaaggacgtcaggttcagttagaagcttatgggcatcgcgcaagagaaattattgaggcgattcaagatgtctaa

SEQ ID NO: 752 - protein, 169 aa, Streptococcus agalactiae
MLWGCQNQQTVGRQRYFWYNISMFYTQNEEELIALGQKLGTVLKSGDIVLLTGNLGAGKTTLTKGIAKGLDIKQMIKSPTYTIVREYEGRVPLYHLDVYRIGDDPDSIDLDDFLFGQGVTVIEWGELLSDNLINNYLEIVITRSNQGRQVQLEAYGHRAREIIEAIQDV

SEQ ID NO: 753 - DNA, 561 bp, Streptococcus agalactiae
atgggcatcgcgcaagagaaattattgaggcgattcaagatgtctaaacaatttgctgttgattttatagaagcttcgagagaggaagcatctgcgatccttgaatttttaaatactgttactgaggaaacagattttattttgcatacggtgagcaatcaactatctttgtcagaaatggaaacgtttattgaaaataccttaatgacgaaaaattgcatttgtttgattgctaaattaaaaaataaagtgatcggcttgataacaatcattagtcagtctgatattgaaattgaacacgttggggatctttttattgccgttcagaaggattattggggatatggtattggtcatattctcatggaagaagcaatagaatgggcgtcagataacgatattacacgccgcttagaactatcagtccaaggacgtaatgaacgtgctattcacctctaccaaaaattcggttttgaaatagatgggcttcaaacaagaggtattaaaagagaaaatggagaatttctagacatttacagaatgagtaagttgatagattag

SEQ ID NO: 754 - protein, 186 aa, Streptococcus agalactiae
MGIAQEKLLRRFKMSKQFAVDFIEASREEASAILEFLNTVTEETDFILHTVSNQLSLSEMETFIENTLMTKNCICLIAKLKNKVIGLITIISQSDIEIEHVGDLFIAVQKDYWGYGIGHILMEEAIEWASDNDITRRLELSVQGRNERAIHLYQKFGFEIDGLQTRGIKRENGEFLDIYRMSKLID

SEQ ID NO: 755 - DNA, 1308 bp, Streptococcus agalactiae
atgaaaatttggaaaaaaataaccttaatgttttctgcaattattttaacaacagtaattgcattgggagtctatgttgcctcagcttataatttttcgactaatgaattgtctaagacttttaaagattttaagctagctaaatcaaaaagtcatgctattgaagaaacaaagccgttttcaatactattaatgggggtggacacaggttcagagcatcgaaaatctaagtggtcaggaaatagcgattctatgatcttagtcactataaatcctaaaactaataaaacaacgatgacaagcttagaacgtgacgtattgattaaattgagtggtcccaaaaataatggacagactggagtagaagcaaagctaaatgcagcctatgcttctggtggtgcggaaatggcattgatgactgttcaagacttattagatattaatgttgattactttatgcaaattaatatgcaaggattagttgatttagtcaatgctgttggtggtataacagtaactaataaatttgactttccaatatcaattgctgccaatgaaccagagtacaaggctgttgttgaaccagggacacataaaataaatggagaacaagcacttgtttattctcgtatgcgctatgatgatccagagggagattatgggcgtcaaaaaagacaacgtgaagtaattcaaaaagtccttaaaaaaatattggcgttaaatagtattagttcatacaaaaaaattctttccgcagtaagtaataacatgcaaactaatattgagatatcatcaaaaacgattcctaatttgttagcttataaagattcattggaacatattaaatcttatcagttgaagggtgaagacgctactttatcagatggtggctcttatcaaattttaactaagaaacatctacttgcagttcaaaatagaattaagaaagaactggataaaaagcgtagtaaaactctgaagacaagcgcgattctatatgaagattactatggtactactgctagtaatgattcttctacttattcatcaacacaagagaataattataatacaacaccttattcagaagcaccaccaagttacagtggtaatactacttatagttctgagactaatcaaacaactcatcaaaattactataatagtagcactcctgctagtaactatagcagtaacactaacacaggtcaggctgattcaagtggaagtgtcaataatcataacggggctgcaacgcctaatccaaacacaggaacgcaaccagtaccaggtcaaactaatccataa

SEQ ID NO: 756 - protein, 435 aa, Streptococcus agalactiae
MKIWKKITLMFSAIILTTVIALGVYVASAYNFSTNELSKTFKDFKLAKSKSHAIEETKPFSILLMGVDTGSEHRKSKWSGNSDSMILVTINPKTNKTTMTSLERDVLIKLSGPKNNGQTGVEAKLNAAYASGGAEMALMTVQDLLDINVDYFMQINMQGLVDLVNAVGGITVTNKFDFPISIAANEPEYKAVVEPGTHKINGEQALVYSRMRYDDPEGDYGRQKRQREVIQKVLKKILALNSISSYKKILSAVSNNMQTNIEISSKTIPNLLAYKDSLEHIKSYQLKGEDATLSDGGSYQILTKKHLLAVQNRIKKELDKKRSKTLKTSAILYEDYYGTTASNDSSTYSSTQENNYNTTPYSEAPPSYSGNTTYSSETNQTTHQNYYNSSTPASNYSSNTNTGQADSSGSVNNHNGAATPNPNTGTQPVPGQTNP

SEQ ID NO: 757 - DNA, 297 bp, Streptococcus agalactiae
atgaaaataggtcgtttaattgcactaggtttagttagtttaggagcgcttgaactttacaaaaatagaaaaactatcaaggattcctatcaaaatacaaaaaatgagacagattcagctaaattaaaattagaacgtatcaaaaatgatcttgctattattagtcaggaaaaagaaaaaatcagattaatttctcaagaactcaatcataaattccaagtgtttaataaagatattcaacctcgtttagaagaaattaatcaacgcatggctaaatatcaagagaaagacgaataa

SEQ ID NO: 758 - protein, 98 aa, Streptococcus agalactiae
MKIGRLIALGLVSLGALELYKNRKTIKDSYQNTKNETDSAKLKLERIKNDLAIISQEKEKIRLISQELNHKFQVFNKDIQPRLEEINQRMAKYQEKDE

SEQ ID NO: 759 - DNA, 420 bp, Streptococcus agalactiae
atggataattgtattttttgtaaaatcatcagtggagaaatcccttcatcaaaagtttatgaagatgatgaagtattagcttttctcgacattacacaaactacgaccgggcacacccttcttattcctaaaaaacatgttcgaaatgtgttagagatggatgaaaaaactgcacagataacctttgaacgcttgcctaaagtggcgcgtgctgtccaagctgctacaaaagccaaaggaatgaatattattaacaacaatgaggaaattgctggacaaactgtttttcatgcacacgtccaccttgttccccgctttgatgaatcagacggtatcaaaattcactacactactcatgaacccgactttgaggcacttgcaaaattagccaaagaaattagaaaagagattcaattatga

SEQ ID NO: 760 - protein, 139 aa, Streptococcus agalactiae
MDNCIFCKIISGEIPSSKVYEDDEVLAFLDITQTTTGHTLLIPKKHVRNVLEMDEKTAQITFERLPKVARAVQAATKAKGMNIINNNEEIAGQTVFHAHVHLVPRFDESDGIKIHYTTHEPDFEALAKLAKEIRKEIQL

SEQ ID NO: 761 - protein, 504 aa, Streptococcus agalactiae
TTGAAATTAAATAAAATAATATTATCTACTGCAGCTCTTACTGCTCTCTTTTTAGGATATAATAGCGTTACTGCGGATACATATAATAACTATCAGCCACATAGATCAAATAATATGGATTTAACTGAGGAATATAACTATAATAACCAGATAGAACTTCAGGAGCGTATAAAAAAACTAAATATACCTTTTAAAGAAAAACTTGCCTTACTTAGAAAGGTTAAATCAAGACAAGATTCTTATGTATTAGACACATTAAGAAAAGAAGTTGAAAATAAAAACAGTGAGTATTCAGAACTAGAGCAAGAATATCAAAGAATTTCAGCTCTTATTGATGCTAAGTTTCCGCAAGGGAAATCTAGTTTAGCAGAAAAATTACATAAAGAACTAATTTGGGACTTGGATGGTGTTAAATATGATGAGGGTATTTCTAAGAGAACTGCTCTAAAAAAATTAGAAGGTAAAATCAACGAATATACTAAAAAATACAGTTATTTATTCTGA

SEQ ID NO: 762 - protein, 167 aa, Streptococcus agalactiae
MKLNKIILSTAALTALFLGYNSVTADTYNNYQPHRSNNMDLTEEYNYNNQIELQERIKKLNIPFKEKLALLRKVKSRQDSYVLDTLRKEVENKNSEYSELEQEYQRISALIDAKFPQGKSSLAEKLHKELIWDLDGVKYDEGISKRTALKKLEGKINEYTKKYSYLF

SEQ ID NO: 763 - protein, 726 aa, Streptococcus agalactiae
ATGTTAAAAATTGAAAATGTTACAGGGGGGTATGTTAATATCCCAGTTTTAAAAAATATTTCTTTTGAAGTAAATGATGGAGAGTTAGTTGGATTAATTGGGCTTAATGGTGCAGGAAAATCAACCACTATTAACGAGATTATTGGTATTTTGAGACCCTATCAAGGAGATATTACAATTGATGGTATTAGTCTTGAAGCCGACCAAGAACTTTATAGAAAGAAAATAGGCTTTATTCCTGAGACACCAAGTCTCTATGAGGAGCTAACTCTCAGGGAACATTTAGAAACGGTAGCTATGGCGTATGATATTGCCACCGATGAAGTTATGGCACGTGCGCAAAAACTATTAGAGATGTTTCGTCTAACAGATAAATTAGACTGGTTTCCAATGCATTTTTCAAAGGGAATGAAACAAAAGGTTATGATTATTTGTGCTTTTGTTGTATCTCCAAGTTTATTTATTGTTGATGAACCATTTTTAGGTTTGGATCCACTAGCTATTTCAGATTTGATTAATCTTCTAGCAGAAGAAAAAGCTAAAGGGAAATCTATTTTGATGTCAACACACGTATTAGATTCTGCCGAAAAAATGTGTGATCGTTTTGTTATTTTACATAAAGGAGAAATACGGGCAGTTGGAACCCTAGAGGAATTACGGGCTATTTTTGGAGACAGTAATGCTAATTTAAATGACATCTACATAGCTCTGACAAAAGAGGTGTGA

SEQ ID NO: 764 - protein, 241 aa, Streptococcus agalactiae
MLKIENVTGGYVNIPVLKNISFEVNDGELVGLIGLNGAGKSTTINEIIGILRPYQGDITIDGISLEADQELYRKKIGFIPETPSLYEELTLREHLETVAMAYDIATDEVMARAQKLLEMFRLTDKLDWFPMHFSKGMKQKVMIICAFVVSPSLFIVDEPFLGLDPLAISDLINLLAEEKAKGKSILMSTHVLDSAEKMCDRFVILHKGEIRAVGTLEELRAIFGDSNANLNDIYIALTKEV

SEQ ID NO: 765 - protein, 1035 aa, Streptococcus agalactiae
ATGAAAAAGTTATTTAATAAACGTCGAAGTCTCTTTTTAACTCAAAATAGTAAATATTTGAGATACGTCTTTAACGATCATTTTGTATTAGTATTAATGTTTTTGTCAGGTTTTTTGTTATATCAGTATAGCCAGTTACTAAAAGACTTTCCAAAAACACATTGGCCAATTATCGTGATTGTGTCAATCATTATCTTAATGTTACTAGCGATGGGGGGAATAGCCAGCTATTTAGAACCGGCTGATAAACAATTTTTACTTATAAAAGAAGAAGCAATAAAGGAAATTATAAATTCTGCTAAAAAACGGACTTATATCTTTTGGTTGGTTATTCAAACCTTATTTTTAGTATTAATATCACCAATTTTGATAAAGTTAGGCTTGTCAGTTTTTATGATTACATTGTTAATTTTTGGTCTAGGAATAATCAAATGGTTGGTAATAACTTACAAGGTAAAGGTCTTTTATAACAATCAAAATTTGAACTGGGATGCAGCTATAAATCATGAGCAGGAAAGAAAACAGAGTATATTAAAATTTTTCTCTTTGTTTACAAATGTTAAAGGAATTTCGACAAGTGTAAAACGTCGTTCATTTTTAGATGGTATTTTAAAACTTATTTCTAAAACGCCATCGCGTTTATGGACTAACTTATTTGTGAGGGCATTTCTAAGAAGCTCAGATTATCTTGGTTTAACAATAAGGTTGGTAACTTTAAATATCTTATCAGTCATCTTTGTTAACGAAACCTACCTCGCCCTTGCTCTGGCATTTGTATTTAACTACTTATTATTGTTCCAACTATTAGCTTTAGGTCACCATTTTGATTATCAATACATGAATCAGCTCTATCCAGTTAGATTAAATGCTAAAGCAAGTCAGCTAAAAGGTTTTCTCAGAGTATTATCATATGCTGTGACAGTAATTGATAGCATACTTATAAGAGAATTGAAACCTGTTATATTATTGATAGTTTTGATGTTAATTGTGACGGAATATTACATCCCTTACAAAATAAAGAAGATGATTGACTAA

SEQ ID NO: 766 - protein, 344 aa, Streptococcus agalactiae
MKKLFNKRRSLFLTQNSKYLRYVFNDHFVLVLMFLSGFLLYQYSQLLKDFPKTHWPIIVIVSIIILMLLAMGGIASYLEPADKQFLLIKEEAIKEIINSAKKRTYIFWLVIQTLFLVLISPILIKLGLSVFMITLLIFGLGIIKWLVITYKVKVFYNNQNLNWDAAINHEQERKQSILKFFSLFTNVKGISTSVKRRSFLDGILKLISKTPSRLWTNLFVRAFLRSSDYLGLTIRLVTLNILSVIFVNETYLALALAFVFNYLLLFQLLALGHHFDYQYMNQLYPVRLNAKASQLKGFLRVLSYAVTVIDSILIRELKPVILLIVLMLIVTEYYIPYKIKKMID

SEQ ID NO: 767 - protein, 801 aa, Streptococcus agalactiae
GTGACAATATCAAATCAAGAATTGACGCTTACTCCCTTAAGAGGAAAAAGTGGCAAAGCCTATATTGGTACTTATCCAAATGGTGAACGTGTCTTTGTCAAATATAATACGACACCTATTTTGCCAGCCTTAGCTAAGGAACAGATTGCGCCACAACTACTGTGGGCACGCCGTACAAGTAATGGCGATATGATGAGTGCTCAAGAATGGTTAGATGGTCGAACATTGACTAAAGAAGATATGGGTAGTAAACAGATTATTCATATTTTATTGCGCCTGCACAAGTCTCGTCCCTTAGTAAATCAGCTGTTACAATTAGGGTATAAAATTGAAAACCCTTATGATTTGTTGATGGATTGGGAAAAACAAACTCCTATTCAAATCCGGGAAAACACTTATTTGCAATCTATTGTGACTGAGTTAAAGCGTAGTTTACCTGAGTTTCGAACAGAGGTTGCAACAATCGTTCACGGAGATATCAAACATAGCAACTGGGTTATTACAACAAGTGGTTTAATTTATTTGGTTGATTGGGATTCTGTTCGTTTAACAGATCGCATGTATGACGTTGCATATATTTTAAGTCATTATATTCCACAAAAACACTGGAAAGATTGGCTGTCTTACTACGGTTATAAAGATAATGAGAAAGTCTGGAGCAAAATTATCTGGTATGGGCAATTTTCATATTTATCACAGATAATCAAATGTTTTGATAAACGAGATATGGAGCATGTCAATCAAGAAATTTATGAATTACGAAAGTTTAGAGAGTTAATTAAAAAGCATAATGCGAGTTAG

SEQ ID NO: 768 - protein, 266 aa, Streptococcus agalactiae
MTISNQELTLTPLRGKSGKAYIGTYPNGERVFVKYNTTPILPALAKEQIAPQLLWARRTSNGDMMSAQEWLDGRTLTKEDMGSKQIIHILLRLHKSRPLVNQLLQLGYKIENPYDLLMDWEKQTPIQIRENTYLQSIVTELKRSLPEFRTEVATIVHGDIKHSNWVITTSGLIYLVDWDSVRLTDRMYDVAYILSHYIPQKHWKDWLSYYGYKDNEKVWSKIIWYGQFSYLSQIIKCFDKRDMEHVNQEIYELRKFRELIKKHNAS

SEQ ID NO: 769 - protein, 636 aa, Streptococcus agalactiae
ATGCGAGTTAGAAAACGTAAGGGTGCAGAGGAACACTTAGAAAATAATCCTCACTATGTTATTTCAAATCCAGAAGAAGCCAAAGGGCGTTGGCATGAGATTTTTGGAAATAATAACCCCATTCACATAGAAGTTGGTTCCGGAAAAGGGGCTTTTATCACTGGTATGGCAGAGCAAAATCCAGATATCAATTATATTGGAATTGATATTCAATTGTCAGTGCTTTCCTATGCTTTGGATAAAGTTCTAGATAGCGGTGCTAAGAATATCAAATTACTATTAGTTGATGGTTCTAGTCTATCAAACTACTTTGATACTGGCGAAGTTGATTTGATGTATCTTAACTTTAGTGATCCATGGCCTAAGAAAAAGCATGAGAAACGTCGATTGACCTATAAGACTTTCTTGGATACCTATAAAGACATACTTCCTGAGCAGGGGGAAATTCATTTTAAAACAGATAATAGAGGTTTATTTGAATATAGCCTTGCTAGCTTTTCTCAATACGGTATGACTTTAAAACAAGTTTGGTTAGATTTACATGCAAGTGATTACCAGCAAAATATCATGACTGAGTACGAACGCAAATTTTCAAATAAAGGACAGGTTATCTATCGTGTAGAAGCACGATTTTAG

SEQ ID NO: 770 - protein, 211 aa, Streptococcus agalactiae
MRVRKRKGAEEHLENNPHYVISNPEEAKGRWHEIFGNNNPIHIEVGSGKGAFITGMAEQNPDINYIGIDIQLSVLSYALDKVLDSGAKNIKLLLVDGSSLSNYFDTGEVDLMYLNFSDPWPKKKHEKRRLTYKTFLDTYKDILPEQGEIHFKTDNRGLFEYSLASFSQYGMTLKQVWLDLHASDYQQNIMTEYERKFSNKGQVIYRVEARF

SEQ ID NO: 771 - DNA, 384 bp, Streptococcus agalactiae
atgggtggcgactatgtgctcagtattttaattgataaacccggaggcattacggttgaagatacagcacaattgacagacgttgtaagtcccttacttgacacaattcaaccagatccatttccagaacagtatatgcttgaagtctcaagtcctgggttggaaagaccacttaaaacagcagaagcattatcaaatgctgttgggtcttatatcaatgtaagtctgtataaatccattgataaagttaaaatatttgaaggtgacttattatcatttgatggtgaaaccttgacaattgattatatggacaaaacacgtcataaaactgtagatattccctatcagacggttgcaaaagcccgtcttgcggttaaactttaa

SEQ ID NO: 772 - protein, 127 aa, Streptococcus agalactiae
MGGDYVLSILIDKPGGITVEDTAQLTDVVSPLLDTIQPDPFPEQYMLEVSSPGLERPLKTAEALSNAVGSYINVSLYKSIDKVKIFEGDLLSFDGETLTIDYMDKTRHKTVDIPYQTVAKARLAVKL

SEQ ID NO: 773 - DNA, 1140 bp, Streptococcus agalactiae
atgctagaagccttccgtattttggaagaagaaaaacacattaataaagaagatattattgatgcagttactgagtcactaaaatctgcctataagcgtcgttatggtcaatcagaatcatgcgttattgaatttaacgagaagaaagcagactttaccgtctatactgttcgtgaagttgttgatgaagtttttgatagccgtttggaaattagcctaaaagatgcccttgctattagctcagcgtatgaacttggtgataagattcgctttgaggaatctgttacagaatttggacgcgtggcagctcagtcagcaaaacaaactattatggaaaaaatgcgtcgtcaaatgcgtgaagtaaccttcaatgaatacaaacaacacgaaggtgaaattatgactggtactgttgaacgatttgaccaacgttttatttatgtcaatctcggttcacttgaggcgcaattatcgcatcaagatcagattcctggagagagctttaaatctcatgatatgattgatgtttatgtctataaagtggagaataatcctaaaggagtcaacgtttttgttagccgtagtcatccagagtttatcaaacgcattatggagcgagaaattccagaagtatttgatggaactgttgagattatgagcgtctctcgtgaggctggagatcgtactaaagttgctgtacgcagtcataattcaaacgttgatgcgattggaacaattgttggacgcggtggaagtaacattaaaaaagttatcagtaatttccatcctaaacgcgttgatgctaaaacaggattggagatcccggttgaagaaaacattgatgttattcaatgggttgaagatccagcggaattcatttacaatgctattgcaccagccgaagttgatatggtactttttgatgatgaagatacaaaacgtgctactgtagttgttccagatagcaagttatcgctagctattggtcgccgaggacaaaatgtgcgtttagcagctcatttgactggctatcgtattgatattaaatctgcaagtgaatacgaaaaaatggaagcgcaagaacttcaaactgaggaagtagctcaagaatctgaagttatttcagataaggcagaataa

SEQ ID NO: 774 - protein, 379 aa, Streptococcus agalactiae
MLEAFRILEEEKHINKEDIIDAVTESLKSAYKRRYGQSESCVIEFNEKKADFTVYTVREVVDEVFDSRLEISLKDALAISSAYELGDKIRFEESVTEFGRVAAQSAKQTIMEKMRRQMREVTFNEYKQHEGEIMTGTVERFDQRFIYVNLGSLEAQLSHQDQIPGESFKSHDMIDVYVYKVENNPKGVNVFVSRSHPEFIKRIMEREIPEVFDGTVEIMSVSREAGDRTKVAVRSHNSNVDAIGTIVGRGGSNIKKVISNFHPKRVDAKTGLEIPVEENIDVIQWVEDPAEFIYNAIAPAEVDMVLFDDEDTKRATVVVPDSKLSLAIGRRGQNVRLAAHLTGYRIDIKSASEYEKMEAQELQTEEVAQESEVISDKAE

SEQ ID NO: 775 - DNA, 297 bp, Streptococcus agalactiae
atggctaaaacaaaaaaaatacctttaagaaaatcagttgtttctggtgaagtgatcgataagcgagatcttttacgaattgttaaaaataaagaaggacaggtttttatagatcctaccggaaagcaaaatggtcgaggtgcctacataaaattggacaatgatgaagctatcctagcgaaaaagaaacgagtgtttgatcgcagtttttcgatggaagtttctgatgaattctatgatgaactattggcatatgtcgaccataaggtcaaaagaagagagttaggccttgaataa

SEQ ID NO: 776 - protein, 98 aa, Streptococcus agalactiae
MAKTKKIPLRKSVVSGEVIDKRDLLRIVKNKEGQVFIDPTGKQNGRGAYIKLDNDEAILAKKKRVFDRSFSMEVSDEFYDELLAYVDHKVKRRELGLE

SEQ ID NO: 777 - DNA, 303 bp, Streptococcus agalactiae
ttgaataattcagaaaaagtattaaatctcattgggttagcacagcgtgcggggcgccttattacaggtgaagaattggttattaaagcaattcaaaatcaacaagtatcgctaatctttctagcaaatgatgctggcccaaatttgacgaaaaaagtaactgataaaagtaattactacaaaacagaagtctccacagtgttttcaacactggaattaagtgatgcgttaggcaaaccaagaaaagtggttgctgtcgcagacgctggattttcaaagaaaatgaggactcttatggcataa

SEQ ID NO: 778 - protein, 100 aa, Streptococcus agalactiae
MNNSEKVLNLIGLAQRAGRLITGEELVIKAIQNQQVSLIFLANDAGPNLTKKVTDKSNYYKTEVSTVFSTLELSDALGKPRKVVAVADAGFSKKMRTLMA

SEQ ID NO: 779 - DNA, 870 bp, Streptococcus agalactiae
gtggttgagcaagctcaatcgcttggcttacctgtaaaaagtcatgcttctagcgttgaagaaaatgatgctacacgtattgttgagagttttagctcttctaaaactaaagctccaacaaattctgttcaaactaatcaaggtgtgaaaacagaatctaaaactgttgaaaccaaacaaggcttgtccgatgataaaccttcaactcaacctgtagctaaaccgaaaccacaaagtcgtaactttaaggcggagcgcgaggctcgtgctaaagctgaagcggagaagcgtcaacataatggggatcaccgtaagaataatcgccataatgatacacgctctgacgacagacgccatcaaggtcaaaagcgttcaaatggtaatcgtaatgataaccgacaaggtcagcaaaataaccgtaataaaaatgatgggcgttatgctgatcataaacagaaaccccaaacgcgtcctcagcaacctgcaggcaatcgcattgactttaaagctcgagcagcagctttgaaagctgagcaaaatgctgaatactcacgtcatagtgagcagcgtttccgtgaagagcaagaagccaaacgtcaagcagctaaggagcaagaactagctaaagcagcagcgttaaaagcgcaagaagaagctcaaaaagctaaggaaaaacttgcttctaaacctgttgctaaggtaaaagaaattgtcaataaagtagccgctacgccatcacagacagcagatagtcgtcgtaaaaaacaaactcgttctgataagtctcgtcaatttttcaaaatgaaaatgaagatggacaaaaagcaaacaaaaaataagaaaaactggaataatcaaaaaaccaagtga

SEQ ID NO: 780 - protein, 289 aa, Streptococcus agalactiae
MVEQAQSLGLPVKSHASSVEENDATRIVESFSSSKTKAPTNSVQTNQGVKTESKTVETKQGLSDDKPSTQPVAKPKPQSRNFKAEREARAKAEAEKRQHNGDHRKNNRHNDTRSDDRRHQGQKRSNGNRNDNRQGQQNNRNKNDGRYADHKQKPQTRPQQPAGNRIDFKARAAALKAEQNAEYSRHSEQRFREEQEAKRQAAKEQELAKAAALKAQEEAQKAKEKLASKPVAKVKEIVNKVAATPSQTADSRRKKQTRSDKSRQFFKMKMKMDKKQTKNKKNWNNQKTK

SEQ ID NO: 781 - protein, 680 aa, Streptococcus agalactiae
ATGRRGCTCCAAAMCMRGTAMCRGAGCGTAAATTCCATGAATTACCAAAAGAATTTGAATATACTGAGGGCATGACCGTTGCGGAAATTGCAAAACGTATTAAACGCGAACCAGCGGAAATTGTTAAAAAACTCTTTATGATGGGAGTTATGGCAACGCAGAATCAATCATTAGATGGAGACACTATTGAGCTATTGATGGTTGACTACGGGATTGAAGCACATGCTAAGGTTGAAGTTGATGAAGCTGATATTGAACGCTTCTTTGCAGATGAGGATTACCTTAATCCTGATAACTTAACGGAACGTCCGCCTGTTGTTACTATCATGGGACACGTTGATCATGGTAAAACAACTCTTCTTGATACTCTACGTAATTCACGTGTCGCTACTGGCGAAGCTGGTGGAATTACTCAACATATTGGTGCTTATCAGATTGAAGAAGCTGGCAAGAAAATTACTTTCTTGGATACACCAGGGCATGCGGCCTTTACTTCTATGCGTGCGCGTGGTGCATCAGTAACTGATATTACTATCCTTATCGTTGCCGCTGATGATGGTGTTATGCCGCAGACAGTTGAGGCAATTAATCACTCTAAAGCTGCGGGTGTCCCAATTATTKTKSYWWCAMMAAAATTGATAAACCTGGTGCAAATCCAGAACGCGTTATCAGTGAATTAG

SEQ ID NO: 782 - protein, 227 aa, Streptococcus agalactiae
  VARIANT 2, 5, 6, 8, 208, 209, 210, 212: Xaa = Any Amino Acid
MXAPXXVXERKFHELPKEFEYTEGMTVAEIAKRIKREPAEIVKKLFMMGVMATQNQSLDGDTIELLMVDYGIEAHAKVEVDEADIERFFADEDYLNPDNLTERPPVVTIMGHVDHGKTTLLDTLRNSRVATGEAGGITQHIGAYQIEEAGKKITFLDTPGHAAFTSMRARGASVTDITILIVAADDGVMPQTVEAINHSKAAGVPIIXXXSXKLINLVQIQNALSVN

SEQ ID NO: 783 - protein, 1008 aa, Streptococcus agalactiae
ATGGAAGAATTAAAAGCAGATGCAGATGTTCGTGCTATTGGTACTGTTATTGAAGCCCGTCTTGATAAAGGTAAGGGAGCCGTTGCAACGCTTCTTGTCCAACAAGGTACTTTAAATGTACAAGATCCAATCGTTGTTGGTAATACATTTGGACGTGTTCGTGCGATGACTAATGATCTTGGGCGTCGTGTCAAAGTTGCGGGTCCATCTACACCAGTTTCTATTACTGGTTTGAACGAAGCTCCAATGGCTGGTGATCATTTTGCTGTTTATGCAGATGAGAAAGCTGCGCGTGCTGCAGGTGAAGAACGTGCAAAACGTGCTCTCTTAAAACAACGCCAAAACACGCAACGTGTTAGCCTCGAGAACTTATTTGATACCCTTAAAGCTGGTGAAGTTAAGTCAGTTAATGTTATTATCAAAGCTGATGTGCAAGGTTCTGTAGAAGCACTTGCAGCTTCTCTCCTTAAGATTGATGTTGAAGGAGTAAAAGTTAACGTTGTTCACTCAGCAGTTGGTGCTATTAATGAGTCTGATGTAACACTTGCTGAAGCATCAAATGCTGTTATTATAGGATTTAACGTACGCCCTACTCCACAAGCTCGTCAACAAGCAGATGCTGATGATGTCGAAATTCGTCAACATAGCATTATCTATAAAGTTATCGAAGAAGTTGAAGAAGCGATGAAAGGTAAACTTGATCCTGAATACCAAGAAAAAATCCTTGGTGAAGCCATTATTCGTGAGACCTTTAAAGTTTCAAAAGTGGGAACTATTGGTGGATTTATGGTTATCAATGGTAAAGTTACTCGTGATTCAAGTGTTCGTGTTATCCGTGATGGTGTTGTCATTTTTGATGGTAAATTAGCAAGTCTTAAACACTATAAAGATGATGTTAAAGAAGTCGGCAATGCTCAAGAAGGTGGTCTAATGATTGAGAATTATAACGATCTCAAAGAAGATGACACTATTGAAGCATACATTATGGAAGAAATTAAACGTAAATAA

SEQ ID NO: 784 - protein, 335 aa, Streptococcus agalactiae
MEELKADADVRAIGTVIEARLDKGKGAVATLLVQQGTLNVQDPIVVGNTFGRVRAMTNDLGRRVKVAGPSTPVSITGLNEAPMAGDHFAVYADEKAARAAGEERAKRALLKQRQNTQRVSLENLFDTLKAGEVKSVNVIIKADVQGSVEALAASLLKIDVEGVKVNVVHSAVGAINESDVTLAEASNAVIIGFNVRPTPQARQQADADDVEIRQHSIIYKVIEEVEEAMKGKLDPEYQEKILGEAIIRETFKVSKVGTIGGFMVINGKVTRDSSVRVIRDGVVIFDGKLASLKHYKDDVKEVGNAQEGGLMIENYNDLKEDDTIEAYIMEEIKRK

SEQ ID NO: 785 - protein, 351 aa, Streptococcus agalactiae
ATGGCTAATCATCGTATTGATCGCGTTGGAATGGAAATTAAACGTGAAGTCAATGAGATTTTGCGTCTCCGAGTTAATGATCCACGTGTACAAGATGTCACAATTACTGATGTTCAGATGTTGGGTGACCTTTCAATGGCTAAAGTATTTTATACTATTCATTCGACACTTGCTTCTGATAATCAAAAAGCACAAATTGGTTTAGAAAAAGCAACTGGTACTATTAAGCGTGAACTTGGCAAAAACCTTACTATGTATAAAATACCAGATTTACAATTTGTTAAAGATGAATCTATTGAATACGGAAATAAGATTGATGAAATGTTGCGCAATCTAGATAAAAAAGATTAG

SEQ ID NO: 786 - protein, 116 aa, Streptococcus agalactiae
MANHRIDRVGMEIKREVNEILRLRVNDPRVQDVTITDVQMLGDLSMAKVFYTIHSTLASDNQKAQIGLEKATGTIKRELGKNLTMYKIPDLQFVKDESIEYGNKIDEMLRNLDKKD

SEQ ID NO: 787 - protein, 1005 aa, Streptococcus agalactiae
TTGAAACCGTCCTTCAAAAAACTATTGCTACTATTTAGTATTATCACCATTTTATCCATCGCCTGTACACCACATGCAAAAGCAAGTGGGCGTTCATGGAAAAGTTGGTTTATCGAACAATACTTTTGGCTAAAGCGCGATAAAAGTTATTATAAAGTTCAAGATGAAAGCTCATTTCAAAAGTACTTAAATGCTAGCCGTGAACAATCTGATAAGGGTTATTACTTAGACCCAAACTCTGTTAATGGAGGGCTTGTTCAAGAGAGACTTTTTGATATGCAAGTCTATTCTTGGAATGACAACGGTAAAGCTAATCAAAAGACCATTTTCTATTTAGCTGGTGGCTCTTACTTAAATAATCCAACGCCTTACCATATCAGCATGCTTAAGACGCTCTCAACTAGTCTTGATGCAAAAATTATTTTACCAATTTATCCAAAAACTCCTCGTTATACCTATGATTATGCTATCCCTAGATTGGTTAACCTTTATAGACACTTTCATGAAAAAAACGCTAATCTCACTTTGATGGGTGATTCAGCTGGCGGAGGATTAGCACTAGGATTAGCGCATGCATTGTCTCACCAATCAGGGCAAGAGGCTATTCCTCAACCTAAAAATATTATCCTCTTATCTCCATGGCTAGATGTGACAATGAAACATCCAGAAATTCCCAAATACGAAGATACTGATCCTATCCTATCTGCTTGGGGTCTCGCACGTGTAGGTGAAATTTGGGCAAATGGTTCTAATAATACTAACCATACATATGTTAGTCCTAAAAATGCCCCTGCTACTAAACTCGCTCCTATTACGTTATTTACTGGAACACGAGAAATATTCTTCCCAGATATTCGCGATTATGCTGCACAACTCCAAGCAGCTAATCACCCCGTTAACTATATTGCACAAGAGGGAATGAATCATGTTTATCCAATTTACCCTATTGAAGAAGCTAAAACAGCACAGTATCAAATGATTGATATCATCAATAAAACTCCTTAA

SEQ ID NO: 788 - protein, 334 aa, Streptococcus agalactiae
MKPSFKKLLLLFSIITILSIACTPHAKASGRSWKSWFIEQYFWLKRDKSYYKVQDESSFQKYLNASREQSDKGYYLDPNSVNGGLVQERLFDMQVYSWNDNGKANQKTIFYLAGGSYLNNPTPYHISMLKTLSTSLDAKIILPIYPKTPRYTYDYAIPRLVNLYRHFHEKNANLTLMGDSAGGGLALGLAHALSHQSGQEAIPQPKNIILLSPWLDVTMKHPEIPKYEDTDPILSAWGLARVGEIWANGSNNTNHTYVSPKNAPATKLAPITLFTGTREIFFPDIRDYAAQLQAANHPVNYIAQEGMNHVYPIYPIEEAKTAQYQMIDIINKTP

SEQ ID NO: 789 - protein, 149 aa, Streptococcus agalactiae
ATGACTATTTCAAGCGCAGAATGGGAAATTATGAGAGTGGTTTGGGCACAGCAGAATACAACCAGTAATGAGATACTAGCAGTTTTACTAGAGAAGTATGATTGGACTCCTTCAACTGTCAAAACCTTATTAAGAAGGCTCTTAGATAA

SEQ ID NO: 790 - protein, 49 aa, Streptococcus agalactiae
MTISSAEWEIMRVVWAQQNTTSNEILAVLLEKYDWTPFNCQNLIKKALR

SEQ ID NO: 791 - DNA, 2235 bp, Streptococcus agalactiae
atggctaatagaaaagaaacatttttgattgatgggatgacttgtgcatcttgtgctttaacgatagaaaaagctgtcaacaagttagaccatgtggatagtgcagtagtaaatttagcaacagagaaaatgacagttacgtttgatgatacaaccttatcgccaaatgtgattgaagagtgtgtttctgagagtggatacgaagcatcgcttttcaaagaggaaacttctaaaagccaatctgaacggcaccaattagccattgaaaagatgtggcatcgcttttggatgtcagcagttgcaactatacctcttctctatatttccatgggaccaatgattaacttatggttaccatcatttttgatgccagataagggacctctaaactatggtatgatacaattattgttaacactaccggtgatgtattttgggcgtatcttttaccaaaatggttttaaagcactttttaaaaggcatcccaatatggattcattagttgctatagccacaacagcggctttcatttatagcttatatggattgtacgaaatattacagggtgacatacactacgctcaccagctttatttcgaatctgttgcagttattttaacacttattactctaggaaaatattttgaaatattatccaaagggcgtacttcggcctcgattgaaaaattattaactttatcagcaaaagaagcaagagttatcaaagatggtgaagactatatggttcctttggataaagttaaaataggtgaaacaattcttgtcaaacctggagaaaaaattcctcttgatggccatgttgtagcaggagaatcaagtattgatgaatccatgttaacaggtgaaagtattccagttgaaaaaaaggttggtagtaaggtttacggtgccagcattaatgggcaaggtagcttaacgattttcgttgaaaaagaagctggcggttcccttctatcacaaattattaacttagtagaagctgcacagacaagtaaggctccaattgctaacttagcagacaaagtatcaggagtctttgtcccttttgttattgtcattgcaattttatcaggcttgagttggtacttaattctggggcaaagttttgccttctctctgaagattatgattgcagtcttagtgattgcttgtccatgtgctttagggttggcaactcctacagctattatggtggctagtggtaaagcagctgagaatggtattttatttaaaggtggtgaagtgttggaaaaggctcaccacattgatacaatagtttttgataaaacaggaaccttgaccaaagggaaaccagaagtagttgctatcaaaacatatgggggagataaagaggagtttttaggtcaggtagcatcagtagaaaaactttcaaatcatccacttagccaaacaattgttaataaagcaaaagagaaagaacttcccttaagggaagtcatggcttttaaaaatattttgggttacggtttgagtgcaactattaatggtaaaactatgcttgtaggtaatgctaacttaatgactaagaacgatgttaatttagatttagcaaaggctgatatagaaatagctcaagaagaagcacaaactgtggtttacgtttccgaaaatggagtgttgagcggtttaataactttaacggaccagctaaagacagatagccaagaaacagttaagcagttacaaagattaggatttaatttagttttacttactggtgataataaggctagtgcagatgccatagcacaaaaattgggtatcacgacagttgtttcagaagttttacctgatcagaaagcaaacgttattttagaacttaaagaaaaaggcggacagattgcgatggttggtgatggcatcaatgatgctcctgcgctagctagcagtgatgtaggtatctctatgagttctggaacagatattgctattgaatcagcagatatcgtgttgatgaaacctgagttaacagatctcttaaaagcaatgactatcagtaaacaaacgattcaaattattaaggaaaatttattttgggctttcttttataacgttttagcgattccagtggcaatgggtgttttacatctttttggtggtcccttactcaatcctatgttggcaggcttagctatggcgtttagttcagtttcagtagttttaaacgcacttcgcttaaaagtcttaaaataa

SEQ ID NO: 792 - protein, 744 aa, Streptococcus agalactiae
MANRKETFLIDGMTCASCALTIEKAVNKLDHVDSAVVNLATEKMTVTFDDTTLSPNVIEECVSESGYEASLFKEETSKSQSERHQLAIEKMWHRFWMSAVATIPLLYISMGPMINLWLPSFLMPDKGPLNYGMIQLLLTLPVMYFGRIFYQNGFKALFKRHPNMDSLVAIATTAAFIYSLYGLYEILQGDIHYAHQLYFESVAVILTLITLGKYFEILSKGRTSASIEKLLTLSAKEARVIKDGEDYMVPLDKVKIGETILVKPGEKIPLDGHVVAGESSIDESMLTGESIPVEKKVGSKVYGASINGQGSLTIFVEKEAGGSLLSQIINLVEAAQTSKAPIANLADKVSGVFVPFVIVIAILSGLSWYLILGQSFAFSLKIMIAVLVIACPCALGLATPTAIMVASGKAAENGILFKGGEVLEKAHHIDTIVFDKTGTLTKGKPEVVAIKTYGGDKEEFLGQVASVEKLSNHPLSQTIVNKAKEKELPLREVMAFKNILGYGLSATINGKTMLVGNANLMTKNDVNLDLAKADIEIAQEEAQTVVYVSENGVLSGLITLTDQLKTDSQETVKQLQRLGFNLVLLTGDNKASADAIAQKLGITTVVSEVLPDQKANVILELKEKGGQIAMVGDGINDAPALASSDVGISMSSGTDIAIESADIVLMKPELTDLLKAMTISKQTIQIIKENLFWAFFYNVLAIPVAMGVLHLFGGPLLNPMLAGLAMAFSSVSVVLNALRLKVLK

SEQ ID NO: 793 - DNA, 207 bp, Streptococcus agalactiae
atgaaacatacctatcgagttagtggcatgaaatgtgatggttgtgccaaaacagtttctgataagttatcaagtgtgattggtgttgacgaggttaatgttgatttgactaaaaatcaagttgtcgtaagtggaaaaacattcaaatggcttttaaaacgttctttaaaagacacaaagtattcactagaagaggaaataaattaa

SEQ ID NO: 794 - protein, 68 aa, Streptococcus agalactiae
MKHTYRVSGMKCDGCAKTVSDKLSSVIGVDEVNVDLTKNQVVVSGKTFKWLLKRSLKDTKYSLEEEIN

SEQ ID NO: 795 - DNA, 615 bp, Streptococcus agalactiae
atgtcaattgatatttggaacattttaagtttggttggaaccgtagcttttgcaagttcgggagctattgtggcgattgaggaagaatttgatattctagggctttttatcttaggttttgtaacggcatttggtggtggagctattagaaatgtactaattggcttgcctattgaaacactttggagtcaaggaattgctttttatgcagcagcagcagctattttatttattatgattttccctaatttgttgagtggtaagggacgggatgccgaagttgtatcagatgctattgggttagcagcgtttagtgttcaaggagcactatatgcgactcaatctcatcaacctcttagtgctgtcattgtcgcagcagtactaactggtgcaggtggtggtattgtcagagatgttctggctggccgaaaacctggagtactaagaagtgaaatatatgcaggttggtcaatattagtggggatcattttatattttaaaattgctaaaacaacaactgactattatttgttagtgttagttgtaactagcctaaggatgttgggttataagaaacaatggcacttgccagttgtcagaccacgtaagaaatga

SEQ ID NO: 796 - protein, 204 aa, Streptococcus agalactiae
MSIDIWNILSLVGTVAFASSGAIVAIEEEFDILGLFILGFVTAFGGGAIRNVLIGLPIETLWSQGIAFYAAAAAILFIMIFPNLLSGKGRDAEVVSDAIGLAAFSVQGALYATQSHQPLSAVIVAAVLTGAGGGIVRDVLAGRKPGVLRSEIYAGWSILVGIILYFKIAKTTTDYYLLVLVVTSLRMLGYKKQWHLPVVRPRKK

SEQ ID NO: 797 - DNA, 813 bp, Streptococcus agalactiae
atgataaaattaattgctattgatatggatggaacgcttttaaatgatgaaaagaaaattccaaaggaaaatatccaagctattaaagaagcaactcaagcaggtattaaaattgtactgtgtactgggcgaccgatgtcaggtatacttccttattttaatgaactaggtttaacaaaagaggagtatattatcatgaataatggttgtagcacttatagcacgaaagattggcaattgattgattctgcaactttaacacatgatgaactcatctttcttgaggaggttgttaaagaatttcccaacgtttgtttaacattaacagctgaaaatacattttacgctgttggagaggaagttcctgaaattgttgcttatgatgctgatttagtttttacaaaagcaaagtcaacaagtttagatgctcttcgcaatcaagaagaaattgtctttcaagcaatgtacatgggattagatgcagatgtaactgcttttcaagaagctgttgaagaagccttaatctcgaaatttagtggagttcgaagccaagactatatttatgagattatgcctcaaggagtaacaaaagcaagaggcttaaaatccttgatagcaaaattaggactggatattaatcaagttatggccatcggtgatgctcctaacgatattgaattattagatttagttcccaatagcgttgctatggggaatgcatcagatgagattaaatctagatgtaaatatataacggtggataataacaaagcaggggttgctaaagctatttatgactatgctttacgttaa

SEQ ID NO: 798 - protein, 270 aa, Streptococcus agalactiae
MIKLIAIDMDGTLLNDEKKIPKENIQAIKEATQAGIKIVLCTGRPMSGILPYFNELGLTKEEYIIMNNGCSTYSTKDWQLIDSATLTHDELIFLEEVVKEFPNVCLTLTAENTFYAVGEEVPEIVAYDADLVFTKAKSTSLDALRNQEEIVFQAMYMGLDADVTAFQEAVEEALISKFSGVRSQDYIYEIMPQGVTKARGLKSLIAKLGLDINQVMAIGDAPNDIELLDLVPNSVAMGNASDEIKSRCKYITVDNNKAGVAKAIYDYALR

SEQ ID NO: 799 - DNA, 2457 bp, Streptococcus agalactiae
  misc_feature 2434, 2435, 2436, 2437, 2438: n = A,T,C or G
atgacaaacaagaataaattacttttaattgatggctcatctgtagcctttcgtgctttttttgctctttataatcaaattgaccgctttaaaaacaattctggacttcatactaatgccatatatggtttccatttgatgttgaatcatattttaggtcgtgtccagcctagtcatattttagtggcttttgatgccggaaaaactactttccgtacggaaatgtatgcagattataaaggtgggcgtgctaaaactccggatgaatttcgtgaacaatttccttacattcgtcaacaattagatgtcttaggcatcaaacattatgaattggaacattatgaagccgatgatatcattggtactcttgcaaaacaagccgaagctagtaatgaacattttgatataacggtggtttctggggataaagatttaattcaattaacagacactaacacggtagtagaaatctctaaaaagggagttgctgagtttgaagaattcacgccagcttaccttatggaaaaaatgggaattacgccgagtcaatttattgatttaaaagctttgatgggagataaatcagataatattcctggggttactaaaatcggtgaaaaaactggcttgaagttgctatcagaatatggttccttagaagggatctatgaaaatattgaggctatgaaacagtctaagatgaaagaaaaccttatcaatgataaggagcaagctttcttatcaaagaccctagctacaatcaacatagcatcacctataacaatcggcttagaagatatcctttatagtggaccgcaagatataaaagccttgtctcaattttatgatgagatggattttaaacagtttaaagcagctctgggtgaggagacaagtcaggaagattttgaggttgactttactgaagtggagcaattaaaaacagaaatgttctccgataatgatttttattactttgagatgttgggtgataactaccatgtagaagatttaattgggatagcttggggaaatagcgatacaatctacgctactagtaatgtatcgttattgcaagaagctttatttaaaaaagctttatcaaaacctatcaaaacttatgattttaaaagaagtaaggtccttttaaatcgttttaatattgatttaccagagccagcctttgatactagattggccaagtaccttttgtctactactgaggataatctagtatcaacaattgctaggttatatacaaatctgccactggatactgatgatgctgtttatgggaaaggtgctaaacgcgctataccagaaaaaacacgatttcttgagcatctagctaaaaaagtaaaagttttagtggattctgaggctaatattatgcaacagcttaaagctaatgagcaagaagaattgctgtttgaaatggagcaacctttagcgaatgttttagctaaaatggaaattcgaggtattaaggttaagaaaaataccttgaatgaaatggccattgaaaatcaaaaagtcatcgaaacattaacacaagaaatctatgaattggctgggcaagagtttaatattaattctccaaaacagttaggaaagttgttgtttgaaacgttaggtcttcctgtagaaatgactaaaaaaacaaaaacaggttattcaactgcagtagatgtattagagcgcttagctccgatttctcctcttgtaactaaaattttagagtaccgtcaaatcactaaattgcaatcaacctatattattggtttacaagattatattttagaagatggtaaaattcatacacgttatgttcaagatttgactcagacaggtcgtctttcaagttctgacccaaaccttcaaaatataccagttagactagagcaaggacggcttatccgaaaagcttttgttccatcagaagacaatgctgttttattgagttcagattattctcaaatagaattgcgcgtgttagcacatatttcaaaagacgaacatttgatcgctgcctttaaagagggagctgatattcatacttcaacagctatgcgtgtttttggtatcgaaaaacctgagaatgtcactcccaatgatcgtcgaaatgctaaggctgttaattttggaattgtttatggtatttcagattttggtctatcgcataatttaggaatacctcgtaaactagcgaagcaatatattgacacctattttgagcgttatcctggaataaaaaactatatggaaacagttgttcgtgaagcaaaagataagggttacgttgaaacacttttccatcgtcgtcgttcattaccagatattaattctcgtaattttaacattcgccaatttgcagagcgcacagcaatcaattcaccaatccaaggaagtgcagctgatattcttaaaatgcaannnnncattccattcattaattaa

SEQ ID NO: 800 - protein, 818 aa, Streptococcus agalactiae
  VARIANT 812, 813: Xaa = Any Amino Acid
MTNKNKLLLIDGSSVAFRAFFALYNQIDRFKNNSGLHTNAIYGFHLMLNHILGRVQPSHILVAFDAGKTTFRTEMYADYKGGRAKTPDEFREQFPYIRQQLDVLGIKHYELEHYEADDIIGTLAKQAEASNEHFDITVVSGDKDLIQLTDTNTVVEISKKGVAEFEEFTPAYLMEKMGITPSQFIDLKALMGDKSDNIPGVTKIGEKTGLKLLSEYGSLEGIYENIEAMKQSKMKENLINDKEQAFLSKTLATINIASPITIGLEDILYSGPQDIKALSQFYDEMDFKQFKAALGEETSQEDFEVDFTEVEQLKTEMFSDNDFYYFEMLGDNYHVEDLIGIAWGNSDTIYATSNVSLLQEALFKKALSKPIKTYDFKRSKVLLNRFNIDLPEPAFDTRLAKYLLSTTEDNLVSTIARLYTNLPLDTDDAVYGKGAKRAIPEKTRFLEHLAKKVKVLVDSEANIMQQLKANEQEELLFEMEQPLANVLAKMEIRGIKVKKNTLNEMAIENQKVIETLTQEIYELAGQEFNINSPKQLGKLLFETLGLPVEMTKKTKTGYSTAVDVLERLAPISPLVTKILEYRQITKLQSTYIIGLQDYILEDGKIHTRYVQDLTQTGRLSSSDPNLQNIPVRLEQGRLIRKAFVPSEDNAVLLSSDYSQIELRVLAHISKDEHLIAAFKEGADIHTSTAMRVFGIEKPENVTPNDRRNAKAVNFGIVYGISDFGLSHNLGIPRKLAKQYIDTYFERYPGIKNYMETVVREAKDKGYVETLFHRRRSLPDINSRNFNIRQFAERTAINSPIQGSAADILKMQXXIPFIN

SEQ ID NO: 801 - protein, 408 aa, Streptococcus agalactiae
ATGTTAAAAAATTATTTAACAAAGCAAAAGACCATCGCAGTTGTAGGACTGTCAGACCGTCAAGAAACTGCAGCTTATCAAGTATCAAAAATAATGCAAGAAGCAGGTTATCAAATTATTCCAGTTAATCCTAAAAATGCAGGACAGAAAATACTTGGGCAAATGACATATGCCTCACTTAAGGATGTCACTGAACATATTGATATTGTTAATATTTTTCGACGTAGCGAGTATTTACCTGATATTGCAAGAGAATTTTTAGAAGTAGACGCTGATATTTTCTGGGCTCAGCTTGGACTTGAAAGTCAAGAAGCAGAGACAATTCTAAAGCAAGCAGGACACAAACAGATTGTCATGAATAAATGTCTGAAAGTTGAATGCCAAAAATTACACTCAGAAACTAACTAA

SEQ ID NO: 802 - protein, 135 aa, Streptococcus agalactiae
MLKNYLTKQKTIAVVGLSDRQETAAYQVSKIMQEAGYQIIPVNPKNAGQKILGQMTYASLKDVTEHIDIVNIFRRSEYLPDIAREFLEVDADIFWAQLGLESQEAETILKQAGHKQIVMNKCLKVECQKLHSETN

SEQ ID NO: 803 - protein, 480 aa, Streptococcus agalactiae
ATGGACAGTCATTCACATGGTCATAGACCTCTCGATGCTTATGAAAACGTCCTAGAGCATCTCCGTGAAAAACGTATTCGAATTACTGAGACTCGAAAAGCTATTATTTCCTATATGGTTAATAGTCGTGAGCATCCGAGTGCAGAAAAGATTTACAATGATTTATTACCAGAATATCCTAACATGAGCTTGGCAACAGTTTACAATAACCTTAAGGTCCTTGTGGATGAGGGGTTTGTGACAGAGCTAAAACTTTGCAATTATAGTACAACTTATTATGATTTTATGGGGCATCAGCACCTAAACATTGCCTGTGAAGATTGTGGGAAAATCGTTGATTTTGTCGATGTTGACTTATTGGATATTTCTAGAGAAGCACACCAACAAACAGGTTTTGAAGTGACTAGAGTTCAGTTAGTAGCTTATGGTATCTGTCCGGAGTGTCAGAGGAAGCGTAAGGATAAATATAAAAAAGATTGA

SEQ ID NO: 804 - protein, 159 aa, Streptococcus agalactiae
MDSHSHGHRPLDAYENVLEHLREKRIRITETRKAIISYMVNSREHPSAEKIYNDLLPEYPNMSLATVYNNLKVLVDEGFVTELKLCNYSTTYYDFMGHQHLNIACEDCGKIVDFVDVDLLDISREAHQQTGFEVTRVQLVAYGICPECQRKRKDKYKKD

SEQ ID NO: 805 - protein, 1488 aa, Streptococcus agalactiae
ATGAAAATATCACAATACAATAAATGGTCAATTCGCCGATTGAAAGTTGGAGCTGCATCTGTAATGATTGCTAGTGGAAGCATTGTTGCTTTAGGGCAATCTCATATTGTTTCAGCAGATGAGATGTCCCAACCTAAAACAACCATTACAGCTCCAACAGCTAACACTTCTACAAATGTAGAAAGTAGTACTGATAAGGCATTATCAAAAGTTACTACGATGGAGACAAGTTCAGAAATGCCTAAAATGCAAAATATGGCAAAAGTTGAAAAAACGAGTGACAAACCTATGATGGTGGCTACCTCTGTTAGAAAAATGATGGCAACGCCGACACCTGTAGCGATGACCAAAACGACTAGTGTAGATGAGGTAAAGAAATCAACTGATACTGCTTTTAAACAGACAGTAGACGTTCCGGCTCATTATGTTAATGCAGCAAAAGGGAATGGCCCATTTCTAGCAGGTGTAAATCAAACGATTCCATATGAAGCGTTTGGTGGAGATGGCATGTTAACGCGTTTAATCCTTAAATCTTCTGAAGGAGCAAAATGGTCAGATAATGGTGTTGATAAAAATAGTCCATTATTACCATTGAAAGGCTTAACTAAAGGTAAATATTTCTATCAAGTTTCTTTAAATGGTAATACGACAGGTAAAGAGGGACAAGCTCTCTTAGATCAAATTAAAGCTAATGATAAACATAGCTACCAAGCCACAATTAGAGTTTATGGTGCTAAAGATGGTAAAGTTGATTTAAAAAACATGATTAGCCAAAAAATGGTAACCATTAACATTCCTCACATTACAACTGATATGGAAGTAAAAAATTCTCTAAAGATGGCCTTTAAAGAAAAAGTAGACGTCCCAGCAAAATATGTTAGTGCTGCAAAAGCTAAAGGTCCATTTTTAGCAGGTGTTAACGAAACGATTCCATATGAAGCGTTTGGTGGGGATGGCATGTTAACGCGTTTAATCCTTAAAGCTTCAGAGGGAGCAAAATGGTCAGACAATGGTGTTGATAAAAATAGTCCATTATTACCGTTAAAAGATTTAACTAAGGGTAAATACTTCTACCAAGTCTCTCTTAATGGCAATACAGCCGGTAAAAAAGGCCAAGCTCTCTTAGATCAAATTAAGGCAAATGGAAGCCATACTTATCAAGCAACTATCACTATTTATGGTACGAAAGATGGCAAAGTTGATATGAATACTATTTTAGGACAAAAGACAGTGATGATTCATATTAATGTCGCTAAAAAAGATATGAATAGCACATCAATGATGATGAAAAAAGATAAGATGACAATGCCTATGAAGAAAGAAATGACTTCATCTAAAATAAATACCGGTATGATGATGTCTAACAACAAGATGTCAGCTAATATGCAAATGTCATCACAAGCCAAATCAAATGATAAAGCTGGTAAAAAAATGTCTATGATGTCTAAAAATTTACCTAATACAGGGAAACAAAGCAACAAAATGTAG

SEQ ID NO: 806 - protein, 495 aa, Streptococcus agalactiae
MKISQYNKWSIRRLKVGAASVMIASGSIVALGQSHIVSADEMSQPKTTITAPTANTSTNVESSTDKALSKVTTMETSSEMPKMQNMAKVEKTSDKPMMVATSVRKMMATPTPVAMTKTTSVDEVKKSTDTAFKQTVDVPAHYVNAAKGNGPFLAGVNQTIPYEAFGGDGMLTRLILKSSEGAKWSDNGVDKNSPLLPLKGLTKGKYFYQVSLNGNTTGKEGQALLDQIKANDKHSYQATIRVYGAKDGKVDLKNMISQKMVTINIPHITTDMEVKNSLKMAFKEKVDVPAKYVSAAKAKGPFLAGVNETIPYEAFGGDGMLTRLILKASEGAKWSDNGVDKNSPLLPLKDLTKGKYFYQVSLNGNTAGKKGQALLDQIKANGSHTYQATITIYGTKDGKVDMNTILGQKTVMIHINVAKKDMNSTSMMMKKDKMTMPMKKEMTSSKINTGMMMSNNKMSANMQMSSQAKSNDKAGKKMSMMSKNLPNTGKQSNKM

SEQ ID NO: 807 - protein, 687 aa, Streptococcus agalactiae
ATGACACAAAAATTATTATTAGTTGACGATGAATTTGAAATTATTGATATTAATAGACGTTATCTAGAGCAAGCAGGATATGAAGTGTCAGTAGCTGCGGATGGCATAGAAGCACTCAAAGAGGTAGATGAGAATCGTTTTGACCTAATTATTAGTGATATTATGATGCCTAAAATGGATGGCTATGATTTTATTAGTGAAGTTCTAGTTCGAGAACCCAACCAACCTTTTCTCTTTATAACCGCTAAAGTATCTGAACCAGATAAAATTTACTCTTTGAGTATGGGTGCAGATGACTTTATTTCCAAGCCTTTCAGTCCTAGGGAATTAGTTTTACGTGTTAAAAATATTCTAAGACGTATCTATGGGAATCATCAACAATCTGAAGTGTTGACGATTGGTGATTTGGTTATCGACCAAAAACAACGTTTGGTAATGGTGGACTGCAATACAATTTCCTTAACCAATAAATCATTTGACTTGCTTTGGATATTAGCAAATCATTTGAATCGTGTTTTTTCAAAAACAGAGCTTTATGAACGTGTCTGGGGCGAAGAATTTTTAGATGACACTAATACTTTGAATGTTCATATCCATGCCTTACGCAATGACCTTGCTAAATTTAGTACAGACAATACCCCAACTATCAAAACAGTTTGGGGATTAGGGTATAAATTAGAGGAATAA

SEQ ID NO: 808 - protein, 228 aa, Streptococcus agalactiae
MTQKLLLVDDEFEIIDINRRYLEQAGYEVSVAADGIEALKEVDENRFDLIISDIMMPKMDGYDFISEVLVREPNQPFLFITAKVSEPDKIYSLSMGADDFISKPFSPRELVLRVKNILRRIYGNHQQSEVLTIGDLVIDQKQRLVMVDCNTISLTNKSFDLLWILANHLNRVFSKTELYERVWGEEFLDDTNTLNVHIHALRNDLAKFSTDNTPTIKTVWGLGYKLEE

SEQ ID NO: 809 - protein, 1038 aa, Streptococcus agalactiae
ATGAAATTAAAATATTATATTGTTATTGGTTACCTTATTTCTATGTTAATAACTGTAGCAGGTGTTTTCTTTGGGCTTAATCATATGCTGATTGAGACTCGAGGTGTTTACTACATCCTTTCAGTTACAATTATTGCCTGTATTGTAGGTGGTATAGTTAATTTGTTCTTATTATCAAGTGTATTTACATCTTTGAAAAAGTTAAAACAAAAAATGAAGGATATTTCTCAAAGATGTTTTGATACAAAAGCACAAATTTGTTCACCACAAGAATTCAAGGATTTAGAGACAGCCTTTAACCAAATGTCTTCGGAGTTAGAGTCAACGTTTAAATCTCTAAACGAGAGTGAACGCGAAAAAACAATGATGATTGCACAACTTTCACATGATATCAAGACTCCAATTACTTCTATACAATCAACAGTAGAAGGTATTTTAGATGGTATTATATCTGAAGAAGAAGTTAACTATTATCTCAATACCATTTCTCGTCAAACAAACCGTCTTAACCATCTGGTTGAAGAATTAAGTTTTATTACATTAGAGACTATGTCAGACACGGCTGAACCTCATAAAGAAGAAACAATTTATCTGGATAAACTACTGATTGATATTTTATCTGAATTTCAATTGGTGTTTGAAAAAGAAAATCGCCAAGTAATGATTGATGTTGCGCCAGATGTTTCGAAATTATCTAGTCAATATGATAAATTATCACGAATTTTATTGAATTTGATTAGCAATGCAGTCAAATATTCTGATCCTGGAAGTCCCTTGACTATCAAGGCCTATTCAAATCGTCAAGATATCGTTATCGATATTATTGACCAAGGCTATGGGATAAAAGATGAAGATCTTGCTTCTATTTTTAATCGTCTTTATCGTGTAGAATCTTCACGAAATATGAAGACAGGAGGACATGGTCTAGGTCTTTATATTGCGCGACAACTTGCACATCAACTGAATGGGGATATTTTGGTCGAAAGTCAGTATCAAAAAGGCAGTAAGTTCTCTTTAGTACTTAAATTACAAAAATAG

SEQ ID NO: 810 - protein, 345 aa, Streptococcus agalactiae
MKLKYYIVIGYLISMLITVAGVFFGLNHMLIETRGVYYILSVTIIACIVGGIVNLFLLSSVFTSLKKLKQKMKDISQRCFDTKAQICSPQEFKDLETAFNQMSSELESTFKSLNESEREKTMMIAQLSHDIKTPITSIQSTVEGILDGIISEEEVNYYLNTISRQTNRLNHLVEELSFITLETMSDTAEPHKEETIYLDKLLIDILSEFQLVFEKENRQVMIDVAPDVSKLSSQYDKLSRILLNLISNAVKYSDPGSPLTIKAYSNRQDIVIDIIDQGYGIKDEDLASIFNRLYRVESSRNMKTGGHGLGLYIARQLAHQLNGDILVESQYQKGSKFSLVLKLQK

SEQ ID NO: 811 - protein, 741 aa, Streptococcus agalactiae
ATGACGAATTCAGAAATTAAAAATGAGGCAAAAACTATATTAAGCAATCTTCAAGGTAAGAATCAACTTTTTTTACTCCCGATTCTCCTTAGTATTATTACGTTATATATATCATTTTATTATCAATATAATAATATGACACTACTTGATTTTTTTGTACCTCTTCCAGTTTATTTCTTTTACACACTTTTTATTATTTCAGTCAGTTTTGTAATGTTAGATGTCGTCAAAAATCAGAAACTAAACGTTAGATTCTCGGACAATACTTATGTATTTTCAAGCCATATTTTCTGGAAATTACTCTCAGTACTTGTTCTAAAAGGACTAATTTTATCTTTCTTTTATCTACTAAGTACTTTTGGTCTACTAATCATCATTTCAAGTTTTAGGCTACTTTTGAGTGGTAACCTTATCCTTGCCCCTGTTTTAATAGTTGTTAGTAGCCTAATTACTACTAAGGCAGTTATAAAACTCGTTCAACAATATTACTCCTATAGTATCTCAACTTTAGTATTTTACACTCAATTAGAAAGTGGAAACTATGAGGGACCGTCTAAAGTACTGGTTGCTAGTCGAGAACTAATGAATGGTAATAAACTTAGACTCTTCCTTTTAGACTTAAGTTTTATTGGTTGGCAGTTCCTTACAATCTTCAGTTTCGGATTAGTCTATATCTATCTCCTTCCTTACCAAACTACTGCGCGCTTAATCTTTTATAGAAACATTACAAAAAATAGCTAG

SEQ ID NO: 812 - protein, 246 aa, Streptococcus agalactiae
MTNSEIKNEAKTILSNLQGKNQLFLLPILLSIITLYISFYYQYNNMTLLDFFVPLPVYFFYTLFIISVSFVMLDVVKNQKLNVRFSDNTYVFSSHIFWKLLSVLVLKGLILSFFYLLSTFGLLIIISSFRLLLSGNLILAPVLIVVSSLITTKAVIKLVQQYYSYSISTLVFYTQLESGNYEGPSKVLVASRELMNGNKLRLFLLDLSFIGWQFLTIFSFGLVYIYLLPYQTTARLIFYRNITKNS

SEQ ID NO: 813 - protein, 1143 aa, Streptococcus agalactiae
ATGACTGATCATCCAATAAAATATCGATTAATTAAACAGGAAAAACACACAGGAGCCAGACTTGGTGAAATAATCACACCACATGGTACATTTCCGACACCAATGTTTATGCCTGTTGGGACACAAGCAACTGTTAAGACACAATCTCCTGAAGAACTAAAAGAAATGGGTTCAGGAATTATTCTATCAAATACCTACCATTTATGGTTACGTCCAGGTGATGAATTGATTGCTAAAGCTGGAGGTTTACATAAATTCATGAACTGGGATCAGGCTATTCTAACAGACAGTGGAGGCTTTCAGGTTTATTCTTTGGCTGATAGTCGAAACATCACTGAAGAAGGAGTAACCTTTAAAAACCATTTAAATGGTGCGAAAATGTTTTTATCACCAGAAAAAGCTATTTCAATTCAAAATAACCTTGGTTCTGATATTATGATGAGTTTTGATGAGTGTCCACAATTTTACCAGCCTTATGATTATGTAAAAAAATCAATTGAGCGAACAAGCCGTTGGGCAGAACGTGGATTAAATGCCCACCGCCGTCCTCATGATCAAGGACTATTTGGTATTGTTCAAGGGGCAGGGTTTGAGGATTTACGTCGTCAATCAGCACGAGATTTAGTATCGATGGATTTTCCAGGTTATTCAATTGGAGGGCTTGCGGTCGGAGAAACACATGATGAGATGAATGCAGTTCTTGATTTTACTGTTCCAATGCTTCCGAATGATAAGCCTCGTTATTTGATGGGAGTTGGTGCACCAGATAGTTTAATAGACGCCGTTATCCGAGGAGTAGATATGTTTGATTGCGTCTTACCTACTCGTATTGCTCGAAATGGGACATGTATGACAAGTCAAGGTCGCTTAGTTGTTAAGAATGCTAAATTTGCAGAAGATTTTACGCCTCTTGATCCAAATTGCGATTGCTATACTTGTAAAAATTATACACGCGCTTATATTCGTCACTTATTGAAAGCAGATGAAACTTTTGGTATTCGTTTGACTAGTTACCATAATCTTTATTTCCTTGTCAATCTTATGAAAGATGTCAGACAAGCTATTATGGATGATAATCTTCTAGAATTCCGTCAAGATTTTATGGAGCGCTATGGCTATGGCATGAATAACCGTAATTTTTAA

SEQ ID NO: 814 - protein, 380 aa, Streptococcus agalactiae
MTDHPIKYRLIKQEKHTGARLGEIITPHGTFPTPMFMPVGTQATVKTQSPEELKEMGSGIILSNTYHLWLRPGDELIAKAGGLHKFMNWDQAILTDSGGFQVYSLADSRNITEEGVTFKNHLNGAKMFLSPEKAISIQNNLGSDIMMSFDECPQFYQPYDYVKKSIERTSRWAERGLNAHRRPHDQGLFGIVQGAGFEDLRRQSARDLVSMDFPGYSIGGLAVGETHDEMNAVLDFTVPMLPNDKPRYLMGVGAPDSLIDAVIRGVDMFDCVLPTRIARNGTCMTSQGRLVVKNAKFAEDFTPLDPNCDCYTCKNYTRAYIRHLLKADETFGIRLTSYHNLYFLVNLMKDVRQAIMDDNLLEFRQDFMERYGYGMNNRNF

SEQ ID NO: 815 - protein, 312 aa, Streptococcus agalactiae
ATGATGCAAGAGTACTTTGGTATTGGTCTTGATAGTAGCAGCCGCTGTTACCACTATCATACTAAATTGGATATTGTCGCTTTAAAATGTGCTGTTTGTCAAAAATATTATGCTTGTTATAAATGTCATGATGCACTCGAGGAGCATTGTTTTGCAGCAACAAAATCTGATGAAACGTTTCCTGTCTTATGCGGTTCTTGTCGTCAGATGTTGACATTAAAAGAGTATAAAACTGGTTTTTGTCCTTATTGTCGTATGCTTTTTAATCCAAATTGTCAACGCCATGATTCTATTTATTTTTCGAAGGAGTAA

SEQ ID NO: 816 - protein, 103 aa, Streptococcus agalactiae
MMQEYFGIGLDSSSRCYHYHTKLDIVALKCAVCQKYYACYKCHDALEEHCFAATKSDETFPVLCGSCRQMLTLKEYKTGFCPYCRMLFNPNCQRHDSIYFSKE

SEQ ID NO: 817 - protein, 540 aa, Streptococcus agalactiae
ATGTTTCACACAAAAAGCCTAATCCAGATGGCTATGATGGCTACTTTATTGGTGGTACTTGGTTTCATTCCTGCTCTACCACTTGGTTTCATTCCGGTCCCTATCGTCTTACAAAACCTAGGGGTTATGATGGCTGGTGTTATTTTGGGCGGAAGAAAAGGGAGTTTATCTATTTTGCTCTTCTTTCTTGTCGGTTTAGTTATTCCTGTATTCTCAGGTTTACGTTCGACTATACCTGTATTGACAGGACCAACAGCTGGTTATGTTATTGCTTGGTTGTTTGTTCCTTTGCTTATCTCATATGGTGTAAAATTAGTAAATAAAAAGAATTTTATAGCTATTTTCCTTATTGTATGGCTAGCAGGGGTCCTTTTTGTAGATGTAGCAGGAGCAGTTTGGCTGGCATCTTATACGAACATCCCATTAGATAAATCACTTCTTCAAAACTTAGTATTTATCCCAGGAGATACAATAAAAGCCATTATAGCTGCTGTTGTTGCTGTTAAATATAAAGATAGTTTTTTCTTGACTGAAAAATAA

SEQ ID NO: 818 - protein, 179 aa, Streptococcus agalactiae
MFHTKSLIQMAMMATLLVVLGFIPALPLGFIPVPIVLQNLGVMMAGVILGGRKGSLSILLFFLVGLVIPVFSGLRSTIPVLTGPTAGYVIAWLFVPLLISYGVKLVNKKNFIAIFLIVWLAGVLFVDVAGAVWLASYTNIPLDKSLLQNLVFIPGDTIKAIIAAVVAVKYKDSFFLTEK

SEQ ID NO: 819 - protein, 777 aa, Streptococcus agalactiae
ATGAAATTAACAACGTTAGGTTGTTGGGGTGGTTATCCTTATAAAGATGGAGGAACCACAAGTTTTCTATTAACTGGAGAAAATAATTTTCACTTATTAATAGATGCGGGAAGTCGTTCAATCAATGAGCTAGAAAAAGAAATAAGCCCGTTGGATTTGGATGCAGTTATCATCAGTCATTATCATCCAGATCATGTAGCAGATTTGGGTGTGTTGTATCATTATCGTTTGCTATACCCTAAAGATAAATGGGAACCCAAAGTATTGCCAGTTTATGGACATAATGAGGATGATTATGAGTTTTCTAAATTGACATTACCTAACGTTGCTCAAGGAATTGCTTATCATACCAATGGAGTTGAGCAAGTTGGTCCCTTCAATATTACGTTTATCAAAACAGTCCACCCAGTCGTCTGCTATGCCATGAGGATTACAGAAAGAGAAACTGGTCAAGTATTAGTCTTTACAGGAGATTCTGGGTATTTTGCTGACCTTGTACCTTTTACAAAAGGCGCAGATTTATTTTTAGCAGACGTTTATCTTTACGAGGGAAATGAAAATCATATTGCACATTTGACTAGTAAAGAAGCAGGTGAGATTGCTTATAACGCTAAAGTTAAGAAATTAGTTTTAACACATGTTCCGCAGTTTCCGGGAGAAGGAATAAACCCCGAAAATCATTTGGAAGAACTTCGACTACAGTCTGAAAAGTATGCAGGTGGCATCTCTGTTGATTTAGCTCAGCCACATAAATCTTGGGACTTAGGAAAACTATAA

SEQ ID NO: 820 - protein, 258 aa, Streptococcus agalactiae
MKLTTLGCWGGYPYKDGGTTSFLLTGENNFHLLIDAGSRSINELEKEISPLDLDAVIISHYHPDHVADLGVLYHYRLLYPKDKWEPKVLPVYGHNEDDYEFSKLTLPNVAQGIAYHTNGVEQVGPFNITFIKTVHPVVCYAMRITERETGQVLVFTGDSGYFADLVPFTKGADLFLADVYLYEGNENHIAHLTSKEAGEIAYNAKVKKLVLTHVPQFPGEGINPENHLEELRLQSEKYAGGISVDLAQPHKSWDLGKL

SEQ ID NO: 821 - protein, 506 aa, Streptococcus agalactiae
ATGCAGAATTTACCCAAGAAGAAAAAGAATGGTTTATGACAGAAGCTCTAAAGRAGGCAAAATCCTCCTTAGAGAAAGAAGAAATTCCTATAGGTTGTGTCATTGTAAAAGATGGTCATATTATTGGAAGAGGACATAATGCTCGTGAAGAGTTTAATAAAGCTATTTTACATGCTGAAATCATGGCTATTAACAATGCAAATGAGAAGGTAGGGAATTGGCGCTTATTAGATACTACTTTATTTGTTACTGTAGAACCTTGTGTAATGTGTAGTGGAGCTATTGGCTTAGCTAGAATTCCCCACGTTATATATGGCGCTAAGAATACGAAATTTGGAGCAGCGGGAAGTCTCTATGATATTTTAAGTGATAGCCGACTTAATCATAGAGTTGAGGTTGAAACCGGCATTTTAGAAGATCAATGCGCTAAAATAATGCAGGATTTCTTTCGAAAAGGACGACAACGCAAGAAAGAAGCTAAACTAAGTGAAAAAACTAAGATTTGA

SEQ ID NO: 822 - protein, 168 aa, Streptococcus agalactiae
  VARIANT 19: Xaa = Any Amino Acid
MQKFTQEEKEWFMTEALKXAKSSLEKEEIPIGCVIVKDGHIIGRGHNAREEFNKAILHAEIMAINNANEKVGNWRLLDTTLFVTVEPCVMCSGAIGLARIPHVIYGAKNTKFGAAGSLYDILSDSRLNHRVEVETGILEDQCAKIMQDFFRKGRQRKKEAKLSEKTKI

SEQ ID NO: 823 - protein, 1350 aa, Streptococcus agalactiae
ATGACACATATTACATTTGACTATTCAAAAGTCTTGGGTCAATTTGTAGGCGAACACGAGTTAGACTACCTACAACCACAAGTAAGTGCAGCAGATGCTTTCCTTCGTCAAGGGACTGGTCCTGGCTCAGATTTTCTCGGATGGATGGACCTCCCAGAAAACTATGACAAAGAAGAATTTTCTCGCATTCAAAAAGCCGCTGAAAAGATTAAATCAGATAGCGAAGTACTCGTGGTTATTGGTATTGGTGGTTCGTACCTTGGCGCAAAAGCAGCAATTGACTTTTTGAATAATCATTTTGCTAATTTGCAAACCGCAGAAGAACGTAAAGCGCCTCAGATTCTTTATGCTGGAAATTCTATTTCATCTACTTACCTTGCCGATTTAGTTGAATACGTCCAAGATAAAGAATTCTCAGTAAATGTCATTTCAAAATCAGGTACAACAACTGAACCAGCGATTGCTTTCCGTGTATTTAAAGAACTTCTAGTTAAAAAGTACGGTCAAGAAGAAGCTAATAAACGTATCTACGCTACAACTGATAAAGTTAAAGGTGCCGTAAAAGTTGAAGCAGATGCTAACAATTGGGAAACATTTGTAGTTCCTGATAATGTTGGTGGTCGTTTCTCAGTACTGACAGCCGTAGGTCTTCTTCCAATTGCTGCTTCAGGAGCAGATATTACTGCTCTTATGGAAGGCGCAAATGCTGCTCGTAAAGATTTATCTTCAGATAAAATCTCTGAAAACATTGCTTATCAGTACGCTGCAGTTCGTAATGTTCTTTATCGCAAAGGTTATATCACAGAGATTTTAGCTAACTACGAACCATCATTACAATACTTTGGTGAATGGTGGAAACAATTAGCAGGTGAATCAGAAGGTAAAGATCAAAAAGGTATCTATCCTACATCAGCAAACTTCTCAACTGATCTTCACTCACTTGGTCAATTTATTCAAGAAGGTTACCGTAACCTCTTTGAGACAGTTGTTCGCGTTGAGAAACCTCGTAAAAATGTGACTATTCCTGAATTAACCGAAGATTTAGATGGTCTTGGTTATCTTCAAGGAAAAGATGTAGATTTTGTTAATAAAAAAGCAACAGATGGTGTACTCCTTGCTCATACAGATGGTGGGGTTCCAAATATGTTTGTAACGCTTCCTACACAAGACGCTTACACCCTTGGTTACACTATTTACTTCTTTGAGTTAGCAATTGGCCTTTCAGGTTATCTTAACTCAGTAAATCCATTTGATCAACCAGGGGTAGAAGCATATAAACGTAATATGTTTGCTCTTCTAGGTAAACCTGGATTCGAAGAGCTTAGCGCTGAATTGAATGCACGTCTTTAA

SEQ ID NO: 824 - protein, 449 aa, Streptococcus agalactiae
MTHITFDYSKVLGQFVGEHELDYLQPQVSAADAFLRQGTGPGSDFLGWMDLPENYDKEEFSRIQKAAEKIKSDSEVLVVIGIGGSYLGAKAAIDFLNNHFANLQTAEERKAPQILYAGNSISSTYLADLVEYVQDKEFSVNVISKSGTTTEPAIAFRVFKELLVKKYGQEEANKRIYATTDKVKGAVKVEADANNWETFVVPDNVGGRFSVLTAVGLLPIAASGADITALMEGANAARKDLSSDKISENIAYQYAAVRNVLYRKGYITEILANYEPSLQYFGEWWKQLAGESEGKDQKGIYPTSANFSTDLHSLGQFIQEGYRNLFETVVRVEKPRKNVTIPELTEDLDGLGYLQGKDVDFVNKKATDGVLLAHTDGGVPNMFVTLPTQDAYTLGYTIYFFELAIGLSGYLNSVNPFDQPGVEAYKRNMFALLGKPGFEELSAELNARL

SEQ ID NO: 825 - protein, 527 aa, Streptococcus agalactiae
ATGGAAAAGAAATTATTAAGAAAAGAAGTTTTGATAACCTTAAAATCTCAACCTCAAGCTTACAAATCAGAAGTTGACTGTAAACTTTAGAGGCTTTTATAAAAACTAAAGCTTATCAAAATAGTTGTGTAATTGCTACTTACCTATCTTTTGACTACGAATACAATACACAACTTCTTATTAAACAAGCTTTATGTGATGGCAAACGTGTCCTTGTTCCCAAAACTTATCCAAAAGGTAAAATGATTTTTGTGGACTATCAAAAAGATAACTTGAGGACAACACCGTTTGGCTTATTAGAACCTGTTAATGATAGAGCTGTTGAAAAAGCTAGTATAGACTTAATTCATGTGCCCGGACTTATCTTTAACAATAAAGGTTTTCGTATAGGTTATGGTGCAGGTTATTTTGATCGCTATTTGAGTGATTTTGAAGGTGATACTATTAGTACTATTTATAGGTGTCAGAGACAGGATTTTGTAGAAGAGAAGCATGACGTAGCAGTTAAGGAGGTATTATGTCTATGA

SEQ ID NO: 826 - protein, 175 aa, Streptococcus agalactiae
MEKKLLRKEVLITLKSQPQAYKSEVDCKLLEAFIKTKAYQNSCVIATYLSFDYEYNTQLLIKQALCDGKRVLVPKTYPKGKMIFVDYQKDNLRTTPFGLLEPVNDRAVEKASIDLIHVPGLIFNNKGFRIGYGAGYFDRYLSDFEGDTISTIYRCQRQDFVEEKHDVAVKEVLCL

SEQ ID NO: 827 - protein, 354 aa, Streptococcus agalactiae
ATGACAAAACAAAAAATTGCCGTTCTTGGACCTGGTTCATGGGGGACTGCTCTTGCACAAGTATTAAATGACAATGGACATGAGGTACGCTTATGGGGAAACGTGGTTGAACAAATAGAAGAGATTAATACTAACCATACTAATCAACGTTACTTCAAAGATATTACCTTAGATTCCAAAATAAAAGCCTACACTAATCTTGAGGAAGCGATTAATAATGTTGACAGCATTTTATTCGTCGTCCCAACTAAAGTTACAAGACTTGTTGCTAAACAAGTGGCTAATCTTTTAAAGCATAAAGTTGTTCTTATGCATGCTTCTAAGGGACTAGNNNNNCATTCATTCATTAATTAA

SEQ ID NO: 828 - protein, 117 aa, Streptococcus agalactiae
  VARIANT 111, 112: Xaa = Any Amino Acid
MTKQKIAVLGPGSWGTALAQVLNDNGHEVRLWGNVVEQIEEINTNHTNQRYFKDITLDSKIKAYTNLEEAINNVDSILFVVPTKVTRLVAKQVANLLKHKVVLMHASKGLXXHSFIN

SEQ ID NO: 829 - protein, 204 aa, Streptococcus agalactiae
ATGTCTATGAAGAAGTTCGCTAAAGAGTATCCGACGACAGTACTCTTGGTCAGTCTGACAACCCTTGTTTTTTTATTGATGCAACTAACTTATGGAAGTCAAGCGGAGTCTAGCCAAGTTATTTTTCAATTTGGTGGAATACAAGGTGATTATCTAAAAGCATATCCAACAAATCTNNNNNCATTCCATTCATTAATTAATTAA

SEQ ID NO: 830 - protein, 67 aa, Streptococcus agalactiae
  VARIANT 60, 61: Xaa = Any Amino Acid
MSMKKFAKEYPTTVLLVSLTTLVFLLMQLTYGSQAESSQVIFQFGGIQGDYLKAYPTNLXXFHSLIN

SEQ ID NO: 831 - protein, 330 aa, Streptococcus agalactiae
TTGAAAAAAACCTATCGGGTAAAAAGTGATAAGGATTTTCAAATGATTTTCAGCAGAGGTAAAAATGTTGCTAATCGAAAATTTGTTATCTACTATTTAGAAAAAGAACAAAAACACTTTCGTGTGGGAATCTCTGTTAGTAAGAAATTAGGAAATGCTGTTGTTCGTAACGCTATTAAAAGAAAAATTAGGCATGTTTTACTCTCTCAGAAAACAGCGCTGCAAGATTATGATTTTGTCGTGATTGCGCGTAAAGGTGTAGAGGAATTGGACTATCAAGCATTAGAAAAAAATCTTATACACGTTTTAAAAATAGCAGGACTCATCTAG

SEQ ID NO: 832 - protein, 109 aa, Streptococcus agalactiae
MKKTYRVKSDKDFQMIFSRGKNVANRKFVIYYLEKEQKHFRVGISVSKKLGNAVVRNAIKRKIRHVLLSQKTALQDYDFVVIARKGVEELDYQALEKNLIHVLKIAGLI

SEQ ID NO: 833 - protein, 816 aa, Streptococcus agalactiae
TTGAAGAAAAAACTTAAAACATTTAGCTTAATATTGCTGACAGGCTCTTTATTGGTTGCTTGCGGACGAGGAGAAGTATCTAGTCATTCAGCCACATTATGGGAGCAAATAGTTTATGCATTTGCTAAATCAATACAATGGCTCTCCTTTAACCATTCAATTGGTTTGGGAATAATCTTATTCACTCTAATAATCAGAGCGATTATGATGCCGCTTTATAATATGCAAATGAAATCCAGCCAAAAGATGCAGGAAATTCAGCCAAGGCTCAAGGAATTACAAAAAAAATATCCAGGGAAAGATCCTGATAACCGTTTAAAGCTAAATGATGAAATGCAATCTATGTATAAAGCTGAGGGAGTTAACCCATATGCAAGTGTATTACCTCTTCTAATTCAGTTACCTGTCCTATGGGCTCTTTTCCAAGCTTTGACTAGGGTTTCTTTCTTAAAAGTAGGAACATTTTTGAGCCTAGAATTATCACAGCCGGACCCATATTATATTTTACCTGTACTGGCGGCCTTATTTACCTTTTTATCAACTTGGTTAACTAACAAAGCAGCTGTTGAAAAAAATATTGCTTTAACTCTTATGACTTATGTTATGCCGTTTATCATATTGGTAACAAGCTTTAACTTTGCTAGTGGTGTTGTTTTATACTGGACGGTGTCTAATGCTTTTCAAGTATTTCAAATTCTATTATTGAACAACCCATACAAGATTATAAAGGTTCGAGAAGAAGCAGTAAGAGTGGCACATGAAAAAGAACAAAGAGTTAAACGTGCTAAGAGAAAAGCAAGTAAGAAAAGAAAGTAG

SEQ ID NO: 834 - protein, 271 aa, Streptococcus agalactiae
MKKKLKTFSLILLTGSLLVACGRGEVSSHSATLWEQIVYAFAKSIQWLSFNHSIGLGIILFTLIIRAIMMPLYNMQMKSSQKMQEIQPRLKELQKKYPGKDPDNRLKLNDEMQSMYKAEGVNPYASVLPLLIQLPVLWALFQALTRVSFLKVGTFLSLELSQPDPYYILPVLAALFTFLSTWLTNKAAVEKNIALTLMTYVMPFIILVTSFNFASGVVLYWTVSNAFQVFQILLLNNPYKIIKVREEAVRVAHEKEQRVKRAKRKASKKRK

SEQ ID NO: 835 - protein, 888 aa, Streptococcus agalactiae
ATGAAAAAGAACAAAGAGTTAAACGTGCTAAGAGAAAAGCAAGTAAGAAAAGAAAGTAGGAAAACCATGGTATTATTTACAGGAGCGACTGTAGAAGAAGCTATTGAAAAAGGACTACAAGAGTTAAACATTTCACGATTGAGGGCACATATAAAAGTTGTATCACGTGAGAAAAAAGGTTTTTTGGGCTTTGGTAAAAAGCCAGCAAAAGTTGAAATAGAAGGTATCACCGACGAAGTAACTGATATTAATGAATCGGTAGCGTTAAAAAATATTAAGAATGTACCGTCTAGCGTAGATGTGGTGGAAGAATATATAGAGGAGGTTGATGAAACGCTTGAAAAAGAAGACGTATCACAACCAGAACTTCCAAAAATTGATGATAAAAACGTTGTAACTACAAGTGAAGCTATTGAAAAAATTGACCTACTTCCTAATATTGAAGTAGCAGCTGCTCAGGTGACTAAATACGTTGAAAATATCATCTATGAGATGGATTTAGATGCAACAATAGAAACTACGACAAGTAAGCGACAAATAAATCTCCAAATAGAAACGCCAGAAGCTGGGCGCATCATTGGTTATCATGGAAAAGTATTAAAATCGTTGCAGTTGTTAGCACAAAATTATCTTCATGACCGCTTTTCTAAGAGTTTTTCAGTATCCATTAATGTCCATGACTACGTTGAGCATCGTACAGAAACTTTAATTGATTTTTCTAAAAAAATAGCTAGGCGTGTTTTAGAGACTAATGAACCTTACCATATGGATCCTATGAGTAACAGTGAGCGAAAAACTGTTCATAAAACAATTGCAACTATAGAGGGTGTTGAAAGTTATTCTGAAGGTAACGATCCTAATAGATTTGTAGTAGTTACTAAGAAATAA

SEQ ID NO: 836 - protein, 295 aa, Streptococcus agalactiae
MKKNKELNVLREKQVRKESRKTMVLFTGATVEEAIEKGLQELNISRLRAHIKVVSREKKGFLGFGKKPAKVEIEGITDEVTDINESVALKNIKNVPSSVDVVEEYIEEVDETLEKEDVSQPELPKIDDKNVVTTSEAIEKIDLLPNIEVAAAQVTKYVENIIYEMDLDATIETTTSKRQINLQIETPEAGRIIGYHGKVLKSLQLLAQNYLHDRFSKSFSVSINVHDYVEHRTETLIDFSKKIARRVLETNEPYHMDPMSNSERKTVHKTIATIEGVESYSEGNDPNRFVVVTKK

SEQ ID NO: 837 - protein, 534 aa, Streptococcus agalactiae
ATGAGATTACCTAAAGAAGGCGACTTTATTACAATTCAAAGTTACAAACATGATGGTAGTTTACACCGAACTTGGCGTGACACCATGGTATTAAAAACAACCGAAAATGCCCTCATTGGTGTTAATGATCATACTTTAGTAACAGAAAATGATGGTCGACGCTGGGTGACACGAGAGCCTGCAATAGTATACTTTCATAAAAAATACTGGTTTAACATTATCGCTATGATACGTGAAACTGGTGTCTCCTACTATTGTAATCTAGCAAGTCCGTATATCTTGGACCCTGAAGCACTCAAGTATATTGACTATGACCTTGATGTCAAAGTATTTGCAGATGGTGAAAAAAGACTACTAGATGTGGACGAATATGAACAGCATAAAGCTCAGATGAACTATCCTACCGATATTGATTATATATTAAAGGAAAATGTAAAAATATTGGTAGAATGGATAAATGAGAATAAAGGCCCCTTTTCATCATCATATATCAATATCTGGTATAAACGGTACCTTGAATTGAAAAAGCGCTAA

SEQ ID NO: 838 - protein, 177 aa, Streptococcus agalactiae
MRLPKEGDFITIQSYKHDGSLHRTWRDTMVLKTTENALIGVNDHTLVTENDGRRWVTREPAIVYFHKKYWFNIIAMIRETGVSYYCNLASPYILDPEALKYIDYDLDVKVFADGEKRLLDVDEYEQHKAQMNYPTDIDYILKENVKILVEWINENKGPFSSSYINIWYKRYLELKKR

SEQ ID NO: 839 - protein, 777 aa, Streptococcus agalactiae
ATGAAAATAACCAAAATCGAAAAGAAAAAAAGACTTTACACTCTAGAGCTAGACAATACCGAAAATTTATATATAACAGAAGATACTATCGTTCATTTTATGTTAAGTAAAGGGATGATAATTAATGCCGAGAAACTTGAAAATATTAAAAAATTTGCCCAACTATCATACGGTAAAAATCTAGGTCTTTATTATATTTCTTTCAAGCAGAGAACCGAGAAAGAAGTTATTAAATATCTTCAACAACATGATATTGATTCTAAAATTATTCCACAAATTATTGATAATCTAAAAAGTGAGAATTGGATAAACGATAAAAACTACGTGCAATCTTTCATACAGCAAAATCTAAATACTGGCGATAAGGGACCATACGTGATAAAACAAAAATTATTGCAAAAAGGTATCAAAAGTAAAATAATTGAATCTGAACTTCAAGCTATAAACTTTCAAGACTTAGCATCCAAAATAAGCCAAAAACTCTATAAAAAATATCAAAACAAACTTCCACTAAAAGCATTAAAAGATAAATTGATGCAGAGCTTAACTACAAAAGGATTTGATTATCAGATAGTGCATACCGTAATTCAAAACCTTGAAATTGAAAAAGATCAAGAACTTGAAGAAGACCTCATTTATAAAGAATTAGATAAACAATACCAAAAATTATCAAAAAAACATGACCAGTATGAATTAAAGCAACGTATAATCAATGCCTTAATGCGTAAAGGATACCAGTACGAAGATATCAAAAGTGCTTTAAGAGAATATTTATAA

SEQ ID NO: 840 - protein, 258 aa, Streptococcus agalactiae
MKITKIEKKKRLYTLELDNTENLYITEDTIVHFMLSKGMIINAEKLENIKKFAQLSYGKNLGLYYISFKQRTEKEVIKYLQQHDIDSKIIPQIIDNLKSENWINDKNYVQSFIQQNLNTGDKGPYVIKQKLLQKGIKSKIIESELQAINFQDLASKISQKLYKKYQNKLPLKALKDKLMQSLTTKGFDYQIVHTVIQNLEIEKDQELEEDLIYKELDKQYQKLSKKHDQYELKQRIINALMRKGYQYEDIKSALREYL

SEQ ID NO: 841 - protein, 1170 aa, Streptococcus agalactiae
ATGAATGTGGTTTTAAAACAGCGAATTCCTTTAAAAATTAAACGAATGGGAATTAATGGTGAAGGAATAGGTTTTTATAAAAAAACACTAATCTTTGTTCCAGGGGCCCTCAAGGGAGAAGAGGTGTTTTGTCAGATTTCTTCTGTTAGACGTAATTTTGCAGAAGCTAAACTGTTAAAGATAAATAAAAAATCTAAAAATAGGGTAGAACCCCCTTGTTCTATTTATAAAGAATGTGGGGGATGCCAAATAATGCACCTTCAATATGATAAGCAGCTAGAGTTTAAAACGGATGTTATTCGACAGGCTCTAATGAAATTTAAACCAGAGGGATATGAGAATTATGAAATCCGTAAAACGATAGGTATGTCGGAACCTGAACACTATCGTGCTAAATTACAATTTCAAGTGCGTTCGTTTGGAGGGAATGTAAAGGCAGGTTTATATGCACAAGGGACACATCGATTGATTGATATCAAAGATTGTTTAGTGCAAGATAGCCTTACTCAGGAAATGATAAATCGAGTTGCAGAACTTTTAGGAAAATATAAATTGCCTATTTATAATGAACGTAAAATAGCTGGTGTCCGTACTGTTATGATTCGACGAGCACAAGCGAGTGGAGAGGTTCAACTGATCTTTATCACAAGTAAAAGACTTGATTTTGATGATGTTGTTATTGAATTAGTTCGAGAGTTTCCTGAGTTAAAGACAGTTGCTGTAAATATCAACGCTAGTAAAACAAGTGATATCTATGGTCAAATAACAGAAGTTATTTGGGGTCAAGAATCCATCAATGAAGAAGTATTAGATTATGGTTTTTCGTTATCACCACGTGCTTTTTATCAACTTAATCCTAAACAAACACAAATTTTATATAGTGAGGCAGTTAAGGCCTTAGATGTGAAGGAAGATGATGATTTAATTGACGCTTATTGTGGAGTAGGAACGATTGGACTTGCTTTTGCTGGAAAAGTTAAAAGTGTTCGTGGAATGGATATTATCCCTGAGGCTATTCAGGATGCTAAAGAGAACGCACTTTATATGGGTTTTACTAATACACATTACGAAGCTGGAAAGGCAGAGGATATTATCCCTAGGTGGTATAGTGAGGGATTTCGCGCTAATGCGTTAATCGTGGANNNNNCATTCCATTCATTAATTAATTAA

SEQ ID NO: 842 - protein, 389 aa, Streptococcus agalactiae
  VARIANT 381, 382, 383: Xaa = Any Amino Acid
MNVVLKQRIPLKIKRMGINGEGIGFYKKTLIFVPGALKGEEVFCQISSVRRNFAEAKLLKINKKSKNRVEPPCSIYKECGGCQIMHLQYDKQLEFKTDVIRQALMKFKPEGYENYEIRKTIGMSEPEHYRAKLQFQVRSFGGNVKAGLYAQGTHRLIDIKDCLVQDSLTQEMINRVAELLGKYKLPIYNERKIAGVRTVMIRRAQASGEVQLIFITSKRLDFDDVVIELVREFPELKTVAVNINASKTSDIYGQITEVIWGQESINEEVLDYGFSLSPRAFYQLNPKQTQILYSEAVKALDVKEDDDLIDAYCGVGTIGLAFAGKVKSVRGMDIIPEAIQDAKENALYMGFTNTHYEAGKAEDIIPRWYSEGFRANALIVXXXFHSLIN

SEQ ID NO: 843 - protein, 759 aa, Streptococcus agalactiae
ATGATTCGACGAGCACAAGCGAGTGGAGAGGTTCAACTGATCTTTATCACAAGTAAAAGACTTGATTTTGATGATGTTGTTATTGAATTAGTTCGAGAGTTTCCTGAGTTAAAGACAGTTGCTGTAAATATCAACGCTAGTAAAACAAGTGATATCTATGGTCAAATAACAGAAGTTATTTGGGGTCAAGAATCCATCAATGAAGAAGTATTAGATTATGGTTTTTCGTTATCACCACGTGCTTTTTATCAACTTAATCCTAAACAAACACAAATTTTATATAGTGAGGCAGTTAAGGCCTTAGATGTGAAGGAAGATGATGATTTAATTGACGCTTATTGTGGAGTAGGAACGATTGGACTTGCTTTTGCTGGAAAAGTTAAAAGTGTTCGTGGAATGGATATTATCCCTGAGGCTATTCAGGATGCTAAAGAGAACGCACTTTATATGGGTTTTACTAATACACATTACGAAGCTGGAAAGGCAGAGGATATTATCCCTAGGTGGTATAGTGAGGGATTTCGCGCTAATGCGTTAATCGTGGATCCTCCTCGCACAGGTTTAGATGATAAATTGCTAAATACTATACTAAAAATGCCTCCAGAAAAAATGGTTTACGTTTCTTGTAATACATCCACGCTTGCTAGAGACTTAGTAACATTAACAAAAGTATACCATGTCCACTACATCCAATCCGTTGACATGTTTCCACATACAGCAAGGACCGAGGCTGTAGTGAAACTACAACGTAAGGAATAA

SEQ ID NO: 844 - protein, 252 aa, Streptococcus agalactiae
MIRRAQASGEVQLIFITSKRLDFDDVVIELVREFPELKTVAVNINASKTSDIYGQITEVIWGQESINEEVLDYGFSLSPRAFYQLNPKQTQILYSEAVKALDVKEDDDLIDAYCGVGTIGLAFAGKVKSVRGMDIIPEAIQDAKENALYMGFTNTHYEAGKAEDIIPRWYSEGFRANALIVDPPRTGLDDKLLNTILKMPPEKMVYVSCNTSTLARDLVTLTKVYHVHYIQSVDMFPHTARTEAVVKLQRKE

SEQ ID NO: 845 - protein, 462 aa, Streptococcus agalactiae
ATGATAATAAATTCATTCGATAATAGTAGAAAAGCGATTATTAATCCTGAAGATATTAATTCACCAATAAAAGGTTTTCCAAAGACTGTTATTACCTGTTTCGCGCGGGAGACTTTCAATCGTATTTTAGAAGAATTGCCTCATCGTGAAATTGCTAGAACTAGTGTAGCAAACTTAGAAATTCCCATTTATGAATTAGAATTTAAAGGACAAAAGATTGGCTTTTTCAATGCTTATGTTGGTGCTTCAGCTTGCGTAGCAATCTTGGAAGATATTATAGTATTTGGAATGGAAAGTTTAATTGTTTTTGGAACATGTGGCGTCCTTGATTCGTCAATTGAGGAGACATCCATTATTATTCCAAGAAGTGCTATTAGGGATGAAGGGACATCATTTCATTATTCGGAAGCAAGTTCTGAAATTGCAGTAAACACAAATTCAATTTTTTTACTCTGCGGATAA

SEQ ID NO: 846 - protein, 153 aa, Streptococcus agalactiae
MIINSFDNSRKAIINPEDINSPIKGFPKTVITCFARETFNRILEELPHREIARTSVANLEIPIYELEFKGQKIGFFNAYVGASACVAILEDIIVFGMESLIVFGTCGVLDSSIEETSIIIPRSAIRDEGTSFHYSEASSEIAVNTNSIFLLCG

SEQ ID NO: 847 - protein, 429 aa, Streptococcus agalactiae
ATGTGGAATGTAAAAACTTTTGATAATTTAACTACACATGAGTTGTTTCAAATATATAAATTAAGAGTATCTGTATTTGTGGTTGAACAAGATTGTCCTTATCAAGAGGTTGATGATGAAGATTTGATTTGTTTGCATGGGATGAATTGGGTAGATGGTCAATTGGCAGCTTATTATAGATTGATACCAGAAGATGATAAGGTGCATTTGGGACGTGTGATTGTTAATCCAGACTTTAGAAAAAAGGGATTAGGAAATCAATTAGTGGAATATGCGATTAAATTTAGTGAGGCAAATTACCCTAATAAACCTATTTATGCTCAGGCCCAAGCTTATTTACAAGATTTTTATCAATCTTTCGGATTTCAACCTGTCTCAGATATCTATCTAGAAGATAATATTCCTCATCTTGATATGGTTTTATTATAA

SEQ ID NO: 848 - protein, 142 aa, Streptococcus agalactiae
MWNVKTFDNLTTHELFQIYKLRVSVFVVEQDCPYQEVDDEDLICLHGMNWVDGQLAAYYRLIPEDDKVHLGRVIVNPDFRKKGLGNQLVEYAIKFSEANYPNKPIYAQAQAYLQDFYQSFGFQPVSDIYLEDNIPHLDMVLL

SEQ ID NO: 849 - protein, 3701 aa, Streptococcus agalactiae
GTGGATAAACATCACTCAAAAAAGGCTATTTTAAAGTTAACACTTATAACAACTAGTATTTTATTAATGCATAGCAATCAAGTGAATGCAGAGGAGCAAGAATTAAAAAACCAAGAGCAATCACCTGTAATTGCTAATGTTGCTCAACAGCCATCGCCATCGGTAACTACTAATACTGTTGAAAAAACATCTGTAACAGCTGCTTCTGCTAGTAATACAGCGAAAGAAATGGGTGATACATCTGTAAAAAATGACAAAACAGAAGATGAATTATTAGAAGAGTTATCTAAAAACCTTGATACGTCTAATTTGGGGGCTGATCTTGAAGAAGAATATCCCTCTAAACCAGAGACAACCAACAATAAAGAAAGCAATGTAGTAACAAATGCTTCAACTGCAATAGCACAGAAAGTTCCCTCAGCATATGAAGAGGTGAAGCCAGAAAGCAAGTCATCGCTTGCTGTTCTTGATACATCTAAAATAACAAAATTACAAGCCATAACCCAAAGAGGAAAGGGAAATGTAGTAGCTATTATTGATACTGGCTTTGATATTAACCATGATATTTTTCGTTTAGATAGCCCAAAAGATGATAAGCACAGCTTTAAAACTAAGACAGAATTTGAGGAATTAAAAGCAAAACATAATATCACTTATGGGAAATGGGTTAACGATAAGATTGTTTTTGCACATAACTACGCCAACAATACAGAAACGGTGGCTGATATTGCAGCAGCTATGAAAGATGGTTATGGTTCAGAAGCAAAGAATATTTCGCATGGTACACACGTTGCTGGTATTTTTGTAGGTAATAGTAAACGTCCAGCAATCAATGGTCTTCTTTTAGAAGGTGCAGCGCCAAATGCTCAAGTCTTATTAATGCGTATTCCAGATAAAATTGATTCGGACAAATTTGGTGAAGCATATGCTAAAGCAATCACAGACGCTGTTAATCTAGGAGCAAAAACGATTAATATGAGTATTGGAAAAACAGCTGATTCTTTAATTGCTCTCAATGATAAAGTTAAATTAGCACTTAAATTAGCTTCTGAGAAGGGCGTTGCAGTTGTTGTGGCTGCCGGAAATGAAGGCGCATTTGGTATGGATTATAGCAAACCATTATCAACTAATCCTGACTACGGTACGGTTAATAGTCCAGCTATTTCTGAAGATACTTTGAGTGTTGCTAGCTATGAATCACTTAAAACTATCAGTGAGGTCGTTGAAACAACTATTGAAGGTAAGTTAGTTAAGTTGCCGATTGTGACTTCTAAACCTTTTGACAAAGGTAAGGCCTACGATGTGGTTTATGCCAATTATGGTGCAAAAAAAGACTTTGAAGGTAAGGACTTTAAAGGTAAGATTGCATTAATTGAGCGTGGTGGTGGACTTGATTTTATGACTAAAATCACTCATGCTACAAATGCAGGTGTTGTTGGTATCGTTATTTTTAACGATCAAGAAAAACGTGGAAATTTTCTAATTCCTTACCGTGAATTACCTGTGGGGATTATTAGTAAAGTAGATGGCGAGCGTATAAAAAATACTTCAAGTCAGTTAACATTTAACCAGAGTTTTGAAGTAGTTGATAGCCAAGGTGGTAATCGTATGCTGGAACAATCAAGTTGGGGCGTGACAGCTGAAGGAGCAATCAAGCCTGATGTAACAGCTTCTGGCTTTGAAATTTATTCTTCAACCTATAATAATCAATACCAAACAATGTCTGGTACAAGTATGGCTTCACCACATGTTGCAGGATTAATGACAATGCTTCAAAGTCATTTGGCTGAGAAATATAAAGGGATGAATTTAGATTCTAAAAAATTGCTAGAATTGTCTAAAAACATCCTCATGAGCTCAGCAACAGCATTATATAGTGAAGAGGATAAGGCGTTTTATTCACCACGTCAGCAAGGTGCAGGTGTAGTTGATGCTGAAAAAGCTATCCAAGCTCAATATTATATTACTGGAAACGATGGCAAAGCTAAAATTAATCTCAAACGAATGGGAGATAAATTTGATATCACAGTTACAATTCATAAACTTGTAGAAGGTGTCAAAGAATTGTATTATCAAGCTAATGTAGCAACAGAACAAGTAAATAAAGGTAAATTTGCCCTTAAACCACAAGCCTTGCTAGATACTAATTGGCAGAAAGTAATTCTTCGTGATAAAGAAACACAAGTTCGATTTACTATTGATGCTAGTCAATTTAGTCAGAAATTAAAAGAACAGATGGCAAATGGTTATTTCTTAGAAGGTTTTGTACGTTTTAAAGAAGCCAAGGATAGTAATCAGGAGTTAATGAGTATTCCTTTTGTAGGATTTAATGGTGATTTTGCGAACTTACAAGCACTTGAAACACCGATTTATAAGACGATTTCTAAAGGTAGTTTCTACTATAAACCAAATGATACAACTCATAAAGACCAATTGGAGTACAATGAATCAGCTCCTTTTGAAAGCAACAACTATACTGCCTTGTTAACACAATCAGCGTCTTGGGGCTATGTTGATTATGTCAAAAATGGTGGGGAGTTAGAATTAGCACCGGAGAGTCCAAAAAGAATTATTTTAGGAACTTTTGAGAATAAGGTTGAGGATAAAACAATTCATCTTTTGGAAAGAGATGCAGCGAATAATCCATATTTTGCCATTTCTCCAAATAAAGATGGAAATAGGGACGAAATCACTCCCCAGGCAACTTTCTTAAGAAATGTTAAGGATATTTCTGCTCAAGTTCTAGATCAAAATGGAAATGTTATTTGGCAAAGTAAGGTTTTACCATCTTATCGTAAAAATTTCCATAATAATCCAAAGCAAAGTGATGGTCATTATCGTATGGATGCTCTTCAGTGGAGTGGTTTAGATAAGGATGGCAAAGTTGTAGCAGATGGTTTTTATACTTATCGCTTACGTTACACACCAGTAGCAGAAGGAGCAAATAGTCAGGAGTCAGACTTTAAAGTACAAGTAAGTACTAAGTCACCAAATCTTCCTTCACGAGCTCAGTTTGATGAAACTAATCGAACATTAAGCTTAGCCATGCCTAAGGAAAGTAGTTATGTTCCTACATATCGTTTACAATTAGTTTTATCTCATGTTGTAAAAGATGAAGAATATGGGGATGAGACTTCTTACCATTATTTCCATATAGATCAAGAAGGTAAAGTGACACTTCCTAAAACGGTTAAGATAGGAGAGAGTGAGGTTGCGGTAGACCCTAAGGCCTTGACACTTGTTGTGGAAGATAAAGCTGGTAATTTCGCAACGGTAAAATTGTCTGATCTCTTGAATAAGGCAGTAGTATCAGAGAAAGAAAACGCTATAGTAATTTCTAACAGTTTCAATATTTTGATAACTTGAAAAAAGAACCTATGTTTATTTCTAAAAAAGAAAAAGTAGTAAACAAGAATCTAGAAGAAATAATATTAGTTAAGCCGCAAACTACAGTTACTACTCAATCATTGTCTAAAGAAATAACTAAATCAGGAAATGAGAAAGTCCTCACTTCTACAAACAATAATAGTAGCAGAGTAGCTAAGATCATATCACCTAAACATAACGGGGATTCTGTTAACCATACCTTACCTAGTACATCAGATAGAGCAACGAATGGTCTATTTGTTGGTACTTTGGCATTGTTATCTAGTTTACTTCTTTATTTGAAACCCAAAAAGACTAAAAATAATAGTAAATAA

SEQ ID NO: 850 - protein, 1233 aa, Streptococcus agalactiae
MDKHHSKKAILKLTLITTSILLMHSNQVNAEEQELKNQEQSPVIANVAQQPSPSVTTNTVEKTSVTAASASNTAKEMGDTSVKNDKTEDELLEELSKNLDTSNLGADLEEEYPSKPETTNNKESNVVTNASTAIAQKVPSAYEEVKPESKSSLAVLDTSKITKLQAITQRGKGNVVAIIDTGFDINHDIFRLDSPKDDKHSFKTKTEFEELKAKHNITYGKWVNDKIVFAHNYANNTETVADIAAAMKDGYGSEAKNISHGTHVAGIFVGNSKRPAINGLLLEGAAPNAQVLLMRIPDKIDSDKFGEAYAKAITDAVNLGAKTINMSIGKTADSLIALNDKVKLALKLASEKGVAVVVAAGNEGAFGMDYSKPLSTNPDYGTVNSPAISEDTLSVASYESLKTISEVVETTIEGKLVKLPIVTSKPFDKGKAYDVVYANYGAKKDFEGKDFKGKIALIERGGGLDFMTKITHATNAGVVGIVIFNDQEKRGNFLIPYRELPVGIISKVDGERIKNTSSQLTFNQSFEVVDSQGGNRMLEQSSWGVTAEGAIKPDVTASGFEIYSSTYNNQYQTMSGTSMASPHVAGLMTMLQSHLAEKYKGMNLDSKKLLELSKNILMSSATALYSEEDKAFYSPRQQGAGVVDAEKAIQAQYYITGNDGKAKINLKRMGDKFDITVTIHKLVEGVKELYYQANVATEQVNKGKFALKPQALLDTNWQKVILRDKETQVRFTIDASQFSQKLKEQMANGYFLEGFVRFKEAKDSNQELMSIPFVGFNGDFANLQALETPIYKTISKGSFYYKPNDTTHKDQLEYNESAPFESNNYTALLTQSASWGYVDYVKNGGELELAPESPKRIILGTFENKVEDKTIHLLERDAANNPYFAISPNKDGNRDEITPQATFLRNVKDISAQVLDQNGNVIWQSKVLPSYRKNFHNNPKQSDGHYRMDALQWSGLDKDGKVVADGFYTYRLRYTPVAEGANSQESDFKVQVSTKSPNLPSRAQFDETNRTLSLAMPKESSYVPTYRLQLVLSHVVKDEEYGDETSYHYFHIDQEGKVTLPKTVKIGESEVAVDPKALTLVVEDKAGNFATVKLSDLLNKAVVSEKENAIVISNSFKYFDNLKKEPMFISKKEKVVNKNLEEIILVKPQTTVTTQSLSKEITKSGNEKVLTSTNNNSSRVAKIISPKHNGDSVNHTLPSTSDRATNGLFVGTLALLSSLLLYLKPKKTKNNSK

SEQ ID NO: 851 - protein, 660 aa, Streptococcus agalactiae
TTGGTTAACTATAAAAAAGCAGATTTTTATGTTTTCTCAGACCAGGATGATGTTTGGAAAGAAAATCGTTTAGAACGTTACCTTGAAGAAGCAGAGAAATTTAACCAAGAACTACCATTGCTTGTTTATTCGAACTGGACTTCTGTAGATGAAAAATTAACAGTATTGAAAGAACATAATCCAGCAACAGTTATTCAAGAACAAATTGCCTTTAACCAAATAAATGGTATGGTTATCATGATGAATCATGAGTTAGCAAAGCTTTGGGAATATCGTCAAATTGGCGCCCATGATTCTTATGTTGGAACTCTAGCTTACGCCGTTGGAAATGTGGCTTATATTTCTGACAGTACAGTCCTTTGGCGTAGACAAGTAGGGGCAGAGTCGCTAAACAATTACGGGAGACAATATGGGGTGGCTACGTTTTGGCAGATGATAAATACTTCTTTTGATCGTGCTTCGCTTATTTTTGCTCAAGTATCCGATAAAATGTCCCTGGAGCGTAAACTCTTCTTTAGTCGTTTTATAGAATTAAAAAATGCCAATCTAATGAGAAGGATTTATCTTTTATCAAAATTAAAACTCCGTCGGAAATCATTGAAAGAAACAGTTGCTATGACTATCCTACTTTTAACAGGTTACGGTAAACCAAAAGCATAA

SEQ ID NO: 852 - protein, 219 aa, Streptococcus agalactiae
MVNYKKADFYVFSDQDDVWKENRLERYLEEAEKFNQELPLLVYSNWTSVDEKLTVLKEHNPATVIQEQIAFNQINGMVIMMNHELAKLWEYRQIGAHDSYVGTLAYAVGNVAYISDSTVLWRRQVGAESLNNYGRQYGVATFWQMINTSFDRASLIFAQVSDKMSLERKLFFSRFIELKNANLMRRIYLLSKLKLRRKSLKETVAMTILLLTGYGKPKA

SEQ ID NO: 853 - protein, 1011 aa, Streptococcus agalactiae
ATGCAATCATACTATGATCGTTCTCAATCGCCACTTGACTATGCCTTGTCAGAAAAAGCTTTTCCTATGCGTTCTGTTAATTGGAATAAGCTAAACGATGACAAAGACTTAGAGGTATGGAACAGAGTAACTCAAAATTTCTGGTTACCTGAAAAGATCCCAGTTTCTAATGACCTTAATTCTTGGAGAACATTGGATGCTGATTGGCAGCAATTAATTACTCGGACTTTTACTGGTCTAACCTTATTAGATTCTGTGCAGGCTACTGTTGGTGATATTGCTCAGATTAAGCATTCTCAGACAGATCATGAACAAGTTATTTATGCTAACTTTGCCTTTATGGTAGCTATTCATGCGCGATCTTATGGAACGATTTTTTCAACCTTATGCACTAGCCAACAAATTGAGGAAGCACATGAATGGGTAGTGGATACTGAAAGTCTACAAGCTCGATCACGTATACTTATTCCTTTTTATACTGGTGACGATCCTTTGAAATCTAAGGTTGCTGCAGCCATGATGCCAGGATTTTTGTTATATGGTGGCTTTTACCTTCCTTTTTACCTTTCAGCCAGAGGAAAATTACCAAATACGTCTGATATTATTCGTTTAATTTTACGAGATAAGGTAATTCATAACTATTACAGTGGCTATAAGTATCAACAGAAAGTTGCTAAATTATCTGTAGAAAAGCAAGCCGAAATGAAGACATTTGTCTTTGACCTCCTCTATCAGTTGATTGATTTAGAAAAAGCCTATCTTTACGAACTATATGATGGTTTTGATTTGGCTGAAGATGCAATCAGATTTAGCATTTACAATGCTGGTAAATTTTTACAAAATTTAGGATATGATTCTCCATTTACAGAAGAAGAGACTCGTATATCTCCTGAGGTTTTTGCACAACTTTCGGCGCGTGCAGATGAAAATCATGATTTCTTCTCAGGAAACGGCTCTTCATATATTATGGGGATTACAGAAGAAACATTGGATGAAGATTGGGAGTTTTAA

SEQ ID NO: 854 - protein, 336 aa, Streptococcus agalactiae
MQSYYDRSQSPLDYALSEKAFPMRSVNWNKLNDDKDLEVWNRVTQNFWLPEKIPVSNDLNSWRTLDADWQQLITRTFTGLTLLDSVQATVGDIAQIKHSQTDHEQVIYANFAFMVAIHARSYGTIFSTLCTSQQIEEAHEWVVDTESLQARSRILIPFYTGDDPLKSKVAAAMMPGFLLYGGFYLPFYLSARGKLPNTSDIIRLILRDKVIHNYYSGYKYQQKVAKLSVEKQAEMKTFVFDLLYQLIDLEKAYLYELYDGFDLAEDAIRFSIYNAGKFLQNLGYDSPFTEEETRISPEVFAQLSARADENHDFFSGNGSSYIMGITEETLDEDWEF

SEQ ID NO: 855 - protein, 414 aa, Streptococcus agalactiae
ATGGATAGTACAGTGAAGGTGGTCTATTTTTCATCGAAATCTAACAATACCCATCGTTTTGTTCAAAAGTTGGCTTGTTCTAACCAGCGTATTCCATCAGATGGTAGTAGTATATTGGTTACTGAGGATTATATTTTGATTGTGCCTACTTACGCTGGAGGAGGAGATGATACCAAAGGCGCAGTTCCAAAACAAGTTGTACAGTTTTTAAATGTTCGACAAAATCGGGAACATTGCCAAGGGGTTATTTCTTCTGGAAATACCAATTTTGGTGACACTTATGCCATTGCTGGACCTATTATTGCTCGAAAATTAAATGTTCCTTTGCTTCATCAATTTGAATTACTGGGAACACAAGAAGATGTTACAAGGGTAAAGGAGTTACTTTGCCAATTCACTAGAAAGGATAAATAA

SEQ ID NO: 856 - protein, 137 aa, Streptococcus agalactiae
MDSTVKVVYFSSKSNNTHRFVQKLACSNQRIPSDGSSILVTEDYILIVPTYAGGGDDTKGAVPKQVVQFLNVRQNREHCQGVISSGNTNFGDTYAIAGPIIARKLNVPLLHQFELLGTQEDVTRVKELLCQFTRKDK

SEQ ID NO: 857 - protein, 2166 aa, Streptococcus agalactiae
ATGACACAATCAGATGCATATCTCTCGTTGAACGCGAAGACACGCTTTAGAGATCGCACAGGTAATTATCATTTTACTTCGGATAAAGAGGCTGTTGAACAATATATGATAGAACATGTTGAACCTAATACGATGGTGTTCACATCACTAATTGAAAAGCTAGATTATTTGGTTTCTAATAACTACTATGAATCGGACCTTCTAAAACAATATAACCTTGAGTTTATTTGCCAAATTTTTGAGCATGCATACGCTAAGAAATTTGCTTTTCTAAATTTTATGGGGGCTTTAAAATTTTATAATGCTTATGCTCTTAAAACAGAAGACAATCGTTATTATTTGGAACACTATGAAGATCGTGTTGTAATGAATGCTCTGTTTTTAGCTGCTGGTGATGAAAAAGCTGCCTATGACCTAGTAGATGACATGCTAGCAAATCGCTTTCAACCAGCAACACCTACCTTTTTAAATGCAGGGAAAAAACGTCGTGGTGAATATATCTCTTGCTATTTGTTGCGCATTGAAGACAATATGGAATCTATTTCTCGTGCTATTAGTACAAGCCTTCAGTTATCAAAACGAGGTGGTGGGGTAGCACTTTGCTTAACCAACTTACGGGAATTTGGTGCTCCAATAAAAGGTATTAAAAATCAAGCTACTGGTATTGTACCTGTCATGAAATTACTAGAAGATTCGTTTTCTTACGCCAATCAATTAGGACAAAGACAAGGAGCTGGTGCAGTTTACTTACACGCTCACCATCCTGAAGTATTAACGTTTTTAGATACTAAACGTGAGAATGCCGATGAGAAAATTCGAATTAAATCTCTTTCCCTAGGACTTGTTATTCCTGATATTACTTTTGAATTGGCTAAGGCAAATAAAGATATGGCCTTGTTTTCACCGTATGACATTGAGCGAGTATATGGTAAACCAATGTCTGATATCTCTATCACAGAAGAATATGAAACTTTATTAGCCAATGCGGATATTCGTAAAACCTTTATTAGTGCACGAAAACTATTTCAAACGATAGCAGAGCTTCATTTTGAATCTGGTTATCCTTATATCTTATTTGAAGATACTGTAAATGCTAAAAACCCTCACAAAAAAGAGGGACGAATTGTTATGTCTAATTTATGTTCTGAGATTGCACAAGTTAATACAGCTAGTCAATTTTCAGAAGACCTGACTTTCACTAAGGTTGGACATGATGTTTGTTGTAATTTAGGTTCTATTAATATTGCGCGTGCTATGGATCAAGCGGCGGATTTTGAAAAATTAATTGCTAATAGCATTAGAGCCCTTGATCGTGTATCTCGAACTTCTGATTTAGATAGTGCTCCATCTATTAAAAAAGGTAATGCAGCTAATCATGCTGTTGGTTTAGGTGCTATGAATTTGCATGGATTTTTGGCGACTAACCATATTTATTACGATTCTCAAGAGGCTATTGATTTTACAGATTGCTTCTTTTACGCTATGGCTTATTATGCCTTTAAAGCTTCTAACCATTTAGCAAAAGAAAAAGGAACCTTTGAGGGCTTCTCGGAATCAAGTTATGCTGATGGCAGTTATTTCTATCAATATACCGAACAAAACTTTGAGCCAAAAACACAGCGTGTTAAAAATCTACTAGCTGAGTATGGTCTGACTCTACCAAGCCAAGAGGATTGGAGAAAGCTTGTGCAAAGTATTAAAGAGATAGGATTAGCTAATGCGCATTTATTAGCTGTTGCTCCGACAGGGTCAATCAGTTATCTTTCTTCTTGTACTCCGAGCCTTCAACCGGTTGTATCACCTGTCGAAGTACGCAAGGAAGGAGCACTGGGGAGGGTTTATGTACCTGCTTATAAGATTGATGCAGATAATTATGTCTACTACAAAAAAGGAGCTTATGAAGTGGGATCTGAGGCGATTATCAATATTGCAGCTGCCGCTCAAAAACACATTGATCAAGCTATTTCGTTAACGCTTTTCATGACAGATCAAGCAACTACGCGAGATTTAAATAAAGCCTATATTCAAGCATTTAAACAAAAATGTGCCTCTATTTATTATGTACGAGTGAGACAGGACATCCTAGAAGGTAGCGAGAGTTATGATGATATGCTGGATGATTTCACTTCATCGGACTTAGAAGACTGTCAATCCTGCATGATTTAA

SEQ ID NO: 858 - protein, 721 aa, Streptococcus agalactiae
MTQSDAYLSLNAKTRFRDRTGNYHFTSDKEAVEQYMIEHVEPNTMVFTSLIEKLDYLVSNNYYESDLLKQYNLEFICQIFEHAYAKKFAFLNFMGALKFYNAYALKTEDNRYYLEHYEDRVVMNALFLAAGDEKAAYDLVDDMLANRFQPATPTFLNAGKKRRGEYISCYLLRIEDNMESISRAISTSLQLSKRGGGVALCLTNLREFGAPIKGIKNQATGIVPVMKLLEDSFSYANQLGQRQGAGAVYLHAHHPEVLTFLDTKRENADEKIRIKSLSLGLVIPDITFELAKANKDMALFSPYDIERVYGKPMSDISITEEYETLLANADIRKTFISARKLFQTIAELHFESGYPYILFEDTVNAKNPHKKEGRIVMSNLCSEIAQVNTASQFSEDLTFTKVGHDVCCNLGSINIARAMDQAADFEKLIANSIRALDRVSRTSDLDSAPSIKKGNAANHAVGLGAMNLHGFLATNHIYYDSQEAIDFTDCFFYAMAYYAFKASNHLAKEKGTFEGFSESSYADGSYFYQYTEQNFEPKTQRVKNLLAEYGLTLPSQEDWRKLVQSIKEIGLANAHLLAVAPTGSISYLSSCTPSLQPVVSPVEVRKEGALGRVYVPAYKIDADNYVYYKKGAYEVGSEAIINIAAAAQKHIDQAISLTLFMTDQATTRDLNKAYIQAFKQKCASIYYVRVRQDILEGSESYDDMLDDFTSSDLEDCQSCMI

SEQ ID NO: 859 - protein, 3168 aa, Streptococcus agalactiae
ATGACAAAAAAACATCTTAAAACGCTTGCCTTGGCACTTACTACAGTATCAGTAGTGACATACAGCCAGGAGGTATATGGATTAGAAAGAGAGGAATCGGTCAAACAAGAACAAACCCAGTCAGCTTCAGAAGATGATTGGTTCGAAGAAGATAATGAGAGGAAAACAAATGTTTCTAAAGAGAATTCTACTGTTGATGAAACAGTTAGTGATTTATTTTCTGATGGAAATAGTAATAACTCTAGTTCTAAAACCGAGTCAGTGGTAAGTGACCCTAAACAAGTCCCCAAAGCAAAACCAGAGGTTACACAAGAAGCAAGCAATTCTAGTAATGATGCTAGCAAAGTAGAAGTACCAAAACAGGATACAGCTTCAAAAAAGGAAACTCTAGAAACATCAACTTGGGAGGCAAAAGATTTCGTAACTAGAGGGGATACTTTAGTAGGTTTTTCAAAATCTGGAATTAATAAGTTATCTCAAACATCACACTTGGTTTTACCAAGTCATGCAGCAGATGGAACTCAATTGACACAAGTAGCTAGCTTTGCTTTTACTCCAGATAAAAAGACGGCCATTGCAGAATATACAAGTAGGCTAGGAGAAAATGGGAAACCGAGTCGTTTAGATATTGATCAGAAGGAAATTATTGATGAGGGAGAAATATTTAATGCTTACCAGTTGACTAAGCTTACTATTCCAAATGGTTATAAGTCTATTGGTCAAGATGCTTTTGTGGACAATAAGAATATTGCTGAGGTTAACCTTCCTGAGAGTCTCGAGACTATTTCAGACTATGCTTTTGCTCACATGTCTTTAAAACAAGTAAAGTTACCAGATAACCTAAAGGTCATTGGAGAATTAGCTTTTTTTGATAATCAGATTGGTGGTAAGCTTTACTTGCCACGTCACTTGATAAAATTAGCAGAACGCGCTTTCAAATCTAATCGTATTCAAACAGTTGAATTTTTGGGAAGTAAGCTTAAGGTTATAGGAGAAGCAAGTTTTCAAGATAATAATCTGAGGAATGTTATGCTTCCGGATGGACTTGAAAAAATAGAATCAGAAGCTTTTACAGGAAATCCAGGAGATGAACATTACAACAATCAGGTTGTATTGCGCACAAGGACAGGCCAAAATCCACATCAACTTGCGACTGAGAATACTTACGTCAATCCGGACAAATCATTGTGGCGTGCAACACCTGATATGGATTATACCAAATGGTTAGAGGAAGATTTTACCTATCAAAAAAATAGTGTTACAGGTTTTTCAAATAAAGGCTTACAAAAGGTAAGACGTAATAAAAACTTAGAAATTCCAAAACAACACAATGGTATTACTATTACTGAAATTGGTGATAACGCTTTTCGCAATGTTGATTTTCAAAGTAAAACTTTACGTAAATATGATTTGGAAGAAATAAAGCTCCCCTCAACTATTCGGAAAATAGGTGCTTTTGCTTTTCAATCTAATAACTTGAAATCCTTTGAAGCAAGTGAAGATTTAGAAGAGATTAAAGAGGGAGCCTTTATGAATAATCGTATTGGAACTCTAGACTTGAAAGACAAACTTATCAAAATAGGTGATGCTGCTTTCCATATTAATCATATTTATGCCATTGTTCTTCCAGAATCTGTACAAGAAATAGGACGTTCAGCTTTTCGACAAAATGGTGCGCTTCACCTTATGTTTATCGGAAATAAGGTTAAAACAATTGGTGAAATGGCTTTTTTATCCAATAAACTGGAAAGTGTAAATCTCTCTGAGCAAAAACAATTAAAGACAATTGAGGTCCAAGCTTTTTCGGATAATGCCCTTAGTGAAGTAGTCTTACCGCCAAATTTACAGACTATTCGTGAAGAGGCTTTCAAAAGGAATCATTTGAAAGAAGTGAAGGGTTCATCTACATTATCTCAGATTACTTTTAATGCTTTTGATCAAAATGATGGGGACAAACGCTTTGGTAAGAAAGTGGTTGTTAGGACACATAATAATTCTCATATGTTAGCAGATGGTGAGCGTTTTATCATTGATCCAGATAAGCTATCTTCTACAATGGTAGACCTTGAAAAGGTTTTAAAAATAATCGAAGGTTTAGATTACTCTACATTACGTCAGACTACTCAAACTCAGTTTAGAGAAATGACTACTGCAGGTAAAGCGTTGTTATCAAAATCTAACCTCCGACAAGGAGAAAAACAAAAATTCCTTCAAGAAGCACAATTTTTCCTTGGTCGCGTTGATTTGGATAAAGCCATAGCTAAAGCTGAGAAGGCTTTAGTGACCAAGAAGGCAACAAAGAATGGTCATTTGCTTGAGAGGAGTATTAACAAAGCGGTATTAGCTTATAATAATAGTGCTATTAAAAAAGCTAATGTTAAGCGCTTGGAAAAAGAGTTAGACTTGCTGACAGATTTAGTCGAGGGAAAAGGACCATTAGCGCAAGCTACAATGGTACAAGGAGTTTATTTATTAAAGACGCCTTTACCATTGCCAGAATATTATATCGGATTGAACGTTTATTTTGACAAGTCTGGAAAATTGATTTATGCACTTGATATGAGTGATACTATTGGCGAGGGACAAAAAGATGCATATGGTAATCCTATATTAAATGTTGACGAGGATAATGAAGGTTATCATACCTTGGCAGTTGCCACTTTAGCTGATTATGAAGGTCTTTATATTAAAGATATTTTAAATAGTTCCCTTGATAAGATTAAAGCAATACGCCAGATTCCTTTGGCAAAATATCATAGATTAGGAATTTTCCAAGCTATTCGAAATGCAGCGGCAGAAGCAGACCGATTGCTTCCTAAGACACCTAAGGGGTACCTAAATGAAGTCCCAAATTATCGTAAAAAACAAGTGGAGAAAAATTTAAAACCAGTTGATTATAAAACGCCGATTTTTAATAAGGCTTTACCTAATGAAAAGGTAGACGGTGATAGAGCGGCTAAAGGTCATAATATAAATGCGGAGACTAATAATTCTGTAGCTGTAACACCAATAAGGTCCGAGCAGCAATTACATAAGTCACAGTCTGATGTAAATTTACCTCAAACAAGTTCTAAAAATAATTTTATATACGAGATTCTAGGATACGTTAGTTTATGTTTGCTTTTCCTAGTAACTGCTGGGAAAAAAGGAAAACGAGCAAGAAAATAA

SEQ ID NO: 860 - protein, 1055 aa, Streptococcus agalactiae
MTKKHLKTLALALTTVSVVTYSQEVYGLEREESVKQEQTQSASEDDWFEEDNERKTNVSKENSTVDETVSDLFSDGNSNNSSSKTESVVSDPKQVPKAKPEVTQEASNSSNDASKVEVPKQDTASKKETLETSTWEAKDFVTRGDTLVGFSKSGINKLSQTSHLVLPSHAADGTQLTQVASFAFTPDKKTAIAEYTSRLGENGKPSRLDIDQKEIIDEGEIFNAYQLTKLTIPNGYKSIGQDAFVDNKNIAEVNLPESLETISDYAFAHMSLKQVKLPDNLKVIGELAFFDNQIGGKLYLPRHLIKLAERAFKSNRIQTVEFLGSKLKVIGEASFQDNNLRNVMLPDGLEKIESEAFTGNPGDEHYNNQVVLRTRTGQNPHQLATENTYVNPDKSLWRATPDMDYTKWLEEDFTYQKNSVTGFSNKGLQKVRRNKNLEIPKQHNGITITEIGDNAFRNVDFQSKTLRKYDLEEIKLPSTIRKIGAFAFQSNNLKSFEASEDLEEIKEGAFMNNRIGTLDLKDKLIKIGDAAFHINHIYAIVLPESVQEIGRSAFRQNGALHLMFIGNKVKTIGEMAFLSNKLESVNLSEQKQLKTIEVQAFSDNALSEVVLPPNLQTIREEAFKRNHLKEVKGSSTLSQITFNAFDQNDGDKRFGKKVVVRTHNNSHMLADGERFIIDPDKLSSTMVDLEKVLKIIEGLDYSTLRQTTQTQFREMTTAGKALLSKSNLRQGEKQKFLQEAQFFLGRVDLDKAIAKAEKALVTKKATKNGHLLERSINKAVLAYNNSAIKKANVKRLEKELDLLTDLVEGKGPLAQATMVQGVYLLKTPLPLPEYYIGLNVYFDKSGKLIYALDMSDTIGEGQKDAYGNPILNVDEDNEGYHTLAVATLADYEGLYIKDILNSSLDKIKAIRQIPLAKYHRLGIFQAIRNAAAEADRLLPKTPKGYLNEVPNYRKKQVEKNLKPVDYKTPIFNKALPNEKVDGDRAAKGHNINAETNNSVAVTPIRSEQQLHKSQSDVNLPQTSSKNNFIYEILGYVSLCLLFLVTAGKKGKRARK

SEQ ID NO: 861 - protein, 390 aa, Streptococcus agalactiae
ATGATTACACAAGAAATGAAAGAGATTATTAATAGTCAGTTAGCAATGGTCGCGACGGTTGATGCTAAAGGTCAACCCAATATTGGCCCAAAACGTTCTATGCGTCTCTGGGATGATAAAACGTTTATTTATAATGAAAATACAGATGGTCAAACTCGTATTAACATTGAAGATAATGGGAAAATTGAAATTGCCTTTGTTGATCGTGAACGTCTTTTAGGTTACAGGTTTGTGGGAACTGCTGAAATTCAAACAGAAGGTACTTATTACGAAGCAGCGAAAAAATGGGCAGAAGGACGCATGGGGGTTCCGAAAGCAGTTGGTATTATTCATGTCGAGCGTATTTTTAATTTACAATCTGGTGCTAATGCAGGTAAAGAAATCACTTAA

SEQ ID NO: 862 - protein, 129 aa, Streptococcus agalactiae
MITQEMKEIINSQLAMVATVDAKGQPNIGPKRSMRLWDDKTFIYNENTDGQTRINIEDNGKIEIAFVDRERLLGYRFVGTAEIQTEGTYYEAAKKWAEGRMGVPKAVGIIHVERIFNLQSGANAGKEIT

SEQ ID NO: 863 - protein, 432 aa, Streptococcus agalactiae
ATGCTATCATTTCAAATTGTTGAAAAGCCAGCAATGATACTTGCTGGAGTAACTTTAGAAAATGTAAAGTCAAATCAAGAAGGTATCCAGCAAGCCATTGGCATTTGTAAAACACAACCTGATTTTCGTTTCGATTACAGTGCCACTTATCAAGTAGAGACAAGTGTCCAAGCCCCAAAAGGGTTAGAAATTATTAGGATCCCAAGCGCTACCTATGCAGTCATTTCTGTTAAAGGTCCAATGCCATCGAGTCTTCAAGAAACATGGCGAAAAATAATACAAGGATTTTTTCAAGAGAATAATCTAAAACCAGCTAACTCGCCAAACTTAGAAATTTATTCATCTCAACATCCACAAGATACTGATTATCAAATGGAAATTTGGCTTGCTATCGCAGATATTACTAATAACTCGAAAACAAACTTAATCTAG

SEQ ID NO: 864 - protein, 143 aa, Streptococcus agalactiae
MLSFQIVEKPAMILAGVTLENVKSNQEGIQQAIGICKTQPDFRFDYSATYQVETSVQAPKGLEIIRIPSATYAVISVKGPMPSSLQETWRKIIQGFFQENNLKPANSPNLEIYSSQHPQDTDYQMEIWLAIADITNNSKTNLI

SEQ ID NO: 865 - protein, 285 aa, Streptococcus agalactiae
ATGCTTACTATTCAAGAAATGAAAGATACAACCTTTGAATTACAAGAAAATTTTAGAAGGTTAAATTATCCTATTAAACAAGTTGCTAAAGACTTGCAACTTAATATCAGTGAAGTTGAATCTCTTTTAAGTCTTGATGTTACTTATCCTGGAGATGTTTGTATGCTGAGAGATTATCTAGAAGATATGTTGAAAAAAGAGGGTAAAGAAGTTTATCCATTTTCTAGATTAGCATCTCATTCAGCAAATCGTTGGTACCCTTATGAGACACCATGGCGTTATTAA

SEQ ID NO: 866 - protein, 94 aa, Streptococcus agalactiae
MLTIQEMKDTTFELQENFRRLNYPIKQVAKDLQLNISEVESLLSLDVTYPGDVCMLRDYLEDMLKKEGKEVYPFSRLASHSANRWYPYETPWRY

SEQ ID NO: 867 - protein, 318 aa, Streptococcus agalactiae
ATGAAAGAAAAACAAACAGCCGGACGTCGTCAATTAGAAGAATTTGCACCTGAATTTGCCAGATATAATGATGATATTTTATTTGGTGAGGTTTGGGCAAAAGAGGATCATTTAACAGATAAAACACGTTCTATTATTACTATATCTGCCTTAATTAGCGGAGGAAATCTTGAACAGTTAGAGCATCATCTTCAATTTGCCAAACAAAACGGAGTTACTAAAGAAGAAATTGCTGACATTATCACTCACCTCGCTTTTTATGTTGGATGGCCAAAAGCTTGGTCAGCCTTTAATAAAGCTAAGGAAATTTGGATATAA

SEQ ID NO: 868 - protein, 105 aa, Streptococcus agalactiae
MKEKQTAGRRQLEEFAPEFARYNDDILFGEVWAKEDHLTDKTRSIITISALISGGNLEQLEHHLQFAKQNGVTKEEIADIITHLAFYVGWPKAWSAFNKAKEIWI

SEQ ID NO: 869 - protein, 396 aa, Streptococcus agalactiae
ATGCAAGAAACAACTAAGTCTATCTTTCCTAAGGGTGAAAAAAATCCATATGGTGAATTCTTTATTGGGCAATCCTATCTCGCAGCATTAGCAAAATCTCCAGATGGGAATGTTTCAGTTGGAAATGTAACCTTTGAAGCAGGCTGTCGTAATAATTGGCATGTTCATTTGGACGGTTATCAAATCCTTCTCGTTACAGAAGGTTCAGGTTGGTACCAAGAAGAAGGAAAAGAAGCAGTGTCATTAAAACCAGGCGACGTTATCGTTACAGATAAAGGTGTTAGACATTGGCATGGTGCTAAAAAAGATTCTGAATTTGCACATATTGCGATTACAGCTGGTAAGAGTGAGTTTTATGAAGCTGTTAGTGATGAAGAATATTCAAGACTAGGTTAA

SEQ ID NO: 870 - protein, 131 aa, Streptococcus agalactiae
MQETTKSIFPKGEKNPYGEFFIGQSYLAALAKSPDGNVSVGNVTFEAGCRNNWHVHLDGYQILLVTEGSGWYQEEGKEAVSLKPGDVIVTDKGVRHWHGAKKDSEFAHIAITAGKSEFYEAVSDEEYSRLG

SEQ ID NO: 871 - protein, 390 aa, Streptococcus agalactiae
ATGCATATCAAAGAAGTTAGTAAAAAGACTGGCATTACGTCAGATACCATCAGGTATTATGAGAGAATTAATCTTATTCCCCCTATTCATCGGAGTGAATCAGGAATTCGTGAGTTCACACAAAACGATATTGATATTTTAGAATTTGTCCGCTATTTTAGAGGCGCAGGTGTTTCCGTTGAAAGTCTCATTGATTATATTCATTTGGTTGAAAAAGGCGATTCCACTATCCCAGCTAGGCTAGAAATTTTAAAAGATGAACGCGACAATCTTGAAGATAGGCTTCAAGGCCTCCAAGAAGCACTTAATCGTCTAAATCACAAAATAGACAATTATCAAAATAAAGTTGTTCCTAGAGAACAAGAACTTTTTGATCCAACAACGAAATGA

SEQ ID NO: 872 - protein, 129 aa, Streptococcus agalactiae
MHIKEVSKKTGITSDTIRYYERINLIPPIHRSESGIREFTQNDIDILEFVRYFRGAGVSVESLIDYIHLVEKGDSTIPARLEILKDERDNLEDRLQGLQEALNRLNHKIDNYQNKVVPREQELFDPTTK

SEQ ID NO: 873 - protein, 1038 aa, Streptococcus agalactiae
ATGAAAGTAGCTACATTTATTGAACCTGGCAAAATGGTTATAACTGATACACCAAAACCAGTCATTGAACAAGAGACAGATGCTGTTATCAAAATTGTTAGAGCCTGTGTTTGTGGTTCAGACTTGTGGTGGTATCGTGGTATTTCAAAACGTGAAAGTGGTTCTTTTGCAGGTCATGAGGCTATTGGTATCGTTGAGGAAGTTGGTACTAAAGTAACTGACGTGTCAAAAGGTGATTTTGTTATTGTTCCCTTTACACATGGCTGTGGCCAATGTCCGTCTTGTAAGGCTGGATTTGATGGAAATTGTACAAATCATCAAGCTGCAAAAAATGTAGGATACCAAGGTCAATATCTACGTTATACTAATGCAAACTGGGCATTGGTTAAGATCCCAGGACAACCTTCTGATTATGATAATGAGACTCTTAACTCTCTGCTCACCTTATCAGATGTAATGGCAACTGGTTATCATGCTGCAGCAACTGCAGAAGTTAAAGAAGGTGACACGGTAGTTGTCATGGGAGATGGTGCTGTTGGACTCTGTGGTGTTATCGCTGCTAAAATGTTAGGTGCTAACCGTATCATTGCAATGAGTCGTCACAAAGATAGGCAGGAACTAGCATTGACTTTTGGTGCAACGGATATTGTCGAAGAACGGGGTGACGAAGCCGTTAAACGTGTTTTAGATTTAACCAATCAAGCAGGTGCCGATGCTGTTTTAGAATGTGTTGGTACAGAGCAGTCTGTTGATACAGCTACCCAAATTGCTAGGCCTGGTGCTGTCATAGGACGTGTTGGTATCCCACAAAATCCAGACATGAATACCAATAATTTATTCTGGAAAAATATCGGCCTTAGAGGTGGCATTGCTTCTGTAACAACATTTGATAAGTCTGTCCTTTTAGATGCTGTTCTAACTCATAAAATTAACCCAGGCTTAGTTTTTACAAAATCCTTTGTATTAGATGATATTCAAAAGGCTTATGAAGCAATGGATAAACGTGACGCTATCAAATCCTTAGTGATTGTTGACTGA

SEQ ID NO: 874 - protein, 345 aa, Streptococcus agalactiae
MKVATFIEPGKMVITDTPKPVIEQETDAVIKIVRACVCGSDLWWYRGISKRESGSFAGHEAIGIVEEVGTKVTDVSKGDFVIVPFTHGCGQCPSCKAGFDGNCTNHQAAKNVGYQGQYLRYTNANWALVKIPGQPSDYDNETLNSLLTLSDVMATGYHAAATAEVKEGDTVVVMGDGAVGLCGVIAAKMLGANRIIAMSRHKDRQELALTFGATDIVEERGDEAVKRVLDLTNQAGADAVLECVGTEQSVDTATQIARPGAVIGRVGIPQNPDMNTNNLFWKNIGLRGGIASVTTFDKSVLLDAVLTHKINPGLVFTKSFVLDDIQKAYEAMDKRDAIKSLVIVD

SEQ ID NO: 875 - protein, 855 aa, Streptococcus agalactiae
ATGACAGATACAATGATATTAAATGACAATCATAAAATACCAACTTTAGGTTTAGGTACGTGGATGATAGATAATGATAGGGTAGCTCAAGTTGTTAAAGATGCTATCGAATTAGGCTACCGCCATATTGATACTGCACAAGCATACAACAATGAAAAAGGTGTCGGTGTAGGGATTAAAGAGTCTGGTATTACACGTGAATCTTTATTTGTTACGACTAAAATTGCCGCTGAACATAAAGATTATGAAAGTGCTACAAAATCAATTGATCAATCACTAGAAGCTTTAGGGCTTGATTATATTGATTTAATGATTATTCATAGTCCACAGCCTTGGAAGGAATGGCGTGAAACAGATAAACATTTTGACCAAGGAAATTTAGAAGCTTGGAGAGCTTTAGAGGATGCTCAAAAATCTGGTAAGATGAAATCCATCGGTGTCTCAAACTTTTTAGAAAAAGACTTAGAAAATATCTTAAAAAATGGTCATGTTAAACCTGCTGTCAATCAAATCTTAGCTCACATCGGAAATACACCTTTCGACTTGATTGATTACTGTCAAAGTAAAGGTATTCAAGTTGAAGCCTATTCACCAATTGCACATGGACAAGCATTGAAATCTGATGGTATTCAAAAAATGGCTGAAAAATATGGGGTTAGTGTTGCTCAATTATGTATTCAATATTTACTACAATTAAACCTGATCGTTTTACCAAAGGCTTCTAGTAAAGAACATTTACAGTCTAATCTAGACTTTGACTTTGTAATTAGTGACGAAGATATGTCGATATTAAAATCACTTATGTTTGACGATTATGGGGAATTTTCTAACTTCCCTGTTTTTAGTGGAAAATGA

SEQ ID NO: 876 - protein, 284 aa, Streptococcus agalactiae
MTDTMILNDNHKIPTLGLGTWMIDNDRVAQVVKDAIELGYRHIDTAQAYNNEKGVGVGIKESGITRESLFVTTKIAAEHKDYESATKSIDQSLEALGLDYIDLMIIHSPQPWKEWRETDKHFDQGNLEAWRALEDAQKSGKMKSIGVSNFLEKDLENILKNGHVKPAVNQILAHIGNTPFDLIDYCQSKGIQVEAYSPIAHGQALKSDGIQKMAEKYGVSVAQLCIQYLLQLNLIVLPKASSKEHLQSNLDFDFVISDEDMSILKSLMFDDYGEFSNFPVFSGK

SEQ ID NO: 877 - protein, 591 aa, Streptococcus agalactiae
ATGATAGAAAATATCCCAAAATTGTGGCATCCTACTCCTGTTAATTATCACGGCATGTTTATTCTAGCTGTCATCGCTATTATCATTAATGGTCTAGCTAGTTTTATTCTCCATTCTGGTCAAAGTAAACATGAGGAAATATTAAGCCTTCATTTTTTGGAAGATATTCTAGGGTGGTTAGCTATTATTGTTATATCTCTTATCTTAAATTGGAAACCGTTGTATATCCTTGATCCATTATTATCAGTTGCCATATCTACTTTCATCTTATCTAAAGCACTTCCTAAATTACTATCAACCCTGAAACTTTTTTTAGATGGTGTTCCAGATTCCATAGATTACGCTGCATTACATGATGAACTTAAGGGACTTTCGCAAGTAAGATCTATCAATCAACTCAATATCTGGTCAATGGATGGTATTGATAATCGAGCAATCATTCACTGTTGCTTAAATCAATTGATATCTGAAAAAGATTGTAAAAGAGCTATTCGAACGATTTGCCAACATTATAAGATAAACGATGTTACTGTTGAAATCGATTATTCTTTAAGAGAACATCAAAATCATTGCAAACCATTAAAAAACTAA

SEQ ID NO: 878 - protein, 196 aa, Streptococcus agalactiae
MIENIPKLWHPTPVNYHGMFILAVIAIIINGLASFILHSGQSKHEEILSLHFLEDILGWLAIIVISLILNWKPLYILDPLLSVAISTFILSKALPKLLSTLKLFLDGVPDSIDYAALHDELKGLSQVRSINQLNIWSMDGIDNRAIIHCCLNQLISEKDCKRAIRTICQHYKINDVTVEIDYSLREHQNHCKPLKN

SEQ ID NO: 879 - protein, 384 aa, Streptococcus agalactiae
ATGAATTATGAAGCAAGCAAACAATTAACTGATGTACGATTTAAGCGCCTTGTTGGTGTTCAGCGCACTACTTTTGAAGAGATGTTAGCTGTGTTAAAAACAGCTTATCAACGTAAACACGCAAAAGGTGGCCGAACCCCTAAGTTAAGCTTAGAAGATCTCCTCATGGCTACTCTTCAATACATGCGAGAATACCGCACTTATGAACAAATTGCGGCTGATTTTGGCATTCACGAAAGCAACTTAATCCGTCGAAGTCAATGGGTTGAATCAACTCTTATTCAAAGTGGTTTTACGATTTCAAAAACTCATCTTAGTGCTGAGGATACGGTGATTGTGGATGCAACAGAGGTAAAAATCAATCGTCCTAAAAAAATCAACTAG

SEQ ID NO: 880 - protein, 127 aa, Streptococcus agalactiae
MNYEASKQLTDVRFKRLVGVQRTTFEEMLAVLKTAYQRKHAKGGRTPKLSLEDLLMATLQYMREYRTYEQIAADFGIHESNLIRRSQWVESTLIQSGFTISKTHLSAEDTVIVDATEVKINRPKKIN

SEQ ID NO: 881 - protein, 390 aa, Streptococcus agalactiae
ATGAAGGCTCAGGCGATTGTCACAAGCCAAGGGAGAATTGTTTCTTTGGATATTGCAGTGAACTATTGCCACGATATGAAGTTGTTCAAAATGAGTCGCAGAAACATCGGACAAGCTGCTAAAATCTTGGCAGACAGTGGTTATCAAGGGATCATGAAGATGTATTCACAAGCGCAAACTCCGAGGAAATCAAGCAAACTTAAGCCACTAACTCTTGAAGATAAAACCTATAACCATACGCTATCCAAAGAGAGAATCAAGGTTGAGAATATTTTTGCCAAAGTAAAAACGTTTAAAATATTTTCAACAACCTATCGAAATCGACGCAAACGGTTTGGATTACGAATGAATTTGATTGCTGGAATGATCAACCGTGAACTAGGATTTTAG

SEQ ID NO: 882 - protein, 129 aa, Streptococcus agalactiae
MKAQAIVTSQGRIVSLDIAVNYCHDMKLFKMSRRNIGQAAKILADSGYQGIMKMYSQAQTPRKSSKLKPLTLEDKTYNHTLSKERIKVENIFAKVKTFKIFSTTYRNRRKRFGLRMNLIAGMINRELGF

SEQ ID NO: 883 - protein, 390 aa, Streptococcus agalactiae; identical to SEQ ID NO: 881

SEQ ID NO: 884 - protein, 129 aa, Streptococcus agalactiae; identical to SEQ ID NO: 882

SEQ ID NO: 885 - protein, 525 aa, Streptococcus agalactiae
ATGGTAAAAGATAGACAAATTCAGAAAACAAAAGTAGCGATTTATAATGCTTTTATAAGCTTGCTACAGGAAAATGATTATTCTAAAATAACGGTTCAAGATGTAATCGGACTTGCAAATGTAGGAAGATCAACTTTTTACTCTCACTATGAAAGCAAAGAAGTGTTACTCAAGGAGCTCTGTGAAGACCTTTTTCACCACTTATTTAAGCAGGGTAGAGATGTTACGTTTGAAGAGTATTTAGTTCATATCTTAAAACATTTTGAACAAAATCAAGATAGTATCGCTACGTTATTATTATCTGACGATCCCTATTTTTTATTACGCTTTAGAAGTGAATTAGAACACGATGTTTACCCTAGATTGCGTGAGGAGTATATTACAAAGGTGGACATTCCTGAAGATTTCTTAAAACAATTTCTTTTATCCAGTTTTATCGAGACCTTAAAGTGGTGGCTTCATCAAAGACAGAAAATGACTGTTGAAGATTTACTAAAATATTATTTAACTATGGTAGAGAGGTAA

SEQ ID NO: 886 - protein, 174 aa, Streptococcus agalactiae
MVKDRQIQKTKVAIYNAFISLLQENDYSKITVQDVIGLANVGRSTFYSHYESKEVLLKELCEDLFHHLFKQGRDVTFEEYLVHILKHFEQNQDSIATLLLSDDPYFLLRFRSELEHDVYPRLREEYITKVDIPEDFLKQFLLSSFIETLKWWLHQRQKMTVEDLLKYYLTMVER

SEQ ID NO: 887 - protein, 1095 aa, Streptococcus agalactiae
ATGNNNNNCTATTTCACTTTTTTACATCATTACCTTATTTTAAGTAACTTTAGTAAAACTCAACATGATTTTTTATTTCATTATGGCTCTTTAGGAGAACTTTTTCTTGTCCACCATATTCAACAATATTATATTATCATCGGTCCCTGGCGTAGCAATGTTATTGACCCTTTACTTCTTAAGAAAAAGCTGACTGAAACACAAATCAATGCTAGTGAACAAGACTACTTTATTGATAGACTATCCCAATTACCTTTCTTCTCACTTAGTCAAATCCGAGAATTACTAATAGTAACCAATTATTGTCTAACTGGGGTTGTGAAAGATAAATTATCAGAGCCCTTACATTACTACACGAAAGGGTGGAGCAACTCCTTTGATCTAGATAAAATTAAGCAATTTTCTAAACAGAATATGAGTTCTTACAAATATCAGTATCATTTTGAAAATAATATTCTAAAAGCTGTTAAATCAGGTAGTGAATTTCTTTTGAAAGAAACAGTGGAACAATTTAGCAATTCTATCGTACCTATAATCAGTGGAGATGAATTGCGATCTGAAAAAAACTACTCCATCATGATTTATGATCGTCTCTCACAGGCTACCATCCAAGCAGGACTTGATATCGAAACAGCTTATCGAGCACGAGATCGTTTTATAAAAGAAAACGAGTCAACTATAAGTCTAAATGAAGTTTTAAAATTACGTGATACTGCTATCTTATTCTATACTCAACAAGTTCATTCTTTAAAAAAACATCTCGAAACCCCTCATTCTCAAACTATTGTCGCAGTGATTCGATATCTTGAAAATAATCTAAATCGCTTTATTAAAACAGAAGAAATAGCTAAAGAATGTCACATGAGTGAATCGAAGTTACGAAAACTATTTAAGCAAGAAAAACACATCACTATTCAACAATATTTTCTAAACTTAAAAATCGAAGCTGCTAAGCAATTACTAGATGAAAATAAGAAAGTAGAAGAAGTTTCCAATTTACTTGGATTTTCCACTTCTTCTAATTTTTCAAGGACATTTAAAAAAATAGTGGGAATTAGCCCACTAGAATATAAGCAAAAGCCTAAGACAATATAG

SEQ ID NO: 888 - protein, 364 aa, Streptococcus agalactiae
  VARIANT 2, 3: Xaa = Any Amino Acid
MXXYFTFLHHYLILSNFSKTQHDFLFHYGSLGELFLVHHIQQYYIIIGPWRSNVIDPLLLKKKLTETQINASEQDYFIDRLSQLPFFSLSQIRELLIVTNYCLTGVVKDKLSEPLHYYTKGWSNSFDLDKIKQFSKQNMSSYKYQYHFENNILKAVKSGSEFLLKETVEQFSNSIVPIISGDELRSEKNYSIMIYDRLSQATIQAGLDIETAYRARDRFIKENESTISLNEVLKLRDTAILFYTQQVHSLKKHLETPHSQTIVAVIRYLENNLNRFIKTEEIAKECHMSESKLRKLFKQEKHITIQQYFLNLKIEAAKQLLDENKKVEEVSNLLGFSTSSNFSRTFKKIVGISPLEYKQKPKTI

SEQ ID NO: 889 - protein, 1563 aa, Streptococcus agalactiae
ATGTTTAGAAGGTCTAAAAATAACAGTTATGATACTTTACAGACGAAACAACGGTTTTCAATTAAGAAGTTTAAGTTTGGTGCAGCTTCTGTACTAATTGGTATTAGTTTTTTAGGAGGTTTTACTCAAGGGCAATTTAATATTTCTACAGATACTGTGTTTGCAGCTGAAGTAATTTCAGGAAGTGCTGTTACGTTAAACACAAATATGACTAAAAATGTTCAGAATGGTAGAGCATATATAGATTTATATGATGTGAAAAATGGGAAAATAGATCCATTACAATTAATTACGTTAAATTCACCTGATTTAAAAGCTCAGTATGTCATTAGGCAAGGCGGCAATTATTTCACACAACCTTCTGAATTGACTACTGTTGGTGCAGCTAGTATTAATTATACAGTATTGAAGACAGATGGAAGTCCTCATACGAAGCCTGATGGACAAGTGGATATTATAAACGTTTCATTGACTATTTACAATTCTTCAGCTTTGAGAGATAAAATAGATGAAGTTAAAAAGAAAGCGGAAGACCCTAAATGGGACGAGGGAAGTCGCGATAAAGTTTTGATAAGTTTAGATGATATCAAAACAGATATTGATAATAATCCTAAGACGCAATCAGACATTGCCAATAAAATAACTGAAGTTACTAATTTAGAAAAAATACTAGTACCTCGAATCCCAGATGCCGATAAGAATGATCCAGCAGGTAAAGATCAGCAAGTCAATGTAGGTGAGACACCGAAGGCAGAAGATTCTATTGGTAACTTACCAGATCTTCCGAAAGGTACAACAGTAGCCTTTGAAACTCCAGTTGATACGGCAACACCGGGAGACAAACCAGCAAAAGTTGTTGTGACTTACCCAGATGGTTCAAAAGATACTGTAGATGTGACTGTTAAGGTTGTCGATCCACGTACAGATGCCGATAAGAATGATCCAGCAGGTAAAGATCAGCAAGTCAATGTAGGTGAGACACCGAAGGCAGAAGATTCTATTGGTAACTTACCAGATCTTCCGAAAGGTACAACAGTAGCCTTTGAAACTCCAGTTGATACGGCAACACCGGGAGACAAACCAGCAAAAGTTGTTGTGACTTACCCAGATGGTTCAAAAGATACTGTAGATGTGACTGTTAAGGTTGTCGATCCACGTACAGATGCCGATAAGAATGATCCAGCAGGTAAAGATCAGCAAGTCAATGTAGGTGAGACACCGAAGGCAGAAGATTCTATTGGTAACTTACCAGATCTTCCGAAAGGTACAACAGTAGCCTTTGAAACTCCAGTTGATACGGCAACACCGGGAGACAAACCAGCAAAAGTTGTTGTGACTTACCCAGATGGTTCAAAAGATACTGTAGATGTGACTGTTAAGGTTGTCGATCCACGTACAGATGCCGATAAGAATGATCCAGCAGGTAAAGATCAGCAAGTCAATGGTAAAGGAAATAAACTACCAGCAACAGGTGAGAATGCAACTCCATTCTTTAATGTTGTAGCTTTGACAATTATGTCATCAGTTGGTTTATTATCTGTTTCTAAGAAAAAAGAGGATTAA

SEQ ID NO: 890 - protein, 520 aa, Streptococcus agalactiae
MFRRSKNNSYDTLQTKQRFSIKKFKFGAASVLIGISFLGGFTQGQFNISTDTVFAAEVISGSAVTLNTNMTKNVQNGRAYIDLYDVKNGKIDPLQLITLNSPDLKAQYVIRQGGNYFTQPSELTTVGAASINYTVLKTDGSPHTKPDGQVDIINVSLTIYNSSALRDKIDEVKKKAEDPKWDEGSRDKVLISLDDIKTDIDNNPKTQSDIANKITEVTNLEKILVPRIPDADKNDPAGKDQQVNVGETPKAEDSIGNLPDLPKGTTVAFETPVDTATPGDKPAKVVVTYPDGSKDTVDVTVKVVDPRTDADKNDPAGKDQQVNVGETPKAEDSIGNLPDLPKGTTVAFETPVDTATPGDKPAKVVVTYPDGSKDTVDVTVKVVDPRTDADKNDPAGKDQQVNVGETPKAEDSIGNLPDLPKGTTVAFETPVDTATPGDKPAKVVVTYPDGSKDTVDVTVKVVDPRTDADKNDPAGKDQQVNGKGNKLPATGENATPFFNVVALTIMSSVGLLSVSKKKED

SEQ ID NO: 891 - protein, 294 aa, Streptococcus agalactiae
ATGTCAACAGTAGCAGTAAGAGTTGATGATCAATTAAAAGATGATGCTACAGAACTTTTTCAATCCTTAGGGTTGGATATGAGCACAGCAGTAAAAATGTTTTTGATTCAATCTGTTAAAACTCAAAGTATTCCTTTTGAAATAAAAAATAAATCATCTGTTTCTGATGAAGAATTTCAAAATTTGGTAGAAACAAAATTAAAGGGAATACGAGTTAAGGCTAGTGATCCAGAAAGTGTAAATGCGTTTTTTGGAGATGAAGATTTTTCAGAATATGAGGAATATTTTAAATGA

SEQ ID NO: 892 - protein, 97 aa, Streptococcus agalactiae
MSTVAVRVDDQLKDDATELFQSLGLDMSTAVKMFLIQSVKTQSIPFEIKNKSSVSDEEFQNLVETKLKGIRVKASDPESVNAFFGDEDFSEYEEYFK

SEQ ID NO: 893 - protein, 189 aa, Streptococcus agalactiae
ATGAGTGATATTGAGGTATATTCTGTATTAGTTTCTCGTATTGAATATTCTGATGGTACAGGTTCAAAGGTTCGTCCTGCTGTAGTAGTCAAATTTAATGATGAAGTAATAAAAACTTTAAGATTTACTACTAAATATGAAAATAAGTCTGACAATATAAGAAGTCAGTATTTAGAAGTTATTGATTAG

SEQ ID NO: 894 - protein, 62 aa, Streptococcus agalactiae
MSDIEVYSVLVSRIEYSDGTGSKVRPAVVVKFNDEVIKTLRFTTKYENKSDNIRSQYLEVID

SEQ ID NO: 895 - protein, 345 aa, Streptococcus agalactiae
ATGNNNNNTATATCTACAGTATTTTTAGTTGCTTGTTCGACTAATTCGTTAAATGTAAAGTATTATAAAGTATATGATGGTGAAAAAATGTTAGTTTTAGAAATTAATGATGAATCAGGAATTTATCATAATGAAGGAAACTTTGTAGTAACTAATATTGATACTAAAAGTAAAAGTTTTGTACTTAAAGGTGGGTCTGCTAAGTATACTGTTTTATATGATGTTAAAAGTGATGGTAAATTGAATGTTGATTTAGGGAACTTTTATTATAATGCTTCTGGTAAGGAGACATATTATAAAGAAGGTAGCAAGGCTTTAGAAAAAGCATTAAGAGATAAAGAATAA

SEQ ID NO: 896 - protein, 114 aa, Streptococcus agalactiae
  VARIANT 2, 3: Xaa = Any Amino Acid
MXXISTVFLVACSTNSLNVKYYKVYDGEKMLVLEINDESGIYHNEGNFVVTNIDTKSKSFVLKGGSAKYTVLYDVKSDGKLNVDLGNFYYNASGKETYYKEGSKALEKALRDKE

SEQ ID NO: 897 - protein, 300 aa, Streptococcus agalactiae
TTGCTTGAACTAAAATTTCAACAAGAAAGAATGCTGAAAGGTTTGCATATAAAAAATACAGATCAATTGATTTTTTATGACTATAGGTTTGGTATGATATCAAATGATGCTGTTAACAAATTCTTGGCAAGCTCATTGGAAAAATTAGAAATAGAATCTAAGATGTCATCAACAGGTGCTAGACATACTTATGGAAGTTATTTGTTGGCTAACGGAGTAGATATTTGGGCGGTTGCAAAATTAATGGGGCATAAAGATATCAAACAATTAATAGAAACATATGGTCATTTGCTTCTGTAA

SEQ ID NO: 898 - protein, 99 aa, Streptococcus agalactiae
MLELKFQQERMLKGLHIKNTDQLIFYDYRFGMISNDAVNKFLASSLEKLEIESKMSSTGARHTYGSYLLANGVDIWAVAKLMGHKDIKQLIETYGHLLL

SEQ ID NO: 899 - protein, 249 aa, Streptococcus agalactiae
ATGTCCCCGTTAGGAATGATTAAAGATGAAGGTTTATTCAATACCATTAAAATCATCAGCCGGGGACTGAAAAATGAACGATGCCCTCATCCAAAATTAATAAATGTTTTGGAAAGAAAACTTGAAATTATCCTTGGTGATCAGAAACATATCCTTGAAAAAGATAGCCTTATTAGCCTCTCTCCACAAGAAACACACCATTTAAGAGCTATTGAAAATAGTAAATTTCTCCAAATAGAATTAGACTAA

SEQ ID NO: 900 - protein, 82 aa, Streptococcus agalactiae
MSPLGMIKDEGLFNTIKIISRGLKNERCPHPKLINVLERKLEIILGDQKHILEKDSLISLSPQETHHLRAIENSKFLQIELD

SEQ ID NO: 901 - protein, 216 aa, Streptococcus agalactiae
ATGTTAACGATGCTTAACAATTCAGCTAAGGAGAAAGCCATAAAAGAGTACTTACGTGTCCTAAAACCTGGTGGACGTTTACTCACACATGATGTTTCTTATCAAGATGAAGACACTGCCAAGCTGATCGATCAACTTAGACATACTATGAATGTTAACGTTGCTCCTCTAAAAATAGATGATTGGCAAAATTTATTCTTACAAAATGGTTTTTAA

SEQ ID NO: 902 - protein, 71 aa, Streptococcus agalactiae
MLTMLNNSAKEKAIKEYLRVLKPGGRLLTHDVSYQDEDTAKLIDQLRHTMNVNVAPLKIDDWQNLFLQNGF

SEQ ID NO: 903 - protein, 255 aa, Streptococcus agalactiae
ATGTCATACGAACAAGAATTTTTAAAAGACTTTGAAGAGTGGTTACAATCGCAAATAAGTATCAACCAAATGGCAATGGACAGTGCAAAGAAAGTTTTAGAGGAAGATAAGGATGAGCGAGCAGCAGATGCGTATATTCGTTATGAGAGTAAGTTAGACGCTTATCGCTTTTTGCAAGGGAAATTTAATAACTATCATAACCAAAAATCTTTCCATGATTTGCCTGATGGTCTTTTTGGACAACGTCATTATTAA

SEQ ID NO: 904 - protein, 84 aa, Streptococcus agalactiae
MSYEQEFLKDFEEWLQSQISINQMAMDSAKKVLEEDKDERAADAYIRYESKLDAYRFLQGKFNNYHNQKSFHDLPDGLFGQRHY

SEQ ID NO: 905 - protein, 312 aa, Streptococcus agalactiae
ATGGCAAAGCGTATTAAACCGAATAAAAAAAGAGAGCTTTTGAAAGCTAAAGGGATCAATTGGAAGGATGTTCGACTATCTCAAACTTTACAAGAAGTCGCATTACCGAAAAAGACGGCTCCTGAAGCGCCAAAGGCAGTCGATCTTTTAGAAGGTTTAACTGCTAATAAACAAGATGTTTTAAAAGAAGCTGGCCTTGTCAGCCTTGAAGCATTTGCGAAAGTAAGTGAAGCAGATGTTTTAGCACTAAAAGGTATTGGTCCAGCAGCTATTAAACAGTTAGTTGATAATGGTGTTGTTTTTGCAAAATAA

SEQ ID NO: 906 - protein, 103 aa, Streptococcus agalactiae
MAKRIKPNKKRELLKAKGINWKDVRLSQTLQEVALPKKTAPEAPKAVDLLEGLTANKQDVLKEAGLVSLEAFAKVSEADVLALKGIGPAAIKQLVDNGVVFAK

SEQ ID NO: 907 - protein, 570 aa, Streptococcus agalactiae
ATGCAGATTCTAGAAGATTTCGATGGCAAAGCATTACCAAAACTAGAAACGGATCGGCTTATCTTGCGTCAGCGAACGGTGGGGGATGTCCCAGCCATGTTTGATTACGTTTGCTTGGAAGAGGTTGCCTATCCAGCAGGACTCAGCCCAATAGCTTCTTTAGAAGATGAGTACGATTATTTTGAAAATCGCTACTATCAAAATCTGGAAAAGGCAAAATTACCATCTGGTTATGGTATTACCGTTAAAGGAAGTGATCGTATTATCGGATCCTGCGCCTTTAACCATCGCCATGAAGACGATGTTTTCGAGATTTGCTATCTGCTTCATCCTGACTACTGGGGTCATGGCTATATGACAGAAGCTGTCGCCGCTTTGATTGAAGTCGGTTTTACCCTTCTCAATCTCCACAAAATCGAAATCCGCTGCTATGATTACAATAAGCAAAGCCGGCGCGTGGCAGAAAAACTAGGATTCACCCTTGAAGCTACCATTCGTGATCGTAAGGATAATCAAGACAATCGCTGTGTCAATTTGATATATGGTTTGCTGAGGAGTGAGTGGGAGTAA

SEQ ID NO: 908 - protein, 189 aa, Streptococcus agalactiae
MQILEDFDGKALPKLETDRLILRQRTVGDVPAMFDYVCLEEVAYPAGLSPIASLEDEYDYFENRYYQNLEKAKLPSGYGITVKGSDRIIGSCAFNHRHEDDVFEICYLLHPDYWGHGYMTEAVAALIEVGFTLLNLHKIEIRCYDYNKQSRRVAEKLGFTLEATIRDRKDNQDNRCVNLIYGLLRSEWE

SEQ ID NO: 909 - protein, 585 aa, Streptococcus agalactiae
ATGATTAAGATACTTGGAGAAATCGTAGATAACCAGCTACCTGTTGTGGAAACGAATCGTCTGTTGTTGCGTCAACGCAAGTTAGAAGATGCTAAGGAGATATTTGAATTTGTCAAACTTGATGAGGTGAGTTATCCAGCAGGTTTTCCGGCTGTTAAAAGCTTGGAAGAAGAGATAACCTATATTCAAGAGATTTATCCAACTAATCTTGAAAAAGAAAAGTTACCCTCTGGTTATGCTATTACTCTAAAAGGCGATGATAAGGTAATTGGTTCAGTAGATTTTAACCATCGCCACGAAGATGACATTTTTGAAATTGGCTACCTGCTCCACCCTGATTATTGGGGACAAGGCATTGTGCCAGAAGCAGCTTCAGCCCTTGTGGAGATAGGTTTCACACTGCTAGGACTACATAAGATTGAGCTGGGATGCTATGACTATAATAAGCAAAGTCAGGCGGTTGCGCGCAAATTAGGTTTTACTTTAGAGGCTAATATTCGTGATCGAAGAGATGCCCAGGGGAAACGTTGTGGCGATATGCGCTTTGGTTTACTGCGAAGCGAGTGGGAGAAAAAAAGAAGATGA

SEQ ID NO: 910 - protein, 194 aa, Streptococcus agalactiae
MIKILGEIVDNQLPVVETNRLLLRQRKLEDAKEIFEFVKLDEVSYPAGFPAVKSLEEEITYIQEIYPTNLEKEKLPSGYAITLKGDDKVIGSVDFNHRHEDDIFEIGYLLHPDYWGQGIVPEAASALVEIGFTLLGLHKIELGCYDYNKQSQAVARKLGFTLEANIRDRRDAQGKRCGDMRFGLLRSEWEKKRR

SEQ ID NO: 911 - DNA, 567 bp, Streptococcus agalactiae
atgaatattattatcatcggagcacaagcttctgggaaaatgacaattggtcaggaaatcgcaaaacagacaggcatgaccttattccataaccatgattctatagattttgttttacgcttcatgccatggtctccagatagtattgctctaacggagtctattcgctttaaattttttgaaacgtttgctaagactggtcaagaaatgatttttactattgtaattgatttcaatgattcaagagatgtagtatttctagaaaagattcaaatagtttttcaatctcacaaccaagaggtattatttgtagaattagaaacagagctaagtgagcgtctcaaacgaaatcgcacagaaaatcgcctcaagcataagccttcaaaacgtgatatcaaatggtcagagagcgatatttgttcaaccatggattacgctatctttaatcctgaagtagccccagaagcgcttacatattatcataaaatcaataatacttgcttaactgctactgaaacagcatatcttattattcaaaaaataaaccaaatcaaggagaaaaactaa

SEQ ID NO: 912 - protein, 188 aa, Streptococcus agalactiae
MNIIIIGAQASGKMTIGQEIAKQTGMTLFHNHDSIDFVLRFMPWSPDSIALTESIRFKFFETFAKTGQEMIFTIVIDFNDSRDVVFLEKIQIVFQSHNQEVLFVELETELSERLKRNRTENRLKHKPSKRDIKWSESDICSTMDYAIFNPEVAPEALTYYHKINNTCLTATETAYLIIQKINQIKEKN

SEQ ID NO: 913 - DNA, 2652 bp, Streptococcus agalactiae
atgtcaaaagaactatcaccaaaatacaatcctgccgaggttgaggaaggccgttatcaaacttggcttgaccaagatgttttcaagccatcaggggatactgaggctaagccttattctatcgtaattccaccaccaaacgttacgggtaaattgcacttgggtcacgcttgggatacaactctacaagatatcattattcgtcaaaagcgtatgcagggctttgatacactctggcttccaggtatggaccacgctggtatagccactcaagctaaggttgaggagcgccttcgtgagcaaggcatttcacgttatgatcttggtcgtgaaaaattcctagataaagtttgggaatggaaagacgagtatgcagcaactattaaatctcagtggggaaaaatgggtctttcggttgattatagccgtgagcgttttacccttgatgagggactttcaaaagcggtaagaaaagtctttgttgatttgtacaataaaggttggatctatcgtggggagttcatcattaactgggatccagcagctcgcacagccctttcagatattgaagttattcacaaggatgttgagggtgctttctatcatatgaattatatgctggaagatggctcacgcgccctagaagtagcaacaactcgtcctgagactatgtttggagatgtggctgtagcggtaaatccagaagatgcacgttacaaggatttgattggtcaaaatgttatccttcctatcatcaataaacctattccaatcgtcgctgatgaacacgctgatccagaatttggaacaggtgtggttaagattacgccggctcacgaccctaatgactttgctgtaggtcaacgccacaacttaccacaagttaacgttatgaacgatgatggtactatgaatgaacttgcggatgaatttaatggtatggatcgtttcgaagctcgtaaggcagtagtcgctaaattagaatcgttaggaaacttagtaaaaattaaaaaaacgactcattctgttggtcattcagaacgaacaggcgttgtggttgaaccacgtttatctactcaatggttcgtcaagatggatcaattggctaagaatgccattgccaaccaagatacagaagacaaggtagagttttatccaccacgatttaacgatacttttatgagctggatggaaaatgtccatgactgggttatctctcgtcaattatggtggggacaccaaattcctgcatggtacaacgtcaatggtgagatgtatgttggagaagatgccccagagggtgacggatggacacaggatgaagacgttctagacacatggtttagttctgctttatggccgttttcaacaatgggatggccagacaccgaagcagctgacttcaaacgctacttcccaacgtcaaccttggtaactggatacgatatcatcttcttctgggtatcgcgcatgattttccaatcccttgaatttacaggacgccaaccattctcaaatgttcttattcatggactcatccgtgatgaagaaggacgtaaaatgtctaaatcactcggcaacgggattgatccgatggatgtcattgagaaatatggtgcggatgcccttcgttggttcctctcaaatggttcagcccctggtcaagatgtgcgtttttcatacgaaaaaatggatgcttcgtggaatttcattaataagatttggaacatttcacgctatatccttatgaataacgaaggtttaacgttggatcaagccagagaaaatgtggaaaaagttgttaatagtcaagttggaaatgtaacagaccgttggattctccacaatttaaatgagactgtgggtaaagttactgaaaactttgacaagtttgaatttggtgttgctggtcacatcctttacaactttatctgggaagaatttgctaattggtacgttgagttaacaaaagaggttctttatagtgacaatgaagacgagaaagtcatcactcgctctgttcttctttataccttagatcaaatcttgcgtcttcttcatccaatcatgccatttgtgacagaagaaatttttggacaatatgcagaaggatcaattgtccttgcaagttatccacaagttaacgcgacatttgaaaatcaaacagctcacaaaggcgttgaaagcttgaaagatttgattcgttcagtgcgaaatagcagagcagaggtcaatgttgctccatctaaaccaatcactatcttggttaagacaagtgacagcgaactcgaaagcttcttcaaagacaatagcaactacatcaaacgcttcacaaacccagagacgcttgaaatcagctcagcaattgccacaccagaacttgccatgtcatcagtcatcacaggtgcagaaattttcctcccacttgctgacctccttaacgttgaagaagagttggcacgacttgaaaaagaacttgctaaatggcaaaaagaactagatatggttggcaaaaaactcagcaacgagcgctttgtagctaacgctaaaccagaagtcgtccaaaaagaaaaagataaacagaccgactaccaaactaaatacgacgcaaccatagcacgtattgaagaaatgaagaagttggtgaggtaa

SEQ ID NO: 914 - protein, 883 aa, Streptococcus agalactiae
MSKELSPKYNPAEVEEGRYQTWLDQDVFKPSGDTEAKPYSIVIPPPNVTGKLHLGHAWDTTLQDIIIRQKRMQGFDTLWLPGMDHAGIATQAKVEERLREQGISRYDLGREKFLDKVWEWKDEYAATIKSQWGKMGLSVDYSRERFTLDEGLSKAVRKVFVDLYNKGWIYRGEFIINWDPAARTALSDIEVIHKDVEGAFYHMNYMLEDGSRALEVATTRPETMFGDVAVAVNPEDARYKDLIGQNVILPIINKPIPIVADEHADPEFGTGVVKITPAHDPNDFAVGQRHNLPQVNVMNDDGTMNELADEFNGMDRFEARKAVVAKLESLGNLVKIKKTTHSVGHSERTGVVVEPRLSTQWFVKMDQLAKNAIANQDTEDKVEFYPPRFNDTFMSWMENVHDWVISRQLWWGHQIPAWYNVNGEMYVGEDAPEGDGWTQDEDVLDTWFSSALWPFSTMGWPDTEAADFKRYFPTSTLVTGYDIIFFWVSRMIFQSLEFTGRQPFSNVLIHGLIRDEEGRKMSKSLGNGIDPMDVIEKYGADALRWFLSNGSAPGQDVRFSYEKMDASWNFINKIWNISRYILMNNEGLTLDQARENVEKVVNSQVGNVTDRWILHNLNETVGKVTENFDKFEFGVAGHILYNFIWEEFANWYVELTKEVLYSDNEDEKVITRSVLLYTLDQILRLLHPIMPFVTEEIFGQYAEGSIVLASYPQVNATFENQTAHKGVESLKDLIRSVRNSRAEVNVAPSKPITILVKTSDSELESFFKDNSNYIKRFTNPETLEISSAIATPELAMSSVITGAEIFLPLADLLNVEEELARLEKELAKWQKELDMVGKKLSNERFVANAKPEVVQKEKDKQTDYQTKYDATIARIEEMKKLVR

SEQ ID NO: 915 - DNA, 960 bp, Streptococcus agalactiae
atgtcaaaggtaaggtatggtgttgtgtcaacggcaaaggtggcgcctcgttttattgaaggagtccgcttagcaggaaatggtgaagttgtggctgtatcgagtcgaactcttgagtctgcgcaagcttttgccaacaaatatcatctcccaaaggcttacgataagttagaggatatgttagcagatgagtcaattgatgtgatttatgtggcaacaattaatcaagaccattataaagttgctaaagcagctctgttagcgggaaaacatgtgttggtagaaaagcctttcacattgacttacgaccaagcgaatgaattattcgctttggcagaaagttgtaatctgtttttgatggaggcacaaaaatcggtatttattccgatgacacaagtgattaaaaaattacttgcctctggtgaaataggagaagtgatctccatctcatctacaacagcctacccaaacattgaccatgtaacatggtttagagaacttgagttaggtggaggaacagtgcattttatggcgccctacgccctgtcttatttacaatatctatttgatgcgactataactcatgctagtgggactgcgacttttccaaaaggtcaaagcgatagtcaatccaaactactcttgcaattatcaaatggggtcctcgtagatatcttcttgacaacacgtctaaatttaccgcatgaaatgattatttatggaactgaaggtcgtctaatcattccacatttttggaaaaccactcatgcaaaattggtgagaaatgatactagtgcgcgaacgattcaagttgacatggttagtgattttgagaaagaagcttatcatgttagtcaaatgattttagaagggcaaagggtaagtcatatcatgacgcctcagttgacgctgtcaggtgttaagattatagaagacttataccgttcatgggggaaatga

SEQ ID NO: 916 - protein, 319 aa, Streptococcus agalactiae
MSKVRYGVVSTAKVAPRFIEGVRLAGNGEVVAVSSRTLESAQAFANKYHLPKAYDKLEDMLADESIDVIYVATINQDHYKVAKAALLAGKHVLVEKPFTLTYDQANELFALAESCNLFLMEAQKSVFIPMTQVIKKLLASGEIGEVISISSTTAYPNIDHVTWFRELELGGGTVHFMAPYALSYLQYLFDATITHASGTATFPKGQSDSQSKLLLQLSNGVLVDIFLTTRLNLPHEMIIYGTEGRLIIPHFWKTTHAKLVRNDTSARTIQVDMVSDFEKEAYHVSQMILEGQRVSHIMTPQLTLSGVKIIEDLYRSWGK

SEQ ID NO: 917 - DNA, 864 bp, Streptococcus agalactiae
atgttttcgagcgattttggatttgagataattaatgttgacgacctatccttgcaagaggagagatttttaccttcagaattgctggcttatgcacgtgatgaaaatgagtcttctttcgtacgtgatattgaggggcatttggcacttgtttaccagcttttggatacgcaaggtcacgttgatgatgttcgtcatgtgccgagagtgataccagtgactctatttttgaaagaagatggcttgtttgtattagctaatcataaaaatattaaccttgtaaaaaaagcacttaatcgtgttgaaaaggtagattctccgaaacacctcttattatcattagtgactgctttctcaaagcaatattttgatgttttagatactatttctgaagaaagagataaactaatcaatgatttgcgtaaaagaccaaacaaatcgaacttggcaaggctggcaaatttacaaagtggaacagtacacttaatgatgggaactaagcaaaattttgaaatgctgaccgatttacaaaacattgagcaagataaagagaacactagaaatgaaaagatgcaacttcaagatgctattattgaagcaagacaattatctaacatgtgttccttaaattcacaggttttccaagaactttcttcttataataatgtcctcagcaataaccttaacgacaatgtaactactttaacaattatttccattggtatttccattattgctatggttaccagtttttatggaatgaatgttaagttgccttttgatagtgtggatgctgtctgggtattgattattttaattacgactatcattactattatgctctctattgttatgtacatttag

SEQ ID NO: 918 - protein, 287 aa, Streptococcus agalactiae
MFSSDFGFEIINVDDLSLQEERFLPSELLAYARDENESSFVRDIEGHLALVYQLLDTQGHVDDVRHVPRVIPVTLFLKEDGLFVLANHKNINLVKKALNRVEKVDSPKHLLLSLVTAFSKQYFDVLDTISEERDKLINDLRKRPNKSNLARLANLQSGTVHLMMGTKQNFEMLTDLQNIEQDKENTRNEKMQLQDAIIEARQLSNMCSLNSQVFQELSSYNNVLSNNLNDNVTTLTIISIGISIIAMVTSFYGMNVKLPFDSVDAVWVLIILITTIITIMLSIVMYI

SEQ ID NO: 919 - DNA, 1176 bp, Streptococcus agalactiae
atgacccagtttaccacagaattacttaacttcctagctcaaaaacaagatattgatgaatttttccgttcgtctcttgaaactgccatgaatgaccttctccaagtggagctatccgccttccttggctatgaaccatacgataaggcaggttacaacaccggtaatagtcgtaatggtgcttatacacgtcgatttgagaccaagtatggkgttgttaatttgttgatccctagagatcgaaacggggagttcagtccagccttaatcccaagttacggtcgtcgagacaatcatttagaagaaatggttatcaagctttatcgaactggagtcacaacacgtgaaatcagcgacatcattgagcgtatgtatggtcatcattacagtccagcaacagtatctaatatctcgaaagcgacacaggaaaacgtggctagctttcatgaacgttccttagaagctaactataccgtattatatcttgatgggacttaccttcctctgagacgtggtacagttagtaaggaatgcatccacattgcactaggcgtcacatcatatgggcataaggctatccttggatatgacatcgcacccaatgaaaacaatgcttcgtggtcagaccttctagaaagatttaagggtcaaggtgtacaacaagtctctcttgttgtgagtgatggttttaatggacttgatcagcttatccagcaagccttcccaatggccaaacaacagcgttgccttgtccatattggccgaaatattgcaagtaaggtgaaacgagcagatcgtgctctaattttggagcagtttaaaacaatttatcgcgcgatcaatgtagaggaagcaaagcaagccttagatagctttatcaatgagtggaaaccacactacaagaaggtaatagagaccttagaatcaatcgaaaatctattgatcttttatgaatttcctcatcagatctggggaagtatctactcgaccaaccttattgaatcacttaacaaagaaatcaaacgtcaaaccaaaaagaaagtcgtctttcccaatgaagaatccctagaacgctatctcgtcacactatttagtgattacaacttcaagcaaggacaacgaatccacaaaggttttggccaatgtacggacacacttgaaagcctatttgattaa

SEQ ID NO: 920 - protein, 391 aa, Streptococcus agalactiae
MTQFTTELLNFLAQKQDIDEFFRSSLETAMNDLLQVELSAFLGYEPYDKAGYNTGNSRNGAYTRRFETKYGVVNLLIPRDRNGEFSPALIPSYGRRDNHLEEMVIKLYRTGVTTREISDIIERMYGHHYSPATVSNISKATQENVASFHERSLEANYTVLYLDGTYLPLRRGTVSKECIHIALGVTSYGHKAILGYDIAPNENNASWSDLLERFKGQGVQQVSLVVSDGFNGLDQLIQQAFPMAKQQRCLVHIGRNIASKVKRADRALILEQFKTIYRAINVEEAKQALDSFINEWKPHYKKVIETLESIENLLIFYEFPHQIWGSIYSTNLIESLNKEIKRQTKKKVVFPNEESLERYLVTLFSDYNFKQGQRIHKGFGQCTDTLESLFD

SEQ ID NO: 921 - protein, 1065 aa, Streptococcus agalactiae
ATGTCAATAGAATCAGATTTTTTCCGGAAAAAACGTTTTATTTTTTCATCGCTTGAGGAGTTTGGATTTATCAAATCTGACCAAGAGTATATCTATTGTCAAACATTTATGGATAATGACTTTAAAGCTATTATCACGATTTCATTGGATGGAAAGATAGCTGGTAAGGTTATTGATTCGGCACTTGAAGAAGAATATTTACCGCTTCGAGCAGCAAATTATAATGGTTCGTTTGTTGGCGAAGTACGATCGGCTTATATGGCTATATTAGGTGATATTTCAGATTCTTGTTGTAAGGACTTATTATTTACCAAAGATCAAAGTAATCGTTTAGCGGAGAAGATAGCTAAAACTTTTGAAGATTCAGTTGATTATCCATTTGCGAAGCACCCACAATATGCTTCCTATCGTGTGTCAGGTAAATGGTATGCTCTGCTTTTTCCATTGAAGATGGGGAAACTAGAAAATGTTCCAGCTCAACTGTCAGAAGATGAGGTTGAAGTTTTGAATATTAAAGTCAATCCTCAAGATATGGAAATACTTTTACAAAAAGAAGGTATTTATCCTTCTTATCATATGTCTAAAAAGACTTGGGTATCTATCGTTTTAGACAATACTTTGTCTGATATAGAAATTTTTAAATTGGTATCAGATAGTCGTAAGCTTGTTTCTCACAATAAAAAATCAAATTCTGAGCCAGAGTTTTGGATTATTCCTGCTAATCCTAAATTTTACGATATTGATAAGGAGTTTGCAGAGCATCAATTGATTGATTGGACTCAAAAAGGAAAGATTGCGGTGGGAGATTATGTGTTTATTTATATTACAGCACCTATTCGTGCTTTGCGCTATGTCTGTCAAGTGATAGAACGTGACCTTAAAACAAGTACTTACTTAGGAGCAAGAGATGTCAAAGCTTATATGCGACTCAAACTGATAAGGCAATTTGAAGATTCTACCTATCCTGTAGCATTTTTAGCAGAACACGGCGTTAAGACTGTGAGAGGACCACGGCGAATGACCAAGGAATTGCGACAAGTCATGGCAAAAACAATTCTAGAGTAA

SEQ ID NO: 922 - protein, 354 aa, Streptococcus agalactiae
MSIESDFFRKKRFIFSSLEEFGFIKSDQEYIYCQTFMDNDFKAIITISLDGKIAGKVIDSALEEEYLPLRAANYNGSFVGEVRSAYMAILGDISDSCCKDLLFTKDQSNRLAEKIAKTFEDSVDYPFAKHPQYASYRVSGKWYALLFPLKMGKLENVPAQLSEDEVEVLNIKVNPQDMEILLQKEGIYPSYHMSKKTWVSIVLDNTLSDIEIFKLVSDSRKLVSHNKKSNSEPEFWIIPANPKFYDIDKEFAEHQLIDWTQKGKIAVGDYVFIYITAPIRALRYVCQVIERDLKTSTYLGARDVKAYMRLKLIRQFEDSTYPVAFLAEHGVKTVRGPRRMTKELRQVMAKTILE

SEQ ID NO: 923 - protein, 993 aa, Streptococcus agalactiae
ATGAAGAAAAGCTTTATTCATCAGCAACAGGAGATTTCTTTTGTCAAAAATACTTTTACACAATATTTGATTGATAAGTTAGAAATCGTCGAAGTGCAAGGACCTATTCTTAGTCAGGTCGGGGATGGTATGCAAGATAATTTATCTGGTATTGAACATCCTGTATCGGTGAAAGTCCTTAATATACCTGAAGCTGAATTTGAAGTCGTTCACTCATTGGCTAAATGGAAACGCCATACTTTGGCAAGATTKGGGTTTAATGAGGGAGAAGGTCTTTTTGTTCATATGAAAGCTCTTCGTCCAGATGAAGATTCTCTTGATCCAACACACTCAGTTTACGTAGATCAGTGGGACTGGGAGAAGGTCATTCCTGATGGTAGACGTAATTTGGACTATCTAAAAGAAACTGTGGAAAAAATCTACAAAGCTATCCGCCTAACAGAGCTTGCCGTGGAAGCTCGTTTTGATATTGAATCCATTTTACCAAAGCGTATTACCTTTATTCATACAGAAGAATTGGTAGAAAAATACCCAGACTTAAGCCCTAAAGAGCGTGAAAATGCCATCGCTAAGGAGTATGGCGCAGTCTTTTTGATTGGTATTGGTGGAGAGTTAGCAGATGGTAAACCACATGATGGTCGTGCACCGGACTATGATGACTGGACAACACCATCAGAAAATGGTTTTAAAGGTCTCAATGGTGATATTTTAGTGTGGAACGAACAGCTTGGAACTGCCTTTGAACTATCATCAATGGGAATTCGAGTTGATGAAGATGCTCTTAAACGTCAAGTTGTTCTCACCGGTGATGAAGATCGTTTAGAGTTTGAGTGGCATAAGACGCTATTACGTGGTTTCTTCCCTCTGACTATTGGTGGGGGAATTGGTCAATCACGATTAGCTATGTTCTTGCTTCGTAAAAAACATATTGGAGAAGTACAGTCAAGTGTCTGGCCAAAAGAAGTCAGAGATACCTTTGAAAATATATTATAA

SEQ ID NO: 924 - protein, 330 aa, Streptococcus agalactiae
  VARIANT 84: Xaa = Any Amino Acid
MKKSFIHQQQEISFVKNTFTQYLIDKLEIVEVQGPILSQVGDGMQDNLSGIEHPVSVKVLNIPEAEFEVVHSLAKWKRHTLARXGFNEGEGLFVHMKALRPDEDSLDPTHSVYVDQWDWEKVIPDGRRNLDYLKETVEKIYKAIRLTELAVEARFDIESILPKRITFIHTEELVEKYPDLSPKERENAIAKEYGAVFLIGIGGELADGKPHDGRAPDYDDWTTPSENGFKGLNGDILVWNEQLGTAFELSSMGIRVDEDALKRQVVLTGDEDRLEFEWHKTLLRGFFPLTIGGGIGQSRLAMFLLRKKHIGEVQSSVWPKEVRDTFENIL

SEQ ID NO: 925 - protein, 450 aa, Streptococcus agalactiae
ATGATTAAAAAACTATTATTAACTTTAATAGCCATATTATGCCTTACAACGCTAAAATCAAACTTAAGTAGCGCTGACACCATGACTATTTCTCAACAACAATACCAACACATGATAACAAATAGTGACTTAATCGCCATCACAGATAAGGCGTTAGTAAGCAAAAGTCAACAATCTGAAGCGACTATTTTTATAGGACGTCCAACTTGCCAATATTGTAGAGCTTTCTTACCAAAATTATTAAAATCTCAAGCCACACTTCATTCAAAAATTTACTACCTTGATAGTCAAAAATACAAAGGGAAACGATTGAAGAGTTTTTTCAAAAAGCATCATATTACCACTGTTCCAAATTTAGCACATTATCAACAAGGAAAAATGACTAAATATCTTGTTCAAGGAAGCCAAGCTACACCTCAACAAATCCAAACTTTCTTAAGCCAAAAATAA

SEQ ID NO: 926 - protein, 149 aa, Streptococcus agalactiae
MIKKLLLTLIAILCLTTLKSNLSSADTMTISQQQYQHMITNSDLIAITDKALVSKSQQSEATIFIGRPTCQYCRAFLPKLLKSQATLHSKIYYLDSQKYKGKRLKSFFKKHHITTVPNLAHYQQGKMTKYLVQGSQATPQQIQTFLSQK

SEQ ID NO: 927 - protein, 540 aa, Streptococcus agalactiae
ATGAGAGTAGTAGCAGGAACATTTGGAGGGCGTCCTTTAAAAACGCTTGATGGAAAAACAACTCGTCCAACAACTGATAAGGTTAAAGGCGCTATTTTTAATATGATTGGTCCTTTTTTTGAAGGTGGTCGTGTTTTAGACCTTTTTTCTGGCAGTGGTAGCTTAGCTATTGAGGCGATCTCAAGGGGAATGGACCAAGCTGTCCTAGTTGAAAAAGATAGGCGTGCGCAGGTCGTTATTCAAGAAAATATTGCAATGACTAAGAGTCCGGAGCAATTTCAATTATTAAAAATGGAAGCCAACCGTGCTTTAGAACAATTAACGGGACAATTTGATTTGGTCTTGTTGGACCCGCCATATGCTAAGGAAGAAATTGTAAAGCAAATCCAAATCATGGATAGCAAGGGTTTATTAGGCGATGATATCATGATTGCTTGTGAAACGGACAAATCAGTTGATTTACCTGAAGAAATTGCTTCTTTTGGGATATGGAAACAGAAAATTTATGGCATTTCTAAAGTAACGGTCTACGTTCGTTAG

SEQ ID NO: 928 - protein, 179 aa, Streptococcus agalactiae
MRVVAGTFGGRPLKTLDGKTTRPTTDKVKGAIFNMIGPFFEGGRVLDLFSGSGSLAIEAISRGMDQAVLVEKDRRAQVVIQENIAMTKSPEQFQLLKMEANRALEQLTGQFDLVLLDPPYAKEEIVKQIQIMDSKGLLGDDIMIACETDKSVDLPEEIASFGIWKQKIYGISKVTVYVR

SEQ ID NO: 929 - protein, 291 aa, Streptococcus agalactiae
ATGGATTACAAGTTAGTGATGATTATTCTCATCTTAGTCATATTGATTTATTTGTTGTTGCGCCTTCACTATTTAGAAGAGTTGCTAAAACATTATCACTTCAAAAATGATGAAGGAGTTTGTTCATTATCAAGAACAAAAAATCCATTGTATCTATTAATGGCAATGATTACTTTTTTGCCAAATCTTATCAATTGGATAGCTAATGGTTTTGAGGCAATAGACATTGTTCGCCTGATTCCTGTGGTAGTCTTTTTATGGTTGTATTATTGTGGAGATGACGACGAATGA

SEQ ID NO: 930 - protein, 96 aa, Streptococcus agalactiae
MDYKLVMIILILVILIYLLLRLHYLEELLKHYHFKNDEGVCSLSRTKNPLYLLMAMITFLPNLINWIANGFEAIDIVRLIPVVVFLWLYYCGDDDE

SEQ ID NO: 931 - DNA, 486 bp, Streptococcus agalactiae
atgacaaagaaagctttatttacaggttcatttgatcctgttactaatggacatttagatattattgagcgcgccagctatctatttgatcatgtttacattgggttattttataaccttgagaagcaaggttacttttcgattgagtgccgtaaaaaaatgttagaagaagctatccgtcagtttaagaatgtttcagttttagtggcgcaagatagactggctgttgacttagcaagggaagtgggagcaaaatattttgttcgaggtctgcgtaatagccaggattttgattatgaagccaatttggagttttttaataaacagttggcagatgatattgagacagtttatttatcaacgtcgccatctttgagtccgatatcatctagtcgcatccgtgaattgatacattttaaggcttctgtgaagccttttgttccaaagagtgttgttagagaagtggagaaaatgagtgaagaatag

SEQ ID NO: 932 - protein, 161 aa, Streptococcus agalactiae
MTKKALFTGSFDPVTNGHLDIIERASYLFDHVYIGLFYNLEKQGYFSIECRKKMLEEAIRQFKNVSVLVAQDRLAVDLAREVGAKYFVRGLRNSQDFDYEANLEFFNKQLADDIETVYLSTSPSLSPISSSRIRELIHFKASVKPFVPKSVVREVEKMSEE

SEQ ID NO: 933 - DNA, 1074 bp, Streptococcus agalactiae
gtgaagaatagagatccaaaaagaaaacataaaagtttactaggtctgcttaaatggtggattataggttttgcttttttattgttagtattagcaagccttgtagtgagactaccttattatttggaaatgccaggtggagcttatgatatccgttcggtattgaaagtgaataaaaaggctgataaagctaagggttcgtacaattttgtagcggtatctgtcagtcaagcaacgccagctcaggttctttatgcttggttaactccttttacagaattatctagtaaagaggagacaacaggtggctttagtaatgacgattatctcagaattaatcaattctacatggagacttctcaaaatgagtccatctatcaagctttaaagttagctaataagcaagtatctcttacttataaaggagtttatgtgcttaacttagctaaaaattcgacatttaaagatagattacatttagctgatacagtcacaggagttaatggcaaaagtttcaaaaattcttctcaacttatcaaatatgttgcagctcttcatctaggtgataaagtaaaggtacaatacacaagtcaaggtaaaaagaaagaatcagttggtaaagttattaaactatcaaacggtaaaaatggtattggtatcggtttgacagaccatacagaagtattatctgatgttcctgtggactttaatactgaaggtgttggaggaccaagtgcaggtttaatgtttactttagcgatttacgaccaattggttaaagaagatttacgtaaaggacgtaagattgcaggtactggtactattgagcaaaatgggcatgttggcgatattggtggagcaggtttgaaagttgtttcagcggctaaaaaaggaatggatattttctttgttcctaataatccgatcgataaaaatgctaaaaaaggcaaaacaaaggttcagacgaattatcaagaggcaaaagcagcagctaagcgattaggtacgaagatgaaaattgtaccagttcaaaatgttcagcaagctattgattatttgaaaaaaacaaaataa

SEQ ID NO: 934 - protein, 357 aa, Streptococcus agalactiae
MKNRDPKRKHKSLLGLLKWWIIGFAFLLLVLASLVVRLPYYLEMPGGAYDIRSVLKVNKKADKAKGSYNFVAVSVSQATPAQVLYAWLTPFTELSSKEETTGGFSNDDYLRINQFYMETSQNESIYQALKLANKQVSLTYKGVYVLNLAKNSTFKDRLHLADTVTGVNGKSFKNSSQLIKYVAALHLGDKVKVQYTSQGKKKESVGKVIKLSNGKNGIGIGLTDHTEVLSDVPVDFNTEGVGGPSAGLMFTLAIYDQLVKEDLRKGRKIAGTGTIEQNGHVGDIGGAGLKVVSAAKKGMDIFFVPNNPIDKNAKKGKTKVQTNYQEAKAAAKRLGTKMKIVPVQNVQQAIDYLKKTK

SEQ ID NO: 935 - DNA, 825 bp, Streptococcus agalactiae
atgacagagcttataagaatactacatttaaatgatctgcactctcattttgagaattttcctaaggtaaaacgattttttcatgacaatcaagcgcagccaatagagacgatttcacttgacttgggggataatattgataaaagccatcctttgacagaagcaagctcgggaaaggctaatgtccaattgatgaatgaactgggtattgagcttgctactattggtaataatgaaggagttggtttatccaaaaaagacttggaccaagtctacaaagattcagattttacggttattgttggcaatctaaaagataacataatcgaaccgagttgggcaaaaccttacattatttatgagacgcagcaaggaactaagcttgcctttttagcttatacttttccttattataaaacctatgaacctaatgggtggacgatagaagatccaattgactgtcttaaatgccatttacaaataaatgagataaaagaggcaaattgtcgcattttgatgagtcatttaggtattcgttttgatacaaggattgctcaagaattttcagaaattgaccttattataggtgcacatacacaccatttatttgaggaaggggagctaattaacggtacatatcttgcagcagctggtaaatatggtcgctttgttgggagtattgatataacttttgataatcatacactaaaagatattttaatctcaacatgtgatacaaaacaactaactggttatccttcggacagtgactggctaagaagattgagtcagaaggtaaagaacagcttagaaaagaaagtttaa

SEQ ID NO: 936 - protein, 274 aa, Streptococcus agalactiae
MTELIRILHLNDLHSHFENFPKVKRFFHDNQAQPIETISLDLGDNIDKSHPLTEASSGKANVQLMNELGIELATIGNNEGVGLSKKDLDQVYKDSDFTVIVGNLKDNIIEPSWAKPYIIYETQQGTKLAFLAYTFPYYKTYEPNGWTIEDPIDCLKCHLQINEIKEANCRILMSHLGIRFDTRIAQEFSEIDLIIGAHTHHLFEEGELINGTYLAAAGKYGRFVGSIDITFDNHTLKDILISTCDTKQLTGYPSDSDWLRRLSQKVKNSLEKKV

SEQ ID NO: 937 - DNA, 444 bp, Streptococcus agalactiae
atggatgcgatgctgttttacgcaggtgcagatgttgctattatcaattctggcttaattgttcagccatttgaaaaagacttttcgaggaaaaatctccacgaatcattacctcatcaaatgcgcctcgctaaattgacagtgagtagtcaagaacttttagagatttatgaaactatttatcaacaaggtcaatttttagcgcaacaaaagattcatggtatgggctttcgtggcaagtgctttggagaagttttacattcgggatttgattacaaaaatggaaaaatagtgtataatgagaaagatattgatgccaaagaagaagtgattcttgtaatcgttgatcagtattattttgcatcgtattttgagtgtttaaaaacgaaaaaagtagacttgcttttcctgaattactcagagatgtggcagcagattatttaa

SEQ ID NO: 938 - protein, 147 aa, Streptococcus agalactiae
MDAMLFYAGADVAIINSGLIVQPFEKDFSRKNLHESLPHQMRLAKLTVSSQELLEIYETIYQQGQFLAQQKIHGMGFRGKCFGEVLHSGFDYKNGKIVYNEKDIDAKEEVILVIVDQYYFASYFECLKTKKVDLLFLNYSEMWQQII

SEQ ID NO: 939 - DNA, 579 bp, Streptococcus agalactiae
atgcgaaaagaagtgacaccagagatgcttaactataataagtatcctggcccacagttcattcactttgaaaatatcgttaaaagtgatgatattgaatttcaacttgttattaatgaaaaatcagcttttgatgtgactgtctttggacaacgtttttctgagattttattaaaatatgattttatcgttggcgattggggtaacgagcagttgaggctaagaggcttttacaaagatgctagtacaattagaaaaaatagccggatttcacgtttagaagattatattaaagagtattgtaactttggttgtgcttattttgtgttggagaatccaaatcctagagatattaaatttgatgatgaaagacctcataagcgtcgtaagtcaagatccaaatcacaatcatcaaagtcacaaactagaaataatcgttcccagtcaaatgccaatgctcattttacaagtaaaaagcgtaaagacacaaaacgccgtcaagaacgtcatattaaagaagagcaagataaggaaatgacctctgcaaagcagcattttgttattcgtaagaaaaaataa

SEQ ID NO: 940 - protein, 192 aa, Streptococcus agalactiae
MRKEVTPEMLNYNKYPGPQFIHFENIVKSDDIEFQLVINEKSAFDVTVFGQRFSEILLKYDFIVGDWGNEQLRLRGFYKDASTIRKNSRISRLEDYIKEYCNFGCAYFVLENPNPRDIKFDDERPHKRRKSRSKSQSSKSQTRNNRSQSNANAHFTSKKRKDTKRRQERHIKEEQDKEMTSAKQHFVIRKKK

SEQ ID NO: 941 - protein, 1107 aa, Streptococcus agalactiae
ATGCCTAAAAAAACTGATACACCCGCCTATAAACCCTCTATTTATAGCTTAACTCGCGATGAACTAATAGCTTGGGCTATTGAACATGGAGAAAAGAAATTCCGTGCTTCACAAATCTGGGACTGGCTCTATAAAAAGCGTGTGCAAAGCTTCGATGAAATGACTAACATTTCCAAAGATTTTATTGCACTTTTGAACGAGAATTTTGTTGTTAATCCTCTAAAACAACGTATTGTTCAAGAATCTGCTGATGGAACTGTTAAATACCTTTTTGAATTACCTGATGGCATGCTGATTGAGACGGTTTTGATGCGTCAACATTATGGTTTATCAGTATGTGTAACGACTCAAGTTGGTTGTAACATTGGTTGCACTTTCTGTGCAAGTGGTTTAATAAAGAAACAACGTGATCTTAACAATGGCGAAATCACTGCTCAAATTATGCTTGTTCAAAAATATTTTGATGAACGTGGACAAGGTGAGCGCGTTAGTCACATTGTGGTCATGGGAATAGGTGAACCCTTTGATAACTATACCAATGTATTAAAATTCTTGCGTACAGTTAATGATGATAATGGATTAGCTATTGGTGCACGTCACATTACAGTGTCTACTTCAGGTTTAGCACATAAAATTCGTGAATTTGCAAATGAAGGTGTACAAGTTAACTTAGCAGTATCTCTTCATGCTCCAAATAACGATTTACGATCAAGTATCATGCGTATTAATCGTTCTTTCCCTCTTGAAAAGTTGTTTGCGGCTATTGAATATTATATTGAGACGACTAACCGTCGTGTAACATTTGAGTATATTATGTTAAATGGTGTCAACGATACCCCAGAAAATGCTCAAGAGTTAGCAGATTTAACGAAAAAGATTCGCAAATTATCTTATGTCAATTTAATTCCTTACAATCCTGTCTCAGAACATGACCAGTATAGTCGTAGTCCTAAAGAGCGTGTAGAAGCTTTCTATGACGTTTTGAAGAAAAATGGAGTTAACTGTGTTGTTCGTCAAGAACATGGTACGGACATTGATGCAGCTTGCGGGCAATTACGTTCAAACACAATGAAACGCGATCGTCAAAAAGCGAAGGTAGGGCAGTAA

SEQ ID NO: 942 - protein, 368 aa, Streptococcus agalactiae
MPKKTDTPAYKPSIYSLTRDELIAWAIEHGEKKFRASQIWDWLYKKRVQSFDEMTNISKDFIALLNENFVVNPLKQRIVQESADGTVKYLFELPDGMLIETVLMRQHYGLSVCVTTQVGCNIGCTFCASGLIKKQRDLNNGEITAQIMLVQKYFDERGQGERVSHIVVMGIGEPFDNYTNVLKFLRTVNDDNGLAIGARHITVSTSGLAHKIREFANEGVQVNLAVSLHAPNNDLRSSIMRINRSFPLEKLFAAIEYYIETTNRRVTFEYIMLNGVNDTPENAQELADLTKKIRKLSYVNLIPYNPVSEHDQYSRSPKERVEAFYDVLKKNGVNCVVRQEHGTDIDAACGQLRSNTMKRDRQKAKVGQ

SEQ ID NO: 943 - protein, 516 aa, Streptococcus agalactiae
ATGCTTAAAAGATTACTTACTGAAGATGGGGAATTGACAAAGATTAGTCGTCGTTTCGTTTGGATGTTAGTGATTATCTATTGTCTTATTATTGTCAGGATGTGTTTTGGGCCTCAAATTATGATTGAGGGGGTATCAACTCCGAATGTTCAGCGCTTCGGAAGAATTGTAGCTCTTTTAGTACCATTTAATTCTTTTCGTAGTTTAGATCAGCTAACTAGCTTTAAAGAGATTTTTTGGGTTATTGGTCAAAATGTAGTGAATATTTTACTGCTGTTTCCTCTCATTATAGGGTTACTATCCCTAAAGCCAAGTTTACGGAAATATAAAAGCGTTATATTACTTGCTTTCTTGATGTCTATTTTCATAGAGTGTACTCAAGTTGTTTTAGATATTTTAATAGATGCTAATCGGGTTTTTGAAATCGACGATCTATGGACAAATACCTTAGGCGGTCCTTTCGCCCTATGGACTTATCGAAACATAAAAGGTTGGCTTCTAACTATTAGAAAATGA

SEQ ID NO: 944 - protein, 171 aa, Streptococcus agalactiae
MLKRLLTEDGELTKISRRFVWMLVIIYCLIIVRMCFGPQIMIEGVSTPNVQRFGRIVALLVPFNSFRSLDQLTSFKEIFWVIGQNVVNILLLFPLIIGLLSLKPSLRKYKSVILLAFLMSIFIECTQVVLDILIDANRVFEIDDLWTNTLGGPFALWTYRNIKGWLLTIRK

SEQ ID NO: 945 - protein, 1746 aa, Streptococcus agalactiae
ATGTCTATTATAAAAAATTTGTGGTGGTTTTTTAAGGAAGAAAAGAAGCGCTATCTTATTGGAATTTTGTCATTAAGTTTGGTTGCGGTGTTAAATCTTATCCCTCCTAAAATCATGGGATCAGTTATTGATGCTATTACAACTGGAAAATTAACAAGACCACAATTGCTCTGGAATTTATTAGGTTTGGTTTTGTCAGCTTTAGCTATGTATGGGCTGCGTTATATTTGGCGTATGTATATTTTAGGGACTTCTTACAAATTGGGTCAAGTTGTCAGATACCGTTTATTTGAACATTTTACAAAAATGTCTCCTTCTTTTTATCAGAAATATCGTACAGGTGATTTAATGGCGCACGCGACCAACGACATCAATTCTCTAACACGTCTTGCAGGAGGAGGAGTTATGTCAGCAGTGGATGCCTCTATCACAGCATTAGTAACGCTTATCACCATGTTCTTTACTATTTCGTGGCAAATGACATTAATTGCGGTTATCCCTTTGCCCTTAATGGCCTTAGCAACTAGTAAATTGGGGCGAAAAACCCATGAAACCTTCAAAGAATCTCAGGCAGCCTTTTCAGAATTAAATAATAAAGTGCAAGAAAGTGTCTCTGGCGTCAAAGTGACTAAATCATTTGGTTATCAAGAACAAGAAATTGCTTCTTTTCAAGAGGTTAATCAGATGACTTTCGTGAAGAACATGCGGACCATGACTTATGATGTCATGTTTGATCCTTTAGTTCTTCTTTTTATAGGTGCCTCCTACGTATTAACATTGGCTATGGGAGCTTTTATGATTTCAAAAGGTCAAGTTACTGTTGGTGACTTGGTAACATTTGTGACGTATTTAGATATGTTGGTATGGCCCTTGATGGCGATTGGTTTCTTGTTCAATATGGTACAGCGTGGTAGTGTTTCTTATAACCGTATTAATAGCCTACTTGAGCAAGAATCGGATATAACTGACCCTTTAAATCCTATCAGACCTGTTGTCAATGGAACATTAAGATATGATATTGATTTCTTTAGATACGACAATGAAGAAACCTTAGCCGATATTCATTTCACCTTAGAAAAAGGTCAAACCTTAGGTTTGGTAGGTCAAACGGGATCAGGGAAGACAAGTCTTATTAAGTTATTGCTACGTGAACATGATGTGACTCAGGGAAAAATTACTTTAAATAAACATGATATACGTGATTATCGATTGTCTGAGTTACGTCAACTAATCGGTTATGTTCCTCAAGATCAGTTTTTATTTGCTACCAGTATTTTAGAAAATGTTCGCTTTGGAAATCCAACTCTATCTATCAATGCTGTTAAAAAAGCAACTAAATTGGCTCATGTTTACGATGACATTAAACAGATGCCAGCAGGATTTGAGACTCTAATTGGAGAAAAAGGAGTCTCATTATCTGGTGGACAAAAACAAAGGATTGCGATGAGTCGTGCCATGATTTTAGATCCAGATATTCTTATTTTGGATGATTCTCTATCAGCAGTGGACGCTAAAACGGAACATGCCATTATTGAAAATCTTAAAACGAATCGTCAAGGGAAATCGACTATTATTTCAGCACATCGATTATCAGCTGTTGTGCACGCAGACCTTATCTTAGTTATGCAAGACGGCAGAGTCATCGAGCGAGGTCAGCATCAAGAGTTGCTAAATAAAGGTGGTTGGTATGCTGAAACGTATGCCTCACAGCAATTAGAAATGGAGGAAGCATTTGATGAAGTCTAA

SEQ ID NO: 946 - protein, 581 aa, Streptococcus agalactiae
MSIIKNLWWFFKEEKKRYLIGILSLSLVAVLNLIPPKIMGSVIDAITTGKLTRPQLLWNLLGLVLSALAMYGLRYIWRMYILGTSYKLGQVVRYRLFEHFTKMSPSFYQKYRTGDLMAHATNDINSLTRLAGGGVMSAVDASITALVTLITMFFTISWQMTLIAVIPLPLMALATSKLGRKTHETFKESQAAFSELNNKVQESVSGVKVTKSFGYQEQEIASFQEVNQMTFVKNMRTMTYDVMFDPLVLLFIGASYVLTLAMGAFMISKGQVTVGDLVTFVTYLDMLVWPLMAIGFLFNMVQRGSVSYNRINSLLEQESDITDPLNPIRPVVNGTLRYDIDFFRYDNEETLADIHFTLEKGQTLGLVGQTGSGKTSLIKLLLREHDVTQGKITLNKHDIRDYRLSELRQLIGYVPQDQFLFATSILENVRFGNPTLSINAVKKATKLAHVYDDIKQMPAGFETLIGEKGVSLSGGQKQRIAMSRAMILDPDILILDDSLSAVDAKTEHAIIENLKTNRQGKSTIISAHRLSAVVHADLILVMQDGRVIERGQHQELLNKGGWYAETYASQQLEMEEAFDEV

SEQ ID NO: 947 - protein, 1740 aa, Streptococcus agalactiae
ATGAAGTCTAATCAATGGCAAGTCTTTAAGAGATTAATCTCCTATTTACGCCCTTATAAATGGTTTACAGTATTAGCTCTATCTCTCTTATTGTTGACGACTGTTGTTAAAAATATTATTCCTTTAATTGCTTCACATTTTATTGATCACTATCTGACAAATGTTAATCAAACAGCAGTTCTTATTTTAGTGGGATATTATTCAATGTATGTCTTGCAGACCTTAATTCAATATTTTGGGAATCTCTTTTTTGCGCGTGTTTCTTATAGTATTGTTAGAGATATTCGTAGAGATGCTTTTGCTAATATGGAAAGGCTTGGCATGTCTTATTTTGATAGGACACCGGCAGGATCTATAGTGTCACGTATTACTAATGATACTGAAGCAATATCTGATATGTTTTCGGGTATTTTATCGAGTTTTATCTCGGCGATATTTATTTTTACAGTTACTCTGTACACTATGTTGATGCTAGACATTAAACTAACAGGACTTGTCGCTCTTTTATTACCTGTTATCTTTATATTAGTGAATGTCTATCGGAAAAAATCAGTCACTGTCATTGCTAAAACGAGAAGTTTACTTAGTGATATCAACAGTAAATTATCAGAAAGTATTGAAGGAATTCGCATTGTACAGGCTTTTGGTCAAGAAGAGCGCTTGAAGACTGAATTTGAGGAAATTAACAAAGAGCATGTTGTGTATGCCAATCGTTCTATGGCTCTTGATAGTCTCTTCTTAAGACCGGCGATGTCTCTTTTAAAACTCCTAGCATATGCTGTTCTTATGGCTTATTTTGGATTTACAGGAGTTAAAGGAGGTCTTACGGCAGGATTGATGTATGCTTTTATTCAGTACGTTAATCGTCTCTTTGACCCTTTAATTGAAGTAACGCAAAATTTTTCAACCTTACAAACATCAATGGTATCAGCAGGGCGTGTGTTTGATTTGATTGATGAAACAGGTTTTGAACCAAGCCAAAAAAATACAGAAGCTTTTGTGAGAGAAGGAAATATCGAATTTAAAAATGTATCATTCTCATATGATGGAAAAAAACAAATCCTTGATAATGTTTCTTTTAGTGTTAAAAAAGGTGAAACGATTGCTTTTGTAGGAGCGACAGGTTCTGGAAAATCATCTATTATTAATGTCTTTATGAGGTTTTACGAATTTCAATCTGGACAAGTTTTATTAGATGGGAAGGATATTAGGGATTACTCACAAGAACAATTGCGAAAGAATATTGGACTCGTCTTACAAGACCCCTTTTTATATCATGGCACTATTAAATCTAATATCAAAATGTACCAAGACATCACCGATCAAGAGGTACAGGACGCAGCAGAGTTTGTTGATGCTGATCAATTTATTCAGAAGTTGCCAGATAAGTACGATGCAGCTGTTTCAGAACGTGGGTCAAGTTTTTCGACTGGACAACGCCAACTATTGGCGTTTGCCAGAACTGTGGCTAGTAAACCTAAAATTTTAATCTTAGATGAAGCGACAGCAAATATTGATTCGGAAACAGAGCAGATTGTACAAGATTCGTTAGCAAAAATGCGTCAAGGTCGAACAACAATTGCCATTGCTCACCGCTTATCAACCATTCAAGATGCTAATTGTATCTATGTTCTTGATAGAGGAAAGATAATTGAAAGTGGGAATCACGAGTCTTTATTAGACCTAAAAGGGACTTATTATCGTATGTACCAATTACAAGCTGGCATGATGGAGGTCTAG

SEQ ID NO: 948 - protein, 579 aa, Streptococcus agalactiae
MKSNQWQVFKRLISYLRPYKWFTVLALSLLLLTTVVKNIIPLIASHFIDHYLTNVNQTAVLILVGYYSMYVLQTLIQYFGNLFFARVSYSIVRDIRRDAFANMERLGMSYFDRTPAGSIVSRITNDTEAISDMFSGILSSFISAIFIFTVTLYTMLMLDIKLTGLVALLLPVIFILVNVYRKKSVTVIAKTRSLLSDINSKLSESIEGIRIVQAFGQEERLKTEFEEINKEHVVYANRSMALDSLFLRPAMSLLKLLAYAVLMAYFGFTGVKGGLTAGLMYAFIQYVNRLFDPLIEVTQNFSTLQTSMVSAGRVFDLIDETGFEPSQKNTEAFVREGNIEFKNVSFSYDGKKQILDNVSFSVKKGETIAFVGATGSGKSSIINVFMRFYEFQSGQVLLDGKDIRDYSQEQLRKNIGLVLQDPFLYHGTIKSNIKMYQDITDQEVQDAAEFVDADQFIQKLPDKYDAAVSERGSSFSTGQRQLLAFARTVASKPKILILDEATANIDSETEQIVQDSLAKMRQGRTTIAIAHRLSTIQDANCIYVLDRGKIIESGNHESLLDLKGTYYRMYQLQAGMMEV

SEQ ID NO: 949 - protein, 567 aa, Streptococcus agalactiae
ATGTTACTATTGGTAGATAATTACGATTCTTTTACCTATAATTTAAAGCAATATTTAAGTGTCTATAAAGAGGTATTCGTCATAAAAAATGATGTTCCTAACCTTTTTTTATTAGCTGAGAGCGCAGAAGCCATCGTCTTATCACCTGGACCAGGACACCCAAAGGATGCTGGGAAAATGGTAGAATTAATCAATCAGTTTATAGGAAAGAAACCTATTCTAGGTATCTGTTTGGGGCATCAAGCGCTTGCCGAGTGCTTGGGTGGGCGATTAAATTTAGCAAATCACGTTATGCATGGTAAACAAAGTTGGGTAACAATAAACGACCATACTAGTTTGTTTAAGGGAATTGATAGTCCAACCCAAGTTATGCGTTATCATTCATTGGTAGTGACTGATTTACCAGAGAATATTGCTGTTATTGCACGATCAAATGAGGATAATGAAATCATGGCATTCCATTGCCCCAGCTTAAAGGTATATGCGATGCAGTTTCATCCTGAGTCAATCGGGAGTATTGATGGAATGAAAATGATTGAAAACTTTTTGACGTTAATTAATGACTAA

SEQ ID NO: 950 - protein, 188 aa, Streptococcus agalactiae
MLLLVDNYDSFTYNLKQYLSVYKEVFVIKNDVPNLFLLAESAEAIVLSPGPGHPKDAGKMVELINQFIGKKPILGICLGHQALAECLGGRLNLANHVMHGKQSWVTINDHTSLFKGIDSPTQVMRYHSLVVTDLPENIAVIARSNEDNEIMAFHCPSLKVYAMQFHPESIGSIDGMKMIENFLTLIND

SEQ ID NO: 951 - DNA, 540 bp, Streptococcus agalactiae
atgaaaacaagaacaactacctatattgcactcatggttgcactacttattgttttaggttttatcccagggatcccattaggtttcattccagtcccaattgttttacaaaatcttggtgttatgctggcaggtgctctgcttggtagtaggaagggtttcctagctgtggctattttcttgctcttagttgctattggtgcaccatttttaccaggaggacggtcaggtctcgtaacgctgtttgggccaacagcaggctatctgctgacttatccatttgcagctttttttatcggcctagggcttgagaaagtgaaaacaacaaaactctgggttcaattccttattatttggatatttggcgtactattgattgatatttgtggtagcatcgttctttcctttcaaacttctctacccttaactaaatcactattttctaaccttatttttattcctggggataccttaaaagcatccatttgcttgattatttatcgtaaatttgcaaacagattaactcatctatacaactaa

SEQ ID NO: 952 - protein, 179 aa, Streptococcus agalactiae
MKTRTTTYIALMVALLIVLGFIPGIPLGFIPVPIVLQNLGVMLAGALLGSRKGFLAVAIFLLLVAIGAPFLPGGRSGLVTLFGPTAGYLLTYPFAAFFIGLGLEKVKTTKLWVQFLIIWIFGVLLIDICGSIVLSFQTSLPLTKSLFSNLIFIPGDTLKASICLIIYRKFANRLTHLYN

SEQ ID NO: 953 - DNA, 993 bp, Streptococcus agalactiae
atgtcatttcaaacaaattatatccatttggctgacgaaatattatctggaaagactagcatttcttatgaacaagcgctggaaattctaaatagcgatgagaactggtgggaaatctacgctgctgccttataccttaaaaatcaagttagccgaaataatattcgccttaacgttttattaagtgctaagcaaggactttgtgcagaaaattgtggttactgttctcaatctaaagaaagcactgctgacattgataaatttggtctgcttcctcaaaatgtcattctaaaacaggctattgtcgctcatcaaaatggtgctagcgtcttttgtattgcgatgagtggaactaagcctagcaagagagaaattgagcagttatgtcaagtcatccctgaaatcaaaaaaagcctccctctagaaatatgccttaccgctggttttttggatagagaacaacttcatcagctaaaacaagcaggaattgaccgtatcaatcataatctcaacacccccgaagaaaactaccccaacattgcaacgacgcatagcttcaaagatcgttgtgatactttagaaagaattcacaatgaagacattgatgtttgttctggattcatttgtggtatgggagagagcgatgaggggctcatcacattagctttcagactaaaagagctggacccctattctatccctgtcaattttttacttgctgttgaaggaacacctcttggaaaatataactatttgactcccattaaatgcttaaaaattatggccatgttgcgttttgtttttcctttcaaggaattaagattaagcgctggacgagaggtccattttgagaattttgaatcattagtcaccttacttgttgactcaacttttttgggaaattacctaacagagggcggtcgcaatcaacataccgatattgaattcttggaaaaattacaactaaatcatactaaaaaggaattaatttaa

SEQ ID NO: 954 - protein, 330 aa, Streptococcus agalactiae
MSFQTNYIHLADEILSGKTSISYEQALEILNSDENWWEIYAAALYLKNQVSRNNIRLNVLLSAKQGLCAENCGYCSQSKESTADIDKFGLLPQNVILKQAIVAHQNGASVFCIAMSGTKPSKREIEQLCQVIPEIKKSLPLEICLTAGFLDREQLHQLKQAGIDRINHNLNTPEENYPNIATTHSFKDRCDTLERIHNEDIDVCSGFICGMGESDEGLITLAFRLKELDPYSIPVNFLLAVEGTPLGKYNYLTPIKCLKIMAMLRFVFPFKELRLSAGREVHFENFESLVTLLVDSTFLGNYLTEGGRNQHTDIEFLEKLQLNHTKKELI

SEQ ID NO: 955 - DNA, 495 bp, Streptococcus agalactiae
atgaaaaaactatttaaaaaagcgatagctatgtgccgagatttgccgcttaattttgtaattgttgaacttagtttgtatcaaagagaggatggctcatctgataatattaaatggatttctaagagaattcttgaggtaacggtaactgatcagcaatggatttaccatttgaggatgcttaatttaccaaaacttaagccaatgtcactagcatccagtgactgtcctgcaagggaagagaaggctagtcttatttcaatagaagaatgtcaaaaattcactagcttagtgcgagataaaaatccttttcaccaaggggaagcagctattgtgcctgcggctctattattggaaaaaataatggaagttagaaaaggaaaaataaaggagattcatttgacttttttatctccagtaagggtgaatcaagaattctcagtgcaagtagtggataacacagtgattatttttcagcatcaaatattatggtga

SEQ ID NO: 956 - protein, 164 aa, Streptococcus agalactiae
MKKLFKKAIAMCRDLPLNFVIVELSLYQREDGSSDNIKWISKRILEVTVTDQQWIYHLRMLNLPKLKPMSLASSDCPAREEKASLISIEECQKFTSLVRDKNPFHQGEAAIVPAALLLEKIMEVRKGKIKEIHLTFLSPVRVNQEFSVQVVDNTVIIFQHQILW

SEQ ID NO: 957 - DNA, 1116 bp, Streptococcus agalactiae
atgaagaatagagatgtttatattggttttgggctacgaacacctatcggtataaaagggaagcaatttaaacattaccgtccagaacttttaggagcacaccttttaaatcaaataaaaaaaatagaatcagaatctaacattgatagtattatttgtgggaacacagttggtactgggggcaatattggtcgtttgatgactcttttttctgattatgaatcctatattccagtacaaacgattgatatgcagtgtgcttcatcaagttctgccttgttttttggttatctaaaaatcagtaccggtattaatgaaaaagttcttgttggggggattgaaagtagttctcttcaacctatgagacgttatgctaaagaagataatcgtaacggagaatatacagttgctcagttttctcctgactcttatgctgaaactgtaatgttagaaggggcccagagagtctgtcaaaaatatggttttagaagagaaatgttagataaattggcattcttgagccataaacgcgccttaacagctaaacaaggtggctatttagaagaggtaatcttaccaatggaagggatgcgagatcaaggcgttagaaaactaaaagaaacattttttcaaaaattaccaagattgatggaaaattcacctttgctcactattggaaatgtttgtttaatgcacgatgctgctgcatttctaacgcttcagagtcagaaaacagaattccggattgttcacattgtagaagtagcaggagatcccaagcttagtccagaattggttcacacggctacggaaaaactattaacagaaactcatactaaaatatcggattatgatgcaattgaatggaatgaaccatttgcagcgattgatgctctatttaatcattattatcctgaagagagagaaaaattcaatatttttggagggacattagcttacggacacccttatgcctgctcaggaattattaatatccttcatcttatgcaggcattaaaatataaaaataaacctatgggtctaactgccattgcaggggcaggaggagtcggaatggccatatcaatagagtacttaggagttaagaatgcttga

SEQ ID NO: 958 - protein, 371 aa, Streptococcus agalactiae
MKNRDVYIGFGLRTPIGIKGKQFKHYRPELLGAHLLNQIKKIESESNIDSIICGNTVGTGGNIGRLMTLFSDYESYIPVQTIDMQCASSSSALFFGYLKISTGINEKVLVGGIESSSLQPMRRYAKEDNRNGEYTVAQFSPDSYAETVMLEGAQRVCQKYGFRREMLDKLAFLSHKRALTAKQGGYLEEVILPMEGMRDQGVRKLKETFFQKLPRLMENSPLLTIGNVCLMHDAAAFLTLQSQKTEFRIVHIVEVAGDPKLSPELVHTATEKLLTETHTKISDYDAIEWNEPFAAIDALFNHYYPEEREKFNIFGGTLAYGHPYACSGIINILHLMQALKYKNKPMGLTAIAGAGGVGMAISIEYLGVKNA

SEQ ID NO: 959 - DNA, 1242 bp, Streptococcus agalactiae
atgcttgaatcattgaaaacgatagttaaaaccaatagcgataaaaagttatttgatggtgatttacaggtcagttatggagaattttataacttagtaagacaagatatggcgtcacaagacaataggaaacatgtgattagcacacactctctgcttaaccaattagtaagatttgtttcaaagttatgtcaaaaagctcttcctattatttgtaaacctaaccttactcataatgaaataagtcgattagaaaaagaagtgcagtatgctcctcaactagctgattttggtgttctttcttctgggactacagctgatgctaaactattgtggaggagcttcacttcgtggtctgatttttttagcattcagaatgcttatttttcggtcacttccaatagcaaactgtttattcaaggtgatttttcatttactggtaacttaaatttagcgctatcccttttattactggggggaacacttgttgtcacacagaaaaattctgtaaaatactggcagactttatgggaaaaaactggtgtaacgcatctatatctgctccctagttatctcaagttagtggaacaatatagcaaggagactgcgttagacaataaaactattattacctcttcgcaatatgtctctgactcattactggaaggtttatatagaaagcatcctaaagtgtcagtgaaaatcttctatggtgctagtgagctcaattatgtgtcatggtacgatggtcgtgatatccgagataagccacagtatgttggagaaatcgttccaaatgtagctgttaggattaaagagggaagaatttttgtaaaaacaccgtatagtatctgtggcctttcaagtgaatattgtgctggtgattatggtgaactgatagatggcaaattatatctatttggccgtggtggtgattggtgcaatcaatcgggcattaagctctatttacctagattaatcgaaaaaatagaaacatgcccttatatcaaggatgcagtagcatttacaaaagagagtcaaagtcatggacaagagtcacattgctgtattgttttaattgaaaatcagatgcaacaagagtgtttgaagtggttatcggaacattttgaaaagaagtatgggtttaagcattatcatattgtatctaaaattcctttgatgccatctggaaaaattgrattatcaacaactcaaaagacagttagcatgagcttttactaa

SEQ ID NO: 960 - protein, 413 aa, Streptococcus agalactiae
  VARIANT 400: Xaa = Any Amino Acid
MLESLKTIVKTNSDKKLFDGDLQVSYGEFYNLVRQDMASQDNRKHVISTHSLLNQLVRFVSKLCQKALPIICKPNLTHNEISRLEKEVQYAPQLADFGVLSSGTTADAKLLWRSFTSWSDFFSIQNAYFSVTSNSKLFIQGDFSFTGNLNLALSLLLLGGTLVVTQKNSVKYWQTLWEKTGVTHLYLLPSYLKLVEQYSKETALDNKTIITSSQYVSDSLLEGLYRKHPKVSVKIFYGASELNYVSWYDGRDIRDKPQYVGEIVPNVAVRIKEGRIFVKTPYSICGLSSEYCAGDYGELIDGKLYLFGRGGDWCNQSGIKLYLPRLIEKIETCPYIKDAVAFTKESQSHGQESHCCIVLIENQMQQECLKWLSEHFEKKYGFKHYHIVSKIPLMPSGKIXLSTTQKTVSMSFY

SEQ ID NO: 961 - protein, 500 aa, Streptococcus agalactiae
ATGCAGCTGTTAATAAAGTTACACCCGCCCTTTTTGAACGCTTTCCAAATCCTTTAGTTTTGGCACAAGCTGATCCCAAAGAGATTGAACCCTATATTTCTAAAATTGGGCTTTACCGTAATAAAGCTCGATTCTTAAATCAATGCGCTAAACAATTGATAGAGCATTTTGATGGAAAAGTCCCCCGAACTCGTCAAGAGCTAGAAAGTTTGGCTGGCGTTGGAAGGAAAACGGCTAACGTGGTCATGAGTGTTGGATTTGGTATTCCGGCTTTTGCCGTAGATACTCATGTCACTCGGATTTGTAAACACCACCAGATTTGCAAACAGTCGGCTTCTCCACTGGAAATTGAGAAACGAGTCATGGAGGTTTTACCACCAGAAGAGTGGCTAGCTGCACATCAATCCATGATTTATTTTGGTCGTGCAATTTGTCATCCTAAAAATCCAAAATGCGACCAGTACCCACAACTTTATCACTTTCCTGATAATTTAAAGTGA

SEQ ID NO: 962 - protein, 166 aa, Streptococcus agalactiae
MQLLIKLHPPFFERFPNPLVLAQADPKEIEPYISKIGLYRNKARFLNQCAKQLIEHFDGKVPRTRQELESLAGVGRKTANVVMSVGFGIPAFAVDTHVTRICKHHQICKQSASPLEIEKRVMEVLPPEEWLAAHQSMIYFGRAICHPKNPKCDQYPQLYHFPDNLK

SEQ ID NO: 963 - protein, 375 aa, Streptococcus agalactiae
TTTATTTCTTTATGCATGAGTTTTATCTTAAGTTATTATGATATAAAATACCAAGAGTATCCTATTTTTCTATGGATATTATTCACCATTTCAACGATAATTCTCACACCGATTACAAAAGTTTCTATTGTTTTGTGTTTATTTGGGATTTTAGCTGAAGTGGTTGATATTAATATCGGAAGTGGAGATTTCCTTTATTTAGCCACAATTGGCTTATCTTTACCTCTTCATCAAATGCTTTTTATTATTCAAATAGGTGCTTGGTTAGGAATTATTTATTGTTTAGTTATGAGAAAAATGAAAAAAACGATAGCTTTTCTACCGTTTTTAAGTATCGCTTATATAATCGTCACCAGTTACTCTCTTTTATTCTAA

SEQ ID NO: 964 - protein, 124 aa, Streptococcus agalactiae
FISLCMSFILSYYDIKYQEYPIFLWILFTISTIILTPITKVSIVLCLFGILAEVVDINIGSGDFLYLATIGLSLPLHQMLFIIQIGAWLGIIYCLVMRKMKKTIAFLPFLSIAYIIVTSYSLLF

SEQ ID NO: 965 - protein, 210 aa, Streptococcus agalactiae
ATGAAAGTTTTATTCGATGTGCAGAATCTTTTGAAAAAATTTGGTATTTATGTTTATATTGGTAAACGTCTTTATGATATCGAAGTTATGAAGATTGAATTGCAACGTCTCTACGATAATGGTCTGATAAGTAGAGATGATTATTTAAAAGCAGAACTGATTTTAAGAAGAGAGCACAGACTAGAATTGGAGAAGGAAAATAAAAAATGA

SEQ ID NO: 966 - protein, 69 aa, Streptococcus agalactiae
MKVLFDVQNLLKKFGIYVYIGKRLYDIEVMKIELQRLYDNGLISRDDYLKAELILRREHRLELEKENKK

SEQ ID NO: 967 - protein, 969 aa, Streptococcus agalactiae
ATGAGTAAGAAATTATTGGGAATTGACCTCGGAGGAACGACCATTAAATTTGGTATCTTGACGCTTGAGGGAGAAGTACAAGAAAAATGGGCAATTGAGACCAATACTTTAGAAAACGGAAGACATATCGTTTCTGATATCGTTGAATCTCTCAAACATCGTTTGAGCCTCTATGGATTAACAAAAGATGACTTTCTCGGTATCGGTATGGGTTCTCCAGGAGCTGTTGATAGAACTAGTAAAACAGTAACAGGTGCTTTTAATCTAAATTGGGCTGATACTCAAGAAGTAGGTTCAGTTATTGAAAAAGAAGTTGGAATTCCATTTTTTATTGATAACGATGCTAATGTTGCAGCACTTGGTGAACGCTGGGTAGGTGCTGGTGCCAATAATCCCGACGTTGTTTTCGTAACCCTCGGAACAGGAGTAGGTGGAGGTGTTATCGCAGATGGTAACCTCATCCATGGTGTTGCAGGAGCAGGTGGAGAAATTGGGCATATGATTGTTGATCCAGAAAATGGATTTACGTGCACATGTGGTAACAAAGGCTGCCTTGAGACAGTTGCATCAGCGACAGGTGTTGTTAGAGTAGCACGTCAACTCGCAGAACAATATGAGGGTTCGTCTGCCATTAAAGCAGCGATTGACAACGGTGATACTGTTACAAGTAAAGATATTTTTATAGCAGCAGAAGATGGGGATAAATTTGCTAATTCTGTTGTTGAACGTGTATCACGTTACCTTGGACTGGCAGCAGCTAATATTTCAAATATTTTAAACCCTGATTCTGTGGTTATTGGTGGCGGTGTCTCAGCAGCAGGTGAATTTTTACGTAGTCGCGTTGAGAAATACTTTGTCACATTTGCTTTCCCACAAGTTAAAAAGTCAACTAAAATTAAGATTGCTGAACTAGGTAATGATGCTGGTATTATTGGTGCAGCAAGCTTAGCCAATCAACAAGCAAGTTAA

SEQ ID NO: 968 - protein, 322 aa, Streptococcus agalactiae
MSKKLLGIDLGGTTIKFGILTLEGEVQEKWAIETNTLENGRHIVSDIVESLKHRLSLYGLTKDDFLGIGMGSPGAVDRTSKTVTGAFNLNWADTQEVGSVIEKEVGIPFFIDNDANVAALGERWVGAGANNPDVVFVTLGTGVGGGVIADGNLIHGVAGAGGEIGHMIVDPENGFTCTCGNKGCLETVASATGVVRVARQLAEQYEGSSAIKAAIDNGDTVTSKDIFIAAEDGDKFANSVVERVSRYLGLAAANISNILNPDSVVIGGGVSAAGEFLRSRVEKYFVTFAFPQVKKSTKIKIAELGNDAGIIGAASLANQQAS

SEQ ID NO: 969 - protein, 381 aa, Streptococcus agalactiae
ATGGATATGTCTGTTATTTTAATTATTGTTATTCTTCTGGCTTTTGTTGCTTGGGCATCTTGGAATTATTGGAGGGTTCGTAGGGCAGCTAAATTTTTAGATAACGAGTCTTTTCAAAAAGAAATGTCACGAGGACAGTTAATTGATATCCGAGAAGCTGGTGCTTTTCATAGAAAGCATATTCTCGGAGCACGTAACATTCCAGCAAGTCAATTTAAAGTTGCCTTATCGGCTTTGCGCAAAGATAAACCTGTCCTCTTATATGACGCAAGCCGTGGTCAATCTATTCCAAGGATTGTTTTGTTACTCAGAAAAGAAGGTTTTAATCAACTTTACGTGTTAAAGGACGGTTTCAATTACTGGACGGGTAGAGTTAAGTAA

SEQ ID NO: 970 - protein, 126 aa, Streptococcus agalactiae
MDMSVILIIVILLAFVAWASWNYWRVRRAAKFLDNESFQKEMSRGQLIDIREAGAFHRKHILGARNIPASQFKVALSALRKDKPVLLYDASRGQSIPRIVLLLRKEGFNQLYVLKDGFNYWTGRVK

SEQ ID NO: 971 - DNA, 381 bp, Streptococcus agalactiae
atggatatgtctgttattttaattattgttattcttctggcttttgttgcttgggcatcttggaattattggagggttcgtagggcagctaaatttttagataacgagtcttttcaaaaagaaatgtcacgaggacagttaattgatatccgagaagctggtgcttttcatagaaagcatattctcggagcacgtaacattccagcaagtcaatttaaagttgccttatcggctttgcgcaaagataaacctgtcctcttatatgacgcaagccgtggtcaatctattccaaggattgttttgttactcagaaaagaaggttttaatcaactttacgtgttaaaggacggtttcaattactggacgggtagagttaagtaa

SEQ ID NO: 972 - protein, 126 aa, Streptococcus agalactiae; identical to SEQ ID NO: 970

SEQ ID NO: 973 - DNA, 1842 bp, Streptococcus agalactiae
atgacaaatttaagaacagatatccgtaacgttgcgatcattgcccacgttgaccacggtaaaacaactctcgttgatgaattattaaaacaatcacatactcttgatgagcgtaaagagcttgaagaacgtgcaatggattcaaatgatatcgaaaaagaacgtggtatcaccattcttgcaaaaaatacagccgtagcatacaacgatgttcgtatcaatattatggacacacctggtcacgcggactttggtggtgaagttgagcgtattatgaaaatggttgatggtgttgttttagtcgttgatgcctacgaaggaacaatgccacaaacacgttttgttttgaagaaagctcttgaacaaaacttaattccaatcgttgttgtaaataaaattgataagccgtcagctcgtccatcagaggttgttgatgaagttcttgaactatttattgagctcggtgctgatgatgatcaactagatttccctgttgtttatgcttcagctatcaatggaacatcttcaatgtcagatgatccttcagatcaagaaaaaacaatggcaccgatttttgatactatcattgatcacattccagccccagttgacaactcggaagaaccacttcaattccaagtttctcttcttgattacaatgattttgtaggacgtattggtattggacgtgttttccgcgggactgtcaaagttggagatcaagttactctttcaaaacttgatggtacaactaaaaacttccgcgtaacaaaactttttggtttctttggacttgaacgtaaagaaatccaagaggctaaagcgggtgatttaatcgctgtttctggtatggaagatatcttcgttggtgagacagtaactccgacagatgctattgaaccactaccagttttacgtattgacgagccaacacttcaaatgactttcttggtgaataattcaccatttgcaggtcgcgaaggtaaatggattacgtcacgtaaggttgaagaacgtcttttagcagaattacaaacagacgtttctttacgtgttgacccaacagattcgccagataaatggacggtttcagggcgtggagaattacatttatctatccttattgaaacaatgcgtcgtgagggatatgaacttcaagtatcacgtccagaagttatcatcaaagaaattgatggtgttcaatgcgagccgtttgagcgtgttcaaattgatactccagaagaatatcagggtgctattatccaaagtttgtcagagcgtaaaggtgatatgcttgatatgcagatggttggtaatggtcaaacgcgtttgattttcttgattcctgcacgtggtttgattggttattcaacagagtttctttcaatgacacgtggatatggtatcatgaatcatacttttgaccagtatctaccggttgttcaaggagaaattggtggtcgtcatcgtggtgccttggtttctattgaaaatggtaaagcaactacatattcaattatgcgtattgaagaacgtgggactatctttgtaaatccaggtatagaagtttatgaaggaatgattgttggtgagaattctcgtgataatgacctcggagtcaatattacaactgctaaacaaatgacaaatgtccgttcagcaactaaagatcaaactgcagtcatcaagacgcctcgtatccttactttagaagagtcacttgaatttttagcagatgatgagtacatggaagtaactcctgagtctattcgtcttcgtaaacaaattttaaataaagcagcacgtgacaaagctaataaaaagaaaaaatcagctgaataa

SEQ ID NO: 974 - protein, 613 aa, Streptococcus agalactiae
MTNLRTDIRNVAIIAHVDHGKTTLVDELLKQSHTLDERKELEERAMDSNDIEKERGITILAKNTAVAYNDVRINIMDTPGHADFGGEVERIMKMVDGVVLVVDAYEGTMPQTRFVLKKALEQNLIPIVVVNKIDKPSARPSEVVDEVLELFIELGADDDQLDFPVVYASAINGTSSMSDDPSDQEKTMAPIFDTIIDHIPAPVDNSEEPLQFQVSLLDYNDFVGRIGIGRVFRGTVKVGDQVTLSKLDGTTKNFRVTKLFGFFGLERKEIQEAKAGDLIAVSGMEDIFVGETVTPTDAIEPLPVLRIDEPTLQMTFLVNNSPFAGREGKWITSRKVEERLLAELQTDVSLRVDPTDSPDKWTVSGRGELHLSILIETMRREGYELQVSRPEVIIKEIDGVQCEPFERVQIDTPEEYQGAIIQSLSERKGDMLDMQMVGNGQTRLIFLIPARGLIGYSTEFLSMTRGYGIMNHTFDQYLPVVQGEIGGRHRGALVSIENGKATTYSIMRIEERGTIFVNPGIEVYEGMIVGENSRDNDLGVNITTAKQMTNVRSATKDQTAVIKTPRILTLEESLEFLADDEYMEVTPESIRLRKQILNKAARDKANKKKKSAE

SEQ ID NO: 975 - DNA, 246 bp, Streptococcus agalactiae
atgttttacttaattgttgcccttttgattgccttgtattacttttttatggcaccaaaaacagtacgtaatactttgaacgctattggtttagtaggtttggtagccttattacttgtcttggcagttatgagttttattaaaatccttcaattgccaggtgaattgtatattgggcttataatgattcctctaggatatacagcatttaaagaaacattgaatttgtcagaaaagaagaaatag

SEQ ID NO: 976 - protein, 81 aa, Streptococcus agalactiae
MFYLIVALLIALYYFFMAPKTVRNTLNAIGLVGLVALLLVLAVMSFIKILQLPGELYIGLIMIPLGYTAFKETLNLSEKKK

SEQ ID NO: 977 - DNA, 1356 bp, Streptococcus agalactiae
atgaaaacaataacaacatttgaaaataaaaaagttttagtccttggtttagcacgatctggagaagctgctgcacgtttgttagctaagttaggagcaatagtgacagttaatgatggcaaaccatttgatgaaaatccaacagcacagtctttgttggaagagggtattaaagtggtttgtggtagtcatcctttagaattgttagatgaggatttttgttacatgattaaaaatccaggaataccttataacaatcctatggtcaaaaaagcattagaaaaacaaatccctgttttgactgaagtggaattagcatacttagtttcagaatctcagctaataggtattacaggctctaacgggaaaacgacaacgacaacgatgattgcagaagtcttaaatgctggaggtcagagaggtttgttagctgggaatatcggctttcctgctagtgaagttgttcaggctgcgaatgataaagatactctagttatggaattatcaagttttcagctaatgggagttaaggaatttcgtcctcatattgcagtaattactaatttaatgccaactcatttagattatcatgggtcttttgaagattatgttgctgcaaaatggaatatccaaaatcaaatgtcttcatctgattttttggtacttaattttaatcaaggtatttctaaagagttagctaaaactactaaagcaacaatcgttcctttctctactacggaaaaagttgatggtgcttacgtacaagacaagcaacttttctataaaggggagaatattatgtcagtagatgacattggtgtcccaggaagccataacgtagagaatgctctagcaactattgcggttgctaaactggctggtatcagtaatcaagttattagagaaactttaagcaattttggaggtgttaaacaccgcttgcaatcactcggtaaggttcatggtattagtttctataacgacagcaagtcaactaatatattggcaactcaaaaagcattatctggctttgataatactaaagttatcctaattgcaggaggtcttgatcgcggtaatgagtttgatgaattgataccagatatcactggacttaaacatatggttgttttaggggaatcggcatctcgagtaaaacgtgctgcacaaaaagcaggagtaacttatagcgatgctttagatgttagagatgcggtacataaagcttatgaggtggcacaacagggcgatgttatcttgctaagtcctgcaaatgcatcatgggacatgtataagaatttcgaagtccgtggtgatgaattcattgatactttcgaaagtcttagaggagagtaa

SEQ ID NO: 978 - protein, 451 aa, Streptococcus agalactiae
MKTITTFENKKVLVLGLARSGEAAARLLAKLGAIVTVNDGKPFDENPTAQSLLEEGIKVVCGSHPLELLDEDFCYMIKNPGIPYNNPMVKKALEKQIPVLTEVELAYLVSESQLIGITGSNGKTTTTTMIAEVLNAGGQRGLLAGNIGFPASEVVQAANDKDTLVMELSSFQLMGVKEFRPHIAVITNLMPTHLDYHGSFEDYVAAKWNIQNQMSSSDFLVLNFNQGISKELAKTTKATIVPFSTTEKVDGAYVQDKQLFYKGENIMSVDDIGVPGSHNVENALATIAVAKLAGISNQVIRETLSNFGGVKHRLQSLGKVHGISFYNDSKSTNILATQKALSGFDNTKVILIAGGLDRGNEFDELIPDITGLKHMVVLGESASRVKRAAQKAGVTYSDALDVRDAVHKAYEVAQQGDVILLSPANASWDMYKNFEVRGDEFIDTFESLRGE

SEQ ID NO: 979 - DNA, 1077 bp, Streptococcus agalactiae
atggggaaaaaaattgtttttacaggtggtggtacggtaggtcatgtaacactaaacctaatattaatccccaaatttatcaaagatggttgggaagtacattatattggtgataaaaatggcatagaacatgaacaaattaatcagtctggacttgatatcacatttcactctatagctactgggaaactacgtcgctatttttcatggcaaaatatgttagatgtctttaaagtaggggttggcgttcttcaatcgattgctattattgctaaacttagaccccaagccttattttcaaaagggggatttgtttcagtacctcctgtagtagctgcacgcctattaaaagttcctgtttttgttcatgaatcagatttatcaatggggttagcaaataagattgcttataaatttgcgactattatgtatacgacttttgaacaatctaaagatttaatcaaaactaagcatattggtgctgtaacaaaagtcatggattgtaaaaagtcgtttgaaaatactgacttaactagtataaaagaagccttcgatccaaacctaaagaccttactatttattggaggatcagcaggtgcaaaagtattcaatgattttattactcaaacacctgagctggaagaaaaatataatgttatcaatatttcaggcgattcttctctcaatcgattgaagaagaacctttatcgcgtggattatgttacagacctttatcagcctttaatgaatttagcagatgtggttgttacacgaggtggctctaatactatttttgaattagtagctatgaaaaaacttcatcttattatccctcttggacgtgaagcgagccgaggtgaccaattagagaatgctgcttattttgaagaaaagggctacgcattgcagttaccagaatctgaattaaacataaatacacttgagaaacagataaatttattaatttctaacagtgagagttacgaaaaaaacatgtcacaatcatctgaaataaaatctcaagatgaattttatcaattattaattgatgatatggcaaaagtaacaaaaggataa

SEQ ID NO: 980 - protein, 358 aa, Streptococcus agalactiae
MGKKIVFTGGGTVGHVTLNLILIPKFIKDGWEVHYIGDKNGIEHEQINQSGLDITFHSIATGKLRRYFSWQNMLDVFKVGVGVLQSIAIIAKLRPQALFSKGGFVSVPPVVAARLLKVPVFVHESDLSMGLANKIAYKFATIMYTTFEQSKDLIKTKHIGAVTKVMDCKKSFENTDLTSIKEAFDPNLKTLLFIGGSAGAKVFNDFITQTPELEEKYNVINISGDSSLNRLKKNLYRVDYVTDLYQPLMNLADVVVTRGGSNTIFELVAMKKLHLIIPLGREASRGDQLENAAYFEEKGYALQLPESELNINTLEKQINLLISNSESYEKNMSQSSEIKSQDEFYQLLIDDMAKVTKG

SEQ ID NO: 981 - protein, 1137 aa, Streptococcus agalactiae
ATGCCTAAGAAGAAATCAGATACCCCAGAAAAAGAAGAAGTTGTCTTAACGGAATGGCAAAAGCGTAACCTTGAATTTTTAAAAAAACGCAAAGAAGATGAAGAAGAACAAAAACGTATTAACGAAAAATTACGCTTAGATAAAAGAAGTAAATTAAATATTTCTTCTCCTGAAGAACCTCAAAATACTACTAAAATTAAGAAGCTTCATTTTCCAAAGATTTCAAGACCTAAGATTGAAAAGAAACAGAAAAAAGAAAAAATAGTCAACAGCTTAGCCAAAACTAATCGCATTAGAACTGCACCTATATTTGTAGTAGCATTCCTAGTCATTTTAGTTTCCGTTTTCCTACTAACTCCTTTTAGTAAGCAAAAAACAATAACAGTTAGTGGAAATCAGCATACACCTGATGATATTTTGATAGAGAAAACGAATATTCAAAAAAACGATTATTTCTTTTCTTTAATTTTTAAACATAAAGCTATTGAACAACGTTTAGCTGCAGAAGATGTATGGGTAAAAACAGCTCAGATGACTTATCAATTTCCCAATAAGTTTCATATTCAAGTTCAAGAAAATAAGATTATTGCATATGCACATACAAAGCAAGGATATCAACCTGTCTTGGAAACTGGAAAAAAGGCTGATCCTGTAAATAGTTCAGAGCTACCAAAGCACTTCTTAACAATTAACCTTGATAAGGAAGATAGTATTAAGCTATTAATTAAAGATTTAAAGGCTTTAGACCCTGATTTAATAAGTGAGATTCAGGTGATAAGTTTAGCTGATTCTAAAACGACACCTGACCTCCTGCTGTTAGATATGCACGATGGAAATAGTATTAGAATACCATTATCTAAATTTAAAGAAAGACTTCCTTTTTACAAACAAATTAAGAAGAACCTTAAGGAACCTTCTATTGTTGATATGGAAGTGGGAGTTTACACAACAACAAATACCATTGAATCAACCCCTGTTAAAGCAGAAGATACAAAAAATAAATCAACTGATAAAACACAAACACAAAATGGTCAGGTTGCGGAAAATAGTCAAGGACAAACAAATAACTCAAATACTAATCAACAAGGACAACAGATAGCAACAGAGCAGGCACCTAACCCTCAAAATGTTAATTAG

SEQ ID NO: 982 - protein, 378 aa, Streptococcus agalactiae
MPKKKSDTPEKEEVVLTEWQKRNLEFLKKRKEDEEEQKRINEKLRLDKRSKLNISSPEEPQNTTKIKKLHFPKISRPKIEKKQKKEKIVNSLAKTNRIRTAPIFVVAFLVILVSVFLLTPFSKQKTITVSGNQHTPDDILIEKTNIQKNDYFFSLIFKHKAIEQRLAAEDVWVKTAQMTYQFPNKFHIQVQENKIIAYAHTKQGYQPVLETGKKADPVNSSELPKHFLTINLDKEDSIKLLIKDLKALDPDLISEIQVISLADSKTTPDLLLLDMHDGNSIRIPLSKFKERLPFYKQIKKNLKEPSIVDMEVGVYTTTNTIESTPVKAEDTKNKSTDKTQTQNGQVAENSQGQTNNSNTNQQGQQIATEQAPNPQNVN

SEQ ID NO: 983 - protein, 1374 aa, Streptococcus agalactiae
ATGGCTAGAAATGGCTTTTTTACTGGTTTGGATATAGGAACAAGCTCGATTAAAGTTTTAGTTGCAGAATTTATTGCAAATGAAATGAATGTAATTGGGGTTAGCAACGTCCCTAGTTCCGGTGTAAAAGATGGTATAATTATTGATATTGAGGCAGCAGCAACTGCAATCAAAGAGGCGGTAAAACAAGCTGAGGAGAAAGCAGGCATCACCATTGACAAAATCAATGTTGGATTACCAGCAAATCTTCTCCAAATTGAACCAACTCAAGGAATGATTCCTGTTCCTAATGAATCAAAAGAAATTAAGGATGAAGATGTCGAAAGTGTTGTTAAATCAGCATTGACTAAAAGCATTACTCCTGAAAGAGAAGTTATTTCATTGATTCCGCTTGAATTCATTGTAGATGGTTTCCAAGGGATTAGAGACCCTAGAGGGATGATGGGGATTCGCCTTGAGATGCGTGGTCTTATCTATACTGGACCAACAACTATCCTTCATAATCTTCGTAAAACTGTTGAACGAGCAGGTATAAAAGTAGAGCATGTTGTGATCGCCCCTCTAGCCTTAGCAAAATCAGTTCTAAACGAAGGTGAACGTGAGTTTGGTGCAACTGTGATTGATATGGGAGGCGGACAAACAACAGTCGCTTCTATGCGTAATCAAGAATTGCAATATACTAATATTTATTCTGAAGGTAGCGATTATGTTACCAAAGATATTTCTAAAGTGCTACGTACAACAGTAGAAATCGCCGAAGCATTGAAATTCAACTTTGGACAAGCTAATGTTGAAGAAGCAAGTACTTCTGATACAGTTCAAGTTAATGTTGTTGGTAACGAGGAACCTGTTGAAATTACAGAAAGCTATCTTTCGCAAATTATTTCAGGACGTATTCGTCAAATTTTAGAACATGTCAAACAAGACTTGGGTAGAGGTCGTTTACTTGATTTACCTGGTGGTATTATTCTTGTTGGAGGTGGTGCAATTATGCCAGGAGTTGTCGAGGTTGCTCAACAAATTTTTGGAACTAGAGTTAAATTGCACGTTCCAAACCAAGTAGGTATTCGCAATCCAATGTTTGCTAATGTTATTAGTATCGTTGATTATGTAGGAATGATGTCAGAAGTTGACATTATCGCACAACATGCTGTAACTGGCGACGAAATGCTAAGACATAAACCAGTCGACTTTGATTATAAAGAAAAAACAAATACAATGTCGACAATGCCTTATTCTGAGCCGTTAACCTCTTCTATGGAAGATTCTAATTTAGAACCAATCCGAGCAAGAGAAAACGCTCAAGAGCCTACTGAGCCTAAAGCTAATATTGGTGAGCGCATCAGAGGAATTTTTGGAAGTATGTTTGACTAA

SEQ ID NO: 984 - protein, 457 aa, Streptococcus agalactiae
MARNGFFTGLDIGTSSIKVLVAEFIANEMNVIGVSNVPSSGVKDGIIIDIEAAATAIKEAVKQAEEKAGITIDKINVGLPANLLQIEPTQGMIPVPNESKEIKDEDVESVVKSALTKSITPEREVISLIPLEFIVDGFQGIRDPRGMMGIRLEMRGLIYTGPTTILHNLRKTVERAGIKVEHVVIAPLALAKSVLNEGEREFGATVIDMGGGQTTVASMRNQELQYTNIYSEGSDYVTKDISKVLRTTVEIAEALKFNFGQANVEEASTSDTVQVNVVGNEEPVEITESYLSQIISGRIRQILEHVKQDLGRGRLLDLPGGIILVGGGAIMPGVVEVAQQIFGTRVKLHVPNQVGIRNPMFANVISIVDYVGMMSEVDIIAQHAVTGDEMLRHKPVDFDYKEKTNTMSTMPYSEPLTSSMEDSNLEPIRARENAQEPTEPKANIGERIRGIFGSMFD

SEQ ID NO: 985 - protein, 1281 aa, Streptococcus agalactiae
ATGGTATTTTCATTTGATACAGCATCAGTACAAGGTGCAGTTATTAAAGTTATTGGTGTTGGAGGCGGTGGCGGTAACGCTATTAACCGCATGATTGACGAAGGTGTCGCTGGCGTTGAGTTTATTGCAGCAAATACTGATATTCAAGCCTTAAGTAGCTCAAAAGCTGAAACTGTCATTCAACTTGGTCCAAAATTAACTCGCGGACTTGGTGCAGGAGGACAACCTGAAGTTGGTCGTAAAGCAGCTGAAGAAAGTGAAGAAGTTTTAACAGAAGCACTTACTGGCGCTGATATGGTATTTATCACAGCAGGTATGGGGGGCGGATCTGGTACAGGTGCGGCTCCAGTTATTGCACGTATTGCAAAGAGTTTAGGAGCACTTACAGTAGCGGTCATCACACGTCCTTTTGGCTTTGAGGGTAATAAACGTTCTAACTTCGCTATCGAAGGTATTCAAGAATTAAGAGAACAAGTTGATACACTGCTTATCATTTCAAATAATAATCTTCTTGAAATTGTAGATAAGAAGACACCATTGCTTGAAGCTCTTAGTGAAGCAGATAATGTTTTACGTCAAGGTGTTCAAGGTATTACGGATTTGATTACTAACCCAGGTTTAATTAACCTTGACTTTGCAGATGTTAAAACAGTTATGGCAAATAAAGGTAATGCACTGATGGGAATTGGTATCGGTTCTGGTGAGGAACGTATTACTGAAGCTGCTCGAAAAGCAATTTATTCACCACTTCTTGAAACAACGATTGATGGAGCAGAAGACGTTATTGTCAATGTTACCGGCGGTATGGATATGACACTTACTGAAGCAGAGGAAGCATCAGAGATTGTTAGCCAAGCAGCAGGTAAAGGTGTCAATATTTGGTTAGGTACTTCAATTGACATGGATATGAAAGACGAAATCCGCGTAACAGTTGTTGCAACAGGTGTACGTAAAGATAAAACTAATCAAGTATCTGGTTTTACAACATCAGCTCCAACTAATCAAGCACCTTCAGAACGTCAAAGTACTTCAAATTCAAACTTTGATCGTCGTGGCAACTTTGATATGACAGAGTCTCGCGAAATGCCAACTCAACAAAATCAGCCTCATGCACAAAATCAGCAACAAAGTTCTGCTTTTGGTAATTGGGACCTTCGTCGTGATAATATTTCACGTCCGACAGAAGGTGAACTTGATAGCAAGTTGTCTATGTCAACGTTTTCAGAAAATGATGATATGGATGATGAACTTGAAACACCTCCATTCTTTAAAAACCGTTAA

SEQ ID NO: 986 - protein, 426 aa, Streptococcus agalactiae
MVFSFDTASVQGAVIKVIGVGGGGGNAINRMIDEGVAGVEFIAANTDIQALSSSKAETVIQLGPKLTRGLGAGGQPEVGRKAAEESEEVLTEALTGADMVFITAGMGGGSGTGAAPVIARIAKSLGALTVAVITRPFGFEGNKRSNFAIEGIQELREQVDTLLIISNNNLLEIVDKKTPLLEALSEADNVLRQGVQGITDLITNPGLINLDFADVKTVMANKGNALMGIGIGSGEERITEAARKAIYSPLLETTIDGAEDVIVNVTGGMDMTLTEAEEASEIVSQAAGKGVNIWLGTSIDMDMKDEIRVTVVATGVRKDKTNQVSGFTTSAPTNQAPSERQSTSNSNFDRRGNFDMTESREMPTQQNQPHAQNQQQSSAFGNWDLRRDNISRPTEGELDSKLSMSTFSENDDMDDELETPPFFKNR

SEQ ID NO: 987 - protein, 675 aa, Streptococcus agalactiae
ATGATGAATTTACAAGAAAATAAAACAGCGATTTTTGACAATGTTAGTAAATTAGCACTAAAAGCAGGTCGCGCTCATGAATCAGTTCATATCGTAGCTGTAACAAAATATGTTAACTGTCAAACAACAGAAGCGCTTATTAGAACAGGTGTTAATCATATCGGTGAAAATCGTGTTGATAAATTTCTTGAAAAATATCAAGCATTAAAAGATGAAAAGCTTACATGGCATCTCATTGGTAGTTTACAACGTCGAAAAGTTAAAGATGTCATTAATTATGTTGATTATTTTCATGCTTTAGATTCTGTTAAGTTAGCAGCTGAGATTCAAAAACGTGCTCAAAAACCAATTAAATGTTTTCTACAAGTTAATATATCACGAGAAGACAGTAAGCATGGTTTTACTATTGAGCAAATAGATGATGCACTGAACTTAATTTCTCGGTACGATAAAATTGAACTTATCGGCATCATGACTATGGCTCCCTTAAAAGCAACTAAAGAGGAAATATCATCAATTTTTGAAGAGACTGAGAGTCTTAGGAAAAGGCTTCAAGCTAGGAACATAGAACGAATGCCGTTTACAGAATTAAGCATGGGCATGAGTAGAGATTATGATATTGCTATTCAAAATGGATCAACATTTGTAAGGATAGGAACTTCATTCTTTAAATAA

SEQ ID NO: 988 - protein, 224 aa, Streptococcus agalactiae
MMNLQENKTAIFDNVSKLALKAGRAHESVHIVAVTKYVNCQTTEALIRTGVNHIGENRVDKFLEKYQALKDEKLTWHLIGSLQRRKVKDVINYVDYFHALDSVKLAAEIQKRAQKPIKCFLQVNISREDSKHGFTIEQIDDALNLISRYDKIELIGIMTMAPLKATKEEISSIFEETESLRKRLQARNIERMPFTELSMGMSRDYDIAIQNGSTFVRIGTSFFK

SEQ ID NO: 989 - protein, 606 aa, Streptococcus agalactiae
ATGGCATTAAAAGATAGATTTGACAAAATTATTTCTTATTTTGACACTGACGATGTAAGTGAAAATGAAGTACACGAAGTACAAGAGAGAACTTCAGTGCAAAGAGATTCCAGAGCAGCTACAGCACAGGAAGCTTCTCAGCGTAGTCATATGACTAACTCCGCAGAGGAAGAGATGATTGGTAGTCGTCCGAGAACTTATACCTATGATCCTAATCGTCAGGAGAGACAAAGGGTACAGAGAGACAATGCTTATCAGCAAGCTACTCCTAGGGTTCAAAATAAAGACTCAGTTCGACAACAGAGAGAACAAGTAACAATTGCTCTGAAGTATCCCCGTAAGTATGAGGATGCACAAGAAATTGTTGATTTACTTATCGTTAATGAATGTGTCTTGATTGATTTTCAATATATGCTTGATGCGCAAGCACGACGTTGCTTGGATTATATTGATGGTGCAAGTAGAGTATTATATGGTTCATTACAAAAGGTTGGGAGTTCAATGTTTCTATTAACACCAGCCAATGTTATGGTTGATATTGAGGAGATGAATATTCCAAAGACTGGTCAAGAGACGAGTTTTGATTTTGATATGAAGAGACGATAA

SEQ ID NO: 990 - protein, 201 aa, Streptococcus agalactiae
MALKDRFDKIISYFDTDDVSENEVHEVQERTSVQRDSRAATAQEASQRSHMTNSAEEEMIGSRPRTYTYDPNRQERQRVQRDNAYQQATPRVQNKDSVRQQREQVTIALKYPRKYEDAQEIVDLLIVNECVLIDFQYMLDAQARRCLDYIDGASRVLYGSLQKVGSSMFLLTPANVMVDIEEMNIPKTGQETSFDFDMKRR

SEQ ID NO: 991 - DNA, 255 bp, Streptococcus agalactiae
atgatattagtactattaatattattaaaaacaattagggtctattcttatatcttactagcctatgccttgttatcttggtttccaggagcatacgattcatggattggtagactagtggtacagattgttgatccgattattcgcccactcagaagatttaatctacaatttttaggtctagattttacagtaatagtagcattctttttactaaatatgttgagtagatttttaatcttgctttttacataa

SEQ ID NO: 992 - protein, 84 aa, Streptococcus agalactiae
MILVLLILLKTIRVYSYILLAYALLSWFPGAYDSWIGRLVVQIVDPIIRPLRRFNLQFLGLDFTVIVAFFLLNMLSRFLILLFT

SEQ ID NO: 993 - DNA, 138 bp, Streptococcus agalactiae
atgacgttagatgatatttatcagcattttcgaccagaagagtatgcgtttatccataaaatagaccatttagctcaatatgtcgaaaacacctattcgtttattaccactgaatttctaaatcctaggggaatttaa

SEQ ID NO: 994 - protein, 45 aa, Streptococcus agalactiae
MTLDDIYQHFRPEEYAFIHKIDHLAQYVENTYSFITTEFLNPRGI

SEQ ID NO: 995 - DNA, 540 bp, Streptococcus agalactiae
atggctgattttaaccttagcctaattgaaataaagtataatgctaaatttaatcaccttacccatgctaaaattatgggaactttactgaattacttaggtgtaaaacgatcaattttaggggatatcctagttgaagaaggctgtgctcaggttttggtcgatagtcaaatgacaaatcaccttgttcattcagttacaaaaattggaactgctagtgtacaattagctgaagttcccttgtccaaacttctaactcccaaacaagatattcaaaaactaactgttattgcttccagtttacgtcttgataaaattttagcaacgattttaaagatttcacgaacacagtcgacgaaattgattgaggcagataaagtcaaggtcaattatgcaaccgtcaatcgagtttctgaacaattagtagagggggatttgattagtgttagaggatatggtcgatttacgttgaaccataacctagggttaactaaaaatcaaaaatataagttagaagtagacaaaatgatacataactaa

SEQ ID NO: 996 - protein, 179 aa, Streptococcus agalactiae
MADFNLSLIEIKYNAKFNHLTHAKIMGTLLNYLGVKRSILGDILVEEGCAQVLVDSQMTNHLVHSVTKIGTASVQLAEVPLSKLLTPKQDIQKLTVIASSLRLDKILATILKISRTQSTKLIEADKVKVNYATVNRVSEQLVEGDLISVRGYGRFTLNHNLGLTKNQKYKLEVDKMIHN

SEQ ID NO: 997 - DNA, 771 bp, Streptococcus agalactiae
atgccacttacagcacttgaaattaaagataaaacattttcatcaaaatttcgcggttatagcgaagaagaagttaatgaatttttagagattgttgttgacgattacgaggacttgattagacgtaatcgtgagcaagagcaatacattaaagatttagaagagaaaatcgcttacttcaacgaaatgaaggaatcgttaagtcaatcagttattttagctcaagaaactgctgagcgtgtgaaaatttcagcacaggatgaagcatctaacctaatggggaaagctacatttgatgctcaacatttaattgatgaggctaaattaaaagcaaatcaaatccttcgagatgcgacagatgatgctaagcgtgttgctatagaaacagaagatttgaaacgtcaatcacgtgttttccaccaacgtttgctttctgagttagaagggcagctaaaattagctaactcatctgcttgggaagaattgttgaaaccaacagctatttatcttcaaaattctgatgcttctttcaaagaagttgttgaaaaagttcttgatgaagatgatgctttaccagtggtggatgacactgagtcatttgatgctactcgtcaattctcaccagatgaaatggaagaattacagcgtcgtgttgaagaaagtaacaaacaacttgaagagtcaggtttattagatactaataatttccaaatggaagaaccgatcaatttaggtgaaactcaaacttttaaattaaatattgaagattaa

SEQ ID NO: 998 - protein, 256 aa, Streptococcus agalactiae
MPLTALEIKDKTFSSKFRGYSEEEVNEFLEIVVDDYEDLIRRNREQEQYIKDLEEKIAYFNEMKESLSQSVILAQETAERVKISAQDEASNLMGKATFDAQHLIDEAKLKANQILRDATDDAKRVAIETEDLKRQSRVFHQRLLSELEGQLKLANSSAWEELLKPTAIYLQNSDASFKEVVEKVLDEDDALPVVDDTESFDATRQFSPDEMEELQRRVEESNKQLEESGLLDTNNFQMEEPINLGETQTFKLNIED

SEQ ID NO: 999 - DNA, 1725 bp, Streptococcus agalactiae
caatggcaagaagcatgggatcaagctgacatttataaaaaacgtcaagcattgaatgaaggaaaaccagcctttcaccttcatgacggacctccctatgctaatgggaatattcatgtaggacatgcactaaataaaatttcgaaagacattattgtacgttcaaaatcaatgtcaggttttcgagctccttatgtgcctggttgggatactcatggactcccaattgagcaagtattagctaaaaaaggggttaaacgtaaagaaatggacttggctgaataccttgaaatgtgtcgtgattatgctctcagccaagttgacaaacaacgtgatgattttaaacgtctgggcgtttctgccgattgggaaaatccttatattacactaacaccagattatgaagcagatcaagtacgtgttttcggtgctatggcagataaaggatatatctatcgtggtgctaaaccagtgtattggtcatggtcatcagagtctgcccttgctgaggctgaaatcgaatatcatgatattgattcgacatcactctactatgccaataaagttaaagatggtaagggaattcttgatacagatacctatatcgtcgtttggacgacaacaccatttactgtaacagcttcacgcggtttaacagtaggaccagatatggagtatgttgtagttgtaccagtaggtagtgagcgtaaataccttcttgcagaggttcttgtagatagtctcgctgctaagtttggctgggaaaactttgaaattgtgactcatcacactggtaaagaacttaatcacattgttacagaacatccatgggatacagaagtagaagagttggttatccttggagaccatgttacaacagattctggtacaggtattgtccacacggctcctggttttggtgaagatgactataacgttggtattgctaatggacttgatgttgtagttaccgtagatagtcgtggtttgatgatggaaaatgctggtcctgattttgaaggtcaattctatgacaaagtaacaccacttgtaaaagaaaaattgggagatcttcttttagccagcgaagttatcaaccactcatatccatttgactggcgtacgaaaaagccaatcatttggcgtgcggttccacaatggtttgcctctgtttcgaaattccgtcaagaaatcctcgatgaaattgaaaagacaaatttccaacctgagtggggtaaaaaacgtctttataacatgatccgtgaccgtggcgactgggtaatctcacgtcaacgtgcttggggtgttccacttccaattttttatgcagaagatggtacagctatcatgacaaaagaagtgactgatcacgttgcagatttatttgctgaatacggctcaatcgtttggtggcaacgtgatgctaaggaccttctaccagcaggttatactcatccaggttcacctaatggtctctttgagaaagaaacagacatcatggatgtttggtttgattctggttcatcatggaatggggtaatgaatgctcgtgraaamcyytycctatccagcagatctttatcytgrargktcygwkaymatwmcgkkggttggttcaactymwymmytaattacatcagttgctgttwawkgkymacgctccatacaaarsmrkyyttatctcaaggttttgtacttgatggkwaargkkgagaaaatgtctaa

SEQ ID NO: 1000 - protein, 574 aa, Streptococcus agalactiae
  VARIANT 518, 519, 520, 521, 529, 530, 531, 532, 533, 534, 535, 536,541, 542, 543, 550, 551, 552, 558, 559, 569, 570, 571: Xaa = Any Amino Acid
QWQEAWDQADIYKKRQALNEGKPAFHLHDGPPYANGNIHVGHALNKISKDIIVRSKSMSGFRAPYVPGWDTHGLPIEQVLAKKGVKRKEMDLAEYLEMCRDYALSQVDKQRDDFKRLGVSADWENPYITLTPDYEADQVRVFGAMADKGYIYRGAKPVYWSWSSESALAEAEIEYHDIDSTSLYYANKVKDGKGILDTDTYIVVWTTTPFTVTASRGLTVGPDMEYVVVVPVGSERKYLLAEVLVDSLAAKFGWENFEIVTHHTGKELNHIVTEHPWDTEVEELVILGDHVTTDSGTGIVHTAPGFGEDDYNVGIANGLDVVVTVDSRGLMMENAGPDFEGQFYDKVTPLVKEKLGDLLLASEVINHSYPFDWRTKKPIIWRAVPQWFASVSKFRQEILDEIEKTNFQPEWGKKRLYNMIRDRGDWVISRQRAWGVPLPIFYAEDGTAIMTKEVTDHVADLFAEYGSIVWWQRDAKDLLPAGYTHPGSPNGLFEKETDIMDVWFDSGSSWNGVMNARXXXXLSSRSLSXXXXXXXXGWFNXXXNYISCCXXXTLHTKXXLSQGFVLDGXXXENV

SEQ ID NO: 1001 - protein, 968 aa, Streptococcus agalactiae
TTGAAAAACAATTKKGYGSRRAWMTYKYGYSTCTGTGGRTAACTTCTGTTGACTCAAGTAATGATGTTCGTATTTCAATGGATATCTTAAAACAAACATCAGAAACTTATCGTAAGATCAGGAATACATTGCGTTTCTTGATTGCAAATACTTCCGATTTTAATCCTAAACAAGATGCAGTAGCCTATGAAAATTTAGGTGCCGTTGATCGTTATATGACTATTAAATTTAATCAAGTTGTGGATACAATCAACAAAGCTTATGCTGCTTATGATTTTATGGCAATTTATAAAGCTGTCGTTAACTTCGTAACAGTTGATCTATCAGCATTTTACCTTGATTTTGCAAAAGATGTGGTTTACATTGAAGCGGCTAACAGTCCAGAACGACGTCGTATGCAAACTGTTTTCTATGATATTTTAGTTAAACTTACAAAACTTTTGACTCCGATTCTACCACATACTGCTGAAGAAATTTGGTCATACCTCGAACATGAGGAGGAGGAGTTTGTTCAATTAGCAGAAATGCCTGTTGCACAGACATTCTCTGGTCAAGAAGAAATTCTTGAAGAGTGGTCAGCATTCATGACGTTACGAACACAAGCTCAAAAAGCTCTCGAAGAAGCACGTAACGCTAAAGTTATTGGTAAATCTCTAGAAGCACATTTAACAATTTATGCTAGTCAAGAAGTGAAAACGTTATTAACAGCGTTAAATAGCGATATTGCACTCTTGATGATTGTCTCACAATTAACAATTGCTGATGAAGCAGACAAACCAGCTGACTCAGTATCATTTGAAGGTGTTGCATTTACTGTTGAACACGCTGAAGGTGAAGTCTGCGAACGCTCACGCCGTATTGATCCAACCACAAAGATGCGTTCGTATGGTGTAGCTGTTTGTGATGCTAGTGCAGCAATTATTGAGCAATATTATCCTGAAGCAGTAGCTCAAGGTTTTGAAGCTTAA

SEQ ID NO: 1002 - protein, 322 aa, Streptococcus agalactiae
  VARIANT 5, 6, 7, 8, 9, 10, 11, 14: Xaa = Any Amino Acid
MKNNXXXXXXXLWXTSVDSSNDVRISMDILKQTSETYRKIRNTLRFLIANTSDFNPKQDAVAYENLGAVDRYMTIKFNQVVDTINKAYAAYDFMAIYKAVVNFVTVDLSAFYLDFAKDVVYIEAANSPERRRMQTVFYDILVKLTKLLTPILPHTAEEIWSYLEHEEEEFVQLAEMPVAQTFSGQEEILEEWSAFMTLRTQAQKALEEARNAKVIGKSLEAHLTIYASQEVKTLLTALNSDIALLMIVSQLTIADEADKPADSVSFEGVAFTVEHAEGEVCERSRRIDPTTKMRSYGVAVCDASAAIIEQYYPEAVAQGFEA

SEQ ID NO: 1003 - protein, 303 aa, Streptococcus agalactiae
ATGAGACTAATTAATACAACCAGTAGTCATCCTGAACTAGTTCGAAATCAACTCCAAAATACAGATGCAAAATTAGTGGAAGTCTATTCAGCTGGCAACACCGATGTCGTTTTTACAAAAGCACCTAAACATTATGAATTATTAATTTCAAACAAATATCGTGCTATCAAAGATGAAGAATTAGAAGCTATTCGTGAGTTCTTCTTAAAGCGTAAAATAGATCAATCTATTATTATTCAAGAGCAGATGAAATCACTCCATACTGCCAAGTTAATTGAAATTTCATATCCAACAACAGCATAA

SEQ ID NO: 1004 - protein, 100 aa, Streptococcus agalactiae
MRLINTTSSHPELVRNQLQNTDAKLVEVYSAGNTDVVFTKAPKHYELLISNKYRAIKDEELEAIREFFLKRKIDQSIIIQEQMKSLHTAKLIEISYPTTA

SEQ ID NO: 1005 - protein, 456 aa, Streptococcus agalactiae
ATGACTAATCCTACTTTCGGTGAAAAAATAGATAATGTAAACTATAGGTCACGATTTGGTGTCTATGCTATTATTCCAAATCCAACTCATGATAAAATTATTTTAGTACAGGCACCTAATGGTGCTTGGTTTCTTCCAGGTGGGGAAATTGAAGAAAATGAAAATCACCTAGAAGCTTTAACTCGTGAGTTAATTGAAGAATTAGGTTATTCCGCAACAATTGGCCATTACTATGGTCAAGCTGATGAATATTTTTACTCTAGACACCGTGATACTTACTACTATAATCCCGCCTATATTTATGAAGTTACTGCCTATCATAAGGATCAAGCGCCACTAGAAGATTTCAACCATCTAGCCTGGTTTCCTATCCAAGAAGCTAAAGAAAAGCTAAAACGAGGAAGCCATAGATGGGGTGTCCAAGCTTGGGAAAAAAATCACCATTCTAGGAAATAA

SEQ ID NO: 1006 - protein, 151 aa, Streptococcus agalactiae
MTNPTFGEKIDNVNYRSRFGVYAIIPNPTHDKIILVQAPNGAWFLPGGEIEENENHLEALTRELIEELGYSATIGHYYGQADEYFYSRHRDTYYYNPAYIYEVTAYHKDQAPLEDFNHLAWFPIQEAKEKLKRGSHRWGVQAWEKNHHSRK

SEQ ID NO: 1007 - protein, 2260 aa, Streptococcus agalactiae
ATGCTCTGTCAAAACTGCAAACTAAACGAATCACTATTCATTTGTATACAAATGTTAATGGAAAACAAAAGCAGTTGATCTTTGTCAAAATTGCTACCAAATTATTAAAACTGACCCTAATAATCCACTTTTTTCAGGTTTAAATCATGTTTCACATGCGCCTGGTGGCATCAATCCTTTCTTTGATGATTTCTTTGGAGATTTAAATAATTTCAGAGCCTTTAATGGCCAAGATTTACCAAACACTCCTCCTACACAATCAGGAGGAAACCGAGGTGGAGGAAACGGTAATGGACGAAATAATAATCGCAACCAAACTGCAACTCCTTCTCAAGCCAAAGGGATTCTAGAAGAATTTGGTATCAATGTCACTGAAATAGCCCGCCATGGTGATATTGACCCTGTTATTGGACGTGACTCAGAAATTATTCGTGTTATCGAAATCCTTAATCGTCGTACAAAAAATAATCCTGTACTTATTGGCGAACCCGGCGTTGGGAAAACTGCCGTTGTTGAAGGACTTGCTCAGAAAATTGTTGATGGTAATGTGCCTCATAAACTTCAAGGCAAACAAGTTATTCGTTTGGATGTTGTGAGTCTAGTACAAGGAACGGGCATTCGTGGTCAATTTGAAGAACGCATGCAAAAGTTGATGGAAGAAATTCGTCAACGTCAAGATGTTATTCTATTCATAGATGAAATTCACGAAATAGTTGGAGCTGGTACAGCTGGCGAAGGTAGTATGGATGCAGGTAATATTTTAAAACCTGCCCTTGCACGTGGAGAATTACAACTAGTAGGTGCTACTACTCTCAATGAATATCGTATTATCGAAAAGGACGCTGCCTTAGAACGCCGTATGCAACCTGTAAAAGTCGATGAGCCTTCTGTTGAAGAAACCATTACTATTTTGAAAGGTATCCAAAAAAAATACGAAGATTATCATCATGTAAAATATAATAATGATGCCATAGAAGCAGCTGCAGTACTATCTAATCGTTATATCCAGGACCGCTTTTTACCTGATAAAGCAATAGACTTATTAGATGAAGCTGGTTCTAAAATGAACCTAACACTAAATTTTGTTGATCCAAAAGAAATTGATCAACGTCTCATTGAAGCAGAAAATTTAAAAGCGCAAGCGACTCGTGAAGAAGATTACGAACGTGCAGCTTACTTCCGTGACCAGATTGCAAAATATAAAGAAATGCAACAACAAAAGGTCGACGATCAAGATACACCTATTATTACCGAAAAAACAATTGAGCACATCATTGAAGAAAAAACGAATATCCCTGTTGGTGATTTAAAAGAAAAAGAACAATCTCAATTAATTAATCTCGCAGATGACTTGAAACAACATGTGATCGGCCAGGATGACGCTGTCGTTAAGATTGCAAAAGCTATTCGTCGTAATCGAGTTGGTCTTGGTAGCCCAAACCGTCCTATTGGTTCCTTTTTATTTGTAGGACCAACCGGCGTTGGTAAAACTGAACTTTCTAAACAACTAGCAATTGAGCTCTTTGGTTCAGCTGATAGTATGATTCGTTTTGATATGTCAGAGTACATGGAAAAGCATGCTGTTGCTAAATTAGTCGGAGCGCCTCCAGGATACGTGGGATACGAGGAAGCTGGACAATTAACTGAAAAGGTTCGTCGAAATCCTTACTCGCTCATCCTTCTAGATGAAATTGAAAAAGCTCATCCTGATGTCATGCATATGTTCTTGCAGGTCCTTGATGACGGTCGATTAACAGATGGACAAGGAAGAACTGTTAGTTTTAAAGATACCATTATCATCATGACCTCAAATGCTGGTTCTGGTAAAACTGAAGCAAGCGTTGGCTTTGGTGCCTCACGAGAAGGTAGAACGAATTCCGTACTAGGTCAACTAGGTAACTTCTTCAGCCCTGAATTTATGAACCGCTTTGACGGTATTATTGAATTCAAGGCTTTAGATAAAGAGAATCTCCTCAATATCGTTGATATTATGTTATCTGACGTTAATGCACGTCTCGCCATCAATGGTATTCATCTAGATGTCACTGATAAAGTGAAAGAAAAATTGGTTGATTTAGGTTACGATCCCAAAATGGGAGCACGTCCATTACGTCGTACCATTCAAGAACATATTGAAGATGCTATCACAGATTACTATCTTGAGAATCCAAGCGAAAAAGAACTTCGTGCTATTATGACTAGCAATGGAAATATCATAATAAAATCTTCTAAAAAAACTGAAGAAAGTACAAAAGGTTGA

SEQ ID NO: 1008 - protein, 753 aa, Streptococcus agalactiae
MLCQNCKLNESTIHLYTNVNGKQKQVDLCQNCYQIIKTDPNNPLFSGLNHVSHAPGGINPFFDDFFGDLNNFRAFNGQDLPNTPPTQSGGNRGGGNGNGRNNNRNQTATPSQAKGILEEFGINVTEIARHGDIDPVIGRDSEIIRVIEILNRRTKNNPVLIGEPGVGKTAVVEGLAQKIVDGNVPHKLQGKQVIRLDVVSLVQGTGIRGQFEERMQKLMEEIRQRQDVILFIDEIHEIVGAGTAGEGSMDAGNILKPALARGELQLVGATTLNEYRIIEKDAALERRMQPVKVDEPSVEETITILKGIQKKYEDYHHVKYNNDAIEAAAVLSNRYIQDRFLPDKAIDLLDEAGSKMNLTLNFVDPKEIDQRLIEAENLKAQATREEDYERAAYFRDQIAKYKEMQQQKVDDQDTPIITEKTIEHIIEEKTNIPVGDLKEKEQSQLINLADDLKQHVIGQDDAVVKIAKAIRRNRVGLGSPNRPIGSFLFVGPTGVGKTELSKQLAIELFGSADSMIRFDMSEYMEKHAVAKLVGAPPGYVGYEEAGQLTEKVRRNPYSLILLDEIEKAHPDVMHMFLQVLDDGRLTDGQGRTVSFKDTIIIMTSNAGSGKTEASVGFGASREGRTNSVLGQLGNFFSPEFMNRFDGIIEFKALDKENLLNIVDIMLSDVNARLAINGIHLDVTDKVKEKLVDLGYDPKMGARPLRRTIQEHIEDAITDYYLENPSEKELRAIMTSNGNIIIKSSKKTEESTKG

SEQ ID NO: 1009 - protein, 231 aa, Streptococcus agalactiae
ATGGAATCACATTTAGTGAGAATCATCAATCGCCTCGAATTAATGGCGACTGATGGTGGTAATTTAAAACGTAATTTTGAACGTGAAGGTGTTGTTGTAGCAGAAGTATCTTTTAGTAATGACCCTGAAAACGGTCCTGTTTTCACATTACGTGATGTAGAAGCGCGTGAATCATATTCATTTGACAGCATTGACCTTATCGCAATGGAAATTTACGATTTATTATACTGA

SEQ ID NO: 1010 - protein, 76 aa, Streptococcus agalactiae
MESHLVRIINRLELMATDGGNLKRNFEREGVVVAEVSFSNDPENGPVFTLRDVEARESYSFDSIDLIAMEIYDLLY

SEQ ID NO: 1011 - protein, 414 aa, Streptococcus agalactiae
ATGNNNNNGGGGCTTTCTAATCTTGATGCTCAGACAAAAGCATATGAGCTACTTGAAAAAGTTGGACTCAAAGAGAAGGCTAATACTTATCCAGCTAGCTTATCTGGAGGACAACAACAACGAATTGCTATTGCAAGAGGTCTTGCAATGAATCCTGATGTCCTTCTTTTTGATGAACCTACTTCAGCTCTTGATCCTGAAATGGTAGGTGAAGTCTTGACTGTTATGCAAGATTTAGCTAAATCTGGTATGACGATGGTTATTGTCACTCATGAAATGGGTTTTGCACGTGAAGTAGCGGATCGTGTCATTTTTATGGATGCAGGAATTATTGTTGAGCAAGGGGCCCCTAAGGAAGTATTTGAGCAGACAAAAGAAATCCGCACAAGAGATTTCTTAAGTAAAGTATTATAA

SEQ ID NO: 1012 - protein, 137 aa, Streptococcus agalactiae
  VARIANT 2, 3: Xaa = Any Amino Acid
MXXGLSNLDAQTKAYELLEKVGLKEKANTYPASLSGGQQQRIAIARGLAMNPDVLLFDEPTSALDPEMVGEVLTVMQDLAKSGMTMVIVTHEMGFAREVADRVIFMDAGIIVEQGAPKEVFEQTKEIRTRDFLSKVL

SEQ ID NO: 1013 - protein, 1695 aa, Streptococcus agalactiae
ATGAATTATAAAGAGATTTATCAAGAGTGGTTAGAAAACGACTCACTCGGTAAAGATATTAAGTCAGATTTAGAAGCTATTAAAGGCGATGAATCTGAAATTCAGGATCGTTTTTACAAAACATTAGAATTTGGAACGGCGGGATTGAGAGGTAAACTTGGAGCAGGAACCAATCGTATGAATACTTATATGGTGGGGAAAGCAGCACAAGCATTAGCTAATACGATTATTGATCATGGCCCTGAAGCTATTGCACGTGGAATTGCAGTTAGTTATGATGTCCGTTATCAATCTAAGGAATTTGCAGAATTAACTTGTTCCATTATGGCAGCAAATGGTATTAAGTCTTATATTTATAAAGGGATTCGCCCAACACCAATGTGCTCATATGCTATTCGTGCTCTAGGATGTGTTTCGGGTGTGATGATTACTGCTAGTCATAATCCTCAAGCTTATAATGGTTATAAGGCATATTGGAAAGAAGGATCTCAGATTTTAGATGATATTGCTGATCAAATTGCCAATCATATGGATGCTATAACCGATTATCAGCAAATTAAGCAAATACCCTTTGAAGAGGCTCTGGCAAGTGGTTCGGCAAGTTATATCGATGAGAGTATTGAAGAAGCATATAAAAAAGAAGTGCTTGGTTTAACTATTAATGATACTAATATTGATAAGTCAGTCCGGGTAGTTTATACTCCTTTAAATGGCGTAGGAAATTTACCTGTGCGCGAAGTTTTAAGACGCCGTGGTTTTGAAAATGTTTATGTGGTACCTGAGCAGGAAATGCCCGATCCTGATTTTACAACGGTTGGCTATCCAAACCCTGAAGTTCCTAAAGCATTTGCCTATTCAGAATCTCTAGGAAAGTCAGTTGATGCAGATATCTTACTTGCCACAGATCCAGATTGTGACCGAGTAGCATTGGAAGTCAAAGATAGTAAGGGAGAATATATTTTCTTAAATGGTAATAAGATAGGGGCACTTCTTTCCTATTATATTTTTTCACAACGATGTGCCTTAGGGAATTTGCCACATCATCCTGTATTGGTAAAATCCATTGTAACTGGTGATCTATCAAAAGTTATTGCAGATAAATATAATATTGAAACTGTTGAAACTTTAACAGGATTTAAAAATATTTGTGGAAAAGCTAATGAATATGATATCTCAAAGGATAAAACTTATCTCTTTGGCTATGAAGAAAGTATTGGTTTTTGCTATGGCACTTTTGTACGTGATAAAGATGCTGTGAGTGCTTCAATGATGGTAGTAGAAATGACTGCCTATTATAAAGAACGAGGGCAAACACTTTTAGACGTTTTGCAAACCATTTACGATAAATTTGGCTATTACAACGAGCGCCAATTTTCTCTTGAGTTAGAGGGTGCTGAGGGGCAAGAACGTATTAGTCGTATTATGGAGGATTTTAGACAGGACCCAATATTACAAGTAGGTGAGATGACATTGGAGAATTCTATTGATTTCAAGGATGGTTATAAGGATTTTCCAAAGCAAAATTGTTTAAAATATTATTTTAATGAGGGTTCATGGTATGCTTTAAGGCCGTCAGGGACGGAACCTAAGATAAAATGTTACCTTTATACGATTGGTTGTACAGAAGCAGATAGTTTATCGAAACTTAATGCAATTGAGTCGGCTTGTCGTGCTAAAATGAATAGTACTAAATAA

SEQ ID NO: 1014 - protein, 564 aa, Streptococcus agalactiae
MNYKEIYQEWLENDSLGKDIKSDLEAIKGDESEIQDRFYKTLEFGTAGLRGKLGAGTNRMNTYMVGKAAQALANTIIDHGPEAIARGIAVSYDVRYQSKEFAELTCSIMAANGIKSYIYKGIRPTPMCSYAIRALGCVSGVMITASHNPQAYNGYKAYWKEGSQILDDIADQIANHMDAITDYQQIKQIPFEEALASGSASYIDESIEEAYKKEVLGLTINDTNIDKSVRVVYTPLNGVGNLPVREVLRRRGFENVYVVPEQEMPDPDFTTVGYPNPEVPKAFAYSESLGKSVDADILLATDPDCDRVALEVKDSKGEYIFLNGNKIGALLSYYIFSQRCALGNLPHHPVLVKSIVTGDLSKVIADKYNIETVETLTGFKNICGKANEYDISKDKTYLFGYEESIGFCYGTFVRDKDAVSASMMVVEMTAYYKERGQTLLDVLQTIYDKFGYYNERQFSLELEGAEGQERISRIMEDFRQDPILQVGEMTLENSIDFKDGYKDFPKQNCLKYYFNEGSWYALRPSGTEPKIKCYLYTIGCTEADSLSKLNAIESACRAKMNSTK

SEQ ID NO: 1015 - protein, 854 aa, Streptococcus agalactiae
ATGACTGAATTAATAGATGGTAAAGCCTTATCACAAAAAATGCAGGCTGAGTTAGGGCGAAAAGTTGAAAGGTTAAAGGAACAGCATGGTATCATACCTGGTTTAGCTGTAATCCTTGTTGGGGATAATCCAGCTAGCCAAGTGTACGTTCGAAATAAAGAACGCTCTGCATTAGAAGCTGGTTTTAAAAGTGAGACTCTACGATTATCTGAATCCATTTCTCAAGAAGAACTGATTGATATTATCCATCAATACAATGAAGATAAAAGTATCCATGGTATTTTAGTTCAACTTCCGTTACCACAACATATTAACGATAAAAAATTATTTTAGCAATAGATCCTAAGAAAGATGTTGATGGTTTCCACCCAATGAATACGGGTCATCTTTGGTCAGGACGACCGATGATGGTACCTTGTACGCCAGCTGGTATTATGGAGATGTTTAGAGAGTACCATGTGGATTTAGAGGGAAAACATGCTGTTATCATCGGAAGGTCCAATATTGTTGGTAAGCCAATGGCACAACTTCTCCTTGATAAAAACGCAACAGTTACTTTGACACATTCAAGAACTCGAAACCTTTCTGAGGTAACAAAGGAGGCTGATATCCTTATTGTTGCGATTGGTCAGGGGCACTTTGTTACAAAAGACTTCGTTAAAGAAGGTGCTGTGGTGATTGATGTTGGTATGAATCGCGATGAAAATGGTAAATTGATTGGAGACGTTGTATTTGAACAAGTGGCAGAAGTTGCTAGTATGATAACACCTGTTCCTGGGGGCGTAGGACCTATGACGATTACAATGCTTTTGGAACAAACTTATCAAGCAGCTCTTAGAAGTGTGAGTCTATGA

SEQ ID NO: 1016 - protein, 284 aa, Streptococcus agalactiae
MTELIDGKALSQKMQAELGRKVERLKEQHGIIPGLAVILVGDNPASQVYVRNKERSALEAGFKSETLRLSESISQEELIDIIHQYNEDKSIHGILVQLPLPQHINDKKIILAIDPKKDVDGFHPMNTGHLWSGRPMMVPCTPAGIMEMFREYHVDLEGKHAVIIGRSNIVGKPMAQLLLDKNATVTLTHSRTRNLSEVTKEADILIVAIGQGHFVTKDFVKEGAVVIDVGMNRDENGKLIGDVVFEQVAEVASMITPVPGGVGPMTITMLLEQTYQAALRSVSL

SEQ ID NO: 1017 - protein, 714 aa, Streptococcus agalactiae
ATGGCAGCTTTGGCCTGTGTCAAAACTGGTGCAGGATTAGTTACTGTAGCAACCCAAAGTTGCAATATCCCCTCTTTGCATAGTCAACTACCAGAGGTAATGGCGTTTGATAGTGATGATTACAAATGGTTGGAAAAATCAATTGTTCAAAGTGATGTTATTGTAATTGGTCCTGGATTAGGAGTATCAGAATCATCTCGAAAAATTTTGAACCAGACCATGGAGAAGATTCAATCACATCAAAGTGTCATCCTTGACGGATCAGCCTTGACTCTGTTATCAGAAGGTGCGTTTCCGCAAACAAAGGCTAAAAATTTAGTGTTGACACCTCATCAAAAAGAATGGGAGCGATTGTCAGGTATCGCTGTATCGCAACAGACAAAAGAAAATACCCAAACCGCTCTTAAATCTTTTCCCAAAGGGACGATTTTAGTCGCTAAGAGTTCGCATACGCGTATTTTTCAAGATTTAGACGAAAAAGAAATTATAGTAGGAGGTCCTTACCAGGCGACTGGAGGGATGGGGGATACTTTGTGTGGTATGATTGCAGGTATGTTAGCGCAATTTAAAGAAGCCTCTCCTCTAGATAAGGTATCAGTGGGAGTTTATCTACATTCGGCAATTGCTCAAGGATTATCTAAAGAAGCCTATGTTGTTCTACCGACAACGATTAGTGATGAGATTCCAAAAGAAATGGCTAGACTATCTAAATAA

SEQ ID NO: 1018 - protein, 237 aa, Streptococcus agalactiae
MAALACVKTGAGLVTVATQSCNIPSLHSQLPEVMAFDSDDYKWLEKSIVQSDVIVIGPGLGVSESSRKILNQTMEKIQSHQSVILDGSALTLLSEGAFPQTKAKNLVLTPHQKEWERLSGIAVSQQTKENTQTALKSFPKGTILVAKSSHTRIFQDLDEKEIIVGGPYQATGGMGDTLCGMIAGMLAQFKEASPLDKVSVGVYLHSAIAQGLSKEAYVVLPTTISDEIPKEMARLSK

SEQ ID NO: 1019 - protein, 1341 aa, Streptococcus agalactiae
ATGTCAGACTATTTATCCGTGTCGACACTGACTAAGTATTTAAAATTAAAATTTGACAAAGACCCTTATTTAGAGAGGGTTTATTTAACTGGGCAAGTGTCTAATTTTCGTCGTCGCCCAAACCATCAATATTTCTCTTTAAAAGATGATAAATCAGTCATTCAGGCGACAATGTGGTCAGGTCACTTCAAAAAATTGGGTTTTGAATTAGAGGAAGGGATGAAGGTTAATGTAGTTGGCCGTGTTCAACTTTATGAACCAAGCGGCTCCTACTCTATTATTGTTGAAAAAGCAGAACCGGATGGTATAGGAGCTCTTGCTATCCAATTTGAACAACTAAAGAAGAAACTCTCTCAAGCAGGTTATTTTGATGATCGTCATAAGCAATTAATTCCTCAATTTGTTAGAAAAATAGGAGTTGTGACTAGTCCAAGTGGAGCCGTTATTCGGGATATTATTACAACAGTATCTCGTCGATTTCCAGGAGTGGAAATATTACTTTTCCCCACAAAAGTTCAAGGAGAGGGCGCAGCTCAGGAAATAGCACAAACTATTGCTTTAGCTAACGAGAAAAAGGATTTGGATCTATTAATTGTTGGCCGTGGGGGAGGTTCTATTGAGGACTTATGGGCATTTAATGAAGAATGTGTTGTAGAAGCTATTTTTGAATCTCGTCTTCCCGTTATTTCTAGTGTCGGACATGAAACTGATACAACTTTAGCAGATTTTGTAGCCGATCGCAGAGCAGCAACTCCAACTGCAGCAGCTGAGCTTGCTACACCGGTTACTAAAATTGATATCTTGTCTTGGATTACTGAACGTGAAAATAGAATGTATCAGTCTAGCCTTCGTCTTATCAGGACAAAAGAGGAGAGGTTGCAAAAATCAAAGCAATCAGTTATTTTTAGGCAACCAGAGCGTCTATATGATGGTTTCCTTCAAAAATTAGATAACCTAAATCAGCAGTTAACATATTCTATGCGTGATAAACTACAAACAGTAAGACAAAAGCAAGGTTTGCTTCATCAAAAACTGCAAGGCATAGATTTAAAACAGCGTATTCATATTTACCAAGAGCGTGTTGTGCAAAGTAGACGACTATTATCAAGTACAATGACTAGTCAGTATGACAGCAAGCTAGCACGTTTTGAAAAGGCTCAAGATGCGCTTATATCATTGGATAGTTCTAGAATTGTAGCGCGTGGTTACGCTATTATCGAAAAAAACCATACTTTAGTATCTACTACTAATGGAATAAATGAAGGAGATCATTTGCAAGTTAAGATGCAAGATGGTCTTTTAGAAGTTGAGGTGAAGGATGTCAGACAAGAAAACATTTGA

SEQ ID NO: 1020 - protein, 446 aa, Streptococcus agalactiae
MSDYLSVSTLTKYLKLKFDKDPYLERVYLTGQVSNFRRRPNHQYFSLKDDKSVIQATMWSGHFKKLGFELEEGMKVNVVGRVQLYEPSGSYSIIVEKAEPDGIGALAIQFEQLKKKLSQAGYFDDRHKQLIPQFVRKIGVVTSPSGAVIRDIITTVSRRFPGVEILLFPTKVQGEGAAQEIAQTIALANEKKDLDLLIVGRGGGSIEDLWAFNEECVVEAIFESRLPVISSVGHETDTTLADFVADRRAATPTAAAELATPVTKIDILSWITERENRMYQSSLRLIRTKEERLQKSKQSVIFRQPERLYDGFLQKLDNLNQQLTYSMRDKLQTVRQKQGLLHQKLQGIDLKQRIHIYQERVVQSRRLLSSTMTSQYDSKLARFEKAQDALISLDSSRIVARGYAIIEKNHTLVSTTNGINEGDHLQVKMQDGLLEVEVKDVRQENI

SEQ ID NO: 1021 - protein, 216 aa, Streptococcus agalactiae
ATGTCAGACAAGAAAACATTTGAAGAAAATTTACAGGAATTAGAGACAATTGTCTCACGTTTAGAAACAGGTGATGTTGCCTTAGAAGATGCCATTGCTGAATTTCAAAAAGGAATGCTTATTTCAAAAGAGTTACAAAGAACTTTAAAAGAAGCTGAAGAGACGCTTGTAAAAGTGATGCAAGCTGACGGAACGGAAGTAGAAATGGATACTTGA

SEQ ID NO: 1022 - protein, 71 aa, Streptococcus agalactiae
MSDKKTFEENLQELETIVSRLETGDVALEDAIAEFQKGMLISKELQRTLKEAEETLVKVMQADGTEVEMDT

SEQ ID NO: 1023 - protein, 873 aa, Streptococcus agalactiae
ATGGTTACTATTGAAAAAATTGATGAAGCTATTCATCGTTATTACAAACAGACACATAGTGTCGTTTCTCCTGATTTGATTAAGGCTATCCTCTACTCAGTTGATGGAGGTGGGAAACGTATTCGTCCACGCATCCTTTTAGAAATTTTAGAGGGATTTGGAGTTGAACTAATAGATGGTCATTATGATGTGGCTGCTGCTTTGGAGATGATTCACACCGGCTCTTTAATCCATGATGATTTACCGGCGATGGATAATGATGATTTTCGTCGTGGCCGCTTAACAAACCATAAAAAGTTTGATGAAGCTACAGCGGTTTTAGCTGGAGATTCCCTTTTTTTAGACCCATTTGATTTAGTTGTAAAAGCTGGTTTTAAAGCTGATGTTACTGTTAGGTTAATAGAGTTATTGTCTATGTCTGCGGGTAGTTTTGGCATGGTTGGTGGACAAATGTTAGATATGAAGGGAGAAAACAAAGTTTTATCTATTGACGATTTAAGCTTGATTCATATTAATAAAACGGGACGCCTGTTAGCTTATCCCTTTGTTGCAGCAGGTATTTTAGCTGAGAAGTCGGAAGAAGTAAAAGGAAAACTGCATCAAGCTGGCCTTTTAATCGGTCATGCTTTTCAAGTACGTGATGATATTTTAGATGTGACTGCTAGTTTTGAAGAATTGGGGAAGACACCAAATAAAGACATTGTAGCAGAAAAGACAACTTATCCAAATTTATTGGGTTTGGATAAGTCACAGGAAATACTTGATGATACTTTGAAAAAAGCTCAGGCAATTTTTCAAAATCTAGAGAAAAAAGCTAACTTTAATGCTAGAAAAATAATAGATATAATAGAGGGATTACGGTTGAATGGCTAA

SEQ ID NO: 1024 - protein, 290 aa, Streptococcus agalactiae
MVTIEKIDEAIHRYYKQTHSVVSPDLIKAILYSVDGGGKRIRPRILLEILEGFGVELIDGHYDVAAALEMIHTGSLIHDDLPAMDNDDFRRGRLTNHKKFDEATAVLAGDSLFLDPFDLVVKAGFKADVTVRLIELLSMSAGSFGMVGGQMLDMKGENKVLSIDDLSLIHINKTGRLLAYPFVAAGILAEKSEEVKGKLHQAGLLIGHAFQVRDDILDVTASFEELGKTPNKDIVAEKTTYPNLLGLDKSQEILDDTLKKAQAIFQNLEKKANFNARKIIDIIEGLRLNG

SEQ ID NO: 1025 - protein, 800 aa, Streptococcus agalactiae
ATGGCTAAAGAGAGGGTAGATGTTCTTGCCTATAAACAGGGACTTTTTGATACACGAGAGCAAGCGAAACGTGGTGTTATGGCAGGAATGGTGATTAACGTTATCAATGGAGAACGTTATGATAAACCAGGTGAAAAGGTTGCAGACGATACTGAATTAAAACTAAAAGGTGAAAAACTAAAATATGTTAGTAGAGGTGGATTGAAATTAGAAAAAGCTTTACAAGTTTTTGAAATTTCAGTTGCAGATAAGCTAACTATAGATATTGGCGCCTCTACGGGTGGTTTTACTGATGTTATGCTACAATCAGGAGCGCGTTTAGTTTACGCAGTAGATGTAGGAACAAATCAATTAGTTTGGAAGTTACGTCAGGATCATCGTGTTCGTTCTATGGAACAATATAATTTTAGGTATGCCCAAAAAGAAGATTTCAAGGAGGGACTGCCTGAATTTGCATCGATAGATGTCTCATTTATCTCTCTTAATTTGATTTTACCAGCTCTAAAAGAAATTTTAGTGGATGGTGGACAAGTAGTGGCATTAATTAAACCACAATTTGAAGCAGGTCGTGAGCAAATTGGTAAAAATGGTATTGTCAAAGACAAGTTGGTTCATGAAAAGGTTTTGACAACAGTGACCAATTTCACGAAAGATTATGGATATACGGTTAAACATCTTGATTTTTCGCCCATTCAAGGTGGACATGGAAATATTGAGTTTTTAATGCATTTGCAAAAGTGTCAAGATCCACAAAATCTTGTGCTTGACCAAATACAAGATGTTATAGAAAAAGCACATAA

SEQ ID NO: 1026 - protein, 266 aa, Streptococcus agalactiae
MAKERVDVLAYKQGLFDTREQAKRGVMAGMVINVINGERYDKPGEKVADDTELKLKGEKLKYVSRGGLKLEKALQVFEISVADKLTIDIGASTGGFTDVMLQSGARLVYAVDVGTNQLVWKLRQDHRVRSMEQYNFRYAQKEDFKEGLPEFASIDVSFISLNLILPALKEILVDGGQVVALIKPQFEAGREQIGKNGIVKDKLVHEKVLTTVTNFTKDYGYTVKHLDFSPIQGGHGNIEFLMHLQKCQDPQNLVLDQIQDVIEKST

SEQ ID NO: 1027 - protein, 474 aa, Streptococcus agalactiae
ATGAAGAAGAGTGAACGTTTAAATTTAATTAAGCAAATTGTTCTTAACCATGCTGTTGAAACACAACATGAGTTGTTACGCAGATTGGAAGCTTATGGGGTAACTCTAACTCAAGCAACTATTTCACGTGATATGAATGAAATTGGCATTATAAAAGTGCCATCAGCAAAAGGTCGCTATATTTACGGTTTGTCAAATGAAAACGACCCTATCTTTACAACTGCTGTGGCAAAGCCTATTAAAACAAGTATTTTATCAATATCAGATAAGCTACTAGGTTTAGAGCAATTTATCAATATTAATGTCATACCAGGTAACAGTCAATTAATTAAAACCTTCATAATGTCACATTGTCAAGAACATATTTTTAGTTTGACAGCTGACGATAATAGTCTCCTTTTGATTGCAAAATCAGAAGCAGATGCTGATCACATTCGTCAATCAATGATTGCAATGTTGGAGAAAAAAGATTAG

SEQ ID NO: 1028 - protein, 157 aa, Streptococcus agalactiae
MKKSERLNLIKQIVLNHAVETQHELLRRLEAYGVTLTQATISRDMNEIGIIKVPSAKGRYIYGLSNENDPIFTTAVAKPIKTSILSISDKLLGLEQFININVIPGNSQLIKTFIMSHCQEHIFSLTADDNSLLLIAKSEADADHIRQSMIAMLEKKD

SEQ ID NO: 1029 - protein, 1530 aa, Streptococcus agalactiae
ATGCTTTTAGAAATTTCTATTAAGAATTTCGCTATTATCGAAGAAATTTCACTTAATTTTGAAACAGGAATGACTGTTTTAACTGGTGAGACTGGTGCAGGGAAATCTATCATTATTGATGCTATGAATATGATGTTAGGATCCCGTGCTAGCGTTGAAGTGATTCGCCATGGTGCTAACAAAGCAGAAATTGAAGGATTTTTCTCTGTTGAAAAAAATCAATCATTAGTCCAATTATTGGAAGAAAATGGCATTGAATTAGCAGATGAATTAATTATTCGCCGAGAAATCTTTCAAAATGGGCGCAGCGTTAGTCGAATTAATGGGCAAATGGTGAATTTGTCAACACTAAAAGCTGTGGGGCATTATTTGGTAGACATTCATGGTCAGCATGACCAAGAGGAACTAATGAAACCTAACATGCACATTCTGATGTTAGATGAATTTGGTAATACAGAATTTAATGTCATAAAAGAACGTTATCAAAGTCTTTTTGATGCTTATCGTCAGCTTCGTAAACGCGTATTGGATAAGCAAAAAAATGAACAAGAGAATAAATCACGTATTGAAATGCTAGAATTTCAAATAGCAGAAATTGAGTCTGTAGCCCTTAAATCAGATGAAGACCAAACGCTACTCAAGCAACGTGATAAATTAATGAATCATAAGAATATTGCAGATACTTTGACAAATGCATATCTTATGTTAGATAACGAAGAGTTTTCAAGTTTATCGAATGTTCGTTCTGCAATGAATGACCTTATGGCTTTAGAAGAATTTGATCGAGAATATAAAGATCTTTCCACCAATCTTTCAGAAGCTTACTACGTTATTGAAGAAGTTACTAAACGTTTAGGTGACGTTATCGATGATTTAGATTTTGACGCTGGTTTACTACAAGAAATTGAAAATAGACTAGATGTTATTAACACAATAACGCGAAAATATGGCGGTGATGTGAATGATGTTTTAGACTATTTTGATAACATTACTAAAGAATATAGTCTATTGACAGGTAGTGAAGAGTCCTCAGATGCTTTAGAAAAAGAATTAAAGATTTTAGAACACGATTTGATTGAATCAGCAAATCAATTAAGTTTAGAGCGCCATAAGCTAGCTAAACAATTGGAAAATGAAATCAAACAAGAATTAACAGAGCTTTATATGGAGAAAGCTGATTTCCAAGTTCAATTTACAAAAGGAAAATTTAATAAAGAAGGGAACGAAATCGTTGAATTTTATATTTCAACGAATCCCGGAGAGGGCTTTAAGCCATTGGTAAAAGTGGCTTCAGGAGGAGAGTTATCTCGATTGATGTTAGCTATTAAATCTGCTTTTTCACGTAAGGAAGATAAAACTTCCATTGTATTTGATGAGGTGGATACAGGAGTTTCTGGTCGCGTGGCCCAGGCTATCGCTCAAAAAATTCACAAGATTGGTAGTCATGGACAAGTTTTAGCAATTTCTCATTTAGCTCAGGTTATTGCAATAGCGGATTACCAATATNNNNNCATTCCATTCATTAATTAA

SEQ ID NO: 1030 - protein, 509 aa, Streptococcus agalactiae
  VARIANT 503, 504: Xaa = Any Amino Acid
MLLEISIKNFAIIEEISLNFETGMTVLTGETGAGKSIIIDAMNMMLGSRASVEVIRHGANKAEIEGFFSVEKNQSLVQLLEENGIELADELIIRREIFQNGRSVSRINGQMVNLSTLKAVGHYLVDIHGQHDQEELMKPNMHILMLDEFGNTEFNVIKERYQSLFDAYRQLRKRVLDKQKNEQENKSRIEMLEFQIAEIESVALKSDEDQTLLKQRDKLMNHKNIADTLTNAYLMLDNEEFSSLSNVRSAMNDLMALEEFDREYKDLSTNLSEAYYVIEEVTKRLGDVIDDLDFDAGLLQEIENRLDVINTITRKYGGDVNDVLDYFDNITKEYSLLTGSEESSDALEKELKILEHDLIESANQLSLERHKLAKQLENEIKQELTELYMEKADFQVQFTKGKFNKEGNEIVEFYISTNPGEGFKPLVKVASGGELSRLMLAIKSAFSRKEDKTSIVFDEVDTGVSGRVAQAIAQKIHKIGSHGQVLAISHLAQVIAIADYQYXXIPFIN

SEQ ID NO: 1031 - protein, 544 aa, Streptococcus agalactiae
TGAAGCATCACGCCAGGGAGCTAATATTGCTGGTGCAGATGTTACAGTTATTGATTCTACTTTTACAGACCAGTGTCAAAAATTCCAGGTTGTAGAAGCTGCGAAATTAGCTAAAGAGGGAGCTGATTTAGATACCATCTTGGCTCGTGTGGAAGAAGTACGCCAGAAGTCAGAATTATTTATTGGCGTATCGACCCTTGAAAATTTAGTAAAAGGTGGTCGTATTGGACGTGTAACGGGTCTTCTAAGTTCATTGCTTAATATAAAAGTAATTATGGAGCTAACAAACCATGAATTAGTACCGATTGTTAAAGGTCGCGGTCTAAAGACCTTCAGCAAATGGTTAGATAATTTTGTTGAAAGTGCCCAAACACGAAAAATTGCTGAAATTGGCATCTCCTACTGTGGTAAAGCTGATATGGCTAATAACTTTAGAGAAAAACTAGCTGTTCTAGGTGCTCCTATATCCGTTTTAGAAACTGGCTCAATCATCCAAACTCATACTGGTGAGGATGCATTTGCTGTTATGGTTCGTTATGAATAA

SEQ ID NO: 1032 - protein, 181 aa, Streptococcus agalactiae
LKASRQGANIAGADVTVIDSTFTDQCQKFQVVEAAKLAKEGADLDTILARVEEVRQKSELFIGVSTLENLVKGGRIGRVTGLLSSLLNIKVIMELTNHELVPIVKGRGLKTFSKWLDNFVESAQTRKIAEIGISYCGKADMANNFREKLAVLGAPISVLETGSIIQTHTGEDAFAVMVRYE

SEQ ID NO: 1033 - protein, 858 aa, Streptococcus agalactiae
TTGCTGTTATGGTTCGTTATGAATAAGAAAAAAATACTTACCGGACTTTCTTTTTTTCTGGTAAGTCTTCTTTTATCTTTTGGGATTTTTTCCTTGATCATTCCAAAATCAAATCCTAAATTAACAAAAAAAGACTTCCTAACAAAGAAAGTTATCCCACTTAACTATGTTGCTCTTGGAGATTCTCTGACCGAAGGTGTGGGCGATACAACCTCTCAAGGTGGTTTTGTTCCACTGCTATCAGAATCACTCCATAATCGATACTCTTACCAAGTGACTTCTGTTAATTATGGTGTGTCTGGGAATACTAGTCAACAAATTTTAAAACGTATGACGACAGATCCTCAAATCGAAAAAGATTTAGAGAAAGCTGATTTATTGACGCTAACTGTTGGTGGTAATGATGTCTTGGCTGTTATTCGTAAAGAGCTCAGTCATTTATCACTAAATTCCTTTGAGAAACCAGCAGAAGCATATAAGGAACGTTTGAAAGAAATCCTTGCAAAAGCAAGACAAGATAATCCTAAATTGCCTATTTATGTTTTAGGCATTTATAATCCTTTTTACCTAAACTTTCCACAATTAACTAAAATGCAAACCGTTATTGATAATTGGAATAAAGCTACAAAAGAAGTAGTTGATGCTTCAGAAAATGTTTATTTTGTCCCAATTAATGACCGCCTTTATAAGGGAATAAATGGTAAAGAGGGTATTACAGAGTCATCAAATAGTCAGGCAAGTATCACTAATGATGCTCTCTTTACTGGAGACCATTTTCATCCCAATAATATTGGCTATCAAATCATGTCTAACGCCGTTATGGAGAAAATAAATGAAACAAGAAAAAACTGGCCGTAA

SEQ ID NO: 1034 - protein, 285 aa, Streptococcus agalactiae
MLLWFVMNKKKILTGLSFFLVSLLLSFGIFSLIIPKSNPKLTKKDFLTKKVIPLNYVALGDSLTEGVGDTTSQGGFVPLLSESLHNRYSYQVTSVNYGVSGNTSQQILKRMTTDPQIEKDLEKADLLTLTVGGNDVLAVIRKELSHLSLNSFEKPAEAYKERLKEILAKARQDNPKLPIYVLGIYNPFYLNFPQLTKMQTVIDNWNKATKEVVDASENVYFVPINDRLYKGINGKEGITESSNSQASITNDALFTGDHFHPNNIGYQIMSNAVMEKINETRKNWP

SEQ ID NO: 1035 - protein, 516 aa, Streptococcus agalactiae
GTGATTGCAAGTCGCTTAATTCAAGTACGTGAGCCTAATACAGGAAAAATTTCGACTGGGGTACAAGATAAAGTAAAAGTAGGTACTTTTACGACCAATAAGTCGCAACTGAATAAGACAATTGCACTTTATTTAAAACAATATCAAACTAAGAAGATGAATTATAAGATTTATGCTGCTTCATCTTCTATACTATTTGAAGGCTCTTATCAATTATTAGGTTATGAAGTGCCTTTATACATCTATTTTGAACCTTATCGTTTAACAAATGGCGCTGTTCAACTTAAAGTGACCTCATTTTCAGTAGGAACTCTTCCGCTTCCAGAAAAAGATGTGTTACAATATATAAAATCATCTTATAAATTGCCAAACTTTGTAGATATAAAACCTAAAAAATCGGTTATTAATATTAATTTGCAAGATTTAAAAAATAAAGAAGGTATTTATTTGAAAGCGACTGCAATTGATTTAGTAAACGATAATTTTAGTTTCGATATTTTTAAGAAAAAGCCCTAA

SEQ ID NO: 1036 - protein, 171 aa, Streptococcus agalactiae
MIASRLIQVREPNTGKISTGVQDKVKVGTFTTNKSQLNKTIALYLKQYQTKKMNYKIYAASSSILFEGSYQLLGYEVPLYIYFEPYRLTNGAVQLKVTSFSVGTLPLPEKDVLQYIKSSYKLPNFVDIKPKKSVININLQDLKNKEGIYLKATAIDLVNDNFSFDIFKKKP

SEQ ID NO: 1037 - protein, 270 aa, Streptococcus agalactiae
ATGAATGNNNNNTTAATTGCAAAAGTAGCAGAAGCTACAGAATTAACTAAAAAAGATTCAGCAGCAGCAGTAGATGCAGTTTTTGCAGCTGTAGCAGATTACCTTGCTGAAGGTGAAAAAGTACAATTAATCGGTTTTGGTAACTTTGAAGTTCGTGAACGTGCAGCTCGTAAAGGTCGTAACCCACAAACTGGTGCAGAAATCGAAATTGCAGCATCAAAAGTTCCAGCATTTAAAGCTGGTAAAGCTCTTAAAGACGCTGTTAAATAA

SEQ ID NO: 1038 - protein, 89 aa, Streptococcus agalactiae
  VARIANT 3, 4: Xaa = Any Amino Acid
MNXXLIAKVAEATELTKKDSAAAVDAVFAAVADYLAEGEKVQLIGFGNFEVRERAARKGRNPQTGAEIEIAASKVPAFKAGKALKDAVK

SEQ ID NO: 1039 - protein, 210 aa, Streptococcus agalactiae
TTGCGAAAGAGAATGTCAGAAAAAGCTATACTATTAATTATCCTTATTGCTTTTGTTATTATCGCTATTATAAAGATAGCTCTGTTAAAGTTATATATGAATACGATAAAACCTAAAGTAGATAATGAAGGAAACATCATAACAAAGCCTGTAAAGGATGATTTAACACCCGAGGAACGTGAAGAACGTGAATTTGATAAAGATTGGTAA

SEQ ID NO: 1040 - protein, 69 aa, Streptococcus agalactiae
MRKRMSEKAILLIILIAFVIIAIIKIALLKLYMNTIKPKVDNEGNIITKPVKDDLTPEEREEREFDKDW

SEQ ID NO: 1041 - protein, 933 aa, Streptococcus agalactiae
ATGGTATCGCTAAAAACGGAAATTGCTGGTTTTAGTTTTGACAATTGTTTGATGAATGCAGCGGGTATTTATTGTATGACTAAGGAAGAGTTATTAGCTATTGAAAATTCTGAAGCTGGTTCCTTTGTTACAAAAACAGGTACCCTTGAAGCTAGAGAGGGAAACCCTCAACCACGTTATGCAGATACTGACTGGGGATCAATTAATTCTATGGGACTCCCTAATAAAGGTATTGACTATTATCTTGATTTCGTGACTGAATTACAAGATCAAGACAATAGCAAAAATCACGTTTTATCATTAGTAGGTTTATCACCAGAAGAGACACATATTATTCTTAAAAAGGTTGAAAACAGTAGTTACAATGGCCTAATAGAGTTAAATTTATCGTGCCCAAATGTTCCTGGAAAACCTCAAATTGCTTATGATTTTGAAATGACTGACCTCATCCTTTCAGAAATCTTTAGCTATTATCAAAAGCCATTGGGCATCAAATTACCACCTTACTTTGATATCGTTCACTTTGATCAAGCAGCTACAATTTTTAACAAATATCCTTTAGCTTTTATTAACTGTGTTAATTCTATCGGAAATGGACTTGTTATTGATGATGAAACTGTCGTTATAAAGCCTAAAAATGGCTTTGGAGGTATCGGTGGGGATTTTATCAAGCCTACCGCCTTAGCTAACGTCCATGCTTTCTACAAACGTTTAAATCCTTCAATTAAAATTATCGGAACAGGTGGTGTTAAAAACGGCCGTGATGCCTTTGAACACATTCTATGTGGAGCTAGTATGGTCCAAATCGGAACCGCTTTACAAAAAGAAGGACCAGAAATTTTTCAGCGTGTAAGCAGAGAATTAAAAGAAATAATGGCTGATAAAGGCTATCAATCATTGGAGGATTTTCGAGGACAACTTAATTACCTTTAA

SEQ ID NO: 1042 - protein, 310 aa, Streptococcus agalactiae
MVSLKTEIAGFSFDNCLMNAAGIYCMTKEELLAIENSEAGSFVTKTGTLEAREGNPQPRYADTDWGSINSMGLPNKGIDYYLDFVTELQDQDNSKNHVLSLVGLSPEETHIILKKVENSSYNGLIELNLSCPNVPGKPQIAYDFEMTDLILSEIFSYYQKPLGIKLPPYFDIVHFDQAATIFNKYPLAFINCVNSIGNGLVIDDETVVIKPKNGFGGIGGDFIKPTALANVHAFYKRLNPSIKIIGTGGVKNGRDAFEHILCGASMVQIGTALQKEGPEIFQRVSRELKEIMADKGYQSLEDFRGQLNYL

SEQ ID NO: 1043 - protein, 1236 aa, Streptococcus agalactiae
ATGGCGCTTAAAGAATTAACAGCTAAAGAGTTCGAAAGTTATTCAGGAAATTACGATTTACAATCGTTTATGCAAACCCCTGAGATGGCAAAGCTTCTAAAAAAACGTGGGTATGACATTACCTACATGGGCTACCAAATCGATGGGAAAATGGAAATCATCAGTATTGTTTATACCATCCCAATGACTGGTGGACTTCATATGGAAGTCAATTCTGGTCCAGCCCATTCCAATTCTAAATATCTGAAACATTTTTATAAAGAACTACAGAACTATGCCAAATCTCAGGGCGCTTTAGAATTATTAATTAAACCTTATGATACCTACCAAGAGTTTACTGGTGAAGGTAAGCCTAAAGGTGCACCGAACACCTATCTTATTGATGACCTGACTAGTATAGGTTATCACCACGATGGGCTTCATATTGGTTATCCTGGCGGTGAACCTGATTGGCATTATGTTAAAAATCTAGAAGGTATCACTCCTCAAAATCTTCTTAAATCTTTCTCTAAAAAAGGACGCCCCTTGGTTAAAAAAGCCATGTCTTTTGGTATAAAAATACGTGTCCTCAAGCGGGAAGAACTACATATCTTTAAGGATATTACTTCTTCTACTTCTGATCGCCGGGACTATATGGATAAATCTCTAGATTATTATCAAGATTTTTATGATAGTTTCGGAGATAAGGCGGAATTTGTCATTGCAACTCTAAACTTTAGGGAATATGATCATAACCTACAATTAAATGCAAAGAAATTGGAAGAACAGATTACAGTCCTTGATAATCGCCATCAAAATAATACAGATTCTGCCAAATACCATCGTCAACGTACTGAGCTTGTCAATCAACTAGCTAGTTTAGATAAACGTCGCAAAGAAGTCGAACCTTTTATTCAAAAATTTGGAAATCAAGATGTTGTTTTAGCTGGTAGCCTCTTTATTTATAGCCCGAAAGAAACTGTCTATCTTTTCTCTGGCTCATACACAGAATTTAATAAATTTTATGCGCCTGCAGTTCTTCAAGAATATGTTATGCAAGAGGCTTTAAAGCGTCAATCAACTTTCTATAATTTTTTAGGTATTCAAGGAAATTTTGATGGTTCAGATGGCGTACTTCGCTTTAAACAGAATTTTAATGGTTACATTGTTCGTAAAATGGGTACTTTCCGCTACTATCCAAATCCATTAAAATATAAGAGTATTCAATTACTAAAGAAAATCTTACGCCGAACATAA

SEQ ID NO: 1044 - protein, 411 aa, Streptococcus agalactiae
MALKELTAKEFESYSGNYDLQSFMQTPEMAKLLKKRGYDITYMGYQIDGKMEIISIVYTIPMTGGLHMEVNSGPAHSNSKYLKHFYKELQNYAKSQGALELLIKPYDTYQEFTGEGKPKGAPNTYLIDDLTSIGYHHDGLHIGYPGGEPDWHYVKNLEGITPQNLLKSFSKKGRPLVKKAMSFGIKIRVLKREELHIFKDITSSTSDRRDYMDKSLDYYQDFYDSFGDKAEFVIATLNFREYDHNLQLNAKKLEEQITVLDNRHQNNTDSAKYHRQRTELVNQLASLDKRRKEVEPFIQKFGNQDVVLAGSLFIYSPKETVYLFSGSYTEFNKFYAPAVLQEYVMQEALKRQSTFYNFLGIQGNFDGSDGVLRFKQNFNGYIVRKMGTFRYYPNPLKYKSIQLLKKILRRT

SEQ ID NO: 1045 - protein, 1212 aa, Streptococcus agalactiae
ATGTATAGAGAAATTACCGCTGTCGAACACGATCGCTTTGTGAGCGAATCCAACCAAACAAACCTACTTCAATCTTCTAATTGGCCCAAAGTAAAAGACAACTGGGGTAGTCAATTACTTGGCTTTTTTGACGGTGAAACCCAAATTGCCAGCGCTAGTATTCTCATCAAATCACTTCCTCTTGGCTTCTCCATGCTATATATTCCGCGTGGACCAATCATGGATTACTCCAATCTAGATATTGTAACTAAGGTCCTTAAGGACCTTAAAGCTTTTGGCAAAAAACAAAGAGCTCTCTTTATCAAGTGTGATCCTCTCATCTATTTAAAAATGGTCAATGCCAAAGATTTTGAAAATTCGCCCGATGAAAAAGAAGGGTTAATCGCCATTGATCATTTACAGCGTGCAGGTGCTGATTGGACTGGTCGGACAACAGATTTAGCTCATACTATCCAACCACGTTTTCAGGCAAACCTATATGCTAATCAATTTGGACTTGATAAAATGTCTAAAAAAACTCGTCAAGCTATTCGAACTTCCAAAAATAAGGGAGTAGATATACAATTTGGTAGCCATGAACTACTTGAAGATTTTGCAGAGTTGATGAAAAAAACGGAAGACCGTAAAGGGATAAATCTTAGAGGAATTGACTACTACCAAAAACTCCTTGATACGTATCCTAATAACTCATACATCACAATGGCTTCGCTAGATGTTGCAAAACGATTAGAAAAAATAGAAAAAGAATGTCAGATAGCCCAATCTGAAAGAATAAAATCACTTGAACTTAATCGTGAGAAAAAAGTTAAACAACACCAAGGTACGATTGATCGATTAAATAAAGAAATTGATTTTCTCAAAGAAGCTCAAAAAGCCTATGACCGAGACATTATTCCATTGGCTGCAACCCTCACTCTAGAATTTGGTAATACATCAGAAAATATTTATGCTGGTATGGACGATTACTTTAAATCTTATTCTGCTCCTATTTACACTTGGTTTGAAACAGCTCAAAGGGCTTTTGAACGTGGAAATATTTGGCAAAATATGGGGGGGATTGAGAATGACTTATCTGGTGGTTTATATCATTTTAAGTCTAAGTTCGAACCAATCATTGAGGAATTTATTGGAGAATTTAACATTCCAGTGAACAGATTGCTTTATAAAGCCTCTAATTATGTCTATGCCTTACGCAAAAAACGTAATAGCTAG

SEQ ID NO: 1046 - protein, 403 aa, Streptococcus agalactiae
MYREITAVEHDRFVSESNQTNLLQSSNWPKVKDNWGSQLLGFFDGETQIASASILIKSLPLGFSMLYIPRGPIMDYSNLDIVTKVLKDLKAFGKKQRALFIKCDPLIYLKMVNAKDFENSPDEKEGLIAIDHLQRAGADWTGRTTDLAHTIQPRFQANLYANQFGLDKMSKKTRQAIRTSKNKGVDIQFGSHELLEDFAELMKKTEDRKGINLRGIDYYQKLLDTYPNNSYITMASLDVAKRLEKIEKECQIAQSERIKSLELNREKKVKQHQGTIDRLNKEIDFLKEAQKAYDRDIIPLAATLTLEFGNTSENIYAGMDDYFKSYSAPIYTWFETAQRAFERGNIWQNMGGIENDLSGGLYHFKSKFEPIIEEFIGEFNIPVNRLLYKASNYVYALRKKRNS

SEQ ID NO: 1047 - protein, 1221 aa, Streptococcus agalactiae
ATGTATCATGTTACCGTTGGAATATCCGAAAAAGAATATGATGCCTTTGCTATTGCATCGTCTCAAACCAATCTCCTCCACTCTTCAAAGTGGGCACAAGTAAAATCAAATTGGCAAAATGAACGTTTAGGCTTTTATAAAGATGACCAATTAGTTGCTGTAGCTAGCATCTTAATTAAATCATTACCACTTGGTTTTACAATGCTTTATATTCCACGTGGACCTATTATGGACTACAGCAATAAAGAATTAGTTAACTTTGTGTTAAAAACACTAAAAAACTTTGGACGAAAGAAACGTGCTGTTTTTGCAAAATTCGATCCAGCACTTCTTCTACGTCAATATCACCTTAAAGAAGAGAATGTCGCCGAAGAGATAGATGAAAGTAGACAGGCAATTGATAATCTTAAGTCAGCAGGTGCCCAATGGATAGGTCCAACGAAAGCCATTTCCGAAACCATCCAACCTCGTTTTCAAGCGAATATCTATACCAAAGCAAATATAGAAGAAAACTTTCCAAAACACACTAAACGTCTGATAAAAGATGCAAAGCATCGCGGTGTTCAAATTTATCGTGCCAACATTGATGATTTACCTAAATTCGCCACGGTTGTAGCATTAACCGAGAATCGTAAAGGTGTAGCTTTACGTAATGAAAACTATTTCCATCAACTAATGACAATTTATGGAGAAGATGCCTATCTCTATTTAGCTAAAGTCAATCTTCCTAAAAGATTAGCGCAATTTAAAGAACAACTTCTTCAAATCCAAAAAGATTTATCAGAAACTCCATCCCATCAAAAAAGTCGCCTGACAAGGCTAAATCAACAAGAAGCTTCTGTTAAACAATATATCCTTGAATTTCAGGAGTTTAGCAAGAAATATCCAGATGAGCCTGTCATTGCAGGAATTTTGTCCATTCGTTTTGGCAATGTCCTGGAGATGTTGTATGCTGGTATGGATGATAGCTTCCGTAAATTTTATCCACAGTATCTCTTGAATGCTAGGGTGTTCGAAGATGCTTTCAAAAACGATATTGTATCTGCTAATCTAGGCGGTGTCGAGGGAAGTCTTAACGATGGTTTAACAAAATTTAAAAGTAACTTCAATCCAATGTTTGAAGAATATATTGGCGAGTTTAATCTAGCAATCAATCCATTATTATATAAATTGGCCAACCTAGCCTATACTATTCGAAAAAAACAAAGACACTCTCACTAA

SEQ ID NO: 1048 - protein, 406 aa, Streptococcus agalactiae
MYHVTVGISEKEYDAFAIASSQTNLLHSSKWAQVKSNWQNERLGFYKDDQLVAVASILIKSLPLGFTMLYIPRGPIMDYSNKELVNFVLKTLKNFGRKKRAVFAKFDPALLLRQYHLKEENVAEEIDESRQAIDNLKSAGAQWIGPTKAISETIQPRFQANIYTKANIEENFPKHTKRLIKDAKHRGVQIYRANIDDLPKFATVVALTENRKGVALRNENYFHQLMTIYGEDAYLYLAKVNLPKRLAQFKEQLLQIQKDLSETPSHQKSRLTRLNQQEASVKQYILEFQEFSKKYPDEPVIAGILSIRFGNVLEMLYAGMDDSFRKFYPQYLLNARVFEDAFKNDIVSANLGGVEGSLNDGLTKFKSNFNPMFEEYIGEFNLAINPLLYKLANLAYTIRKKQRHSH

SEQ ID NO: 1049 - protein, 813 aa, Streptococcus agalactiae
ATGACTTCAATTAAACTTGTTGCCGTAGATATTGACGGCACCCTATTAAATAGTAAGCGTGAAATTACACCTGAAGTGGCTAAAGCTGTTCAAGAAGCAAAATCAAAAGGCGTTAAAATTGTTATTGCTACAGGACGTCCAATCATCGGAGTCCAAGATCTTTTAGAAGAATTGAAACTCAATGAAGAGGGAGATTATGTTATCACCTTTAACGGCGGTCTAGTTCAAGACACAGCCACAGGAGATGACATCATCAAAGAAACCTTAACCTATGAAGACTATCTGGATTTCGAACTGTTAGCGCGTAAATTAGGCGTCCACATGCACGCCATTACAAAAGAAGGAATTTACACAGCAAATCGTGATATTGGTAAATATACAATACACGAAGTAACTTTAGTTAATATGCCGCTCTTCTATCGTACTCCTGAAGAAATGGGAGACAAAGAAATCATTAAACTAATGATGATTGATCAACCTGACATCTTAGATGCAGCAATTGCTAAAATTCCAAAAAAAGTTCTCGATAACTACACTATTGTAAAATCAACTCCTTTTTATTTAGAAATTTTACCCAAAAACGTTAATAAAGGCACTGCACTTCTCCACCTTGCAGAGAAAATGGGATTAACTGTAGATCAAACAATGGCTATTGGTGATGAAGAAAATGACCGTGCTATGCTTGAAGTTGTTGGAAATCCTGTTGTTATGCAAAACGGCAATCCTGAACTAAAAAAAATAGCAAAATATATCACCAAATCAAACGAGGAAAGTGGCGTAGCCTACGCACTACGTGAATGGGTAATAAACTGA

SEQ ID NO: 1050 - protein, 270 aa, Streptococcus agalactiae
MTSIKLVAVDIDGTLLNSKREITPEVAKAVQEAKSKGVKIVIATGRPIIGVQDLLEELKLNEEGDYVITFNGGLVQDTATGDDIIKETLTYEDYLDFELLARKLGVHMHAITKEGIYTANRDIGKYTIHEVTLVNMPLFYRTPEEMGDKEIIKLMMIDQPDILDAAIAKIPKKVLDNYTIVKSTPFYLEILPKNVNKGTALLHLAEKMGLTVDQTMAIGDEENDRAMLEVVGNPVVMQNGNPELKKIAKYITKSNEESGVAYALREWVIN

SEQ ID NO: 1051 - protein, 1317 aa, Streptococcus agalactiae
ATGAATGAAAAAGTATTTCGTGACCCCGTTCACACTTATATCCATGTAAATAATCAAGTCATATATGACTTGATTAACACTAAAGAATTTCAACGTTTACGACGCATTAAACAAACCTCAACGACTTCTTTTACCTTCCATGGTGCAGAGCATAGTCGTTTTTCACATTGTCTCGGAGTTTATGAACTGGCTCGTAAAGTTACAGAAATCTTTGATGAACATTATTCTGATCTTTGGAATAAAAATGAGTCCCTGCTAACGATGGCTGCCGCCCTACTACATGATATCGGACATGGCGCATATTCTCATACATTTGAGCGTCTCTTCAATACTGATCATGAAGCTTACACTCAGGAAATCATCACCAATCCTACCACAGAGATTAATGCTATTTTACGAAAGGTGGCTCCTGATTTTCCTGATAAAGTAGCTAGTGTTATTAATCATAGCTACCCCAATAAACAAGTTGTTCAATTAATTTCTAGTCAAATTGATTGTGATCGAATGGACTATCTTCTCAGAGATTCTTACTACACTGCTGCTAGCTATGGACAATTTGATTTAACACGAATTTTACGCGTTATTAGACCAACCGATTCTGGAATTGCTTTTGCTCGTAACGGGATGCACGCTGTGGAAGATTATATTGTTAGTCGCTTCCAAATGTATATGCAAGTTTATTTCCATCCAGCCAGTCGTGCTATGGAATTACTCTTACAAAATTTACTAAAACGTGCTCGCTTCTTATTTGATACCCATCGCGATTTTTTTGAACAAACTTCTCCAAATCTTATTCCTTTCTTCACGGATCAATATGATTTACAAGATTATTTAGCCCTAGATGATGGGGTAATGAATACTTACTTCCAATCTTGGATGCAAGCTGATGATAACATTTTGGCAGATTTAGCTAATCGTTTTATCAATCGAAAAGTCTTTAAATCAATTACCTTTGAAGAGTCTGATAAAGAAAATCTAGTTAAAATGAAAGAACTAGTCTCACAGGTTGGTTTTGATCCCGATTATTACACTGGTGTCCATGCTAATTTTGACTTACCTTACGATGTTTATCGGCCTGAACATTCAAATCCACGAACAGAAATTCAAATTATCCAAAAGAATGGACAACTTGCTGAATTATCAAGCTTATCACCGATTGTAAAAGCATTAACTGGATCTAATTATGGTGATCAACGTTTTTATTTTCCAAAAGAAATGTTGACATTAGATAGCCTATTTTCAAGTACAAAAGAAGAATTTCAATCTTATATCACAAATGAGCATTTGACACTCACGAAAGATAATAGCCATTCATGA

SEQ ID NO: 1052 - protein, 438 aa, Streptococcus agalactiae
MNEKVFRDPVHTYIHVNNQVIYDLINTKEFQRLRRIKQTSTTSFTFHGAEHSRFSHCLGVYELARKVTEIFDEHYSDLWNKNESLLTMAAALLHDIGHGAYSHTFERLFNTDHEAYTQEIITNPTTEINAILRKVAPDFPDKVASVINHSYPNKQVVQLISSQIDCDRMDYLLRDSYYTAASYGQFDLTRILRVIRPTDSGIAFARNGMHAVEDYIVSRFQMYMQVYFHPASRAMELLLQNLLKRARFLFDTHRDFFEQTSPNLIPFFTDQYDLQDYLALDDGVMNTYFQSWMQADDNILADLANRFINRKVFKSITFEESDKENLVKMKELVSQVGFDPDYYTGVHANFDLPYDVYRPEHSNPRTEIQIIQKNGQLAELSSLSPIVKALTGSNYGDQRFYFPKEMLTLDSLFSSTKEEFQSYITNEHLTLTKDNSHS

SEQ ID NO: 1053 - protein, 387 aa, Streptococcus agalactiae
ATGAAACTAGAAATTAACAATAACATTCAAATTGACAACGAAACCGAAATGATTCATGAGATTCACGATTGTCAATTTATTGAAAAAGGAAGTTACGTTTATTTGAATTATATTAATGCTGAGGGCGAGAGGGTAGTTATTAAGGCAAATCATGAGGAATTGCTTATGACGAGGTTTTCAAATCCTAAGTCTGTAATGCGTTTTCATCGTGAAACGCCTGCTTTGGTTAATATCCCCACTCCACTTGGTGTTCAACATTTGATTACAGAGACAAGTCACTATCAGTTTGATTTGTCACAGCAAAGGTTGCATATCAATTATGTCCTTAAGCAAACGGAGACAGGAGACTGTTTTGCAAATTATGAATTAAGGATTCAATGGTATTAA

SEQ ID NO: 1054 - protein, 128 aa, Streptococcus agalactiae
MKLEINNNIQIDNETEMIHEIHDCQFIEKGSYVYLNYINAEGERVVIKANHEELLMTRFSNPKSVMRFHRETPALVNIPTPLGVQHLITETSHYQFDLSQQRLHINYVLKQTETGDCFANYELRIQWY

SEQ ID NO: 1055 - protein, 2685 aa, Streptococcus agalactiae
TTGTTAAAAGAACAGAAAAAATCCTTGTTTTACACACAAGGTCAAGAAGAGGTTCTAACGTCTTTAGAATCTTCTCGTGAAGGATTATCAACGACAGAAGCGAAAAATCGCTTAGAGATGTATGGTCGCAATGAGCTTGAAGAAGGGAAAAAACGTAGTCTAATAGCTAAGTTTTTTGACCAATTCAAAGATTTAATGATTATTATCTTACTGGTTGCTGCAGCTCTCTCTGTTATTACGGAAGGTATGCATGGCTTAACGGATGCATTGATTATCTTGGCGGTTGTTATCTTAAATGCAGCTTTTGGTGTTTATCAAGAGGGGCAAGCCGAAGCAGCTATTGAAGCCCTCAAAGATATGTCAAGCCCAATTGCGCGTGTTCGTCGTGATGGTCATACTATTGAGGTGGATTCTAAAGAACTAGTTCCTGGTGACCTCGTTATGTTAGAAGCAGGAGATGTTGTTCCCGCAGATTTACGACTTTTAGAAGCCGCGTCTCTAAAAATTGAAGAAGCAGCTCTAACTGGTGAGTCAGTACCTGTTGAGAAAGACATATCTCAAGTAGTAGCAGAGGATGCAGGTATTGGTGACCGTGTGAATATGGCGTATCAAAATTCAAATGTCACGTATGGTCGAGGATATGGTGTTGTTACTAACACAGGGATGTATACTGAAGTTGGTAAAATTGCGGACATGTTGGCAAATGCTGATGAATCTGAAACACCATTGAAACAAAGTTTAGTTCAACTTTCTAAATTATTGACTTACTTAATCGTGATTATTGCGGTTATTACTTTCTTAGTGGGGATATTTGTCCGTAAAGAAGGTTGGATTGAAGGATTGATGACTTCAGTTGCTTTAGCAGTTGCAGCTATTCCAGAAGGGCTTCCTGCAATTGTTACGATTGTCTTATCAATGGGAACAAAAACTCTTGCTAAACGCAATTCTATCGTTCGTAAACTCCCTGCAGTTGAAACTTTAGGTTCTACAGAAATCATTGCATCAGATAAGACTGGAACTCTGACAATGAATCAAATGACTGTCGAAAAAGTGTATACTAATGGTGTTCTCCAATCATCTTCGGAAGAAATTTCAGTTGATAATAACACTTTACGTATTATGAATTTCTCCAACGATACTAAGATTGATCCTTCAGGAAAATTAATTGGTGACCCAACAGAGACTGCACTGGTACAATTTGGTTTAGATAAGAATTTTGATGTCCGTGAAGTTTTGAAAAATGAACCACGTGTAGCTGAGTTACCATTTGATTCAGATCGTAAGTTAATGTCTACGATTCATAAAGAATCAGATGGTCGCTACTTTATCGCAGTCAAGGGTGCTCCTGATCAATTATTAAAACGAGTTACTAAAATTGAAGATAATGGCTTGGTTCGTGATATCACGGCTGAAGATAAAGAGGCTATCCTAAATACCAATAAAGAACTCGCAAAACAAGCTCTTCGTGTCTTGATGATGGCTTATAAATATGAAACACAAATTCCAACTTTAGAGACTGATATTGTTGAGTCAGATTTAGTATTCTCAGGTTTAGTGGGAATGATTGACCCTGAGCGTCCAGAAGCGGCAGAAGCTGTTCGAGTTGCTAAAGAAGCAGGAATTCGTCCGATTATGATTACCGGGGACCATCAAGATACTGCAGAAGCTATTGCAAAGCGTCTAGGTATTATTGATGCAAATGACACAGAAGATCATGTCTTTACGGGTGCTGAACTTAATGAATTAAGTGATGAAGAGTTTCAAAAAGTATTTAAACAATATTCTGTCTATGCACGTGTTTCTCCTGAACATAAAGTGCGTATCGTGAAAGCTTGGCAAAACGATGGCAAAGTCGTTGCCATGACTGGTGATGGTGTTAATGATGCTCCATCGCTAAAAACAGCAGATATTGGTATTGGTATGGGAATAACTGGTACGGAAGTTTCCAAAGGTGCTTCTGATATGGTCCTTGCTGATGATAATTTTGCAACTATTATTGTGGCTGTTGAGGAAGGACGTAAAGTCTTCTCAAATATCCAAAAATCTATTCAGTATCTTCTTTCAGCCAACATGGCAGAGGTATTTACAATTTTCTTTGCAACTTTATTAGGATGGGATGTACTTGCACCGGTTCACCTTCTTTGGATTAACTTGGTAACAGATACTCTTCCAGCCATCGCTCTTGGAGTTGAGCCAGCTGAACCAGGAGTTATGACACATAAACCTCGTGGTCGCCAGTCAAACTTCTTTGATGGTGGTGTTATGGGAGCTATTATCTATCAAGGTATTTTACAAACTATCTTAGTACTTGGTGTCTATGGTTGGGCATTGATGTATCCAGAACATGCTGGTTATCGCATGATTCACGCAGATGCCCTTACGATGGCCTTTGCAACGCTTGGTTTAATCCAATTGGTACATGCATTTAACGTTAAGTCAGTTTACCAATCAATCTTTACAGTTGGAGCTTTTAAAAATAGAACCTTTAACTGGTCTATTCCAGTAGCTTTCATTCTTTTGATGGTGACTATTGTTGTTCCTGGATTTAATAAACTTTTCCATGTAACTCATTTAAGTTCAACACAATGGTTAACTGTAGTTATCGGAAGTTTATTGATGGTAGTGTTAACGGAAATTGTTAAATTTATCCAACGTAAATTAGGACAAGACGAAAAAGCTATTTAG

SEQ ID NO: 1056 - protein, 894 aa, Streptococcus agalactiae
MLKEQKKSLFYTQGQEEVLTSLESSREGLSTTEAKNRLEMYGRNELEEGKKRSLIAKFFDQFKDLMIIILLVAAALSVITEGMHGLTDALIILAVVILNAAFGVYQEGQAEAAIEALKDMSSPIARVRRDGHTIEVDSKELVPGDLVMLEAGDVVPADLRLLEAASLKIEEAALTGESVPVEKDISQVVAEDAGIGDRVNMAYQNSNVTYGRGYGVVTNTGMYTEVGKIADMLANADESETPLKQSLVQLSKLLTYLIVIIAVITFLVGIFVRKEGWIEGLMTSVALAVAAIPEGLPAIVTIVLSMGTKTLAKRNSIVRKLPAVETLGSTEIIASDKTGTLTMNQMTVEKVYTNGVLQSSSEEISVDNNTLRIMNFSNDTKIDPSGKLIGDPTETALVQFGLDKNFDVREVLKNEPRVAELPFDSDRKLMSTIHKESDGRYFIAVKGAPDQLLKRVTKIEDNGLVRDITAEDKEAILNTNKELAKQALRVLMMAYKYETQIPTLETDIVESDLVFSGLVGMIDPERPEAAEAVRVAKEAGIRPIMITGDHQDTAEAIAKRLGIIDANDTEDHVFTGAELNELSDEEFQKVFKQYSVYARVSPEHKVRIVKAWQNDGKVVAMTGDGVNDAPSLKTADIGIGMGITGTEVSKGASDMVLADDNFATIIVAVEEGRKVFSNIQKSIQYLLSANMAEVFTIFFATLLGWDVLAPVHLLWINLVTDTLPAIALGVEPAEPGVMTHKPRGRQSNFFDGGVMGAIIYQGILQTILVLGVYGWALMYPEHAGYRMIHADALTMAFATLGLIQLVHAFNVKSVYQSIFTVGAFKNRTFNWSIPVAFILLMVTIVVPGFNKLFHVTHLSSTQWLTVVIGSLLMVVLTEIVKFIQRKLGQDEKAI

SEQ ID NO: 1057 - protein, 861 aa, Streptococcus agalactiae
ATGACCAAACTTGCTATCATGAGTGATTTACATATTGACCTCAATCATTTTTCTACCTTTGAGACGAAAACGTTAATTAATTTGCTTAAGAAAGAAAAAATTGATCACCTCCATATCGCTGGAGATATATCTAATCATTTTACTAAAGATACACTTCCCTTTATCAATAACTTAAAAAAGCATATTAAACTTAGCTATAATTTAGGAAACCATGATATGCTTGATTTAACAGAAACAGAAATCCAACGTCTTGACTTTCAAACCTATCGATTTGACAAAAAAATGCTACTAGCTTTTCATGGCTGGTATGATTACAGCTTTTCAAATAATAGAGACATCAAGGATGTTGAAAAATTAAAAAAGACTTTTTGGTTTGATAGACGTTTAAAACGTCCAAATAATGATGTAACTATCCAAGCATCAATTTTAAAACGCTTAGACGAAATATTAGCAAAAGTCGATTCTTCAAATATCATTATTGCTATGCACTTTGTTCCCCATAAACAATTCACGATGACTCATCCTAGATTCTCTCCTTTTAATGCTTTTTTGGGGAGTCAGGCTTATCATGATTTATTCCAAAAATATCATATCAAAGATGTTGTTTTTGGTCATGCACACCGCTCATTTGGCGACGTTAAAATTGGAGAGACTACTTATCATTCTAGACCACTTGGATATATTAGAGAATGGAATTTAACTATTGACTTTGTCAATCAGAATCCCAATCATAACCCTAATTTAACCTGGAATCTTAGCAAAAGGTATAATGCCGTTAAGCATTTGGATAGTTTTGAAAACTATCGAAAAAAATATTTTGAAGACGAATTACGCAACTCTATGACAATATTTGATTGCTAA

SEQ ID NO: 1058 - protein, 286 aa, Streptococcus agalactiae
MTKLAIMSDLHIDLNHFSTFETKTLINLLKKEKIDHLHIAGDISNHFTKDTLPFINNLKKHIKLSYNLGNHDMLDLTETEIQRLDFQTYRFDKKMLLAFHGWYDYSFSNNRDIKDVEKLKKTFWFDRRLKRPNNDVTIQASILKRLDEILAKVDSSNIIIAMHFVPHKQFTMTHPRFSPFNAFLGSQAYHDLFQKYHIKDVVFGHAHRSFGDVKIGETTYHSRPLGYIREWNLTIDFVNQNPNHNPNLTWNLSKRYNAVKHLDSFENYRKKYFEDELRNSMTIFDC

SEQ ID NO: 1059 - protein, 1932 aa, Streptococcus agalactiae
ATGTCTAATTTTTATAAGCTCTTGAAAGAAAAATTTCCTCGAAAAGAAGATATCGTAACAGAAATGATCAATTTAGAAGCTATTTGTCAATTACCCAAAGGGACGGAGTATTTTATTAGTGATTTACACGGGGAATACGATGCTGTTGATTATCTCTTACGGACAGGTGCAGGGTCTATTAGAGCTAAATTATTAGACTGTTTTGATTGGCAGAAAATAGTTGCTGTTGATTTAGATGATTTTTGTATACTGCTTTATTACCCAAAGGAAAAATTAGCCTTCGATAAAATGAACTTGTCAGCAAGTGCTTATAAAACGAAGTTATGGGAAATGATTCCGTTACAAATACAAGTTTTAAAATATTTTTCTAGTAAATATACAAAATCTAAAGTACGTAAGCAATTGTCAGGTAAGTTTGCTTACATTATCGAAGAACTTTTAGCTGAGATTGACCGTAACCCAGAGAAGAAAAGCTATTTTGATACTATTATTGAAAAATTATTTGAATTAGACCAAGTAGAAGATTTAATTATAGTATTGTCCCAAACAATTCAAGTTTTGATTATTGACCATTTACATGTTGTAGGGGATATTTACGATCGTGGTAGGTATCCTGATCGTATCTTGAATAGGTTAATGGCTTTTCCAAATTTGGATATCCAATGGGGGAACCATGATGTCACTTGGATGGGAGCAGCATCTGGTTCTTACCTTTGTATGGTAAATGTTATCCGTATTGCTGCACGTTATAATAATATTACTTTAATTGAAGACCGATATGGTATCAATTTGCGTCGCTTGGTTGATTACTCACGCCGTTACTATGAACCTCTACCTTCTTTCGTTCCTATATTAGATGGAGAGGAAATGACTCATCCAGATGAACTAGACTTGTTAAATATGATACAACAAGCAACAGCAATTTTACAGTTTAAATTGGAAGCCCAATTGATTGACAGGCGTCCAGAATTTCAAATGCATAATCGGCAACTTATTAACCAGGTAAATTATAAAGATTTAAGTATATCTATTAAGGAAGTTGTGCATCAACTTAAAGATTTTAATAGTAGATGCATTGATTCGAAAAATCCCAGTCGATTAACAAGTGAGGAAGAAGAGCTTTTACAACAATTGATGATAGCCTTCCAGACTTCTGAAAGTTTAAAGAAACATATTGATTTCCTATTTGAAAAAGGAAGTATGTATTTAACATATAATGATAATCTTTTATTCCATGGTTGCATACCAATGCATAGTAATGGTGATTTTAAAAGCTTTAAAATTGCAGGAAAAACTTATGGTGGTAGGGATTTACTGGATTTATTTGAAAGTCAAATACGTCTAGCATATGCTAGACCAGAGAAACATGATGATTTGGCGACAGATATCATTTGGTATCTTTGGTGTGGTGAAAATTCTTCTCTTTTTGGTAAGAATGCCATGACTACTTTTGAGCGCTATTATGTTTCCGACAAAGTAACTCATCAAGAAAGAAAAAATCCCTACTTTAAACTGAGAGATAAAGATGATATTTGCACTGCTCTTTTACAAGAGTTTGATTTGCCTAAGTTTGGGCATATTGTCAATGGTCATACGCCAGTCAAAGAAAAAAATGGTGAGCAACCGATAAAAGCAAATGGTAAGATGTTAGTAATTGATGGTGGCTTTGCCAAAGGTTATCAGAAAAATACAGGTTTAGCTGGCTACACTTTGATTTATAATAGCTATGGGATACAATTAATTTCACACCTTCCTTTTACATCCATTGAGGAAGTTTTAAGTGGAACCAACTATATCATTGATACGAAGCGATTAGTAGAAGAAGCCAAGGATAGGATTCTTGTAAAAGATACAACTATTGGACAAAAGTTAACCAAAGAGATTAAAGACTTAGATCACCTTTATCGTCATTTTCAGGAATATGATGACTAG

SEQ ID NO: 1060 - protein, 643 aa, Streptococcus agalactiae
MSNFYKLLKEKFPRKEDIVTEMINLEAICQLPKGTEYFISDLHGEYDAVDYLLRTGAGSIRAKLLDCFDWQKIVAVDLDDFCILLYYPKEKLAFDKMNLSASAYKTKLWEMIPLQIQVLKYFSSKYTKSKVRKQLSGKFAYIIEELLAEIDRNPEKKSYFDTIIEKLFELDQVEDLIIVLSQTIQVLIIDHLHVVGDIYDRGRYPDRILNRLMAFPNLDIQWGNHDVTWMGAASGSYLCMVNVIRIAARYNNITLIEDRYGINLRRLVDYSRRYYEPLPSFVPILDGEEMTHPDELDLLNMIQQATAILQFKLEAQLIDRRPEFQMHNRQLINQVNYKDLSISIKEVVHQLKDFNSRCIDSKNPSRLTSEEEELLQQLMIAFQTSESLKKHIDFLFEKGSMYLTYNDNLLFHGCIPMHSNGDFKSFKIAGKTYGGRDLLDLFESQIRLAYARPEKHDDLATDIIWYLWCGENSSLFGKNAMTTFERYYVSDKVTHQERKNPYFKLRDKDDICTALLQEFDLPKFGHIVNGHTPVKEKNGEQPIKANGKMLVIDGGFAKGYQKNTGLAGYTLIYNSYGIQLISHLPFTSIEEVLSGTNYIIDTKRLVEEAKDRILVKDTTIGQKLTKEIKDLDHLYRHFQEYDD

SEQ ID NO: 1061 - protein, 1125 aa, Streptococcus agalactiae
ATGGACATAAAGGCAGAAATTCAAAAATTAGCAAAAGAAATTGGTATCTCTAAAATTGGTTTTACGACGGCAGATAACTTTGATTATTTGGAAAAGTCATTGCGTGCTTCTGTGGAAGAGGGGCGCAATTCAGGATTTGAACATAAAGTCATAGAGGATCGTATCTACCCTGAAAGGCTTTTAGAATCGGCTAAAACGATTATTTCAATTGGCGTTGCTTATCCTCACAAACTTCCTCAGCAACCTCAAAAAACATCTTATAAACGAGGAAAAATTACACCTAATTCGTGGGGGCTTGATTATCATTATGTGGTCGGCGAAAAGTTAGACAGACTATCAAAAGGCATTGAAGAGCTCTGTCGAGATTTTCCTTTGCAACAAAAAGCAATGGTCGATACTGGAGCTTTAGTTGATACTGCAGTTGCCCAAAGAGCAGGTATTGGTTTTATAGGAAAAAATGGTCTAGTTATTTCTAAAGAATATGGCTCTTATATGTTTTTGGGAGAATTAATTACCAATTTAGAGATCGAGCCAGACAAGCCTGTCGATTATGATTGTGGTGACTGTCGTCGTTGTCTAGATGCCTGTCCAACTTCTTGTTTAATTGGTGATGGCTCAATGAATGCCAAGCGTTGTCTATCATTTCAAACCCAAGATAAGGGAATGATGGACATAGAGTTTCGAAAAAAGATTAAAACAGTTATCTATGGTTGTGATATTTGCCAAATTTGCTGTCCTTATAACAAAGGTATAAATAATCCATTGGCGCCAGAGATTGATCCTGAGTTGGCTCAACCAGAATTAATACCATTTTTGAGTTTATCAAATGGACAATTTAAAGAAAAATTTGGTATGATTGCTGGAAGTTGGCGAGGTAAAAATATTTTACAGCGTAATGCCATTATTGCGCTAGCAAATGCTCATGATAAAACCGCAGTGGTCAAATTAATAGAGATTATTGATAAAAATAATAACCCTATTCATACTGCAACAGCTATATGGGCATTGGGAGAAATTGTCAAAAAACCAAACGATGAGATACTGGAGTTTATGAGTAATTTAACCTTAAAAGATGAAGATAGCCGAAAAGAGTTGGAATTAATCCGTCATAAATGGCAATTTTAA

SEQ ID NO: 1062 - protein, 374 aa, Streptococcus agalactiae
MDIKAEIQKLAKEIGISKIGFTTADNFDYLEKSLRASVEEGRNSGFEHKVIEDRIYPERLLESAKTIISIGVAYPHKLPQQPQKTSYKRGKITPNSWGLDYHYVVGEKLDRLSKGIEELCRDFPLQQKAMVDTGALVDTAVAQRAGIGFIGKNGLVISKEYGSYMFLGELITNLEIEPDKPVDYDCGDCRRCLDACPTSCLIGDGSMNAKRCLSFQTQDKGMMDIEFRKKIKTVIYGCDICQICCPYNKGINNPLAPEIDPELAQPELIPFLSLSNGQFKEKFGMIAGSWRGKNILQRNAIIALANAHDKTAVVKLIEIIDKNNNPIHTATAIWALGEIVKKPNDEILEFMSNLTLKDEDSRKELELIRHKWQF

SEQ ID NO: 1063 - protein, 981 aa, Streptococcus agalactiae
ATGACTGAGCCAGACTTTTGGAATGACAATATTGCAGCGCAAAAGACATCTCAAGAACTGAATGAGTTAAAAGGTAAGTATGATACTTTCCATAATATGCAAGAATTATCTGACGAAACAGAACTCTTACTTGAGATGCTTGACGAAGATGATTCTTTGAAAGAAGAATTAGAAGAAAATCTAATGCAGCTAGATAAGATAATGGGTGCTTATGAAATGACGCTTCTCTTATCTGAGCCTTATGACCACAATAATGCTATCTTAGAAATCCATCCTGGTTCAGGAGGAACTGAAGCGCAAGATTGGGGAGATTTACTCTTACGAATGTATACCCGTTTTGGCAATGCTAATGGTTTCAAAGTAGAAGTATTAGATTATCAAGCAGGGGATGAAGCTGGTATTAAATCGGTTACCCTCTCTTTTGAAGGCCCCAATGCTTATGGTTTGTTGAAATCAGAAATGGGAGTTCATCGCCTCGTTCGTATATCACCTTTTGATTCGGCTAAACGTCGTCATACCTCATTTGCTTCAGTTGAAGTGATGCCAGAGTTAGATGATACGATTGAAGTAGAAGTACGTGATGATGACATTAAAATGGATACTTTCCGTTCCGGAGGAGCTGGTGGTCAGAACGTCAATAAAGTATCAACAGGTGTTCGTTTGACGCATATTCCAACTGGAATTGTGGTATCGTCTACCGTTGACCGTACTCAATATGGGAACCGCGATCGCGCTATGAAGATGTTGCAGGCTAAGCTATATCAGTTAGAACAAGAAAAGAAAGCACAAGAAGTAGATGCTCTTAAGGGTGATAAAAAAGAAATCACTTGGGGAAGTCAGATTCGTTCTTATGTTTTCACCCCTTATACGATGGTGAAGGATCATCGTACTAACTTTGAGCTTGCTCAGGTAGATAAGGTTATGGATGGAGAAATCAATGGCTTTATTGATGCCTACCTTAAGTGGCGCATTGAAGACTAA

SEQ ID NO: 1064 - protein, 326 aa, Streptococcus agalactiae
MTEPDFWNDNIAAQKTSQELNELKGKYDTFHNMQELSDETELLLEMLDEDDSLKEELEENLMQLDKIMGAYEMTLLLSEPYDHNNAILEIHPGSGGTEAQDWGDLLLRMYTRFGNANGFKVEVLDYQAGDEAGIKSVTLSFEGPNAYGLLKSEMGVHRLVRISPFDSAKRRHTSFASVEVMPELDDTIEVEVRDDDIKMDTFRSGGAGGQNVNKVSTGVRLTHIPTGIVVSSTVDRTQYGNRDRAMKMLQAKLYQLEQEKKAQEVDALKGDKKEITWGSQIRSYVFTPYTMVKDHRTNFELAQVDKVMDGEINGFIDAYLKWRIED

SEQ ID NO: 1065 - protein, 693 aa, Streptococcus agalactiae
ATGGCACTAATAGAAATGTCTGGTGTTACTAAAAAGTATCGCCGTTCAACAACTGCCTTGAGAAACTTAAATTTATCAATTCAGCAAGGTGAGTTTGTGTATTTAGTTGGTCCGTCAGGTGCTGGTAAATCTAGCTTGATTCGCCTCCTATACCGTGAAGAAAAATTAAGTTCAGGTAGATTAAAGGTAGGGGAATTCAATCTCAATAAACTCAAACGTCGTCAAATTCCTATTTTACGTCGTAGTATTGGAGTTGTCTTCCAAGATTATAAATTACTACCAACAAAAACAGTTTATGAGAATGTTGCGTTTGCGATGCAAGTTATTGGAGCTAAGCGCCGTCATATTAAAAAACGCGTGCCAGAAGTTCTAGAATTAGTAGGTTTAAAACACAAGATGCGTTCTTTTCCAACACAGTTATCTGGTGGAGAACAACAACGTGTGGCAATTGCACGTGCGATTGTTAATAATCCAAAATTATTAATTGCAGATGAACCTACTGGTAATTTGGATCCAGAAATTGCTTGGGAAATCATGCATCTATTGGAACGTATTAACCTTCAAGGAACGACTGTTTTGATGGCAACACACAATAGTCAAATTGTTAACACACTTCGTCATCGTGTCATTGAGATTGAAGCAGGTAGCGTTATCCGAGATGAAGAGAAGGGAGAATATGGTTATCATGATTAA

SEQ ID NO: 1066 - protein, 230 aa, Streptococcus agalactiae
MALIEMSGVTKKYRRSTTALRNLNLSIQQGEFVYLVGPSGAGKSSLIRLLYREEKLSSGRLKVGEFNLNKLKRRQIPILRRSIGVVFQDYKLLPTKTVYENVAFAMQVIGAKRRHIKKRVPEVLELVGLKHKMRSFPTQLSGGEQQRVAIARAIVNNPKLLIADEPTGNLDPEIAWEIMHLLERINLQGTTVLMATHNSQIVNTLRHRVIEIEAGSVIRDEEKGEYGYHD

SEQ ID NO: 1067 - protein, 930 aa, Streptococcus agalactiae
ATGGTTATCATGATTAATTTCTTTAGACATTTCTGGGAATCGCTTAAAAACTTGAAACGTAACTTTTGGATGACTTTTGCTTCTGTAACATCAGTTACCATAACCTTACTTCTTGTAGGCTTGTTTTCATCAGTTTTACTGAATGTTGAAAAGTTAACAACTGATGTTTCAGGTAATTTTACTATCAGTGCCTTTTTAAATGTTGACTCAACGGATGCTCAAAAACAAGTCAAAGATAAGGACGGAAAGCTAAAAGATAATCCTGATTATCATAAAGTTTACGACAAAATTAAACGTATTTCTGGTGTAGAGAAAGTCACTTATTCAAGTAAAGCTGAACAATTAAAAGAAGTTCAAAAAGAGTATGGTTCAGATGTTATTGATGATACCTATAAAGATGCTTTGTTAGATGTTTACGTAGTTGGGACAAGTTCTGCAAAAGTTTCTAAGAGTGTCAGTGAAGCAATTGGACGCATTGAAGGTGTTGATTATACTAAAGAACCTATTGATTCAACAAAACTATCTAATCTCACAGATAACATCCGTATATGGGGATTTGGTGGTGTTGCCTTATTAATTGTCCTTGCTATCTTTTTGATTTCAAATACTATTCGTATGTCGATTATGTCACGCCGTACAGATATTGAAATCATGAGATTAGTTGGCGCTAAAAATTCTTATATTCGAGGACCGTTCTTTTTTGAAGGTGCTTGGGTAGGGATTTTAGGGGCTATCGTTCCATCGCTGATTTTCTATTTTGGTTATCAATTTGTGTTTAACAAGTTTAATCCAAAATTTGAGACAAGCCATGTTTCATTGTATCCTATGGATATTATGGTTCCAGCAATTATTGGTGGTATGGTGATTATTGGTATTATTATTGGCTCACTTGGGTCTGTCCTATCAATGAGACGTTACCTTAAGATTTAA

SEQ ID NO: 1068 - protein, 309 aa, Streptococcus agalactiae
MVIMINFFRHFWESLKNLKRNFWMTFASVTSVTITLLLVGLFSSVLLNVEKLTTDVSGNFTISAFLNVDSTDAQKQVKDKDGKLKDNPDYHKVYDKIKRISGVEKVTYSSKAEQLKEVQKEYGSDVIDDTYKDALLDVYVVGTSSAKVSKSVSEAIGRIEGVDYTKEPIDSTKLSNLTDNIRIWGFGGVALLIVLAIFLISNTIRMSIMSRRTDIEIMRLVGAKNSYIRGPFFFEGAWVGILGAIVPSLIFYFGYQFVFNKFNPKFETSHVSLYPMDIMVPAIIGGMVIIGIIIGSLGSVLSMRRYLKI

SEQ ID NO: 1069 - protein, 711 aa, Streptococcus agalactiae
ATGAACATAAAACGTCACTCTATTTTTCTTTGGTTAACAACAAGTATCCTTGCTATTTTAATGGCCGTCGGGATGACCATTTACTTCAATACTTACCAAGCCTCCCCATTAGCTAGGAGAATTGCTAAAACCGCTACAAACCATAAGAACTACCTTCTTTTTAGAAGCAAGGGTAAGGTAAAAGCAAATATTATTTTCTATCAAGGGGCTCTTGTGGAAGAAGAAGCTTATTCTCAACTTGCTAGAGATTTAGCTGACAAAGGGGATAATACCTATATTTTGAAGACACCTTTAAATTTGCCAGTTTTATCGCCTCATAAAGCTAAAACAATTATTAATCAGAACCACTTAACTAATGTTTACCTTGCTGGACATTCTTTAGGAGGAGTTGTTGCTAGCCAAAATGCCAAAGTAGCCCCTGTTAGAGGGCTCATATTATTAGCTTCCTACCCTTCACGTAAATCCGACCTATCTCATAAAAAGTTAAGAGTACTCTCCATTACAGCAAGTAATGATCATATTTTAAACTGGGAAAAATATGAGGAAGCTAAAAAACGCCTCCCAAATTCAAGTACTTTTCGAACTATTGTCGGAGGAAACCATAGCCGATTTGGTAACTACGGACATCAAAAAGGGGATGGTAAAGCTACCCTTTCTCACAAATCATCTGAAAAACAATTGGCTACGTTTATTTCGAATTTTATCCACTAA

SEQ ID NO: 1070 - protein, 236 aa, Streptococcus agalactiae
MNIKRHSIFLWLTTSILAILMAVGMTIYFNTYQASPLARRIAKTATNHKNYLLFRSKGKVKANIIFYQGALVEEEAYSQLARDLADKGDNTYILKTPLNLPVLSPHKAKTIINQNHLTNVYLAGHSLGGVVASQNAKVAPVRGLILLASYPSRKSDLSHKKLRVLSITASNDHILNWEKYEEAKKRLPNSSTFRTIVGGNHSRFGNYGHQKGDGKATLSHKSSEKQLATFISNFIH

SEQ ID NO: 1071 - protein, 699 aa, Streptococcus agalactiae
TTGCCATTTATTTTCCGCCACTCTTTTTTTAACAAAGTCTTGATTTTTTGGTACACTATCATTATGAAAATCTATAAAACAATAAACCACATTGCTGGTGAAAATACTTATTACCTCGTTAATGATCAAGCTGTTATCCTCATTGATCCAGGGAGCAATGGCCAAGAAATTATTGCTAAAATTAAATCCTTTGAAAAACCTTTAGTGGCTATCCTCTTAACTCATACTCACTATGATCATATTTTTAGTTTAGATTTGGTCAGAGATACTTTTGATAATCCACCTGTTTATGTTTCAGAAAAAGAAGCCGCTTGGCTATCTTCCCCAGATGATAATTTATCTGGGTTAGGCCGTCATGATGATATCATTAATGTTATAGCAAGACCGGCAGAGAACTTTTTTAAATTAAAGCAACCCTATCAACTAAATGGTTTTGAATTCACAGTTTTACCAACACCTGGTCATTCTTGGGGAGGAGTCTCGTTTGTTTTCCACTCAGATGAATTAGTCGTTACTGGCGATGCTCTATTTCGTGAAACTATCGGTCGTACTGACTTACCTACCAGTAACTTTGAGGACCTCATTACTGGTATTCGTCAAGAACTATTCACCTTACCTAGTCATTATAGTGTTCACCCAGGCCATGGCATGAATACAACTATTGGCCACGAAAAAAACTTTAATCCTTTCTTCCAATGA

SEQ ID NO: 1072 - protein, 232 aa, Streptococcus agalactiae
MPFIFRHSFFNKVLIFWYTIIMKIYKTINHIAGENTYYLVNDQAVILIDPGSNGQEIIAKIKSFEKPLVAILLTHTHYDHIFSLDLVRDTFDNPPVYVSEKEAAWLSSPDDNLSGLGRHDDIINVIARPAENFFKLKQPYQLNGFEFTVLPTPGHSWGGVSFVFHSDELVVTGDALFRETIGRTDLPTSNFEDLITGIRQELFTLPSHYSVHPGHGMNTTIGHEKNFNPFFQ

SEQ ID NO: 1073 - protein, 765 aa, Streptococcus agalactiae
ATGTCAAAAGTTGCTATTGTTACTGGTGCTGGTCAAGGAATTGGATTTGCTATTGCGAAACGTCTTCATGCAGACGGCTTTAAAATAGGCGTTTTAGACTATAATGAAGAGACTGCTCAGGCTGCGGTTGATAAACTATCACCTGAGGATGCTGTTGCAGTTGTAGCAGATGTTTCAAAACGTGATCAAGTTTTTGATGCTTTCCAAAAAGTTGTAGATACTTTTGGTGATTTGAATGTTGTTGTTAACAATGCAGGTGTTGCCCCAACAACTCCTCTTGACACTATTACTGAAGAGCAGTTTGAAAAGGCTTTTGCAATCAATGTCGGAGGAACTATTTGGGGAAGCCAAGCAGCTCAGAAACATTTTAGAGAATTAGGTCATGGCGGAAAAATTATAAATGCAACTTCACAAGCAGGATGTGAAGGGAATCCTAATTTGACTGTTTATGGTGGTACAAAATTTGCAGTTCGTGGTATTACACAGACTTTGGCAAAAGATTTAGCATCAGAAGGAATCACAGTCAATGCTTACGCACCAGGTATTGTTAAAACACCTATGATGTTTGATATTGCCCATGAAGTTGGTAAGAATGCAGGCAAAGATGATGAATGGGGTATGGAGCAGTTTGCCAAAGATATCACTTTGAAACGCTTGTCTGAACCAGAAGATGTTGCTAATGCAGTAGGCTTCTTAGCGGGAGATGATTCAAATTATATCACTGGACAAACAATAGTTGTCGATGGGGGTATGGTATTCCATTAA

SEQ ID NO: 1074 - protein, 254 aa, Streptococcus agalactiae
MSKVAIVTGAGQGIGFAIAKRLHADGFKIGVLDYNEETAQAAVDKLSPEDAVAVVADVSKRDQVFDAFQKVVDTFGDLNVVVNNAGVAPTTPLDTITEEQFEKAFAINVGGTIWGSQAAQKHFRELGHGGKIINATSQAGCEGNPNLTVYGGTKFAVRGITQTLAKDLASEGITVNAYAPGIVKTPMMFDIAHEVGKNAGKDDEWGMEQFAKDITLKRLSEPEDVANAVGFLAGDDSNYITGQTIVVDGGMVFH

SEQ ID NO: 1075 - protein, 2241 aa, Streptococcus agalactiae
ATGTTTTGTTTTATAGATATAGCGTGCTATAATAGACTTACTATGACCCAGAAAAAACTTAGAAAATATGCAGTAGTTGACTTGGAGGCTACTGGAGCAGGTCCCAATGCTTCTATTATTCAGGTTGGGATTGTTATTATCCAAGGAAATAAAATTATTGATAGTTATGAAACAGATGTTAATCCTCATGAATCTTTGGATGAGCATATTGTTCATTTGACAGGTATTACGGATAAGCAGTTGGCTAAAGCTCCGGATTTTGGTCAAGTGGCGCATCACATTTATCAATTGATTGAAGATTGTATTTTTGTTGCCCACAATGTAAAGTTCGATGCAAATTTATTGGCTGAGCAACTATTTTTAGAAGGCTGCGAGTTACGTACACCAAGGATAGATACAGTAGAATTATCACAAGTATTTTATCCCTGTTTAGAAAAATATTCTTTAGGGGCATTAGCAGAAAGCTTAAATATTGAATTAACAGATGCGCACACTGCTATTGCAGATGCAAGAGCTACAGCACAGTTATTCATTAAGTTAAAAGCTAAAATTAGTAGTTTACCTAAAGAAGTGTTGGAGACCATTTTAACATTTGCTGATAATCTTTTGTTCGAATCCTATTTATTGATTGAAGAAGCTTATCAAGAAGCTGATTTCGTTAATCCTAAAGAATATTATTTCTGGCAAGGATTGGTCTTAAAAAAAGAAAAAGCTGTTGGAAAGCCTAAGAAATTATCTAGTGATTTTCAAGTTAACATGGCTTTGTTAGGTATGGATGCTCGCCCTAAGCAAGTTGTTTTTGCTGACTTGGTTAAAGCGCATTTTAATGATCAAACAACAACGTTTTTAGAAGCTCAACCAGGACTTGGTAAAACATATGGTTATCTCTTGCCTTTATTGGATCAGTCTCAAAAACAACAAATAATAGTATCTGTTCCAACAAAGATTTTGCAAGATCAAATAATGGCTAAAGAAATAAAGCACATTCAAGAACTTTTTCATATTCCCTGTCACAGTATCAAAGGACCGAGAAATTACTTGAAGTTAGATGCGTTTTATAAGAGCCTCCAAGTGCAGGATCGAAATCGATTGATAAATCGTTTTAAAATGCAACTGCTAGTGTGGTTGACGGAAACGACTACAGGTGATTTGGATGAAATTAAACAAAAACAACGATTAGAATCTTACTTTGACCAGCTAAAACACGATGGAGAAGTGACTCAATCATCACTTTTTTATGATCTGGATTTTTGGAAACGCAGTTATGATAAAGTTGCACAAAGTCAACTTGTTATTATCAATCATGCTTATTTTCTTGAGCGTGTTCAGGATGACAAAGATTTTGCAAAGGGGAAGGTTTTAGTTTTTGATGAAGCTCAGAAACTTGTTTTGGGACTGGAAAATTTTTCTCGTGGGCAACTTGATATTAGTCACCAATTGCAGGTTATTCAAAAAATAATTGATAGTTCTATTCCATTATTACAAAAGCGCCTTCTGGAAAGTATCTCTTATGAGCTAAGTCATGCAGTAGAACTTTTTTATCGTCATAATTCTTTTGAATTTTCAGAGACCTGGTTGAAACGTCTAAAAAATAGTATAAACGCTTTAGAAGTAGTAGGATTAGATGAGTTACAAACTTTTTTCACAGCTACTTATACTAACTATTGGTTTGAAACTGACAAAGTCAATGAGAAGCGTTTAACCATTTTACGTGGGGCGAGAGAAGATTTTCTTAAATTTTCAAAGTTCCTCCCCCCCACAAAAAAGACCTATATGATATCAGCGACTTTACAAATCAGTCCCAAAGTCTACTTGTCAGATCTTTTAGGAGGATTTTCAAGTATAAGTACAGAAAAGATAGCGCATGAGAAAAATGCCAATCAGAAAGTATGGATTGATACCTCTATGCCCAATATACTTGATTTATCACCGGAACAGTATGCTTACGAAATAGCCAAGCGTTTACAAGATATAATGACGTTAAAGCAGCCTACCTTAGTCTTATTAACTTCTAAACAGACAATGTTTATGGTATCTGATTATTTGGATAAGTGGGAGATAAAACATCTTACTCAAGATAAAAATGGCTTAGCTTATAACGTTAAAAAACGTTTTGATCGTGGAGAAAGCAATCTTCTTTTAGGTACAGGATCTTTTTGGGAAGGTGTTGACTTTGTACATCGTGATCGTCTTATTGAAGTTATCACGCGATTGCCTTTTGNNNNNCATTCCATTCATTAA

SEQ ID NO: 1076 - protein, 746 aa, Streptococcus agalactiae
  VARIANT 741, 742: Xaa = Any Amino Acid
MFCFIDIACYNRLTMTQKKLRKYAVVDLEATGAGPNASIIQVGIVIIQGNKIIDSYETDVNPHESLDEHIVHLTGITDKQLAKAPDFGQVAHHIYQLIEDCIFVAHNVKFDANLLAEQLFLEGCELRTPRIDTVELSQVFYPCLEKYSLGALAESLNIELTDAHTAIADARATAQLFIKLKAKISSLPKEVLETILTFADNLLFESYLLIEEAYQEADFVNPKEYYFWQGLVLKKEKAVGKPKKLSSDFQVNMALLGMDARPKQVVFADLVKAHFNDQTTTFLEAQPGLGKTYGYLLPLLDQSQKQQIIVSVPTKILQDQIMAKEIKHIQELFHIPCHSIKGPRNYLKLDAFYKSLQVQDRNRLINRFKMQLLVWLTETTTGDLDEIKQKQRLESYFDQLKHDGEVTQSSLFYDLDFWKRSYDKVAQSQLVIINHAYFLERVQDDKDFAKGKVLVFDEAQKLVLGLENFSRGQLDISHQLQVIQKIIDSSIPLLQKRLLESISYELSHAVELFYRHNSFEFSETWLKRLKNSINALEVVGLDELQTFFTATYTNYWFETDKVNEKRLTILRGAREDFLKFSKFLPPTKKTYMISATLQISPKVYLSDLLGGFSSISTEKIAHEKNANQKVWIDTSMPNILDLSPEQYAYEIAKRLQDIMTLKQPTLVLLTSKQTMFMVSDYLDKWEIKHLTQDKNGLAYNVKKRFDRGESNLLLGTGSFWEGVDFVHRDRLIEVITRLPFXXHSIH

SEQ ID NO: 1077 - protein, 156 aa, Streptococcus agalactiae
ATGAATGAATGNNNNNCAGCGGTAATTATTTTGGATAGCAGATTGGTTATTAAATCTTATGGACTAACCATCATGCATTCTCTTGGTAGAGATTTTGAAATTTCTAAGGAAAAAATTAACAAGGTCTTGACTGAAATGGCTAAATTTTTGATATAA

SEQ ID NO: 1078 - protein, 51 aa, Streptococcus agalactiae
  VARIANT 4, 5, 6: Xaa = Any Amino Acid
MNEXXXAVIILDSRLVIKSYGLTIMHSLGRDFEISKEKINKVLTEMAKFLI

SEQ ID NO: 1079 - protein, 1193 aa, Streptococcus agalactiae
ATGACCTATTTGTCAGAACGTGTACTCAATATGGAAGAGAGTGTTACTTTAGCTGCGGGAGCTAAAGCAAGAGACTCAGAGTACAAGGAAGAGATATTCTTAGTTTAACTTTAGGGGAGCCTGACTTTGCTACTCCTAAAAACATTCAGCAAGCGGCTATTGAGGCTATAACAGATGGACGTGCAAGTTTTTACACACCATCAAGTGGTTTGCCGGAGTTGAAGTCAGCAATTAATGCGTATTTTGAACGTTTTTATGGCTACTCCCTTAAACCTAATCAGGTGGTTGTGGGAACTGGTGCTAAGTTTATCCTTTATACTTTCTTTATGACAGTACTGAATCCCGGTGATGAAGTAATTATTCCGACTCCTTATTGGGTATCTTATGCTGATCAGATTAAGATGGCTGAAGGTAAGCCAGTTTTTGTCACAGCAAAAGAAGTTAATCACTTCAAAGTAACTGTGGAACAGTTAGAAGCTGTTAGGACTGATAAGACAAAAGTCATACTTCTTAATAGTCCATCAAATCCTACAGGTATGATTTATAAAGCTGAGGAGTTGGAGGCTATTGGAAATTGGGCAGTCGAACATGATATCCTAATTTTAGCAGATGATATTTACGGTCGATTGGTTTACAATGGCAATATTTTTACCCCTATTTCAAGCCTTTCAGAGTCTATTCGAAACCAAACGATAGTCATAAATGGAGTTTCTAAGACTTATGCGATGACAGGTTGGCGTGTTGGTTTTGCAGTGGGTAATCATGATATTATAGCGGCAATGTCTAAAGTAGTCAGTCAAACAACTTCTAACCTTACGGCTGTCTCACAGTATGCTACTATTGAGGCTTTAAATGGTTCTCAAGAGTCATTTGAAAAAATGAGGCTAGCATTTGAAGAACGCCTTAATATCATTTATCCATTGTTGTGTCAGGTCCCTGGGTTTGAGGTTGTTAAACCACAAGGTGCTTTTTATCTTTTCCCAAATGTTACAAAAGCAATGGAAATGAAAGGATATACGGATGTTACAGCATTCACGGATGCCATTCTTGAAGAAGTTGGACTTGCTTTAGTAACGGGTGCTGGTTTTGGAGCGCCGGAAAATGTTCGTCTGAGTTATGCTACAGATCTTGAAACCCTTAAAGAAGCTGTTCGTAGACTGCATGTCTTTATGGGAAGTAATGAAATTAATTAA

SEQ ID NO: 1080 - protein, 397 aa, Streptococcus agalactiae
MTYLSERVLNMEESVTLAAGAKARELRVQGRDILSLTLGEPDFATPKNIQQAAIEAITDGRASFYTPSSGLPELKSAINAYFERFYGYSLKPNQVVVGTGAKFILYTFFMTVLNPGDEVIIPTPYWVSYADQIKMAEGKPVFVTAKEVNHFKVTVEQLEAVRTDKTKVILLNSPSNPTGMIYKAEELEAIGNWAVEHDILILADDIYGRLVYNGNIFTPISSLSESIRNQTIVINGVSKTYAMTGWRVGFAVGNHDIIAAMSKVVSQTTSNLTAVSQYATIEALNGSQESFEKMRLAFEERLNIIYPLLCQVPGFEVVKPQGAFYLFPNVTKAMEMKGYTDVTAFTDAILEEVGLALVTGAGFGAPENVRLSYATDLETLKEAVRRLHVFMGSNEIN

SEQ ID NO: 1081 - protein, 1347 aa, Streptococcus agalactiae
ATGTCAAAAAAACTTATTTCAATTGTTGATGTTAAAGATTATGTTGGTCAAGAAGTTACTATTGGTGCTTGGGTTGCTAACAAATCAGGTAAAGGTAAGATTGCGTTTGTACAGTTGCGCGATGGTTCTGCCTTTTTCCAAGGTGTCGCTTTTAAACCAAACTTCATTGAAAAATATGGTGAAGAATCAGGTCTTGAAAAATTTGACGTTATTAAACGTCTCAACCAAGAAACATCTGTTTATGTAACAGGGATTGTTAAAGAGGATGAACGTTCAAAATTTGGCTATGAGCTTGATATTACTGACCTTGAAGTCATTGGAGAGTCACATGAATATCCTATAACTCCTAAAGAGCATGGGACAGACTTCTTGATGGACAACCGTCATCTTTGGTTGCGTTCTCGTAAACAAATGGCTGTTATGCAAATTCGTAACGCTATTATTTATTCAACTTATGAATTCTTTGACCAAAATGGTTTTATCAAATTTGATAGCCCAATTTTATCAGAAAATGCAGCAGAAGATTCAACAGAGTTATTTGAAACAGACTATTTTGGGAAACCAGCATTTCTTAGCCAATCTGGTCAATTATACCTTGAAGCTGGAGCAATGGCTCTAGGCCGAGTTTTCGACTTTGGTCCAGTCTTTCGTGCTGAAAAATCTAAAACACGTCGCCATTTAACAGAATTTTGGATGATGGATGCTGAGTATTCTTTCTTGTCACATGAGGAATCACTTGACCTCCAAGAAGCTTATGTTAAAGCATTGATCCAAGGCGTTCTAGATCGTGCGCCTCAAGCACTTGATATTTTAGAACGTGATGTTGAGGCTCTCAAACGTTATATCGCAGAGCCATTCAAGCGTGTTTCTTATGATGATGCTATTACACTTCTTCAAGAGCATGAAGCAGATGAAGATACAGATTATGAACATTTAGAGCATGGTGATGACTTTGGTTCACCACATGAAACTTGGATTTCTAATTACTTTGGAGTGCCGACATTTGTAGTGAATTACCCAGCAAGCTTTAAAGCATTTTATATGAAACCAGTTCCTGGAAATCCAGAACGCGTTCTTTGTGCTGATCTTCTAGCTCCAGAAGGTTATGGAGAGATCATTGGCGGCTCAATGCGTGAAGACGACTACGATGCTCTTGTGGCTAAAATGGATGAACTAGGTATGGATAAATCAGAATACGACTTTTACCTTGACCTTCGTAAATACGGCTCTGTTCCTCATGGCGGTTTTGGTATAGGTATTGAACGTATGGTAACTTTTGTTGCTGGTACCAAACATATTCGCGAAGCTATTCCATTCCCACGTATGTTACATCGTATCAAACCATAA

SEQ ID NO: 1082 - protein, 448 aa, Streptococcus agalactiae
MSKKLISIVDVKDYVGQEVTIGAWVANKSGKGKIAFVQLRDGSAFFQGVAFKPNFIEKYGEESGLEKFDVIKRLNQETSVYVTGIVKEDERSKFGYELDITDLEVIGESHEYPITPKEHGTDFLMDNRHLWLRSRKQMAVMQIRNAIIYSTYEFFDQNGFIKFDSPILSENAAEDSTELFETDYFGKPAFLSQSGQLYLEAGAMALGRVFDFGPVFRAEKSKTRRHLTEFWMMDAEYSFLSHEESLDLQEAYVKALIQGVLDRAPQALDILERDVEALKRYIAEPFKRVSYDDAITLLQEHEADEDTDYEHLEHGDDFGSPHETWISNYFGVPTFVVNYPASFKAFYMKPVPGNPERVLCADLLAPEGYGEIIGGSMREDDYDALVAKMDELGMDKSEYDFYLDLRKYGSVPHGGFGIGIERMVTFVAGTKHIREAIPFPRMLHRIKP

SEQ ID NO: 1083 - protein, 558 aa, Streptococcus agalactiae
ATGACAAAATCACCTGCTCGTTTAATTTCATTTATCTCAATCGCTATCGCCATCAACCTTGTTGGGGCTAATTTAGCTCTATTTTTACGCCTACCTATCTATCTAGATACTATAGGTACATTGTTAATAGCAGTTATCCTGGGACCATGGTACGCTGCCAGCACTGCTTTTCTCAGTGCACTCATCAATTGGATGACTACTGATATTTTTTCACTTTATTATTCACCAGTCGCCATCGTGGTTGCTATCATTACGGGTATCTTGATTAAAAGGAATTGTAAACCCTCTAGCCTATTGTGGAAATCACTGATTATTTCTTTACCAGGAACTATTATTGCTTCAGTTATAACAGTTATCCTTTTTAAAGGAATTACCTCTAGTGGCTCAAGTATTATAGCACAATTCTTACATGGAATTGGATTAGACATGACAAGTAGTTTGATACTTGTTCAAGTTGGAACAGATTATATGGATCGACTAATCAGTCTTATCCTTGTCTTTTCGACAATCACATTGTTAAAAAAACATAGTCCCAATTTAATTAACCAACGATTCTAA

SEQ ID NO: 1084 - protein, 185 aa, Streptococcus agalactiae
MTKSPARLISFISIAIAINLVGANLALFLRLPIYLDTIGTLLIAVILGPWYAASTAFLSALINWMTTDIFSLYYSPVAIVVAIITGILIKRNCKPSSLLWKSLIISLPGTIIASVITVILFKGITSSGSSIIAQFLHGIGLDMTSSLILVQVGTDYMDRLISLILVFSTITLLKKHSPNLINQRF

SEQ ID NO: 1085 - protein, 192 aa, Streptococcus agalactiae
GTGATAAATGATCCTTTAGCTATTGCTTACTTTGTTAATGAAAATATCGCTACTGGTTTTGATAGCTATACCGATGTTGCTTGTCACGGAATCGCCATGGGACAAACAATTGTAGATCAGTATCATTTTTATAAAAAAGATGCTAACAGTAAGATTTTAACCTCAGTCAATACTWAWTTWWTTTKGGAATGA

SEQ ID NO: 1086 - protein, 63 aa, Streptococcus agalactiae
  VARIANT 59, 60, 61, 62: Xaa = Any Amino Acid
MINDPLAIAYFVNENIATGFDSYTDVACHGIAMGQTIVDQYHFYKKDANSKILTSVNTXXXXE

SEQ ID NO: 1087 - protein, 701 aa, Streptococcus agalactiae
ATGAATAAAGAAAAAATTATTATCGATTGCGATCCCGGTATTGATGATACCTTAGCACTGATGTATGCTATTCAGCATCCTAAGTTAGAAGTTGTTGCTATTACTATAACAGCAGGCAATTCGCCTGTTGAGCTAGGACTAAAGAATACCTTTGTAACGCTTGAATTACTAAACCGTCACGACATTCCAGTTTATGTTGGTGATAACTTGCCTTTACAACGTGAATTTGTATCTGCTCAGGATACTCATGGAATGGATGGCCTTGGAGAGAATAACTTTACATTGGCGCAACCAATTATCTTTCAAGAAGAATCAGCAGATTGTTTTTTAGCAAACTATTTTGAACACAAAAATGATACTTCTATTATAGCTCTCGGACCTCTGACCAATATCGCTCGAGCCTTACAAACTAATCCCAAATTAGGCAAACATTGCAAGCGATTTATTAGCATGGGAGGAAGTTTTAAATCACATGGCAATTGTTCTCCAGTTGCTGAATACAACTATTGGTGTGATCCTCATGCTGCACAATATGTATTTGAAAACCTTGACAAAAAAATAGAGATGGTTGGACTAGACATCACACGTCATATTGTATTAACCCCCAATCATTTATCTTATATGGAGCGKAWTAATYCAGACGTATCAAGTTTTATCCAAAAAATCACAAAGTTCTACTTCGATTTTCACTGGCAATATGA

SEQ ID NO: 1088 - protein, 233 aa, Streptococcus agalactiae
  VARIANT 211, 213: Xaa = Any Amino Acid
MNKEKIIIDCDPGIDDTLALMYAIQHPKLEVVAITITAGNSPVELGLKNTFVTLELLNRHDIPVYVGDNLPLQREFVSAQDTHGMDGLGENNFTLAQPIIFQEESADCFLANYFEHKNDTSIIALGPLTNIARALQTNPKLGKHCKRFISMGGSFKSHGNCSPVAEYNYWCDPHAAQYVFENLDKKIEMVGLDITRHIVLTPNHLSYMERXNXRRIKFYPKNHKVLLRFSLAI

SEQ ID NO: 1089 - protein, 201 aa, Streptococcus agalactiae
ATGCTTTATGAAGTAACCTCATCAAACACTCAAGGCGTTGATGGAAAAGTTTATCTCTCCAATGGAAAAATTGTGGAGACCAATCACCCTTTAAATCATTTACCAGGATTTAATCCTGAGGAATTAATTGCTTTAGCATGGTCAACATGTTTAAATGCAACTATAAAAGCTATTTTAGAACAAAAAGGATTCAAAGACCTA

SEQ ID NO: 1090 - protein, 67 aa, Streptococcus agalactiae
MLYEVTSSNTQGVDGKVYLSNGKIVETNHPLNHLPGFNPEELIALAWSTCLNATIKAILEPKKDSKT

SEQ ID NO: 1091 - protein, 489 aa, Streptococcus agalactiae
ATGTCAGACGAACAAATCAAACTTGTGATTGTAACAGGTATGAGTGGGGCAGGAAAGACAGTGGCTATTCAGTCATTTGAAGATTTAGGATATTTTACAATAGATAATATGCCGCCTACTCTAGTGCCTAAGTTTTTAGAATTAGCAGCACAATCAGGAGATACAAGCAAGATTGCTATGGTAGTTGACATGCGTAGTCGTCTTTTCTTTAGAGAAATTAACTCTATTTTGGATAGCCTTGAAATTAATGATAATATTAACTTTAAGATTCTATTTTTAGATGCTACTGACACCGAGCTAGTGTCACGATATAAAGAGACACGTCGTAGCCACCCTCTTGCTGCCGACGGCAGAGTGTTAGATGGTATTTCTCTAGAGAGAGAACTATTAGCACCGCTTAAAAGTATGAGTCAGAACGTTGTGGACACTAGTGAATTAACACCAAGACAACTACGTAAGGTCATTTCTAAAGATTCTCAAATCAGATAG

SEQ ID NO: 1092 - protein, 162 aa, Streptococcus agalactiae
MSDEQIKLVIVTGMSGAGKTVAIQSFEDLGYFTIDNMPPTLVPKFLELAAQSGDTSKIAMVVDMRSRLFFREINSILDSLEINDNINFKILFLDATDTELVSRYKETRRSHPLAADGRVLDGISLERELLAPLKSMSQNVVDTSELTPRQLRKVISKDSQIR

SEQ ID NO: 1093 - protein, 377 aa, Streptococcus agalactiae
TTGATGGAAAAGTTTATCTCTCCAATGGAAAAATTGTGGAGACCAATCACCCTTTAAATCATTTACCAGGATTTAATCCTGAGGAATTAATTGCTTTAGCATGGTCAACATGTTTAAATGCAACTATAAAAGCTATTTTAGAACAAAAAGGATTCAAAGACCTAAAATCTCGCGTTGATGTTACTTGCCAGCTCATGAAGGAAAAGCAAGTAGGTAAGGGATTTTATTTCCAAGTTAACGCTGTTGCTAGTATTGAAAAACTGTCATTATCTGATAGTAAGCTAATCGTTAACAAAGCACACAGCAGATGTCCGATTTCAAAATTAATTTCAAATGCTAAAACAATCAATCTAGACACTGTTAAATGGTCAGTTTGA

SEQ ID NO: 1094 - protein, 125 aa, Streptococcus agalactiae
MMEKFISPMEKLWRPITPLNHLPGFNPEELIALAWSTCLNATIKAILEQKGFKDLKSRVDVTCQLMKEKQVGKGFYFQVNAVASIEKLSLSDSKLIVNKAHSRCPISKLISNAKTINLDTVKWSV

SEQ ID NO: 1095 - protein, 891 aa, Streptococcus agalactiae
ATGTCAGACGAACAAATCAAACTTGTGATTGTAACAGGTATGAGTGGGGCAGGAAAGACAGTGGCTATTCAGTCATTTGAAGATTTAGGATATTTTACAATAGATAATATGCCGCCTACTCTAGTGCCTAAGTTTTTAGAATTAGCAGCACAATCAGGAGATACAAGCAAGATTGCTATGGTAGTTGACATGCGTAGTCGTCTTTTCTTTAGAGAAATTAACTCTATTTTGGATAGCCTTGAAATTAATGATAATATTAACTTTAAGATTCTATTTTTAGATGCTACTGACACCGAGCTAGTGTCACGATATAAAGAGACACGTCGTAGCCACCCTCTTGCTGCCGACGGCAGAGTGTTAGATGGTATTTCTCTAGAGAGAGAACTATTAGCACCGCTTAAAAGTATGAGTCAGAACGTTGTGGACACTAGTGAATTAACACCAAGACAACTACGTAAGGTCATTTCTAAAGAATTCTCAAATCAAGATAGTCAAAGTTCTTTTCGTATCGAAGTTATGAGTTTTGGTTTTAAATATGGTATACCTTTGGATGCGGATTTAGTATTCGATGTGCGTTTTTTACCAAATCCATACTATAAACCAGAATTAAGAGATAAGACAGGTTTAGATACTGAGGTTTATGACTATGTCATGAGTTTTGATGAATCAGATGATTTTTATGACCATCTTCTTGCCTTAATAAAGCCAATCTTACCAGGCTATCAAAATGAAGGGAAATCTGTTTTGACTGTGGCAATCGGATGTACAGGTGGGCAACATCGTAGCACCGCTTTTGCTCATAGATTATCAGAAGATTTAAAAGCAGATTGGACAGTTAATGAAAGCCATCGTGATAAAAATAAGCGTAAGGAGACGGTAAATCGTTCATGA

SEQ ID NO: 1096 - protein, 296 aa, Streptococcus agalactiae
MSDEQIKLVIVTGMSGAGKTVAIQSFEDLGYFTIDNMPPTLVPKFLELAAQSGDTSKIAMVVDMRSRLFFREINSILDSLEINDNINFKILFLDATDTELVSRYKETRRSHPLAADGRVLDGISLERELLAPLKSMSQNVVDTSELTPRQLRKVISKEFSNQDSQSSFRIEVMSFGFKYGIPLDADLVFDVRFLPNPYYKPELRDKTGLDTEVYDYVMSFDESDDFYDHLLALIKPILPGYQNEGKSVLTVAIGCTGGQHRSTAFAHRLSEDLKADWTVNESHRDKNKRKETVNRS

SEQ ID NO: 1097 - protein, 975 aa, Streptococcus agalactiae
ATGAGAAAACCTAAAATAACCGTTATCGGCGGAGGAACGGGAATTCCAGTTATTTTGAAAAGTCTTCGCTTAGAAGATGTTGAGATTACAGCGGTTGTCACGGTTGCAGATGATGGTGGTTCGTCAGGTGAGTTGCGCTCAGTTATGCAACTAACACCACCAGGAGATCTAAGAAATGTTTTGGTTGCCTTGAGTGATATGCCGAAGTTTTACGAACAAATTTTCCAATATCGTTTTGCAGAAGGTGATGGGGATTTTGCAGGTCATCCTTTAGGAAATCTTATTATTGCTGGTGTTGCTGAAATGCAAGGTTCAACTTATAACGCTATGCAGAGTTTAACACAGTTCTTTCATACAACAGGAAAGATATATCCATCTAGTGAACATCCGCTCACTCTGCATGCTGTTTTTAAAGATGGCCATGAAGTGGTTGGAGAGAGTCAAATAGCCGATTATAAAGGCATGATTGACCATGTGTATGTCACTAATACTTATAATGAAGAGACTCCTACGGCCAGCCGCAAAGTTGTTGATGCAATTTTAGAAAGTGATATGATTGTGTTGGGGCCAGGGTCACTTTTCACCTCTATTTTACCTAACCTAGTTATTCCAGAAATTAAACAAGCTCTTTTAGAAACTCGGGCAGAGGTAGCTTATGTATGCAATATTATGACACAACGTGGTGAAACTGAGCATTTTACAGACGCAGACCACGTTGAAGTATTGAAACGTCATTTAGGACAAGATGCTATCGATACAGTTTTGGTTAATATTGAAAAAGTGCCAGAGTCTTATATGGAAAACAATCATTTTGATGAGTATTTGGTACAGGTTGAACATGATTTTTCAGGGCTTAGAAAACATGCCAGACGTGTCATCTCGTCTAACTTTTTAAAATTAGAAAAAGGTGGAGCCTTCCATCATGGTGACTTCGTTGTTGAGGAACTAATGAATTTAGTAGGAACACATTTATGA

SEQ ID NO: 1098 - protein, 324 aa, Streptococcus agalactiae
MRKPKITVIGGGTGIPVILKSLRLEDVEITAVVTVADDGGSSGELRSVMQLTPPGDLRNVLVALSDMPKFYEQIFQYRFAEGDGDFAGHPLGNLIIAGVAEMQGSTYNAMQSLTQFFHTTGKIYPSSEHPLTLHAVFKDGHEVVGESQIADYKGMIDHVYVTNTYNEETPTASRKVVDAILESDMIVLGPGSLFTSILPNLVIPEIKQALLETRAEVAYVCNIMTQRGETEHFTDADHVEVLKRHLGQDAIDTVLVNIEKVPESYMENNHFDEYLVQVEHDFSGLRKHARRVISSNFLKLEKGGAFHHGDFVVEELMNLVGTHL

SEQ ID NO: 1099 - protein, 912 aa, Streptococcus agalactiae
ATGAGTTTTACAGTAAAAGTCAAAGAAGAGCTGCTAGGTCATAAGAGTGAAAATAAGATGGAACTGTCAGCTATTATCAAAATGTCAGGTAGTTTAGGATTAGCTAACCACGGCCTTAACCTTTCTATTACTACAGAAAATGCTAAAATTGCTCGTCATATTTATAGCATGCTAGAAGAACATTATCATTTGCAGCCAGAAATCAAATACCATCAAAAAACGAACTTACGAAAGAATCGTGTGTATACTGTTTTTATTGAAGAAAAAGTTGATGTTATTCTTGCTGATTTGAAGTTGGCTGATGCTTTTTTTGGTATTGAAACTGGTATTGAACACTCTATATTGGACAATGATGAAAATGGAAGAGCTTATCTCAGGGGAGCATTCTTATCAACGGGTACTGTTAGAGAACCTGATTCTGGGAAATATCAACTAGAAATTTTTTCTGTTTATCTAGACCATGCACAAGACTTAGCTAATCTTATGAAAAAATTTATGTTAGATGCAAAGGTTATTGAACATAAACATGGAGCAGTAACTTATTTGCAAAAAGCAGAAGATATTATGGATTTCTTGATAGTCATTGATGCCATGGAAGCTAGAGATGCTTTTGAAGAGATTAAAATGATACGTGAGACACGTAATGATATTAATCGTGCTAACAACGTTGAAACAGCTAATATTGCTAGAACAATCACAGCTAGTATGAAGACTATCAATAATATTATCAAGATTATGGATACTATTGGTTTTGATGCACTGCCTAGTGATTTAAGACAAGTAGCTCAGGTGCGTGTGGCTCATCCAGATTACTCTATTCAACAAATAGCAGACAGTTTAGAAACGCCTCTGAGTAAGAGTGGCGTTAACCATCGCTTACGGAAAATAAATAAAATTGCAGATGAATTATAG

SEQ ID NO: 1100 - protein, 303 aa, Streptococcus agalactiae
MSFTVKVKEELLGHKSENKMELSAIIKMSGSLGLANHGLNLSITTENAKIARHIYSMLEEHYHLQPEIKYHQKTNLRKNRVYTVFIEEKVDVILADLKLADAFFGIETGIEHSILDNDENGRAYLRGAFLSTGTVREPDSGKYQLEIFSVYLDHAQDLANLMKKFMLDAKVIEHKHGAVTYLQKAEDIMDFLIVIDAMEARDAFEEIKMIRETRNDINRANNVETANIARTITASMKTINNIIKIMDTIGFDALPSDLRQVAQVRVAHPDYSIQQIADSLETPLSKSGVNHRLRKINKIADEL

SEQ ID NO: 1101 - protein, 1398 aa, Streptococcus agalactiae
ATGGCTTGTACAACAATATTGGTTGGTAAAAAGGCTTCTTATGATGGTTCGACTATGATCGCTAGAACGGAAGACTCTGTTAATGGCGATTTCACACCCAAAAAATTAAAGGTAATGACATCTAAAGATCAACCGCGTCATTACAAATCAGTTTTATCAAATTTTGAAGTAGATTTACCAGATAACCCACTTCCTTATACTTCAGTACCGGACGCATTGGGAAAAGATGGTATATGGGGTGAAGCCGGTATTAACAGTAAAAATGTAGCGATGAGTGCTACAGAAACTATTACAACGAATTCCCGCGTTTTGGGTGCAGATCCTTTGGTTTCAGATGGTATAGGGGAAGAGGATATACTCACTTTAGTGCTTCCCTATATTCAGTCAGCGCGAGAAGGTGTGGAGCGTTTAGGTGCTATTTTGGAAAAATATGGAACCTATGAATCAAATGGTATTGCTTTTTCAGATACCGAAGAAATATGGTGGTTAGAAACAATTGGTGGGCATCATTGGATTGCTCGTCGCGTACCTGATGATGTTTATGTTACTAATCCTAACCAACTAGGAATTGATCATTTTGAATTTAATAACTGTGATGACTACATGTGCTCTAGTGATTTGAAAGAGTTTATCGAACAATACCATTTAGATTTGACCTATTCTAATGAGCATTTCAATCCTCGATATGCTTTTGGTAGCCAACGTGATAAAGATCGTCATTACAACACACCAAGAAGTTGGGCAATGCAGCGTTTTTTAAATCCTGAAATTGAACAGGATCCACGTAGCTTGTTTATTCCCTGGTGTCAAAAGCCTTACCGAAAAATTACTGTTGAGGATATTAAATATGTGTTGAGTGATCATTATCAAGACAGTGTGTATGACCCATATGGACCAGAAGGGGATGCGGTAAGTAGGAGAGCTTTTCGTTCAGTTGGTATCAACCGAACTAGTCAAACGTCTATTCTACAATTACGACCAAATAAATCACTTGAAACGACAGGTGTTCAATGGTTATCTTATGGCTCTATGCCATTTGCAACCATGGTGCCGTTGTTTACACAAGTTGAGACTGTACCAAACTATTTTTCGAATACAACCAAGGATGCTTCAACAGATAATTTTTATTGGACCAATCGTTTAATTGCAGCTCTAGCAGATCCACACTTTTATCAACATGAAGCTGATATTGAAAGCTATATCGAGAGAACGATGGCTCAAGGACATGCACATATTAACGGTGTTGATAGAGAAGTTGCTGAGAATAAAGAGATTGATTTTCAACAGAAAAATCAAGAAATGAGTGACTATATCCAAAAAGAAAGCCAAGAATTGTTAAATCGTATTCTATTTGATGCAAGTAATTTAATGACAAATCGCTTTTCAATGGGAGATTAA

SEQ ID NO: 1102 - protein, 465 aa, Streptococcus agalactiae
MACTTILVGKKASYDGSTMIARTEDSVNGDFTPKKLKVMTSKDQPRHYKSVLSNFEVDLPDNPLPYTSVPDALGKDGIWGEAGINSKNVAMSATETITTNSRVLGADPLVSDGIGEEDILTLVLPYIQSAREGVERLGAILEKYGTYESNGIAFSDTEEIWWLETIGGHHWIARRVPDDVYVTNPNQLGIDHFEFNNCDDYMCSSDLKEFIEQYHLDLTYSNEHFNPRYAFGSQRDKDRHYNTPRSWAMQRFLNPEIEQDPRSLFIPWCQKPYRKITVEDIKYVLSDHYQDSVYDPYGPEGDAVSRRAFRSVGINRTSQTSILQLRPNKSLETTGVQWLSYGSMPFATMVPLFTQVETVPNYFSNTTKDASTDNFYWTNRLIAALADPHFYQHEADIESYIERTMAQGHAHINGVDREVAENKEIDFQQKNQEMSDYIQKESQELLNRILFDASNLMTNRFSMGD

SEQ ID NO: 1103 - protein, 729 aa, Streptococcus agalactiae
ATGAGAAAGAAATTTCTTTTATTGATGAGCTTTGTAGCTATGTTTGCAGCTTGGCAACTTGTTCAAGTTAAACAAGTTTGGGCTGATAGTAAACTTAAAGTGGTAACAACTTTTTACCCAGTTTATGAGTTTACAAAAAATGTCGTTGGTGATAAAGCTGATGTATCTATGTTAATTAAAGCAGGTACAGAACCGCATGATTTTGAACCATCAACTAAAAACATCGCTGCCATCCAAGATTCAAATGCTTTTGTTTACATGGATGATAACATGGAAACTTGGGCTCCAAAAGTAGCTAAGTCAGTTAAATCCAAAAAAGTAACAACTATTAAAGGTACTGGCGATATGTTACTTACTAAAGGCGTCGAAGAAGAAGGTGAAGAACATGAAGGACATGGTCATGAAGGGCATCATCATGAACTTGACCCACACGTATGGTTGTCTCCAGAACGTGCGATTTCTGTTGTAGAAAACATCCGTAATAAATTTGTCAAAGCTTATCCAAAAGATGCAGCTTCATTTAACAAAAATGCAGATGCTTACATTGCAAAATTAAAAGAGCTTGACAAAGAATACAAAAATGGTTTGTCAAATGCTAAACAAAAGAGTTTTGTGACTCAACACGCAGCGTTTGGTTACATGGCGCTTGATTACGGTTTAATCAAGTTCCAATTGCTGGTCTACTCCAGATGCAGAACCTTCATCAAAACGTTTAGGCGAATTAGCTAA

SEQ ID NO: 1104 - protein, 243 aa, Streptococcus agalactiae
MRKKFLLLMSFVAMFAAWQLVQVKQVWADSKLKVVTTFYPVYEFTKNVVGDKADVSMLIKAGTEPHDFEPSTKNIAAIQDSNAFVYMDDNMETWAPKVAKSVKSKKVTTIKGTGDMLLTKGVEEEGEEHEGHGHEGHHHELDPHVWLSPERAISVVENIRNKFVKAYPKDAASFNKNADAYIAKLKELDKEYKNGLSNAKQKSFVTQHAAFGYMALDYGLNQSSNCWSYSRCRTFIKTFRRIS

SEQ ID NO: 1105 - protein, 702 aa, Streptococcus agalactiae
GTGAAAACAGCTGTGCTTAGTCCACTTGAAGGACTTTCTAAAAAAGAAATGGCAGCTGGCGAAGATTACTTCTCAGTTATGAGACGTAATTTGAAAGTTCTTAAAAAGACAACAGATGTTGCAGGTAAAGAAGTAGCTCCTGAAGAAGATAAAACTAAAACAGTTGAAACAGGTTACTTTAAAACTAAAGATGTTAAAGACCGTAAATTGACAGATTACTCTGGTAATTGGCAATCAGTATATCCTCTTCTTCAAGATGGGACACTTGATCCAGTTTGGGATTACAAAGCTAAATCTAAAAAAGATATGACTGCTGCAGAGTACAAAAAATATTATACAGCAGGTTACAAGACTGACGTAGAATCAATCAAGATTGATGGTAAAAAACATCAAATGACCTTTGTACGTAATGGTAAATCACAAACATTTACATACAAATATGCAGGTTACAAAATCTTAACTTATAAAAAAGGTAATCGTGGAGTACGTTATCTCTTTGAAGCTAAAGAAAAAGATGCTGGTCAATTCAAATATATCCAATTTAGTGACCATGGTATTAAACCGAATAAAGCTGAACACTTCCATATCTTCTGGGGTTCAGAAAGCCAAGAAAAATTATTTGAGGAAATGGAAAACTGGCCAACATACTTCCCAGCTAAAATGTCTGGACGTGAAGTTGCCCAAGACCTTATGTCTCATTAA

SEQ ID NO: 1106 - protein, 233 aa, Streptococcus agalactiae
MKTAVLSPLEGLSKKEMAAGEDYFSVMRRNLKVLKKTTDVAGKEVAPEEDKTKTVETGYFKTKDVKDRKLTDYSGNWQSVYPLLQDGTLDPVWDYKAKSKKDMTAAEYKKYYTAGYKTDVESIKIDGKKHQMTFVRNGKSQTFTYKYAGYKILTYKKGNRGVRYLFEAKEKDAGQFKYIQFSDHGIKPNKAEHFHIFWGSESQEKLFEEMENWPTYFPAKMSGREVAQDLMSH

SEQ ID NO: 1107 - protein, 285 aa, Streptococcus agalactiae
ATGGCAGAAAGGAAATTTTTAAAGATGAAAAAAGACATCCATCCAGATTATCGTCCAGTTGTTTTCTTAGATACAACTACAGGTTACAAATTCCTTAGTGGTTCAACTAAATCAACTAAAGAAACAGTAGAATTCGAAGGTGAAACTTACCCACTTATTCGTGTGGAAATCTCATCAGATTCACATCCATTCTATACAGGACGTCAAAAATTCACTCAAGCAGATGGACGTGTGGACCGTTTCAACAAAAAATATGGTCTCAAAGACGCAAACGCTGCTCAATAA

SEQ ID NO: 1108 - protein, 94 aa, Streptococcus agalactiae
MAERKFLKMKKDIHPDYRPVVFLDTTTGYKFLSGSTKSTKETVEFEGETYPLIRVEISSDSHPFYTGRQKFTQADGRVDRFNKKYGLKDANAAQ

SEQ ID NO: 1109 - protein, 150 aa, Streptococcus agalactiae
GTGCGCCTACGTAGTAAGTCACACATCATTAATGAAATAGCTAAACGTCATAATGGTGGCGGACATCCTTTAGCCAGCGGAGCTAATTCTTATAGTTTGGAAGAGAATCAAGCTATTTACCAAGAAATCCAGGAAATACTTTCTTTATAA

SEQ ID NO: 1110 - protein, 49 aa, Streptococcus agalactiae
MRLRSKSHIINEIAKRHNGGGHPLASGANSYSLEENQAIYQEIQEILSL

SEQ ID NO: 1111 - DNA, 591 bp, Streptococcus agalactiae
atgagaccagaccctgatgctcttggtagccaaatcggcttaagggatatcatcaggcataattttccaaagaaaaaagtacttgctactggttttgacgaacccactctcgcttggattgctaaaatggatcaagtgaccgaccaagactatcaaggcgctcttgttgttgttacagatacagcaaataccccacgcattgatgatgaacgttataaaaaaggtgactttttaattaaaattgaccatcatccaaacgatgaagtctatggagatctctcttatgtagatactaacgcctctagtgcaagtgaaattgtgacagactttgctctttcttgtgatttgttgttatcaacaagtgcagcaagagttctatataatggtattgtaggagatacaggacgctttttatatcctgctaccacaagtaaaacactgaagattgctagcaaacttcgtgaatttgactttgatttttctgcaatggcacgtcaaatggattcctttcctttcaaaattgcaaaattacaaggctttatttttgagcaacttaaaattgacaagaacggcgctgcatgcgttacttwa

SEQ ID NO: 1112 - protein, 197 aa, Streptococcus agalactiae
  VARIANT 197: Xaa = Any Amino Acid
MRPDPDALGSQIGLRDIIRHNFPKKKVLATGFDEPTLAWIAKMDQVTDQDYQGALVVVTDTANTPRIDDERYKKGDFLIKIDHHPNDEVYGDLSYVDTNASSASEIVTDFALSCDLLLSTSAARVLYNGIVGDTGRFLYPATTSKTLKIASKLREFDFDFSAMARQMDSFPFKIAKLQGFIFEQLKIDKNGAACVTX

SEQ ID NO: 1113 - DNA, 1023 bp, Streptococcus agalactiae
atgacacaagcagtattaaaagaattggctaaggcggagttgcattgtcatctagatggctcactttctttaccagctattagaaaattggctaatatggctgatataatactgccgagtagtgataaagaattaagaaaatatgttatagctccagctcaaacagaaagcttggtagattaccttaaaacgtttgagtttatcagaccgcttcttcaaacgaaggaagcattacgttttgctgcttatgatgttgctagacaggcagctttagaaaatgttatttatattgagattcgttttgcgccagaactctctatggataaaggtttaactgcaagtgatacagtccttgcagtcttagaaggtttagcagacgctcagaaagaatttaatatcgttgcacgcgcccttgtttgcggtatgcgccaatcgtctcataaaacgaccaaggacattattaaacacattgttgatttggctcccaaaggcctggtaggttttgattttgcaggtgatgaattttcctatccaacagatagtttagtagatcttattcaggaagtaaaacgctcaggttacccgatgactttacatgcaggtgagtgtggttgtgctaagcatattgcggatagtttaaatttagggattaagcgtatgggacatgtgacagctttaacaggacagagggatttaataaagcgatttgtcgaagaagatgctgtagcagagatgtgtttaactagcaatttacaaacaaaagcagcctcaagtattcaaagttttccttatcaagaactttatgatgctggaggtaagattacaattaatacagataatcgtactgtttccgatacaaatttgacgaaagaatatagtcttttcgtaacttattttggaacgaaaatagaagactttcttgttttcaatcaaaacgctgtgaaggcctcctttacaagtgattcagagaaagatactttactacataagctacaagaaaactatgacagctatctaaaataa

SEQ ID NO: 1114 - protein, 340 aa, Streptococcus agalactiae
MTQAVLKELAKAELHCHLDGSLSLPAIRKLANMADIILPSSDKELRKYVIAPAQTESLVDYLKTFEFIRPLLQTKEALRFAAYDVARQAALENVIYIEIRFAPELSMDKGLTASDTVLAVLEGLADAQKEFNIVARALVCGMRQSSHKTTKDIIKHIVDLAPKGLVGFDFAGDEFSYPTDSLVDLIQEVKRSGYPMTLHAGECGCAKHIADSLNLGIKRMGHVTALTGQRDLIKRFVEEDAVAEMCLTSNLQTKAASSIQSFPYQELYDAGGKITINTDNRTVSDTNLTKEYSLFVTYFGTKIEDFLVFNQNAVKASFTSDSEKDTLLHKLQENYDSYLK

SEQ ID NO: 1115 - DNA, 444 bp, Streptococcus agalactiae
atggctttagcaaagattgtttatgctagcatgaccggaaatactgaagaaattgctgacattgttgctgataaattacgtgacttgggtctagatgttgaagtagaagagtgtacgatggttgatgctgcagattttgaagatgctgacattgcaattgttgccacttatacatatggtgatggagatttaccagatgaaatcgtggacttttatgaagatttagcagaggttgatttatctggtaaagtttacggcgtagtgggttcaggtgatactttctatgattacttctgcaaatctgttgatgagttcgaggctcaattcgcattaacaggagcacaaaaaggtgctgattgtgttaaagttgatttagcggcagaagacgaagacattgaaaacttagaagcttttgctgaagaaattgcttctaaacttaactaa

SEQ ID NO: 1116 - protein, 147 aa, Streptococcus agalactiae
MALAKIVYASMTGNTEEIADIVADKLRDLGLDVEVEECTMVDAADFEDADIAIVATYTYGDGDLPDEIVDFYEDLAEVDLSGKVYGVVGSGDTFYDYFCKSVDEFEAQFALTGAQKGADCVKVDLAAEDEDIENLEAFAEEIASKLN

SEQ ID NO: 1117 - DNA, 276 bp, Streptococcus agalactiae
atggaattagaagagattcgtcaagaaatagatgaaatagatcagcaattagtaagccttttagaaactagaatgggtctaattttagaggtcatagcatttaaaaagaaacatcgacttccagttttagataataatcgtgaaaacgaagtgcttaacaatgtattgaagaaagtccaaaaccatcaatttgacgatgtgatacgagcaactttcaaagacattatgacagaatctcgtgtttatcaaaaggagaatattgtagacggtgattaa

SEQ ID NO: 1118 - protein, 91 aa, Streptococcus agalactiae
MELEEIRQEIDEIDQQLVSLLETRMGLILEVIAFKKKHRLPVLDNNRENEVLNNVLKKVQNHQFDDVIRATFKDIMTESRVYQKENIVDGD

SEQ ID NO: 1119 - DNA, 1197 bp, Streptococcus agalactiae
gtgattaaacgatttgataattatgctcagtacgtacttgttttaggttttagcttactaattggtggtgtggttggggctattacagcagtctttggacgtgttctattattcctgacagcctttagaagtgattatatagcttacctactcccttttcttagcattgttggtttatttatagtttttgtctatcaaaaatttgggggtaagagtgttaaagggatgggattggtatttgaagtaggtcatggtaatgaggagactattccgaaacgtcttgttcctctcgtgatattaacaacttggttaacccacttatttggtggtagtgcaggtcgtgagggggttgctgtacagattggggctaccgtttcacactactttcaaaaatattgccgtttacaaaacgcttctcaacttttcctagtaatgggaatggcagcaggttttgctggtttatttcagactcctttagctgctactttttttgcgattgaagttttggtagtaggtcgtttaatggtttcgtatgtattaccaagtttaattgctgccctgacagcaaatttcgtctcacattctttaggtttagaaaaattttctcatagtatagcaacatcaatggcgttaacaccagatattattctaaaattattggttttaggactatgttttggtctgtgtggtaatttatttgcttatttattggctaaagctaaattaattgcttctagtaggttgctaaacccatataaacggattttcacacttggattgttagctacttttttattgtttatcttccattttggacgatattcaggactgggaacaaatctaattgaggctagcttcactaataagaacctttatgattatgattggttgttaaaattgtgtttgacagttattactttggctgcaggttatcagggaggagaagtaactcccttatttgcaatcggagcaagtttaggagtgattattgcgcccattttaggtttgccagttattttagttgctgctttaggctatactagcgtttttgggagtgcaacgaatactctgttaggtcctatcttaataggaggcgaagtctttggctttgccaacactccttattttgttattgtatgtcttgttgcttactccatatcacatgctcatacgatttatggtgctcaatctagatag

SEQ ID NO: 1120 - protein, 398 aa, Streptococcus agalactiae
MIKRFDNYAQYVLVLGFSLLIGGVVGAITAVFGRVLLFLTAFRSDYIAYLLPFLSIVGLFIVFVYQKFGGKSVKGMGLVFEVGHGNEETIPKRLVPLVILTTWLTHLFGGSAGREGVAVQIGATVSHYFQKYCRLQNASQLFLVMGMAAGFAGLFQTPLAATFFAIEVLVVGRLMVSYVLPSLIAALTANFVSHSLGLEKFSHSIATSMALTPDIILKLLVLGLCFGLCGNLFAYLLAKAKLIASSRLLNPYKRIFTLGLLATFLLFIFHFGRYSGLGTNLIEASFTNKNLYDYDWLLKLCLTVITLAAGYQGGEVTPLFAIGASLGVIIAPILGLPVILVAALGYTSVFGSATNTLLGPILIGGEVFGFANTPYFVIVCLVAYSISHAHTIYGAQSR

SEQ ID NO: 1121 - protein, 348 aa, Streptococcus agalactiae
ATGAATCCATTAATTCAAAGTTTGACAGAAGGTCAACTTCGTTCTGATATCCCTGAGTTCCGTGCTGGTGATACTGTACGTGTTCACGCTAAAGTTGTCGAAGGTACTCGCGAACGTATTCAGATCTTTGAAGGTGTTGTTATCTCACGTAAAGGTCAAGGAATCTCAGAAATGTACACAGTACGTAAAATTTCTGGTGGTATCGGTGTAGAGCGTACATTCCCAATTCACACTCCTCGTGTTGATAAAATCGAAGTTGTTCGTTATGGTAAAGTACGTCGTGCTAAACTTTACTACTTACGCGCATTGCAAGGTAAAGCTGCACGTATTAAAGAAATCCGTCGTTAA

SEQ ID NO: 1122 - protein, 115 aa, Streptococcus agalactiae
MNPLIQSLTEGQLRSDIPEFRAGDTVRVHAKVVEGTRERIQIFEGVVISRKGQGISEMYTVRKISGGIGVERTFPIHTPRVDKIEVVRYGKVRRAKLYYLRALQGKAARIKEIRR

SEQ ID NO: 1123 - protein, 582 aa, Streptococcus agalactiae
TTGATAAAAATTTGTAAAGAAAAATCACAACATCAATCGTATGCAGCGTTATACCTCATCGCTAAAACTGGCATGCGCTTCGCTGAATGTTTAGGTTTAACAGTTAATGATATTGATTACACTAACAAATATTTATCAATTAATAAAACTTGGGATTATCATTTCAACCAAAGATACCTGCCAACAAAAAACAAAAGTAGTATCAGAAATATACCAATTGACAATGATACATTATTTTTTTTGCATGAATTTACAAAAAATAAAAACGACAGATTATTCGACAAACTTTCAAATAATGCAGTCAATAAAACTATCCGAAAAATAACTGGTCGCGAGGTACGAGTGCACTCTCTCAGGCATACATTTGCAAGCTATCTAATTTCCATCTCTCAAGTTTTAGATCACGAGAATTTAAATATCACTTTAGAAGTTTACGCACATCAATTACAAGAACAAAAAGATAGGAACGATAAACTTAATCAGAGAAATTTGGGGCGGATTTGGGGCAAAATAGCTCTAAACCGCTATTTACATGCAATGAATATGTCCCCTGCCGGAATCGAACCAGCAATTACTCCTTAG

SEQ ID NO: 1124 - protein, 193 aa, Streptococcus agalactiae
MIKICKEKSQHQSYAALYLIAKTGMRFAECLGLTVNDIDYTNKYLSINKTWDYHFNQRYLPTKNKSSIRNIPIDNDTLFFLHEFTKNKNDRLFDKLSNNAVNKTIRKITGREVRVHSLRHTFASYLISISQVLDHENLNITLEVYAHQLQEQKDRNDKLNQRNLGRIWGKIALNRYLHAMNMSPAGIEPAITP

SEQ ID NO: 1125 - protein, 405 aa, Streptococcus agalactiae
TTGATATACTCCACATTAGCTAAAGAACAGGGTGTTCAAGGCTACCTTGATGGAAAAGGCTCTCTTAGAGATATTTGTAAATGGTATGATATCTCAAGTCGCTCTGTTCTCCAAAAGTGGATAAAACGGTATACTAGTGGTGAAGACTTGAAAGCCACTAGTAGAGGATATAGCCGTATGAAACAAGGAAGGCAAGCCACATTTGAAGAACGTGTAGAGATTGTTAACTACACCATTGCCCATGGGAAAGACTATCAAGCAGCTATTGAGAAGTTTGGTGTTTCCTACCAACAAATTTATTCTTGGGTGCGTAAGCTTGAGAAGAATGGCTCACAAGGTTTGGTTGATAGACGTGTGRAAGGGTTGGAGAGTAGGCCTGATTTAACCGAGATTGAGCAACTTTAA

SEQ ID NO: 1126 - protein, 134 aa, Streptococcus agalactiae
  VARIANT 120: Xaa = Any Amino Acid
MIYSTLAKEQGVQGYLDGKGSLRDICKWYDISSRSVLQKWIKRYTSGEDLKATSRGYSRMKQGRQATFEERVEIVNYTIAHGKDYQAAIEKFGVSYQQIYSWVRKLEKNGSQGLVDRRVXGLESRPDLTEIEQL

SEQ ID NO: 1127 - protein, 201 aa, Streptococcus agalactiae
GTGCCTATTCAGGCCTTATGCCAACTCTTGAAGGGGTCTCGTTCAGGCTATTACAAGTGGCTCAATCGTCAAAAAACAGATTTTGAGACAAAAAATACAAAGCTAATGGCTAAAATCAAGGAACTTCATAGACTCTACAATGGTATCTTAGGTTATCGCCGTATGACAACATTTATTAATCGTCAACTTGGGACAACTTAA

SEQ ID NO: 1128 - protein, 66 aa, Streptococcus agalactiae
MPIQALCQLLKGSRSGYYKWLNRQKTDFETKNTKLMAKIKELHRLYNGILGYRRMTTFINRQLGTT

SEQ ID NO: 1129 - protein, 261 aa, Streptococcus agalactiae
TTGATGAACATTCTGGGGATTAGTTCAGTCATTCGTCGTGTTAGCCATGCTTGTACAAAAGCTGGTGACAGATTTTACGAAGAAAATATTCTTAATCGTGAATTTACAGCCACAGCTCATAACCAGAAATGGTGCACAGATGTCACCTATCTTCAATACGGTCTGGGAGCTAAAGCTTATCTCAGTGCGATTAAAGACCTGTATAACGGTTCTATTATCGCTTATGAGATTAGTCACAACAATGAAATCCACTTGTTATGA

SEQ ID NO: 1130 - protein, 86 aa, Streptococcus agalactiae
MMNILGISSVIRRVSHACTKAGDRFYEENILNREFTATAHNQKWCTDVTYLQYGLGAKAYLSAIKDLYNGSIIAYEISHNNEIHLL

SEQ ID NO: 1131 - DNA, 162 bp, Streptococcus agalactiae
ttgggcggcattggagcgcataaattttacgcaggaaaaataggccaggtttttttatatattatttttagtattacctttattcctggaattatcgaccttatcgaagctttgatggctctcggaaaacaaactgatgaatatggaaatatcatcgtttaa

SEQ ID NO: 1132 - protein, 53 aa, Streptococcus agalactiae
MGGIGAHKFYAGKIGQVFLYIIFSITFIPGIIDLIEALMALGKQTDEYGNIIV

SEQ ID NO: 1133 - DNA, 1278 bp, Streptococcus agalactiae
gtgataaaaaatgctatagcatatattaccagaaaaaaaaatagaacacttattatatttgctattttaacaattgttctttcttgcttgtattcatgtttaacaataatgaaatcaagtaatgaaatagaaaaggctttatatgaaagttctaattcttcaatatcaattacaaaaaaagatggtaaatattttaatattaatcaatttaagaatattgaaaaaataaaagaggttgaagaaaaaatatttcaatatgatggattagcaaaattgaaagatcttaaagtagttagtggtgagcaaagtataaatagagaagatttatctgacgaatttaaaaatgttgtttcactagaagctacaagtaatactaaaagaaatcttttatttagtagtggagtatttagttttaaagaaggaaaaaatatagaagaaaatgataagaattcaattcttgttcatgaagaatttgctaaacaaaacaaactaaaattgggtgatgaaattgatcttgaattactagatacggaaaaaagtggaaaaataaaaagtcataaatttaaaattataggaatcttttctggtaaaaaacaggaaacatatacaggattatcatctgattttagcgaaaatatggtttttgtagattattcaactagccaagaaatattaaataaatcagagaataatagaattgcaaataaaattttaatgtattctggtagtttagaatctacagagcttgccttaaacaaattgaaagactttaaaattgataagtcaaagtattctattaagaaagataataaagcattcgaagagtctttagagtcagtgagtggaataaaacatataattaaaataatgacttattcgattatgttaggtggaatagttgttctttcattaatcttgattctatggttaagagaaagaatttatgaaataggtatatttttatctattggaacaactaagatacaaattataaggcaatttatatttgagttaatattcatatcaataccaagtataatatcctccttatttttagggaatctactattaaaagtaattgtagaaggatttattaactcagagaactcaatgattttcggtggaagtttaataaataaaagcagttttatgttaaacataacaacacttgcagaaagttatttaatattaataagtattattgttttatcagttgtaatggcctcttcattaatattatttaagaaaccaaaagaaatattatcaaaaataagttag

SEQ ID NO: 1134 - protein, 425 aa, Streptococcus agalactiae
MIKNAIAYITRKKNRTLIIFAILTIVLSCLYSCLTIMKSSNEIEKALYESSNSSISITKKDGKYFNINQFKNIEKIKEVEEKIFQYDGLAKLKDLKVVSGEQSINREDLSDEFKNVVSLEATSNTKRNLLFSSGVFSFKEGKNIEENDKNSILVHEEFAKQNKLKLGDEIDLELLDTEKSGKIKSHKFKIIGIFSGKKQETYTGLSSDFSENMVFVDYSTSQEILNKSENNRIANKILMYSGSLESTELALNKLKDFKIDKSKYSIKKDNKAFEESLESVSGIKHIIKIMTYSIMLGGIVVLSLILILWLRERIYEIGIFLSIGTTKIQIIRQFIFELIFISIPSIISSLFLGNLLLKVIVEGFINSENSMIFGGSLINKSSFMLNITTLAESYLILISIIVLSVVMASSLILFKKPKEILSKIS

SEQ ID NO: 1135 - DNA, 192 bp, Streptococcus agalactiae
  misc_feature 169, 170, 171, 172, 173: n = A,T,C or G
atggatatattagaaataaagaatgtaaattacagttacgcaaattctaaagaaaaagttttgtcaggagtaaatcaaaaatttgaactttggaarttttatgcgatagtagggaagtcaggaaacaggaaatccacacttctttccttacttgcaggacttgataaannnnncattccattcattaattaa

SEQ ID NO: 1136 - protein, 63 aa, Streptococcus agalactiae
  VARIANT 57, 58: Xaa = Any Amino Acid
MDILEIKNVNYSYANSKEKVLSGVNQKFELWKFYAIVGKSGNRKSTLLSLLAGLDKXXIPFIN

SEQ ID NO: 1137 - DNA, 201 bp, Streptococcus agalactiae
atgtcacaagaaaaactaaaatcaaaattagatcaagcaaaaggtggtgctaaagaaggctttggcaaaataaccggtgataaagagttagaagcaaaaggatttgttgaaaaaacaattgctaaaggcaaagaactagcagatgatgctaaagatgctgttgaagaggcagtagatgctgtcaaagaaaaactgaaataa

SEQ ID NO: 1138 - protein, 66 aa, Streptococcus agalactiae
MSQEKLKSKLDQAKGGAKEGFGKITGDKELEAKGFVEKTIAKGKELADDAKDAVEEAVDAVKEKLK

SEQ ID NO: 1139 - DNA, 204 bp, Streptococcus agalactiae
ttgtattttactttattaacaaggatgattgaaatggataaagaattaacacctcaagaaaaagcaaataaaaagtgggcagaaaacaatagagaacatagaacctatctatcaaaacgatctactgctcgtagttttattaacaaaaatgctacaaaagaagacttattagaattaaaacaattaattgaaagcaaactctag

SEQ ID NO: 1140 - protein, 67 aa, Streptococcus agalactiae
MYFTLLTRMIEMDKELTPQEKANKKWAENNREHRTYLSKRSTARSFINKNATKEDLLELKQLIESKL

SEQ ID NO: 1141 - protein, 480 aa, Streptococcus agalactiae
ATGAATGNNNNNTTTAAGAATGAAGATATAGAAAAGAAAGGATATAGTAATCACAGAAAAAATAATATATCTTTGGTATTTCAAAATTATAATTTAATAGATTATTTATCGCCGATTGAAAATATTAGACTAGTAAATAAATCAGTAGATGAGAGTATCTTGTTCGAATTAGGTTTAGATAAAAAACAAATAAAAAGAAATGTTATGAAATTATCTGGTGGTCAGCAACAAAGGGTAGCTATTGCTAGGGCACTGGTATCAGATGCCCCAATAATACTAGCTGATGAGCCTACCGGTAACCTAGACAGTGTTACTGCTGGAGAAATAATTAATATATTAAAGGAATTAGCTCAAGATAGAAATAAATGTGTAATAGTTGTAACACATAGTAAGGAAGTAGCAGATTCTGCGGATATCATTTTAGAACTAAGTGGTAAAAAGTTGAAAAAAGTAAATAAAATGAATTTGGAGGTTGAATAA

SEQ ID NO: 1142 - protein, 159 aa, Streptococcus agalactiae
  VARIANT 3, 4: Xaa = Any Amino Acid
MNXXFKNEDIEKKGYSNHRKNNISLVFQNYNLIDYLSPIENIRLVNKSVDESILFELGLDKKQIKRNVMKLSGGQQQRVAIARALVSDAPIILADEPTGNLDSVTAGEIINILKELAQDRNKCVIVVTHSKEVADSADIILELSGKKLKKVNKMNLEVE

SEQ ID NO: 1143 - protein, 918 aa, Streptococcus agalactiae
ATGATAAAAAATGCATTTGCTTATGTAACTAGAAAAAGCTTAAAATCATTAATTATTATATTAGTTATTCTATCAATGGCAACTTTAAGCATCATTAGTTTATCTATTAAAGATGCCACAGATAGAGCTTCTAAGGAAACATTTGCTAATATAACAAACAGTTTTTCTATGGAAATAAATAGACAAGTAAATCCAGGAACACCTAGGGGTGGAGGAAATGTAAAAGGTGAAGATATTAAAAAGATATCTCAAACAAACAGTATAGACTCCTATGTAAAAAGAATAAACAGCGTCGCAGACCTAGTTGATCATGATATAATTGAAACTCAAGATACACTTGCAAATCAATCACCTGAAAGAGCAAAGAATTTTAAGAGAACAGTTATGTTAACAGGGGTTAATGACTCAGCAAAAGAAACAAAATTTGTATCAGAAGCATATAAGTTAGTAGAAGGAAAGCATTTAGAAAATAAAGATAAAAATAAAATTTTAATGCATAAAGATTTGGCAAAAAAAAACAATCTCAAAGTTGGAGATAAAATAAAAATAAAATCTAATTTGTTTGATGCTGACAATGAAAAAGTTGCAAATGAAACTGTAGAAGTAGAAATTAAAGGTTTATTTGATGGTCATAATAGCGGTGGGGTAAGTGCAGCACAAGAACTATACGAAAATACACTAATCACTGACGTTCATTCAGCTGCTAAAGTTTATGGTAATACAGAAGATACAGCCGTATACCAAGATGCAACATTCTTTGTAAAAGGTGATAAGAATCTTGATAGTGTAATAAAAGATCTTGGGAAACTAGATATAAATTGGAGAGAATATAATTTGATTAAAAGTTCATCAAATTATCATGCGCTGCAACAATCTATATCCGGTATCTATTCTNNNNNCATTCCATTCATTAATTAA

SEQ ID NO: 1144 - protein, 305 aa, Streptococcus agalactiae
  VARIANT 299, 300: Xaa = Any Amino Acid
MIKNAFAYVTRKSLKSLIIILVILSMATLSIISLSIKDATDRASKETFANITNSFSMEINRQVNPGTPRGGGNVKGEDIKKISQTNSIDSYVKRINSVADLVDHDIIETQDTLANQSPERAKNFKRTVMLTGVNDSAKETKFVSEAYKLVEGKHLENKDKNKILMHKDLAKKNNLKVGDKIKIKSNLFDADNEKVANETVEVEIKGLFDGHNSGGVSAAQELYENTLITDVHSAAKVYGNTEDTAVYQDATFFVKGDKNLDSVIKDLGKLDINWREYNLIKSSSNYHALQQSISGIYSXXIPFIN

SEQ ID NO: 1145 - protein, 654 aa, Streptococcus agalactiae
ATGAAAATATTAACTGTTGAAGATGATAAGTTGATAAGAGAGGGAATAAGTGAATACCTTTCAGAATTTGGATATACTGTTATTCAGGCTAAAGATGGAAGGGAAGCCTTGTCAAAATTTAATAGTGATATAAACTTGGTTATCTTAGACATTCAGATACCTTTTATAAATGGTTTAGAAGTGTTGAAAGAAATTAGAAAGAAAAGCAATTTACCAATTCTAATTTTGACTGCATTTAGTGATGAAGAATATAAAATTGATGCATTTACTAATTTAGTAGATGGATATGTAGAAAAACCATTTTCATTGCCTGTTTTAAAGGCTAGAATAGATTCTTTAATTAAGAAGAATTTTGGACATTTAGAGAAGTTTGAATATAAGAATCTTTCGGTAAATTTTAATAGTTATACAGCTAAAATAAATGATGAAAAAATAGATGTAAATGCAAAAGAACTCGAAATACTAAAATGTTTATTGGATAATGATGGACAAGTTTTAACAAGAATGCAAATTATTGATTATGTCTGGAAGGATAGCGAAGAGATCCCTTATGATCGAGTAGTAGATGTATATATAAAAGAACTTAGAAAAAAATTACAATTAGACTGTATAACTACTATAAGAAATGTAGGATATAAATTGGAGAGAAAATGA

SEQ ID NO: 1146 - protein, 217 aa, Streptococcus agalactiae
MKILTVEDDKLIREGISEYLSEFGYTVIQAKDGREALSKFNSDINLVILDIQIPFINGLEVLKEIRKKSNLPILILTAFSDEEYKIDAFTNLVDGYVEKPFSLPVLKARIDSLIKKNFGHLEKFEYKNLSVNFNSYTAKINDEKIDVNAKELEILKCLLDNDGQVLTRMQIIDYVWKDSEEIPYDRVVDVYIKELRKKLQLDCITTIRNVGYKLERK

SEQ ID NO: 1147 - protein, 459 aa, Streptococcus agalactiae
ATGAAGAAATTAAAAATATTCCCAAAAATGTTCATACAAATATTTTCTATTCTTGGAATACTAATTATATTAGTTCATTCATTATTCTTTTTTATCTTTCCTAAAACATATTTGGAGACGAGGAAAGTAAAAATCCACATTATGGCAGATGAAATTTCTAAAAATATGAATGGAAAAGAGTTAAAATATTTAGACCAAACTTTGGAGCTTTATTCTAAAAGTAGTGACATAAAGGTATTTATAAAAAAAAATAATAACAAAAATGAATTACAAATAAATGATAATATAAATGTTAATGTAAAAAGTGATAGTAATTCTTTAATAATTGAAGAAAGGGAAATTAAACTTCATGATGGCAAAAAAATACATCTTCAATTTGTTTCAACAGCTGATATGCAAAAAGACGCGAAAGACTTGAGCCTTAAGTTTTTACCANNNNNCATTCCATTCATTAATTAA

SEQ ID NO: 1148 - protein, 152 aa, Streptococcus agalactiae
  VARIANT 146, 147: Xaa = Any Amino Acid
MKKLKIFPKMFIQIFSILGILIILVHSLFFFIFPKTYLETRKVKIHIMADEISKNMNGKELKYLDQTLELYSKSSDIKVFIKKNNNKNELQINDNINVNVKSDSNSLIIEEREIKLHDGKKIHLQFVSTADMQKDAKDLSLKFLPXXIPFIN

SEQ ID NO: 1149 - protein, 219 aa, Streptococcus agalactiae
ATGNNNNNCGAGCGGTTATTTGTTATCTTTTTGTCTATCAGAACAGATATAGATGAGTTTAAAGAAGCGATTGATAAAGGCTATATTTCAGGGAACACAGTAGCGATAGTGCGTAAAAACGGAAAGATATTTGATTATGTGTTACTACACGAAGAAGTGAGAGAAGAAGAGGTTGTTACAGTTGAGAGAGTGCTTGATGTACTGAGGAAGTTATCATAA

SEQ ID NO: 1150 - protein, 72 aa, Streptococcus agalactiae
  VARIANT 2, 3: Xaa = Any Amino Acid
MXXERLFVIFLSIRTDIDEFKEAIDKGYISGNTVAIVRKNGKIFDYVLLHEEVREEEVVTVERVLDVLRKLS

SEQ ID NO: 1151 - DNA, 1206 bp, Streptococcus agalactiae
atgtcacaaaaatcaaactattttaaagggcaaattgattatgctgttgtgataccagtattttttttattaatgattggtttagcctcaatttatgttgcaacgatgaatgattatccttctaatatctatatcgcgatgtttcagcaggtgtcttggattattatggggtgtattattgcatttgtcgttatgcttttcagtactgaatttttatggaaagccacgccctatctgtatgctttaggactaaccctaatggttcttcccttaattttttatagtccacagctttttgcggcaacaggtgctaaaaattgggtgaccattggctcggtaactttgtttcaaccgtcagagtttatgaagatttcctatattttaatgttatctcgaataactgttagttttcatcagaaaaatcgcaaaacttttcaagatgattggaagttgctaggattgtttggtttggttacattgccagtgatgattcttctaatgttacaaaaagatttaggaacagcattagttttccttgccattttgtcaggtttaatccttttatcgggcatatcttggtggataatcttgccaattttatctactatcgttctttttatagctagctttttgatgatttttatctcaccaaacggcaaggaatggttttataatttggggatggatacatatcaaatcaaccgtttatctgcttggattgatccatttagttttgcagactcaattgcttatcaacaaacacagggtatggtatcaattggaagtggcggggtaacaggtaaaggttttaatattttagagctctcggttcctgttcgtgaaagtgacatgatttttactgtcattgctgagaattttggcttcattggttcggcgattgttttagggttatatctcattatcatttaccgtatgttaaggatcaccattgaatctaataatcaattttatacttttatatcaactggttttatcatgatgattgttttccatgtttttgaaaatattggtgcagcagttggtatattacctctaacaggaatcccacttccgtttatttcgcaaggtggaagttcattactaagtaatcttattggaattggattggtcttatccatgtcttatcaaaatacagttcgtcaggccaaggctaatggatcacatttgaagtatcgtagtatataa

SEQ ID NO: 1152 - protein, 401 aa, Streptococcus agalactiae
MSQKSNYFKGQIDYAVVIPVFFLLMIGLASIYVATMNDYPSNIYIAMFQQVSWIIMGCIIAFVVMLFSTEFLWKATPYLYALGLTLMVLPLIFYSPQLFAATGAKNWVTIGSVTLFQPSEFMKISYILMLSRITVSFHQKNRKTFQDDWKLLGLFGLVTLPVMILLMLQKDLGTALVFLAILSGLILLSGISWWIILPILSTIVLFIASFLMIFISPNGKEWFYNLGMDTYQINRLSAWIDPFSFADSIAYQQTQGMVSIGSGGVTGKGFNILELSVPVRESDMIFTVIAENFGFIGSAIVLGLYLIIIYRMLRITIESNNQFYTFISTGFIMMIVFHVFENIGAAVGILPLTGIPLPFISQGGSSLLSNLIGIGLVLSMSYQNTVRQAKANGSHLKYRSI

SEQ ID NO: 1153 - DNA, 561 bp, Streptococcus agalactiae
atgaattatcatgattatatttgggatttgggtggtacactacttgataattacgaaagttccacacgtgcttttgtagagactttgaaagaatttggatatcaagcagaccacgatagtgtgtatcaaaaattaaaagagtcaacagcagatgcaattgcatattttatccctgaagaagctgattttttaaaagagtataaggctaatgaagctaaggttttggaaacaccaattctattccaaggggcaaaagaacttttagcgaaaattcaaagacaaggtagtcgtaattttttggtgtctcatcgtgataatcaagttatagttattctggaaaaaacagaaattattgactattttacagaagtagtgactgctgataacggcttttcaaggaaacctagtcccgagagtatgctttatttgaaagaaaaataccaaattgataattgtttagtaataggcgatcgtgatatagataagcaagcaggagaatcggctggttttgataccttattagtcgatgggtcaaaatcattgatggagataatagagtaa

SEQ ID NO: 1154 - protein, 186 aa, Streptococcus agalactiae
MNYHDYIWDLGGTLLDNYESSTRAFVETLKEFGYQADHDSVYQKLKESTADAIAYFIPEEADFLKEYKANEAKVLETPILFQGAKELLAKIQRQGSRNFLVSHRDNQVIVILEKTEIIDYFTEVVTADNGFSRKPSPESMLYLKEKYQIDNCLVIGDRDIDKQAGESAGFDTLLVDGSKSLMEIIE

SEQ ID NO: 1155 - DNA, 93 bp, Streptococcus agalactiae
  misc_feature 66, 67, 68, 69, 70: n = A,T,C or G
atgacagaagaaacaaagaatatggaacaacgtgctcaagaatatgacgcaagtcagattcaagtnnnnncattccattcattaattaattaa

SEQ ID NO: 1156 - protein, 30 aa, Streptococcus agalactiae
  VARIANT 23, 24: Xaa = Any Amino Acid
MTEETKNMEQRAQEYDASQIQVXXFHSLIN

SEQ ID NO: 1157 - DNA, 1818 bp, Streptococcus agalactiae
  misc_feature 12, 13, 14, 15, 16: n = A,T,C or G
atgaatgaatgnnnnnaaattgttgataactcaattgatgaagccttagctggatttgcaggacatattaaagtttacattgaaccagataactctattacagttgttgatgatggtcgcggtattccggtagatatccaagaaaaaactggaagaccagctgtagagacagtttttacagttctccatgccggtggtaaatttggtggtggcggatacaaggtttctggtggcttacatggtgtagggtcatctgttgttaatgcattgtcaacacaattagatgtcaaggtttataaaaatggcaaggttcattatcaagaataccaacgcggtgttgttgttaatgatcttgaaattatcggtgatactgacttatcaggaacaacagttcactttacgcctgacccagaaattttcactgaaaccactgtatttgattttgataaattagccaaacgtattcaggaattagcttttttaaatcgtggactaagaatctccatttcagacaagcgagaaggtcaagaagttgaaaaagaatatcactatgaaggtggtataggttcatacgttgagtttatcaatgagaacaaagaagtgatttttgaaaatcctatttatactgacggtgaattagatggtatttcagttgaagtagcaatgcagtatactactggatatcaagagactgttatgagttttgcaaataacatccacactcatgaaggaggaacgcacgaacaaggatttcgtactgccttgacacgtgtgattaatgattacgctaaaaagaataagattctcaaagaaaatgaagataatttaactggagaagatgttcgtgaaggtttaacagcagttatatctgttaaacatccaaatccacaatttgaaggacaaactaaaacaaaacttggaaattctgaagttgttaaaattacaaatcgtctctttagcgaagctttcaatcgattcctattagaaaatccacaagtagctaagaagattgttgaaaaaggaattttggcatctaaagcccgtattgcagcaaaacgggcgcgtgaagtaacacgtaaaaagtcaggcttagagatttcaaacttacctgggaaactggctgattgctcatctaataatgctgagatgaatgaactttttatagtggagggagattctgcgggagggtctgcaaaatcaggacgtaatcgtgagtttcaagcaattttaccgattaggggtaagattctaaacgttgaaaaagctacaatggataaaattttagcaaacgaagaaatccgaagtctcttcacagctatgggaactggatttggtgcagattttgatgtatcaaaagtcagatatcaaaaattagtcattatgactgatgccgatgttgatggagctcacatcagaactttacttttaactctgatttatcgttttatgcgacctgttttggaagcaggatatgtttatatcgctcaaccaccaatctatggtgtcaaagtaggaagtgagattaaagcttatattcagccaggggtcaatcaagaagaggaattacgtcaagctctagatacctatagttcaggacgttcaaaacctactgtacaacgttacaaaggtctaggtgagatggatgaccatcaactttgggaaacaacaatggatcctgaaaaccgcttgatggcacgtgtctcagttgatgatgcagcagaagcagataagattttcgatatgctaatgggagatcgagtagaaccacgacgtgaattcattgaagctaatgctgtttatagtaacttagatatctag

SEQ ID NO: 1158 - protein, 605 aa, Streptococcus agalactiae
  VARIANT 4, 5, 6: Xaa = Any Amino Acid
MNEXXXIVDNSIDEALAGFAGHIKVYIEPDNSITVVDDGRGIPVDIQEKTGRPAVETVFTVLHAGGKFGGGGYKVSGGLHGVGSSVVNALSTQLDVKVYKNGKVHYQEYQRGVVVNDLEIIGDTDLSGTTVHFTPDPEIFTETTVFDFDKLAKRIQELAFLNRGLRISISDKREGQEVEKEYHYEGGIGSYVEFINENKEVIFENPIYTDGELDGISVEVAMQYTTGYQETVMSFANNIHTHEGGTHEQGFRTALTRVINDYAKKNKILKENEDNLTGEDVREGLTAVISVKHPNPQFEGQTKTKLGNSEVVKITNRLFSEAFNRFLLENPQVAKKIVEKGILASKARIAAKRAREVTRKKSGLEISNLPGKLADCSSNNAEMNELFIVEGDSAGGSAKSGRNREFQAILPIRGKILNVEKATMDKILANEEIRSLFTAMGTGFGADFDVSKVRYQKLVIMTDADVDGAHIRTLLLTLIYRFMRPVLEAGYVYIAQPPIYGVKVGSEIKAYIQPGVNQEEELRQALDTYSSGRSKPTVQRYKGLGEMDDHQLWETTMDPENRLMARVSVDDAAEADKIFDMLMGDRVEPRREFIEANAVYSNLDI

SEQ ID NO: 1159 - DNA, 1725 bp, Streptococcus agalactiae
atgtcgagcggaatcatattgctgcttgtggctatagtcctgcttgtgattattgcctacgtagtcggcgtcgtaataagaaaacgtaatgatacattaattgcaaacttagaaactagaaaacaagagttagttgaccttcctgtgcaagaggagattgagcaagtcaaattgcttcatttgattggccaaagtcaatcaacttttagagaatggaaccaaaaatggactgatttatcaactaattcatttaaagatattgattttcatttagttgaagctgaaaatcttaatgattcatttaattttgtgcgtgctaagcacgagattgataatgttgatagtcagctaactattatagaagaagatattgtttcgattcgtgaagctttagaagttttaaaagagcaagaagagaaaaatagtgcccgtgtaacacatgctttggacctatacgaaacacttcaaaaatcaatttctgaaaaagaagataattacgggacaaccatgccagaaattgaaaagcagttgaaaaatatcgaggctgaattttcacattttgtgaccttaaactcaactggtgacccgattgaagcttctgaagttttgaataaagcagaggagcatacgattgctttagggcaaattacagaacaaattccagctattgttgctaaattagaagacgattttccagatcagttagatgatttggagacaggatatcgtcgtcttttagaggaaaactaccatttccctgaaaaggatattgaacaacgttttcaagaagttcgtgaggctattcgttcgaattcagatggtttagttagtttggatctagatcgtgctcgcgatgaaaatgaacatattcaagaaaaaattgataaactttatgatatttttgaacgtgagattgctgcttataaagtagctcataaggatagtaaaattattcctcaattccttgctcatgcaaaatctaacaatgaacaactggggcatgaaatcaaacgattatctgctaaatatatcttaaatgaaaatgaaagcttaagtttacgttccttcacaaatgatttggaagaaattgaaacaaaggttttaccttctgtagaaaattttggtcaagaagcttcaccttatactcatctacaaattttatttgagcgtacgttgaaaacattgactactgttgaagaaaatcaaatggaagtttttgaagccgttaaaactattgaaagcgttgagacacgagcacgccaaaatatggataagtatgttaacaagctccatatgattaaacgtttcatggaaaaacgcaatcttccaggaatcccgcaagacttcttaagcactttctttacaacaagttctcaaattgaggcacttattaatgaactcagtcgcggtcgtattgatattgaggctgtttcacgtttaaatgatgtgactacaaatgctatcgctaatttagagcaagctacatatctagttgttcaagatgcgactctcacagagcagttactacagtattcaaaccgttatcgtagttttgaacaaaatgtgcaaaagagctttgaacaagctttgtacttatttgaagttgaacataactataaagcatctttcgatgaaatttcatacgcacttgagactgtggaaccaggtgtaactgaccgttttgtgacgtcttatgaaaagacacaagaacgtattcgtttctaa

SEQ ID NO: 1160 - protein, 574 aa, Streptococcus agalactiae
MSSGIILLLVAIVLLVIIAYVVGVVIRKRNDTLIANLETRKQELVDLPVQEEIEQVKLLHLIGQSQSTFREWNQKWTDLSTNSFKDIDFHLVEAENLNDSFNFVRAKHEIDNVDSQLTIIEEDIVSIREALEVLKEQEEKNSARVTHALDLYETLQKSISEKEDNYGTTMPEIEKQLKNIEAEFSHFVTLNSTGDPIEASEVLNKAEEHTIALGQITEQIPAIVAKLEDDFPDQLDDLETGYRRLLEENYHFPEKDIEQRFQEVREAIRSNSDGLVSLDLDRARDENEHIQEKIDKLYDIFEREIAAYKVAHKDSKIIPQFLAHAKSNNEQLGHEIKRLSAKYILNENESLSLRSFTNDLEEIETKVLPSVENFGQEASPYTHLQILFERTLKTLTTVEENQMEVFEAVKTIESVETRARQNMDKYVNKLHMIKRFMEKRNLPGIPQDFLSTFFTTSSQIEALINELSRGRIDIEAVSRLNDVTTNAIANLEQATYLVVQDATLTEQLLQYSNRYRSFEQNVQKSFEQALYLFEVEHNYKASFDEISYALETVEPGVTDRFVTSYEKTQERIRF

SEQ ID NO: 1161 - protein, 642 aa, Streptococcus agalactiae
ATGATTAAAGGTTTGTTAGTCATGGACGTTGATTCAACCTTAATAATGGAAGAAGCTATTGATTTATTAGCTATTGAAGCAGGGGTGGGGAAACAGGTTGCTGCACTGACTGACGCTGCAATGCGTGGCGAGTTAGATTTTGAAGAAGCTTTGAAGAAAAGAGTAGCGCTACTTAAAGGTTTGCCTGTTACTATTTTGACAGATATATTATCCTCAATACATTTTACTCCAGGGGCTTATGAATTGATTAAAGAGTGTCACAAGCGTCAGATGAAAGTTGGTCTTGTATCAGGAGGTTTTCACGAGACGATTGATATCTTAGCTAAGCAATTACAAGTTGATTATGTCAAAGCGAATCGTCTTGGTGTCAAAGGTGGTTTTCTCACTGGCGAAGTTGAGGGAGAGATTGTCACTAAAGAAGTGAAAAAAATAAAGTTAAAAGAGTGGGCTTCTGAAAATCACTTAGACCTTTCACAAACCATCGCAATGGGAGATGGTGCCAATGATTTACCAATGATCAAATCCGCTGGGGTAGGAATTGCTTTTTGTGCAAAACCAATTGTCAGAGAAGAAGCTGCGTATCAGATTAATGAAAAAAATTTGCTTAAGGTATTTGATATTATTGATGCAAATGAAAACTAG

SEQ ID NO: 1162 - protein, 213 aa, Streptococcus agalactiae
MIKGLLVMDVDSTLIMEEAIDLLAIEAGVGKQVAALTDAAMRGELDFEEALKKRVALLKGLPVTILTDILSSIHFTPGAYELIKECHKRQMKVGLVSGGFHETIDILAKQLQVDYVKANRLGVKGGFLTGEVEGEIVTKEVKKIKLKEWASENHLDLSQTIAMGDGANDLPMIKSAGVGIAFCAKPIVREEAAYQINEKNLLKVFDIIDANEN

SEQ ID NO: 1163 - protein, 486 aa, Streptococcus agalactiae
ATGGAAATTTGGGATGCTTATGACCAATATGGGTTCATTACAGGTCTTACACTTAATAGGGATCAAAATATCCCACAAGGCTTATTCCACTTAGTTGTTGATGTTATCCTTTTTCATGAGGATGGTGACGTATTGATGATGAAACGGCACCCTAAAAAGAAAGCTTTTCCTGCTTATTTCGAAGCCACCGCTGGCGGATCTGCCCTTAAAGGAGAAAATGCTAAGCAAGCTATTCTAAGGGAACTCAAAGAAGAAACTGGTATCGTTCCTCAATGTCTAACCTTTCTTAATAGAGAGTGGTTCTCTGAGCGTTCTTACTTTGTAGACCATTTTATCGCAAAATACAATGGTGCAAAAGATATAATTACATTGCAAGAAGGAGAGACCGTTGACTATATCTGGTTAAAACCAGAATATATTGATTTATTTTTATCTAAAAACAAATTAATACCCTCTCAAATAAAACTCTTAAAATCCTTAATCTAA

SEQ ID NO: 1164 - protein, 161 aa, Streptococcus agalactiae
MEIWDAYDQYGFITGLTLNRDQNIPQGLFHLVVDVILFHEDGDVLMMKRHPKKKAFPAYFEATAGGSALKGENAKQAILRELKEETGIVPQCLTFLNREWFSERSYFVDHFIAKYNGAKDIITLQEGETVDYIWLKPEYIDLFLSKNKLIPSQIKLLKSLI

SEQ ID NO: 1165 - protein, 456 aa, Streptococcus agalactiae
ATGACTGAACTTGACAATAAAATCCTACAAAAAGCAAGCGGTGAAAATCGTCTTGATCCTGATCAACAACGTTACTACCTTGGTACTTATAAAGAAAGAGTTGTGCTCCACTTAAGTTTAAAAGAGGCACAAGAAGAAAAGTTTCAACTTGCTATAACATCTGCTCTTAATAATCTGATACTTGAATATCCTAATCTTAGTTTAAAATTATCACCAAATCTCCCTACTGATGTTCAAATGTTCTACATGAAGTTAGCTAACCGTCTATCACTAGCTGCTACGATTGTTAATGAAGCAAATGCCAATTCTCCATTTGGTATTATTATACATAGTGATAAGGCTGAAAACGTTGAATGGAACGATTTTGAGACACAATTCCCTGATTTATTCAATTCACCAAAAAAAGAGGAGTCTCCTAAAAAAAGTCTATGGCAACATTTCTTTAGTCAAAAATAA

SEQ ID NO: 1166 - protein, 151 aa, Streptococcus agalactiae
MTELDNKILQKASGENRLDPDQQRYYLGTYKERVVLHLSLKEAQEEKFQLAITSALNNLILEYPNLSLKLSPNLPTDVQMFYMKLANRLSLAATIVNEANANSPFGIIIHSDKAENVEWNDFETQFPDLFNSPKKEESPKKSLWQHFFSQK

SEQ ID NO: 1167 - protein, 1308 aa, Streptococcus agalactiae
ATGTCAATTATTACTGATGTTTACGCACGCGAAGTCCTTGACTCACGCGGTAACCCAACACTTGAAGTAGAAGTTTATACAGAATCAGGTGCTTTCGGACGTGGTATGGTTCCTTCAGGAGCTTCTACTGGTGAACACGAAGCAGTTGAACTTCGCGACGGCGACAAGTCTCGTTACGGTGGTCTTGGAACACAAAAAGCTGTTGACAATGTAAATAACGTTATTGCAGAAGCAATCATTGGTTATGATGTACGCGACCAACAAGCTATCGACCGTGCTATGATCGCTCTTGACGGAACTCCTAATAAAGGTAAATTAGGTGCAAATGCTATTCTTGGTGTTTCTATTGCCGTAGCACGTGCTGCAGCTGATTACCTTGAAGTACCACTTTACAGCTACCTTGGTGGATTCAACACTAAAGTTCTTCCAACTCCAATGATGAACATCATCAACGGTGGTTCTCACTCAGACGCTCCAATCGCATTCCAAGAATTCATGATTATGCCAGTTGGTGCACCAACTTTCAAAGAAGCACTTCGTTGGGGTGCTGAAGTATTCCATGCTCTTAAGAAAATCCTTAAAGAACGTGGTCTTGAAACAGCTGTTGGTGATGAAGGTGGATTTGCACCTAAATTTGAAGGTACTGAAGATGGCGTAGAAACTATTCTTAAAGCTATTGAAGCAGCTGGTTACGAAGCTGGCGAAAACGGAATCATGATTGGTTTTGACTGTGCTTCATCAGAGTTCTACGATGCAGAACGTAAAGTATACGACTACAGTAAATTCGAAGGTGAAGGTGGAGCAGTTCGTACTGCTGCAGAACAAATCGATTACCTTGAAGAGTTGGTTAACAAATACCCAATCATCACTATTGAAGATGGTATGGATGAAAACGACTGGGATGGTTGGAAAGCTCTTACAGAACGCCTTGGTGGACGTGTACAATTAGTTGGTGACGATTTCTTCGTTACAAATACTGATTACTTAGCACGTGGTATCAAAGAAGAAGCTGCTAACTCAATCCTTATCAAAGTTAACCAAATCGGTACTTTGACAGAAACTTTCGAAGCTATTGAAATGGCTAAAGAAGCTGGTTACACTGCAGTTGTATCACACCGTTCAGGTGAAACTGAAGATTCAACAATCGCTGATATCGCAGTTGCAACTAACGCTGGTCAAATTAAAACAGGTTCATTATCACGTACTGACCGTATTGCTAAATACAACCAATTACTTCGTATCGAAGACCAACTTGGTGAAGTTGCTCAATACAAAGGTATCAAATCATTCTACAACTTAAAAAAATAG

SEQ ID NO: 1168 - protein, 435 aa, Streptococcus agalactiae
MSIITDVYAREVLDSRGNPTLEVEVYTESGAFGRGMVPSGASTGEHEAVELRDGDKSRYGGLGTQKAVDNVNNVIAEAIIGYDVRDQQAIDRAMIALDGTPNKGKLGANAILGVSIAVARAAADYLEVPLYSYLGGFNTKVLPTPMMNIINGGSHSDAPIAFQEFMIMPVGAPTFKEALRWGAEVFHALKKILKERGLETAVGDEGGFAPKFEGTEDGVETILKAIEAAGYEAGENGIMIGFDCASSEFYDAERKVYDYSKFEGEGGAVRTAAEQIDYLEELVNKYPIITIEDGMDENDWDGWKALTERLGGRVQLVGDDFFVTNTDYLARGIKEEAANSILIKVNQIGTLTETFEAIEMAKEAGYTAVVSHRSGETEDSTIADIAVATNAGQIKTGSLSRTDRIAKYNQLLRIEDQLGEVAQYKGIKSFYNLKK

SEQ ID NO: 1169 - protein, 1065 aa, Streptococcus agalactiae
ATGAAAAGAAAACAGTTTATAAAATTAGGAATTGCAACCTTACTAACGGTTATTTCGCTTTACACACCAATAAACCTAGCTACAAATCATACCACAGAAAATATTGTTACTGCTCAAGAGTATAAAACAAAAGAGAATGGTACTTTACCTTTTAAACACAAACGACAATTGGTTTTAGGAGAGTTGGATGACAAAGGTCGTGCCACATTCGCACATATTCAGCTAAAAGTTAAAGATGAACCCAAGAAAAAGAGAGTAAAACGTTTAAAAACAACCCCTGTTGGATGGCACAATTTTAAATTCTATTATAATGATGGTACTCAAAAAGCTTGGCTAATGAGCCGAGGCCGTCTTATTTGCCACCAATTTAGTGGACTAAACAATGAAAGAAAGAATTTAGTTCCAATGACGAATTGGCTAAATACTGGAAACTACAATAGCACGAATTCATCTAACCCTGAGAGCATGCTATTCTATGAAAAACAACTAAAGACTTGGCTTTCGACTCATAAAAACTACTACTTAGATTATAAAGTAACACCAATTTATCAAAATAATGAACTAATTCCAAGAAAAATTGAATTAAAATATGTTGGTATTGATAAGACTGGGAAATTATTACCTATTTTTATCGGAAACAAATCCACTCAAGATCAATTCGGCATCAGCACTGTTACCTTAGAGAATACCTCACCAAATGCTACCATTGACTACCTCAGCGGAAAGGCTCAAAATACTGTCTTATCAGCTAAAGAACAAAGAAAACTTATCGCTAAGCACGAAGAAGAAAAACGACTTGCAGAAAAGAAAGTTGAAGAGGAAAAAGCTGCTGCTGAAACTCAGAAAAAACTGGAAGAAGAACAAGCAAGGCTTGCTGCTGAAGCTCAAAGGAAGCAAAAAGAGGAGCAAGCAAGGCTCGCAGCTGAAACTCAGAAAAAACAAGAAACTCTAGTACAAGAACAAACTAGTCAAGGCTACAAACGTGACTATAGAGGAAGGTGGCATCGTCCAAATGGACAATACGCTTCAAAAGCAGAAATCGCTGCTGCTGGATTGCAATGGTAG

SEQ ID NO: 1170 - protein, 354 aa, Streptococcus agalactiae
MKRKQFIKLGIATLLTVISLYTPINLATNHTTENIVTAQEYKTKENGTLPFKHKRQLVLGELDDKGRATFAHIQLKVKDEPKKKRVKRLKTTPVGWHNFKFYYNDGTQKAWLMSRGRLICHQFSGLNNERKNLVPMTNWLNTGNYNSTNSSNPESMLFYEKQLKTWLSTHKNYYLDYKVTPIYQNNELIPRKIELKYVGIDKTGKLLPIFIGNKSTQDQFGISTVTLENTSPNATIDYLSGKAQNTVLSAKEQRKLIAKHEEEKRLAEKKVEEEKAAAETQKKLEEEQARLAAEAQRKQKEEQARLAAETQKKQETLVQEQTSQGYKRDYRGRWHRPNGQYASKAEIAAAGLQW

SEQ ID NO: 1171 - DNA, 1284 bp, Streptococcus agalactiae
atgaaattactgactaatgcaaatactctcaagggaaccatccgtgttcctggcgataaatcaataagtcacagggctattatttttgggagtatatctcagggagttacccgaattgttgatgtcttaagaggcgaggatgttttatcaactatagaggcttttaaacaaatgggggttctaattgaagacgatggcgagataatcactatctatggcaaaggatttgcaggtttaacacaaccgaataatctcttagacatgggaaactctggtacttcaatgcgtctgatagcaggtgtgttagctggtcaagagtttgaagtgacgatggttggagacaatagtttgtcaaagagacctatggatcgtatagcattgcctttaagcaaaatgggagctagaatttcgggagtaactaaccgtgatttaccaccattaaaacttcaaggtacaaaaaaattaaaacctattttttaccatttacccgtagcttctgcacaagtaaaatcagctttaatttttgcggctttacaaactaagggagaatctctcattgtagaaaaagagcaaacaaggaatcatactgaggacatgattcggcaatttggtggacatttggatattaaagataaagaaattcgactcaatggcggtcagagcttagtaggacaagatataagagttcctggtgatatttcgagtgctgccttttggatagtagcgggtcttattattcctaacagtcatattattttagaaaacgtaggtataaacgagacacgaactggaatccttgatgtcgtcagtaaaatgggtggaaaaattaagttatcttcggttgataatcaagtaaaatcagcaacccttacagttgattactctcatctacaagctactcatatttctggggctatgattccacgtctgattgatgaattacctattattgctcttttagcaacacaagctcaaggcaccacagtcatagcagatgctcaggaattaaaggtgaaagagacagatcggattcaggtcgttgtcgaatcgctaaaacagatgggtgctgatattactgctacagcagatggtatgattatacgtggtaatacccctcttcacgctgcttcacttgattgtcatggagatcatagaataggaatgatgatagctattgctgctctcttggtcaaagaaggcgaagtagatttatctggtgaagaagctattaatacaagctatcctaactttttagaacatttggagggattagttaatgcctaa

SEQ ID NO: 1172 - protein, 427 aa, Streptococcus agalactiae
MKLLTNANTLKGTIRVPGDKSISHRAIIFGSISQGVTRIVDVLRGEDVLSTIEAFKQMGVLIEDDGEIITIYGKGFAGLTQPNNLLDMGNSGTSMRLIAGVLAGQEFEVTMVGDNSLSKRPMDRIALPLSKMGARISGVTNRDLPPLKLQGTKKLKPIFYHLPVASAQVKSALIFAALQTKGESLIVEKEQTRNHTEDMIRQFGGHLDIKDKEIRLNGGQSLVGQDIRVPGDISSAAFWIVAGLIIPNSHIILENVGINETRTGILDVVSKMGGKIKLSSVDNQVKSATLTVDYSHLQATHISGAMIPRLIDELPIIALLATQAQGTTVIADAQELKVKETDRIQVVVESLKQMGADITATADGMIIRGNTPLHAASLDCHGDHRIGMMIAIAALLVKEGEVDLSGEEAINTSYPNFLEHLEGLVNA

SEQ ID NO: 1173 - DNA, 390 bp, Streptococcus agalactiae
atgcctaaggtattattgggattcatgggagttggcaagactagtgttgccaactgcttagaaaatgaagtaattgatatggatagtctgattgaaaaacatattggtatgtcaatttcccgattttttacagaagaaggagaagcctcctttcgtgctttagaatctcaatttttaaacgaacttttaaagaaaaaaaatgaaggacttgtgatagctagtggaggaggtattgtactccttgaagaaaatcgtcgtcttttaactttaaatcgtcataataatattcttttaacaggaagttttgaagtcttatatcatcgtataaaaaaagatgagaagaatagaagaccatttatttttaaaccattcaaaagaagaattttatga

SEQ ID NO: 1174 - protein, 129 aa, Streptococcus agalactiae
MPKVLLGFMGVGKTSVANCLENEVIDMDSLIEKHIGMSISRFFTEEGEASFRALESQFLNELLKKKNEGLVIASGGGIVLLEENRRLLTLNRHNNILLTGSFEVLYHRIKKDEKNRRPFIFKPFKRRIL

SEQ ID NO: 1175 - DNA, 1374 bp, Streptococcus agalactiae
atgtcaagaaataattacggtcagctaaatcatcatgaagagctacgatataactatcttttaaaaaacatccattatcttaatgaacgtgaaaagatggaatttcagtaccttcattataaaaaaacagcagtacgaccacagagaaggacagaaagtccaccaactaattcttattatgaggaaccttattctgattcttattatcaagatgacgatttttactcagagcctcagctaacctcacaaggtttaccaatttatcaagaagagagagctccgaagaagaaaaaacaaagggccagaaaagaaaaacagagggtgaaggttatggcgcctttccctccaaaggctataaccccccctagaaagaaaaaaaaatttaagggtttcctaaagttcataggtattatattactaattgttttatcaggtatggttttcatgtttgttaaaggaatgcgtgatgtgaataatgggaagtcacattatagccctgcaattattgaagattttaagggaaaagatgctgttgatgggactaatatcttaattttaggtagtgataaacgtgtcagcgagagatctactgatgcgagaacagataccataatggttgctaatgttggtaacaaggataataaggttaagatggtgagttttatgcgagatctcttagtcaatattcctaattatagtacggaaggttactatgatatgaaattaaatgcgtcttttaatttgggagaacaagataatcataaaggagcagagtatgttcgacaaacgttgaaaaatcattttgatattgatataaaatattatgttatggttgactttgagacatttgcagatgctattgatacactgtttcctaatggtgtcaagattaatgctaaatttggacttgtcggtggacaatctgctgattcagttaaagttcctgatgatttaaggatgaaaaatggcgttgtacctagccaaaaaattaaggttgggattcagtacatggatggaaggacccttctaaattatgctcgtttcagaaaagacgatgatggggactttggtcgaacacaacgtcaacaacaagttatgagagctattgtctctcaaataaaagacccacgtcgtctctttacaggttctgctgctatcggtaaagcctatgctttaacttcaagtaatttatcttatagctttgtcctaacagatggcattccaattttatcagatgctaaaaatggtattaagcaaatgacaattccaagagaaggagattgggtagatgattatgaccagtatggtggtcaagggttaacaattgattttgctaagtacaaaaagatcctaaagaaaatgggactgcgttaa

SEQ ID NO: 1176 - protein, 457 aa, Streptococcus agalactiae
MSRNNYGQLNHHEELRYNYLLKNIHYLNEREKMEFQYLHYKKTAVRPQRRTESPPTNSYYEEPYSDSYYQDDDFYSEPQLTSQGLPIYQEERAPKKKKQRARKEKQRVKVMAPFPPKAITPPRKKKKFKGFLKFIGIILLIVLSGMVFMFVKGMRDVNNGKSHYSPAIIEDFKGKDAVDGTNILILGSDKRVSERSTDARTDTIMVANVGNKDNKVKMVSFMRDLLVNIPNYSTEGYYDMKLNASFNLGEQDNHKGAEYVRQTLKNHFDIDIKYYVMVDFETFADAIDTLFPNGVKINAKFGLVGGQSADSVKVPDDLRMKNGVVPSQKIKVGIQYMDGRTLLNYARFRKDDDGDFGRTQRQQQVMRAIVSQIKDPRRLFTGSAAIGKAYALTSSNLSYSFVLTDGIPILSDAKNGIKQMTIPREGDWVDDYDQYGGQGLTIDFAKYKKILKKMGLR

SEQ ID NO: 1177 - DNA, 1356 bp, Streptococcus agalactiae
atgttacataaaaatgatattattgaaactgaaattagcgacattagccatgagggaatgggtattgccaaagtagatggctttgttttctttgttgaaaatgctcttccaggtgagattattaagatgcgcgtcttgaaattacgtaagcgtataggatatggaaaagttgaggaatatttaacgacttctcctcaccgaaatgaaggattagactatacctatttacgtacagggattgctgatttgggacatcttacttatgaacaacagctgttatttaaacaaaaacaagtagctgataacctttataaaattgctcatatatctgatgttttagtagaacctactcttggtatgacaatccctttggcatatcgaaataaagctcaggtaccagttcgtcgtgttgatggacagctagagacaggttttttcagaaaaaattcacatactctggtatccattgaagattatttaattcaggaaaaagagattgatgctctgattaattttacacgagatttattaagaaaatttgatgttaaaccatatgacgaagagcagcaatctggtttaattagaaatctcgttgttcgtcgaggacattatacagggcaattaatgttggttttggtgacaacacgtcctaaaatattccgcattgaccaaatgattgaaaagttggtgtctgcctttccttctgttgtttcaattatgcaaaatattaatgatcgtaatagcaacgttatttttgggaaagaatttcgtactctatatggttctgatactattgaggaccaaatgttaggaaatacttacgctatatcagcccaatctttttaccaagttaatactgaaatggctgaaaaactgtaccaaaaagcaatcgatttttcagatttaaactcagaggatatcgttattgatgcctattcaggtataggaacaattggcttatctgttgctaaacaagtaaaacatgtttatggtgttgaagttgttgaaaaagcagtaagtgatgccaaagaaaatgctactcgaaatgggataactaacagtacctatgttgctgattcggctgaaaatgcaatggcaaagtggcttaaagaaggtataaaaccaactgttataatggttgatccaccacgaaaaggattaacggagagttttgtatattctgctgcccaaacaaaagcagataaaatcacttatatttcttgtaattcagcgacaatggcgcgtgatatcaaactatttgaagaattagggtatcatttagtaaaaattcaaccagtagacttattcccaatgacacatcatgtggagtgtgtggctctgctcgtaaaagcctag

SEQ ID NO: 1178 - protein, 451 aa, Streptococcus agalactiae
MLHKNDIIETEISDISHEGMGIAKVDGFVFFVENALPGEIIKMRVLKLRKRIGYGKVEEYLTTSPHRNEGLDYTYLRTGIADLGHLTYEQQLLFKQKQVADNLYKIAHISDVLVEPTLGMTIPLAYRNKAQVPVRRVDGQLETGFFRKNSHTLVSIEDYLIQEKEIDALINFTRDLLRKFDVKPYDEEQQSGLIRNLVVRRGHYTGQLMLVLVTTRPKIFRIDQMIEKLVSAFPSVVSIMQNINDRNSNVIFGKEFRTLYGSDTIEDQMLGNTYAISAQSFYQVNTEMAEKLYQKAIDFSDLNSEDIVIDAYSGIGTIGLSVAKQVKHVYGVEVVEKAVSDAKENATRNGITNSTYVADSAENAMAKWLKEGIKPTVIMVDPPRKGLTESFVYSAAQTKADKITYISCNSATMARDIKLFEELGYHLVKIQPVDLFPMTHHVECVALLVKA

SEQ ID NO: 1179 - DNA, 213 bp, Streptococcus agalactiae
atgcagctgttagatgagttagttcttccaaaagacattaccatagcagatgtcagtcaaagtatccaagaatttgaaatagaaagagatgcccttcaagaattttttgacgatatgctgaagacttatacaacctaccaagaaatgaaagattatattaaatctcgtgaagcgaacactcctaagcaagagacagaagaaaaatcactttga

SEQ ID NO: 1180 - protein, 70 aa, Streptococcus agalactiae
MQLLDELVLPKDITIADVSQSIQEFEIERDALQEFFDDMLKTYTTYQEMKDYIKSREANTPKQETEEKSL

SEQ ID NO: 1181 - protein, 737 aa, Streptococcus agalactiae
ATGAAGAAAGTGTTAGTGAGTAGTCTTTTGGTTTTAGGGATTACGATAACGTTACAAACAGTAGTTGAGGCTAAGGGGCCAAAAGTAGCTTATACACAAGAGGGAATGACTGCTCTTTCGGACACAAATAAAGATAAAGTCACTACTATTTCTATTGACGAGATTCAAAAAAGCTTAGAAGGTAAGAAGCCGATTACTGTTAGTTTTGATATTGATGATACACTGCTTTTCAGTAGTCAATATTTTCAATATGGTAAAGAATATGTAACTCCTGGATCGTTTGATTTTCTTCATAAACAAAAATTCTGGGATCTTGTTGCAAAACGAGGAGATCAAGATTCCATTCCCAAAGAATATGCTAAAAAATTAATTGCTATGCATCAAAAACGAGGAGATAAAATTGTTTTTATAACAGGTAGGACAAGAGGGTCAATGTATAAGGAGGGCGAGGTTGATAAAACAGCTAAAGCCTTAGCTAAAGATTTAAATTAGACAAACCAATTGCTGTAAATTATACAGGCGATAAACCTAAAAAGCCATACAAATATGATAAATCATATTATATTAAGAAATATGGTTCAGACATTCATTATGGAGATAGTGATGACGATATTCATGCAGCTAGGGAGGCCGGTGCTAGACCAATTAGAATTTTAAGAGCACCTAATTCTACAAATCTACCTTTACCAGAAGCTGGAGGCTACGGTGAAGAGGTTCTCGAAAATTCAGCTTACTAG

SEQ ID NO: 1182 - protein, 245 aa, Streptococcus agalactiae
MKKVLVSSLLVLGITITLQTVVEAKGPKVAYTQEGMTALSDTNKDKVTTISIDEIQKSLEGKKPITVSFDIDDTLLFSSQYFQYGKEYVTPGSFDFLHKQKFWDLVAKRGDQDSIPKEYAKKLIAMHQKRGDKIVFITGRTRGSMYKEGEVDKTAKALAKDFKLDKPIAVNYTGDKPKKPYKYDKSYYIKKYGSDIHYGDSDDDIHAAREAGARPIRILRAPNSTNLPLPEAGGYGEEVLENSAY

SEQ ID NO: 1183 - protein, 519 aa, Streptococcus agalactiae
TTGAGAGTTTATGAAAATAAAGAAGAGTTGAAAAAAGAAATAAGTAAAACATTTGAGAAATACATTATGGAATTTAATAATATTCCAGAGAATCTAAAAGATAAAAGAATTGATGAAGTTGATAGAACTCCAGCAGCCAACCTTTCTTATCAGGTTGGCTGGACCAACTTGGTTCTTAAATGGGAAGAAGATGAAAGAAAGGGACTTCAAGTAAAAACACCATCGGATAAATTTAAATGGAATCAACTTGGTGAATTATATCAGTGGTTCACAGATACCTACGCTCATTTATCTCTGCAAGAGTTGAAAGCAAAATTAAATGAAAATATTAATTCTATCTATGCAATGATTGATTTGTTGAGTGAGGAAGAATTATTTGAAGCGCATATGAGAAAGTGGGCTGATGAAGCGACTAAAACAGCGACTTGGGAAGTGTATAAGTTTATTCATGTAAATACGGTTGCACCTTTTGGAACTTTCAGAACTAAAATCAGAAAATGGAAGAAGATAGTATTATAA

SEQ ID NO: 1184 - protein, 172 aa, Streptococcus agalactiae
MRVYENKEELKKEISKTFEKYIMEFNNIPENLKDKRIDEVDRTPAANLSYQVGWTNLVLKWEEDERKGLQVKTPSDKFKWNQLGELYQWFTDTYAHLSLQELKAKLNENINSIYAMIDLLSEEELFEAHMRKWADEATKTATWEVYKFIHVNTVAPFGTFRTKIRKWKKIVL

SEQ ID NO: 1185 - protein, 237 aa, Streptococcus agalactiae
TTGTTTTTTCCGAATATTGACAACATAATTAAAAACTATATCAAAGAGATGATTACACATTCCGATATACCAGACTTACAAAAACAACTGGAAACAGCATATCAAGTTCCATATTCTTTCGCTCTTGGTATTTATATCTCAACAATTGAAAGTATTATTTTAAATTGGATAGATCATGACTTTACTGAAGAGCCTGAAGAAATAGCAAGATATATTACATCTGTCGTGAGAATTTAA

SEQ ID NO: 1186 - protein, 78 aa, Streptococcus agalactiae
MFFPNIDNIIKNYIKEMITHSDIPDLQKQLETAYQVPYSFALGIYISTIESIILNWIDHDFTEEPEEIARYITSVVRI

SEQ ID NO: 1187 - protein, 330 aa, Streptococcus agalactiae
ATGCTTAGGAAGTATAAGCAAAGAAATTATAATGTCGCACATACGAAACAGCGTTTTTCGATTAAGAAATTCAAATTTGGTGTAGCATCGGTATTAATTGGATTGACATTTCTAGGAATGAGTAGTCATTCTGTTTTGGCGGATGAGTCAAGCATTATGAGTACTGAGGTACCACAAACAGCTGGTGTAAAACCGGAAGTTACTGTTACACAGCCTACTTCAGATGTAACAAGTCTTGCGACAGATACGTCAACTTCAGCAGTGTTATCAACAGATGCATCTCATTCTAATCCTACAGAATCAGCGGAGCATGCTGTAGGATTAGAATGA

SEQ ID NO: 1188 - protein, 109 aa, Streptococcus agalactiae
MLRKYKQRNYNVAHTKQRFSIKKFKFGVASVLIGLTFLGMSSHSVLADESSIMSTEVPQTAGVKPEVTVTQPTSDVTSLATDTSTSAVLSTDASHSNPTESAEHAVGLE

SEQ ID NO: 1189 - protein, 822 aa, Streptococcus agalactiae
TTGTGTCGTGTTTTACGTGTCAATCGCTCCACTTACTATAAATTTCTAAAACATAAGCCCTCAAAAAGAGAATTGGATAATCAAATTTATAAAAAACAAATACTTGAGATTTATACCAAAGCAAACAAAAGACTTGGTGTGAAGTCTATCAAAGTCATTCTTCAAAGAGACTACGACACAAAAATCTCTGAAGGAAGAATTTACCATCTGATGAAGAATATGGCGCTCCCTAAAATGGCTACCGTTAAGCCAAAAACAGCTCTTAAAAAGACTCAAAAAACGTATCCTCAAAACTTACTCAACCAGAAATTTTATCCTGACAAACCTAATCAAGTATGGTCTACTGACTTCACCTATATTTCTATTGGATATAAGAAATATGTCTATCTCTGCGCAATACTTGATCTCTATTCTAGAAAATGTATTGCTTGGAAATTGAGTCACCGTATGGATGCAAAGTTAGCATGTAACACTCTAGAATTAGCTCTTAATAAAAGAAAGATTGAAGGAACACTTCTCTTTCATTCCGACCAAGGGTCACAATTTAAGGCCAGGGAATTTAGAAAAATAATTGATGACAACAATATCATGCATTCTTTTTCTAAACCTGGATATCCTTATGATAATGCCGTAACTGAAGCATTTTTCAAGTATTTAAAGCATAGACAAATCAACCGAAAACATTATCAAAATATCAAACAGGTTCAATTAGACTGCTTTGAATACATTGAGAATTTTTATAACAATTACATCCCACATACGGCTAATCTAGGACTAACCCCTAATCAGAAAGAAGAAAATTATTTTAACGCAATAAAATAA

SEQ ID NO: 1190 - protein, 273 aa, Streptococcus agalactiae
MCRVLRVNRSTYYKFLKHKPSKRELDNQIYKKQILEIYTKANKRLGVKSIKVILQRDYDTKISEGRIYHLMKNMALPKMATVKPKTALKKTQKTYPQNLLNQKFYPDKPNQVWSTDFTYISIGYKKYVYLCAILDLYSRKCIAWKLSHRMDAKLACNTLELALNKRKIEGTLLFHSDQGSQFKAREFRKIIDDNNIMHSFSKPGYPYDNAVTEAFFKYLKHRQINRKHYQNIKQVQLDCFEYIENFYNNYIPHTANLGLTPNQKEENYFNAIK

SEQ ID NO: 1191 - DNA, 276 bp, Streptococcus agalactiae
atgtcaacatttaaacgctatgatgaagaattcaaacaatctcttgttaacctttatcaaactggaaaaactcagtctgaactctgtaaagactatagggtatccacttctgcgcttgcaaaatggatcaaacagtactctcaattcaaactcgaagataattctgtacttactgccaagcaaatacaagagttacaaaaacgtaatgcgcagcttgaagaggagaaccttatcctaaaaaaagcaagtgccatattcatgcaaaacttaaagtaa

SEQ ID NO: 1192 - protein, 91 aa, Streptococcus agalactiae
MSTFKRYDEEFKQSLVNLYQTGKTQSELCKDYRVSTSALAKWIKQYSQFKLEDNSVLTAKQIQELQKRNAQLEEENLILKKASAIFMQNLK

SEQ ID NO: 1193 - DNA, 270 bp, Streptococcus agalactiae
  misc_feature 248, 249, 250, 251, 252: n = A,T,C or G
gtgttacaatctgttttaaaagacacaaaaacgaaaggacaacctatgtcaacatttaaacgctatgatgaagaattcaaacaatctcttgttaacctttatcaaactggaaaaactcagtctgaactctgtaaagactatagggtatccacttctgcgcttgcaaaatggatcaaacagtactctcaattcaaactcgaagataattctgtacttactgccaagcaaatacaagagttacaaaaacnnnnncattcattcattaattaa

SEQ ID NO: 1194 - protein, 89 aa, Streptococcus agalactiae
  VARIANT 83, 84: Xaa = Any Amino Acid
MLQSVLKDTKTKGQPMSTFKRYDEEFKQSLVNLYQTGKTQSELCKDYRVSTSALAKWIKQYSQFKLEDNSVLTAKQIQELQKXXHSFIN

SEQ ID NO: 1195 - DNA, 150 bp, Streptococcus agalactiae
gtgcaggaagttttgattatcgcaagagagaatcatcaagtgactcatgaacacgtgtcaatcttattgacctgcgttcaagaattgattgtggaagtcaatcaaacacagccactcagtcgtgagtttcgtgaaaagtatatgggttag

SEQ ID NO: 1196 - protein, 49 aa, Streptococcus agalactiae
MQEVLIIARENHQVTHEHVSILLTCVQELIVEVNQTQPLSREFREKYMG

SEQ ID NO: 1197 - DNA, 348 bp, Streptococcus agalactiae
atggataaaattattaaatcaatttctgcctctggtgccttcaggtcttatgtcctcgatagcaccgagactgttaaattggctcaggaaaaacatcataccttgtcgtcttcaacagttgctcttggtcgcaccctgattgctaatcaaatattagcggctaatcaaaaaggcgatagcaagattacggttaaagtcatcggtgattcttcctttggtcatattatctctgttgcagataccaaagggcatgttaaggggtacatccaaaatactggtgttgacatcaaaaaacggtcacaggtgaagttttggttggcccttttatggggaatggtcattttgtga

SEQ ID NO: 1198 - protein, 115 aa, Streptococcus agalactiae
MDKIIKSISASGAFRSYVLDSTETVKLAQEKHHTLSSSTVALGRTLIANQILAANQKGDSKITVKVIGDSSFGHIISVADTKGHVKGYIQNTGVDIKKRSQVKFWLALLWGMVIL

SEQ ID NO: 1199 - DNA, 1209 bp, Streptococcus agalactiae
atggttacattcgattttaaacatgttcaaacattgcataccatatctcaactacctatttcagtcatgtcacgagacaaggaactcgttcagttatatggtaacgaagactatctgttgccttactatcagtttttaaaacatttagctatcccttataaccaagatatcactgtttatgagggtctttttgaagaatcattcttaatttttcctgtctgtcaatatcttattgctattggaccattttatccctatagccctgatatcaataggcaagaacagttatccagtcgctttctagaacaattttctcatcgtagtaaaaaagaaatcttatcctatataaagcttgtcccttgttttcctactaccagtatacgtagtcttcttgtgtctatcgatgcctttttccaaacacagtttgaggctagttgccaacaagtcatcaatcatttattagaagagtcagaacagattgttgcggatcctgatattgttcttcacctaaaacatactaagaaaaactcttttcagttacccactgttttaaaccatctcaatcacattattgatctcgttaagctgggtaacactcaactgttaaagcaagaaattaatcgcctcccatcatccagtgttacctcatcttcaatccctgccctaagagctgaaaagaacttaactgttgtttacttaacaaaattactagaattaagtttcgaggaaaatactgatgtggctaaaagttatgcgctggtaaagcactatatggctttaaacgaagaggctcctgatcttattgatgtttcaagaattcgctgtgcagctcttattgatttttcagaatccttaaccaataagagcatctctgacaagcagcaaatgtacaatagtattctccattatgtggacaaccacctctactccaaactcaaagtatctgatattgccaactacctatatatctcagattcccacttacgctcagtttttaaaaaatactctgacatttccttgcaaagttatattctaaaggcaaaaattaaggagggacaattactactgcaaagaggggtaccgattggggaagtagcgaaattattacatttttacgacaccacacattttcttaaaacctttaaaaaatacgtgggaatatcttcaaacgaatatcttactaaatatcgtgagacctcatgccagtaa

SEQ ID NO: 1200 - protein, 402 aa, Streptococcus agalactiae
MVTFDFKHVQTLHTISQLPISVMSRDKELVQLYGNEDYLLPYYQFLKHLAIPYNQDITVYEGLFEESFLIFPVCQYLIAIGPFYPYSPDINRQEQLSSRFLEQFSHRSKKEILSYIKLVPCFPTTSIRSLLVSIDAFFQTQFEASCQQVINHLLEESEQIVADPDIVLHLKHTKKNSFQLPTVLNHLNHIIDLVKLGNTQLLKQEINRLPSSSVTSSSIPALRAEKNLTVVYLTKLLELSFEENTDVAKSYALVKHYMALNEEAPDLIDVSRIRCAALIDFSESLTNKSISDKQQMYNSILHYVDNHLYSKLKVSDIANYLYISDSHLRSVFKKYSDISLQSYILKAKIKEGQLLLQRGVPIGEVAKLLHFYDTTHFLKTFKKYVGISSNEYLTKYRETSCQ

SEQ ID NO: 1201 - protein, 99 aa, Streptococcus agalactiae
TTGTTTTCATCATTTTATTTTGTAGTCTTTACAAACCTAAAGAAAAATTCTAGAAATGATAATGAAGGCGGTCTATCAAATGGTTACATTCGATTTTAA

SEQ ID NO: 1202 - protein, 32 aa, Streptococcus agalactiae
MFSSFYFVVFTNLKKNSRNDNEGGLSNGYIRF

SEQ ID NO: 1203 - protein, 642 aa, Streptococcus agalactiae
ATGAAATTATCGAAGAAGTTATTGTTTTCGGCTGCTGTTTTAACAATGGTGGCGGGGTCAACTGTTGAACCAGTAGCTCAGTTTGCGACTGGAATGAGTATTGTAAGAGCTGCAGAAGTGTCACAAGAACGCCCAGCGAAAACAACAGTAAATATCTATAAATTACAAGCTGATAGTTATAAATCGGAAATTACTTCTAATGGTGGTATCGAGAATAAAGACGGCGAAGTAATATCTAACTATGCTAAACTTGGTGACAATGTAAAAGGTTTGCAAGGTGTACAGTTTAAACGTTATAAAGTCAAGACGGATATTTCTGTTGATGAATTGAAAAAATTGACAACAGTTGAAGCAGCAGATGCAAAAGTTGGAACGATTCTTGAAGAAGGTGTCAGTCTACCTCAAAAAACTAATGCTCAAGGTTTGGTCGTCGATGCTCTGGATTCAAAAAGTAATGTGAGATACTTGTATGTAGAAGATTTAAAGAATTCACCTTCAAACATTACCAAAGCTTATGCTGTACCGTTTGTGTTGGAATTACCAGTTGCTAACTCTACAGGTACAGGTTTCCTTTCTGAAATTAATATTTACCCTAAAAACGTTGTAACTGATGAACCAAAAACAGATAAAGATGTTAAATAA

SEQ ID NO: 1204 - protein, 213 aa, Streptococcus agalactiae
MKLSKKLLFSAAVLTMVAGSTVEPVAQFATGMSIVRAAEVSQERPAKTTVNIYKLQADSYKSEITSNGGIENKDGEVISNYAKLGDNVKGLQGVQFKRYKVKTDISVDELKKLTTVEAADAKVGTILEEGVSLPQKTNAQGLVVDALDSKSNVRYLYVEDLKNSPSNITKAYAVPFVLELPVANSTGTGFLSEINIYPKNVVTDEPKTDKDVK

SEQ ID NO: 1205 - protein, 972 aa, Streptococcus agalactiae
TTGAAATCTACAATCCCTGCCAATTTAGGTGACTATGAAAAATTTGAAATTACTGATAAATTTGCAGATGGCTTGACTTATAAATCTGTTGGAAAAATCAAGATTGGTTCGAAAACACTGAATAGAGATGAGCACTACACTATTGATGAACCAACAGTTGATAACCAAAATACATTAAAAATTACGTTTAAACCAGAGAAATTTAAAGAAATTGCTGAGCTACTTAAAGGAATGACCCTTGTTAAAAATCAAGATGCTCTTGATAAAGCTACTGCAAATACAGATGATGCGGCATTTTTGGAAATTCCAGTTGCATCAACTATTAATGAAAAAGCAGTTTTAGGAAAAGCAATTGAAAATACTTTTGAACTTCAATATGACCATACTCCTGATAAAGCTGACAATCCAAAACCATCTAATCCTCCAAGAAAACCAGAAGTTCATACTGGTGGGAAACGATTTGTAAAGAAAGACTCAACAGAAACACAAACACTAGGTGGTGCTGAGTTTGATTTGTTGGCTTCTGATGGGACAGCAGTAAAATGGACAGATGCTCTTATTAAAGCGAATACTAATAAAAACTATATTGCTGGAGAAGCTGTTACTGGGCAACCAATCAAATTGAAATCACATACAGACGGTACGTTTGAGATTAAAGGTTTGGCTTATGCAGTTGATGCGAATGCAGAGGGTACAGCAGTAACTTACAAATTAAAAGAAACAAAAGCACCAGAAGGTTATGTAATCCCTGATAAAGAAATCGAGTTTACAGTATCACAAACATCTTATAATACAAAACCAACTGACATCACGGTTGATAGTGCTGATGCAACACCTGATACAATTAAAAACAACAAACGTCCTTCAATCCCTAATACTGGTGGTATTGGTACGGCTATCTTTGTCGCTATCGGTGCTGCGGTGATGGCTTTTGCTGTTAAGGGGATGAAGCGTCGTACAAAAGATAACTAA

SEQ ID NO: 1206 - protein, 323 aa, Streptococcus agalactiae
MKSTIPANLGDYEKFEITDKFADGLTYKSVGKIKIGSKTLNRDEHYTIDEPTVDNQNTLKITFKPEKFKEIAELLKGMTLVKNQDALDKATANTDDAAFLEIPVASTINEKAVLGKAIENTFELQYDHTPDKADNPKPSNPPRKPEVHTGGKRFVKKDSTETQTLGGAEFDLLASDGTAVKWTDALIKANTNKNYIAGEAVTGQPIKLKSHTDGTFEIKGLAYAVDANAEGTAVTYKLKETKAPEGYVIPDKEIEFTVSQTSYNTKPTDITVDSADATPDTIKNNKRPSIPNTGGIGTAIFVAIGAAVMAFAVKGMKRRTKDN

SEQ ID NO: 1207 - protein, 924 aa, Streptococcus agalactiae
ATGAAACAAACATTAAAACTTATGTTTTCTTTTCTGTTGATGTTAGGGACTATGTTTGGAATTAGCCAAACTGTTTTAGCGCAAGAAACTCATCAGTTGACGATTGTTCATCTTGAAGCAAGGGATATTGATCGTCCAAATCCACAGTTGGAGATTGCCCCTAAAGAAGGGACTCCAATTGAAGGAGTACTCTATCAGTTGTACCAATTAAAATCAACTGAAGATGGCGATTTGTTGGCACATTGGAATTCCCTAACTATCACAGAATTGAAAAAACAGGCGCAGCAGGTTTTTGAAGCCACTACTAATCAACAAGGAAAGGCTACATTTAACCAACTACCAGATGGAATTTATTATGGTCTGGCGGTTAAAGCCGGTGAAAAAAATCGTAATGTCTCAGCTTTCTTGGTTGACTTGTCTGAGGATAAAGTGATTTATCCTAAAATCATCTGGTCCACAGGTGAGTTGGACTTGCTTAAAGTTGGTGTGGATGGTGATACCAAAAAACCACTAGCAGGCGTTGTCTTTGAACTTTATGAAAAGAATGGTAGGACTCCTATTCGTGTGAAAAATGGGGTGCATTCTCAAGATATTGACGCTGCAAAACATTTAGAAACAGATTCATCAGGGCATATCAGAATTTCCGGGCTCATCCATGGGGACTATGTCTTAAAAGAAATCGAGACACAGTCAGGATATCAGATCGGACAGGCAGAGACTGCTGTGACTATTGAAAAATCAAAAACAGTAACAGTAACGATTGAAAATAAAAAAGTTCCGACACCTAAAGTGCCATCTCGAGGAGGTCTTATTCCCAAAACAGGTGAGCAACAGGCAATGGCACTTGTAATTATTGGTGGTATTTTAATTGCTTTAGCCTTACGATTACTATCAAAACATCGGAAACATCAAAATAAGGATTAG

SEQ ID NO: 1208 - protein, 307 aa, Streptococcus agalactiae
MKQTLKLMFSFLLMLGTMFGISQTVLAQETHQLTIVHLEARDIDRPNPQLEIAPKEGTPIEGVLYQLYQLKSTEDGDLLAHWNSLTITELKKQAQQVFEATTNQQGKATFNQLPDGIYYGLAVKAGEKNRNVSAFLVDLSEDKVIYPKIIWSTGELDLLKVGVDGDTKKPLAGVVFELYEKNGRTPIRVKNGVHSQDIDAAKHLETDSSGHIRISGLIHGDYVLKEIETQSGYQIGQAETAVTIEKSKTVTVTIENKKVPTPKVPSRGGLIPKTGEQQAMALVIIGGILIALALRLLSKHRKHQNKD

SEQ ID NO: 1209 - protein, 636 aa, Streptococcus agalactiae
ATGGGACAAAAATCAAAAATATCTCTAGCTACGAATATTCGTATATGGATTTTTCGTTTAATTTTCTTAGCGGGTTTCCTTGTTTTGGCATTTCCCATCGTTAGTCAGGTCATGTACTTTCAAGCCTCTCACGCCAATATTAATGCTTTTAAAGAAGCTGTTACCAAGATTGACCGGGTGGAGATTAATCGGCGTTTAGAACTTGCTTATGCTTATAACGCCAGTATAGCAGGTGCCAAAACTAATGGCGAATATCCAGCGCTTAAAGACCCCTACTCTGCTGAACAAAAGCAGGCAGGGGTCGTTGAGTACGCCCGCATGCTTGAAGTCAAAGAACAAATAGGTCATGTGATTATTCCAAGAATTAATCAGGATATCCCTATTTACGCTGGCTCTGCTGAAGAAAATCTTCAGAGGGGCGTTGGACATTTAGAGGGGACCAGTCTTCCAGTCGGTGGTGAGTCAACTCATGCCGTTCTAACTGCCCATCGAGGGCTACCAACGGCCAAGCTATTTACCAATTTAGACAAGGTAACAGTAGGTGACCGTTTTTACATTGAACACATCGGCGGAAAGATTGCTTATCAGGTAGACCAAATCAAAGTTATCGCCCCTGNNNNNCATTCCATTCATTAA

SEQ ID NO: 1210 - protein, 211 aa, Streptococcus agalactiae
  VARIANT 206, 207: Xaa = Any Amino Acid
MGQKSKISLATNIRIWIFRLIFLAGFLVLAFPIVSQVMYFQASHANINAFKEAVTKIDRVEINRRLELAYAYNASIAGAKTNGEYPALKDPYSAEQKQAGVVEYARMLEVKEQIGHVIIPRINQDIPIYAGSAEENLQRGVGHLEGTSLPVGGESTHAVLTAHRGLPTAKLFTNLDKVTVGDRFYIEHIGGKIAYQVDQIKVIAPXXHSIH

SEQ ID NO: 1211 - protein, 108 aa, Streptococcus agalactiae
ATGNNNNNTGAGCAACAGGCAATGGCACTTGTAATTATTGGTGGTATTTTAATTGCTTTAGCCTTACGATTACTATCAAAACATCGGAAACATCAAAATAAGGATTAG

SEQ ID NO: 1212 - protein, 35 aa, Streptococcus agalactiae
  VARIANT 2, 3: Xaa = Any Amino Acid
MXXEQQAMALVIIGGILIALALRLLSKHRKHQNKD

SEQ ID NO: 1213 - protein, 918 aa, Streptococcus agalactiae
ATGGGACAAAAATCAAAAATATCTCTAGCTACGAATATTCGTATATGGATTTTTCGTTTAATTTTCTTAGCGGGTTTCCTTGTTTTGGCATTTCCCATCGTTAGTCAGGTCATGTACTTTCAAGCCTCTCACGCCAATATTAATGCTTTTAAAGAAGCTGTTACCAAGATTGACCGGGTGGAGATTAATCGGCGTTTAGAACTTGCTTATGCTTATAACGCCAGTATAGCAGGTGCCAAAACTAATGGCGAATATCCAGCGCTTAAAGACCCCTACTCTGCTGAACAAAAGCAGGCAGGGGTCGTTGAGTACGCCCGCATGCTTGAAGTCAAAGAACAAATAGGTCATGTGATTATTCCAAGAATTAATCAGGATATCCCTATTTACGCTGGCTCTGCTGAAGAAAATCTTCAGAGGGGCGTTGGACATTTAGAGGGGACCAGTCTTCCAGTCGGTGGTGAGTCAACTCATGCCGTTCTAACTGCCCATCGAGGGCTACCAACGGCCAAGCTATTTACCAATTTAGACAAGGTAACAGTAGGTGACCGTTTTTACATTGAACACATCGGCGGAAAGATTGCTTATCAGGTAGACCAAATCAAAGTTATCGCCCCTGATCAGTTAGAGGATTTGTACGTGATTCAAGGAGAAGATCACGTCACCCTATTAACTTGCACACCTTATATGATAAATAGTCATCGCCTCCTCGTTCGAGGCAAGCGAATTCCTTATGTGGAAAAAACAGTGCAGAAAGATTCAAAGACCTTCAGGCAACAACAATACCTAACCTATGCTATGTGGGTAGTCGTTGGACTTATCTTGCTGTCGCTTCTCATTTGGTTTAAAAAGACGAAACAGAAAAAGCGGAGAAAGAATGAAAAAGCGGCTAGTCAAAATAGTCACAATAATTCGAAATAA

SEQ ID NO: 1214 - protein, 305 aa, Streptococcus agalactiae
MGQKSKISLATNIRIWIFRLIFLAGFLVLAFPIVSQVMYFQASHANINAFKEAVTKIDRVEINRRLELAYAYNASIAGAKTNGEYPALKDPYSAEQKQAGVVEYARMLEVKEQIGHVIIPRINQDIPIYAGSAEENLQRGVGHLEGTSLPVGGESTHAVLTAHRGLPTAKLFTNLDKVTVGDRFYIEHIGGKIAYQVDQIKVIAPDQLEDLYVIQGEDHVTLLTCTPYMINSHRLLVRGKRIPYVEKTVQKDSKTFRQQQYLTYAMWVVVGLILLSLLIWFKKTKQKKRRKNEKAASQNSHNNSK

SEQ ID NO: 1215 - protein, 852 aa, Streptococcus agalactiae
ATGAAAAAGCGGCTAGTCAAAATAGTCACAATAATTCGAAATAATAAAATCAGAACCCTCATTTTTGTGATGGGAAGTCTGATTCTCTTATTTCCGATTGTGAGCCAGGTAAGTTACTACCTTGCTTCGCATCAAAATATTAATCAATTTAAGCGGGAAGTCGCTAAGATTGATACTAATACGGTTGAACGACGCATCGCTTTAGCTAATGCTTACAATGAGACGTTATCAAGGAATCCCTTGCTTATAGACCCTTTTACCAGTAAGCAAAAAGAAGGTTTGAGAGAGTATGCTCGTATGCTTGAAGTTCATGAGCAAATAGGTCATGTGGCAATCCCAAGTATTGGGGTTGATATTCCAATTTATGCTGGAACATCCGAAACTGTGCTTCAGAAAGGTAGTGGGCATTTGGAGGGAACCAGTCTTCCAGTGGGAGGTTTGTCAACCCATTCAGTACTAACTGCCCACCGTGGCTTGCCAACAGCTAGGCTATTTACCGACTTAAATAAAGTTAAAAAAGGCCAGATTTTCTATGTGACGAACATCAAGGAAACACTTGCCTACAAAGTCGTGTCTATCAAAGTTGTGGATCCAACAGCTTTAAGTGAGGTTAAGATTGTCAATGGTAAGGATTATATAACCTTGCTGACTTGCACACCTTACATGATCAATAGTCATCGTCTCTTGGTAAAAGGAGAGCGTATTCCTTATGATTCTACCGAGGCGGAAAAGCACAAAGAACAAACCGTACAAGATTATCGTTTGTCACTAGTGTTGAAGATACTACTAGTATTATTAATTGGACTCTTCATCGTGATAATGATGAGAAGATGGATGCAACATCGTCAATAA

SEQ ID NO: 1216 - protein, 283 aa, Streptococcus agalactiae
MKKRLVKIVTIIRNNKIRTLIFVMGSLILLFPIVSQVSYYLASHQNINQFKREVAKIDTNTVERRIALANAYNETLSRNPLLIDPFTSKQKEGLREYARMLEVHEQIGHVAIPSIGVDIPIYAGTSETVLQKGSGHLEGTSLPVGGLSTHSVLTAHRGLPTARLFTDLNKVKKGQIFYVTNIKETLAYKVVSIKVVDPTALSEVKIVNGKDYITLLTCTPYMINSHRLLVKGERIPYDSTEAEKHKEQTVQDYRLSLVLKILLVLLIGLFIVIMMRRWMQHRQ

SEQ ID NO: 1217 - protein, 1094 aa, Streptococcus agalactiae
ATGAAAAAGAGACAAAAAATATGGAGAGGGTTATCAGTTACTTTACTAATCCTGTCCCAAATTCCATTTGGTATATTGGTACAAGGTGAAACCCAAGATACCAATCAAGCACTTGGAAAAGTAATTGTTAAAAAAACGGGAGACAATGCTACACCATTAGGCAAAGCGACTTTTGTGTTAAAAAATGACAATGATAAGTCAGAAACAAGTCACGAAACGGTAGAGGGTTCTGGAGAAGCAACCTTTGAAAACATAAAACCTGGAGACTACACATTAAGAGAAGAAACAGCACCAATTGGTTATAAAAAAACTGATAAAACCTGGAAAGTTAAAGTTGCAGATAACGGAGCAACAATAATCGAGGGTATGGATGCAGATAAAGCAGAGAAACGAAAAGAAGTTTTGAATGCCCAATATCCAAAATCAGCTATTTATGAGGATACAAAAGAAAATTACCCATTAGTTAATGTAGAGGGTTCCAAAGTTGGTGAACAATACAAAGCATTGAATCCAATAAATGGAAAAGATGGTCGAAGAGAGATTGCTGAAGGTTGGTTATCAAAAAAAATTACAGGGGTCAATGATCTCGATAAGAATAAATATAAAATTGAATTAACTGTTGAGGGTAAAACCACTGTTGAAACGAAAGAACTTAATCAACCACTAGATGTCGTTGTGCTATTAGATAATTCAAATAGTATGAATAATGAAAGAGCCAATAATTCTCAAAGAGCATTAAAAGCTGGGGAAGCAGTTGAAAAGCTGATTGATAAAATTACATCAAATAAAGACAATAGAGTAGCTCTTGTGACATATGCCTCAACCATTTTTGATGGTACTGAAGCGACCGTATCAAAGGGAGTTGCCGATCAAAATGGTAAAGCGCTGAATGATAGTGTATCATGGGATTATCATAAAACTACTTTTACAGCAACTACACATAATTACAGTTATTTAAATTTAACAAATGATGCTAACGAAGTTAATATTCTAAAGTCAAGAATTCCAAAGGAAGCGGAGCATATAAATGGGGATCGCACGCTCTATCAATTTGGTGCGACATTTACTCAAAAAGCTCTAATGAAAGCAAATGA

SEQ ID NO: 1218 - protein, 364 aa, Streptococcus agalactiae
MKKRQKIWRGLSVTLLILSQIPFGILVQGETQDTNQALGKVIVKKTGDNATPLGKATFVLKNDNDKSETSHETVEGSGEATFENIKPGDYTLREETAPIGYKKTDKTWKVKVADNGATIIEGMDADKAEKRKEVLNAQYPKSAIYEDTKENYPLVNVEGSKVGEQYKALNPINGKDGRREIAEGWLSKKITGVNDLDKNKYKIELTVEGKTTVETKELNQPLDVVVLLDNSNSMNNERANNSQRALKAGEAVEKLIDKITSNKDNRVALVTYASTIFDGTEATVSKGVADQNGKALNDSVSWDYHKTTFTATTHNYSYLNLTNDANEVNILKSRIPKEAEHINGDRTLYQFGATFTQKALIESK

SEQ ID NO: 1219 - protein, 1263 aa, Streptococcus agalactiae
ATGAGTAATGAGGGATATGCAATTAATAGTGGATATATTTATCTCTATTGGAGAGATTACAACTGGGTCTATCCATTTGATCCTAAGACAAAGAAAGTTTCTGCAACGAAACAAATCAAAACTCATGGTGAGCCAACAACATTATACTTTAATGGAAATATAAGACCTAAAGGTTATGACATTTTTACTGTTGGGATTGGTGTAAACGGAGATCCTGGTGCAACTCCTCTTGAAGCTGAGAAATTTATGCAATCAATATCAAGTAAAACAGAAAATTATACTAATGTTGATGATACAAATAAAATTTATGATGAGCTAAATAAATACTTTAAAACAATTGTTGAGGAAAAACATTCTATTGTTGATGGAAATGTGACTGATCCTATGGGAGAGATGATTGAATTCCAATTAAAAAATGGTCAAAGTTTTACACATGATGATTACGTTTTGGTTGGAAATGATGGCAGTCAATTAAAAAATGGTGTGGCTCTTGGTGGACCAAACAGTGATGGGGGAATTTTAAAAGATGTTACAGTGACTTATGATAAGACATCTCAAACCATCAAAATCAATCATTTGAACTTAGGAAGTGGACAAAAAGTAGTTCTTACCTATGATGTACGTTTAAAAGATAACTATATAAGTAACAAATTTTACAATACAAATAATCGTACAACGCTAAGTCCGAAGAGTGAAAAAGAACCAAATACTATTCGTGATTTCCCAATTCCCAAAATTCGTGATGTTCGTGAGTTTCCGGTACTAACCATCAGTAATCAGAAGAAAATGGGTGAGGTTGAATTTATTAAAGTTAATAAAGACAAACATTCAGAATCGCTTTTGGGAGCTAAGTTTCAACTTCAGATAGAAAAAGATTTTTCTGGGTATAAGCAATTTGTTCCAGAGGGAAGTGATGTTACAACAAAGAATGATGGTAAAATTTATTTTAAAGCACTTCAAGATGGTAACTATAAATTATATGAAATTTCAAGTCCAGATGGCTATATAGAGGTTAAAACGAAACCTGTTGTGACATTTACAATTCAAAATGGAGAAGTTACGAACCTGAAAGCAGATCCAAATGCTAATAAAAATCAAATCGGGTATCTTGAAGGAAATGGTAAACATCTTATTACCAACACTCCCAAACGCCCACCAGGTGTTTTTCCTAAAACAGGGGGAATTGGTACAATTGTCTATATATTAGTTGGTTCTACTTTTATGATACTTACCATTTGTTCTTTCCGTCGTAAACAATTGTAA

SEQ ID NO: 1220 - protein, 420 aa, Streptococcus agalactiae
MSNEGYAINSGYIYLYWRDYNWVYPFDPKTKKVSATKQIKTHGEPTTLYFNGNIRPKGYDIFTVGIGVNGDPGATPLEAEKFMQSISSKTENYTNVDDTNKIYDELNKYFKTIVEEKHSIVDGNVTDPMGEMIEFQLKNGQSFTHDDYVLVGNDGSQLKNGVALGGPNSDGGILKDVTVTYDKTSQTIKINHLNLGSGQKVVLTYDVRLKDNYISNKFYNTNNRTTLSPKSEKEPNTIRDFPIPKIRDVREFPVLTISNQKKMGEVEFIKVNKDKHSESLLGAKFQLQIEKDFSGYKQFVPEGSDVTTKNDGKIYFKALQDGNYKLYEISSPDGYIEVKTKPVVTFTIQNGEVTNLKADPNANKNQIGYLEGNGKHLITNTPKRPPGVFPKTGGIGTIVYILVGSTFMILTICSFRRKQL

SEQ ID NO: 1221 - protein, 570 aa, Streptococcus agalactiae
ATGTTAGAAGTCAGAGAGCAGGTTGACCATGTGATGATTCCAAAAATCAATCAGGATTTACCAATCTACGCTGGTTCAGAAGAGGACAATCTGCAACGGGGAGTTGGTCATCTAGAAGGGATAAGTTTGCCGATTGGAGGGGCTTCTACACATGCGGTCTTGAGCGGTCAAAGAGGTATGCCAGCTGCTCGGTTGTTTGCGGATTTGGATAAGATGAAAAAAGGTGATTATTTTTATGTTACCAATCTGAAAGAAACCTTGGCTTATCAAGTGGATCGTATCATGGTGATTGAACCTAGCCAATTGGATGCCGTGAGCATTGAAGAGGATAAAGATTATGTTACCCTTCTGACCTGTACACCTTATATGGGCTCTTTGTCAACTGTAATGGGTGACTTATCATTAACAACGAGAGAGAATCAGCTTGGTTCTCTCTCTTTTTGGATGTTCAAAGCGATGAGAATTTTGCTTTTAAAATTTTTAAAGTTGCGAAAGCCAAAGGCTTGTCGCTTGATGTCTTTGATAAGCTTGTTGGTCGCTTCTAATTTGGCATTGGAAAGGGATAGCTGA

SEQ ID NO: 1222 - protein, 189 aa, Streptococcus agalactiae
MLEVREQVDHVMIPKINQDLPIYAGSEEDNLQRGVGHLEGISLPIGGASTHAVLSGQRGMPAARLFADLDKMKKGDYFYVTNLKETLAYQVDRIMVIEPSQLDAVSIEEDKDYVTLLTCTPYMGSLSTVMGDLSLTTRENQLGSLSFWMFKAMRILLLKFLKLRKPKACRLMSLISLLVASNLALERDS

SEQ ID NO: 1223 - protein, 606 aa, Streptococcus agalactiae
GTGGCGCGCGATCCATATAGTGATAGATCGAGATATTTAGATCCAAAAGTTCTATCATCCTCTTTTGGCGCCTTTTTTCCAGCAGATAATATTAAGGTAGCTTGGTCTAACAACTCCAGCACTTTATTTACACCACCTATTAATGCAAACTACACCACTCAGATTCAAGCTATTGGGACAACGATTAAGTCACAAATTCCGGAATCGATTTTGACGGTTACGGATAAAAAGAGCAGGAAGTTCAGCATTAACAAGATTGACGAAGCTAAAGAAGGCTTAGTAGGTGCGACCTTCACCTTGTCTAAACGCACAACAGTAGCGGCAGATCATCAAGTACAAGGAGATTTCATTCCTGTCAGCAAAGAGACGACAGTCGGTCGGACAACCCTTACCTTTGACAACCTTAAACCTGGATTTTATGACCTTAAAGAAACGAAAGCGCCGAATGCTTACGTACTTGATCCTAAGACTTATGTTGTGGTCGTTCAAAATTCAGGAAAAACGACAATTGTGGATGAAGCTAACTTCAAAGAGGCTGATTACCCAATGGCTGATAATACCAGCCATGTGGAGTGCGTAGCGTTGCTACAACGAAGCAAAGGGTAA

SEQ ID NO: 1224 - protein, 201 aa, Streptococcus agalactiae
MARDPYSDRSRYLDPKVLSSSFGAFFPADNIKVAWSNNSSTLFTPPINANYTTQIQAIGTTIKSQIPESILTVTDKKSRKFSINKIDEAKEGLVGATFTLSKRTTVAADHQVQGDFIPVSKETTVGRTTLTFDNLKPGFYDLKETKAPNAYVLDPKTYVVVVQNSGKTTIVDEANFKEADYPMADNTSHVECVALLQRSKG

SEQ ID NO: 1225 - protein, 93 aa, Streptococcus agalactiae
ATGGGAAATGGTCAGGATTGGGTTGGAACAGCCGAAAGACTAGATGGTGAAACTGATACAGTTCCAAAAGAAGGTACTATTCTCTCTTTTTAG

SEQ ID NO: 1226 - protein, 30 aa, Streptococcus agalactiae
MGNGQDWVGTAERLDGETDTVPKEGTILSF

SEQ ID NO: 1227 - protein, 231 aa, Streptococcus agalactiae
ATGGGCATTACTCTAGTTTTTAATAAGCTATCTGATGAGCAGAAGGAGAAGTTAATGCATGTTGGGAAGTCTTATTTTGACTATCAAGAAAATGCTCTTATCCCACAATTAGGTTTTCTATATTCTAAATTAACTAAAAAAATTGAACTTGATAATCGGTTGTCTCCGACTGAACAAAAGTTATTGATTACCTTATTATTACATACTAAAGGTTTAATCATTGATATGTAA

SEQ ID NO: 1228 - protein, 76 aa, Streptococcus agalactiae
MGITLVFNKLSDEQKEKLMHVGKSYFDYQENALIPQLGFLYSKLTKKIELDNRLSPTEQKLLITLLLHTKGLIIDM

SEQ ID NO: 1229 - protein, 105 aa, Streptococcus agalactiae
ATGATATTTGAAGAGTCCAAAGATCTAATAGATAGTCCAGTTAGAGAAGCGTTGATTATAAGTGATAAGGATTTTCAAAAATTAAAACAAGAGCTATTATTTTAA

SEQ ID NO: 1230 - protein, 34 aa, Streptococcus agalactiae
MIFEESKDLIDSPVREALIISDKDFQKLKQELLF

SEQ ID NO: 1231 - protein, 270 aa, Streptococcus agalactiae
ATGGTGAGCTTGCTTCTCTTGAAAGTAAAGCAGGAGGAGTTGATAGAGTTTCATAATGTTTTTTATAGAGAAGCGATATCTTCTTATCTTGAAACAGAAAATTTTGAGAAGGCTAAAGTGACTGAAGAGAATTACCAAGTTTTTTTAGGAATCCGTACTTATCAGAAGAGTTATAACTATCAAGATCATAGTGAGAATCTAAAAGGAAATATTGAGGTAGCAATGATAGGAGTTGAAAATAATATTAGCGACGAACATATTTTTTGCTAG

SEQ ID NO: 1232 - protein, 89 aa, Streptococcus agalactiae
MVSLLLLKVKQEELIEFHNVFYREAISSYLETENFEKAKVTEENYQVFLGIRTYQKSYNYQDHSENLKGNIEVAMIGVENNISDEHIFC

SEQ ID NO: 1233 - protein, 1152 aa, Streptococcus agalactiae
ATGGTACGTAAATTTTTAAAATCGCTCCTATCTCTCTTTCTTATAGCAGTAATCGCCACCGGTATTTCAGTGGCATGTTTCTTTTTTATTCCAGAAAATAAAGGGAATATTACACCGATTTTATTGCATCGCTTTATGCGAAAAAATAATGTTAATGGAATGATGATTGTTAGCGATAATACTGGTAAACCGATTACCATCTCGCATGGGATTAACCGTGGGGAAGTTGAAACGGATATTGAAAATAATAAATTATTTCCAATGGCTTCTCTCCAAAAACTCATGACAGGAATTATTATCCAAAGATTAATTGATCAAGATGTCTTGAGTGAAGACGACCGATTGTCTCAGTTCTTTCCCCAAGTAAAAGGTAGTAATAGTATTACCATCCACCAATTGTTGACCCATACGAGTGGGTTAAGAGAAAAAGGTGTTAAGGTGTCTCCTTATCTAAAAAATGAGAGAGAACAATTACAATTTTGCTTAAAACACTATAACTTTGTTAATAAGAAATCGTGGTATTATTCTAATATCAACTTTAGTTTCCTAACAGGTATAGCCACTCAAGTTACGGGAAGGACCTACGCTGAACTTGTTGATGATGTGATAAAAAATCCTTTGCGATTAGATGATACCCAAAGTTACCAATCAGTTGTTAATCATGACTTAGTTAGCCCAATGCGAAAGAACGGCAAGTTAAATAAAATTAATATCTTTAATCAAGTATCCACAGCATATGGAGCTGGAGATTTTTTCACAACTCCGCTGAACTTTTGGGTGTTGATGCGGTCTTTTTCTAAAGGGTACTTTTTCCCAACGGATGAATATACCAAACATCAAAATGATGCGATATCACATTATTATGGTGGGCTTTACATGCATGGTCGTATAGTTAATTCTAATGGGACCTTTTTCCAGTATTCAAGTTTTGGTTATGCAGATCTAAAGACGCATGATACAATGGTGCTTTTTATGAATAACAAAGTCTATAGTGATGCTAGTCACGTGGCACCAAAAGCATTTGAATATTATCAAAAATTTATGTTCCTTAATAAGATTTTCCACTTAGTCTTTTACTTTGTATTTTCTTTCTTTTTAATGCTTTTAATACGTCATTCGTTTAGGAAAAGAAGGTATAAGAAACGTCTCTAA

SEQ ID NO: 1234 - protein, 383 aa, Streptococcus agalactiae
MVRKFLKSLLSLFLIAVIATGISVACFFFIPENKGNITPILLHRFMRKNNVNGMMIVSDNTGKPITISHGINRGEVETDIENNKLFPMASLQKLMTGIIIQRLIDQDVLSEDDRLSQFFPQVKGSNSITIHQLLTHTSGLREKGVKVSPYLKNEREQLQFCLKHYNFVNKKSWYYSNINFSFLTGIATQVTGRTYAELVDDVIKNPLRLDDTQSYQSVVNHDLVSPMRKNGKLNKINIFNQVSTAYGAGDFFTTPLNFWVLMRSFSKGYFFPTDEYTKHQNDAISHYYGGLYMHGRIVNSNGTFFQYSSFGYADLKTHDTMVLFMNNKVYSDASHVAPKAFEYYQKFMFLNKIFHLVFYFVFSFFLMLLIRHSFRKRRYKKRL

SEQ ID NO: 1235 - protein, 993 aa, Streptococcus agalactiae
ATGTCAATGATTGAAGTTTCTCACCTTCAGAAAAATTTTATAAAAACCGTTAAAGCACCAGGGTTAAAAGGAGCATTTCAATCATTTCTTCGTCCTGAAAAACACACCTTTGAAGCTGTTAAAGATTTAACATTTGATGTGCCTAAAGGACAAATTTTGGGATTTATTGGAGCGAACGGTGCAGGAAAATCTACAACAATTAAAATGTTAACTGGGATTTTAAAACCAACTTCGGGCTTTTGCCGTATTGATGGCAAATTGCCACAAGAAAACCGACAAAATTATGTTAAGGATATTGGAGTCGTTTTTGGGCAACGTACGCAGTTATGGTGGGATTTAGCTCTACAAGAAACCTATACAGTGTTAAAAGAAATCTATGACGTTCCTGATAAAGAATTTCGCAAACGCATGGCTTTTTTAAATGAGGTTTTGGAACTAAATGACTTTATAAAGGATCCTGTTAGAACTTTGTCTCTCGGACAGCGTATGAGAGCGGATATCGCAGCTTCTTTATTACATAACCCAAAGGTTCTTTTCTTAGATGAACCCACCATTGGCTTGGACGTTTCAGTGAAAGATAATATCCGACGTGCAATCACACAAATTAATCAAGAAGAAGAGACAACGATTTTACTAACGACACATGACCTCAGTGATATTGAACAACTTTGTCATCGTATTTTTATGATTGATAGAGGACAAGAAATATTTGATGGCACAGTTTCTCAGCTAAAAGAGACATTTGGAAAGATGAAAACTCTTTCTTTTGATTTGCGCCCAGGACAAGAGCATATCAGCTCTAGTTTAATTGGAAAGTCGGAGATTAATATTAAACGTAATGACTTAGTTTTAGATATTCAGTATGATAGTTCTCGCTACCAAACTGCTGACATAATTCAGCAGACATTAGCAGATTTTTCTGTACGTGACCTTAAAATGACAGATGCGGATATTGAAGATATCATTCGTCGCTTCTATAGAAATGAGCTATAA

SEQ ID NO: 1236 - protein, 330 aa, Streptococcus agalactiae
MSMIEVSHLQKNFIKTVKAPGLKGAFQSFLRPEKHTFEAVKDLTFDVPKGQILGFIGANGAGKSTTIKMLTGILKPTSGFCRIDGKLPQENRQNYVKDIGVVFGQRTQLWWDLALQETYTVLKEIYDVPDKEFRKRMAFLNEVLELNDFIKDPVRTLSLGQRMRADIAASLLHNPKVLFLDEPTIGLDVSVKDNIRRAITQINQEEETTILLTTHDLSDIEQLCHRIFMIDRGQEIFDGTVSQLKETFGKMKTLSFDLRPGQEHISSSLIGKSEINIKRNDLVLDIQYDSSRYQTADIIQQTLADFSVRDLKMTDADIEDIIRRFYRNEL

SEQ ID NO: 1237 - protein, 819 aa, Streptococcus agalactiae
ATGAACAGAATTTGGAGACGTTATAAACCTTTTATTAGTACAGGAATCCAAGGATTAATCACATATCGTGTTGATTTCATCCTTTATAGGATAGGTGATGTGATAGGAGCATTTGTTGCATTTTATCTATGGAAAGCAGTTTTCGATTCCTCAAGTCAATCCTTAATCCAAGGTTTTCAGCTGTCAGATATGATTCTCTATATTATTATGAGTTTTGTGACTAATTTATTAACAAGAACTGATAGTTCATTTATGATAGGTGACGAAGTAAAAGACGGTTCAATTATTATGCGACTCTTACGTTCAGTTCACTTTGCTGCTTCCTACCTTTTCATGGAGATTGGTTCTAGATGGCTCATCTTTTTAAGTATAGGGGTACCGTTTTTGCTTGTTATTACGGGGGTACGCCTCTTCTTGGGGACTGATTTGATTCAAGCTATAGTGTTAGTGGTATTTTATATTATTAGCATTATTTTAGCTTTTTTGATTAACTTCTTTTTTAATATTTGTTTTGGCTTCTCGGCATTTGTTTTTAAAAATTTATGGGGGTCAAACCTGTTAAAAAATTCGTTAGTCGCATTTATGTCGGGGAGCTTGATTCCTCTTACTTTTTTTCCGAAAATCGTTGCTGATATTTTAGGATTTTTACCATTTTCATCTTTAATTTACACACCAGTAATGATTATTATTGGTAAATATGATGGCAGTCAAATTGTGCAAGCCTTACTTTTACAAATATTTTGGCTAATAGTAATGGTAGCTTTATCTCAATTAATATGGAAAAAAGTACAGTTGCATATCACTATCCAAGGAGGTTGA

SEQ ID NO: 1238 - protein, 272 aa, Streptococcus agalactiae
MNRIWRRYKPFISTGIQGLITYRVDFILYRIGDVIGAFVAFYLWKAVFDSSSQSLIQGFQLSDMILYIIMSFVTNLLTRTDSSFMIGDEVKDGSIIMRLLRSVHFAASYLFMEIGSRWLIFLSIGVPFLLVITGVRLFLGTDLIQAIVLVVFYIISIILAFLINFFFNICFGFSAFVFKNLWGSNLLKNSLVAFMSGSLIPLTFFPKIVADILGFLPFSSLIYTPVMIIIGKYDGSQIVQALLLQIFWLIVMVALSQLIWKKVQLHITIQGG

SEQ ID NO: 1239 - protein, 786 aa, Streptococcus agalactiae
ATGACAAAATATCAGCGAATGCACTTTATTTTTATTAAACAATACATGAAGCAAATCATGGAGTATAAAATAGACTTTTTTGTAGGCGTTTTAGGAGTATTTTTAACACAAGGGTTAAATCTTTTATTTCTGAATGTTCTTTTTCAACATATCCCTTCTTTAGAAGGATGGACTTTTCAGCAAATAGCTTTTATTTATGGTTTTTCTCTCCTCCCAAAAGGAATTGATCACCTTTTCTTTGATAACTTGTGGGCTCTTGGTCAAAGGCTTATTCGAAAAGGAGAATTTGATAAGTATTTAACCAGGCCGATCAGTCCTTTATTTCATGTCCTAGTTGAAACCTTTCAAGTAGATGCATTGGGGGAGTTATTGGTTGGTTTTATTCTGTTATCTACCACAGTATCTAGTATAAGCTGGACCGTGCCAAAAGTATTATTATTTATATTTATTATCCCCTTTGCAACTTTGATTTATACCTCCTTGAAGATTGCTACGTCAAGTATCGCTTTTTGGACCAAACAATCTGGTGCTGTTATCTATATTTTTTATATGTTTAATGACTTTGCTAAGTATCCTGTCGCAATATATAATAATCTATTGCGTTGGATCATTAGTTTTGTCATTCCATTTGCTTTTACAGCTTATTATCCCGCTGCTTACTTCTTACAAGATAGAAATGTCTATTTTAATATTGGTGGGGTTATCTTGATTTCCTTGATTTCTTTTATGGTATCACTAATACTTTGGCATAAAGGAGTAGAAGTATATGAGAGTGCGGGTTCTTGA

SEQ ID NO: 1240 - protein, 261 aa, Streptococcus agalactiae
MTKYQRMHFIFIKQYMKQIMEYKIDFFVGVLGVFLTQGLNLLFLNVLFQHIPSLEGWTFQQIAFIYGFSLLPKGIDHLFFDNLWALGQRLIRKGEFDKYLTRPISPLFHVLVETFQVDALGELLVGFILLSTTVSSISWTVPKVLLFIFIIPFATLIYTSLKIATSSIAFWTKQSGAVIYIFYMFNDFAKYPVAIYNNLLRWIISFVIPFAFTAYYPAAYFLQDRNVYFNIGGVILISLISFMVSLILWHKGVEVYESAGS

SEQ ID NO: 1241 - protein, 849 aa, Streptococcus agalactiae
ATGAAAACAGTAATAATATATGGAGGACAGGGTAATGTTCAGTCAAAACACCTTTGTCAACTAGTTAAAACTCCAAAAGGTGAAATTCTTTTTTCAAAGTTACAAGCAACTGATTTAGAATCATATCAGTTAATGATGGATGTCATTAACCACAAGGTAAGTTTAGACAATGTTCATGCGTCTATGTTAGCAAATTTTTTATATAATGATTGGCTAACAAACGATGAAAAAATAGTATCTGGGATAGGATTTTCAGCTCATAGCGCCGGTATTTTCAATGTGTTATATGCTAGTGGTAGTACTAGTTTTGAAAACATTATTCACTTTATTAAACGTCGTGCCCAACTTATAGAAAATTGTCATGTGTCTGAAGAGCTTTGGCTTTTGATGGTTGAAAACATTGATATGTTTAGTAAGGATGTTTTAAAAGAACAGTCTGAGAAAGTAAAATTAGCTATTATTACTGATGATAGAGCTGGTGTAATTGCTATGGATCAAGTCAACCGTTCTTTCTTTGATGACGTGATGACTAACAAAGGTTATTTTTATAAATTAAAGCAGTTAGGCGTAAAAGCACCATATCATACTGATTTTTTAAATGAATCTAAAGAGCAGTATAAACAATTGATTGAAAGCCTAGATATTTCGCAAAATGATGACTATGACTATATTTTTCATTGTGATCAATTGGTAGATGAAATTTTATATCAGTGGACCAATCTCTTTAACTGGCGTGCGATTAAGGAAACTATCATAGAAAAGGATGCGGAGATTATTGATATTTCTCCTAATAGGTTTATTTCTAGTCAGTTGCAAAAAATGAAAAAGAGGGGGAGGAAACAGTTATGA

SEQ ID NO: 1242 - protein, 282 aa, Streptococcus agalactiae
MKTVIIYGGQGNVQSKHLCQLVKTPKGEILFSKLQATDLESYQLMMDVINHKVSLDNVHASMLANFLYNDWLTNDEKIVSGIGFSAHSAGIFNVLYASGSTSFENIIHFIKRRAQLIENCHVSEELWLLMVENIDMFSKDVLKEQSEKVKLAIITDDRAGVIAMDQVNRSFFDDVMTNKGYFYKLKQLGVKAPYHTDFLNESKEQYKQLIESLDISQNDDYDYIFHCDQLVDEILYQWTNLFNWRAIKETIIEKDAEIIDISPNRFISSQLQKMKKRGRKQL

SEQ ID NO: 1243 - protein, 723 aa, Streptococcus agalactiae
ATGAAAGTAGCAATAGTTACTGGTGGTACCAGAGGAATTGGAAGGGCTATTACAAAAGAGTTATACAAAGAAGGTTACAAAGTCATTGCTATTTATAATAGCAATGATGCTAAGGCAAGAGCTTTACAAGAGGAGTTACCAAAATTAGACGTTTATAAATGCAATATTTCAGATGCAAAAGCAGTACAAAAATTGGTGACTAAAATTTTTAGAGAATATGGCGGTATTGATTGTTTAGTTAATAATGCTGGTATTGTTAGAGATGGCTTTTTCTTGATGATGTCTAAGGAAAAATGGATGGATGTCATTAACATAAATATTATGGGGCTAGTTAACATGAGTAAAGCCGTGTTAAAAATCATGAAGGCTAAGCGTATACAGGGAAAGGTTATCAATATTTCTTCAACTAGTGGTATAGCAGGGCAGATAGGGCAAGCGAACTATTCAGCAACGAAAGGCGCTATCATTTCCATTACTAAAACTCTAGCGAAAGAATTTGCATCAGATGGTATTACGATTAATTGTGTAAGTCCAGGATTCATTGAAACAGATATGACAAATGAATTGCAAAATAAAGAAGAGCTAAAAGAGCATCTTATTCCTCTAAAAAGGTTTGGACAACCTGAAGAGGTGGCTTGGCTCGTAAGCTTTTTAGCAAGTGAGAAGGCAAACTATATTACAGGAAAAAATATTGTGATTGATGGAGGAATGATTAATGATTAA

SEQ ID NO: 1244 - protein, 240 aa, Streptococcus agalactiae
MKVAIVTGGTRGIGRAITKELYKEGYKVIAIYNSNDAKARALQEELPKLDVYKCNISDAKAVQKLVTKIFREYGGIDCLVNNAGIVRDGFFLMMSKEKWMDVININIMGLVNMSKAVLKIMKAKRIQGKVINISSTSGIAGQIGQANYSATKGAIISITKTLAKEFASDGITINCVSPGFIETDMTNELQNKEELKEHLIPLKRFGQPEEVAWLVSFLASEKANYITGKNIVIDGGMIND

SEQ ID NO: 1245 - protein, 306 aa, Streptococcus agalactiae
ATGATTAACTGGGCTGAAGAACGTAAAATAATAAAAACACGTCAAGAAGTAGTTGATGAAATTAAAGGTATTTTGATTGACTCTTTAATGTTGGATATTGATAAAGATCTGATTATGAATGATCAACCATTATTTGGTCGTGGATTAGAGCTAGACTCTATTGATGCCCTAGAACTGTCAATAGGGATTTCAACAACGTTTGGTGTTGAACTAAATGATGATGATATTTCAATATTATCATCAGTAAATAGACTAGCAGATTTTGTGATTGAAAATAGTGAGGATATAGATGACCAAGCTAAGTAG

SEQ ID NO: 1246 - protein, 101 aa, Streptococcus agalactiae
MINWAEERKIIKTRQEVVDEIKGILIDSLMLDIDKDLIMNDQPLFGRGLELDSIDALELSIGISTTFGVELNDDDISILSSVNRLADFVIENSEDIDDQAK

SEQ ID NO: 1247 - protein, 477 aa, Streptococcus agalactiae
ATGACCAAGCTAAGTAGTGAAGAAATTATAAAAATGTTACCTCATCGCTATCCGTTTCTAATGGTGGATAGAGTGCAGAGTTATAAAAAAGGTATCATTGAATGTCGTAAGAATATTACTATCAACGAACCTTACTTTCAAGGACATTTTCCACAACGTCCTATAGTTCCGGGTGTTTTGATGATTGAGATGGCAGCTCAATCTGCAGCTTTACTTTATATTTTAGATGCACTTGATGGTAGCCTCCCCTCTCTTGATGAATTAACAGCAGAGAAAATAGCAGAAAAAGTAGGTTATTTAGCCAGTGTGAAGAATTTCAAATTCAAGAAAATTGTTACTCCAGGAGACCAGCTAAACATTACATGTAAATCTCAATCAAAATTGGGGCATCTTTTAGAAATTCAAGTCGTTATTAGAGATGAGAATAAAAAAGAGGTTGCCTCAGGAAGGATGTTGGTATCAGAAAATGGAAATTAA

SEQ ID NO: 1248 - protein, 158 aa, Streptococcus agalactiae
MTKLSSEEIIKMLPHRYPFLMVDRVQSYKKGIIECRKNITINEPYFQGHFPQRPIVPGVLMIEMAAQSAALLYILDALDGSLPSLDELTAEKIAEKVGYLASVKNFKFKKIVTPGDQLNITCKSQSKLGHLLEIQVVIRDENKKEVASGRMLVSENGN

SEQ ID NO: 1249 - protein, 930 aa, Streptococcus agalactiae
ATGGAAATTAAACTCAAAAATATTGGAAAAAAATATGGTTCTTTTGAAGCATTGAGAGACATTAATCTCATCTTTGAAGAGGGAAAATTTTATGGCCTTCTTGGACCTAATGGAGCTGGTAAAACAACTTTATTTAACCTTTTAATTCAAAATTTTAAGCAAACGTCAGGCGATATTAAGTGGGAGGTGGATGGAAAACCTCTATCTATTAAAGATTTTTATCGTCACATTGGTATTGTCTTCCAAAGTAATCGCTTAGATGATAATTTAACGGTTGAGGAAAATCTAATTTCTAGAGGTGCTTTGTACGGTTTATCTAAATCACAAGTACGTAATCGCCTTAAAGATCTTCAAACGTATCTAGATATCACAGCAATAAAAAAACAAAAATATGGCAGTTTATCAGGAGGTCAAAAACGAAAAGTTGATATTGCACGCGCCTTGCTGCCACAACCTTCTCTATTATTATTAGATGAACCAACGACTGGTTTAGACCCTCAATCTCGTCGCGATTTATGGGATGCTATCGCACAACTAAATCAACAATCGCAGATGACAGTTGTACTAATTACTCATTATCTTGAAGAAATGTCTGCTTGTGATGTTTTAAATGTTCTTATTGAAGGAAACATTTATTATTCGGGAGATATTAAAAGCTTTATTGAGCAACATTCCACAACAAACTTGAATGTGGTATTGAAACCAGAAAAGTCATTAGACCAACTTTCGATAGCTGATTTTGTTAATAAATGTCAAGTCCTTTCAGAAAGGGAGATAGTATTTAAGGATATTTCTGTTGAGGAAATGATGCAGGTTATCTCAGACAATCAAGATAAATCTATTATTGAGACATTTAATGTTGAATATTCGAACTTAGAGGCGGCGTATCTCAACTTGCTTAGAGAAAAAGAAAGGAAAAACAATGTTTGA

SEQ ID NO: 1250 - protein, 309 aa, Streptococcus agalactiae
MEIKLKNIGKKYGSFEALRDINLIFEEGKFYGLLGPNGAGKTTLFNLLIQNFKQTSGDIKWEVDGKPLSIKDFYRHIGIVFQSNRLDDNLTVEENLISRGALYGLSKSQVRNRLKDLQTYLDITAIKKQKYGSLSGGQKRKVDIARALLPQPSLLLLDEPTTGLDPQSRRDLWDAIAQLNQQSQMTVVLITHYLEEMSACDVLNVLIEGNIYYSGDIKSFIEQHSTTNLNVVLKPEKSLDQLSIADFVNKCQVLSEREIVFKDISVEEMMQVISDNQDKSIIETFNVEYSNLEAAYLNLLREKERKNNV

SEQ ID NO: 1251 - protein, 879 aa, Streptococcus agalactiae
ATGTTTGAACTAATTTCTAGAAATCGTAAAGTTTACACGCGAGATCGGTTAGCGTTTTTCATGTCTTTTTTATCAGTTATTATCTTAATTTTGGTCTATCAGATTTTCTTGGGAAAAATTCAATTAGATGCTATAAAAGCAGCATTGAGGAGTAATACAGTATCCAGTGATACTATTCACATGGTTAATTATTGGCTCATTGCAGGTTTGACGACTATTATTTCAATGACTAGTACATTAGGTGCCTTTGGAGTTATGGTGTCCGACAAAGAAAAAAAATTAAATGAAGATTTTAAGGTCAGTCCTATATCAAATATCAAAATTGAATTGTCCTATGCTATATTTGCCGTTTTATTTGGTATTGTCATGACGATGTTCTCTTGCATCTTTGCTATCGGTATTTTTAACGGCTTTAATTCCTTGCTAGAGTATTCAGCTATGGATTATTTAACTATTTTAGGGATCGTTTCCTTAGGGACTGTTTTATCTGCGGCGATGATTTTACCTATTTTAGCCTTTATTCATACTAGTTCAGCTTTTACGACTCTTAGCACAATTGTAGGGACTTTTATTGGTTTTATTTCAGGAGTATATCTCTCAATTGGCTCGGTAGGAAAAGCATTACAACAGGTTATGACATGGTTTCCATTGACTCAAATCAATTCTCTTTTGAAACAGGTCTTAATGAAGGGTTCTATTGCGAAGGTATTTGACAAAGCCAACGAAGCCACTGTCTCTAACTATAAAGAATCATATGGTGTTGTTTTGCGTAATGCTGATGGAGAAAGGCTGAGTAATCACTTTATGTTGATTTATATCATTGCCCTCATTCTTATTTTATTGGCAATTCATTTTATTATTAAAAAGGTTAAAAAATGA

SEQ ID NO: 1252 - protein, 292 aa, Streptococcus agalactiae
MFELISRNRKVYTRDRLAFFMSFLSVIILILVYQIFLGKIQLDAIKAALRSNTVSSDTIHMVNYWLIAGLTTIISMTSTLGAFGVMVSDKEKKLNEDFKVSPISNIKIELSYAIFAVLFGIVMTMFSCIFAIGIFNGFNSLLEYSAMDYLTILGIVSLGTVLSAAMILPILAFIHTSSAFTTLSTIVGTFIGFISGVYLSIGSVGKALQQVMTWFPLTQINSLLKQVLMKGSIAKVFDKANEATVSNYKESYGVVLRNADGERLSNHFMLIYIIALILILLAIHFIIKKVKK

SEQ ID NO: 1253 - protein, 2004 aa, Streptococcus agalactiae
ATGAAAGATGATAATAAATTAAAGATTTCTGAAGCTTCCTTAGAAGATTATTCTGAAGTGGTTCATTTATTTAATAGGAATCATGTTTATCAATTTCCAGACGGTAGGCCTTTAACTGTTGATGACCTTGATTTAACGTTAAAAGTTAAAGAAGTGACACATTTATTTTTACTGAAAAATCATGGTGTTTTGATTGGAACATCAGCTTTCTTTAAATTTATTACCTATGGTTGTTTAGATTGGAATAGTAGCTTTAGTGGTTTTCTTTTAATTGATTCGAAAAGTCGTAGTGGACAGGCAATCACTTATCTATATAAAACTATCTTAAAGAAGATAACAAAACTGAAGTTTTCTAATATCTATACCGAAATCAGTAACTACAATAAACCCTCCTTAGCTTTATCAAAATTGAATGGCTTCAAAGAGTATGATAAGACATATGAAGACATACTGCATTGTCGATCATTGCGTAGTCACCTCCCTAAGATATTGAATACGTTTCGTATTTCGAATTATTATGGTAAAACATACGACATATCAACTTTTCAAATTATGGAGGAAATTGAAAATCCCTTGGAAGAGGAGACAGAAATTAGGACCAAAGTCTCTGATGAAGAAATATTATTTAAAGCAGAAGATAGTGCTTCACTTCCTTATTATTTAAAAATGAGCTTGTTTCAAATGGAAATTGCTAAGTTAGATAACCGTTATGTTTTACAAGTTGACTTTTTATCGGAACAAGTAAAGAGGGTTCGGGTTAAAACTGGAAAATATCACTTGGCAAACTTAACGAGGGCTCACCCTAGCCTAACTTTAAGTCGTTTTGCCAATTATTATTACATTCAAGCAACTGTGGAAACCCTTTATGGTAATATCGATGTTCAACTGGAACGTCGAAAAAAGCATTATAGAGATGCAACTATTTGTCTTAAGAGAACTTTTCAAGGTTATGATTTACTTATCTCTCCAAATGGCAGCCTTATTTTTGAAAAGCAGAAAAGAAAGATACTTGAAGATAGTTTTTTGATTTTTAGCCAACCTTTGGACAAGAAATTAGTTGTAAAAGAAGAAGAAAATCACATTACAATCAAATGTTTCTATCAAGGTGCTTTAATTGAGAAAATCATGACATTTACAAGTGACGAAGAAATCACTTGTGTTTATAAATGTAATCAAAAGGCTAAAGAGATGTTCCCAAAATTATTGAAACAGACTTTCAAGTTACACTGCCAAGAGCAGTTGATTAGAGATAGTGAAGGTTATCTTGTGAATGTTCCAGGAAGTTACCCGATTGAGCATGATGATTTTCTTCGAGCAGATAAGTTTGAAGATAGACAATTCCATTATTACCTCCCGAATGAAGATAAAATGATTTCCTATTCTCCTCCTGGCAAAGCCAGCAATCAAATGCAATTTAGACCCTTATGTCTTATTGATACAGATAGCCTTTCTTTTCCACTGACTTATCATTTTAGGATTTCACAAGCATCATCGGAGGAGGCGTTAATCAATCTAAAAAAACAGCCAATATGGGACAGCAACTACCAAGCGTCAGCAACTGACCTTTTAAAACATATCTCTAACCTAACATTAGAAGAAGAGAAGGATTATGGCATCAAGAGAATGATAGCTAACAGAAAGCATTATCCTAGTCACAAACTGGTTTTAGCCTATAATCAGATTGTTTTGCCTAAGAATGAAATTCCAAGAGACAGTGAATTATATTCTATTTCTTTTGATTATCGAATTAGAGGAAAGTTTGTCCAAATCCGCCAAGGGGAACATGTCAAATATGATAATAAATCCTATGTTTTGGAAAATAGTCAACAATTAGTATTGTATGTAGCTAGCGATGATAAATATATACTAATTTCTGCTAAAAATGGAATATTTTATTCTTACAAAGAGAACAATCATTTAAAAATAAGGTGCATGTTTAAAAGGAACTCACCTTATGCTACAAATGTGAGCATTACAGAATATAGAAAGTGTGAAGAAAAATGA

SEQ ID NO: 1254 - protein, 667 aa, Streptococcus agalactiae
MKDDNKLKISEASLEDYSEVVHLFNRNHVYQFPDGRPLTVDDLDLTLKVKEVTHLFLLKNHGVLIGTSAFFKFITYGCLDWNSSFSGFLLIDSKSRSGQAITYLYKTILKKITKLKFSNIYTEISNYNKPSLALSKLNGFKEYDKTYEDILHCRSLRSHLPKILNTFRISNYYGKTYDISTFQIMEEIENPLEEETEIRTKVSDEEILFKAEDSASLPYYLKMSLFQMEIAKLDNRYVLQVDFLSEQVKRVRVKTGKYHLANLTRAHPSLTLSRFANYYYIQATVETLYGNIDVQLERRKKHYRDATICLKRTFQGYDLLISPNGSLIFEKQKRKILEDSFLIFSQPLDKKLVVKEEENHITIKCFYQGALIEKIMTFTSDEEITCVYKCNQKAKEMFPKLLKQTFKLHCQEQLIRDSEGYLVNVPGSYPIEHDDFLRADKFEDRQFHYYLPNEDKMISYSPPGKASNQMQFRPLCLIDTDSLSFPLTYHFRISQASSEEALINLKKQPIWDSNYQASATDLLKHISNLTLEEEKDYGIKRMIANRKHYPSHKLVLAYNQIVLPKNEIPRDSELYSISFDYRIRGKFVQIRQGEHVKYDNKSYVLENSQQLVLYVASDDKYILISAKNGIFYSYKENNHLKIRCMFKRNSPYATNVSITEYRKCEEK

SEQ ID NO: 1255 - protein, 954 aa, Streptococcus agalactiae
ATGAATACTATTTATAATACATTGAGAACAGATAAAGGTTATAAAGTTTATGAGGGGTATTTATATGAAATTACTGGTGAAGAATGTGAAGAAGCCTTAGACCTTGTGATTCCTAAGAATATTGTATTTGCAGATACAGATACTTGTGGCTACACTTTTTTACTCAATGAAGATGGAACAGTTTATGATGATGTGACTTTCTACAAATTTGATGATAAATATTGGTTGGCTAGTCATAAAGCTTTGGATTCTTATTTAGACAACATCAATTTTGACTATACCGTAACAGATATTTCTGACGAGTATAAAATGCTGCAAATTGAAGGAAGATATTCGGGAGAAATTGCTCAGTCATTTTATGAATATGATATTTCAACACTTAATTTTCGTACTTTGATAGAGATGACTTATAAAGGTGAGAAAGGTTATCTTGCTAGATTTGGTTTTTCTGGAGAATTTGGCTATCAATTTTTCCTACCATCTTCTATTTTTGCTACTTTTGTTTCGGATGTCTGTGAAGGTATAGCAGAGTATGGGGATGAACTTGATAGATATTTAAGGTTTGAAGTGGGACAACCCATTACTGATATTTATCAACAAGAAGAATATTCTTTATATGAAATAGGTTATTCTTGGAATCTAGATTTCACAAAGGAAGAATTTAGAGGTCGCGATAGCTTGTTAGAGCACATCAGATCAGCAACAGTTAAAAGTGTTGGATTCTCAACGAAGGAAAAACTCGCTTCAGGAACACCAGTGCTATTTGATGACCAAATTGTTGGAAAGATTTTTTGGATAGCAGACGAGAAAGACTCTTCGGAAAATTACCTAGGTTTGATGATTGTTAACCAAACATATGCTCATTCAGGAGTTACTTTTGTAACAGAAGATGGCCAAATTTTGAAAACACAATCAAGCCCTTATTGTATCCCAGAAAGTTGGAACAAAGAATGA

SEQ ID NO: 1256 - protein, 317 aa, Streptococcus agalactiae
MNTIYNTLRTDKGYKVYEGYLYEITGEECEEALDLVIPKNIVFADTDTCGYTFLLNEDGTVYDDVTFYKFDDKYWLASHKALDSYLDNINFDYTVTDISDEYKMLQIEGRYSGEIAQSFYEYDISTLNFRTLIEMTYKGEKGYLARFGFSGEFGYQFFLPSSIFATFVSDVCEGIAEYGDELDRYLRFEVGQPITDIYQQEEYSLYEIGYSWNLDFTKEEFRGRDSLLEHIRSATVKSVGFSTKEKLASGTPVLFDDQIVGKIFWIADEKDSSENYLGLMIVNQTYAHSGVTFVTEDGQILKTQSSPYCIPESWNKE

SEQ ID NO: 1257 - protein, 2196 aa, Streptococcus agalactiae
ATGAGCGTATATGTTAGTGGAATAGGAATTATTTCTTCTTTGGGAAAGAATTATAGCGAGCATAAACAGCATCTCTTCGACTTAAAAGAAGGAATTTCTAAACATTTATATAAAAATCACGACTCTATTTTAGAATCTTATACAGGAAGCATAACTAGTGACCCAGAGGTTCCTGAGCAATACAAAGATGAGACACGTAATTTTAAATTTGCTTTTACCGCTTTTGAAGAGGCTCTTGCTTCTTCAGGTGTTAATTTAAAAGCTTATCATAATATTGCTGTGTGTTTAGGGACCTCACTTGGGGGAAAGAGTGCTGGTCAAAATGCCTTGTATCAATTTGAAGAAGGAGAGCGTCAAGTAGATGCTAGTTTATTAGAAAAAGCATCTGTTTACCATATTGCTGATGAATTGATGGCTTATCATGATATTGTGGGAGCTTCGTATGTTATTTCAACCGCCTGTTCTGCAAGTAATAATGCCGTAATATTAGGAACACAATTACTTCAAGATGGCGATTGTGATTTAGCTATTTGTGGTGGCTGTGATGAGTTAAGTGATATTTCTTTAGCAGGCTTCACATCACTAGGAGCTATTAATACAGAAATGGCATGTCAGCCCTATTCTTCTGGAAAAGGAATCAATTTGGGTGAGGGCGCTGGTTTTGTTGTTCTTGTCAAAGATCAGTCCTTAGCTAAATATGGAAAAATTATCGGTGGTCTTATTACTTCAGATGGTTATCATATAACAGCACCTAAGCCAACAGGTGAAGGGGCGGCACAGATTGCAAAGCAGCTAGTGACTCAAGCAGGTATTGACTACAGTGAGATTGACTATATTAACGGTCACGGTACAGGTACTCAAGCTAATGATAAAATGGAAAAAAATATGTATGGTAAGTTTTTCCCGACAACGACATTGATCAGCAGTACCAAGGGGCAAACGGGTCATACTCTAGGGGCTGCAGGTATTATCGAATTGATTAATTGTTTAGCGGCAATAGAGGAACAGACTGTACCAGCAACTAAAAATGAGATTGGGATAGAAGGTTTTCCAGAAAATTTTGTCTATCATCAAAAGAGAGAATACCCAATAAGAAATGCTTTAAATTTTTCGTTTGCTTTTGGTGGAAATAATAGTGGTGTCTTATTGTCATCTTTAGATTCACCTCTAGAAACATTACCTGCTAGAGAAAATCTTAAAATGGCTATCTTATCATCTGTTGCTTCCATTTCTAAGAATGAATCACTTTCTATAACCTATGAAAAAGTTGCTAGTAATTTCAACGACTTTGAAGCATTACGCTTTAAAGGGGCTAGACCACCCAAAACTGTCAACCCAGCACAATTTAGGAAAATGGATGATTTTTCCAAAATGGTTGCCGTAACAACAGCTCAAGCACTAATAGAAAGCAATATTAATCTAAAAAAACAAGATACTTCAAAAGTAGGAATTGTATTTACAACACTTTCTGGACCAGTTGAGGTTGTTGAAGGTATTGAAAAGCAAATCACAACAGAAGGATATGCACATGTTTCTGCTTCACGATTCCCGTTTACAGTAATGAATGCAGCAGCTGGTATGCTTTCTATCATTTTTAAAATAACAGGTCCTTTATCTGTCATTTCGACAAATAGTGGAGCGCTTGATGGTATACAATATGCCAAGGAAATGATGCGTAACGATAATCTAGACTATGTGATTCTTGTTTCTGCTAATCAGTGGACAGACATGAGTTTTATGTGGTGGCAACAATTAAACTATGATAGTCAAATGTTTGTCGGTTCTGATTATTGTTCAGCACAAGTCCTCTCTCGTCAAGCATTGGATAATTCTCCTATAATATTAGGTAGTAAACAATTAAAATATAGCCATAAAACATTCACAGATGTGATGACTATTTTTGATGCTGCGCTTCAAAATTTATTATCAGACTTAGGACTAACCATAAAAGATATCAAAGGTTTCGTTTGGAATGAGCGGAAGAAGGCAGTTAGTTCAGATTATGATTTCTTAGCGAACTTGTCTGAGTATTATAATATGCCAAACCTTGCTTCTGGTCAGTTTGGATTTTCATCTAATGGTGCTGGTGAAGAACTGGACTATACTGTTAATGAAAGTATAGAAAAGGGCTATTATTTAGTCCTATCTTATTCGATCTTCGGTGGTATCTCTTTTGCTATTATTGAAAAAAGGTGA

SEQ ID NO: 1258 - protein, 731 aa, Streptococcus agalactiae
MSVYVSGIGIISSLGKNYSEHKQHLFDLKEGISKHLYKNHDSILESYTGSITSDPEVPEQYKDETRNFKFAFTAFEEALASSGVNLKAYHNIAVCLGTSLGGKSAGQNALYQFEEGERQVDASLLEKASVYHIADELMAYHDIVGASYVISTACSASNNAVILGTQLLQDGDCDLAICGGCDELSDISLAGFTSLGAINTEMACQPYSSGKGINLGEGAGFVVLVKDQSLAKYGKIIGGLITSDGYHITAPKPTGEGAAQIAKQLVTQAGIDYSEIDYINGHGTGTQANDKMEKNMYGKFFPTTTLISSTKGQTGHTLGAAGIIELINCLAAIEEQTVPATKNEIGIEGFPENFVYHQKREYPIRNALNFSFAFGGNNSGVLLSSLDSPLETLPARENLKMAILSSVASISKNESLSITYEKVASNFNDFEALRFKGARPPKTVNPAQFRKMDDFSKMVAVTTAQALIESNINLKKQDTSKVGIVFTTLSGPVEVVEGIEKQITTEGYAHVSASRFPFTVMNAAAGMLSIIFKITGPLSVISTNSGALDGIQYAKEMMRNDNLDYVILVSANQWTDMSFMWWQQLNYDSQMFVGSDYCSAQVLSRQALDNSPIILGSKQLKYSHKTFTDVMTIFDAALQNLLSDLGLTIKDIKGFVWNERKKAVSSDYDFLANLSEYYNMPNLASGQFGFSSNGAGEELDYTVNESIEKGYYLVLSYSIFGGISFAIIEKR

SEQ ID NO: 1259 - protein, 981 aa, Streptococcus agalactiae
ATGAGTAAATTTTTATTTGCTCCTTTCATGATGAATTTAGGAGAGAGCCAAAGATTATCAAAACTGGCTAATTGTTTATATGAACAAGGACATGATATTCATATCCTTGGAGACAATTATTATCCATTTTTATTTAATAATGATGCTTATCGCTATCACCACTGTGTAGAAGATAAATCTGTTTATAATAGTAAGCGATATGATGCTTTCTTTTCTCTTTCAACAGACTTTAATTTTTTATCAGAAGAAGAAATTGAACGCATCTGTTCTATTGAAAGAGACTTGTTACGCCAAGAAAAATTTGATGCTGTATTGACAGGTTACCGTCTATCTATTGTTACAAGTTGTCGTTTAGAAAGCATACCATTAATTTGGATTATTTCAGGGGCAACGCATATCAGTGAAATTGTTGAAAACTCAGAAGGAATATTGCCTAATGGGAAGATAAGTAAAGCTAGTAAGCCTCAAACAAAGGATTTTATCAAAAGAGTAATCACTACTTATTCAACAAATGTTAAAACGTGGAATAACTATATTAAAAAATATGGTGGCAAACCTTTTAATAATGCTTTAGAATTATTTACTGGTGATCTAAACTTGGTAACAGATTACTCTTTGTTTTATGAATTTGATAAAGATTCGTCCTATAAAACGATAGGACCTATTTTGATAGATAATGTAGGTTTTTCAAAATGCAGCCAAATTAATCAAGACAATAAGACTGTACTGCTCAGCTTTGGTACTTCATTTAAACGAGATTGGGTGGAATCTTTTTTAAAGACATTACCAAGGCATTATCATTATTTACTGACAAGCTGTGGTGAGGCTATAAACATTCCAGGAAGTTATATTGAGATAGTTGATTTTATTGATTTTAAAACCATAGATAAAGAGATTTATTTCGCTTATTATACACGGTGGGCAAGGGGAACCAGTTTATGCGATGGCTGCACNNNNNCATTCCATTCATTAATTAATTAA

SEQ ID NO: 1260 - protein, 326 aa, Streptococcus agalactiae
  VARIANT 319, 320: Xaa = Any Amino Acid
MSKFLFAPFMMNLGESQRLSKLANCLYEQGHDIHILGDNYYPFLFNNDAYRYHHCVEDKSVYNSKRYDAFFSLSTDFNFLSEEEIERICSIERDLLRQEKFDAVLTGYRLSIVTSCRLESIPLIWIISGATHISEIVENSEGILPNGKISKASKPQTKDFIKRVITTYSTNVKTWNNYIKKYGGKPFNNALELFTGDLNLVTDYSLFYEFDKDSSYKTIGPILIDNVGFSKCSQINQDNKTVLLSFGTSFKRDWVESFLKTLPRHYHYLLTSCGEAINIPGSYIEIVDFIDFKTIDKEIYFAYYTRWARGTSLCDGCTXXFHSLIN

SEQ ID NO: 1261 - protein, 1149 aa, Streptococcus agalactiae
ATGAATGNNNNNTTATATGAACAAGGACATGATATTCATATCCTTGGAGACAATTATTATCCATTTTTATTTAATAATGATGCTTATCGCTATCACCACTGTGTAGAAGATAAATCTGTTTATAATAGTAAGCGATATGATGCTTTCTTTTCTCTTTCAACAGACTTTAATTTTTTATCAGAAGAAGAAATTGAACGCATCTGTTCTATTGAAAGAGACTTGTTACGCCAAGAAAAATTTGATGCTGTATTGACAGGTTACCGTCTATCTATTGTTACAAGTTGTCGTTTAGAAAGCATACCATTAATTTGGATTATTTCAGGGGCAACGCATATCAGTGAAATTGTTGAAAACTCAGAAGGAATATTGCCTAATGGGAAGATAAGTAAAGCTAGTAAGCCTCAAACAAAGGATTTTATCAAAAGAGTAATCACTACTTATTCAACAAATGTTAAAACGTGGAATAACTATATTAAAAAATATGGTGGCAAACCTTTTAATAATGCTTTAGAATTATTTACTGGTGATCTAAACTTGGTAACAGATTACTCTTTGTTTTATGAATTTGATAAAGATTCGTCCTATAAAACGATAGGACCTATTTTGATAGATAATGTAGGTTTTTCAAAATGCAGCCAAATTAATCAAGACAATAAGACTGTACTGCTCAGCTTTGGTACTTCATTTAAACGAGATTGGGTGGAATCTTTTTTAAAGACATTACCAAGGCATTATCATTATTTACTGACAAGCTGTGGTGAGGCTATAAACATTCCAGGAAGTTATATTGAGATAGTTGATTTTATTGATTTTAAAACCATAGATAAAGAGATTTATTTCGCTATTATACACGGTGGGCAAGGAACAGTTTATGCGATGGCTGCACAAGGTATTCCCTTTATAGGTATCCCTTTCTTTAACGAACAATTTTGGAATATTAAGAAGTTCAGTAAAGAAAAGTGCGCTTATTTGGTAAAGAAACCTGATGTAAGAGAGATACGTAAAGCAATTAGCTGTCTTGAAAGAGACTATGATATCTATAAAAGTTATATGATAAGACTAAGCCAAGGAATTAAAGAAGAAGCAGAGGCATCTTTACAAAAAGCGGAGGCAGAAATTGAATCCTTTATCAGAAAAAGACAAAGTTAA

SEQ ID NO: 1262 - protein, 382 aa, Streptococcus agalactiae
  VARIANT 3, 4: Xaa = Any Amino Acid
MNXXLYEQGHDIHILGDNYYPFLFNNDAYRYHHCVEDKSVYNSKRYDAFFSLSTDFNFLSEEEIERICSIERDLLRQEKFDAVLTGYRLSIVTSCRLESIPLIWIISGATHISEIVENSEGILPNGKISKASKPQTKDFIKRVITTYSTNVKTWNNYIKKYGGKPFNNALELFTGDLNLVTDYSLFYEFDKDSSYKTIGPILIDNVGFSKCSQINQDNKTVLLSFGTSFKRDWVESFLKTLPRHYHYLLTSCGEAINIPGSYIEIVDFIDFKTIDKEIYFAIIHGGQGTVYAMAAQGIPFIGIPFFNEQFWNIKKFSKEKCAYLVKKPDVREIRKAISCLERDYDIYKSYMIRLSQGIKEEAEASLQKAEAEIESFIRKRQS

SEQ ID NO: 1263 - protein, 576 aa, Streptococcus agalactiae
TTGAATCCTTTATCAGAAAAAGACAAAGTTAACTATATTATGATTTATAAAAATAGGCAGTCTACATTGGAGAATAATTTATCTGGCGATCGGTTGATGAGATATCAACAAGCAAATAGACAGGTAAGCAAAGATAAACTGTTAACAGGGAGTTATTTTGTGTACCAATGCTTAAAAAAGTTAGGTTTTACCAATAAGATTTGTCAGGAATCTTTTTCTAGTGTTAGTAGTTATTTAATTGGTTTGCCAAAGGGGAAAATTAGTTACTCTAATTCTGGTGACTATCATATTCTAACCTATGCTCCCAGTGGTTCAACTGGGGTTGATATTGAGAAATACAAAGATAGATCAGAACAAACCTACCAAAACTACCTAGGAGAATCAGTTAGTAGTGATATGGATTCTAAATTATTATTTTATAAGGCATGGTTACAAAAAGAAATTTCCTATAAATGTGGGAAATCTATAGATATTACCTATCAAACAATGATAGATGGCTATATTTATGGTTATGCTTTTGATAATACTTTTAAAGTAGAAGCGGTTTACTTAAAAGAATTATTACCAGATAACTAA

SEQ ID NO: 1264 - protein, 191 aa, Streptococcus agalactiae
MNPLSEKDKVNYIMIYKNRQSTLENNLSGDRLMRYQQANRQVSKDKLLTGSYFVYQCLKKLGFTNKICQESFSSVSSYLIGLPKGKISYSNSGDYHILTYAPSGSTGVDIEKYKDRSEQTYQNYLGESVSSDMDSKLLFYKAWLQKEISYKCGKSIDITYQTMIDGYIYGYAFDNTFKVEAVYLKELLPDN

SEQ ID NO: 1265 - protein, 342 aa, Streptococcus agalactiae
ATGAGTGAATTCCTTTCAGCCAAACCTATTGGTCATAATGATTCATCTAATACTATTTTAAGAATTATAGAGAATACGAAATATATTCATCACTATGATGGAAAAGTTGTTGTCGAAATTCCTCCTCAAAAAGAGCCTATCAAAGTCTTTTTTATGGATTCACGTCTTCATTATTTAGAATTTTCAGACATATGTCGGTATGTAACTGTTGTTTTGAAAAATAGTACCGTTGATAATATAACCAATTTAGGGCTAGATAATCATATTGTTTATGACAATGGTGATGATATGGTTGATCCGTTGCCGAGTATTCAGCATGGATTATTTCTTAATGATGATTAA

SEQ ID NO: 1266 - protein, 113 aa, Streptococcus agalactiae
MSEFLSAKPIGHNDSSNTILRIIENTKYIHHYDGKVVVEIPPQKEPIKVFFMDSRLHYLEFSDICRYVTVVLKNSTVDNITNLGLDNHIVYDNGDDMVDPLPSIQHGLFLNDD

SEQ ID NO: 1267 - protein, 516 aa, Streptococcus agalactiae
ATGACATTTTATAAAAAGACGGACAAATTTGGATTTAGGAAAAGTAAAGTGTGCCGCAGCCTATGCGGTGCTTTATTGGGTACAGTAGCAGTTGTTAGTCTAGCTACAGCAAGTACAGAGATTCACGCTGATGAAGCAACAACCTCACCTACCACTGTAACGAAAGTACCTCAGCCAGTTCAAGCAGACACAACAGCTCTAAATACCTCTAAGACTCACAGTACACAAGCAACTACAACTCCTGTTGAAGCTAAGGAGAATAAGGTTGTCAAAAGTGAAACTGTTCAATCTGAGAGCCGAGTAATGCCTAGAGATAAGGTAGTAGAAAGGCCAGAAACAGTAAAAGCTAGTGTTAACTCAGACGTTAGCCAACCTATTACAACCACACCCCCAACAATTAATGAAAAAACAGTTGAGATTCCTAACTTAGCTCAAGATACTAAGAAGGTAGCTCCAAAAGTAACTGTTACACCAGAAGTTGTTAATCAGCCAAAGCAGTTGCCTAAATACGAGTAA

SEQ ID NO: 1268 - protein, 171 aa, Streptococcus agalactiae
MTFYKKTDKFGFRKSKVCRSLCGALLGTVAVVSLATASTEIHADEATTSPTTVTKVPQPVQADTTALNTSKTHSTQATTTPVEAKENKVVKSETVQSESRVMPRDKVVERPETVKASVNSDVSQPITTTPPTINEKTVEIPNLAQDTKKVAPKVTVTPEVVNQPKQLPKYE

SEQ ID NO: 1269 - protein, 2613 aa, Streptococcus agalactiae
GTGCCAAAGCCTCAAAAAGTAAGAGTAATTGTTGAATTTAATAAGGAATCTATCTTAGATTATGCGACAGAACAGAAAAAAACAGTTGCACAGTTAAATCAAGCTGATGTTGAGAAAAAATTACAAAGCATCAAGCAAGAGCAAGATAAAGTTCTTAAGAATATTGAAAAAAGTGTTCACTTTGATTCAAGCAAAGTGAAGCGTTACGATGCTATTATTAATGGTGTCGCACTTGATATTCAAGCTCAAGAAATTGAAAAATTAAAAACGATTGCTGATGTTAGAAGGGTCTATGTCTCACAAGAATATGTTCAGACAAAACCTTTACTATCTTCCTCAGGGCAACTTATTGGTTTGCCAGAAGTTTGGAACAACTCCCAGTATAAAGGTGAGGGAACTGTTGTTGCAGTTATTGATTCAGGGGTTGATTTCAAACACCAAGCACTAAAAATCAAAGAACCAAATCGTGCTAAGTATAATAAAACTAGTATTGAAAAACTGATTCATGAAAAGAATCTCAAAGGAAAATTCTATTCCGAAAAAGTACCTTATGGTTATAACTATTATGACTATAATGATAACCTCAAGGATAGCTACGGTGTAATGCATGGTATGCATGTAACAGGTATCGTAGGAGCTAATGATGATAATCAAAAATTGTATGGTGTTGCACCAAATGCTCAAATTTTAGCGATGAAGGTATTTTCAGATGACCAACAAAATCCCACAACCTTCACAGATGTGTGGCTAAAAGCTCTAGACGATGCTATTTTACTAAAAGCTGATGTTGTTAATATGAGTCTTGGAACACCTGCTGGATTTGTACATGAGGGGAAAGACTATCCTGAACTTGAAGTTATTGCAAGAGCGTGTAAGGCAGGAATCGTCATTGCAGTAGCAGCAGGTAATGAAGGAAATATCACTGACGGTAATACTTATGGTGTTAAGCCGCTAGCAGAAAATTATGATACAGCCTTGATTGCCAACCCAGCCCTCGATGATAATACCTTGGCTGTTGCCTCTATGGAGAACCTTAAAAAGCATGCTCATGTTTTGAAATTTAAAGATAAAAAATCTGGAACAGAAGTTACAGAAGTCATTAATCTTCATGTTGCCCCAAACGCTTCAAAAACTATTATTGGATTGGCTGTAGATTTGGGAGCAGGAGCTCCTTCGGAATTGTCAAAACATTTTGATTTAAGTGGTAAAATCGCCATGCTTGAAATTCCAGAAGATAATAAATCTAATGGATTTTTAGAAAAAGTACAGGCGATTACTAAGTTAAATCCAGCTGCTATCTTGCTTTACAATAATGCGAAGGTTAAAGATGATTTAGGCAGTCAATTATTAGTTGAATCAGAAGCAGCTAAATTTAATATTGCTCGCATTACCAGAAGCACGTATAACAATATCAAAAATAATAGCAATAAAATTATTACTATTTTAACAGAGCGTCAAGCTATTGATAATAGTTTAGCAGGACAATTATCTTCTTATTCTTCTTGGGGACCTACACCAGACTTACGTCTAAAACCTGAGATTACAGCTCCAGGTGGTCATATTTTCTCAACTGTGGAGGATAATCAATATGCTGATAAATCAGGAACATCAATGGCTGCACCTCAGGTAGCTGGGGCAGCTGCAGTTTTAAAACAATACATTACAGATAAAAAAATTCCTGTTGATAATGCTGCTGATTTTATTAAATTACTCTTGATGAACACTGCACAGCCAATTATCAATAAACAATCAAAAGATGGCAAAACACCTTACTTTGTGCGCCAACAAGGTAGCGGAGCAATGAATCTTGCCAAAGCTCTTGTTACGACAGTCGTTGCAACTGTAACAGGGACTAACGATAATAATGCAGATGGTAAGTTGGAGTTACGTGAATTAAAAGAGAAAAAATTTAAAGCACGCATTCTACTTCGTAACTTTGGAAAAACTAATAAAACGTATATCATCTCATCAGAAGCGATTGCGGACCCAGTTGATGAAAAAGGATTTCGTACGCAAAATTCAGAACACCTAGTATCAAAAAAAGCTGATGCAGTTACAAGGAAAGTTACTGTAGAAGCAGGTAAGACATTAGCTGTTGACCTTGATGTGGATTATTCTGATGCAGAGGCTTTAACTCGCAATAATTTCTTGGAAGGTTATCTTAACTTAAAAGATACTGAAGGTGTAGCCGATTTACACTTACCATTTTTAGGTTTTTACGGTTCATGGACAGAGCAAAAAGCTATTGATGCTTTTGAAGGCATTTCTGAAATTGGTAACGGTGACAAAAAACGTCGCGTTCAATTCTATGTTAATAAAGAAACCAACAAGACCTCATCAACCTTTACAACTAACGGCATGTTGAGTCTTCCAATCTATAACAATACAGTATTTTTCTCTCCTAATAGTCCTTTCTATGACAAAGCAGGAGTTCGTATTGCAGCTTTGCGTAATATGGAGTATGTTCAATATTCTATTATAGATCCAGATACCAATAAAGAAGTTCGTGTACTTGGTAGATCACACGACGTTAGAAAACTTTATCGCCTAGATTATCGTAATAGTTTTGCCATGATGCCAGATTCTATTTGGGATGGTAAGATTAAAGATTAA

SEQ ID NO: 1270 - protein, 870 aa, Streptococcus agalactiae
MPKPQKVRVIVEFNKESILDYATEQKKTVAQLNQADVEKKLQSIKQEQDKVLKNIEKSVHFDSSKVKRYDAIINGVALDIQAQEIEKLKTIADVRRVYVSQEYVQTKPLLSSSGQLIGLPEVWNNSQYKGEGTVVAVIDSGVDFKHQALKIKEPNRAKYNKTSIEKLIHEKNLKGKFYSEKVPYGYNYYDYNDNLKDSYGVMHGMHVTGIVGANDDNQKLYGVAPNAQILAMKVFSDDQQNPTTFTDVWLKALDDAILLKADVVNMSLGTPAGFVHEGKDYPELEVIARACKAGIVIAVAAGNEGNITDGNTYGVKPLAENYDTALIANPALDDNTLAVASMENLKKHAHVLKFKDKKSGTEVTEVINLHVAPNASKTIIGLAVDLGAGAPSELSKHFDLSGKIAMLEIPEDNKSNGFLEKVQAITKLNPAAILLYNNAKVKDDLGSQLLVESEAAKFNIARITRSTYNNIKNNSNKIITILTERQAIDNSLAGQLSSYSSWGPTPDLRLKPEITAPGGHIFSTVEDNQYADKSGTSMAAPQVAGAAAVLKQYITDKKIPVDNAADFIKLLLMNTAQPIINKQSKDGKTPYFVRQQGSGAMNLAKALVTTVVATVTGTNDNNADGKLELRELKEKKFKARILLRNFGKTNKTYIISSEAIADPVDEKGFRTQNSEHLVSKKADAVTRKVTVEAGKTLAVDLDVDYSDAEALTRNNFLEGYLNLKDTEGVADLHLPFLGFYGSWTEQKAIDAFEGISEIGNGDKKRRVQFYVNKETNKTSSTFTTNGMLSLPIYNNTVFFSPNSPFYDKAGVRIAALRNMEYVQYSIIDPDTNKEVRVLGRSHDVRKLYRLDYRNSFAMMPDSIWDGKIKD

SEQ ID NO: 1271 - protein, 3228 aa, Streptococcus agalactiae
TTGAATAATAAAGGTGTCGGTGGCGATGGTGTCCAAATTTATCAATACTATATCAAAATGGACAACAATAAACCTTACTTAAGTCCCAAAGATAAGACTACTGTAGAGAAGTTAGAAGATCGCTGGAAAAAAATTACTTTCAAAGTTCAGGATACTGGCATTGGTTTGAAAGACGTTTATCTTCAATCTGTTAAGTATGTTGGTGGTGGCAATAATAATTTAGACCTTATCACACCTCCAGGATTTAAAAAAGAAGATAAAAAAGTTGAAAAACCAAAATTAGACCGTCCACCAGGAATTGATTTACCAGCACCAACTTCAATGAGAAGTTTTGATTATTCAACCCCACCGGGAACTAAGCCAAGCAAACCCAAAGATAGTTTATCAACTCCTCCAGGTTTCCCAGATTTAAACACGCCGCCGGATGAAGCACCAAAGGATAGTAAAAAAGACGCTATTGAAGATAAATCAGGAGCAATTAAATATGCTAAGTCTCTTCAACTTAGCTTTGTTGATGACCCTATTTTAGCTAGCAAAGTAAATGGCAAAATATTACAAGTCGAATCTGATGGCAAATTAGTCATTCCTAGAAATGCTTTGTCAGCTAATCAATTTGATGACACTAGTCTTAAAATTTATCGTAATAATAATCGCAATAAAGAAATTACTATCACAACAGATTATTTTGCAGATACAAAATATGTCAATATCACAGCGGTTGACTATTTGAGCAATACTACTTTTGAGCAATTAGCTACTGGTGAAACAGTAGATTACCATGCCATTGTATTTTCAAGCTTTGCTGCTATTAAAGACAAGGGTGGTAAGATTTATGTTAACGATAAATTGCAAGAAACTTCTCGTATAGCGCTTAAAGATAAATCTGTTAAGATTGGTATTGAATTACCAAATGATGTCAGACATATTGATAGTTTATCTGTTCGTCGTTTGAATGAGGTTAAAACTGTTGATAATATCTTGAAAAATGATGAACAAGACATTAATCTCAGCAAAACTTACCAATTAAAATACAACCCGACAAATCGTCGTCTAGAGTTTACTATTAATAACATTAACTCAAGTTCAGAAATCATGACCACTTTCAAAGATGGAAAGATGCCAGAATTGGTTGAACAAAAAGATGTTTCTTTGGATATAAACGATATGGACATGAGTAAGTTTAAAACTATTCGACTTGGACGAAAGGATTCTGAATTTAAGGGACAACTTATTGCAAAAACTGGAACAGTTGAATTAGATATGTTTTTCAAACAATCTCAAGACCCAGCTTCAATTATTAAAAAAATATACCTTATCCAAAATGGTGTTCCAAATGAATTGAAAAAATTTGACTCTAGTTTTGGTTTAACTGAAAGTCAGATAGATGGATACTATATTTATAAAGATGCAATTAACCTTAAATTTAAATTAACCAGTGGTGCAAGTCTTAAAGTTGTTTATAAAGGGCAAGAAGATCCATATAGTCATCAGAAAGAAGATATGACTAAAAAAGGTGAACAGCTCAGTCATTCAACTCAAGCCAATGAAAATACAGCAAAAGTAACCTTTGCTAATATTGACTGGTCACATTATAGTAAGGTTACTGTGAATGGAAAAGAAGTTGTTAAAGGTAGTGAGTTACCTTTAACTAAAGGATGGACAACATTTGTATTACATAAAACAGAAAATTCATTAAATGTTAAAAGTTTGATTATGGAGACGGGTAGTGTAAGTAAGAAAGTTCAACAACTTCCTTTAAGTCCTAGATTATCTAAAAATAAGCATATGAGGGATATGCTACTTACTATGCAAAAAGATTCAGCGTATTACGAAACAAGTGACAGTCTAGTCCTTCGAATTAATCTCACTGCAGATACTAAACTTAATTTTAATGCTGTTAAAGGAGCGAGTGCTCTTACTGAAAATATGATGATGAGACAGTTTGCAGTTGCTGGACCACAAGATGATCCTGTTAGTGAACATAAATACCCATCAGTATTTCTCTTAACTCCTGCCTTATTGGAAACTGCTAGTGAGGCAACTCTAAATGGTAAGGAAATCACAGCATCTGGTATTATCGGTCACATCAAGGATGGTGATAAAAGCAAGCATGTTGAAGTCAAAATGGTGAATGAAAATGGAGACATGCTAGGAACCCCTGTTATTATTCAAGGTAAAGACTTGACTAATCGAACAAAACCATTAATGAGTGGACGTAGAGTACTTTATGCCGGTAAACAATATGAGTTCCGGGCTAAATTACCACTTAGTCGTTTTAACACTTGGATTAGGGTTGAAGTGGTAACAGAAGCAGGAGAGAAAGCAAGTATTGTTCGTCGCATGTTCTTTGACCAATCAGTTCCAGAGCTTAACACAGCAGTTGCTAAACGTGATTTGACTTCTGATACTGCTCTTATCCACATCGTTGCCAAAGATGACTCTCTAAAACTAAAATTATATCAAGATGATTCATTACTTGAATCTGTTGATAAAACCGGTCTTTATAGTTTTAGAAATGGTGTAGAAATCACTAAAGATATGACAGTACCACTAGAATTTGGAGATAATATTATTAAGTTATCTGCTGTTGACTTATCAAATTATCGTCGTAATGAGACCCTTCATATCTATAGAAACCGTTTTGATGTTAAAGCAAGCCAAATGACAGCTGACAAAGGAGCTAAAGTAACTGTGGATATGTTGATGAAGCACTTAGTTGTTCCAGAAATGGCAGGAGCTTATACATTAACAATCGACGAAGCTCCAAACACAAATGAATCAGGAATGTTAACAAACGCTAAAGTATCGATTCATTATGTAAATGGTGGTGTTGATAAAGTTGATGTTCCGATTAAAGTAGTTGACTTAGAAGCTATTCGTAAAGCTGAAGAAGCACGTAAAGCTGAAGAAGCACGTAAAGCTGAAGAGGGACATAAAACCCAAGAAGCACCTATAGTTGAAGAAGGCTACAAGGTTAATAACGTTCATCAAACTGATACTACAGTTAAAGCGTCTGATTTACCAAAGACTAAGACAGTTTCCGCAGTTCATATGGCTAGAACAGACAATAAACAGATAACTTCACATCAGACACATGTTGAAAAACAAATTAAAAATACATTGCCATCCACTGGTGACAGCAAACGTGGTTATTATATCACTGGAATGGCTATCGTTATGCTGAGTGTATTATTTAGTTTAGCTAAAAAGTTTAAAAGCAAATATTAA

SEQ ID NO: 1272 - protein, 1075 aa, Streptococcus agalactiae
MNNKGVGGDGVQIYQYYIKMDNNKPYLSPKDKTTVEKLEDRWKKITFKVQDTGIGLKDVYLQSVKYVGGGNNNLDLITPPGFKKEDKKVEKPKLDRPPGIDLPAPTSMRSFDYSTPPGTKPSKPKDSLSTPPGFPDLNTPPDEAPKDSKKDAIEDKSGAIKYAKSLQLSFVDDPILASKVNGKILQVESDGKLVIPRNALSANQFDDTSLKIYRNNNRNKEITITTDYFADTKYVNITAVDYLSNTTFEQLATGETVDYHAIVFSSFAAIKDKGGKIYVNDKLQETSRIALKDKSVKIGIELPNDVRHIDSLSVRRLNEVKTVDNILKNDEQDINLSKTYQLKYNPTNRRLEFTINNINSSSEIMTTFKDGKMPELVEQKDVSLDINDMDMSKFKTIRLGRKDSEFKGQLIAKTGTVELDMFFKQSQDPASIIKKIYLIQNGVPNELKKFDSSFGLTESQIDGYYIYKDAINLKFKLTSGASLKVVYKGQEDPYSHQKEDMTKKGEQLSHSTQANENTAKVTFANIDWSHYSKVTVNGKEVVKGSELPLTKGWTTFVLHKTENSLNVKSLIMETGSVSKKVQQLPLSPRLSKNKHMRDMLLTMQKDSAYYETSDSLVLRINLTADTKLNFNAVKGASALTENMMMRQFAVAGPQDDPVSEHKYPSVFLLTPALLETASEATLNGKEITASGIIGHIKDGDKSKHVEVKMVNENGDMLGTPVIIQGKDLTNRTKPLMSGRRVLYAGKQYEFRAKLPLSRFNTWIRVEVVTEAGEKASIVRRMFFDQSVPELNTAVAKRDLTSDTALIHIVAKDDSLKLKLYQDDSLLESVDKTGLYSFRNGVEITKDMTVPLEFGDNIIKLSAVDLSNYRRNETLHIYRNRFDVKASQMTADKGAKVTVDMLMKHLVVPEMAGAYTLTIDEAPNTNESGMLTNAKVSIHYVNGGVDKVDVPIKVVDLEAIRKAEEARKAEEARKAEEGHKTQEAPIVEEGYKVNNVHQTDTTVKASDLPKTKTVSAVHMARTDNKQITSHQTHVEKQIKNTLPSTGDSKRGYYITGMAIVMLSVLFSLAKKFKSKY

SEQ ID NO: 1273 - protein, 1086 aa, Streptococcus agalactiae
ATGCAAAGAAAATCCTATTTAAAATCCATGAGTGTTCTTACTTTAACAGCTTGTCTTATATCAGGATATGTGGTTAAAGATATTGCTATGTTACATGCAGTATCTGCCAGTGAGAAGAAAGCAAATAATGTCAGTCCGAGAGAAAATCTCTACAGGGCTGTCAATGATAATTGGCTAGCCAATACAAAACTCAAACAAGGGCAGACTAGTGTTAATAGTTTTTCAGAAATTGAGGATAAATTAAAGCAACTGTTAGTGTCTGATATGGCTAAAATGGCCTCAGGAAAGATTGAAACAACCAATGATGAACAGAAAAAAATGGTTGCATACTATAAACAAGGTATGGACTTTAAAACAAGAGATAAAAATGGTCTCAAACCTCTAAAACCAGTTTTACAAAAACTTGAAGCAGTCTCTTCAATGAAAGACTTTCAAAGTTTGGCCCATGATTTTGTGATGAGTGGTTTTGTTTTACCATTTGGTTTGACTGTGGAAACCAATGCTCGAGATAATAGCCAAAAGCAATTGGTGCTTCGTCAAGCACCCGCATTACTTGAATCACCTGACCAATATAAGAAGGGCAATAAAGAAGGTGAGGCTAAATTATCAGCTTACCGTACTTCAGCAATGGCTTTGCTTAAACAAGCTGGAAAAAGTAACATTGAAGATAGAAAACTAGTTAAACAAGCTATAGCATTTGATAGACTCTTATCAGAAAAAACGCAAGTTGATCAAAGTAAAATCACAGCTGAAAGTGAGACAGCTGCGGGGCGATATAACCCTGAAAGTATGGAAACGGTTCACAATTACGCCAAGGAATTTGACTTTAAAGAATTGATTGAAAAACTAGTTGGGCCAACGAATAAGGCAGTCAATGTAGAAGATAAAACTTATTTTAAACAGGTTAATGATGTTATAAATAGTAAACAATTAGCCAATATGAAAGCATGGATGATGATTTCTATGCTAGTTGATCAATCAGATTTTCTAGGAGAACAAAATCGTCAAGCAGCGAGTGCTTTTAAGAATGTTGCGTCTGGTTTGACTCAGATTGAATCGAAAGAAAAAATGCTTACACCCAATTAG

SEQ ID NO: 1274 - protein, 361 aa, Streptococcus agalactiae
MQRKSYLKSMSVLTLTACLISGYVVKDIAMLHAVSASEKKANNVSPRENLYRAVNDNWLANTKLKQGQTSVNSFSEIEDKLKQLLVSDMAKMASGKIETTNDEQKKMVAYYKQGMDFKTRDKNGLKPLKPVLQKLEAVSSMKDFQSLAHDFVMSGFVLPFGLTVETNARDNSQKQLVLRQAPALLESPDQYKKGNKEGEAKLSAYRTSAMALLKQAGKSNIEDRKLVKQAIAFDRLLSEKTQVDQSKITAESETAAGRYNPESMETVHNYAKEFDFKELIEKLVGPTNKAVNVEDKTYFKQVNDVINSKQLANMKAWMMISMLVDQSDFLGEQNRQAASAFKNVASGLTQIESKEKMLTPN

SEQ ID NO: 1275 - protein, 819 aa, Streptococcus agalactiae
TTGGGTGATTATTATGGTAAGAAATATTTTGGTGAGGCAGCTAAAAAAGACGTCGAACATATGGCTAAGAAAATCATTAATGTCTATAAAACACGGTTAAAAAACAACACTTGGTTATCAGAAAATACAAAAGCAATGGCCATTAAGAAACTTGATAACATGAGATTAATGATTGGCTATCCAGAAGATTATCCTGATCTTTATCGTCAGTACCAATTTGATAGTAAAGCAAGCTTCTTTGAAAACAATGATAACTACAGAAAATTATCGAACAAGAAAACATTTGAAGAATTTAACCAGTCTAATCAACGTGAACATTGGCAAATGAGTGCCAATGCTGTAAATGCTTATAATGATCCTAATACCAATTCCATAGTCTTTCCAGCAGCGATTTTTCAATCACCACTCTACGATAAAACTAAAACAGTTAGTCAAAATTATGGAGCTATCGGAGCAATTATTGGTCATGAAATTTCACACTCATTTGATATTAATGGTATGAAATATGACGAGAAAGGGAATCTTCACGATTGGTGGACTAAAGAAGATTTAAAACATTATAAGAAAAAAACACAAGCTATGATTGACCAATGGGATGGCCTTAAAGCAGATGGCGGTAAAGTTGATGGTAAATTAACTTTAGCAGAAAATATTGCAGATAATGGTGGTGTTATGGCATCTCTAGAAGCTCTTAAGACTGAAAAAATCCAAACTATAAAGAATTTTTTGAATCATGGGCAAGTATTTGGCGTCAAAAAGCAACCAAAGAACAAAGTAAGTCCTCAATTCAGTCAGATGTTCATGCACCATATGAATTGA

SEQ ID NO: 1276 - protein, 272 aa, Streptococcus agalactiae
MGDYYGKKYFGEAAKKDVEHMAKKIINVYKTRLKNNTWLSENTKAMAIKKLDNMRLMIGYPEDYPDLYRQYQFDSKASFFENNDNYRKLSNKKTFEEFNQSNQREHWQMSANAVNAYNDPNTNSIVFPAAIFQSPLYDKTKTVSQNYGAIGAIIGHEISHSFDINGMKYDEKGNLHDWWTKEDLKHYKKKTQAMIDQWDGLKADGGKVDGKLTLAENIADNGGVMASLEALKTEKIQTIKNFLNHGQVFGVKKQPKNKVSPQFSQMFMHHMN

SEQ ID NO: 1277 - protein, 111 aa, Streptococcus agalactiae
TTGAGAGCTAACATCCCAGTACGTAATTTCCAAGAATTTTATGATGCCTTTGGTGTTAAAAAAGGCGATTCAATGTATCTAAAACCAGAAAAACGTTTGACACTTTGGTAA

SEQ ID NO: 1278 - protein, 36 aa, Streptococcus agalactiae
MRANIPVRNFQEFYDAFGVKKGDSMYLKPEKRLTLW

SEQ ID NO: 1279 - protein, 1032 aa, Streptococcus agalactiae
ATGAAGAATATAACAAAGCTATCAACTGTTGCTTTAAGCCTACTACTTTGTACGGCGTGTGCTGCATCAAACACGTCTACATCTAAAACACAGTCTCATCATCCTAAACAAACTAAACTCACAGATAAGCAAAAAGAAGAACCCAAAAACAAAGAAGCTGCTGATCAAGAGATGCATCCCCAAGGCGCTGTTGATTTGACAAAATATAAGGCAAAACCGGTCAAAGATTATGGTAAAAAAATCGATGTTGGTGATGGCAAGAAAATGAACATTTATGAAACTGGTCAGGGAAAAATTCCAATTGTTTTTATTCCTGGTCAAGCTGAGATTTCGCCACGCTATGCTTATAAGAATTTAATTGAGCGGTTAAGTAAAAAATATAAAATTTATACAGTAGAACCATTAGGCTATGGTCTCAGTGATATTCCTACTAAACCACGTACGCTAGAAAACATTACAAAAGAAATTCACACAGGCCTAAATAAAATTGGAGTTAAAAATTTCTACCTTGCAGCTCACTCACTTGGCGGTATGTATTCTTTAAATTATGCTAAAAATTATCCAGAAGAAGTCAGAGGATTTATTGGTATGGATACCAGTACACCTTGGATGGAAGGGGAACAAAAAACAAAGTATGACCCTGAAAGTGCTAAATGGGCAATGAAATTACCAGATGTTGATGATAAGACTAACGAACAGTATCTGTCAATTGCGAAAAAAATTAACGGCAATAAGTCTCAACGAGATGAAGATGAGCGCTTAGGTGATAATCTTGGTAAATTGAAGAATGTAAAATTCCCTAAAGGGATGCCAACTAAGTATTTTCTTGCTGATCAATCTGTGGAGGGAATCAAGCTACGTCAAGCAGATTTTAAAGGTTTGAAAAATTGGGATCAGCAGCATATTGATTTATCTGAAGATCCAAAAGATGCTTCCGTTGAAATTCTTAAAGGTAGTCACAATATTTTCCAAACACAATATGAACATATGGCTAAAGCTATTGATGGATTTATCCAATCCCATCAAAAGTAA

SEQ ID NO: 1280 - protein, 343 aa, Streptococcus agalactiae
MKNITKLSTVALSLLLCTACAASNTSTSKTQSHHPKQTKLTDKQKEEPKNKEAADQEMHPQGAVDLTKYKAKPVKDYGKKIDVGDGKKMNIYETGQGKIPIVFIPGQAEISPRYAYKNLIERLSKKYKIYTVEPLGYGLSDIPTKPRTLENITKEIHTGLNKIGVKNFYLAAHSLGGMYSLNYAKNYPEEVRGFIGMDTSTPWMEGEQKTKYDPESAKWAMKLPDVDDKTNEQYLSIAKKINGNKSQRDEDERLGDNLGKLKNVKFPKGMPTKYFLADQSVEGIKLRQADFKGLKNWDQQHIDLSEDPKDASVEILKGSHNIFQTQYEHMAKAIDGFIQSHQK

SEQ ID NO: 1281 - protein, 1020 aa, Streptococcus agalactiae
ATGAATAAAATAACGAAATTATCAACCGTTGCCCTCGCTTTGATGCTTTGCGTTGGATGTTCTGCCAATAAAGATAATCAAAAAACTAAAACTGAGCAGCCTAAGCAAGAAAAGTCAATCGCTAAGCAAAAACAAGAGAGAGAAGCAGAAAAAGCTATGATTGCTAAAGGTGCTATTGACCTAACTAAATATAAAGCGAAACCAATTGAAGATTACGGACAAAAAATTGATGTCGGTGACGGTAAAAAAATGAACATATATACAATGGGTCAAGGGAAAATTCCGCTAGTAGTCTTCCCTGGTCAAGCTGAAATTTCACCACGTTATGCTTACAAAAACTTGCTTGATAGATTAGGGAAAAAATATAAAATTTATACGGTTGAACCGCTCGGTTATGGGCTTAGTGATATGACAGATAAGCCACGTACGATTGAAAATATTACCAAAGAGATTCATACAGCTCTTGAAAAAGTCGGTGTCAAAAATTTCTATCTTATGGCTCACTCGTTAGGTGGCATATACGGTCTAAATTATGCTAAGACATATTCTAACGATGTCAAAGGTTTCATTGGCATGGATACAAGCACACCAAATATGGAAGGTGATGGCACAACTGGAGAATCTTCAGCTTCAACCTTAAAATGGGCAGAATCCATTCCAGAAGTTGATAAGAAAACCAATGAACAATACTTATCAATCGGTGCTAAAAAATCAGGTAATAAAACAGAGCGCGATAAAGATAGGCGTGTTAGTGACAATCTTCATAAAATGGAAAAAGTTAAGTTCCCTAAAGGTATGCCAGCTAAGTATTTCTTAGCTAATGAGTCAGCAGAAGATATAAAAATGCGTAAAAAAATATTCCCTAAGCTTAAAAGCTGGGAACAACAACATATTGACTTATCTGAAGATCCAAAAGACGTTTCTGTTGAGACACTAGATGCTAGCCACTTGATTTATCATACGCAATATAAACATATGGCGAAGGCTATTGACGAGTGGATTCAATCGCATGAAAAATAA

SEQ ID NO: 1282 - protein, 339 aa, Streptococcus agalactiae
MNKITKLSTVALALMLCVGCSANKDNQKTKTEQPKQEKSIAKQKQEREAEKAMIAKGAIDLTKYKAKPIEDYGQKIDVGDGKKMNIYTMGQGKIPLVVFPGQAEISPRYAYKNLLDRLGKKYKIYTVEPLGYGLSDMTDKPRTIENITKEIHTALEKVGVKNFYLMAHSLGGIYGLNYAKTYSNDVKGFIGMDTSTPNMEGDGTTGESSASTLKWAESIPEVDKKTNEQYLSIGAKKSGNKTERDKDRRVSDNLHKMEKVKFPKGMPAKYFLANESAEDIKMRKKIFPKLKSWEQQHIDLSEDPKDVSVETLDASHLIYHTQYKHMAKAIDEWIQSHEK

SEQ ID NO: 1283 - protein, 1062 aa, Streptococcus agalactiae
ATGAATAAAATAACGACATTATCAACCATCGCCCTGACTTTAATGCTTTGCGTTGGATGTTCTGCCAATAAAGATAATCAAAAAACTAAAACTGAGGATCCTAAGCAAGAAAACGTAACTGCAAATCCGAAGGAAGACAAGGCAACAGCAGCCAAGCGAATGAAGTTAACGAAAGAACTTGAAAAATATAATAAAGGCACAGAGAGCTTTATTAGTAACAAACAATATCAAAAATATATCAAAACACCTATCAAAGAATATGGTCAAAAGGTTGAAGTCAAAGGCAAGAAGATGAATGTCTATACTGTTGGAGAAGGTAAAGTACCAATTGTCTTTATTCCTGGTCAAGGGACGGTGACTGCCAAACATCAGTACCATAATTTGATTAGTAATTTAAGTAAAACTCATAAGGTTGTGGTAGTTGAGCCATTTGGTTCAGGTTTAAGTGATGTCATTGACCAACCACGAAATCTAGCTAATATTACCTCAGATATCCACGAAGCTTTACAAAAAGTTGGTATTACCGGAAAATATGTAATTGCCTCTCATTCAATTGGTGGTGTTTATGCCCTTAAATACATCAGTACTTATCCAAAGGAAGTGCTAGGATTAATAGGTTTAGATACATCAACGCCGGGTATGGAAGGTGGTAAGCAAGTTGATTTCGCTGCTCCAGTGTTAAAAGAATTACCTAAAATTCCTAAAGTATCCGACGATATTAATGCACAATTTTTTGCTATTGGACATAAGATACTTAATAATTCTAATATGAAAGAAGAAGCGAAGAATTCTTCTAATATGATTAACGAAAGTGCCAACTATAAGATTCCAAAGGGAATTCCTGCTATGTATTTATTAGCACGTGAAAGTGACTTAGGGCTTCAATTACGTAGTTTAGATATACCAATTAAAGGCAGTTGGCAAGAGCAACATAAGGAGTTATCAGAAGATCCAAAAGAAGTCTCTATTCATACACTAGACGGAACTCACCAAATTTATGATACTAACCTTAAAGAAGTAATTGATTATACTAACCAATTTATGAAAACATTTGAGAAATAA

SEQ ID NO: 1284 - protein, 353 aa, Streptococcus agalactiae
MNKITTLSTIALTLMLCVGCSANKDNQKTKTEDPKQENVTANPKEDKATAAKRMKLTKELEKYNKGTESFISNKQYQKYIKTPIKEYGQKVEVKGKKMNVYTVGEGKVPIVFIPGQGTVTAKHQYHNLISNLSKTHKVVVVEPFGSGLSDVIDQPRNLANITSDIHEALQKVGITGKYVIASHSIGGVYALKYISTYPKEVLGLIGLDTSTPGMEGGKQVDFAAPVLKELPKIPKVSDDINAQFFAIGHKILNNSNMKEEAKNSSNMINESANYKIPKGIPAMYLLARESDLGLQLRSLDIPIKGSWQEQHKELSEDPKEVSIHTLDGTHQIYDTNLKEVIDYTNQFMKTFEK

SEQ ID NO: 1285 - protein, 1230 aa, Streptococcus agalactiae
GTGAACCTATGGACATTAAGTTTAGCTTATTTGAAACGTCAAAAAATGAAAACAGTAACCTTGTTCTTAGTTTTTCTAACTATAGGCACATGTTTAATCAGTCTGATGAGTATTCAGCATTCTTTGGAAAAAAATATCCTAACAAAACAAGGGAAAAGCATTTATTTAACCTCCAAAGAAAAGGCTTATTGGCCTGAACAAGCATACGAAGCTTTGAAAAAAGCAAAAATGGTTGAGTCAGTAGAGGCAAGTTTAAGCATTGATGTTGGTAGCCGTTTAAAATCTGTATCACCATATAACTCTTCTAAAGAAGAGAATCAAGTTACATTAGCAGGTTATCAAAGTACAGAAGATTTACGAGCTTTTCAGACAAAAGCATTGGTCTTAAAGAAAGGAAGCCATTTAGCGGCCGATAATACAAAACAAGTACTAGTTCCATTGAAGTTAGCACAAAAGAATCATTTAAGTGTGGGTAACAAATTGAGATTAGGCAAAGAAAATGTTACTATTGCAGGAATTTATGATGCGAATAGTGCTAAGTCTAAAAATACTTTTAATCCCAATATTGATAATACATTGATTGCTCAGGCAACATTGGTTAGGAAGATTAGTAAACAAAAAGGTTATCAGACGGTTGCAGTGCGCTTAAGTGATAAACGTTTAGTGGATACAGTTATCCAAAACATCAAACAATGGCCGCTTGATTTCGGGAAATTAGATGTTCAAACAGCTAAAGAGTTTTATGGAGATTCTTATCGTAATATCGAGACATTGCATCGTCTAGTGGGACGAATCATTCTTATTGTTAGTCTCGTGGCGATGGCAATATTAGTTGTCATGCTAACATTTTGGATTAATAACCGCATTAAAGAGACGGGAATTTTACTCGCTATCGGAAAAACTAAGTTTGAAATCATAGGTCATTATCTGATAGAAGTACTGTTAGTAGCAGGTGCTGCCTTCACACTATCTATTATTGGTGGTGTCTTTCTTGGAAAAACATTTGCAGCTGGCCTTTTATCACAAGTTAATGGTGGTGTGAGTTCACAAATTGTACAAAATAGTAGTCTAATTATTGATAGAATTGATAACCTCGCTGTTTCTGTTGGAGTAATGGATGTCTTTAGACTCTATGCTCAGGGTGCTTTAATTTGCTTATTTGCAGTTGTATTATCTAGTTATTCTATTCTTAAACTACAACCAAAGCAAATATTGTCACGAATGTCATAG

SEQ ID NO: 1286 - protein, 409 aa, Streptococcus agalactiae
MNLWTLSLAYLKRQKMKTVTLFLVFLTIGTCLISLMSIQHSLEKNILTKQGKSIYLTSKEKAYWPEQAYEALKKAKMVESVEASLSIDVGSRLKSVSPYNSSKEENQVTLAGYQSTEDLRAFQTKALVLKKGSHLAADNTKQVLVPLKLAQKNHLSVGNKLRLGKENVTIAGIYDANSAKSKNTFNPNIDNTLIAQATLVRKISKQKGYQTVAVRLSDKRLVDTVIQNIKQWPLDFGKLDVQTAKEFYGDSYRNIETLHRLVGRIILIVSLVAMAILVVMLTFWINNRIKETGILLAIGKTKFEIIGHYLIEVLLVAGAAFTLSIIGGVFLGKTFAAGLLSQVNGGVSSQIVQNSSLIIDRIDNLAVSVGVMDVFRLYAQGALICLFAVVLSSYSILKLQPKQILSRMS

SEQ ID NO: 1287 - protein, 444 aa, Streptococcus agalactiae
ATGAATTTATTTAAACGTTCCTTTTTATATGTTAGCCGTAAAAAGCGTAAGAGTATCACTTTATTCGTATGTTTATGGCTAGTTGCTTCTACATTAATTAGCGGTATTGCGGTAAAAAATGCTGGTCTTACTGCTAAAAAGACATTTTCAAGGCAAACTGGATCAATTTTGCATATTTCATCGGATAGTACTGACCTTGTTGGTGATGGTTACGGATCTGGAGAAATCCCTGAAAAAGCAATAGTTAACATAGCAAGTAATCCAAATGTTAAGCGCGTTAATAATAATTTGATGGCTTATGCTGGACTAACCTCGGAAAAAATGGTTACACGACCAAATGATAAAGAACAATATAAAGAACAAGTTTTACAAGTTCATGGTAATAGTTACTCCGATACAGATCCTAAATACACAGCGGGGATGATTTCTCTTAAGGGAGGGTGA

SEQ ID NO: 1288 - protein, 147 aa, Streptococcus agalactiae
MNLFKRSFLYVSRKKRKSITLFVCLWLVASTLISGIAVKNAGLTAKKTFSRQTGSILHISSDSTDLVGDGYGSGEIPEKAIVNIASNPNVKRVNNNLMAYAGLTSEKMVTRPNDKEQYKEQVLQVHGNSYSDTDPKYTAGMISLKGG

SEQ ID NO: 1289 - protein, 267 aa, Streptococcus agalactiae
ATGTTTTCAAAAGACCCCGTTAGAAACAGTAAGGATAAAACATTAGTTGAAGCAACTATTGTTGGCATATATAAAGGTAAAACGGTACAAAAATCAAATTACCCTTATGAGATGCTAGAAAATACAGCCTTTTCAGATACGCAATTGATTAAGGATTTATACGGCTATTCTAAAGGTAAGGCCTTTTATCGCCAAACAACTGTATATCCTAAAAAGAATGCTGATATAGAAACTCTTAAAAGTTTTATCAAAAAACAATCCTATTGA

SEQ ID NO: 1290 - protein, 88 aa, Streptococcus agalactiae
MFSKDPVRNSKDKTLVEATIVGIYKGKTVQKSNYPYEMLENTAFSDTQLIKDLYGYSKGKAFYRQTTVYPKKNADIETLKSFIKKQSY

SEQ ID NO: 1291 - protein, 195 aa, Streptococcus agalactiae
TTGCTAACAAGTTATGCAAAAAGTATAGATGTCTTGAATCAATTAATTACTTCTCTACAAGGCGGCATGTTAGTAGTATCTATTATCCTAGTGATGATGGCTCTGCTATTCTGGATTGGTGGTAGAACCCATGAGACAGGTATTTTATTAGCTATTGGTAAGTCTAAAGCAATTATCATTGTCAGTACGCAGTAG

SEQ ID NO: 1292 - protein, 64 aa, Streptococcus agalactiae
MLTSYAKSIDVLNQLITSLQGGMLVVSIILVMMALLFWIGGRTHETGILLAIGKSKAIIIVSTQ

SEQ ID NO: 1293 - protein, 321 aa, Streptococcus agalactiae
ATGATTGCTATTCCAGCCTTTGCTTTATCAGTACTTATCAGTCAATTTATTGGTCAAAAATTAGCAGACTCCTTAGTGTATCAGGCCTCTAGAACTGTCAGAGCAGACTTTATGAAAGGGTTTGGGAATATGCAGCTTGGGGCTGATAGTGATACAGATATGTTTATGCAAACGATTAAGACGTTAAATGTACAAGTGAAGCCTGAGGAAGTCTGGTTAGTAATTCTAGTTGGTTTAGCAATCGTCTTATTTGCTATTATTACTACTAGTTTAATTATTGCTCGCTACAAACCAAGGGGAATCTTATCAAAACTGTCCTAA

SEQ ID NO: 1294 - protein, 106 aa, Streptococcus agalactiae
MIAIPAFALSVLISQFIGQKLADSLVYQASRTVRADFMKGFGNMQLGADSDTDMFMQTIKTLNVQVKPEEVWLVILVGLAIVLFAIITTSLIIARYKPRGILSKLS

SEQ ID NO: 1295 - protein, 672 aa, Streptococcus agalactiae
ATGCTCGAATTAAAAAATATTGCTTATCGTTATAAGGGGAACGACAATAAAACATTAGAAAATATCAATTATAGTTTTCAGTCAGGGGTATTTTATACTATATTAGGGAATTCTGGTTCAGGGAAAACAACCCTTCTATCCTTGATGGCAGGTCTTGATTCGCCTACTGAGGGACAAGTATTATTTAACAAAAAAGATATTAAAGAAGCAGGTTATGCTCAGCATCGCAAAAAGAATATAGCTTTGGTCTTTCAAAATTATAACCTTTTAGACTATCTAACCCCATTGGAAAATGTTCAGTTGGTAAAACCTACTGCAGATAAACAATTATTGTTGGATTTAGGTTTAAAAGAAGATATGTTAACGCGAAATATCTTGAGATTATCAGGAGGGCAACAACAACGTGTAGCTATTGCGAGAGCTTTGGTTGTAGGAACACCAGCTATTTTACTTGATGAACCTACGGGGAATTTAGATTTTGACATTGCGCGTGATATTACGATGCGTCTTAAAGATTTTGCGCATAAGGAAAAACGATGTGTTATTATGGTGACACATAGTAGAGAGATCGCTCATATGGCTGATACTGCTTTACAATTGATAGGAGATAACTTAAAAGAATTATCAAAAGAAAGTATAGCACAGTCTATATTACAACAAAGGAATTTATAA

SEQ ID NO: 1296 - protein, 223 aa, Streptococcus agalactiae
MLELKNIAYRYKGNDNKTLENINYSFQSGVFYTILGNSGSGKTTLLSLMAGLDSPTEGQVLFNKKDIKEAGYAQHRKKNIALVFQNYNLLDYLTPLENVQLVKPTADKQLLLDLGLKEDMLTRNILRLSGGQQQRVAIARALVVGTPAILLDEPTGNLDFDIARDITMRLKDFAHKEKRCVIMVTHSREIAHMADTALQLIGDNLKELSKESIAQSILQQRNL

SEQ ID NO: 1297 - protein, 470 aa, Streptococcus agalactiae
ATGNNNNNGTATAAAGCACTCTATGGAAAAGCGATTATTAACTTGCGAAATCCTATGCCTGATGAATCTGCTAAAGTAATTTTGAAAGCTGCACAAAAAGGGACTTTTTCTCTGATCAATAACGTCAAGACAATTACAAAAAATGACGAAGGATTTTCAATAGAAAAAGAAAAACAAAATCATATATCTGTCGATCGCGTCATTAACGCTACTGGTTACCAGTTAAACACTAAAAACTGGACAAAAGCCAATCCACTTCTAAATCGCTCATCAATCAAGAATTTTGTCAAATTGACGATCAAGGAGGGATTACTATTTTAACTGAAAATGCACAAGTTTTGTCTCCAAAATATGGTCCAATGCCAGGTTTATATGCGCATGGTGCACTGGTTAATGGTGTCGTTTATCAGAATAACTCTACAATTAAAATTCAACAAATGGCAGAGCGAGCCTTTTCTGATAATAAATAA

SEQ ID NO: 1298 - protein, 156 aa, Streptococcus agalactiae
  VARIANT 2, 3: Xaa = Any Amino Acid
MXXYKALYGKAIINLRNPMPDESAKVILKAAQKGTFSLINNVKTITKNDEGFSIEKEKQNHISVDRVINATGYQLNTKNWTKANPLLKSLINQEFCQIDDQGGITILTENAQVLSPKYGPMPGLYAHGALVNGVVYQNNSTIKIQQMAERAFSDNK

SEQ ID NO: 1299 - protein, 786 aa, Streptococcus agalactiae
ATGAAAAGATTACATAAACTGTTTATAACCGTAATTGCTACATTAGGTATGTTGGGGGTAATGACCTTTGGTCTTCCAACGCAGCCGCAAAACGTAACGCCGATAGTACATGCTGATGTCAATTCATCTGTTGATACGAGCCAGGAATTTCAAAATAATTTAAAAAATGCTATTGGTAACCTACCATTTCAATATGTTAATGGTATTTATGAATTAAATAATAATCAGACAAATTTAAATGCTGATGTCAATGTTAAAGCGTATGTTCAAAATACAATTGACAATCAACAAAGACTATCAACTGCTAATGCAATGCTTGATAGAACCATTCGTCAATATCAAAATCGCAGAGATACCACTCTTCCCGATGCAAATTGGAAACCATTAGGTTGGCATCAAGTAGCTACTAATGACCATTATGGACATGCAGTCGACAAGGGGCATTTAATTGCCTATGCTTTAGCTGGAAATTTCAAAGGTTGGGATGCTTCCGTGTCAAATCCTCAAAATGTTGTCACACAAACAGCTCATTCCAACCAATCAAATCAAAAAATCAATCGTGGACAAAATTATTATGAAAGCTTAGTTCGTAAGGCGGTTGACCAAAACAAACGTGTTCGTTACCGTGTAACTCCATTGTACCGTAATGATACTGATTTAGTTCCATTTGCAATGCACCTAGAAGCTAAATCACAAGATGGCACATTAGAATTTAATGTTGCTATTCCAAACACACAAGCATCATACACTATGGATTATGCAACAGGAGAAATAACACTAAATTAA

SEQ ID NO: 1300 - protein, 261 aa, Streptococcus agalactiae
MKRLHKLFITVIATLGMLGVMTFGLPTQPQNVTPIVHADVNSSVDTSQEFQNNLKNAIGNLPFQYVNGIYELNNNQTNLNADVNVKAYVQNTIDNQQRLSTANAMLDRTIRQYQNRRDTTLPDANWKPLGWHQVATNDHYGHAVDKGHLIAYALAGNFKGWDASVSNPQNVVTQTAHSNQSNQKINRGQNYYESLVRKAVDQNKRVRYRVTPLYRNDTDLVPFAMHLEAKSQDGTLEFNVAIPNTQASYTMDYATGEITLN

SEQ ID NO: 1301 - protein, 639 aa, Streptococcus agalactiae
ATGTTTTTAATCGATTTTATTTTACATATTGATACTCATATCTATGCTATGGCTAACACTGTTGGTAATTGGACCTATCTATTGCTCTTCCTCGTTATTTTCGTTGAAACTGGGGCTGTCATCTTTCCATTTTTACCAGGTGATAGTTTATTATTTGCTGCTGGAGCCCTTGCTGCAAATCCAAAAATGTCCTTCAATATTGTAACTTTTCTTATTATTTTCTTTATTGCAGCATTTATTGGTGATAGTTGCAACTTCTTGATTGGTCGTACATTTGGTTACCGTTTTATCAAACATCCTTTCTTTCGTCGTTTCATTAAAGAAAAAAATATCCGAGATGCTGAGCTTTATTTTGAGAAAAAAGGTACTGCTGCCATCATTTTAGGGCGCTATATCCCTATTATCAGAACCTTTGTTCCTTTTGTAGCAGGTATTAGTCAGCTCCCTCCAAAAGTATTTATCAAACGCGCCTTCATTGCAGCATTATCTTGGTCAGTTATTGCAACAGGTTCTGGTTTTCTCTTTGGTAATATTCCTTTTGTGAAGCAGCACTTCTCGCTTATTATCTTGGGAATTGTATTTGTTACCTTAATTCCTGTCCTTATTTCTGGTGTCAAATCATATCGGAACACTAAGTAA

SEQ ID NO: 1302 - protein, 212 aa, Streptococcus agalactiae
MFLIDFILHIDTHIYAMANTVGNWTYLLLFLVIFVETGAVIFPFLPGDSLLFAAGALAANPKMSFNIVTFLIIFFIAAFIGDSCNFLIGRTFGYRFIKHPFFRRFIKEKNIRDAELYFEKKGTAAIILGRYIPIIRTFVPFVAGISQLPPKVFIKRAFIAALSWSVIATGSGFLFGNIPFVKQHFSLIILGIVFVTLIPVLISGVKSYRNTK

SEQ ID NO: 1303 - protein, 657 aa, Streptococcus agalactiae
ATGTCCTATTTAACCTTTAAACACGTTGATTTTAAAACGGATGATAAGTTGGTTTTAAATGATATCAACTTTGCAATTGATGAAGGTGATTTTGTTTCTATTGTAGGGCCATCTGGAAGTGGTAAGAGTACTGTATTAAAATTAGCCAGTGGTTTAATGAGTCCTACTGCAGGTCATATTTTCTTTGATGGAAAAGATTTGAACCAATTAGAACCGATTGAAAGTCGAAAAATGATTTCTTACTGTTTTCAAACGCCACATTTATTTGGTAATACAGTGGAAGACAATATTAGTTTTCCTTACCACATTCGACACGAAAAAGTAGATTATAGACGCGTTGATGATTTATTTCAACGTTTTGAAATGGACCAGTCTTACCTGAAACAGGATGTCAAAAAACTATCAGGAGGAGAAAAGCAACGTATTGCTCTGATTAGGCAATTATTGTTTGAACCTAAAGTTTTACTCTTAGATGAAGTTACTTCGGCTTTAGACAATCATAATAAAGCTATTGTTGAAAAGGTTATTAAATCATTACATGACAAAGGAATAACGATTTTGTGGATTACGCATGATGAGGAACAGAGTCGTCGATTTGCCAATAAAGTCTTAAAAGTTGTCAATGGTAGTATTGAAGCAATGGAGGTTATAAAATGA

SEQ ID NO: 1304 - protein, 218 aa, Streptococcus agalactiae
MSYLTFKHVDFKTDDKLVLNDINFAIDEGDFVSIVGPSGSGKSTVLKLASGLMSPTAGHIFFDGKDLNQLEPIESRKMISYCFQTPHLFGNTVEDNISFPYHIRHEKVDYRRVDDLFQRFEMDQSYLKQDVKKLSGGEKQRIALIRQLLFEPKVLLLDEVTSALDNHNKAIVEKVIKSLHDKGITILWITHDEEQSRRFANKVLKVVNGSIEAMEVIK

SEQ ID NO: 1305 - protein, 774 aa, Streptococcus agalactiae
ATGAGCGGTGCAAATTCTATTTCTTTAATGTCATTACTAATGGCATCGTCATTAGTTTTGATTACTTTATTTTTTTCTTACTGGCAAAAGTTAAACCTAGAAAAAGAAGTGATTATTAGCGCTATCCGAGCAGTGATTCAATTATTAGCAGTGGGTTTTTTGCTAGACTATATATTTGGTTATCAAAATCCTATTTTCACAGCTCTTTTAATGCTATTCATGATTATTAATGCTTCTTATAACGCAGCTAAGCGTGGTAAAGGGATTAATAAAGGGTTTGTTATTTCATTTATAGCTATTGGGTCAGGGACTATAATCACTTTATCTGTCTTGATTTTTTCAGGAATTTTAAAATTTGTTCCGAATCAAATGATTCCTGTAGGTGGTATGATTATTAGTAATTCTATGGTAGCAATCGGTTTGTGCTATAAACAATTATTGTCCGAATTTAGAAGTAAACAAGAGGAAGTGGAGACAAAATTAGCTTTAGGAGCAGATATTTTGCCAGCTTCGATTGATATTATTCGTGATGTTATCAAAACTGGTATGGTACCTACAATTGATTCAGCTAAAACACTTGGGATTGTATCTTTGCCAGGGATGATGACAGGGTTAATTCTTGCTGGAACTTCACCTATCCAAGCGGTTAAATACCAAATGATGGTGACGTTTATGCTATTAGCAACGACTTCGATAGCTTCTTTTGTAGCTACTTATTTGGCTTATAAAATTTTCTTTAATAATCGTAAGCAATTAGTAGTAACAAAAGATTGA

SEQ ID NO: 1306 - protein, 257 aa, Streptococcus agalactiae
MSGANSISLMSLLMASSLVLITLFFSYWQKLNLEKEVIISAIRAVIQLLAVGFLLDYIFGYQNPIFTALLMLFMIINASYNAAKRGKGINKGFVISFIAIGSGTIITLSVLIFSGILKFVPNQMIPVGGMIISNSMVAIGLCYKQLLSEFRSKQEEVETKLALGADILPASIDIIRDVIKTGMVPTIDSAKTLGIVSLPGMMTGLILAGTSPIQAVKYQMMVTFMLLATTSIASFVATYLAYKIFFNNRKQLVVTKD

SEQ ID NO: 1307 - protein, 819 aa, Streptococcus agalactiae
ATGATTTTAAAAATTTGTCGTGCAGCATATAGTTTACAATGGGGAGGTGTTTACCAATTAGCTTTGCTGGATTATCCTCGAATTAAGGCGTTTGAATTGGAAAGGATAGGAGCTTTCATAGCTTACGAGAAACAATATAAAAGAAAAACTGAGATACAATGTGACGATAAACATCTCCTCGCAAAAATTGTTCATTTTTTAAAATACAATAGTTTTACTTTTCCCTATATTCCCAAATATAGAGAAGCGGCAGCTACTTTTAATGAGGATGGTATTAGTTTAACTTCTGATTTTTTAAGCCATACATGTACGATTGAAACTGCAAAACTAATTTTTAAAGAAGGTAAAATCTTATCAGCAGTTAAAGCCTTTAATAAGCCTGCTGAAGTACTGGTAAAAGATAAGAGGAATGCTGCTGGAGACCCTAAAGATTACTTTGACTATGTGATGTTGAACTGGTCAAATACCAATTCTGGTTATCGTTTAGTAATGGAAAGATTGTTAGGCAAAGCACCATCTGAACAGGAGTTAACAGTAGGTTTTAAGCCAGGGGTCAGTTTTCATTTTACTTATCAAGATATCATCAATCATCCTGATTCTATTTTTGATGGTTATCATCCTGCTAAAATTAAAAATCAGCTTTCTTTAGCAGAACATTTAGTTGCATGTGTTATCCCAAAACATTATCAAGAAGATTATCAAAGCCTTGTGCCCAATGACTTGAAACACAGGGTTTATTATTTAGATTACTGTAACGAAACACTTTATGAGTGGAATCAAAAAGTTTATGATTTTCTTTGTCATTTGGAAAATAAATAA

SEQ ID NO: 1308 - protein, 272 aa, Streptococcus agalactiae
MILKICRAAYSLQWGGVYQLALLDYPRIKAFELERIGAFIAYEKQYKRKTEIQCDDKHLLAKIVHFLKYNSFTFPYIPKYREAAATFNEDGISLTSDFLSHTCTIETAKLIFKEGKILSAVKAFNKPAEVLVKDKRNAAGDPKDYFDYVMLNWSNTNSGYRLVMERLLGKAPSEQELTVGFKPGVSFHFTYQDIINHPDSIFDGYHPAKIKNQLSLAEHLVACVIPKHYQEDYQSLVPNDLKHRVYYLDYCNETLYEWNQKVYDFLCHLENK

SEQ ID NO: 1309 - protein, 885 aa, Streptococcus agalactiae
ATGGATATTAGACAACTTACTTACTTTATTGCTGTTGCAGAAGCAAAAAATTATTCACGCGCTGCAAAAAGTCTTTTTGTGACCCAACCTACACTTTCACAATCCATTAAAAAATTAGAAGCAGAATTAAATACTATTTTATTCTTACAAAATGGTCGTCAACTCGCTTTAACTGAAGCAGGAGAAATTCTCTATGAGAAAGGACAATTGTTGATGACTAATGTTAATCAAATGGTTACGGAGATCCAGCAATTAAATCAAGAAAAAAAGGAAGGTATCCGTGTAGGGCTTACTTCTCTTTTTGCTATTCAATTTATGAAACAGATTTCAACTTTTATGGCTACACATTCAAATGTTGAAGTATCTTTGATTCAAGATGGTTCCCGTAAATTACAAGAATTGTTAGCAAAAGGAAAGATCGATATTGGCTTATTGTCCTTTCCAAGTACCCGCAATGATATCACTATCGAACCACTGCAAACCTCAACTAAAGGATATAAAGTAAGCATTGTCATGCCAAAATCGCATCCTCTTGCAACACTTCCTGAAATTGAACTTAATGATTTAAGAGATTATAAAGTTGCCTCACTCAACGAACATTATATGCTAGGAGAGATGTTGCCTCGTAAATGTCGTGCTTTAGGATTTGACCCCCATATCGTCTTTAAACACAATGACTGGGAAGTTCTTATTCATAGTTTACAAGACCTCAATGCAGTCACTATTTTACCAAGTGAATTTGAAAGCATTAGCCAAGTTCAAGATTTATGCTGGGTCCCACTTAAGGATAAAAATAATTTTTATCCGATTGGTATTGCTTACCGAAATGATACTTCTTTTAGTCCTATGATTGAAGAATTTTTAAGTCTTTTAAAGACCAATTAA

SEQ ID NO: 1310 - protein, 294 aa, Streptococcus agalactiae
MDIRQLTYFIAVAEAKNYSRAAKSLFVTQPTLSQSIKKLEAELNTILFLQNGRQLALTEAGEILYEKGQLLMTNVNQMVTEIQQLNQEKKEGIRVGLTSLFAIQFMKQISTFMATHSNVEVSLIQDGSRKLQELLAKGKIDIGLLSFPSTRNDITIEPLQTSTKGYKVSIVMPKSHPLATLPEIELNDLRDYKVASLNEHYMLGEMLPRKCRALGFDPHIVFKHNDWEVLIHSLQDLNAVTILPSEFESISQVQDLCWVPLKDKNNFYPIGIAYRNDTSFSPMIEEFLSLLKTN

SEQ ID NO: 1311 - DNA, 1059 bp, Streptococcus agalactiae
atgtcggatgttgtcgaaaaacaaacaactaaatcgtttataatgaacgtattaaatggtttagctttagggactgttattgtcttgataccaggagcaatccttggagaattaatgaaagctttactgccaatgtggagcggctttgcaactttaatcgctgcaacagcagttgcaacaagtatgatggggcttgttattggtattatggttggtctcaattttaaatttaatcccattcaatcagcatcactaggattagcggttatgtttgcaggtggagctgcaaccttccttaaaggcgctattatgctaaaaggaacaggcgatatcattaacatgggaattactgctgccttaggtgtccttttgatccaatttttatctgacaagacgaaatcattcactttgattgtcattccaacagtaacactcttactagttggaggagtaggtcatgtgttattaccttatgtcaaaatgattaccaccatgattggacaagggattgcttcattacttggtttacaacctgttttgatgtcaattttaattgcgatgattttctgtttcttgatcgtatctccaatcacaacagttgggattgctttggcaattagtttgtccggaattggttctggtgctgctaatttaggtatctgtgctgctagttttgggctttgtatggctgggtggtcagtcaattctaaggggacagccttagcgcatgttttagggtctcctaagatttcgatggctaatgtattagcaaaaccgaagattatgctacctatgatatcttcagcagcaatactaggaattctcggagctctctttaatattcaaggaacaccagctagtgcaggttttggtatcagtggtttgattggaccgattaatgctcttaatttagcaaaaggtggatggtcagttatgaatatgttattgataattataatatttgttgctgcaccaattatattgaattttatttttaattacctctttataaaagtacttaaaattattgatccaatggactataaattagatatttaa

SEQ ID NO: 1312 - protein, 352 aa, Streptococcus agalactiae
MSDVVEKQTTKSFIMNVLNGLALGTVIVLIPGAILGELMKALLPMWSGFATLIAATAVATSMMGLVIGIMVGLNFKFNPIQSASLGLAVMFAGGAATFLKGAIMLKGTGDIINMGITAALGVLLIQFLSDKTKSFTLIVIPTVTLLLVGGVGHVLLPYVKMITTMIGQGIASLLGLQPVLMSILIAMIFCFLIVSPITTVGIALAISLSGIGSGAANLGICAASFGLCMAGWSVNSKGTALAHVLGSPKISMANVLAKPKIMLPMISSAAILGILGALFNIQGTPASAGFGISGLIGPINALNLAKGGWSVMNMLLIIIIFVAAPIILNFIFNYLFIKVLKIIDPMDYKLDI

SEQ ID NO: 1313 - DNA, 993 bp, Streptococcus agalactiae
atgaaactcaaagtatttaatgttagagaagaagaagcaacattagcacaagattgggcaaaccgaaatcatgtggaactttctatgagtgaaggacctttgacattggaaactgttaatgaggtagaaggttttgatgggattgctaatgcacagattgagcctttagatgatgctatttatcctcttctcaaagaaatgggaattaagcaaatcgctcagcgcagtgctggtgttgatatgtataatcttgagttagctaagcaacatggtattatcattagcaatgtgccaagttactcaccggagtctattgcagaatttacagtgacaatcgctcttaaccttattcgaaaagttgagcttattagagctaatgttcgtgaacagaatttttcatggaccttgccaattcgaggacgagtcctaggtaacatgactgtggctataataggaactggtcgcattggtctagcgactgctaaaatttttaaagggttcggatgtcgtgttattggttatgatatttaccataatccaatggcagatggtatccttgagtatgtcaattcggtagaagaagctgttgaagaagctgatcttgtgtccttacatatgccaccaactgctgaaaatacgcatctatttaatttagatatgtttaaacagtttaaaaaaggtgctattttaatgaatatggcacgtggagcattggtggaaaccaaagatcttcttgaggctttagatcaagggcttttggagggagctggtattgatacttatgaatttgaggggccatatatacctaaaaattgtcaaggtcaagacatttcagacaaggatttcctaagactgattaaccatccgaaagtaatatacactcctcatgcggcttattatacagatgaagcggtcaaaaatctagtagagggtgccttaaatgcttgtgtagaagtgattgaaacgggaacaactactacgaaagtcaactaa

SEQ ID NO: 1314 - protein, 330 aa, Streptococcus agalactiae
MKLKVFNVREEEATLAQDWANRNHVELSMSEGPLTLETVNEVEGFDGIANAQIEPLDDAIYPLLKEMGIKQIAQRSAGVDMYNLELAKQHGIIISNVPSYSPESIAEFTVTIALNLIRKVELIRANVREQNFSWTLPIRGRVLGNMTVAIIGTGRIGLATAKIFKGFGCRVIGYDIYHNPMADGILEYVNSVEEAVEEADLVSLHMPPTAENTHLFNLDMFKQFKKGAILMNMARGALVETKDLLEALDQGLLEGAGIDTYEFEGPYIPKNCQGQDISDKDFLRLINHPKVIYTPHAAYYTDEAVKNLVEGALNACVEVIETGTTTTKVN

SEQ ID NO: 1315 - DNA, 1551 bp, Streptococcus agalactiae
atggagaaaacaatggatatggaacaacgtgaagaagttgtatcttataaccgagcgaaagtatggcagttagttatgtttgccatgaacaatgcttctacaaatatatacttatttacgtttatgtttgttacctatttctcaactggcgttcttggctcggcagccatttttgtcagtcaaattatgggttatatccgtatttttgatggttttattgatccagctattggtattatgattgataaaactgatacaaaatttggtaagtatcgtcctattttgattattgggaacgttattacggctttgtcattgatttttcttcttgcattgagaggtgtcgatgaaaatattcgtttcccattatttatccttgttctaattatccataaaattggatactcaatgcaacagacaataactaaagcagggcaaacagcactgacaaatgaccctaagcaacgtcctatttttaatatcgttgatgcagttatgacaacatcattaatgacaggcggtcagtttgtcgtttcagttttcttagtaccaaaatttggtaattttacacctcaattcttcaatgtccttatttttggaacaattcttatttcagctattttagcaatcgttgcaattattgggatttgggcaaaagacagaaaagaattctttggtttaggagagaatacccaaaagactgctctaaaagattactggaaggtgttgaaaggaaataaaccgcttcagatattatccattgctgcagctttggtaaaatttgccatccaattctttggcgattccgttgttatggtgctattgtttggtattttatttggtaattatgctttatcaggacaattctcacttcttttcattgttcctggtgttattattaatattttgttctcaacaattgctcgtaaaaaaggtcttcgtttttcatatgtcagagcaattcagatcggtatgattggtttacttgcttttggtgcagttctttacgttggtaagcctggtgaccttagtttaacaagcctaaatctttatactattttatttatcgttactaatattattgcgagatacgcttcacaagcacctgctagtttagtattgactatgggagcagatatttctgactatgaaacttctgaatccggtcgttatgtatcaggaatgattggaactatcttctccttaacagattcgattgcttcttcatttgctcctatggtagtaggttttgtgttagcaggaattggattttcaaaatcatttccaactatcgaaacaccactgccccctgatttaaaaatggcagctattagtatccttgtggccattccatttatagctttgtctatagctcttcttttaatgaaattttacaaactagataaagaagaaatggttcgtattcaagagaagattcaagttatgaaagcagcaactactaaggaacgtgctaaagatattgctcgtaatgttcctttgacagatatggattatgttgatgtaacaaaatatcctattgataaagattaa

SEQ ID NO: 1316 - protein, 516 aa, Streptococcus agalactiae
MEKTMDMEQREEVVSYNRAKVWQLVMFAMNNASTNIYLFTFMFVTYFSTGVLGSAAIFVSQIMGYIRIFDGFIDPAIGIMIDKTDTKFGKYRPILIIGNVITALSLIFLLALRGVDENIRFPLFILVLIIHKIGYSMQQTITKAGQTALTNDPKQRPIFNIVDAVMTTSLMTGGQFVVSVFLVPKFGNFTPQFFNVLIFGTILISAILAIVAIIGIWAKDRKEFFGLGENTQKTALKDYWKVLKGNKPLQILSIAAALVKFAIQFFGDSVVMVLLFGILFGNYALSGQFSLLFIVPGVIINILFSTIARKKGLRFSYVRAIQIGMIGLLAFGAVLYVGKPGDLSLTSLNLYTILFIVTNIIARYASQAPASLVLTMGADISDYETSESGRYVSGMIGTIFSLTDSIASSFAPMVVGFVLAGIGFSKSFPTIETPLPPDLKMAAISILVAIPFIALSIALLLMKFYKLDKEEMVRIQEKIQVMKAATTKERAKDIARNVPLTDMDYVDVTKYPIDKD

SEQ ID NO: 1317 - DNA, 909 bp, Streptococcus agalactiae
atggcaaaaattatttcattaggtgaggttcttttgcgattatctccacctcaatatcacacactgatgcaggctaatcacctaaaatgccaattcggtggttcagaacttaatgtcttagcaagccttgctcaactaggttaccatgtaggattggtctcagctttgcctgataatgatttgggcaagatggcaagtcaatttatattgtcacagcaaattagtccagctgctataattaaaaaagaaggacgactaggaatttattactatgaacaaggattttcggtaagaacaaataaggttatctacgatcgtaactattcatctttttgggaaagtaccttgagtgattatgattttacttctatttttaagggagtggattggtttcatgtttctggaattactccagcactaaccaaggacttatatgaggtgactcggttccttatgacaaaagctaaagaaggaggtgtaaaagtatcgattgatctcaattttcgtgagagtttatggtcatcttttcaagaggcacgtgagcaattatcgccactattaggattattagatgtttgctttggcttagagccgatttatttagctggcgaaagtgaagatttaaaagatgagttgggcttatccagaccttaccttgatattgaattacttgaaaagataacccaaaagattgtccaagaatatgggttagactatattgcctttactcaaagggaaatggaatatactaatcagtatatgttaaaatcatatttgtatcataataatatgttatatcaaactgataaaactggcgttgaagtattagatcgtgtggggacaggagatgcctttgctgcaggtttaattcatgcgcttctggaaaagaaactcctcaagggcccctaa

SEQ ID NO: 1318 - protein, 302 aa, Streptococcus agalactiae
MAKIISLGEVLLRLSPPQYHTLMQANHLKCQFGGSELNVLASLAQLGYHVGLVSALPDNDLGKMASQFILSQQISPAAIIKKEGRLGIYYYEQGFSVRTNKVIYDRNYSSFWESTLSDYDFTSIFKGVDWFHVSGITPALTKDLYEVTRFLMTKAKEGGVKVSIDLNFRESLWSSFQEAREQLSPLLGLLDVCFGLEPIYLAGESEDLKDELGLSRPYLDIELLEKITQKIVQEYGLDYIAFTQREMEYTNQYMLKSYLYHNNMLYQTDKTGVEVLDRVGTGDAFAAGLIHALLEKKLLKGP

SEQ ID NO: 1319 - DNA, 582 bp, Streptococcus agalactiae
  misc_feature 12, 13, 14, 15, 16: n = A,T,C or G
atgaatgaatgnnnnnaagctaaagaaggaggtgtaaaagtatcgattgatctcaattttcgtgagagtttatggtcatcttttcaagaggcacgtgagcaattatcgccactattaggattattagatgtttgctttggcttagagccgatttatttagctggcgaaagtgaagatttaaaagatgagttgggcttatccagaccttaccttgatattgaattacttgaaaagataacccaaaagattgtccaagaatatgggttagactatattgcctttactcaaagggaaatggaatatactaatcagtatatgttaaaatcatatttgtatcataataatatgttatatcaaactgataaaactggcgttgaagtattagatcgtgtggggacaggagatgcctttgctgcaggtttaattcatgcgcttctggaaaaagaaactcctcaaagggccttagaaatagctatggctacatttaaatacaaacataccattcaaggagatatcaatatcatgacacgagatgatattgcctacctcattgaaaaagaaacaaatgatattaaacgatag

SEQ ID NO: 1320 - protein, 193 aa, Streptococcus agalactiae
  VARIANT 4, 5, 6: Xaa = Any Amino Acid
MNEXXXAKEGGVKVSIDLNFRESLWSSFQEAREQLSPLLGLLDVCFGLEPIYLAGESEDLKDELGLSRPYLDIELLEKITQKIVQEYGLDYIAFTQREMEYTNQYMLKSYLYHNNMLYQTDKTGVEVLDRVGTGDAFAAGLIHALLEKETPQRALEIAMATFKYKHTIQGDINIMTRDDIAYLIEKETNDIKR

SEQ ID NO: 1321 - protein, 1800 aa, Streptococcus agalactiae
ATGTTATATCCATTATTGACAAAAACAAGAAATACTTATGATTTAGGCGGTATTTGGAACTTTAAATTAGGAGAACATAATCCAAATGAATTACTACCTTCAGATGAAGTCATGGTTATCCCGACTTCATTTAATGATTTGATGGTAAGTAAAGAAAAACGTGATTATATAGGTGATTTTTGGTATGAAAAAGTCATTGAAGTACCTAAAGTATCAGAGGATGAAGAGATGGTGCTGCGTTTTGGCTCAGTGACACATCAAGCTAAAATTTATGTTGACGGTGTATTGGTAGGAGAGCATAAGGGAGGTTTTACTCCTTTTGAAGTTCTTGTTCCTGAATGTAAGTATAATAATGAGAAAATTAAGGTATCAATTTGTGCTAATAACGTTTTAGACTATACCACGCTTCCGGTCGGAAATTATAGTGAAATCATTCAAGAAGATGGTAGCATTAAGAAGAAAGTACGTGAGAATTTTGATTTCTTCAATTATGCAGGTGTGCATCGTCCTCTTAAGTTGATGATACGTCCTAAAAATCATATTTTTGATATTACAATTACAAGTCGTCTATCAGATGATTTACAGTCAGCAGATTTACATTTTTTAGTGGAGACTAATCAAAAGGTTGACGAAGTTAGAATTAGCGTTTTTGATGAAGATAACAAACTAGTGGGTGAAACGAAGGATAGCAGATTATTTCTTAGTGATGTCCATCTTTGGGAAGTTTTAAATGCCTATCTGTACACAGCGCGTGTTGAAATTTTTGTTGATAATCAACTCCAAGATGTCTATGAGGAAAATTTTGGTCTTAGAGAAATAGAAGTGACAAATGGTCAATTCCTATTGAATCGCAAACCTATTTATTTTAAAGGATTTGGTAAACATGAAGATACGTTCATTAATGGCAGAGGTTTGAATGAAGCTGCTAACTTAATGGATTTGAATCTTTTGAAGGATATGGGGGCAAACTCTTTTAGAACATCCCATTATCCTTATTCTGAAGAAATGATGCGTTTAGCAGATCGAATGGGAGTGTTAGTGATAGATGAGGTTCCAGCAGTAGGGTTATTTCAAAATTTTAACGCTTCCTTAGATTTGTCACCAAAAGATAATGGTACGTGGAATTTGATGCAAACAAAAGCGGCGCATGAACAAGCTATCCAAGAATTAGTGAAGCGTGATAAAAATCATCCTAGCGTCGTGATGTGGGTAGTCGCTAACGAACCGGCTAGTCATGAAGCGGGAGCACATGATTATTTTGAGCCATTAGTAAAACTTTATAAAGATTTAGACCCTCAAAAACGTCCTGTCACCTTGGTTAATATTTTAATGGCAACCCCAGATAGAGACCAAGTGATGGACCTGGTTGATGTTGTCTGCCTTAATCGTTACTATGGTTGGTACGTTGACCACGGTGATTTAACAAATGCAGAAGTAGGTATAAGAAAAGAGTTATTAGAATGGCAAGATAAATTTCCTGACAAACCAATTATCATAACGGAGTATGGCGCTGATACGTTACCGGGATTACATTCTACTTGGAATATTCCATATACAGAAGAATTTCAATGTGATTTTTATGAAATGAGTCATCGTGTTTTTGATGGTATTCCTAATTTAGTTGGTGAGCAAGTCTGGAATTTTGCAGACTTTGAAACTAATCTGATGATACTTCGTGTACAGGGGAATCACAAAGGTCTCTTTTCAAGGAATCGCCAGCCGAAACAAGTCGTCAAAGAATTTAAAAAACGCTGGATGACTATTCCTCATTACCATAATAAAAAAAATAGTGTAAAATAG

SEQ ID NO: 1322 - protein, 599 aa, Streptococcus agalactiae
MLYPLLTKTRNTYDLGGIWNFKLGEHNPNELLPSDEVMVIPTSFNDLMVSKEKRDYIGDFWYEKVIEVPKVSEDEEMVLRFGSVTHQAKIYVDGVLVGEHKGGFTPFEVLVPECKYNNEKIKVSICANNVLDYTTLPVGNYSEIIQEDGSIKKKVRENFDFFNYAGVHRPLKLMIRPKNHIFDITITSRLSDDLQSADLHFLVETNQKVDEVRISVFDEDNKLVGETKDSRLFLSDVHLWEVLNAYLYTARVEIFVDNQLQDVYEENFGLREIEVTNGQFLLNRKPIYFKGFGKHEDTFINGRGLNEAANLMDLNLLKDMGANSFRTSHYPYSEEMMRLADRMGVLVIDEVPAVGLFQNFNASLDLSPKDNGTWNLMQTKAAHEQAIQELVKRDKNHPSVVMWVVANEPASHEAGAHDYFEPLVKLYKDLDPQKRPVTLVNILMATPDRDQVMDLVDVVCLNRYYGWYVDHGDLTNAEVGIRKELLEWQDKFPDKPIIITEYGADTLPGLHSTWNIPYTEEFQCDFYEMSHRVFDGIPNLVGEQVWNFADFETNLMILRVQGNHKGLFSRNRQPKQVVKEFKKRWMTIPHYHNKKNSVK

SEQ ID NO: 1323 - protein, 672 aa, Streptococcus agalactiae
ATGGCTAGACCCTTAGTAGAACAAACAGCAGATCGTCTATTGCATTTAATTTTAGAAAGAGAATACCCTGTTGGTGCTAAGCTCCCCAATGAATATGAATTAGCAGAAGATCTAGATGTTGGTCGCAGCACAATCCGAGAAGCAGTCAGAAGTTTAGCAACGCGTAATATTTTAGAAGTCAGACAGGGCTCTGGAACATATATTAGTTCTAAAAAGGGTGTTTCTGAGGATCCATTAGGGTTCTCTCTAATAAAGGACACAGATAGGTTGACATCAGATCTCTTTGAACTACGCCTTTTATTGGAACCTCGAATAGCAGAGCTGGTAGCTTATAGAATTACAGATGATCAGTTACAATTACTCGAAAAGCTTGTTGGAGATATTGAAGATGCTGTTCACGCAGGCGATCCGAAACATTTACTTTTAGACGTGGAATTTCATTCCATGCTAGCTAAATACAGTGGTAATATTGCAATGGATAGCCTTTTGCCAGTCATCAACCAGTCAATTCATCTGATAAATGCGAATTATACAAATCGTCAGATGAAGTCGGATAGTTTAGAAGCACATAGAGAAATTATCAAAGCAATCCGAGAAAAAAATCCAGTAGCTGCACATGATGCTATGCTTATGCATATCATGAGTGTTAGACGTTCAGCATTGAAAGCTTAA

SEQ ID NO: 1324 - protein, 223 aa, Streptococcus agalactiae
MARPLVEQTADRLLHLILEREYPVGAKLPNEYELAEDLDVGRSTIREAVRSLATRNILEVRQGSGTYISSKKGVSEDPLGFSLIKDTDRLTSDLFELRLLLEPRIAELVAYRITDDQLQLLEKLVGDIEDAVHAGDPKHLLLDVEFHSMLAKYSGNIAMDSLLPVINQSIHLINANYTNRQMKSDSLEAHREIIKAIREKNPVAAHDAMLMHIMSVRRSALKA

SEQ ID NO: 1325 - protein, 618 aa, Streptococcus agalactiae
ATGTTAAATCAATTGAAAAACAACTATTTCTTTGCTGTTATTCGAGGGAAATCATCTGAGGATGCGCTCGAAATCGCAAAGCATGCTATTTTGGGTGGTATTCGGAATATTGAAGTAACTTTTTCGACTCCTGAAGCAAGCAAAGTCATCAAACAATTATCAGATGACTTTAAAAATAATAAAGAAATTATTGTGGGGGCCGGAACGGTCATGACAACTGAACTTGCTAAAGAGGCTATTGATGCTGGAGCTAAATTTTTGGTTAGCCCACACTTTGATTCAGATATTGCTAATTTAGCTAATGAAAACAAGGTTTATTATTTCCCAGGCTGTGCAACGGCAACAGAAATCGTGGTAGCTAGAAAGTATAAATGTCAGATTATAAAGCTTTTTCCAGGTGGAGTTGTGGGTCCAGGTTTTATCAAAGATATTCATGGTCCTATTCCAGATGTTGATTTAATGCCATCAGGTGGCGTCTCTGTTTCAAATGTAGTTGAATGGAGAAAAGCAGGAGCAGTTGCGGTTGGTGTTGGCTCAGCATTATCTAGTAAAGTAGCCACAGAAGGCTATGATAGTGTTACTAAAATAGCTAAACAGTTTGTTTCTGCACTTGATTAG

SEQ ID NO: 1326 - protein, 205 aa, Streptococcus agalactiae
MLNQLKNNYFFAVIRGKSSEDALEIAKHAILGGIRNIEVTFSTPEASKVIKQLSDDFKNNKEIIVGAGTVMTTELAKEAIDAGAKFLVSPHFDSDIANLANENKVYYFPGCATATEIVVARKYKCQIIKLFPGGVVGPGFIKDIHGPIPDVDLMPSGGVSVSNVVEWRKAGAVAVGVGSALSSKVATEGYDSVTKIAKQFVSALD

SEQ ID NO: 1327 - protein, 1401 aa, Streptococcus agalactiae
ATGGCGTTTAATACTGAAACATTTATGTTAAAAAATCAAGCAGCTATACAGCTGTATGAAGAGGTCAAGAGACAACCTATTTTTGATTATCATTGCCACTTAGATCCAAAGGACATTTTTGAAGATCATATTTTTGATAATATTGTGGATTTGTGGCTTGGTGGTGACCACTATAAATGGCGTCTTATGAGGGCTAATGGTATTTCTGAAGCAGAAATTACAGGTCCAGCATCCAACCTTGAGAAATTTAAAGCATTTGCTAGAACACTAGAAAGAGCATACGGTAATCCTGTTTATCATTGGTCTGCTATGGAATTGAAAAATGTCTTTGGTGTTAATGAGATTTTGACAGAATCAAATGCTGAGGAAATTTATCATCGTTTAAATCATTTCTTGAAAGAGCATAAAATAAGTCCTAGACGTTTAATTGCAGATAGCAAAGTTATGTTTATTGGTACTACAGACCACCCTCTTGATACTCTCGAGTGGCATAAAAAGTTGGCTGCTGATGAGAGTTTTAAAACAGTTGTTGCTCCGACATTTAGGCCAGATGAAGCTTTTATTGAACATCGACATTTTGTTGATTTTATTACTAAACTGGGTGACATTACTCAAAAAGAGATTACAGATTTTTCAACATTTATAGCAGCAATGGAAGAACGCATTGCGTATTTTGCTCAAAATGGTTGTAGGGCTAGCGATATCAGTTTTACGGAAATCGTCTTTGAACAAACTGATGAATTGGAGTTGAACGATTTATTTAATAAAGTTTGTGAAGGCTATATCCCAAATCAATCAGAAATCAGCAAATGGCAAACAGCTGTTTTTATGGAACTTTGCCGATTATATAAAAAATATGGTTTTGTAACACAGGTGCATTTTGGAGCTTTGAGAAATAATCATTCTACTATTTTTGAAAAATTGGGAGCTGACGTGGGTGTGGATTCACTTGGTGACCAAGTGGCTTTAACTGTTAATATGAACCGTTTATTGGATTCCTTGGTTAAAAAAGATAGTCTGCCTAAAATGATTTGGTATAATCTCAATCCAGCTTACAATATAGCAGTAGCTAACACTTTGGCAAATTTTCAAGCTAACGAACTTGGAGTGAGATCTTACCTTCAATTTGGTGCAGGTTGGTGGTTTGCAGATACTAAATTAGGGATGATTAGTCAAATGAATGCCTTAGCAGAGCAAGGCATGTTGGCGAATTTTATTGGTATGTTAACAGATTCTAGAAGTTTTCTATCTTATCAACGTCATGACTATTTTCGACGTATTTTATGTACCTACTTAGGAGAATGGATTGAAGAAGGAGAAGTTCCAGAAGATTATCAAGCTTTAGGAAGTATGGCTAAAGACATCGCTTATCAAAATGCAGTTAATTATTTTAAGAACTAA

SEQ ID NO: 1328 - protein, 466 aa, Streptococcus agalactiae
MAFNTETFMLKNQAAIQLYEEVKRQPIFDYHCHLDPKDIFEDHIFDNIVDLWLGGDHYKWRLMRANGISEAEITGPASNLEKFKAFARTLERAYGNPVYHWSAMELKNVFGVNEILTESNAEEIYHRLNHFLKEHKISPRRLIADSKVMFIGTTDHPLDTLEWHKKLAADESFKTVVAPTFRPDEAFIEHRHFVDFITKLGDITQKEITDFSTFIAAMEERIAYFAQNGCRASDISFTEIVFEQTDELELNDLFNKVCEGYIPNQSEISKWQTAVFMELCRLYKKYGFVTQVHFGALRNNHSTIFEKLGADVGVDSLGDQVALTVNMNRLLDSLVKKDSLPKMIWYNLNPAYNIAVANTLANFQANELGVRSYLQFGAGWWFADTKLGMISQMNALAEQGMLANFIGMLTDSRSFLSYQRHDYFRRILCTYLGEWIEEGEVPEDYQALGSMAKDIAYQNAVNYFKN

SEQ ID NO: 1329 - protein, 1047 aa, Streptococcus agalactiae
ATGGAAATGTCATTTAGGTGGTATGGTGAAGACGACCCCGTTACTTTAGAAAATATTGGTCAAATTCCAACAATGAAAGGGATTGTTACAGCGATATACGATGTACCAGTAGGAGAAGTTTGGTCACGTGAGCGCATTCAACAGCTGAAAGAAAAGGTAGAGGCAGCAGGGCTTAAAATTTCGGTTATCGAATCAGTACCTGTTCATGAAGATATCAAATTGGGACGTCCAACACGTGATCTCTTGATTGATAATTATATTCAAACCGTCAAAAATTTGGCTGCGGAAGGTATTGATACTATTTGTTATAATTTTATGCCAGTATTTGACTGGACACGCACTGATTTAGCATATCAATATCCAGATGGTTCCACAGCTTTGATATTTGATGAGACGGTTTCTAAAAAAATGGATCCAGTAAACGGTGAATTATCTTTGCCAGGATGGGATGCCAGCTATAGTAAAGAAGAAATGAAGGCTATCATGGATGCCTATGCTGAAATTGATGAGGAAAAACTTTGGGAAAATCTCACTTATTTTATTAAACGTATTATTCCTGAAGCGGAAGCCGTAGGCGTTAAAATGGCCATTCATCCGGATGACCCACCATATTCTATTTTTGGTTTACCTCGCATTATTACTGGGTTAGAGGCTATTGAGCGTTTTGTGAAATTGTACGATAGTAAAAGTAATGGCATCACTTTATGTGTGGGTTCTTACGCTTCTGATCCCCAGAATGATGTTTTAGAGATTTCGCGACGTGCTTTTGAGTTAGATCGTGTAAACTTTGTTCATGCTCGCAATATTAAATTAGGTGATGGAAAGTCATTTAAAGAATCGGCTCATCCATCAGAATACGGGTCAATAGACATGTATGAAGTTATTAAGTTATGCCATGAATTTGGGTTTGAGGGTGCTATTCGACCTGACCACGGGCGTATGATTTGGGGAGAAACAGGTCGTCCAGGATATGGCCTATACGATAGAGCTTTAGGAGCCACTTACGTTTCTGGTTTATACGAAGCTGTGATTAAAGGTTCAAAATAA

SEQ ID NO: 1330 - protein, 348 aa, Streptococcus agalactiae
MEMSFRWYGEDDPVTLENIGQIPTMKGIVTAIYDVPVGEVWSRERIQQLKEKVEAAGLKISVIESVPVHEDIKLGRPTRDLLIDNYIQTVKNLAAEGIDTICYNFMPVFDWTRTDLAYQYPDGSTALIFDETVSKKMDPVNGELSLPGWDASYSKEEMKAIMDAYAEIDEEKLWENLTYFIKRIIPEAEAVGVKMAIHPDDPPYSIFGLPRIITGLEAIERFVKLYDSKSNGITLCVGSYASDPQNDVLEISRRAFELDRVNFVHARNIKLGDGKSFKESAHPSEYGSIDMYEVIKLCHEFGFEGAIRPDHGRMIWGETGRPGYGLYDRALGATYVSGLYEAVIKGSK

SEQ ID NO: 1331 - DNA, 840 bp, Streptococcus agalactiae
atgtcaaaaacaattacatttaccaataaagttgtcgtcataacaggtgcaggcggtgttctctgtggttatatggctaaagaatttgcgaaagcaggcgctaaagtggcattattagatttgaatcaagaagctgctcaaacatttgctgatgaaattgtagaagaaggtggtatcgctaaggcttataaagctaacgttttgtctaaagaaaaccttgaagaagtgcatcaagccgttttagaggatcttggaccaactgatattttagttaatggtgcaggaggcaacaatcctaaagctacaactgataatgaatttcacgaattagacttaccttcagaaacaaaaaccttctttgagttagatgaagctggtattagctttgtttttaacttaaattatttaggaacattattgccaacgcaagtatttgcccaagatatggttggacgtgaaggagcgaatattattaatatctcttcaatgaatgcttttacccctctgaccaaaataccagcttattctggagctaaagcagctattagtaacttcacacaatggctagctgttcatttctcaaaagttggtatccgttgtaatgctattgcacctggtttcttggtaacaaatcagaaccgaagcttgttatttactgaggacggtcagccaactgcgcgtgctgagaaaattcttaataatacaccaatgggaagatttggagaagcaagtgagctgattggcggattgttctttttagcagatgaaaaatcatcaagttttgttaatggcgttgtccttccgattgatggtggatttgctgcttactctggtgtttaa

SEQ ID NO: 1332 - protein, 279 aa, Streptococcus agalactiae
MSKTITFTNKVVVITGAGGVLCGYMAKEFAKAGAKVALLDLNQEAAQTFADEIVEEGGIAKAYKANVLSKENLEEVHQAVLEDLGPTDILVNGAGGNNPKATTDNEFHELDLPSETKTFFELDEAGISFVFNLNYLGTLLPTQVFAQDMVGREGANIINISSMNAFTPLTKIPAYSGAKAAISNFTQWLAVHFSKVGIRCNAIAPGFLVTNQNRSLLFTEDGQPTARAEKILNNTPMGRFGEASELIGGLFFLADEKSSSFVNGVVLPIDGGFAAYSGV

SEQ ID NO: 1333 - DNA, 813 bp, Streptococcus agalactiae
atggtagatacaaatcacaaaatcgctttttgcatagattctgatggttgcgcaatggatacaatgacatataagcatcaactcttttttggtccaattgctgcagatatatttgggatatcagaacaagaaagaacaagttttttaaaagagtgggatagagtcaatctttattcaagaactcgtggagttaatcggtttgtgggattggttatgggccttgagtttgccggagtagaacatattgataaattaaaagaatgggtcgaaacaacagactcattgtccaataattccttagagttagcgcttgccaacgattttagtagagatttagagaaggctttagaatggtccaatgaagtgaatcgccaaatcaaaaattatgagggagattctttagcgttttcaggtgtgttagaaagtttagaacgattaagtcaatttggtaatgtttatgtcgtgagttctgctaacaaggaagctgtttggcaagagtgggaagaacagggattgctaaagtatgttgatgatatctattgtcaagatagaggtaaaaaagaagatgttatcgccactttaattgcaagtggttactgccgtgaaactattttgatggtaggagattccctgggtgatctggctgcagcagaacaaaatggtattgcattttacccagtacttgttggtaaggaagtcaaatcatgggaaattcttagagaagatattggtgaagcttttgcaaaaggtcaattcgaacagcaaaggcaaaaagaatctattaataccttttgggctaatttagataactaa

SEQ ID NO: 1334 - protein, 270 aa, Streptococcus agalactiae
MVDTNHKIAFCIDSDGCAMDTMTYKHQLFFGPIAADIFGISEQERTSFLKEWDRVNLYSRTRGVNRFVGLVMGLEFAGVEHIDKLKEWVETTDSLSNNSLELALANDFSRDLEKALEWSNEVNRQIKNYEGDSLAFSGVLESLERLSQFGNVYVVSSANKEAVWQEWEEQGLLKYVDDIYCQDRGKKEDVIATLIASGYCRETILMVGDSLGDLAAAEQNGIAFYPVLVGKEVKSWEILREDIGEAFAKGQFEQQRQKESINTFWANLDN

SEQ ID NO: 1335 - DNA, 1791 bp, Streptococcus agalactiae
atgacacatttagttgacttaacaaagaaacccttcaatctaaatcaagaagcaattgagtggattgaaaaaacaattaatgagatgacattggatgagaaaattgggcaactttttttcaatatgggagctagtcgttcagaagaatatttaacagatgttttggatcggtatcatattgctgctgttcgctataatagaggtagttcaagtgaaatctatgatcagaatttaattttacagacaaagtcgaaattgccgatgttgattgctgcaaatacagaagctggtggagacggtgctgtcacggatggaactaaagttggcgatgaaataaaagtggctgctacaaatgatccgaaatatgcttatgaaatgggaagaatcgcagggatggaggcatctgctgtgggttgtaatgcttcattttctccaattgtagatttgacacgtaattggcgtaatcctatcatagctagtcgaaattggggtgctaacgttgatcaaattatttcactttcaaaagagtatatgaaaggaatcatgcaatataatattgtacctttcgctaaacattttccaggggatggcattgatgagcgtgatcatcatttgtcatttgcttccaatcctatgagtaaagaggagtggatgtcgacatttggccgcatttatggtgaattggctgacgcaggtttaccaggagtcatggcaggtcacatacatttaccaaacgttgaaaaagaaatgcatccagagcgagaccttgatgatatgttaccagcttcattgaataaaacacttttagatgagttattgagaggagagttaggttataatggagctattgtaacggacgcttctcatatggttggaatgactgcttcaatggcaaggagagatttgttgccaacggcgattgaagcaggttgtgatttattcttattctttaatgaccctgatgaagacattcaatggatgaaagaaggttacgaaaaaggtattctaacagaggaacgtctccatgacgctttacgtcgtactctcggtctaaaagcgaaattaggcttgcataactatgagggacgtcgccaagaactctttatgcctaaagataaggctatggctttaatcaacacattagagtcgcaaaaaatagctgatgaagttgctgataaagcagtaactctggtaaaagataaacaaaaagatatctttccagtaaatccagaacgttatcgtcatatcttacttgttaacgttgaaggatataagggaggttttggtgcgatgattgctggaaacaagcaacgtgcatcggattacatgaaagagttacttgaggcacgtggccatgaagtaactgtctgggagtctaccgaagagcgtattatgaaattgccacaagaggagcgggcagcagctatcgctaatgtttacgcacaaaaacagccaatcgcaaatctaacagaacactatgacttgattattaacttggtagatgtcaatgctggaggaacaacacaacgtattatttggccagcagctaaaggcacccctgatcagcctttttacgttcatgaaataccatctattgtgatttcagtacaacatgcatttgctttagcagatatgccacaggtagggacttatattaatgcttatgatgggcttcctagcacgataagtgcagtagttgcgaaattggctggagaatcagaatttacaggagtttcaccagtagatgcttactgtggtttaattgatacacatttatggcgccaatgctaa

SEQ ID NO: 1336 - protein, 596 aa, Streptococcus agalactiae
MTHLVDLTKKPFNLNQEAIEWIEKTINEMTLDEKIGQLFFNMGASRSEEYLTDVLDRYHIAAVRYNRGSSSEIYDQNLILQTKSKLPMLIAANTEAGGDGAVTDGTKVGDEIKVAATNDPKYAYEMGRIAGMEASAVGCNASFSPIVDLTRNWRNPIIASRNWGANVDQIISLSKEYMKGIMQYNIVPFAKHFPGDGIDERDHHLSFASNPMSKEEWMSTFGRIYGELADAGLPGVMAGHIHLPNVEKEMHPERDLDDMLPASLNKTLLDELLRGELGYNGAIVTDASHMVGMTASMARRDLLPTAIEAGCDLFLFFNDPDEDIQWMKEGYEKGILTEERLHDALRRTLGLKAKLGLHNYEGRRQELFMPKDKAMALINTLESQKIADEVADKAVTLVKDKQKDIFPVNPERYRHILLVNVEGYKGGFGAMIAGNKQRASDYMKELLEARGHEVTVWESTEERIMKLPQEERAAAIANVYAQKQPIANLTEHYDLIINLVDVNAGGTTQRIIWPAAKGTPDQPFYVHEIPSIVISVQHAFALADMPQVGTYINAYDGLPSTISAVVAKLAGESEFTGVSPVDAYCGLIDTHLWRQC

SEQ ID NO: 1337 - DNA, 1086 bp, Streptococcus agalactiae
atgtcaaaacttaatcgtatacgccatcacttacattcagtccaagctgaacttgctgtcttttctgatcctgtgacagtcaactatttaacaggtttcttttgcgatccccatgaaagacaaatgtttttatttgtctatgaagatcgcgatcctattttatttgtaccagcactagaagtatcgcgtgcaaaacaaagtgtaccatttcccgtctttggttacatagattcagaaaatccttggcaaaaaatagctagcaacttaccatccttttctgtttctaaagttctagccgaatttgataatcttaatgttactaaattccaaggtctccaaaccgtttttgatggtcattttgaaaacctaacaccttatattcaaaacatgcgcctaattaaatcacgagatgaaattgagaaaatgttagtcgctggagaatttgctgataaagctgttcaagttggatttgacaatatctcgctaaacaacactgaaaccgatattatcgctcaaatcgaatttgaaatgaaaaaacaaggtatcaataaaatgagtttcgacactatggttttgactggcaataatgcagcaaatccacatggtatcccaggaactaataaaatcgaaaataatgctttgttattatttgatttaggtgtagaaacactaggttatacgtcagatatgacccgtacagtagcagtggggaaacctgatcaattcaaaaaagatatttaccatttatgtcttgaagcacatcaagcggctattgattttattaagccaggagtccttgcttctgaagttgacgcagcagcaagaaatgttattgaaaaggctggttatggacaatactttaaccaccgccttggtcatggattaggtatggatgtccatgaatttccatctattatggctggtaacgatatggagattcaagaaggcatgtgcttctctgttgaaccaggtatttatataccagataaagttggtgtgcgaattgaagactgcggttatgtgactaaaaccggctttgaagtatttaccaaaacacccaaggaactactctattttgaaggataa

SEQ ID NO: 1338 - protein, 361 aa, Streptococcus agalactiae
MSKLNRIRHHLHSVQAELAVFSDPVTVNYLTGFFCDPHERQMFLFVYEDRDPILFVPALEVSRAKQSVPFPVFGYIDSENPWQKIASNLPSFSVSKVLAEFDNLNVTKFQGLQTVFDGHFENLTPYIQNMRLIKSRDEIEKMLVAGEFADKAVQVGFDNISLNNTETDIIAQIEFEMKKQGINKMSFDTMVLTGNNAANPHGIPGTNKIENNALLLFDLGVETLGYTSDMTRTVAVGKPDQFKKDIYHLCLEAHQAAIDFIKPGVLASEVDAAARNVIEKAGYGQYFNHRLGHGLGMDVHEFPSIMAGNDMEIQEGMCFSVEPGIYIPDKVGVRIEDCGYVTKTGFEVFTKTPKELLYFEG

SEQ ID NO: 1339 - DNA, 948 bp, Streptococcus agalactiae
atggcaactgttagtcgtgtggtaaatggaaataaaaatgtcaaggaaaatacacgtaagaaagtccttgaagttattgatcgtcttgactatcgtccaaatgctgtggcgcgtggtttagcaagtaaaaaaacgacaactgttggtgttgtcattcctaatatcgcaaatagctacttttcaattttagcgcgtggtattgatgatattgcagcaatgtacaaatataacattgtccttgcttcaagtgatgaagacgatgataaagaggttaatgttgttaatactttgtttgctaagcaagtagacggtattatttttatgggacaccacttaactgaaaagattcgtgcagagttctctcgttcacgcacaccgattgttttagcaggtactgtggaccttgagcatcaattaccaagtgttaatatcgattacaaagcagcagcagttgatgttattgatattttagctggcaatcataaagacattgcttttgtatcaggaccacttattgacgatattaatggcaaggttcgtttggcaggatacaaagaaggtctcaagaaaaatggcttaaactttaaagaggggttggtttttgaagccaactaccgttatgctgaaggctttgcattagctcaacgcgtgattaatgctggagcaacagcagcatatgttgctgaggatgagttagcggcaggtttgttaaatggtctttttgaggcaggtaaacgtgttcctgaagattttgaaattatcacaagcaatgactcgccaatcgcacaatatacacgtcctaacttaacttctatcagtcaaccggtctatgatttgggtgctgttagcatgcgtatgctaacaaaaattatgcacaaagaagagttggaagaaaaagaaatagtgcttaatcacgggattgttaaacgtggcacaacaaataattag

SEQ ID NO: 1340 - protein, 315 aa, Streptococcus agalactiae
MATVSRVVNGNKNVKENTRKKVLEVIDRLDYRPNAVARGLASKKTTTVGVVIPNIANSYFSILARGIDDIAAMYKYNIVLASSDEDDDKEVNVVNTLFAKQVDGIIFMGHHLTEKIRAEFSRSRTPIVLAGTVDLEHQLPSVNIDYKAAAVDVIDILAGNHKDIAFVSGPLIDDINGKVRLAGYKEGLKKNGLNFKEGLVFEANYRYAEGFALAQRVINAGATAAYVAEDELAAGLLNGLFEAGKRVPEDFEIITSNDSPIAQYTRPNLTSISQPVYDLGAVSMRMLTKIMHKEELEEKEIVLNHGIVKRGTTNN

SEQ ID NO: 1341 - protein, 1344 aa, Streptococcus agalactiae
ATGACAAATGAATTGATAATGCAAGCTTTTGAGTGGTATTTACCTAGTGATGGGAATCACTGGAAGAAATTAGAGGAGTCTATATCAGACCTTAAAAAACTTGGAATTAGTAAAATCTGGTTACCACCAGCATTTAAGGGAACTAGCAGTGATGATGTAGGATATGGTGTTTATGATCTCTTTGATTTAGGAGAATTTGACCAGAATGGAACAATTAGAACAAAATATGGTAGGAAAGAAGAGTATCTAAAGCTTATTAAGTCGTTAAAGGCAAATGGCATTAAACCGTTTGCAGATATCGTTCTTAACCATAAAGCCAATGGTGATCATAAAGAAAAATTTCAAGTCATCAAAGTCAATCCTGAAAATCGTCAAGAAGCATTAAGTGAACCCTATGAGATTGAAGGATGGACGGGATTTGATTTCCCAGGTAGACAGGGTGAGTACAATGATTTTAAATGGCACTGGTACCACTTTACTGGTTTAGATTACGATGCTAAAAATAATGAAACAGACATCTTTATGATTGTAGGCGATAATAAAGGTTGGGCAGACGATGATTTGATTGATGATGAAAATGGTAATTTCGATTATCTCATGTACAATGACATTGATTTTAAGCATCCTGAAGTTATAAAAAACTTACAAGATTGGGCTAAGTGGTTTATTGAAACTACAGGCATTGAAGGTTTTCGTTTGGATGCTGTGAAACATATCGATTCTTACTTTATTCAAACTTTCATTAATGATATTCGTACAAAAATAAAACCCGATTTAGAGGTCTTTGGCGAATATTGGAAATCTGACCAAACATCAATGAAGGACTATTTAGAGGCAACACAATTTCAATTTTCTCTTGTTGATGTTACCTTACATATGAATTTTTTTGATGCCAGTCACCAAAACCGTGATTTTGATATGCGAACAATTTTTGATGATAGTCTTGTTATTGATAATCCTGAGTATGCTGTTACATTCGTAGAAAATCATGATACGCAAAGTGGACAAGCTCTAGAAAGTAGAGTGGAAGATTGGTTTAAACCTTTAGCTTATGGCTTGATACTTTTACGCCAACAAGGGACTCCATGTCTTTTTTATGGTGATTACTATGGCATTCAAGGAGAATTTGGTCAACCATCCTTTAAAGAGGTTATTGATAAAATGGCTGAGCTACGCCAAAACTATGTATTTGGCAAACAAGTCGATTATTTTACGCATTCAAATTGTATTGGTTGGACTTGTCTTGGGGATGAGGAACATAATTCTTGTTTAGCTGAGGTCCTAACAAATGGTGATCAGGGATGGAAACATATGGAAGTAGGGGNNNNNCATTCCATTCATTAA

SEQ ID NO: 1342 - protein, 447 aa, Streptococcus agalactiae
  VARIANT 442, 443: Xaa = Any Amino Acid
MTNELIMQAFEWYLPSDGNHWKKLEESISDLKKLGISKIWLPPAFKGTSSDDVGYGVYDLFDLGEFDQNGTIRTKYGRKEEYLKLIKSLKANGIKPFADIVLNHKANGDHKEKFQVIKVNPENRQEALSEPYEIEGWTGFDFPGRQGEYNDFKWHWYHFTGLDYDAKNNETDIFMIVGDNKGWADDDLIDDENGNFDYLMYNDIDFKHPEVIKNLQDWAKWFIETTGIEGFRLDAVKHIDSYFIQTFINDIRTKIKPDLEVFGEYWKSDQTSMKDYLEATQFQFSLVDVTLHMNFFDASHQNRDFDMRTIFDDSLVIDNPEYAVTFVENHDTQSGQALESRVEDWFKPLAYGLILLRQQGTPCLFYGDYYGIQGEFGQPSFKEVIDKMAELRQNYVFGKQVDYFTHSNCIGWTCLGDEEHNSCLAEVLTNGDQGWKHMEVGXXHSIH

SEQ ID NO: 1343 - protein, 963 aa, Streptococcus agalactiae
TTGAAAAAGTCAGGTATCGGTCGTGCTATCAAACATCAAGAGAAAGCTCTTCAAATTGCTGGGATAGATTATACCACTAATCCTACAGATGACTTTGACCTTGTTCATATGAATACCTATGGTATTAGAAGTTGGCTTTTGATGAGTAAAGCTAAAAAAACTGGGAAAAAAGTAATTATGCATGGCCATTCCACTGAAGAGGACTTTAGAAATTCTTTTATTGGCTCAAATTTAGTATCCCCGCTTTTTAAATGGTACCTTTGCCGTTTTTATCAAAAAGCAGATGCCATTATAACCCCAACTGATTATTCTAAACAACTAATAAAAGCATATGGCATCAAGAAACCAATTTTTGTTTTATCTAACGGGATTGATCTAAGTCGCTATCAGAGGTCAGAAAAGAAAGAATCTGCATTTCGTCACTATTTTCACTTAAGTAAGGATGATAAAGTTGTTATGGGGGCCGGTCTTTATTTCATGCGTAAGGGAATTGACCAATTTGTTGAAGTAGCTGCAAAAATGCCTGATATTCGTTTTATTTGGTTTGGAGAAACAAATAAATGGGTTATTCCTCGAAAGGTTAGGCAAATCGTTACCAAGCAACATCCCTCAAATGTTACTTTTGCTGGTTACATAAAAGGTGATGTTTATGAAGGTGCCATGAGTGCTAGCGATGCTTTCTTCTTTCCGAGTCGTGAAGAGACAGAAGGGATAGTAGTTTTAGAGGCTTTAGCTAGTCATCAGCATGTGGTTTTAAGAGATATCCCTGTGTATCACGGTTGGGTGACCGAAGACAGTGTTGAATTAGCGACTGATGTTGATGGTTTTGTTGAAAAGTTGGATAAAGTCTTATCTGGTAAGAGTGATAAGATTAAAGAAGGTTATCATGTGGCTGAGAGTCGAAGTATCGAACGAATTGCCCATGAATTGGCAAGTGTTTATCAAAAAGTAATGGAGTTGTAA

SEQ ID NO: 1344 - protein, 320 aa, Streptococcus agalactiae
MKKSGIGRAIKHQEKALQIAGIDYTTNPTDDFDLVHMNTYGIRSWLLMSKAKKTGKKVIMHGHSTEEDFRNSFIGSNLVSPLFKWYLCRFYQKADAIITPTDYSKQLIKAYGIKKPIFVLSNGIDLSRYQRSEKKESAFRHYFHLSKDDKVVMGAGLYFMRKGIDQFVEVAAKMPDIRFIWFGETNKWVIPRKVRQIVTKQHPSNVTFAGYIKGDVYEGAMSASDAFFFPSREETEGIVVLEALASHQHVVLRDIPVYHGWVTEDSVELATDVDGFVEKLDKVLSGKSDKIKEGYHVAESRSIERIAHELASVYQKVMEL

SEQ ID NO: 1345 - protein, 881 aa, Streptococcus agalactiae
ATGCGTATAGGTCTATTTACAGATACATACTTCCCCCAAGTTTCGGGAGTTTCAACAAGTATCCGCACTTTAAAGGAAGGGTTGGAGAAGGAAGGACACGAAGTTTATATTTTCACAACTACCGACCGTAATGTCAAACGTTTTGAAGACCCTACAATTATTCGTTTACCAAGTGTCCCTTTTATTTCTTTTACGGATCGTCGAGTAGTTTATAGAGGTTTAATTTCTGCTTATAGGATAGCTAAAGACTACGAACTTGATATTATTCATACTCAAACAGAATTCAGCTTAGGGCTTTTAGGAAAATTAGTTGCAAAAGCTTTAAGAATACCTGTTGTGCATACTTATCATACTCAATATGAGGATTACGTTGGTTATATCGCAAAAGGCAAATTGATTAAGCCAAGTATGGTCAAATATATCATGCGTACCTACCTAAGTGATTTGGATGGTGTCATATGTCCTTCTCGAATTGTTCTCAATCTTCTAGATGGTTACGGTGTCAAAATTCCAAAACAAGTTATTCCGACAGGTATTCCTGTTGAGAACTATCGTCGAGAGGATATCTCTGAAGAAACAATCAAGAATCTACGAACGGAGCTTGGACTTGCGGATAATGATACAATGCTATTGAGTTTATCACGGGTATCTTTTGAAAAAAATATTCAAGCAATCTTGATGCATTTATCAGCTGTCGTTGATGAAAATCCTCACGTAAAATTAGTGATAGTTGGAGATGGTCCTTATCTTTCAGATCTAAAAGAACTTGTTCACTCTTTAGAACTTGAAAATTCAGTTATTTTTACAGGTATGGTTGAGCATAGCCAAGTGGCTATCTACTATAAAGCATGTGATTTCTTTATTAGTGCTTCMACAAGTGA

SEQ ID NO: 1346 - protein, 293 aa, Streptococcus agalactiae
MRIGLFTDTYFPQVSGVSTSIRTLKEGLEKEGHEVYIFTTTDRNVKRFEDPTIIRLPSVPFISFTDRRVVYRGLISAYRIAKDYELDIIHTQTEFSLGLLGKLVAKALRIPVVHTYHTQYEDYVGYIAKGKLIKPSMVKYIMRTYLSDLDGVICPSRIVLNLLDGYGVKIPKQVIPTGIPVENYRREDISEETIKNLRTELGLADNDTMLLSLSRVSFEKNIQAILMHLSAVVDENPHVKLVIVGDGPYLSDLKELVHSLELENSVIFTGMVEHSQVAIYYKACDFFISASTK

SEQ ID NO: 1347 - protein, 483 aa, Streptococcus agalactiae
GTGATTTCTTTATTAGTGCTTCMACAAGTGAACGCARGGATTAACTTACATTGAGAGTCTGGCGAGTGGACGTCCATCATTGCGCAAAGTAATCCTTATCTAGATGATGTTATTTCAGATAAAATGTTTGGAACTCTGTACAAGAAGGAAAGTGATTTGGCAGATGCTATCCTAGATGCAATAGCAGAGACACCCAAAATGACTCAAGAAGCTTATGAACAGAAATTATATGAGATTTCTGCTGAGAATTTCAGCAAGTCTGTATATGCTTTTTACCTAGACTTTCTGATTTCACAAAAAGCTAGTGTGAAAGAAAAAGTCTCTCTGACAATAGGAAATAAGGATAGCCATTCTACTCTTCGTTTTGTCAGAAAAGCGGTATATTTACCTAAGAAAGTTTTTACCTTTACAGGAAGAGCCTCTAAAAAAGTGGTAAAAGCACCTAAACGTCGTATTTCATCTATTCGAGATTTTTTAGATTGA

SEQ ID NO: 1348 - protein, 161 aa, Streptococcus agalactiae
  VARIANT 8: Xaa = Any Amino Acid
MISLLVLXPSETQGLTYIESLASGRPIIAQSNPYLDDVISDKMFGTLYKKESDLADAILDAIAETPKMTQEAYEQKLYEISAENFSKSVYAFYLDFLISQKASVKEKVSLTIGNKDSHSTLRFVRKAVYLPKKVFTFTGRASKKVVKAPKRRISSIRDFLD

SEQ ID NO: 1349 - protein, 1944 aa, Streptococcus agalactiae
ATGATTAAAATCACTTTCCCAGATGGTGCAATTCGTGAATTTGAATCTGGCATCACAACATTTGAAATTGCACAATCAATTTCTAACTCTTTAGCTAAAAAAGCTTTAGCTGGTAAATTTAATGGTCAACTTATTGATACAACACGTGCTATCGAAGAAGATGGTAGTATTGAGATTGTAACACCTGACCACGAAGATGCTTTAGGAGTTCTTCGTCACTCAGCAGCGCATTTATTTGCTCAAGCTGCAAAACGCCTTTTTCCAGACTTATGTTTAGGTGTAGGTCCAGCTATTCAAGATGGTTTTTACTACGATACTGATAATAAATCAGGTCAAATTTCAAATGATGATCTTCCTCGTATTGAAGAAGAAATGAAAAAAATTGTTAAGGAAAATCACCCTTGTATTCGTGAAGAAATCAGTAAAGAAGAAGCGTTAGAACTTTTTAAAGATGACCCTTATAAAGTTGAATTAATTAGTGAACATGCTGAAGATGGTTTAACTGTTTATCGTCAAGGTGAATTTGTAGACCTTTGTCGTGGACCTCATGTCCCATCAACAGGACGTATTCAAGTCTTTCATCTTCTAAATGTCGCTGGTGCTTACTGGCGTGGTAACAGTGATAATGCTATGATGCAGCGTGTCTATGGTACTGCTTGGTTTGATAAAAAAGATTTGAAAGCATATCTTAAACGCCGTGAAGAAGCTAAGGAACGTGACCATCGCAAATTAGGTAAAGAACTTGATTTATTTATGGTTAATCCTGAAGTAGGTCAAGGATTGCCATTCTGGTTGCCAAATGGAGCAACTATTCGCCGCGAATTGGAACGTTACATTGTTGATAAGGAGATTGCTTCAGGTTATCAACACGTTTACACACCTCCGATGGCATCTGTTGAATTTTACAAGACTTCTGGGCACTGGGACCACTATCGTGAAGATATGTTCCCAACAATGGATATGGGAGATGGAGAGGAATTCGTTCTTCGTCCAATGAACTGCCCACACCATATTGAAGTTTATAAACATCATGTTCATTCATATCGTGAATTGCCAATTCGTATCGCTGAACTTGGTATGATGCACCGTTATGAAAAATCAGGGGCCCTCACAGGATTGCAACGTGTACGCGAAATGACACTCAACGATGCCCATATTTTCGTTACACCTGAGCAAATTAAAGATGAATTTCTTAAAGCTCTTAATCTTATAGCAGAAATTTATGAAGATTTTAACTTAACAGATTACCGTTTCCGCTTATCTTATCGTGACCCAGAAGATAAACATAAGTATTATGATAACGATGAGATGTGGGAAAATGCACAAGCTATGCTAAAAGAGGCTATGGATGATTTTGGATTAGATTATTTTGAAGCAGAAGGCGAAGCAGCCTTTTACGGTCCTAAATTGGATATCCAGGTGAAAACTGCTCTTGGTAATGAAGAAACACTATCTACTATCCAACTAGATTTCCTTCTTCCAGAACGCTTTGATCTCAAATACATCGGTGCAGATGGTGAAGAACATCGTCCAATTATGATTCACCGCGGTGGTATTTCAACAATGGAGCGCTTTACAGCTATTTTAATTGAAACTTACAAAGGTGCCTTTCCAACTTGGCTTGCTCCACAACAAGTTTCTGTTATTCCAATTTCAAATGAAGCCCACATTGATTATGCTTGGGAAGTGGCTCGTGTCCTTAAAGATCGTGGTATTCGTGCTGAAGTAGATGACCGTAACGAAAAGATGCAATATAAGATTCGTGCGGCTCAAACCCAAAAAATTCCATATCAATTGATTGTTGGTGATAAGGAAATGGAAGAAAAAGCCGTAAATGTGCGCCGCTATGGAAGCAAAGCGACTGAAACAAAATCTATAGAGGAATTTGTAGAAAGTATTTTAGCTGATATTGCAAGAAAATCTAGACCTGACGAAGTTAAATAA

SEQ ID NO: 1350 - protein, 647 aa, Streptococcus agalactiae
MIKITFPDGAIREFESGITTFEIAQSISNSLAKKALAGKFNGQLIDTTRAIEEDGSIEIVTPDHEDALGVLRHSAAHLFAQAAKRLFPDLCLGVGPAIQDGFYYDTDNKSGQISNDDLPRIEEEMKKIVKENHPCIREEISKEEALELFKDDPYKVELISEHAEDGLTVYRQGEFVDLCRGPHVPSTGRIQVFHLLNVAGAYWRGNSDNAMMQRVYGTAWFDKKDLKAYLKRREEAKERDHRKLGKELDLFMVNPEVGQGLPFWLPNGATIRRELERYIVDKEIASGYQHVYTPPMASVEFYKTSGHWDHYREDMFPTMDMGDGEEFVLRPMNCPHHIEVYKHHVHSYRELPIRIAELGMMHRYEKSGALTGLQRVREMTLNDAHIFVTPEQIKDEFLKALNLIAEIYEDFNLTDYRFRLSYRDPEDKHKYYDNDEMWENAQAMLKEAMDDFGLDYFEAEGEAAFYGPKLDIQVKTALGNEETLSTIQLDFLLPERFDLKYIGADGEEHRPIMIHRGGISTMERFTAILIETYKGAFPTWLAPQQVSVIPISNEAHIDYAWEVARVLKDRGIRAEVDDRNEKMQYKIRAAQTQKIPYQLIVGDKEMEEKAVNVRRYGSKATETKSIEEFVESILADIARKSRPDEVK

SEQ ID NO: 1351 - DNA, 561 bp, Streptococcus agalactiae
  misc_feature 538, 539, 540, 541, 542: n = A,T,C or G
gtgcaaggtgatgacgaaacaatagagttattaaggtcgtatttagagggagctctttataaggttgtgatggctagtgatggtgaggaggctttttctttatttcagcaacatcagattgatttagcaatcatagatattacgctacctaaaatagatggatatgagttgacgcgactcattcgtcaagatagtcagattcctattattatgctagcagctaagacaacagatatggacagaatattaggattgaatattggagcagatgattttatcacgaaaccgtttaattctttggaggttttagctcgaattaattcgcaactgcgtcgttactatgaattcaatagtcttgccaaacctaaaaatcaatttataaagataggggaattggaattagatgaggaacatgttgaactaactaaaaatggtaaacatatcaagttgactgctacagaatttaagattcttcatatcttaatgtcatcaccaggaaggatttatactaaaacacaactctatgagaagattaacnnnnncattccattcattaattaa

SEQ ID NO: 1352 - protein, 186 aa, Streptococcus agalactiae
  VARIANT 180, 181: Xaa = Any Amino Acid
MQGDDETIELLRSYLEGALYKVVMASDGEEAFSLFQQHQIDLAIIDITLPKIDGYELTRLIRQDSQIPIIMLAAKTTDMDRILGLNIGADDFITKPFNSLEVLARINSQLRRYYEFNSLAKPKNQFIKIGELELDEEHVELTKNGKHIKLTATEFKILHILMSSPGRIYTKTQLYEKINXXIPFIN

SEQ ID NO: 1353 - DNA, 567 bp, Streptococcus agalactiae
atgattaagaaaaataaagtttttttaggagttcttttagtccttgttgttatccttggaggtggtgtattattttaccaatcacaattccaaaagacaactaatcaagcgttagctattgcttataaagatgctaaagtggctaagaaggatgtcatacatcaaaaaattgacaaagaatttgaaaactttagagggagctacgaaattgaattcaataccaaaagcgcagaatacagctatcatgtagatgttaagactggacaaatccttgagcgggacatggataataatggcttttcaaaatcgacttctcagtcaagttcatcgtcaagtcaaaaatctcataaaataagtcaagaagaagccaaaaagattgcatttaaagatgctaatatagaggaatcagaagtcagtaatcttaagatcaaagaagaaattgaaaatggaaaatcagtttatgatattgactttgtggacctgaaaaataaaaatgaagttgattatcaaattgatgcagaaactggaaaaatcattgaacgttctagagatcatatgaatgattaa

SEQ ID NO: 1354 - protein, 188 aa, Streptococcus agalactiae
MIKKNKVFLGVLLVLVVILGGGVLFYQSQFQKTTNQALAIAYKDAKVAKKDVIHQKIDKEFENFRGSYEIEFNTKSAEYSYHVDVKTGQILERDMDNNGFSKSTSQSSSSSSQKSHKISQEEAKKIAFKDANIEESEVSNLKIKEEIENGKSVYDIDFVDLKNKNEVDYQIDAETGKIIERSRDHMND

SEQ ID NO: 1355 - DNA, 651 bp, Streptococcus agalactiae
atgtcatcagtcttaacactaacaaagatactatttctccttcaagggttcggtttaaccttatatatatcttttatttccattttactatcaatgttttttggaactctattagcaattatgagaaatagcaaaaatcctatctggaaattaatagctagtatctatatcgaatttgtcagaaatgttccaaatctactttggatttttatcattttcttagtattccagatgaaatcagtcagcgctggtattacttcgtttacaatttttacctccgctgctttagcagaaattattcggggaggtttaaatggagtcgataaaggacaaacagaagctggactttctcaaggattcacttatttgcaagttttcattattattattttcccacaagcttttcgcaaaatgttgccagccattatttctcagtttgtaacggttataaaagatacatcactactttattctgttatagctattcaagaaatcttcggaaaaagtcaaattctaatgggaagatatttcgaagctggacaagtttttacactctacgctattataactgctgtctatttcattacaaactttatcatctcaagtttttcacgtaaactttcaaaacgttgggagcaagctactgagtaa

SEQ ID NO: 1356 - protein, 216 aa, Streptococcus agalactiae
MSSVLTLTKILFLLQGFGLTLYISFISILLSMFFGTLLAIMRNSKNPIWKLIASIYIEFVRNVPNLLWIFIIFLVFQMKSVSAGITSFTIFTSAALAEIIRGGLNGVDKGQTEAGLSQGFTYLQVFIIIIFPQAFRKMLPAIISQFVTVIKDTSLLYSVIAIQEIFGKSQILMGRYFEAGQVFTLYAIITAVYFITNFIISSFSRKLSKRWEQATE

SEQ ID NO: 1357 - DNA, 696 bp, Streptococcus agalactiae
atgactttattaaacatcagtccttttgccatttcaaggtggggcgctttctttaaccatttcgacctattctttaaaggcttcttatatactctaggtatttcgtttggtgcactcctacttgctctgatattaggaattctctctggtggtttatcaacttctaaaagtaaagttggtaagttgatatcacgtatctatgttgaagtttttcaaaacacacctcttttagttcaaatggtttttgtctactatggactagcaatcattagtaatggacatgttatgattagtgcttttttcaccgccgttttgtgcgttggactataccatggtgcctatatttctgaagttattcgctcaggaattgaagctgtccctaaaggacaaacagaggctgctttagctcaaggattcacagctaatcaaaccatgcaacttatcattttgcctcaagctgtcagaacaattttaccaccaatgaccaaccaagttgttaatctaatcaagaatacctctaccgtagcaatcatttctggagccgatatcatgtttgtagctaaggcctgggcttatgatacgactaattatatcccagcttttgcaggagctgctatcttctattttgttatttgtttcccactagcaagctgggcaagaaaacaagaagaattaaataagaaaacttattcttaa

SEQ ID NO: 1358 - protein, 231 aa, Streptococcus agalactiae
MTLLNISPFAISRWGAFFNHFDLFFKGFLYTLGISFGALLLALILGILSGGLSTSKSKVGKLISRIYVEVFQNTPLLVQMVFVYYGLAIISNGHVMISAFFTAVLCVGLYHGAYISEVIRSGIEAVPKGQTEAALAQGFTANQTMQLIILPQAVRTILPPMTNQVVNLIKNTSTVAIISGADIMFVAKAWAYDTTNYIPAFAGAAIFYFVICFPLASWARKQEELNKKTYS

SEQ ID NO: 1359 - DNA, 801 bp, Streptococcus agalactiae
atgctgagacgaaaaagattaacgttctatctattatcctgtatttttattttcctgttattttatcctaactcaacgtcagctaatcaattatcagaaatcaaaaaatcgggcgtccttaaagttggagtcaaacaagatgtgcctaactttggttattataatgctgagacgaatcaatacgaaggaatggaaattgatattgccaaaaaaattgccaaatccttaggtgtcaaaccagtttttgtaccgacaaccgcacaaaccagagagcctctgatggacaatgggcaaattgatattctaatcgcaacatacactatcacgcccgaaagaaaagctaactataatatttctaaagcttattatcacgatgaaattggatttttggtgcgtaaaaatagtcatatcaaaactataaaagaattggatggtaaacacattggtgtggctcaaggtgccactacaaaagtcaatttagaaaaatatgctaaagaacacaagctaaaatttagctatgctcaattagggagtttcccagaattagcgatatcgctgtacgctaatcgtattgatgctttttcagttgataaatctatccttagcggctaccttagccctcatacaaccatattaaaagaagggttcaatacgcaagaatacggtattgcaaccagtaaacaggacaaagtcttgattccctacgttaataagttactggtatcatgggaaaaagatggtagtttaaaacacatttatcaaaaatttaagcttaaacccgctaaagtaaaaaaagaatag

SEQ ID NO: 1360 - protein, 266 aa, Streptococcus agalactiae
MLRRKRLTFYLLSCIFIFLLFYPNSTSANQLSEIKKSGVLKVGVKQDVPNFGYYNAETNQYEGMEIDIAKKIAKSLGVKPVFVPTTAQTREPLMDNGQIDILIATYTITPERKANYNISKAYYHDEIGFLVRKNSHIKTIKELDGKHIGVAQGATTKVNLEKYAKEHKLKFSYAQLGSFPELAISLYANRIDAFSVDKSILSGYLSPHTTILKEGFNTQEYGIATSKQDKVLIPYVNKLLVSWEKDGSLKHIYQKFKLKPAKVKKE

SEQ ID NO: 1361 - protein, 756 aa, Streptococcus agalactiae
ATGTCACTCATATCTTATAAGAATGTTAACAAGTATTATGGAGATTATCACGCCCTTCGTCAGATTAATTTGGAAATAGAGCCAGGGCAAGTGGTTGTTCTATTAGGACCTTCTGGATCAGGTAAATCAACACTTATTAGAACAATGAACGCTCTCGAATCTATTGACGATGGTAGTTTGGTCGTGAATGGACATGAATTAGCAAATATTTCATCTAAAGAATTGGTCAACCTCCGTAAAGAAGTTGGTATGGTTTTTCAACATTTTAACCTTTATCCTCACAAAACCGTGTTAGAAAATATTACATTAGCTCCTATTAAAGTATTAAAACAATCTAAAAAAGAAGCTATGGAAATTGCTGAAAAATATTTAAAATTTGTCAATATGTGGGAAAGAAAAGATTCCTACCCATCTATGCTATCAGGTGGTCAAAAACAAAGAATTGCTATTGCTAGAGGGCTTGCCATGCATCCAAAACTCCTCCTCTTTGATGAGCCTACCTCTGCCCTTGATCCCGAAACCATCGGAGACGTTCTTTCAGTGATGCAAAAATTGGCAAATGACGGAATGAATATGGTCGTTGTAACTCATGAAATGGGATTTGCACGAGAAGTTGCTGATCGTATTATTTTTATGGCTGATGGGGAAATTTTAGTGGATACTACAGATGTACAAGACTTTTTTGATAATCCCAGAGAACCACGTGCTAAACAATTTTTAAGCAACATTATCAACCATACCAGTACTGACCTTTAG

SEQ ID NO: 1362 - protein, 251 aa, Streptococcus agalactiae
MSLISYKNVNKYYGDYHALRQINLEIEPGQVVVLLGPSGSGKSTLIRTMNALESIDDGSLVVNGHELANISSKELVNLRKEVGMVFQHFNLYPHKTVLENITLAPIKVLKQSKKEAMEIAEKYLKFVNMWERKDSYPSMLSGGQKQRIAIARGLAMHPKLLLFDEPTSALDPETIGDVLSVMQKLANDGMNMVVVTHEMGFAREVADRIIFMADGEILVDTTDVQDFFDNPREPRAKQFLSNIINHTSTDL

SEQ ID NO: 1363 - protein, 711 aa, Streptococcus agalactiae
ATGAAAAAAATACTTATCGTTGATGATGAAAAACCAATTTCAGATATTATCAAATTTAATTTAACCAAAGAAGGATATGAGACGGCGACAGCTTTCGATGGCCGTGAAGCTTTAGTACAATATGCAGAATTTCAACCAGATTTAATCATTTTGGATTTAATGCTTCCTGAACTAGATGGTTTAGAAGTGGCTAAGGAAGTTCGTAAAACCAGCCATATTCCTATTATTATGCTTTCTGCAAAAGACAGTGAGTTTGACAAAGTCATTGGTTTAGAAATCGGTGCAGATGATTATGTTACTAAACCTTTTTCAAATCGTGAACTTTTGGCACGGGTCAAAGCACATTTACGACGTACTGAAAATATTGAAACAGCTGTAGCAGAAGAAAGTGCTCAAAATGCTTCTTCAGATATTACTATTGGTGAGTTGCAAATTTTACCAGATGCCTTTATTGCTAAGAAACGTGGCGAAGAAATTGAATTAACGCACCGAGAATTTGAATTACTTCACCATTTAGCGACACATATCGGACAAGTCATGACACGCGAACATTTATTGGAAACAGTTTGGGGATATGATTATTTTGGAGATGTCCGTACAGTTGATGTGACGGTGAGACGTTTACGTGAAAAGATTGAAGATACTCCTGGTCGTCCAGAATATATTTTGACTCGACGTGGTGTAGGTTATTACATGAAGTCTTATGAATAA

SEQ ID NO: 1364 - protein, 236 aa, Streptococcus agalactiae
MKKILIVDDEKPISDIIKFNLTKEGYETATAFDGREALVQYAEFQPDLIILDLMLPELDGLEVAKEVRKTSHIPIIMLSAKDSEFDKVIGLEIGADDYVTKPFSNRELLARVKAHLRRTENIETAVAEESAQNASSDITIGELQILPDAFIAKKRGEEIELTHREFELLHHLATHIGQVMTREHLLETVWGYDYFGDVRTVDVTVRRLREKIEDTPGRPEYILTRRGVGYYMKSYE

SEQ ID NO: 1365 - protein, 1350 aa, Streptococcus agalactiae
ATGAATAATAGTGCTGCAAATATTAGGTCGTTTGAGCTAGCCTTACTTTTTTTACTAGTTTTTGTTGCTGTTTATTTTGTTTATCTAGCGGTTAGAGATTTTAAAATGTCTAAAAATATCCGGCTTTTGAATTGGAAAGTCAGAGATTTGATAGCAGGAAATTATTCAGATAGTATTCTAATTCAAGGTGATGCAGATTTGGTAGAATTAGGTGAAAGTCTAAATGATTTATCTGATGTCTTCCGAATGGCACATGATAACTTAGAACAAGAAAAGAATCGCTTAGCAAGTATCTTAACTTATATGACTGACGGTGTGCTGGCTACAGATCGTTCAGGAAAAATCGTTATGATTAATGAGACAGCCCAACAGCAGTTCAATCTAGCATATGATGAAGCTTTATCAATGAATATTGTTGATATGTTAGGGTCGGGAAGTCCATATTCGTTCCAAGATTTAGTCTCTAAAACGCCAGAGGTAGTTCTTAATAGACGTGATGAAAACGGTGAATTTGTTACCTTACGGATTCGATTTGCTTTGAACCGTCGTGAAAGTGGTTTTATTTCCGGTTTAGTTGCAGTGTCACACGATGCTACTGAGCAAGAGAAAGAAGAGCGTGAAAGAAGACTTTTTGTATCTAATGTTTCTCATGAACTTCGTACACCTTTGACATCTGTAAAATCTTATTTAGAAGCTTTAGATGAGGGAGCGCTTAATGAAGAAGTTGCTCCAAGCTTCATTAAGGTATCTCTAGATGAAACAAATCGTATGATGCGTATGATATCAGATTTATTAAGTTTATCGCGCATTGATAATGAAGTAACGCATTTAGATGTTGAAATGACGAATTTTACAGCTTTCATGACCTCAATTTTGAATCGATTTGATCAGATTAGAAATCAAAAAACAGTCACAGGAAAAGTTTATGAAATTGTCAGAGATTATCCTCTTAAGTCAATTTGGGTGGAAATTGATACAGATAAGATGACTCAAGTGATTGATAACATTTTAAATAATGCAGTCAAGTATTCACCAGATGGTGGTAAGATCACAGTTAATCTACGCACAACTAAAACGCAGATGATTTTATCAATATCAGACCAAGGCTTAGGTATTCCCAAAAAAGATTTACCTCTCATCTTTGATCGTTTTTATCGTGTTGATAAGGCGAGAAGTCGTCAACAGGGTGGGACTGGACTTGGTTTGTCAATTGCAAAAGAAATTGTTAAGCAGCATAAGGGATTTATTTGGGCTAAGAGTGAGTATGGTAAAGGGTCTACTTTTACAATAGTCTTGCCTTATGATAAAGATGCTGTAACTTATGAAGAATGGGAGGACGTTGAAGATTAA

SEQ ID NO: 1366 - protein, 449 aa, Streptococcus agalactiae
MNNSAANIRSFELALLFLLVFVAVYFVYLAVRDFKMSKNIRLLNWKVRDLIAGNYSDSILIQGDADLVELGESLNDLSDVFRMAHDNLEQEKNRLASILTYMTDGVLATDRSGKIVMINETAQQQFNLAYDEALSMNIVDMLGSGSPYSFQDLVSKTPEVVLNRRDENGEFVTLRIRFALNRRESGFISGLVAVSHDATEQEKEERERRLFVSNVSHELRTPLTSVKSYLEALDEGALNEEVAPSFIKVSLDETNRMMRMISDLLSLSRIDNEVTHLDVEMTNFTAFMTSILNRFDQIRNQKTVTGKVYEIVRDYPLKSIWVEIDTDKMTQVIDNILNNAVKYSPDGGKITVNLRTTKTQMILSISDQGLGIPKKDLPLIFDRFYRVDKARSRQQGGTGLGLSIAKEIVKQHKGFIWAKSEYGKGSTFTIVLPYDKDAVTYEEWEDVED

SEQ ID NO: 1367 - protein, 810 aa, Streptococcus agalactiae
ATGTCAGAAATAGGATTTAAATATAGTATCTTAGCTTCAGGTTCAACTGGAAATTGTTTTTATATTGAGACACCCCAAAAACGTCTTTTAATTGACGCTGGTTTAACAGGCAAGAAAGTGACTAGCCTTCTTGCAGAAATTAATCGTAAACCAGAAGATTTAGATGCTATACTAGTTACCCATGAACATTCTGACCACATTAAAGGTGTTGGCGTATTGGCTAGGAAATATCACCTTGATATTTATGCCAATGAGCAGACGTGGAAAGTTATGGATGAGCGTAACATGTTAGGCAAAGTTGATGTTAGTCAAAAGCATGTTTTTGGACGCGGTAAAACCTTAACTTTCGGGGATTTAGATATTGAGAGCTTTGGTGTAAGTCATGATGCTGTGGATCCCCAATTTTACCGTATGATGAAAGATGATAAGAGCTTTGTGATGTTGACAGATACAGGATATGTTAGCGACCGAATGGCAGGCTTGATTGAGAATGCAGATGGTTATTTGATCGAGTCAAATCACGACATTGAGATTCTACGTTCGGGTTCTTATCCTTGGACACTTAAGCAACGTATTTTATCAGATAAAGGACATTTATCTAATGAAGATGGTTCAGAAACCATGATTCGCACTATAGGTAACCGTACTAAACACATCTATTTAGGACACTTGAGTAAGGAAAATAATATTAAGGAACTTGCTCACATGACTATGGAAAACAATTTAATGAGAGCTGACTTTGGTGTGGGCACAGATTTTTCTGTTCACGATACTTCACCTGATTCAGCTACCCCACTGACGAGGATTTAA

SEQ ID NO: 1368 - protein, 269 aa, Streptococcus agalactiae
MSEIGFKYSILASGSTGNCFYIETPQKRLLIDAGLTGKKVTSLLAEINRKPEDLDAILVTHEHSDHIKGVGVLARKYHLDIYANEQTWKVMDERNMLGKVDVSQKHVFGRGKTLTFGDLDIESFGVSHDAVDPQFYRMMKDDKSFVMLTDTGYVSDRMAGLIENADGYLIESNHDIEILRSGSYPWTLKQRILSDKGHLSNEDGSETMIRTIGNRTKHIYLGHLSKENNIKELAHMTMENNLMRADFGVGTDFSVHDTSPDSATPLTRI

SEQ ID NO: 1369 - protein, 369 aa, Streptococcus agalactiae
TTGAAAAAGATTTTTTACATTAGTTTAGGATTTATTAGTTTAGGGATAGGCATTGCAGGTATTGTCTTGCCGGTAGTTCCAACGACTCCATTAGTATTGCTTTCAGCTTTTTGCTTTTCGAGAAGCTCTGAAAAATTTGATATTTGGTTGCGTCAAACTAAAGTTTATAAATACTACGCTGCAGATTTTGTTGAAAGCAGAAGTATTGCCCCAGCGCGTAAAAAGTCAATGATTTGGCAAATTTATATCTTGATGGGAATTTCAATCTATTTTGCTCCTCTAATGTGGCTCAAACTGGGATTATTGATTGGAACTATTGTAGGAACTTATGTGCTTTTTTATGTAGTACCTGATAAAATTGATGAATAG

SEQ ID NO: 1370 - protein, 122 aa, Streptococcus agalactiae
MKKIFYISLGFISLGIGIAGIVLPVVPTTPLVLLSAFCFSRSSEKFDIWLRQTKVYKYYAADFVESRSIAPARKKSMIWQIYILMGISIYFAPLMWLKLGLLIGTIVGTYVLFYVVPDKIDE

SEQ ID NO: 1371 - DNA, 687 bp, Streptococcus agalactiae
atgaaagaattaagatcaaagctggaaaaagactatggtattgtttttgctaatcaagaattattagatacagcttttacccatacatcatacgcaaatgagcatcgcctcctaaacatttcacataatgaacgtttggaatttttaggagacgctgttctacaattacttatttcacagtatctttttacaaagtaccctcaaaaggcagaaggtgatttatcaaaattacgttcaatgattgttcgtgaggaaagtcttgcaggtttttcacgtctatgtggctttgatcactatattaaacttggaaaaggagaagaaaaatctggtggacgtaatcgtgacactattttaggagatttatttgaggcttttttaggagctttattattagataaaggtgttgaagtggttcatgcctttgttaacaaggtaatgatccctcacgttgaaaaagggacctatgagcgtgttaaagattacaagacaagcttgcaagaattacttcaatctcatggggatgtaaaaatagattatcaagttactaatgaaagtggtccagcacatgcaaaggaatttgaggtgactgtatctgtcaaccaagaaaatttgagccaaggaattggacgatcaaagaaagctgctgaacaagacgctgccaaaaatgctttagcaacgttacaatga

SEQ ID NO: 1372 - protein, 228 aa, Streptococcus agalactiae
MKELRSKLEKDYGIVFANQELLDTAFTHTSYANEHRLLNISHNERLEFLGDAVLQLLISQYLFTKYPQKAEGDLSKLRSMIVREESLAGFSRLCGFDHYIKLGKGEEKSGGRNRDTILGDLFEAFLGALLLDKGVEVVHAFVNKVMIPHVEKGTYERVKDYKTSLQELLQSHGDVKIDYQVTNESGPAHAKEFEVTVSVNQENLSQGIGRSKKAAEQDAAKNALATLQ

SEQ ID NO: 1373 - DNA, 2538 bp, Streptococcus agalactiae
atgccagacgttatatttgctggtacagaaaatcgtaagccccttaattatgcgcaagtgagtgttactttagataatagcgaccattttatcgaaaatatagctgacgaagttcgagttgaacgtcgtatttttcgaaacggagatagtgaatatttaatagatggacgcaaagttcgcttacgtgatattcatgatttatttatggatactggattaggaagagattctttttctattatttcccaaggacgcgttgaagctatttttaatagtaaaccagaagagcgccgtgccatatttgaagaagccgctggtgttctgaaatacaaaacacgtaagaaagaaacacaatccaaattagaacaaactcaagggaacttagatcgcttagaggatattatttatgaattggacatgcaagtccaaccattagaaaaacaagcaagtattgccaagcgttttttagtattagatgaggaacgacaaggactccacttatctattttgattgaagatattttacaacatcaatcagatttaactactgttgaggaaaagctattgacagtaagaaaagagttagcaacttattaccaacaacgtcagtcccttgaagatgaaaatcaatcgttaaaacagaaacgtcaccatttatctgaagaaattgaggctaaacagttagctcttttagacgttacaaagttaaagtcagatttggaacgccaaattgatctgattcgtttagagtcaaaccaaaaggctgaaaaaaaagaagaggcaggtcaacgcttagcagagttagaaattaaagctaaagattgtagtgaccagattacccaaaaaaatatagagttaactactctgtcggaaaaaatagcccaaataagatcagaaattgttagtacagaaagttccttggagcgtttttcaactaatccggatcagattattgaaaaacttcgagaagactttgttaccttgatgcaagaagaagccgacacttcaaacgctttaacagctttactagctgatatagagaatcaaaaacaagcttctcaagctaaatctcaagaaatacaagaagttagcaaaaatttagaagtattaaaaagtaacgcaaaggtagcattggaacgatttgaggctgcaaagaagaatgttcgtcagttattatctcactaccaagatttaggtcaaaccttgcaaaatctagaaggtgagtataagaatcagcagtcaattttatttgatcatttagatgaaatcaaatcaaagcaagcacgtatttcgagtttagaatctattttgaaaaatcatagtaatttctatgctggagtgaagtcagttctacaggctaaggaccagcttggaggtatcataggtgctgttagtgagcatcttagctttgacaaacattaccaaacagcattggagatagctttgggaggtagcagccaacacatcattgttgaagacgagagtgctgccaaacgttcaattgcttttttaaagaaaaaccgccaaggtagagcgacatttctgcctttaactacaataaaaccaagagaattagcacaacattatctctcaaaattacaaagttctcaagggtttttaggaatagctagtgaattggtaacctatgatcaacgcttgtcaaacatttttaaaaataacttagggttaactgctatttttgatacggttgataatgctaatgtagctgcgagacaattgaattatcaagtacgtttagtaaccttagatggaacagagttacgccctggagggtcgtactcagggggagcaaatcgtcaaaataatactgtttttatcaagcctgaattggataatctaaaaaaagaattgaaacaggcacaaagtaaacaattaattcaagaaaaagaagttgccacattgttagagcaactcaaagagaaacaagaaaccttagcacaacttaagaatgatggagaacaagctcgtcttgaggaacaaagagctgatatagagtatcaacaactatcagaaaagcttgctgatttaaataaactatataatggcttgcaattaagcagcggggcgttggaacaaactacttctgaaaatgaaaaaaatcgtttagaaaaagaacttgaacaatttgctattaaaaaagaagagttgacaacttcaattgctcaaattaaggaagataaagattcaattcaagaaaaagtcaataatctaacaacattattgtcagaggcacagctagaagaacgtgatttgctaaacgagcagaaatttgaacgtgccaactgtacacgtctagagattaccttgtctgaaataaaacgtgacattagtaatttacaaacattactaagccatcaggacagtcaattagacaaagaagagcttccacgtatagaaaaacagttgctacaagtaaataatagaagagaaaatgacgaagaaaagcttgtgagtctccgttttgaattggaggattgtgaagctgctttagatgattttagctgcttctctggctaa

SEQ ID NO: 1374 - protein, 845 aa, Streptococcus agalactiae
MPDVIFAGTENRKPLNYAQVSVTLDNSDHFIENIADEVRVERRIFRNGDSEYLIDGRKVRLRDIHDLFMDTGLGRDSFSIISQGRVEAIFNSKPEERRAIFEEAAGVLKYKTRKKETQSKLEQTQGNLDRLEDIIYELDMQVQPLEKQASIAKRFLVLDEERQGLHLSILIEDILQHQSDLTTVEEKLLTVRKELATYYQQRQSLEDENQSLKQKRHHLSEEIEAKQLALLDVTKLKSDLERQIDLIRLESNQKAEKKEEAGQRLAELEIKAKDCSDQITQKNIELTTLSEKIAQIRSEIVSTESSLERFSTNPDQIIEKLREDFVTLMQEEADTSNALTALLADIENQKQASQAKSQEIQEVSKNLEVLKSNAKVALERFEAAKKNVRQLLSHYQDLGQTLQNLEGEYKNQQSILFDHLDEIKSKQARISSLESILKNHSNFYAGVKSVLQAKDQLGGIIGAVSEHLSFDKHYQTALEIALGGSSQHIIVEDESAAKRSIAFLKKNRQGRATFLPLTTIKPRELAQHYLSKLQSSQGFLGIASELVTYDQRLSNIFKNNLGLTAIFDTVDNANVAARQLNYQVRLVTLDGTELRPGGSYSGGANRQNNTVFIKPELDNLKKELKQAQSKQLIQEKEVATLLEQLKEKQETLAQLKNDGEQARLEEQRADIEYQQLSEKLADLNKLYNGLQLSSGALEQTTSENEKNRLEKELEQFAIKKEELTTSIAQIKEDKDSIQEKVNNLTTLLSEAQLEERDLLNEQKFERANCTRLEITLSEIKRDISNLQTLLSHQDSQLDKEELPRIEKQLLQVNNRRENDEEKLVSLRFELEDCEAALDDFSCFSG

SEQ ID NO: 1375 - DNA, 849 bp, Streptococcus agalactiae
atgattttagctgcttctctggctaaagagggacaaaaaaatgaaagtcttattcgtcagcaagctcaattagagtcacaatgtgaacaattatctcaacaattgatgatattctcacgtcaattatcagaagactatcagatgacattggatgaagcgaaggtaaaagcaaatgtcttggaagatattttgatggcgcgtgaacaattgaaatctctacaagctaaaattaaagctttaggacctgttaatattgatgcaattgctcaatttgaagaagttcatgaacgattgaccttccttaacacacagcgagacgacttagttcatgccaaaaatttattactagagacgattacagatatggatgatgaagttaagactcgttttaaatcgacatttgaagccattcgtcatagtttcaaagaaacctttgtacagatgtttggtggaggttctgcggaccttattctgacagaaggtgatttattatcagctggggttgatatttcggttcaacctcctggtaaaaaaatccagtctttaaacttgatgtcaggtggtgaaaaagcattatcagcgttagcattattatttgccattatccgtgttaagacaattccatttgtcatcttggatgaagttgaggccgctttagatgaagcaaatgttaagcgatttggcgattatcttaatcgatttgataaatcaagtcaatttatcgttgttactcaccgaaaagggactatgtctgctgctgatagtatctatggggtaacgatgcaagaatcaggcgtttccaaaattgtttctgtaaaattaaaagaagctcaagaaatgaccaattag

SEQ ID NO: 1376 - protein, 282 aa, Streptococcus agalactiae
MILAASLAKEGQKNESLIRQQAQLESQCEQLSQQLMIFSRQLSEDYQMTLDEAKVKANVLEDILMAREQLKSLQAKIKALGPVNIDAIAQFEEVHERLTFLNTQRDDLVHAKNLLLETITDMDDEVKTRFKSTFEAIRHSFKETFVQMFGGGSADLILTEGDLLSAGVDISVQPPGKKIQSLNLMSGGEKALSALALLFAIIRVKTIPFVILDEVEAALDEANVKRFGDYLNRFDKSSQFIVVTHRKGTMSAADSIYGVTMQESGVSKIVSVKLKEAQEMTN

SEQ ID NO: 1377 - DNA, 798 bp, Streptococcus agalactiae
atgataaaattagtagcaaccgatatggacggtacattcttagatgaaaacggtacctatgataaaaaacgtttagcaaatgtgctaaaaaaatttaaagaacaaggaattgtctttacggcagcaagtgggcgttccttattatcacttgaacaattatttgctgactttcgtgatcagatggcttttatagcagaaaacggaagtgcagcagtcttatttaatcgcttggcatatgaacagcacttgagtcgagaacaatacttagatattattgaccatttgagtaagagcccttatatggagaataatgaatatgtcttatctggcaaggatggtgcatatattctaagtgatgccaatccagattatattgaattcatcactcattattatgataatttgcaaaaagtttctcactttgaagatgttgatgatattattttcaaagtaacggctaactttactgaagagactgttagacaagctgaggagtgggtaaatcaagctataccgtatgccacagcagtgacaacaggttttaaatccattgatattattctaagctcagttaataaacgaaatggtttagagcacctctgtgaacaatacggtattagagcagaagaagtcttatcttttggtgacaatattaatgatttagaaatgctagagtggtcaggaaaagctatcgcaacagaaaatgctagaccagaagttaaagagatagcagattgtattataggtcatcacaataatcaagctgtaatggcttatttagaaagtatggtggattaa

SEQ ID NO: 1378 - protein, 265 aa, Streptococcus agalactiae
MIKLVATDMDGTFLDENGTYDKKRLANVLKKFKEQGIVFTAASGRSLLSLEQLFADFRDQMAFIAENGSAAVLFNRLAYEQHLSREQYLDIIDHLSKSPYMENNEYVLSGKDGAYILSDANPDYIEFITHYYDNLQKVSHFEDVDDIIFKVTANFTEETVRQAEEWVNQAIPYATAVTTGFKSIDIILSSVNKRNGLEHLCEQYGIRAEEVLSFGDNINDLEMLEWSGKAIATENARPEVKEIADCIIGHHNNQAVMAYLESMVD

SEQ ID NO: 1379 - DNA, 825 bp, Streptococcus agalactiae
atgtcggatattaaaatacttgccttagatttagatggcactttatttacaacagataagaaagtttcagaagaaaataaagtggccttaaaagcagctagagaaaaaggtataaaagttgttattacaacagggcgtcctttaaaagcaattggtaatttgttagaggacctagagttagtatctgatgaagattacagcattacttttaacggtggtttagttcaacaaaatacagggaaaatcttagctaaaactgcaatgacacgacaagaagtggaagatatccatgaggagttgtatcaagtgggtttgccaacagatatcttaagtgagggaacggtatatagtatcgctaacaagggacaccattctcaatatcatttagccaacccgctcttagaatttatagaagttgatgatttagagcaagtgccaaaggatgtagtttataataaaattgttagtgttattgatgctacatatcttgatcaacaaattgctaaacttcctgatagacttaaagttgactatgaaatgtttaaatcacgtgatatcattttagaattgatgcctaaaggtgttcataaagcagtcggcttagaactactgacaaaacaccttgggttagatagtagtcaagttatggcaatgggagatgaagcaaatgatttatcaatgctagagtgggcaggcttaggagttgcaatggctaatggtattccagaagctaaggcaatagcaaaagcgacaactatttgtaataacgatgagtctggagtcgccgaagcaattgggaaatatattttaagtgaggaaaattaa

SEQ ID NO: 1380 - protein, 274 aa, Streptococcus agalactiae
MSDIKILALDLDGTLFTTDKKVSEENKVALKAAREKGIKVVITTGRPLKAIGNLLEDLELVSDEDYSITFNGGLVQQNTGKILAKTAMTRQEVEDIHEELYQVGLPTDILSEGTVYSIANKGHHSQYHLANPLLEFIEVDDLEQVPKDVVYNKIVSVIDATYLDQQIAKLPDRLKVDYEMFKSRDIILELMPKGVHKAVGLELLTKHLGLDSSQVMAMGDEANDLSMLEWAGLGVAMANGIPEAKAIAKATTICNNDESGVAEAIGKYILSEEN

SEQ ID NO: 1381 - protein, 1611 aa, Streptococcus agalactiae
ATGGGATTATTTGACCGCCTATTTGGACATAAGAAAAAAGATAAAGAACCAGAAATTGAAGCATCAGAATCTGTTGTTTTAGAAGATGAAGATTCAGTTATTGATAAAGAGGAGGGCAGCAACTTTTCGAAGGAGTCAACTTTGAATCGAACCTCTGAAGTCCCTGTTGCAGAAGATGATTCTTTCTTAGAATTAGAAAGAGATACAGCATTGTCAGAATCACATCAACCAGTTACCTCTGAAATTCATCCTTTAGAGTCAGAAGATACCGATGAAATTCCTGTAAAAGAAGACGATAGTTTTTTAGAACTAGAAGATAGGGCTAAGACAAAGGTAGCAGATACTTCTGAGGTAGAAAATGTAGTTCCTGATTCCACGACTCTTTCTGACAATGTTTCTGCTAAATCTGAGGCATCTTTTAGTGATAAGGAGCAATTAAGTGATAGTCAGGCTTCAGATCAGTTTTCAGAAACTCCCCTTCAAGAAGAGATGTCTAGTGGAAAAACTGAGGTACAAACAGAGTCAGAGGATACATCTGCGGCTGATGCTTTTTTAGCAGATTACTATGCTAAACGTAAAGCAATTGAGAAAGAAATCTCGTCTAATTCGCTGTCAACAGATGAGTCAGAATTTTCTGAGGCACAGGAAGTTTTATCGCAATCACAGGCAGACACTATAAAAGCTGAGAGTCAAGAGGAAAAATATAATCGTAGCCTGAAAAAAACACGCACAGGTTTTAGTGCACGCCTTAATGCTTTCCTTTCTAACTTCCGTCGTGTTGACGAAGAGTTCTTTGAAGAATTAGAAGAAATGTTAATCTTATCTGACGTTGGGGTAAATGTTGCAACACAGTTAACCGAAGATCTTCGTTATGAAGCAAAATTAGAGAATGCCAAGAAATCAGAGGATTTAAAACGTGTTATCGTTGAAAAATTAGTTGAAATCTACGAAAAAGATGGTATTTATAATGAGGCTATCAATTTCCAAGAAGGTTTAACCGTAATGCTTTTTGTAGGTGTTAATGGTGTTGGAAAAACGACATCTATAGGTAAGTTAGCTCATCAATACAAGTCTCAAGGGAAAAAAGTTATGTTAGTAGCAGCTGATACTTTCCGTGCAGGTGCTGTGGCTCAACTAGTAGAATGGGGACGCCGTGTTGATGTACCAGTTGTCACTGGAGAAGAAAAAGCAGATCCGGCTAGCGTTGTCTTTGATGGCATGGAAAAAGCCGTTGCTCAAGGCGTTGATGTCTTGTTAATTGATACAGCAGGACGTCTGCAAAATAAAGAAAACCTTATGGCAGAGTTGGAAAAAATTGGACGTATTATTAAGCGTGTCGTACCTGATGCTCCCCACGAAACTTTGCTTGCTTTAGATGCATCTACAGGACAAAATGCTTTAAGTCAAGCTAAAGAGTTCTCGAAAATTACACCATTAACTGGCCTTATTCTGACTAAAATTGATGGTACTGCTAAGGGTGGTGTGGTACTGGCTATTCGTCAAGAACTAGATATTCCTGTTAAATTCATTGGTTTCGGCGAAAAAATCGATGATATTGGTGAATTTAATTCAGAAGATTTCATGCGTGGCCTTCTGGAAGGAATTTTATAA

SEQ ID NO: 1382 - protein, 536 aa, Streptococcus agalactiae
MGLFDRLFGHKKKDKEPEIEASESVVLEDEDSVIDKEEGSNFSKESTLNRTSEVPVAEDDSFLELERDTALSESHQPVTSEIHPLESEDTDEIPVKEDDSFLELEDRAKTKVADTSEVENVVPDSTTLSDNVSAKSEASFSDKEQLSDSQASDQFSETPLQEEMSSGKTEVQTESEDTSAADAFLADYYAKRKAIEKEISSNSLSTDESEFSEAQEVLSQSQADTIKAESQEEKYNRSLKKTRTGFSARLNAFLSNFRRVDEEFFEELEEMLILSDVGVNVATQLTEDLRYEAKLENAKKSEDLKRVIVEKLVEIYEKDGIYNEAINFQEGLTVMLFVGVNGVGKTTSIGKLAHQYKSQGKKVMLVAADTFRAGAVAQLVEWGRRVDVPVVTGEEKADPASVVFDGMEKAVAQGVDVLLIDTAGRLQNKENLMAELEKIGRIIKRVVPDAPHETLLALDASTGQNALSQAKEFSKITPLTGLILTKIDGTAKGGVVLAIRQELDIPVKFIGFGEKIDDIGEFNSEDFMRGLLEGIL

SEQ ID NO: 1383 - protein, 813 aa, Streptococcus agalactiae
ATGATTCGATTTCTTATTCTTGCTGGTTATTTTGAATTAAGCATGTATTTAAAGTTATCAGGTAAACTAAATCAGTATATTAATACTCATTATACCTATTTGGCCTATATTTCAATGGTCCTATCTTTTATTTTAGCAATTGTACAGCTAATTATTTGGGTTAAAAATATGAAAATGCATAGTCACCTACATGGTAAAATAGCTAAATCAACAAGCCCAATGATTTTAGTATTTCCCGTTTTAGTAGGTTTGTTAGTACCTACAGTTAGTTTAGACTCAACCACAGTCTCTGCCAAGGGATATAATTTCCCTCTAGCAGCCGGCTCTACTGGTACTGTAAGTCAAGATGGGACACGCGTTCAATATTTGAAACCAGATACCAGCACTTATTTTACTTCTTCAGCCTATGAAAAAGAAATGCAAAAAGAGCTTAAAAAATATAAAGGCTCTGGTACATTAACCATCACAACTGAAAATTACATGGAAGTTATGGAACTAATTTATCTCTATCCCGAGCAATTCATGGATCGCCAAATACAATATACTGGGTTTGTTTATAACGAACCCAAACACGAAGGATATCAATTTATTTTCCGCTTTGGAATCATTCATTGTATTGCCGATTCAGGAGTTTATGGTCTACTAACGACTGGAAATCAAAAAAGTTATCCGGACAATACTTGGGTAACTGTTAGAGGTACAATTAAATCCGAGTATAATCAATTGTTACAACAAAACTTACCAGTCTTACACATTGAAGAGTCTCGTCAAGTTTCTAAAGCTAATAATCCTTATGTTTATCGTGTCTTTTAA

SEQ ID NO: 1384 - protein, 270 aa, Streptococcus agalactiae
MIRFLILAGYFELSMYLKLSGKLNQYINTHYTYLAYISMVLSFILAIVQLIIWVKNMKMHSHLHGKIAKSTSPMILVFPVLVGLLVPTVSLDSTTVSAKGYNFPLAAGSTGTVSQDGTRVQYLKPDTSTYFTSSAYEKEMQKELKKYKGSGTLTITTENYMEVMELIYLYPEQFMDRQIQYTGFVYNEPKHEGYQFIFRFGIIHCIADSGVYGLLTTGNQKSYPDNTWVTVRGTIKSEYNQLLQQNLPVLHIEESRQVSKANNPYVYRVF

SEQ ID NO: 1385 - protein, 903 aa, Streptococcus agalactiae
ATGGATATCTTTAATCAATTACCGGATAGTGTCCTTCAATGGTTTGCCATTTTCATTTCCATTATTATTGAGGCACTTCCTTTTGTTTTGCTTGGAACTATTTTATCAGGAATTATTGAAGTCTTTATAACACCTGATATAGTCAATAAGTTCTTACCGAAAAATAAATTTCTCAGAGTCTTATTTGGAACCTTCGTTGGCTTTGTCTTTCCTTCTTGCGAATGTGGTATCATTCCTATTATTAATCGATTCCTTGAAAAGAAAGTGCCTTCATACACGGCAGTTCCGTTTCTTGCTACTGCCCCTATTATTAATCCTATTGTTTTATTTGCGACCTACTCAGCATTTGGAAATTCCATACGCTTCCTGATATTACGCTTTGTAGGTGCTACCATTGTAGCCATTGCTTTAGGAGTCATGCTTGCCTTTTTAGTAGATGATAATATTCTAAAAGAAGACGCTAAACCTACTCATTTTCATGATTATTCTGATAAGAAGTGGTATCAAAAAATCTTTCTAGCCTTAGCTCATGCCATCGATGAATTTTTTGATACAGGACGCTATCTAGTATTTGGTACTTTAATTGCTTCAGCTATGCAAATTTATTTACCAACTCGAGTTCTTACTACTATCGGACATAGCCCTATCACAGCCATCTTAGTTATGATGTTGCTTGCTTTCATCTTGTCATTGTGTAGTGAAGCTGACGCTTTTATAGGTGCTTCTTTATTATCAACCTTTGGAATCGCGCCAGTGATGGCTTTCCTTTTAATTGGACCCATGATTGATATTAAGAATTTAATGATGATGGTAAATTCTTTTAAAACAAGGTTTATTGTCCAATTCATTAGTGTATCTTCTCTTATTATTATTATCTATTGTTTATTTGTGGGGGTAATATAA

SEQ ID NO: 1386 - protein, 300 aa, Streptococcus agalactiae
MDIFNQLPDSVLQWFAIFISIIIEALPFVLLGTILSGIIEVFITPDIVNKFLPKNKFLRVLFGTFVGFVFPSCECGIIPIINRFLEKKVPSYTAVPFLATAPIINPIVLFATYSAFGNSIRFLILRFVGATIVAIALGVMLAFLVDDNILKEDAKPTHFHDYSDKKWYQKIFLALAHAIDEFFDTGRYLVFGTLIASAMQIYLPTRVLTTIGHSPITAILVMMLLAFILSLCSEADAFIGASLLSTFGIAPVMAFLLIGPMIDIKNLMMMVNSFKTRFIVQFISVSSLIIIIYCLFVGVI

SEQ ID NO: 1387 - protein, 129 aa, Streptococcus agalactiae
ATGGCTATTACGCACAAACGTCAAGATGACTTAGAAAGTATGTTCGCTAGTTTTGCTAAAGTACCAAAACCTAAAAAAGTTGATTCTGATTCAAAACCTGAACAGAAAGATGATTCTCAGAAAGATTAA

SEQ ID NO: 1388 - protein, 42 aa, Streptococcus agalactiae
MAITHKRQDDLESMFASFAKVPKPKKVDSDSKPEQKDDSQKD

SEQ ID NO: 1389 - protein, 1044 aa, Streptococcus agalactiae
ATGATTGAATTAGGTATTACAACATTCGGAGAGACAACAATCCTTGAAGAAACAAACCAAAGCTATTCACATCCTGAGAGGATTCGCCAATTAGTTGCTGAGATTGAACTAGCTGATCAAGTTGGTTTAGATGTATATGGTATTGGAGAGCACCATCGTGAAGATTTTGCGGTCTCTGCACCCGAAATTGTCCTAGCAGCAGGAGCGGTTAGAACTAATAATATCCGTTTATCTAGTGCAGTAACGATTCTCTCTTCCAATGATCCTATTCGCGTCTACCAGCAATTTTCAACGATTGACGCACTTTCAAATGGTAGAGCAGAAATTATGGCAGGGCGTGGTTCCTTTATTGAGTCTTTTCCATTGTTTGGATACGATTTAGCGGATTATGATGATTTATTTAATGAAAAAATGGATATGTTGTTAGCAATTAACTCAGCGACAAATCTCGATTGGAAAGGTCATTTGACACAAACAGTTAATGAGCGACCAATTTATCCAAGAGCATTACAGAGACAGTTACCAATATGGGTGGCAACAGGAGGAAATGTTGATTCTACAATTCGTATTGCAGAACAAGGTTTGCCAATTGTTTATGCAACTATTGGTGGGAATCCCAAAGCATTTCGTCAATTGGTCCATATTTATAAAGAAGTTGGTAGTCGTAATGGACACAAACCAGAACAACTAAAAGTTGCTGCTCACTCTTGGGGATGGATTGAAGAGGATAATCAAACCGCTATTGACCGTTATTTTTTCCCTACGAAACAGACCGTCGATAATATTGCTAAGGGACGCCCTCATTGGTCTGAAATGACCAAAGAGCAGTATTTACGTTCAGTAGGTCCAGAAGGTGCTATTTTTGTAGGAAGTCCTGAAGTGGTTGCACATAAAATTATAGGACTTGTTGAAGCACTTGAGTTAGACCGTTTTATGTTACATCTACCAGTTGGCTCTATGCCTCACAAAGACGTCCTAAATGCTATCAAACTTTATGGTAAGGAAGTAGCACCAATTGTTCGAAAATATTTTGAAAAGAATTAA

SEQ ID NO: 1390 - protein, 347 aa, Streptococcus agalactiae
MIELGITTFGETTILEETNQSYSHPERIRQLVAEIELADQVGLDVYGIGEHHREDFAVSAPEIVLAAGAVRTNNIRLSSAVTILSSNDPIRVYQQFSTIDALSNGRAEIMAGRGSFIESFPLFGYDLADYDDLFNEKMDMLLAINSATNLDWKGHLTQTVNERPIYPRALQRQLPIWVATGGNVDSTIRIAEQGLPIVYATIGGNPKAFRQLVHIYKEVGSRNGHKPEQLKVAAHSWGWIEEDNQTAIDRYFFPTKQTVDNIAKGRPHWSEMTKEQYLRSVGPEGAIFVGSPEVVAHKIIGLVEALELDRFMLHLPVGSMPHKDVLNAIKLYGKEVAPIVRKYFEKN

SEQ ID NO: 1391 - DNA, 2244 bp, Streptococcus agalactiae
ttgttagattataaaaacgctatcttgaaatcgctttttaaaactcttcgtaagtcaaaaatatgctataataaaagcgttatggaaaatttaaatattacacaaattgctattgatttaggtattaaagcgtcacaaatcgaaaaggttttagaattaacagatgaaggaaatactattccttttattgcccgttatcgtaaagaaatgacaggtaatttggatgaagttcaaatcaaatcaattattgaccttgataagagtatgacagctctttcagatcgtaaaactacggtcttagccaaaattgaagaacaaggaaagttgactcaagaactcaaaaaggctattgaagaagcaactaaactagcagatgttgaggaactctacctaccttataaagaaaaacgtcgtacgaaagctacgattgcacgtgaagcaggtctttttcctttagcacgtcttattttacaaaataaggataaccttgaggaagaagctcaaaactatcttacagatggttttgagacaactacgaaggcactttctggagcagtagatattcttatcgaagctttttctgaggataataaattacgttcatggacatataatgagatctggaactacagctcaatcactgcagttgttaaagatgagtcacttgatgaaaaacaggtcttcaaaatctactatgacttttctgaaaaaataagtaaactccatggctatcaagttttagcattgaatcgtggtgagaaaatgggtgttcttaaggttaattttgagcataaccttgaaaaaatgtttcgcttttttgctgttcgatttaaagaaactagccaatatatagatgaccttattgtacagactgtcaagaaaaaaatcgttccagctatggaacgccgtatccgtacagaactaagtgaaggagcagaagatggtgcaatttcactgttttcagagaatcttcgtaacttattgttagtctcaccgcttaaggggaaaatggtgttaggttttgaccctgcctttcgtacaggagcaaaattagcagtagtagaccaaactggaaaattaatgacaacacaagtgatttatccagttcctccagctaatcaagcaaaaatcgaacaatcaaaaatagagttagcaaaacttatcaaagaattcaatatagaaattattgctatagggaatggaacagcgagtcgtgaatcagaagcatttgttgcagaagttttacaagattttccagacgtatcctatgtgattgttaacgaaagtggtgcctctgtttattcagcctcagaattggcacgtcatgaatttccagacttaacggttgaaaaacgttcggccatctcaattgcaagacgtctgcaagacccattagcagaactagtcaaaattgatccaaaatctattggtgtgggtcaatatcaacatgatgttagccaaaaaaaattagcagaaaatcttgattttgttgttgaaactgtagttaaccaagtaggtgttaatgttaatacagcaagtccagccttgttagctcatgtttcaggtttaaataaaacaatatctgaaaatattgttaaatatcgtgaagagaatgggcaaattaagtcacgtgctgaaattaagaaagtgcccagattaggagcaaaagcttttgagcaagctgctggattcttacgtattcctaatgctaaaaatttcttggataatacaggtgttcaccctgagtcttatgaagctgttaaaaagttgcttgaccaactgactatcaaagaattagatgatcttgctaaagagaagttacaaaaccttgacttaattgcaacagcagaaagtattggggtaggtcaagaaacattaaaagacattatagaagatcttttgaaaccaggtcgtgatttgcgtgatgattttgaagcgcctgttttgagacatgatgttttagatgtcagtgatttaaaagttggacaggaattgcaaggaactgttcgaaacgtcgttgattttggtgcttttgttgatattggtgttcatgaagatggtctaatccaccagtctcgccttattaagcgaaaacgcgataaaaaaactagaaaaatgcctcctttacaacatccaagcaaatatctctctgttggtgatattgtaactgtttgggttgtagaggtagatgcggagcgtagcagaattggacttagtcttatcaagccagacggacttgactaa

SEQ ID NO: 1392 - protein, 747 aa, Streptococcus agalactiae
MLDYKNAILKSLFKTLRKSKICYNKSVMENLNITQIAIDLGIKASQIEKVLELTDEGNTIPFIARYRKEMTGNLDEVQIKSIIDLDKSMTALSDRKTTVLAKIEEQGKLTQELKKAIEEATKLADVEELYLPYKEKRRTKATIAREAGLFPLARLILQNKDNLEEEAQNYLTDGFETTTKALSGAVDILIEAFSEDNKLRSWTYNEIWNYSSITAVVKDESLDEKQVFKIYYDFSEKISKLHGYQVLALNRGEKMGVLKVNFEHNLEKMFRFFAVRFKETSQYIDDLIVQTVKKKIVPAMERRIRTELSEGAEDGAISLFSENLRNLLLVSPLKGKMVLGFDPAFRTGAKLAVVDQTGKLMTTQVIYPVPPANQAKIEQSKIELAKLIKEFNIEIIAIGNGTASRESEAFVAEVLQDFPDVSYVIVNESGASVYSASELARHEFPDLTVEKRSAISIARRLQDPLAELVKIDPKSIGVGQYQHDVSQKKLAENLDFVVETVVNQVGVNVNTASPALLAHVSGLNKTISENIVKYREENGQIKSRAEIKKVPRLGAKAFEQAAGFLRIPNAKNFLDNTGVHPESYEAVKKLLDQLTIKELDDLAKEKLQNLDLIATAESIGVGQETLKDIIEDLLKPGRDLRDDFEAPVLRHDVLDVSDLKVGQELQGTVRNVVDFGAFVDIGVHEDGLIHQSRLIKRKRDKKTRKMPPLQHPSKYLSVGDIVTVWVVEVDAERSRIGLSLIKPDGLD

SEQ ID NO: 1393 - DNA, 477 bp, Streptococcus agalactiae
atgcggagcgtagcagaattggacttagtcttatcaagccagacggacttgactaattatgttaagaaggtgtctatagaagattttggatgtcagtttttacatactgcacattggaataatcgcttaagaacaactggaggacgcttctttccaaacgatagacaccttgactttaatcccaaaatttatcgtgagtttggtattgatatttttcgtaagattgtaagacatgagctttgccattatcatctctatatacaaggtaaaggatatcaacatagggataaagcttttaaagagttactagaaaaagtcgatggcttacgatatacccctagagttacggctgttaaagtgaattatcatcattactcttgccaatcttgcggtcaagtataccgacgtaggagacgtgttaatttacgcaagtttgcttgtggttattgtcatggtcgcttgatagagagtttttaa

SEQ ID NO: 1394 - protein, 158 aa, Streptococcus agalactiae
MRSVAELDLVLSSQTDLTNYVKKVSIEDFGCQFLHTAHWNNRLRTTGGRFFPNDRHLDFNPKIYREFGIDIFRKIVRHELCHYHLYIQGKGYQHRDKAFKELLEKVDGLRYTPRVTAVKVNYHHYSCQSCGQVYRRRRRVNLRKFACGYCHGRLIESF

SEQ ID NO: 1395 - DNA, 936 bp, Streptococcus agalactiae
atggcagttactgttcaaatgttagttgaccgcttaaagttaaatgtcatctatggtgatgaacatctattatctaagcggattacaacagctgacatttcacgtcctggtctagaaatgacagggtattttgattattatgcaccagagcgtttgcaacttgttggtatgaaagagtggtcatatttaatggctatgacaggacataatcgttatcaagtgttacgtgaaatgttccaaaaagaaacaccagctattgttgtagcacgtgatttagaaattccagaagagatgtatgaggcggctaaagataccggtattgctattcttcaaagtaaggcccctacaagtcgtttatcaggtgaagtttcttggtatttagattcttgcttagctgagaggacaagtgttcatggtgtcttgatggatatctatggtatgggtgttctgattcaaggtgattccggtattggtaagagtgagacaggactagagctagttaagcgaggacatcgtttggtagcagatgatcgtgttgatgtttatgctaaagacgaagagacgctttggggagagcctgctgagatattacgtcatttacttgaaattagaggtgtgggaatcattgatattatgagcctatatggagctagtgcggttaaagattcatcgcaagtgcaattagctatataccttgaaaactttgaaactggaaaagtttttgatagactcgggaatggcaatgaagagatcgaattatctggagttaaggttcctcggatacgtattcctgttaaaacaggccgaaacgtgtcagtagttattgaagcagcggctatgaatcacagagctaaacaaatggggtttgatgctacccagacttttgaggatcgtttaacacatttgattagtcagaacgaggtcaatgatgattaa

SEQ ID NO: 1396 - protein, 311 aa, Streptococcus agalactiae
MAVTVQMLVDRLKLNVIYGDEHLLSKRITTADISRPGLEMTGYFDYYAPERLQLVGMKEWSYLMAMTGHNRYQVLREMFQKETPAIVVARDLEIPEEMYEAAKDTGIAILQSKAPTSRLSGEVSWYLDSCLAERTSVHGVLMDIYGMGVLIQGDSGIGKSETGLELVKRGHRLVADDRVDVYAKDEETLWGEPAEILRHLLEIRGVGIIDIMSLYGASAVKDSSQVQLAIYLENFETGKVFDRLGNGNEEIELSGVKVPRIRIPVKTGRNVSVVIEAAAMNHRAKQMGFDATQTFEDRLTHLISQNEVNDD

SEQ ID NO: 1397 - DNA, 153 bp, Streptococcus agalactiae
  misc_feature 126, 127, 128, 129, 130: n = A,T,C or G
atgattaatccagtagcaatacgattaggccccttttctattcgctggtatgctatttgcatagtgtctggtatgttgttagcagtttacttagcaatgaaagaggcccctcgtaagaacattaannnnncattccattcattaattaattaa

SEQ ID NO: 1398 - protein, 50 aa, Streptococcus agalactiae
  VARIANT 42, 43, 44: Xaa = Any Amino Acid
MINPVAIRLGPFSIRWYAICIVSGMLLAVYLAMKEAPRKNIXXXFHSLIN

SEQ ID NO: 1399 - DNA, 372 bp, Streptococcus agalactiae
  misc_feature 12, 13, 14, 15, 16: n = A,T,C or G
atgaatgaatgnnnnnttttagttttaggaatacttttcgttctgaaaaaagtatcagaaacgattgaggaaaccaagcaaactattaaagtattaacaagcgatgttaacgtgactctttaccaaactaatgaaattttagccaaagctaatgttttagttgatgatgttaatggtaaagtatctactattgatcctctttttgtagctattgctgacttatcagaatctgtatctgatttaaacctacaggcaagacatattggacaaaaggcaagtagtgcaacctcaagtgttactaaggcaggttcagctttagctattggaaaagcggcttcaaaaatttttcgtaaaaaaggagacaaaaaatga

SEQ ID NO: 1400 - protein, 123 aa, Streptococcus agalactiae
  VARIANT 4, 5, 6: Xaa = Any Amino Acid
MNEXXXLVLGILFVLKKVSETIEETKQTIKVLTSDVNVTLYQTNEILAKANVLVDDVNGKVSTIDPLFVAIADLSESVSDLNLQARHIGQKASSATSSVTKAGSALAIGKAASKIFRKKGDKK

SEQ ID NO: 1401 - protein, 432 aa, Streptococcus agalactiae
ATGAGTAAATTATTTAAAACTTTAGTTATCAGTGCTGCATCAGGTGCAGCAGCAGCTTATTTTTTAACAACAAAAAAAGGAAAAGAGCTAAGGAAAAATGCAGAAAAATTCTATGGAGAATATAAAGAAAATCCAGAAGAATATCATCAAATAGCTAAAGATAAAGCAAGTGAATATTCAAATTTAGCTGTTGATACTTTTAAAGATTATAAAGGTAAATTTGAATCAGGTGAATTGACAACAGAGGATATCGTCTCAGCCGTTAAGGAAAAAAGCGGAGAAGTAGTTGACTTTGCTAATGATTTTGTCAATCAAGCTAAATCAAAATTCTCAGACGAGGATACTGCTAAAAAAGAAGATAAGGCTCCTGAAACAAAAGTAGAAGATATTGTCATTGATTATAAAGAAAACACAGAAGATAAAGAAAAATAA

SEQ ID NO: 1402 - protein, 143 aa, Streptococcus agalactiae
MSKLFKTLVISAASGAAAAYFLTTKKGKELRKNAEKFYGEYKENPEEYHQIAKDKASEYSNLAVDTFKDYKGKFESGELTTEDIVSAVKEKSGEVVDFANDFVNQAKSKFSDEDTAKKEDKAPETKVEDIVIDYKENTEDKEK

SEQ ID NO: 1403 - protein, 927 aa, Streptococcus agalactiae
ATGGAAAAAATAATTTTGACAGCGACAGCTGAATCTATTGAACAAGTAAAGCAATTGCTAGCAATAGGAATTGACCGCATCTATGTAGGGGAAGAAAATTACGGTCTTCGTTTACCACATTCATTTTCAGACGATGAATTGCGTGAAATCGCTAAATTAGTACATGATGCTGGTAAAGAATTGACAGTAGCTTGTAATGCACTCATGCATCAAGAGATGATGGATAATATCAAACCATTTTTGGAGTTGATGAAAGAAATTAATGTGGATTATTTGGTAGTTGGTGATGCAGGAGTATTTTATATCAACAAGCGTGATGGTTATAACTTCAAACTTATCTACGACACTTCTGTCTTCGTTACATCAAGTCGTCAAGTTAATTTTTGGGGACAACATGGAGCAGTAGAAACGGTTTTAGCACGTGAAATACCTTCTGAAGAACTTTTTAAGATGTCTGAGAATCTTGAATTTCCTGCTGAGATTTTAGTTTATGGGGCTTCTGTAATTCATCACTCTAAGCGTCCGTTATTGCAAAACTATTATAATTTTACTCATATCACTGATGAAAAAACACGTGAGCGTGGTCTTTTTTTAGCAGAACCAGGTGATCCAGAAAGTCACTATTCTATTTACGAAGATAAGCATGGGACTCATATTTTTATTAACAATGATATCAATATGATGACTAAAGTGACTGAACTAGTTGAACATCACTTTACTCACTGGAAATTAGATGGTATTTATTGTCCAGGAGATAATTTTGTTGCTATTGCTGAAATTTTTGTCGAAACAGCTCGTTTGATTGAAAATGGAACATTCACTCAGGATCAGGCTTTCTTGTTTGATGAACGAATTAGAAAACTGCACCCTAAAGGACGTGGTTTAGATACTGGATTTTATGATTTTGACCCATCAACAGTAAAATAA

SEQ ID NO: 1404 - protein, 308 aa, Streptococcus agalactiae
MEKIILTATAESIEQVKQLLAIGIDRIYVGEENYGLRLPHSFSDDELREIAKLVHDAGKELTVACNALMHQEMMDNIKPFLELMKEINVDYLVVGDAGVFYINKRDGYNFKLIYDTSVFVTSSRQVNFWGQHGAVETVLAREIPSEELFKMSENLEFPAEILVYGASVIHHSKRPLLQNYYNFTHITDEKTRERGLFLAEPGDPESHYSIYEDKHGTHIFINNDINMMTKVTELVEHHFTHWKLDGIYCPGDNFVAIAEIFVETARLIENGTFTQDQAFLFDERIRKLHPKGRGLDTGFYDFDPSTVK

SEQ ID NO: 1405 - protein, 342 aa, Streptococcus agalactiae
ATGTCTAATGTAAAAAAACGCCCTGAGGTTTTATCACCTGCAGGAACACTAGAAAAATTAAAAGTTGCTATTGATTATGGAGCAGATGCTGTATTTGTTGGAGGTCAAGCGTATGGTCTTCGAAGTAGAGCTGGTAACTTTTCTATGGAAGAGTTACAAGAGGGAATAAACTATGCTCATGCAAGAGATGCTAAAGTTTATGTAGCGGCTAATATGGTTACTCATGAAGGTAATGAGCTTGGGGCAGGTCCGTGGTTTCGTGAATTACGTGATATGGGACTAGATGCAGTCATTGTTTCAGATCCTGCTCTTATTGTTATTTNNNNNCATTCCATTCATTAA

SEQ ID NO: 1406 - protein, 113 aa, Streptococcus agalactiae
  VARIANT 108, 109: Xaa = Any Amino Acid
MSNVKKRPEVLSPAGTLEKLKVAIDYGADAVFVGGQAYGLRSRAGNFSMEELQEGINYAHARDAKVYVAANMVTHEGNELGAGPWFRELRDMGLDAVIVSDPALIVIXXHSIH

SEQ ID NO: 1407 - protein, 774 aa, Streptococcus agalactiae
ATGTGTATTTCATACTCAGGACGATGTGTTCTATCAAACCATATGAGCCATCGTGATGCTAATCGTGGCGGTTGCTCTCAGTCATGTCGTTGGAAATATGACCTCTACGATATGCCATTTGGACAAGAACGTCAATCGTTAAAAGGCGAGATTCCAGAACCTTTCTCAATGTCAGCTGTGGATATGTGTATGATTGAGCATATTCCAGATATGATTGAAAATGGTGTAGATAGTTTAAAAATAGAAGGACGTATGAAATCCATTCATTATGTTTCTACAGTAACTAATTGCTATAAAGCTGCTGTAGATGCCTATATGGAAAGTCCAGAAGCTTTTGAAGCTATTAAAGAAGACTTGATTGATGAACTTTGGAAGGTTGCACAACGCGAATTAGCAACAGGTTTCTACTACCATACACCAACTGAAAATGAACAACTCTTTGGAGCTCGTCGTAAAATTCCTCAATACAAATTTGTTGGGGAAGTGGTTTCATTTGACAATGCTAAAATGGAGGCTACAATTCGTCAGCGTAATGTTATTATGGAAGGAGATCGCGTAGAATTCTATGGTCCTGGCTTCCGTCACTTTGAATGTTTTATTGATGGTCTGCGTGATGCTGAAGGAAATAAAATAGACCGTGCTCCAAATCCGATGGAATTATTAACCATAACATTACCAAATCCAGTAAAAAAAGGGGATATGATTCGTGCTTGTAAAGAAGGATTAGTGAACCTTTATCAAAATGATGGTACTAGCAAGACTGTAAGAGCTTAG

SEQ ID NO: 1408 - protein, 257 aa, Streptococcus agalactiae
MCISYSGRCVLSNHMSHRDANRGGCSQSCRWKYDLYDMPFGQERQSLKGEIPEPFSMSAVDMCMIEHIPDMIENGVDSLKIEGRMKSIHYVSTVTNCYKAAVDAYMESPEAFEAIKEDLIDELWKVAQRELATGFYYHTPTENEQLFGARRKIPQYKFVGEVVSFDNAKMEATIRQRNVIMEGDRVEFYGPGFRHFECFIDGLRDAEGNKIDRAPNPMELLTITLPNPVKKGDMIRACKEGLVNLYQNDGTSKTVRA

SEQ ID NO: 1409 - protein, 213 aa, Streptococcus agalactiae
ATGTCAGAATTTACATTTGAAATTGTTGAGAAGTTATTGGTCCTATCTGAAAATGAAAAAGGTTGGACAAAAGAGTTGAATCGTGTGAGCTTCAACGGAGCGCCAGCTAAATTTGATTTGCGTACATGGAGTCCAGATCATACAAAAATGGGTAAAGGTATCACTTTATCTAATGAAGAATTTAAAGTCATTTTAGATGCTTTTCGTAAATAA

SEQ ID NO: 1410 - protein, 70 aa, Streptococcus agalactiae
MSEFTFEIVEKLLVLSENEKGWTKELNRVSFNGAPAKFDLRTWSPDHTKMGKGITLSNEEFKVILDAFRK

SEQ ID NO: 1411 - protein, 798 aa, Streptococcus agalactiae
ATGATTAGACATTCATTTAAAAGTAAGGTGTTATTGTTAGTCTTTATCTTAACAATAATAGTGAATTATTTATCCGCAACAGGTTTTTTAACAGGGAACAGTCAGAAGAGTCTGTCTGATCGTTATCAAACGCTCTTGACACCAGCACCATTAGCCTTTTCAATTTGGTCAGTCATCTATTTATTGACCTTTTTAGTAATATTAAGAGCTATATTCAGTAAGAGTCAATCTTACCAAGATAACTTTGCTAGCATTTTTCCATACTTTTTGGGTCTTCTATTAGTTAATAATATATGGACTGTATTTTTTACGAGTAATTTGATTGGCCTATCAACAATAATAATTTTTGCTTACTGTATTCTTCTGGTTATCATTATCAAGATACTAAGTAAAAATAAATCAAAATTACTGCTTAGAATAACATTTGGAATTCATGCAGGATGGTTGCTAGTTGCGTCATTGGTCAATTTAGCGGTCTACTTAGTTAAAATTGATTTTAATTACCCATTACCAAAGGTATATATAGCTATCATTGCCTTGATTTTTATAACTGTTTTAAGTCTTTACCTAGCTAGAGTATTACAAAATGCTTACTTAATCTTATCCGTTTTTTGGGCTTGGTTGATGGTTTTTAAAGCACATTTAGAAGGAAATTTTCAACACCTATATTTTAGTATCCAAATTTTATCTTTGATTGCAGCAATTATCCTTGGCGTATCGTTTTTCATCATCGGTTATTATAATGTCAAGGAGAGGTACAAGCAAAAAAATACTAGCCCTTACTCACGGGTTCTTTGA

SEQ ID NO: 1412 - protein, 265 aa, Streptococcus agalactiae
MIRHSFKSKVLLLVFILTIIVNYLSATGFLTGNSQKSLSDRYQTLLTPAPLAFSIWSVIYLLTFLVILRAIFSKSQSYQDNFASIFPYFLGLLLVNNIWTVFFTSNLIGLSTIIIFAYCILLVIIIKILSKNKSKLLLRITFGIHAGWLLVASLVNLAVYLVKIDFNYPLPKVYIAIIALIFITVLSLYLARVLQNAYLILSVFWAWLMVFKAHLEGNFQHLYFSIQILSLIAAIILGVSFFIIGYYNVKERYKQKNTSPYSRVL

SEQ ID NO: 1413 - protein, 1341 aa, Streptococcus agalactiae
ATGAATCAAAATCATTCCGTCAAAAGATCCTTATCCGAAGTTAATCAGAGCGTTGAGGTTCCTCACAATAGCTCTTTTTGGAACACTTTAAGAGCTTTTCTTGGACCTGGAGCTTTGGTTGCAGTTGGTTATATGGATCCAGGTAACTGGATTACTAGCGTTATTGGTGGAGCTACCTATCGTTACTTACTATTGTTTGTTGTTTTAGTATCTTCTTTGATGGCGATGCAATTACAACAAATGGCTGGCAAGCTTGGCATTGTTACACGACAGGACTTAGCACAAGCAACAGCTTCTCGACTCCCAAAACCGCTTCGTTACCTGCTATTTATTATCATTGAGTTAGCCCTTATCGCTACTGATTTAGCAGAAGTCATTGGCTCTGCCATTGCTCTTCACTTATTATTTGGCTGGCCCCTGTTACTGTCTATCATGATTACTATTTTGGATGTATTCTTACTTTTACTCTTAATGAAGTTAGGCGTCCAAAAAATTGAAGCCTTTGTTTCTGTTCTCATATTGACAATTTTGATAATCTTTACATATTTAGTTGTTTTATCACAACCTGATTTAGATGCTATGTTCAAAGGATTTTTACCACACCATGAGCTTTTTAACATATCACATGAAGGGAAAAATAGTCCTTTAACCCTCGCTCTTGGCATTATCGGCGCAACAGTCATGCCACATAATCTTTATTTACATTCTTCTTTATCTCAGACTAGACGCGTGGATTATCATAATAAATCTTCAATAAAAAAAGCTGTACGTTTCATGACCTTAGATTCTAACATTCAGCTATCACTTGCATTTGTCGTGAATTCGCTACTATTAGTCTTAGGAGCTAGTCTATTTTATGGGCATGCTAATGATATCAGTGCCTTTTCTCAAATGTATCTTGCCCTATCTGATAAAACTATTACTGGTGCAGTAGCCAGTTCTTTCCTTTCTACCCTTTTTGCAGTTGCCCTACTAGCAAGTGGTCAAAATTCAACGATTACAGGTACTTTAACAGGACAAATCGTTATGGAAGGTTTCCTTCACTTCAAATTACCTCAATGGTTAATAAGGCTTTGTACTAGATTATTAACTCTTCTTCCAATTTTTGTTATCGCCCTACTAGTTGGAGGCGAAGAAAATACGTTAGATCAACTAATCGTCTATTCACAAGTTTTTCTTTCCTTAGCTTTACCATTTTCAATCTTTCCATTGATTTATTTCACGTCGCAAAAATCAATTATGGGAGAGCATGCTAATGCTAAATGGAATACCTATTTAGCATACCTTGTCGCCATCATTTTAACATTACTCAATTTGAAATTAATCATGGATTTACTTTAA

SEQ ID NO: 1414 - protein, 446 aa, Streptococcus agalactiae
MNQNHSVKRSLSEVNQSVEVPHNSSFWNTLRAFLGPGALVAVGYMDPGNWITSVIGGATYRYLLLFVVLVSSLMAMQLQQMAGKLGIVTRQDLAQATASRLPKPLRYLLFIIIELALIATDLAEVIGSAIALHLLFGWPLLLSIMITILDVFLLLLLMKLGVQKIEAFVSVLILTILIIFTYLVVLSQPDLDAMFKGFLPHHELFNISHEGKNSPLTLALGIIGATVMPHNLYLHSSLSQTRRVDYHNKSSIKKAVRFMTLDSNIQLSLAFVVNSLLLVLGASLFYGHANDISAFSQMYLALSDKTITGAVASSFLSTLFAVALLASGQNSTITGTLTGQIVMEGFLHFKLPQWLIRLCTRLLTLLPIFVIALLVGGEENTLDQLIVYSQVFLSLALPFSIFPLIYFTSQKSIMGEHANAKWNTYLAYLVAIILTLLNLKLIMDLL

SEQ ID NO: 1415 - protein, 1089 aa, Streptococcus agalactiae
ATGGCATTAGCCTTGAAAGAGGCTGAGAAAGGTATGGGGTTCGTTGCTCCCAACCCATTAGTAGGTGCTGTTATTGTTAAAGATGATCGTATAATTTCCAAAGGTTATCATAAACGATTTGGAGATTTACATGCGGAAAGACAGGCTATTAAAAATGCTGATGAGGATATCTCTGGAAGTACTCTGTACGTGACTTTAGAACCATGCTGTCATGTTGGTAAGCAACCACCTTGTACTGAAGCTCTTATTAAATCTGGTATCAAAAAAGTAGTAGTTGGAAGTTTAGATCCAAATCCTTTAGTTTCAGGAAAAGGGATTGCCTTGTTGAGAAAAGAAGGTTTAAATGTTGAAGTTGGTATCTTAAGAGAAGAATGCGATGCTCTGAATGAAAGATTTATTTTTCACATGACCTATAAGCAGCCTTTTGTTTATTTGAAATATGCTATGACTTTAGATGGGAAGATAGCTACAAAGACGGGCGATTCTAAGTGGATATCAAATGAGCACTCAAGACAATCTGTTCAGAAATTGAGGCAAAAATGTAGTGCTATTATGGTCGGTATCAATACTGTATTAGCTGATAATCCACGTTTAACTTGCCGTATTCCTAAAGGTGAAGCGCTTGTGAGGATCGTATGTGATAGTCAGTTGAAGATACCTTTAGACTCTTACCTAGTTAAGAGCGCTAAAACAATACCAACATGGATTGCAACATGTTCAGATAATCTTGCTCAGCAACAAACATTAAAAGAAATGGGTTGCCGTTTGATTAAGGTCCCAAGAAAAGATGGAAAGCTGGATTTGAAAGTATTAATGACTATTTTAGGACAAGAAGGGATTGATAGCCTTCTTATTGAAGGAGGAAGTAGTTTACATTTTTCAGCTTTAAAAGCTGGTATTGTTAACAGACTAATTGTTTTTATTGCACCCAAAATAATAGGAGGTCTGAAAGCAAAAACAGCTATTTCTGGAGAAGGTTTGGATTGGCTTAACCAAGCTTTCAGAGTAAAAGATATTGAACTTAGTCGTATGGATTCTGACGTTGTTATTGAAGGAAAGGTAGAACATTATGTTTACAGGAATTATTGA

SEQ ID NO: 1416 - protein, 362 aa, Streptococcus agalactiae
MALALKEAEKGMGFVAPNPLVGAVIVKDDRIISKGYHKRFGDLHAERQAIKNADEDISGSTLYVTLEPCCHVGKQPPCTEALIKSGIKKVVVGSLDPNPLVSGKGIALLRKEGLNVEVGILREECDALNERFIFHMTYKQPFVYLKYAMTLDGKIATKTGDSKWISNEHSRQSVQKLRQKCSAIMVGINTVLADNPRLTCRIPKGEALVRIVCDSQLKIPLDSYLVKSAKTIPTWIATCSDNLAQQQTLKEMGCRLIKVPRKDGKLDLKVLMTILGQEGIDSLLIEGGSSLHFSALKAGIVNRLIVFIAPKIIGGLKAKTAISGEGLDWLNQAFRVKDIELSRMDSDVVIEGKVEHYVYRNY

SEQ ID NO: 1417 - protein, 627 aa, Streptococcus agalactiae
ATGGGTCAAGTCAGTCGTATTCGGAATGGCATAAAGTCCCAACAATTAAGTATTGATGCTCCCAAACTAGTCCCTTTATTAAGAAAAGGGGATAGCGTAGCTGTTAATGGTGTTTGTTTGACGGTTCTTGACAAAAGTGAAACAGCTTTTATAGCAGACGTCATGCCAGAAAGTATGATGCGAACAAGCTTAGCTGCTTTACGACTTCATTCTAAAGTTAACTTAGAATTAGCACTCAGAAGTGACTCAAGGTTAGGGGGGCATTTTGTTCTTGGACATGTGGATGGGGTTGGAAAAATAGAAAAAATCCAAAAAGATGATATTGCTGTCAGATTTTCAATTGATGCTCCACCTAGTATTATGTCTTATATTATAGAGAAAGGTTCGGTGGCTCTAGATGGGATTAGCTTAACAGTGGTATCATTTACAGAGCATTCTTTTGAAGTTTCGGTCATTCCCCACACGATGGCTCAAACTAATCTATCCTTAAAAAAGGTTGGGGATTTATTAAATATCGAAGTGGATGTTTTAGGCAAATATGCTGAGAAATTTTTAGCACCCACTAATAGAACTAATCACACTTCATCGGTAATGGATTGGTCTTTTTTATCAGAAAATGGCTACTAA

SEQ ID NO: 1418 - protein, 208 aa, Streptococcus agalactiae
MGQVSRIRNGIKSQQLSIDAPKLVPLLRKGDSVAVNGVCLTVLDKSETAFIADVMPESMMRTSLAALRLHSKVNLELALRSDSRLGGHFVLGHVDGVGKIEKIQKDDIAVRFSIDAPPSIMSYIIEKGSVALDGISLTVVSFTEHSFEVSVIPHTMAQTNLSLKKVGDLLNIEVDVLGKYAEKFLAPTNRTNHTSSVMDWSFLSENGY

SEQ ID NO: 1419 - protein, 1194 aa, Streptococcus agalactiae
ATGGCCTTTAGTCCAATAAAAAAACTTTTACAAGACATCAAATCAGGGAAAATGGTAGTGTTGATGGATGACGAAAATAGAGAGAATGAAGGAGACCTTATTTGTGCGGCTGAAATGGTGACAAAAGAGTCGATTAATTTTATGGCTAAATTTGGGAAAGGATTAATTTGCTTACCTCTGTCTAATTACTATGCTGAAAAGTTAGAATTAGCTCAAATGGCTAGCCATAATACTGATAATCATGAAACAGCTTTTACCATATCTATTGATCATCTATCAACTAGTACTGGGATTTCTGCGGAAGATAGAGCTTTGACAGCTAAGATGGTTGCTAACGACAGTAGCAAAGCTAAAGACTTTAGACGTCCTGGGCACTTATTTCCCTTGTTAGCCAAGGAAGGAGGTGTTTTAGCTAGAAATGGACATACTGAAGCAACCGTTGATCTATGTCGTTTAGCTGGATTAAAGGAATGTGGACTTTGTTGTGAAATAATGGCTGAAGATGGTAGTATGATGAGAAAGGATGAGTTATTAGCATTTGCTCAAAAGCACGATTTAGCTATCGCTACCATAAAACAATTGCAAGACTATAGACGTCAAGAAGAGGGAGGGGTGGTTAGAGAAATTGAGATTCAGCTACCAACGCAATTCGGTCATTTTACGGCTTATGGATATAGCGAAGTTGTGGCAAATAAGGAACATGTTGCCCTTGTTAAAGGGGATATTAGTAGTGGTGAAGATGTTTTATGTCGTTTACACTCAGAATGTTTGACAGGTGATGTCTTTCATTCCTTGAGATGTGATTGTGGGGAACAACTGGCTAATGCCCTCCAACAAATAGAGGCTGAAGGTCGTGGAGTCCTTCTTTATATGAGACAGGAAGGTCGAGGAATTGGTTTGATTAATAAGTTAAAAGCTTATCATTTGCAAGAAGAAGGCTTAGATACTTTAGAAGCTAATTTGGCTTTAGGTTTTGAAGGAGATGAGAGAGACTATGGAGTTAGTGCTCAACTTTTAAAAGATTTAGGTATAAATTCTATAAACTTACTAACCAATAATCCAGATAAAATCCAACAACTTGAAGCAGAAGGAATTTGCGTCAAAAACAGAGTGCCATTACAGGTGGCAGTAACAGCTTATGACCTTAATTATTTAAAAACTAAAAAAGAAAAAATGGGACATCTTTTAGATTAA

SEQ ID NO: 1420 - protein, 397 aa, Streptococcus agalactiae
MAFSPIKKLLQDIKSGKMVVLMDDENRENEGDLICAAEMVTKESINFMAKFGKGLICLPLSNYYAEKLELAQMASHNTDNHETAFTISIDHLSTSTGISAEDRALTAKMVANDSSKAKDFRRPGHLFPLLAKEGGVLARNGHTEATVDLCRLAGLKECGLCCEIMAEDGSMMRKDELLAFAQKHDLAIATIKQLQDYRRQEEGGVVREIEIQLPTQFGHFTAYGYSEVVANKEHVALVKGDISSGEDVLCRLHSECLTGDVFHSLRCDCGEQLANALQQIEAEGRGVLLYMRQEGRGIGLINKLKAYHLQEEGLDTLEANLALGFEGDERDYGVSAQLLKDLGINSINLLTNNPDKIQQLEAEGICVKNRVPLQVAVTAYDLNYLKTKKEKMGHLLD

SEQ ID NO: 1421 - protein, 471 aa, Streptococcus agalactiae
ATGACAATTATTGAAGGACAATTAGTGGCAAACGAAATGAAAATAGGAATCGTAGTCTCACGTTTCAATGAATTGATTACATCTAAATTATTATCAGGAGCAGTAGATGGACTGCTGAGACATGGTGTTTCAGAAGAAGATATAGATATTGTATGGGTACCTGGTGCTTTTGAAATCCCCTATATGGCTAGAAAAATGGCATTATATAAAGATTATGATGCTATTATCTGTCTTGGGGTAGTCATTAAAGGCAGCACTGATCATTATGATTATGTTTGTAATGAGGTGACAAAAGGTATTGGTCATTTAAATAGCCAGTCAGATATCCCTCATATCTTTGGTGTTCTAACAACGGATAACATCGAACAAGCTATTGAGAGGGCAGGAACAAAAGCAGGAAATAAAGGTTATGATTGTGCTCTTTCGGCTATTGAAATGGTGAACCTTGATAAAAAATTGCGTGAGCGATAA

SEQ ID NO: 1422 - protein, 156 aa, Streptococcus agalactiae
MTIIEGQLVANEMKIGIVVSRFNELITSKLLSGAVDGLLRHGVSEEDIDIVWVPGAFEIPYMARKMALYKDYDAIICLGVVIKGSTDHYDYVCNEVTKGIGHLNSQSDIPHIFGVLTTDNIEQAIERAGTKAGNKGYDCALSAIEMVNLDKKLRER

SEQ ID NO: 1423 - protein, 1490 aa, Streptococcus agalactiae
ATGTCTAACCAACATATTGAAGAATTAAATGACCAACAGATTGTTCGTCGTGAAAAAATGGCTGCTTTGACTGAACAAGGCATTGATCCTTTTGGTAAACGATTGAACGTACAGCAACATCTGGTCAATTAAATGAAAAATACGCTGACAAATCAAAAGAAGACTTGCACGACATTGAAGAAACTGCTACAATCGCTGGTCGTTTAATGACTAAGCGCGGTAAGGGGAAAGTTGGCTTTGCGCATATCCAAGATCGCGAAGGTCAAATTCAAATTTATGTCCGTAAAGATTCTGTTGGCGAAGAAAACTACGAAATCTTTAAAAAAGCTGATTTAGGTGACTTCCTTGGTGTTGAAGGGCAAGTAATGCGTACAGATATGGGAGAACTTTCTATCAAGGCTACTCATATTACTCACCTTTCAAAAGCACTCCGTCCACTTCCTGAAAAATTCCACGGCCTAACTGATATTGAAACAATCTATCGTAAACGTCATCTTGATTTAATCTCAAATCGTGACAGCTTTGACCGTTTTGTAACACGCTCAAAAATCATTTCAGAAATTCGTCGCTTTATGGATAGCAATGGTTTCTTAGAGGTTGAAACACCTGTTCTTCATAATGAAGCTGGTGGTGCTTCTGCTCGCCCATTTATCACACATCACAATGCACAAGACATTGACATGGTTCTTCGTATCGCAACTGAATTGCATCTAAAACGTCTTATTGTAGGTGGTATGGAGCGTGTTTATGAAATCGGACGTATTTTCCGTAATGAAGGGATGGATGCAACCCACAATCCAGAGTTCACATCTATTGAAGCCTACCAAGCCTATGCTGACTACCAGGATATTATGGACTTGACAGAAGGTATTATCCAGCATGTTACAAAAACTGTAAAAGGTGATGGACCAATTAATTATCAAGGCACAGAAATTAAAATTAATGAACCATTCAAACGTGTTCATATGGTTGATGCGGTTAAAGAAATCACTGGTATTGACTTCTGGAAAGAAATGACTCTTGAAGAAGCACAAGCTTTGGCACAAGAAAAAAATGTTCCGCTTGAAAAACATTTCACAACAGTTGGTCACATCATTAATGCCTTCTTCGAAGAATTTGTTGAAGACACTTTAATTCAACCAACTTTTGTCTTTGGTCATCCAGTTGAAGTGTCTCCACTTGCTAAGAAAAATGATACAGACCCTCGTTTTACAGACCGTTTCGAACTCTTTATCATGACTAAAGAATACGCTAATGCTTTTACAGAATTAAATGACCCAATTGATCAGCTATCTCGCTTTGAAGCACAAGCATCTGCTAAAGAACTTGGCGATGATGAAGCAACTGGAGTTGATTACGATTATGTTGAAGCACTTGAATATGGTATGCCACCTACTGGTGGACTAGGTATTGGTATCGACCGTCTCTGTATGCTGTTAACTGATACAACAACTATCCGAGACGTCCTACTTTTCCCTACAATGAAATAA

SEQ ID NO: 1424 - protein, 496 aa, Streptococcus agalactiae
MSNQHIEELNDQQIVRREKMAALTEQGIDPFGKRFERTATSGQLNEKYADKSKEDLHDIEETATIAGRLMTKRGKGKVGFAHIQDREGQIQIYVRKDSVGEENYEIFKKADLGDFLGVEGQVMRTDMGELSIKATHITHLSKALRPLPEKFHGLTDIETIYRKRHLDLISNRDSFDRFVTRSKIISEIRRFMDSNGFLEVETPVLHNEAGGASARPFITHHNAQDIDMVLRIATELHLKRLIVGGMERVYEIGRIFRNEGMDATHNPEFTSIEAYQAYADYQDIMDLTEGIIQHVTKTVKGDGPINYQGTEIKINEPFKRVHMVDAVKEITGIDFWKEMTLEEAQALAQEKNVPLEKHFTTVGHIINAFFEEFVEDTLIQPTFVFGHPVEVSPLAKKNDTDPRFTDRFELFIMTKEYANAFTELNDPIDQLSRFEAQASAKELGDDEATGVDYDYVEALEYGMPPTGGLGIGIDRLCMLLTDTTTIRDVLLFPTMK

SEQ ID NO: 1425 - protein, 903 aa, Streptococcus agalactiae
ATGATTACTTCAATTGTTTTTGATGTTGATGATACGATTTACGATCAACAAGCACCTTACCGTATTGCTGTGGAGAAATGCTTTCCTGATTTTGATATGAGCGCTATTAACCAAGCTTATATTCGCTTTCGTCATTATTCAGATATTGGCTTTCCACGAGTAATGGCTGGTGAATGGACAACAGAATATTTTCGTTTCTGGCGATGCAAAGAAACGCTTTTAGAGTTTGGTTATCGTGAAATTGACGAAGCTACTGGTATTTATTTTCAAGAAATATACGAACATGAACTTGAAAATATTACAATGCTTGATGAGATGCGTATGACACTTGACTTTTTGAAATCAAAAAATGTACCAATGGGAATTATTACAAATGGTCCTACGGAACATCAATTGAAAAAAGTTAAAAAATTGGGACTTTATGACTATGTTGATCCAAAACGTGTTATAGTTAGTCAAGCAACTGGTTTTCAAAAGCCTGAAAAGGAGATTTTTAATTTAGCAGCAGAGCAATTTGATATGAACCCTTCAACTACACTTTATGTGGGTGATTCATATGATAATGATATTATGGGTGCATTTAATGGTGGTTGGCATTCTATGTGGTTCAACCATAGAGGACGTTCTTTAAAACCGGGAATTAAACCAGTTTATGATGTTGCTATTGATAACTTTGAGCAATTATTCGGTGCTGTTAAAGTGTTGTTTGACTTACCTGATAATAAATTTATTTTTGATATCAACGATAAAAGTAATCCAGTCCTTGAAATGGGACTTAATAATGGTTTAATGATGGCAGCAGAGCGTCTGCTTGAGAGTAATATGAGCGTTGACAAAGTTGTTATTTTACTGCGCCTAACTGCAAAACAAGAAAAAGTATTACGCATGAAGTATGCTAGATAA

SEQ ID NO: 1426 - protein, 300 aa, Streptococcus agalactiae
MITSIVFDVDDTIYDQQAPYRIAVEKCFPDFDMSAINQAYIRFRHYSDIGFPRVMAGEWTTEYFRFWRCKETLLEFGYREIDEATGIYFQEIYEHELENITMLDEMRMTLDFLKSKNVPMGIITNGPTEHQLKKVKKLGLYDYVDPKRVIVSQATGFQKPEKEIFNLAAEQFDMNPSTTLYVGDSYDNDIMGAFNGGWHSMWFNHRGRSLKPGIKPVYDVAIDNFEQLFGAVKVLFDLPDNKFIFDINDKSNPVLEMGLNNGLMMAAERLLESNMSVDKVVILLRLTAKQEKVLRMKYAR

SEQ ID NO: 1427 - protein, 642 aa, Streptococcus agalactiae
ATGAAATTTTATCTTGTTAGACACGGAAAAACACAATGGAATTTAGAGGGGCGTTTCCAAGGTGCTAACGGAGACTCACCTCTCCTTGAAGAAGCTATTGAAGAATTAGAAGAACTTGGACAATACCTATCATCTATTCATTTTGATGCTGTTTATTCTAGCGACTTAGGTCGTGCTAGAGATACTGTTAATATCCTCAATGATGCTAATTCATGCCCAAAAGAAATCCACTATACTCCTCAACTTCGTGAATGGGCATTGGGAACTTTAGAAGGTTGTAAAATTGCAACTATGCAAGCTATCTATCCTCGTCAAATGACCGCATTTTATCAAAATCCCTTACAATTTAAACATGACATGTTCGGTGCAGAATCTCTTTATCAGACAACGCATCGTGTAGAGAGTTTCTTACGTTCTCTAGCTTCAAAAAATTACGACAAGGTCCTTATTGTAGGACATGGAGCAAACCTAACTGCGTCTATTCGTTCCTTACTGGGTTATCAATATGGTAGTTTACACTACAAAGATAAACTTGATAATGCCAGCCTCACAATCATAGAAACTCATGATTTTAAAGACTTCAACTGTCTGACTTGGAACGATAAATCTTATTTAAGGCAAGAGGTCAAAATGACACACTAA

SEQ ID NO: 1428 - protein, 213 aa, Streptococcus agalactiae
MKFYLVRHGKTQWNLEGRFQGANGDSPLLEEAIEELEELGQYLSSIHFDAVYSSDLGRARDTVNILNDANSCPKEIHYTPQLREWALGTLEGCKIATMQAIYPRQMTAFYQNPLQFKHDMFGAESLYQTTHRVESFLRSLASKNYDKVLIVGHGANLTASIRSLLGYQYGSLHYKDKLDNASLTIIETHDFKDFNCLTWNDKSYLRQEVKMTH

SEQ ID NO: 1429 - protein, 474 aa, Streptococcus agalactiae
ATGAGTAAAAAGAATAAAATCAAAAAAACTTTAGTTGATCAAATTTTAGATAAAGCAAAAATCGAACATGATAGTCTACAATTGGATGCTTTACAGGGAGATTTACCCAACGGTATTCAAAAACAAGATATCTTTAAGACATTAGCGCTAATCGGTGATAAAACCGGTCCCATAATAGGTATCTTACCTCTCACCGAGCATTTATCCGAAAAAAAGTTAGCTAAAATTTCAGGAAACAAAAAGGTACAAATGATACCTCAAAAAGATCTCCAGAAAATAACCGGTTATATTCACGGAGCAAATAATCCAATTGGAATTCGCCAAAAACATAATTACCCTATTTTTATCGATACTATCGCTTTAGAAAAACAAGAACTCATTGTCTCTGCAGGAGAAATTGGACGTTCTATTCGTATTAATAGTGAGGTTCTTGCAGATTTCGTAAATGCTAAATTTGCCGATATAAAGGAATAA

SEQ ID NO: 1430 - protein, 157 aa, Streptococcus agalactiae
MSKKNKIKKTLVDQILDKAKIEHDSLQLDALQGDLPNGIQKQDIFKTLALIGDKTGPIIGILPLTEHLSEKKLAKISGNKKVQMIPQKDLQKITGYIHGANNPIGIRQKHNYPIFIDTIALEKQELIVSAGEIGRSIRINSEVLADFVNAKFADIKE

SEQ ID NO: 1431 - protein, 408 aa, Streptococcus agalactiae
ATGGAAATACTGATTGCAGGTGGTAGTGGTTTTTTAGGAAAGCAGATAATAAAAGCAGCGCTTACAAAAGGGCATAAAGTGGCTTACTTATCAAGACATGAAGGTAAAGGTGATATATTTAAGGATCCTAGATTAACCTACATTAGGGGAGATATTACAGAAGCTGATAAGATTCATTTAGAAGACAGAACTTTTGATATATTAATTGACTGTATTGGAGCGATTAAGCCCAATCAACTAGATGAGCTTAACGTTAAAGCAACCCAAAAAGCAGTAGCACTCTGTCACAAAAATCAAATACCAAAGTTAGTTTATATTTCAGCCAACAGCGGCTATTCAGCTTACATTAAAAGTAAAAGGAAGGCAGAGCAGATAATCAANNNNNCATTCCATTCATTAATTAATTAA

SEQ ID NO: 1432 - protein, 135 aa, Streptococcus agalactiae
  VARIANT 127, 128, 129: Xaa = Any Amino Acid
MEILIAGGSGFLGKQIIKAALTKGHKVAYLSRHEGKGDIFKDPRLTYIRGDITEADKIHLEDRTFDILIDCIGAIKPNQLDELNVKATQKAVALCHKNQIPKLVYISANSGYSAYIKSKRKAEQIIXXXFHSLIN

SEQ ID NO: 1433 - protein, 204 aa, Streptococcus agalactiae
ATGAATGNNNNNTTTGCAGGAGGGTTAGGGGTTGTTTATGGCGTCATTATTGATACCTGTTTTGCTTGGTTATATCATATGCCTTGGTGGACTTATGTATTAGCAGGACTTAGTTTTAATATGGCACACGCTTTATCAACTTGTTTATTTTATCCTCTTTTGTTACCGATTTTAAGGAGATTTAGGAATGAAAAAATACATTAA

SEQ ID NO: 1434 - protein, 67 aa, Streptococcus agalactiae
  VARIANT 3, 4: Xaa = Any Amino Acid
MNXXFAGGLGVVYGVIIDTCFAWLYHMPWWTYVLAGLSFNMAHALSTCLFYPLLLPILRRFRNEKIH

SEQ ID NO: 1435 - protein, 390 aa, Streptococcus agalactiae
ATGAAAAAATACATTAAATTATTCTTGCTAACAGTATTCGCTACAACTTTAGTAGCTTGCGGGCAACCATCTACATCGAATAAGACAACAACTAGCTCAACGTTAGAAGTTGGTAAGGTTGAATTGGTGGTTAAAGAAGATACGAACGTGTTAAGTGAAAAGGTTGTTTACCATAAAGGTGATACTGTTTTGGATGTGCTTAAAGCTAACTATAAAGTTAAAGAAAAAGATGGTTTCATTACTTCAATTGATGGCATCAGCCAAGATGAAACCAAAGGGCTTTATTGGATGTTCAAGGTCAATAATAAATTAGCTCCTAAGGCAGCAAACCAAATTAAAGTTAAAAAGAATGACAAAATTGAATTTTATCAGGAAGTTTACAAAAAATAA

SEQ ID NO: 1436 - protein, 129 aa, Streptococcus agalactiae
MKKYIKLFLLTVFATTLVACGQPSTSNKTTTSSTLEVGKVELVVKEDTNVLSEKVVYHKGDTVLDVLKANYKVKEKDGFITSIDGISQDETKGLYWMFKVNNKLAPKAANQIKVKKNDKIEFYQEVYKK

SEQ ID NO: 1437 - protein, 1800 aa, Streptococcus agalactiae
ATGAAACTTAAAAAACGCTCTGAATTCCCTGAAAATGAACTTTGGGATCTGACTGCTCTCTACAAAGATCGTCAAGATTTTTTACTGGCTATTGAAAAAGCTCTTGAGGATATCAAGGTTTTCAAAAAAAATTACGAGGGAAAACTTAATTGTGTTGAGGATTTTACTAGTGCCCTTATGGAAATCGAGCATATTTATATCCAGATGAGTCACATTGATACGTATGCTTTTATGCCTCAAACTACTGACTTTAGCAACGAAGAGTTTGCACAAATTTCTCAAGCAGGATCAGACTTCGCAACTAAAGCTAATGTACTACTTTCTTTCTTTAATACTGCCCTAGCAAATGCAGATATAAAGATTTTAGATTCTTTAGAAAATAACCCTCATTTCAAAGCAACTATTCGCCAAGCTAAAATTCAAAAGCAACACTTATTAAGTCCAGAAGTCGAAAAAGCTTTGACAAACTTAAATGAAGTCCTAAATACACCATATGATATTTATACTAAAATGCGTGCTGGCGATTTTGATATGGAAGATTTTGAAGTTGACGGAAAAACCTACAAAAATAGTTTTGTAACTTATGAAAATTACTTTCAAAATCACGAAAATGCAGAGATACGTGAAAAATCCTTCCGTTCATTCTCGAAAGGTCTACGTAAGCACCAAAATGCTGCAGCTGCGGCTTATCTTGCAAAAGTCAAATCTGAAAAGTTAATTGCTGATATGCGTGGTTACGATAGTGTTTTTGATTATCTTCTTTCCGAACAAGAAGTTGACCGTTCAATGTTTGACAGACAAATTGATCTTATCATGGATGAATTTGGTCCAGTAGCTCAACGATTCCTCAAACATATCGCCGATGTTAATGGTATTGAAAAGATGACTTTTGCAGATTGGAAATTAGACATTGATAACGAACTTAATCCCGAAGTAAGTATCAATGATGCTTATGACTTAGTAATGAAATCAGTTGCTCCTTTAGGAAAAGAATATTCTCAAGAGGTTGAGCGCTATCAAAAAGAGCGTTGGGTTGATTTTGCAGCTAACGCTAATAAAGATTCTGGAGGATATGCTGCGGATCCTTACAAAGTTCATCCCTATGTACTCATGAGCTGGACGGGGCGTATGAGCGATGTCTACACACTTATTCATGAGATTGGACATTCTGGTCAATTTATCTTCTCAGATAATCACCAAAGTTTTTTCAATACTCACATGTCCACTTACTATGTTGAAGCTCCATCTACTTTTAACGAACTTTTACTTAGTGACTACTTAGAAAACCAATTTGATACAGCACGTCAAAAACGCTTTGCTCTTGCACATCGCTTAACTGATACTTACTTCCACAATTTCATTACTCACTTACTTGAAGCTGCTTTCCAACGTAAAGTTTACACTCTAATTGAGGAGGGAGGAACTTTTGGAGCAGAACAATTAAATGCTATTATGAAGGAAGTATTAACACAATTCTGGGGAGATGCTATTGAAATAGATGACGATGCCGCTTTGACATGGATGAGACAAGCTCATTACTACATGGGGCTCTATAGCTATACTTACTCTGCTGGATTAGTAATCTCGACAGCCGGCTATCTCAATCTCAAAAATAATCCAAACGGAGCAAAAGAGTGGTTAGCATTCTTGAAATCTGGTGGGAGCCGTACCCCTTTAGAAACAGCTCTATTAATCAGTGCTGATATTTCTACTGATAAGCCTCTGCGCGATACTATTAATTTCTTATCTAACACTGTAGACCAAATTATTAATTACAGTAATCTTATTGAGCAAGGCTAA

SEQ ID NO: 1438 - protein, 599 aa, Streptococcus agalactiae
MKLKKRSEFPENELWDLTALYKDRQDFLLAIEKALEDIKVFKKNYEGKLNCVEDFTSALMEIEHIYIQMSHIDTYAFMPQTTDFSNEEFAQISQAGSDFATKANVLLSFFNTALANADIKILDSLENNPHFKATIRQAKIQKQHLLSPEVEKALTNLNEVLNTPYDIYTKMRAGDFDMEDFEVDGKTYKNSFVTYENYFQNHENAEIREKSFRSFSKGLRKHQNAAAAAYLAKVKSEKLIADMRGYDSVFDYLLSEQEVDRSMFDRQIDLIMDEFGPVAQRFLKHIADVNGIEKMTFADWKLDIDNELNPEVSINDAYDLVMKSVAPLGKEYSQEVERYQKERWVDFAANANKDSGGYAADPYKVHPYVLMSWTGRMSDVYTLIHEIGHSGQFIFSDNHQSFFNTHMSTYYVEAPSTFNELLLSDYLENQFDTARQKRFALAHRLTDTYFHNFITHLLEAAFQRKVYTLIEEGGTFGAEQLNAIMKEVLTQFWGDAIEIDDDAALTWMRQAHYYMGLYSYTYSAGLVISTAGYLNLKNNPNGAKEWLAFLKSGGSRTPLETALLISADISTDKPLRDTINFLSNTVDQIINYSNLIEQG

SEQ ID NO: 1439 - protein, 2796 aa, Streptococcus agalactiae
TTGTCCCACCCGAAATTAGAAAGTAGTAGCAATAAAGAAATCATTACCGAAGAGGTCGGTTTACTGAAGCAGCTTTTGGATGAAGCAACGCAAAAATTGATTGGTAGTGAATCATTTGACAAGATTGAAAAAATAGTTTCATTATCATTAACTGACGATTATACTGGTCTGAAGGAAACTATTTCGGCTTTAAGCAACGAGGAGATGGTTATTGTTTCTCGTTACTTCTCTATTTTGCCGCTCTTAATTAATATTTCAGAAGACGTTGATTTAGCATATGAAATTAATTATAAAAATAATCTTAACCAAGATTACCTAGGAAAGTTATCAACGACTATTGATGTTGTAGCTGGCCATGAAAATGCTAAAGATATTCTTGAACACGTCAATGTTGTGCCTGTGCTAACAGCTCATCCTACTCAGGTGCAGCGTAAAACGGTGCTCGAATTAACGTCTAAGATTCATGATTTATTACGTAAATACAGAGATGTCAAGGCAGGAATCGTGAATCAAGAAAAATGGTATGCTGACTTGCGTCGTTACATCGGCATTATCATGCAAACAGACACTATTCGCGAGAAAAAATTGAAAGTCAAAAATGAGATAACCAATGTAATGGAATATTACAACCGTTCTCTTATTAAAGCAGTTACCAAATTAACAGCAGAATATAAGGCACTGGCAGCTAAAAAAGGTATTCACTTGGAGAATCCTAAGCCTCTGACTATGGGGATGTGGATTGGTGGTGATAGAGATGGCAATCCCTTTGTAACTGCTGAGACACTAAGATTATCAGCTATGGTACAAAGTGAAGTGATTATTAACCATTATATTGAGCAGCTAAATGAACTTTATCGTAATATGTCACTTTCAATAAATCTAACTGAAGTCTCTCCCGAACTTGTTACATTGGCAAACCAGTCACAAGATAATTCGGTATATAGGGAAAATGAACCTTACCGTAAAGCTTTCAATTTTATCCAAGATAAACTGGTACAAACCCTACTAAATTTAAAAGTTGGTTCTTCCCCAAAAGAGAAATTTGTTAGTCGCCAAGAATCTTCTGATATTGTAGGAAGGTATATAAAATCACATATCGCTCAAGTAGCTTCTGACATACAGACAGAAGAACTACCAGCATACGCTACTGCTGAGGAGTTTAAACAAGATTTGTTACTTGTGAAGCAATCTTTAGTTCAATATGGACAAGATTCTCTTGTTGATGGCGAATTAGCTTGTCTTATTCAAGCAGTAGATATCTTTGGATTTTATTTAGCTACTATTGATATGCGTCAAGATTCTAGTATTAATGAAGCTTGTGTAGCAGAATTATTGAAGTCTGCCAATATTGTAGATGATTACAGTTCTCTTTCAGAAGAAGAAAAATGTCAACTTCTCTTAAAAGAATTAACAGAAGATCCTAGAACATTATCTTCTACGCATGCTCCTAAATCCGAGTTACTTCAAAAAGAATTGGCTATTTTCCAAACAGCACGTGAGTTAAAAGATCAATTGGGTGAAGACATTATAAACCAGCATATCATTTCTCACACAGAGAGCGTTTCGGATATGTTTGAGTTAGCTATCATGTTAAAAGAAGTTGGACTAATTGATGCCAATCAAGCTCGTATTCAGATTGTACCGTTATTTGAAACCATCGAAGATTTGGATAATTCACGTGATATTATGACCCAGTATCTACATTATGAATTAGTTAAAAAATGGATTGCTACTAACAACAATTATCAAGAAATAATGCTAGGTTATTCAGATAGTAATAAAGATGGTGGCTATTTATCATCTGGTTGGACTCTATATAAAGCTCAAAATGAGCTAACAAAAATAGGTGAAGAAAACGGTATTAAAATCACATTTTTCCACGGTCGTGGTGGAACTGTTGGTCGTGGTGGTGGTCCATCTTATGAAGCTATCACATCACAACCTTTTGGTTCAATCAAAGATCGAATTCGCCTAACAGAGCAAGGTGAAATCATTGAGAATAAATATGGTAATCAAGATGCAGCCTATTATAACCTTGAAATGCTTATTTCAGCTTCCATAGACCGCATGGTAACACGTATGATTACTAACCCTAATGAAATTGATAATTTCCGTGAGACAATGGATGGTATTGTGTCTGAAAGTAATGCCGTTTATAGAAATTTAGTTTTTGATAATCCTTATTTCTATGACTATTTCTTTGAAGCAAGTCCAATTAAAGAGGTATCAAGTTTAAATATTGGTTCTCGGCCAGCAGCACGTAAAACAATTACAGAAATTTCAGGTTTACGTGCAATTCCATGGGTATTTTCATGGTCACAAAATCGTATTATGTTTCCAGGATGGTATGGTGTTGGATCAGCCTTCAAGCACTTTATTGAACAAGATGAGGCAAACTTAGCAAAATTACAAACCATGTATCAAAAATGGCCATTCTTTAATTCTCTTTTATCTAATGTAGATATGGTTTTATCAAAATCAAATATGAATATTGCGCTTCAGTATGCTCAGTTAGCTGGAAGTAAAGAAGTTCGAGATGTTTTTAATATCATCCTTAATGAATGGCAGTTAACTAAAGATATGATTTTAGCTATTGAACAGCATGATAATTTATTAGAAGAAAACCCAATGTTACATGCAAGTTTAGATTATCGTTTGCCATATTTCAATGTTTTGAATTATGTTCAAATTGAATTGATTAAACGTCTTCGTAGTAACCAACTAGATGAAGACTATGAGAAGTTGATTCATATTACTATTAATGGTATTGCAACAGGTTTACGAAATTCAGGTTAA

SEQ ID NO: 1440 - protein, 931 aa, Streptococcus agalactiae
MSHPKLESSSNKEIITEEVGLLKQLLDEATQKLIGSESFDKIEKIVSLSLTDDYTGLKETISALSNEEMVIVSRYFSILPLLINISEDVDLAYEINYKNNLNQDYLGKLSTTIDVVAGHENAKDILEHVNVVPVLTAHPTQVQRKTVLELTSKIHDLLRKYRDVKAGIVNQEKWYADLRRYIGIIMQTDTIREKKLKVKNEITNVMEYYNRSLIKAVTKLTAEYKALAAKKGIHLENPKPLTMGMWIGGDRDGNPFVTAETLRLSAMVQSEVIINHYIEQLNELYRNMSLSINLTEVSPELVTLANQSQDNSVYRENEPYRKAFNFIQDKLVQTLLNLKVGSSPKEKFVSRQESSDIVGRYIKSHIAQVASDIQTEELPAYATAEEFKQDLLLVKQSLVQYGQDSLVDGELACLIQAVDIFGFYLATIDMRQDSSINEACVAELLKSANIVDDYSSLSEEEKCQLLLKELTEDPRTLSSTHAPKSELLQKELAIFQTARELKDQLGEDIINQHIISHTESVSDMFELAIMLKEVGLIDANQARIQIVPLFETIEDLDNSRDIMTQYLHYELVKKWIATNNNYQEIMLGYSDSNKDGGYLSSGWTLYKAQNELTKIGEENGIKITFFHGRGGTVGRGGGPSYEAITSQPFGSIKDRIRLTEQGEIIENKYGNQDAAYYNLEMLISASIDRMVTRMITNPNEIDNFRETMDGIVSESNAVYRNLVFDNPYFYDYFFEASPIKEVSSLNIGSRPAARKTITEISGLRAIPWVFSWSQNRIMFPGWYGVGSAFKHFIEQDEANLAKLQTMYQKWPFFNSLLSNVDMVLSKSNMNIALQYAQLAGSKEVRDVFNIILNEWQLTKDMILAIEQHDNLLEENPMLHASLDYRLPYFNVLNYVQIELIKRLRSNQLDEDYEKLIHITINGIATGLRNSG

SEQ ID NO: 1441 - protein, 1269 aa, Streptococcus agalactiae
ATGAAAATTGATAAAAGGCATCTTCTGAATTATTCCATCCTCATTCCCTATTTGATATTGTCTATTCTAGGCTTAATTGTAATTTATTCGACAACTAGTGCAACTCTAATTCAGCTTGGAGCTAACCCTTTTCGTTCAGTAATCAACCAGGGTGTCTTTTGGGCAGTCAGTTTGGTTGCAATTATCTTTATCTATAAACTGAAACTAAATTTTTTGAAAAATTCTAAAGTGTTGACTATGGCAGTATTGGTAGAAGTATTTTTACTACTAATAGCGCGCTTTTTTACACAAGAAGTTAATGGAGCACATGGTTGGATTGTTATTGGTCCTATTAGTTTTCAACCTGCTGAATATTTAAAAGTTATCATTGTATGGTATTTAGCGTTTACTTTTGCTCGAAGGCAAAAAAAGATAGAAATATATGATTATCAAGCTTTGACAAAAGGGAGATGGCTTCCGAGATCACTAAGCGACCTAAAAGATTGGCGATTTTATTCTTTATTTATGATTGGTTTGGTAATTGCACAACCTGATTTAGGAAATGGTTCGATAATTGTTCTAACGGTCATTATTATGTACTGTATTAGTGGTATTGGTTATCGATGGTTTTCAGCTTTACTTGGTCTAATCGTCGTGGGGTCAACTTTATTTATCGGAACTATTGCAGTTGTTGGAGTTGAGACAATGGCTAAAGTCCCTGTCTTTGGTTATGTAGCTAAGCGATTTAATGCTTTTTTTGACCCATTTAAAGATTTAACAGATTCAGGACACCAGTTGGCTAATTCGTATTATGCAATGAGCAACGGTGGCTGGTTTGGTCGAGGACTTGGGAATTCTATTGAAAAATTAGGGTACTTACCAGAAGCAACAACAGACTTTGTCTTTTCAATTGTTATTGAGGAATTAGGAGTTATTGGTGCAGGGTTTATTTTAGCTTTGGTTTTCTTCTTAATTTTACGTATTATGCACGTAGGTATAAAGGCTAAAGATCCTTTCAACTCAATGATCGCTCTTGGTATTGGAGCAATGCTATTGATGCAAGTTTTTGTTAACATTGGTGGTATTTCTGGGTTAATCCCCTCAACTGGAGTGACATTTCCTTTCTTATCCCAAGGAGGGAACAGCCTCTTGGTACTTTCTGTAGCTATCGGATTCGTGCTTAATATTGATGCTAACGAGAAAAAGGAACTCATAATGAAAGAAGCAGAAGAGCAATATAAGCCACAAGAAAAAAATGAAAAAATAATCAACCTTGATGCCTTTAAATAA

SEQ ID NO: 1442 - protein, 422 aa, Streptococcus agalactiae
MKIDKRHLLNYSILIPYLILSILGLIVIYSTTSATLIQLGANPFRSVINQGVFWAVSLVAIIFIYKLKLNFLKNSKVLTMAVLVEVFLLLIARFFTQEVNGAHGWIVIGPISFQPAEYLKVIIVWYLAFTFARRQKKIEIYDYQALTKGRWLPRSLSDLKDWRFYSLFMIGLVIAQPDLGNGSIIVLTVIIMYCISGIGYRWFSALLGLIVVGSTLFIGTIAVVGVETMAKVPVFGYVAKRFNAFFDPFKDLTDSGHQLANSYYAMSNGGWFGRGLGNSIEKLGYLPEATTDFVFSIVIEELGVIGAGFILALVFFLILRIMHVGIKAKDPFNSMIALGIGAMLLMQVFVNIGGISGLIPSTGVTFPFLSQGGNSLLVLSVAIGFVLNIDANEKKELIMKEAEEQYKPQEKNEKIINLDAFK

SEQ ID NO: 1443 - protein, 1197 aa, Streptococcus agalactiae
ATGGCAAAAGAAAAATACGATCGTAGTAAACCACACGTTAACATTGGTACAATCGGACACGTTGACCACGGTAAAACTACTTTAACAGCAGCTATCACAACTGTATTGGCACGTCGCTTGCCTACTTCAGTTAACCAACCAAAAGATTACGCTTCTATCGATGCTGCTCCAGAAGAGCGCGAACGCGGAATCACAATCAACACTGCACACGTTGAGTACGAAACTGAAAAACGTCACTATGCCCACATCGACGCTCCAGGACACGCGGACTACGTTAAAAACATGATCACTGGTGCTGCTCAAATGGACGGAGCTATCCTTGTAGTTGCTTCAACTGATGGACCAATGCCACAAACTCGTGAGCACATCCTTCTTTCACGTCAAGTTGGTGTTAAACACCTTATCGTATTCATGAACAAAGTTGACCTTGTTGATGATGAAGAATTGCTTGAATTGGTTGAAATGGAAATTCGTGACCTTCTTTCAGAATACGACTTCCCAGGTGATGACCTTCCAGTTATCCAAGGTTCAGCTCTTAAAGCACTTGAAGGCGACGAAAAATACGAAGACATCATCATGGAATTGATGAGCACTGTTGATGAGTACATTCCAGAACCAGAACGTGATACTGACAAACCTTTACTTCTTCCAGTTGAAGATGTATTCTCAATCACTGGACGTGGTACAGTTGCTTCAGGACGTATCGACCGTGGTACTGTTCGTGTCAACGACGAAGTTGAAATCGTTGGTATTAAAGAAGATATCCAAAAAGCAGTTGTTACTGGTGTTGAAATGTTCCGTAAACAACTTGACGAAGGTCTTGCAGGGGACAACGTTGGTGTTCTTCTTCGTGGTGTTCAACGTGATGAAATCGAACGTGGTCAAGTTCTTGCTAAACCAGGTTCAATCAACCCACACACTAAATTTAAAGGTGAAGTTTACATCCTTTCTAAAGAAGAAGGTGGACGTCATACTCCATTCTTCAACAACTACCGTCCACAATTCTACTTCCGTACAACTGACGTAACAGGTTCAATCGAACTTCCAGCAGGAACAGAAATGGTTATGCCTGGTGATAACGTTACTATCGAAGTTGAATTGATTCACCCAATCGCCGTAGAACAAGGTACTACTTTCTCAATCCGTGAAGGTGGACGTACTGTTGGTTCAGGTATCGTTTCAGAAATCGAAGCTTAA

SEQ ID NO: 1444 - protein, 398 aa, Streptococcus agalactiae
MAKEKYDRSKPHVNIGTIGHVDHGKTTLTAAITTVLARRLPTSVNQPKDYASIDAAPEERERGITINTAHVEYETEKRHYAHIDAPGHADYVKNMITGAAQMDGAILVVASTDGPMPQTREHILLSRQVGVKHLIVFMNKVDLVDDEELLELVEMEIRDLLSEYDFPGDDLPVIQGSALKALEGDEKYEDIIMELMSTVDEYIPEPERDTDKPLLLPVEDVFSITGRGTVASGRIDRGTVRVNDEVEIVGIKEDIQKAVVTGVEMFRKQLDEGLAGDNVGVLLRGVQRDEIERGQVLAKPGSINPHTKFKGEVYILSKEEGGRHTPFFNNYRPQFYFRTTDVTGSIELPAGTEMVMPGDNVTIEVELIHPIAVEQGTTFSIREGGRTVGSGIVSEIEA

SEQ ID NO: 1445 - protein, 759 aa, Streptococcus agalactiae
ATGTCACGTAAACCATTTATCGCTGGTAACTGGAAAATGAATAAAAATCCAGAAGAAGCAAAAGCATTCATCGAAGCAGTAGCTTCTAAATTACCATCATCAGAACTTGTTGAAGCAGGGATTGCTGCTCCAGCGCTTACTTTATCAACAGTTCTTGAAGCAGCTAAAGGTTCAGAATTGAAAATCGCTGCTCAAAATAGCTATTTTGAGAATTCAGGTGCATTCACTGGTGAAAACAGCCCTAAAGTATTGGCTGAAATGGGTACAGACTACGTTGTTATCGGTCACTCAGAACGTCGTGATTATTTCCATGAAACTGACCAAGATATCAACAAAAAAGCAAAAGCTATCTTTGCTAATGGTTTGACTCCAATCATTTGTTGCGGTGAGTCTCTTGAAACTTACGAAGCTGGTAAAGCGGTTGAATTCGTAGGTGCTCAAGTTTCAGCAGCTCTTGCAGGTTTGTCAGAAGAGCAAGTATCATCACTTGTTATCGCTTACGAACCAATCTGGGCTATTGGTACTGGTAAATCAGCAACTCAAGACGACGCACAAAACATGTGTAAAGCAGTTCGTGACGTTGTTGCAGCAGACTTCGGTCAAGCAGTTGCTGACAAAGTTCGCGTTCAATACGGTGGTTCAGTTAAACCTGAAAACGTTGCAGAATATATGGCTTGCCCAGACGTTGACGGTGCCCTTGTAGGTGGAGCTTCACTTGAAGCAGAAAGCTTCCTTGCCTTATTAGATTTTGTTAAATAA

SEQ ID NO: 1446 - protein, 252 aa, Streptococcus agalactiae
MSRKPFIAGNWKMNKNPEEAKAFIEAVASKLPSSELVEAGIAAPALTLSTVLEAAKGSELKIAAQNSYFENSGAFTGENSPKVLAEMGTDYVVIGHSERRDYFHETDQDINKKAKAIFANGLTPIICCGESLETYEAGKAVEFVGAQVSAALAGLSEEQVSSLVIAYEPIWAIGTGKSATQDDAQNMCKAVRDVVAADFGQAVADKVRVQYGGSVKPENVAEYMACPDVDGALVGGASLEAESFLALLDFVK

SEQ ID NO: 1447 - protein, 693 aa, Streptococcus agalactiae
ATGGTAAAATTAGTATTCGCACGCCACGGTGAATCTGAGTGGAATAAAGCTAACCTTTTCACTGGATGGGCTGACGTAGATCTTTCAGAAAAAGGTACACAACAAGCTATTGATGCTGGGAAATTAATTCAAGCAGCAGGTATTGAGTTCGACCTTGCTTTTACATCAGTTCTTAAACGTGCCATCAAAACAACTAACCTTGCCCTTGAAGCAGCTGATCAACTTTGGGTACCAGTTGAAAAATCATGGCGCTTGAACGAACGTCATTACGGTGGATTGACAGGAAAAAATAAAGCAGAAGCAGCTGAACAATTTGGTGATGAGCAAGTTCATATTTGGCGTCGTTCATATGATGTATTGCCTCCAGATATGGCTAAAGATGATGAACATTCAGCACATACTGATCGTCGCTATGCTTCACTAGATGATTCTGTTATTCCAGATGCAGAAAACCTAAAAGTTACTTTAGAGCGTGCTCTTCCTTTCTGGGAAGATAAAATTGCTCCTGCTCTTAAAGATGGTAAAAATGTGTTTGTTGGTGCACACGGTAACTCAATCCGTGCTCTTGTAAAACATATCAAACAATTGTCAGATGATGAAATCATGGACGTTGAAATTCCTAACTTCCCACCACTTGTTTTCGAATTTGATGAAAAATTAAACCTTGTTTCAGAATATTACTTAGGTAAATAA

SEQ ID NO: 1448 - protein, 230 aa, Streptococcus agalactiae
MVKLVFARHGESEWNKANLFTGWADVDLSEKGTQQAIDAGKLIQAAGIEFDLAFTSVLKRAIKTTNLALEAADQLWVPVEKSWRLNERHYGGLTGKNKAEAAEQFGDEQVHIWRRSYDVLPPDMAKDDEHSAHTDRRYASLDDSVIPDAENLKVTLERALPFWEDKIAPALKDGKNVFVGAHGNSIRALVKHIKQLSDDEIMDVEIPNFPPLVFEFDEKLNLVSEYYLGK

SEQ ID NO: 1449 - protein, 2046 aa, Streptococcus agalactiae
ATGTTGAATCGTAAAAAAAGGTATCGTCTCACTGTAAAAAAGCAAAATGCTAGCATACCTAGACGATTAAATCTTCTATTTTTTATTATTGTTTTATTATTTACTGTTCTAATTCTTCGTTTAGAGCAAATGCAGATTGGGCAACAATCATTTTACATGAAAAAACTGACAGCTCTTACGAGTTATACAGTGAAAGAATCAAAAGCGAGAGGTCAGATTTTTGATGCTAAGGGAGTTGTCTTAGTTGAAAATGATGAACGTCCTACTGTGGCGTTTTCTAGAGGAAACAATATTTCATCTCAGTCTATCAAAGAGTTAGCGAATAAATTATCACATTACATTACCTTAACCGAAGTTGCTTCAAGCGATAGAGCAAAGAGAGATTATTATTTAGCAGATAAAGCCAACTACAAAAAAGTTGTTGAAAGTTTACCAGATTCTAAACGTTACGATAAATTTGGTAACCATCTAGCCGAATCAACCGTATATGCAAATGCAGTTGCTGCAGTTCCAGTGAGCGCTATTAACTATTCTGAAGATGAGTTAAAAGTGGTTGCCTTATTTAACCAAATGAATGCGACACCAACGTTTGGTTCAGTGAAATTAAGTACAGGCGAATTAAGTGATGATCAAATCAAGAAACTGGATGCTGATAAGAAGGAACTGTTAGGAATTTCTGTAACAAGTAATTGGCATCGTCGTAAAAAAGGAACTTCTTTATCGGATATATTAGGTACTATTTCTACAGAAAAGGCAGGTTTACCAAGAGAAGAAGTTAAAAAATATTTGAAAAAAGGCTATTCACTGAATGACCGAGTGGGAACTTCTTACCTTGAAAAACAATATGAAGATGACTTACAAGGAATCAGACAAATTCGCAAAGTAGTTGTTAATAAAAAAGGTAAAGTTGTTTCAGATAATATTACGCAAGAAGGTAAGTCAGGAAGAAATCTTAAATTAACGATTGATCTTAATTACCAAAACAAAGTAGAAAGTATCTTGAAACAATACTATGGCAGTGAATTATCTAGTGGACGCGCTAGTTTTTCCGAAGGGATGTATGCAGTTGCTATAGAACCTTCAACTGGTAAAGTGTTAGCAATGGCTGGTCTGAAAAATGATCATGGGAATTTAGTTGATGACAGCCTAGGCACTATTGCTAAGAATTTCACGCCAGGATCTGTTGTGAAAGGTGCGACGCTATCATCAGGATGGGAAAATAAAGTTCTTAGAGGAAATGAAGTGCTTTATGACCAAGAAATTGCTAATATACGGTCATGGTTTACACGAGGTTTGACTCCAATATCTGCGGCACAAGCGCTAGAGTATTCATCTAATACTTATATGGTTCAAGTAGCACTTCGTTTAATGGGACAAGACTATAATACAGGAGATGCTTTAACTGATCGAGGCTATCAAGAAGCAATGGCTAAACTAAGGAAAACTTACGGCGAATATGGTTTAGGGGTTTCTACAGGATTAGATTTACCTGAATCAGAAGGTTATGTACCTGGAAAATACAGCTTAGGAACAACTCTAATGGAATCGTTCGGTCAGTATGATGCCTATACACCAATGCAACTTGGTCAGTATATCTCAACTATTGCGAATAATGGGAATCGTTTAGCACCTCACGTGGTTTCAGATATCTATGAAGGGAATGATTCTAATAAGTTCGCTCAATTGGTTCGTTCAATCACTCCTAAAACACTAAATAAGATAGCTATCTCAGATCAAGAGTTAGCCATTATTCAAGAAGGTTTTTATAACGTTGTCAATAGTGGAAGTGGCTATGCAACTGGTACGTCAATGAGGGGGAATGTGACAACCATTAGTGGTAAAACTGGTACCGCTGAAACATTTGCTAAAAATGTAAATGGACAAACAGTTTCTACCTACAACTTAAACGCTATTGCCTACGATACTAATCGTAAAATAGCAGTAGCGGTAATGTATCCGCATGTTACAACTGATACAACAAAATCCCATCAATTAGTTGCACGAGATATGATTGATCAATATATTTCACAGTTCACAGGACAATAA

SEQ ID NO: 1450 - protein, 681 aa, Streptococcus agalactiae
MLNRKKRYRLTVKKQNASIPRRLNLLFFIIVLLFTVLILRLEQMQIGQQSFYMKKLTALTSYTVKESKARGQIFDAKGVVLVENDERPTVAFSRGNNISSQSIKELANKLSHYITLTEVASSDRAKRDYYLADKANYKKVVESLPDSKRYDKFGNHLAESTVYANAVAAVPVSAINYSEDELKVVALFNQMNATPTFGSVKLSTGELSDDQIKKLDADKKELLGISVTSNWHRRKKGTSLSDILGTISTEKAGLPREEVKKYLKKGYSLNDRVGTSYLEKQYEDDLQGIRQIRKVVVNKKGKVVSDNITQEGKSGRNLKLTIDLNYQNKVESILKQYYGSELSSGRASFSEGMYAVAIEPSTGKVLAMAGLKNDHGNLVDDSLGTIAKNFTPGSVVKGATLSSGWENKVLRGNEVLYDQEIANIRSWFTRGLTPISAAQALEYSSNTYMVQVALRLMGQDYNTGDALTDRGYQEAMAKLRKTYGEYGLGVSTGLDLPESEGYVPGKYSLGTTLMESFGQYDAYTPMQLGQYISTIANNGNRLAPHVVSDIYEGNDSNKFAQLVRSITPKTLNKIAISDQELAIIQEGFYNVVNSGSGYATGTSMRGNVTTISGKTGTAETFAKNVNGQTVSTYNLNAIAYDTNRKIAVAVMYPHVTTDTTKSHQLVARDMIDQYISQFTGQ

SEQ ID NO: 1451 - protein, 597 aa, Streptococcus agalactiae
ATGCTTTACCCAACACCAATTGCTAAATTGATTGACAGCTTTTCAAAATTACCGGGTATAGGTACTAAAACAGCAACACGTTTAGCTTTTTACACCATTGGTATGAGTGATGAAGATGTTAATGAATTTGCTAAGAATTTATTAGCTGCTAAGCGGGAATTAACCTATTGTTCTGTTTGTGGTAATTTGACTGATGATGATCCTTGCTTAATTTGTACAGATAAGACGCGTGACCAGTCTGTTATCTTGGTTGTTGAAGATAGTAAAGATGTGTCAGCTATGGAAAAAATTCAAGAGTATAATGGTTTGTATCATGTCTTACATGGCTTAATTTCACCTATGAATGGTATTAGCCCTGATGACATTAATTTGAAAAGTTTAATTACTCGATTGATGGATGGTCAGGTGACAGAAGTTATTGTTGCTACCAATGCGACTGCTGATGGTGAAGCTACATCAATGTATATTTCACGAGTCTTAAAACCAGCTGGTATCAAAGTGACACGATTAGCGAGAGGTTTAGCTGTTGGTTCAGATATCGAATATGCAGATGAAGTAACCTTGCTTCGAGCAATCGAAAATCGTACAGAGTTATAA

SEQ ID NO: 1452 - protein, 198 aa, Streptococcus agalactiae
MLYPTPIAKLIDSFSKLPGIGTKTATRLAFYTIGMSDEDVNEFAKNLLAAKRELTYCSVCGNLTDDDPCLICTDKTRDQSVILVVEDSKDVSAMEKIQEYNGLYHVLHGLISPMNGISPDDINLKSLITRLMDGQVTEVIVATNATADGEATSMYISRVLKPAGIKVTRLARGLAVGSDIEYADEVTLLRAIENRTEL

SEQ ID NO: 1453 - protein, 1047 aa, Streptococcus agalactiae
ATGTCMAAAGAAACATTGATCTTGCTTTACGGTGGTCGCTCTGCGGAACGTGAAGTATCTGTACTGTCTGCAGAAAGCGTCATGCGTGCTATTAATTATGATAAATTTTTTGTTAAAACTTATTTTATCACGCAAGTAGGTCAATTTATTAAAACACAAGAATTTGATGAAATGCCATCTTCAGATGAAAAGTTAATGACAAACCAAACTGTTGATTTAGACAAAATGGTTCGTCCAAGTGATATCTATGATGATAATGCAATTGTTTTCCCCGTTTTACATGGACCAATGGGGGAAGATGGTTCTATCCAAGGATTTTTAGAAGTTTTAAGGATGCCTTATGTTGGGACTAATATTCTATCTTCAAGCGTGGCTATGGATAAAATTACAACAAAACAAGTCCTTGCAACAGTAGGTGTACCTCAGGTTGCATATCAAACTTATTTTGAGGGTGATGATTTGGAACATGCGATTAAACTCTCTTTAGAAACTTTAAGTTTCCCAATTTTTGTAAAACCGGCTAATATGGGGTCATCAGTAGGTATTTCAAAAGCGACAGATGAATCCTCACTTCGCTCTGCAATTGACTTAGCTCTCAAGTATGATAGCCGTATTTTGATTGAACAAGGCGTGACAGCTCGTGAAATTGAAGTAGGTATTTTAGGCAATAATGATGTTAAGACAACTTTTCCTGGCGAAGTCGTTAAAGACGTCGATTTCTATGACTATGACGCCAAATATATTGATAATAAAATTACTATGGATATTCCAGCTAAAGTTGATGAAGCAACTATGGAAGCAATGCGTCAATATGCAAGTAAAGCTTTTAAAGCAATCGGGGCTTGTGGTTTATCACGCTGTGATTTCTTTTTGACGAAAGATGGACAAATCTTCTTAAACGAACTGAATACAATGCCCGGTTTTACTCAGTGGTCAATGTATCCCCTGCTTTGGGAAAATATGGGGCTAACTTATAGTGATTTGATTGAAAAGTTAGTTATGTTAGCTAAAGAAATGTTTGAAAAACGTGAGAGTCATTTAATTTAA

SEQ ID NO: 1454 - protein, 348 aa, Streptococcus agalactiae
MSKETLILLYGGRSAEREVSVLSAESVMRAINYDKFFVKTYFITQVGQFIKTQEFDEMPSSDEKLMTNQTVDLDKMVRPSDIYDDNAIVFPVLHGPMGEDGSIQGFLEVLRMPYVGTNILSSSVAMDKITTKQVLATVGVPQVAYQTYFEGDDLEHAIKLSLETLSFPIFVKPANMGSSVGISKATDESSLRSAIDLALKYDSRILIEQGVTAREIEVGILGNNDVKTTFPGEVVKDVDFYDYDAKYIDNKITMDIPAKVDEATMEAMRQYASKAFKAIGACGLSRCDFFLTKDGQIFLNELNTMPGFTQWSMYPLLWENMGLTYSDLIEKLVMLAKEMFEKRESHLI

SEQ ID NO: 1455 - protein, 1311 aa, Streptococcus agalactiae
ATGAAGCTTAGTTTGCATGAAGTTGCTAAAGTAGTTGGCGCTAAAAATCAAGTATCAGAGTTTGAAGACGTTCCCCTGGGAAATATTGAATTTGATAGTCGTAATATCAGTGAAGGTGACTTATTTCTTCCCTTAAAAGGAGCAAGAGATGGACATGAGTTTATAGAGATGGCTTTTGATAATGGAGCAATAGCAACCATTTCAGAGAAGGAAATAGAGGGTCATCCTTATCTTTTAGTGTCTGATGCACTTAAAGCATTTCAAGTCTTGGCACAGTATTATATTGAAAAGATGAACGTTGATGTTATTGCAGTAACTGGCTCAAATGGTAAGACAACAACTAAAGATATGATAGCTGCAATCTTATCAACCACATATAAGACTTATAAAACACAAGGAAACTACAATAACGAGATTGGCTTACCCTATACTGTGCTACACATGCCAGAAGATACTGAAAAAATTATTTTGGAGATGGGACAGGATCATCTTGGAGATATCCATGTGTTATCTGAAATTGCAAAACCACGTATTGCTGTTGTTACTTTGATTGGTGAAGCACACTTAGAATTTTTTGGTAGTCGAGAAAAGATTGCAGAAGGGAAAATGCAAATCACAGATGGTATGAGTTCAGATGGCATATTAATTGCACCGGGAGATCCAATTATTGATCCATATCTTCCAGCAAACCAGATGACTATTCGTTTTGGTCATGACCAAGAATTGCAAGTGACAGAACTCAAAGAAGAAAAACATTCCTTAACTTTTAAAACTAATGCTTTGGAGCACCAATTACGTATACCAGTACCTGGTAAGTACAATGCAACTAATGCGATGGTCGCTGCCTATGTTGGAAAATTATTAGCAGTAGCAGAAGAAGATATAGTGGATGCTCTAGAAAATCTTCAACTAACTCGTAATCGCACCGAATGGAAGAAATCAGCCAATGGAGCAGATATTTTATCAGATGTTTACAATGCTAACCCAACGGCTATGCGATTGATACTAGAAACCTTTTCAGCTATTCCCAATAATGATGGTGGAAAGAAGATTGCTCTTTTAGCTGATATGAAAGAACTGGGAGAACAATCTGTGGATTTACATAATCAAATGATTATGAGTATCAGACCTGACTCTATTGATACTTTGATTTGTTATGGCCAGGATATTGAGGGGTTGGCTCAATTAGCAAGCCAGATGTTCCCAATTGGTAAAGTGTATTTCTTTAAAAAGAATCAAGAAGTAGATCAGTTTGATCAATTGCTTGCAAAAGTAAAAGATACTCTTAAGGNNNNNCATTCCATTCATTAA

SEQ ID NO: 1456 - protein, 436 aa, Streptococcus agalactiae
  VARIANT 431, 432: Xaa = Any Amino Acid
MKLSLHEVAKVVGAKNQVSEFEDVPLGNIEFDSRNISEGDLFLPLKGARDGHEFIEMAFDNGAIATISEKEIEGHPYLLVSDALKAFQVLAQYYIEKMNVDVIAVTGSNGKTTTKDMIAAILSTTYKTYKTQGNYNNEIGLPYTVLHMPEDTEKIILEMGQDHLGDIHVLSEIAKPRIAVVTLIGEAHLEFFGSREKIAEGKMQITDGMSSDGILIAPGDPIIDPYLPANQMTIRFGHDQELQVTELKEEKHSLTFKTNALEHQLRIPVPGKYNATNAMVAAYVGKLLAVAEEDIVDALENLQLTRNRTEWKKSANGADILSDVYNANPTAMRLILETFSAIPNNDGGKKIALLADMKELGEQSVDLHNQMIMSIRPDSIDTLICYGQDIEGLAQLASQMFPIGKVYFFKKNQEVDQFDQLLAKVKDTLKXXHSIH

SEQ ID NO: 1457 - protein, 645 aa, Streptococcus agalactiae
ATGATAGAATTCTTTTCTAATATCAGAACAGAGATTCCGCAGATGCCTTTACTTATCCATAGTTTGATTTTATCYGKCYTACCTTTTCTGATGTGGCTGACTTTGGTTAATAGAGATAAGCCTTTGTATAAAACTATTTGGAGTATCCTTTTAGGACTTCAGTTAATTACGATTTATACTTGGTTTTTCTGGGCAAAATTGCCTTTATCTGAAAGTCTTCCCCTTTACCATTGTCGAATAGGCATGTTTGTCGTTCTCTTGGCGAGGCCTGGAATATTAAAGGATTATTTCGCATTGTTAGGAGTAGTAGGTGGAGTATTGGCAATGATTCACCCAGACTTTTACCCTTACCAGTTTCTACATGTGACTAATATTTTCTTCTTTATTGGACATTTTGCTTTATTTGTCCTTAGTTTACTACATCTGATGACACAGTCCAATTTGGACAAATTAAATCCAAAATTGATTATACAACTAACGCTTCTCATTAATATGTCTTTGATTTTTATTAACCTCTTGACTGGGGGGAATTATGGCTTTATGATGAAGACACCAATACTAGGAATAACAAATCCCTTTTTAAACCTTTTTATAGTGACAACTCTATTAAGTTTTCTCGTCCTATNNNNNCATTCCATTCATTAA

SEQ ID NO: 1458 - protein, 214 aa, Streptococcus agalactiae
  VARIANT 26, 209, 210: Xaa = Any Amino Acid
MIEFFSNIRTEIPQMPLLIHSLILSXLPFLMWLTLVNRDKPLYKTIWSILLGLQLITIYTWFFWAKLPLSESLPLYHCRIGMFVVLLARPGILKDYFALLGVVGGVLAMIHPDFYPYQFLHVTNIFFFIGHFALFVLSLLHLMTQSNLDKLNPKLIIQLTLLINMSLIFINLLTGGNYGFMMKTPILGITNPFLNLFIVTTLLSFLVLXXHSIH

SEQ ID NO: 1459 - protein, 90 aa, Streptococcus agalactiae
ATGNNNNNTTTCTTGATACTTTCTTGGAGTTGCTCCAGAACCTCATGGTCACAAGACTACAGAAGGTAATGTTATTGACCCCTTGGCTAA

SEQ ID NO: 1460 - protein, 30 aa, Streptococcus agalactiae
  VARIANT 2, 3: Xaa = Any Amino Acid
MXXFLILSWSLLPEPHGHKTTEGNVIDPLG

SEQ ID NO: 1461 - protein, 719 aa, Streptococcus agalactiae
ATGTTATTGACCCCTTGGCTAAAGATTTTTCAGGTTTTGTCTTTAAAATTCAAGCTAACATGGACCCACGTCATCGCGACCGTATTGCTTTTGTTCGTATTGTTTCTGGTGAATTTGAGCGCGGTATGGGAGTTAATTTGACACGTACTGGTAAAGGTGCTAAGCTCTCCAATGTTACTCAATTTATGGCAGAATCACGTGAAAATGTGACGAATGCTGTTGCTGGGGATATTATCGGGGTTTATGATACAGGAACTTATCAAGTTGGGGATACCTTAACAGTTGGGAAAAATAAATTTGAATTTGAACCATTACCAACTTTTACCCCAGAATTATTTATGAAAGTATCAGCAAAAAATGTTATGAAGCAGAAATCATTCCACAAAGGTATTGAGCAATTAGTACAAGAAGGAGCAATCCAGCTTTATAAGAATTATCAGACAGGCGAATACATGCTGGGTGCTGTGGGTCAACTTCAGTTTGAAGTTTTTAAACATCGTATGGAAGGTGAATACAATGCTGAAGTTGTTATGACACCAATGGGTAAAAAGACTGTACGTTGGATTAACTCAGACGATTTAGACGAACGCATGTCTTCAAGCCGAAATATTTTAGCAAAAGATCGTTTTGACCAACCAGTTTTCCTATTTGAAAATGATTTTGCACTTCGCTGGTTTGCTGATAAGTATCCTGATGTGAAGCTTGAAGAAAAAATGTAA

SEQ ID NO: 1462 - protein, 239 aa, Streptococcus agalactiae
MLLTPLAKDFSGFVFKIQANMDPRHRDRIAFVRIVSGEFERGMGVNLTRTGKGAKLSNVTQFMAESRENVTNAVAGDIIGVYDTGTYQVGDTLTVGKNKFEFEPLPTFTPELFMKVSAKNVMKQKSFHKGIEQLVQEGAIQLYKNYQTGEYMLGAVGQLQFEVFKHRMEGEYNAEVVMTPMGKKTVRWINSDDLDERMSSSRNILAKDRFDQPVFLFENDFALRWFADKYPDVKLEEKM

SEQ ID NO: 1463 - protein, 480 aa, Streptococcus agalactiae
ATGAATGNNNNNAATTTGTTAGCAGGAGAAAGTGTATATTATCATCTAGCTTTAGTTTATAAATTAAATCATCAAAAAGTAAATCATGACGCAATTAATGATATCTTAGATTTTTTAGGTTTGATGGATTTAAAACAGGTGAAATGCCATAGTTTGAGTGGTGGGCAGCAACAAAAAGTTGCAATCGCTATGGCTGTTTTGCAAAAACCGAAACTTATTCTATGTGATGAGATCAGCTCTGCCTTAGATACTAATAGTGAAAAAGAGATATTTAACTTGTTGTCTGATCTTCGTGAAAAATATGGTATCTCTATCTTGATGATTGCTCATCACCTATCTCTTTTAAAACAATATTGTGATCGTGTAATGATTTTGGATCACCAGACTATTGTAGATACTGTTGTTCCAGTGAAAGCAACTCTGAATCAATTAAAGTCAAACTACGTAGATCAAGTAAAGGAGTTTTTGTTACATGATTGA

SEQ ID NO: 1464 - protein, 159 aa, Streptococcus agalactiae
  VARIANT 3, 4: Xaa = Any Amino Acid
MNXXNLLAGESVYYHLALVYKLNHQKVNHDAINDILDFLGLMDLKQVKCHSLSGGQQQKVAIAMAVLQKPKLILCDEISSALDTNSEKEIFNLLSDLREKYGISILMIAHHLSLLKQYCDRVMILDHQTIVDTVVPVKATLNQLKSNYVDQVKEFLLHD

SEQ ID NO: 1465 - protein, 663 aa, Streptococcus agalactiae
ATGATTGACATTATTGAAAAACATGGCGAAGGTATCTTAAAATCATTTTGGGAAACCAATTTAATGTTAGGGTTAACCTTGATTCTTTGTTTTCTAATTGCTTTTCCAACAGGTATTTTATTGTTTTCATTGAGAAAGTCTTACTTGATTAAACATTCTTTAGCCTATCAACTACTAAATTTATTTTTAGGTACGTTACGGAGTGTCCCTTTCCTTATTTTTATTTTTATCTTAATCCCTCTCAATCGATTAATTTTTGGGACCTCATTTGGAACGATAGCGGCAATCTTACCTCTTACTTTGGTTTCAGTCAGTTTGTATGCACGTTATGTGGAACAAGCTTTATTAAATATACCTCAAGTTGTTGTAGATCGAGCTCTCAGTCTAGGGGCTAACAAGAGACAGATAATTTATTATTTTTTAATCCCCTCCATCAAGATTGACCTTGTTTTATCATTTACTGCAACGGCTATAAGTATTCTTGGCTACTCGACAATAATGGGAGTTATTGGTGCAGGAGGTTTGGGTGAATATGCCTATCGTTTTGGCTATCAAGAGTATGACTACCCAGTTATGTACTTGATTGTTGTCTTATTTATAATATATGTGTTTATCTTACAGAGTTTGGGCTATTTTATAGCAAACCGCTACTCAAGAAAATAA

SEQ ID NO: 1466 - protein, 220 aa, Streptococcus agalactiae
MIDIIEKHGEGILKSFWETNLMLGLTLILCFLIAFPTGILLFSLRKSYLIKHSLAYQLLNLFLGTLRSVPFLIFIFILIPLNRLIFGTSFGTIAAILPLTLVSVSLYARYVEQALLNIPQVVVDRALSLGANKRQIIYYFLIPSIKIDLVLSFTATAISILGYSTIMGVIGAGGLGEYAYRFGYQEYDYPVMYLIVVLFIIYVFILQSLGYFIANRYSRK

SEQ ID NO: 1467 - protein, 831 aa, Streptococcus agalactiae
ATGAAAAAATTACTTTCCCTAACATGTCTAATCATGATGTCTTTATGTTTAGTGGCATGTACTAAGCAAGCAATGTCGTCTAAGAAAATTAAAGATAAGAATAGTAAAGAAAAGGTGATTACTGTTGCAACTTACAGCAAACCTACATCTACCTTTTTAGATTTGGTTAAAGATAATGTAAAAGAAAAAGGATATACTTTAAAGGTTGTCATGGTCTCTGACTATATTCAGGCTAACATTGCTTTAGAAAACAAAGAACATGATGCTAACCTTTTACAACATGAATTTTTCATGAGTATCTTTAATAAGGAAAATGATGGTCATCTAGTATCAATTACACCAATTTATCATTCATTGGCTGGTTTTTATGGTCAACATTTGAAAAATATTGCCGAGCTTAAAGACGGTGCTAAGGTAGCGATTCCGTCTGATCCTGCCAATATGACTAGAGCTCTGCTATTATTGCAAGAAAAGAAACTTATCACCTTAAAGAATACGTCCAAAAAGACCAAGGCTATCGAAGATATTATTACTAACCCTAAAAAATTACGAATTGAACCTGTAGCATTACTTAACCTCAATCAGGCCTATTTTGAATATGACCTTGTCTTTAATTTCCCTGGATATGTGACAAAAATCAATCTAGTTCCTAAAAGGGATAGATTATTATATGAGAAAAAACCAGATATCCGTTTTGCAGGTGCCTTGGTAGCTCGTGAAGATAATAAAAATAGTGATAAAATAAAAGTACTTAAAGAAGTACTAACAAGTAAAGAGATTCGTCACTATATCACTAAGGAGATTCCAAGTGAAGCAGCCGTTGCGTTCTAG

SEQ ID NO: 1468 - protein, 276 aa, Streptococcus agalactiae
MKKLLSLTCLIMMSLCLVACTKQAMSSKKIKDKNSKEKVITVATYSKPTSTFLDLVKDNVKEKGYTLKVVMVSDYIQANIALENKEHDANLLQHEFFMSIFNKENDGHLVSITPIYHSLAGFYGQHLKNIAELKDGAKVAIPSDPANMTRALLLLQEKKLITLKNTSKKTKAIEDIITNPKKLRIEPVALLNLNQAYFEYDLVFNFPGYVTKINLVPKRDRLLYEKKPDIRFAGALVAREDNKNSDKIKVLKEVLTSKEIRHYITKEIPSEAAVAF

SEQ ID NO: 1469 - protein, 1587 aa, Streptococcus agalactiae
TTGAAATTTACAGAACTTAACTTATCGCAAGATATTCTTTCAGCGGTAGAAAAAGCAGGCTTTGTAGAGCCATCACCAATCCAAGAAATGACTATCCCACTTGCTCTTGAAGGCAAAGATGTCATTGGTCAAGCGCAGACAGGTACAGGAAAAACTGCAGCTTTTGGGTTACCAACTTTAAATAAAATTCATACTGAAGATAATACTATCCAAGCACTTATTATTGCTCCTACACGTGAACTTGCAGTACAATCACAAGAAGAATTGTTCCGTTTTGGACGCGATAAAGGTGTTAAGGTCCGCTCTGTTTATGGTGGGTCAAGTATTGAAAAACAAATCAAGGCATTACGTTCAGGAGCACACGTTGTTGTTGGAACTCCAGGTCGATTACTTGATTTAATTAAACGTAAAGCACTTAAACTTAATCACATTGAAACTCTTATTCTTGATGAAGCAGACGAAATGCTTAACATGGGATTTTTAGAGGACATTGAAGCAATCATTAGTCGTGTACCAGAAACACGTCAAACTCTTTTATTCTCAGCGACAATGCCTGATCCAATCAAACGTATCGGCGTTAAATTCATGAAAGATCCTGAGCATGTTAAAATTAAAGCAACTGAATTAACTAATGTGAATGTTGATCAGTATTATGTTCGTGTTAAGGAAAATGAAAAATTCGATACTATGACACGTTTGATGGACGTTGATCAACCAGAATTGTCAATTGTCTTTGGACGTACGAAACGTCGTGTAGATGAATTAACTCGTGGACTAAAATTACGTGGTTTCCGAGCAGAAGGAATTCATGGAGACTTAGATCAAAATAAACGTCTTCGTGTTATCAGAGACTTTAAAAATGACCATATTGATATTCTTGTTGCCACAGATGTTGCTGCGCGTGGTTTAGATATTTCAGGCGTTACACATGTTTACAACTATGATATTCCCCAAGATCCCGAAAGTTATGTTCACCGTATTGGACGTACTGGTCGTGCTGGTAAATCTGGTCAATCTATCACTTTTGTTTCACCAAACGAAATGGGATATTTGACAATTATTGAAAACTTAACTAAAAAACGTATGACTGGAATGAAGCCTGCTACTGCAAGCGAAGCATTTCAGGCTAAGAAAAAAGTTGCATTGAAACGTATTGCACGTGACTTTGAGGATCAGGAATTAGTTTCTAAATTTGATAAATTTAAAGCCGATGCTTTAGAATTAGCAACTCAATACACACCAGAAGAACTTGCTCTTTATGTCTTAAGCTTAACAGTTCAGGATCCAGAATCGTTACCAGAAGTTGAAATCACACGTGAAAAACCATTACCATTTAAACCATCAGGTGGTGGCTTTAAAGGTAAAGGTGGACGAGGCAATGGCCGTGGTGGCGATCGTCGACGCAATGATCGTGGTGATCGTCGTGGAAATCGTGACCGTGATGATCGTGGTGGTCGTTGTGATTTTAAACGTCGTGATGATAAGTTCAAGAAAGATAATCGTCGTCAAGAAAATAAAAAACCTCATAAAAACACTTCAAGTGAAAAACAAACTGGATTTGTTATTCGCAACAAAGGCGATAAATAA

SEQ ID NO: 1470 - protein, 528 aa, Streptococcus agalactiae
MKFTELNLSQDILSAVEKAGFVEPSPIQEMTIPLALEGKDVIGQAQTGTGKTAAFGLPTLNKIHTEDNTIQALIIAPTRELAVQSQEELFRFGRDKGVKVRSVYGGSSIEKQIKALRSGAHVVVGTPGRLLDLIKRKALKLNHIETLILDEADEMLNMGFLEDIEAIISRVPETRQTLLFSATMPDPIKRIGVKFMKDPEHVKIKATELTNVNVDQYYVRVKENEKFDTMTRLMDVDQPELSIVFGRTKRRVDELTRGLKLRGFRAEGIHGDLDQNKRLRVIRDFKNDHIDILVATDVAARGLDISGVTHVYNYDIPQDPESYVHRIGRTGRAGKSGQSITFVSPNEMGYLTIIENLTKKRMTGMKPATASEAFQAKKKVALKRIARDFEDQELVSKFDKFKADALELATQYTPEELALYVLSLTVQDPESLPEVEITREKPLPFKPSGGGFKGKGGRGNGRGGDRRRNDRGDRRGNRDRDDRGGRCDFKRRDDKFKKDNRRQENKKPHKNTSSEKQTGFVIRNKGDK

SEQ ID NO: 1471 - protein, 267 aa, Streptococcus agalactiae
ATGATTAAAGTTCCTGCTTATATGTATGTTTTAGAATGTTCAGATGGAACACTTTATACAGGTTATACTACAGATGTCAAGCGCCGTCTCAATACACACAATACTGGAAAAGGTGCTAAATATACTCGTGCGAGATTGCCAGTAAAACTTCTTTATTCTGAAGCTTTTAATAGCAAACAAGAAGCAATGAGGGCAGAAGCATTATTTAAACAAAAGACTCGGCAAGCAAAATTGACTTATATTAAACAACATAAAAATGAACAATAA

SEQ ID NO: 1472 - protein, 88 aa, Streptococcus agalactiae
MIKVPAYMYVLECSDGTLYTGYTTDVKRRLNTHNTGKGAKYTRARLPVKLLYSEAFNSKQEAMRAEALFKQKTRQAKLTYIKQHKNEQ

SEQ ID NO: 1473 - protein, 765 aa, Streptococcus agalactiae
ATGATAGATACAATTTTAAAAGAAAATGAACGCATTGATCAGCTTTTTTCAACTGATGTCAAAATCATCCAAAACAAAGAAGTTTTTTCCTATTCCATAGATAGTGTTTTATTGTCTCGGTTCCCTAAACTTCCTTCTCGTGGTCTTATCGTTGACTTATGTAGTGGTAATGGTGCTGTCGGTTTGTTTGCCAGCACCAAAACAAATGCGACAATTATAGAGATCGAACTACAAGAGAGCCTTGCGGATATGGCTAAGCGTTCGATTAAGCTCAATAAATTGGAAAAACAGGTTACTATGATTAATGATGATTTAAAAAATCTTCTTGATCATGTTCAACGTTCAAACGTTGATTTAATGCTTTGCAATCCACCTTATTTCAAAGCAAGCGAAACCTCTAAAAAAAATCTAAGCCCGCATTATCTCCTTGCAAGACACGAAATAACAACAAACCTTAGAGAGATTTGTCAAATTGCTCAACATGCTCTAAAAACAAAAGGACGTATCGCTATGGTACATCGTCCAGACCGTTTCCTTGAAATTATTGATACGATGCGTCAGTTCAATTTAGCACCTAAACGTATCCAATTTGTTTATCCAAAATTAGGAAAAGATGCTAATATGCTTTTAATTGAAGCTATTAAAGATGGCTCGACAGAAGGTATGAAAATACTTCCTCCTCTTGTTGTTCATCAAGATAATGGAGACTATACTGAGACTATTTTTGATATATATTTCGGAGAAAACGGAAAATCTCATGATTAA

SEQ ID NO: 1474 - protein, 254 aa, Streptococcus agalactiae
MIDTILKENERIDQLFSTDVKIIQNKEVFSYSIDSVLLSRFPKLPSRGLIVDLCSGNGAVGLFASTKTNATIIEIELQESLADMAKRSIKLNKLEKQVTMINDDLKNLLDHVQRSNVDLMLCNPPYFKASETSKKNLSPHYLLARHEITTNLREICQIAQHALKTKGRIAMVHRPDRFLEIIDTMRQFNLAPKRIQFVYPKLGKDANMLLIEAIKDGSTEGMKILPPLVVHQDNGDYTETIFDIYFGENGKSHD

SEQ ID NO: 1475 - protein, 741 aa, Streptococcus agalactiae
ATGTTCTATACTTACTTACGTACTTTAGTTATGTTCTTGATTTGGGTGGCTAATGGTAATGCGCACTATCATAATGAAGATAAAATGTTAAAAGATGATGAAAATTATATTTTAGTAGCTCCACACAGAACATTTTGGGATCCTGTGTACATGGCTTTTGCTGCTAGACCCAAACAGTTTATTTTTATGGCCAAAAAAGAATTATTCACGAATCGTTTGTTTGGTTGGTGGATTAAAATGTGTGGTGCTTTCCCTATTGATCGTGAAAAGCCAGGGCAAGATGCTATTCGATATCCTGTAAAGATGCTGAAAAATAGCAACCGTTCTTTGGTGATGTTTCCGAGTGGAAGCCGCCACTCCAAAGATGTCAAAGGAGGCGTAGCTGTTATTGCAAAAATGGCAAAAGTCAGAATTATGCCAGCAGCATATAGAGGTCCTATGGTTTTTAAAAATCTATTAAAGGGGCATCGTGTTGATATGAATTTTGGTAACCCTATTGATGTTTCTGATATTAAGCGTATGGATGCCGAAGGGATTGCAGAAGTATCTCGTCGTATTCAGGAAGAATTTGATCGTTTAGATAGAGAAAATGAAACTTATGATGATGGTAAGAAATTAAATCCATTGACTTATATTTATCGTCTACCTTTAGCAATTATAGCTATTGTCTTGCTTGTCCTAACTCTAATTTTTAGTTATTTAGCAAGCTTTGTGTGGGATCCACAAAAACATCTAAAATAA

SEQ ID NO: 1476 - protein, 246 aa, Streptococcus agalactiae
MFYTYLRTLVMFLIWVANGNAHYHNEDKMLKDDENYILVAPHRTFWDPVYMAFAARPKQFIFMAKKELFTNRLFGWWIKMCGAFPIDREKPGQDAIRYPVKMLKNSNRSLVMFPSGSRHSKDVKGGVAVIAKMAKVRIMPAAYRGPMVFKNLLKGHRVDMNFGNPIDVSDIKRMDAEGIAEVSRRIQEEFDRLDRENETYDDGKKLNPLTYIYRLPLAIIAIVLLVLTLIFSYLASFVWDPQKHLK

SEQ ID NO: 1477 - protein, 267 aa, Streptococcus agalactiae
ATGTTTGAAATAGTATTGGAAAAAATTAAATCGCATAAATGGGAGACAACAGGAATTATTGTAGGACTCTTATTATTTGGAATTTTGGGTTTAAATCATTTTGGCACTCATCATAAAGAAGACAATTTAAATATCAATTTAGAGAAAAAAGTATCAACTATAACAGAAAAAAAGGTACCAATGATTAGTCACGTCAAAGATAAAGTATCTAATCAAGTAACGGTTGACGTAAAAGGGGCAGTCNNNNNCATTCCATTCATTAATTAA

SEQ ID NO: 1478 - protein, 88 aa, Streptococcus agalactiae
  VARIANT 82, 83: Xaa = Any Amino Acid
MFEIVLEKIKSHKWETTGIIVGLLLFGILGLNHFGTHHKEDNLNINLEKKVSTITEKKVPMISHVKDKVSNQVTVDVKGAVXXIPFIN

SEQ ID NO: 1479 - protein, 285 aa, Streptococcus agalactiae
ATGGTTATCTATGTTGCTCAAAAAGGTGAAAAAATAACTGTTGTGGAAGAGGAGAAAGCAAATAATATCGCTACTCAGGGAAATAGTAAGGGGAAAATTAATCTTAATAAAGCAGATTTATCAAGTCTTCAGACCATATCAGGCGTTGGGGCTAAAAGAGCTCAAGATATTTTAGATTATCGTGATAGTCAAGGTGGTTTTAAAACTATTGATGACCTCAAAAACGTATCAGGTATTGGTGAGAAAACACTAGAAAAATTACGTCAAGATGTTACAATTGACTAA

SEQ ID NO: 1480 - protein, 94 aa, Streptococcus agalactiae
MVIYVAQKGEKITVVEEEKANNIATQGNSKGKINLNKADLSSLQTISGVGAKRAQDILDYRDSQGGFKTIDDLKNVSGIGEKTLEKLRQDVTID

SEQ ID NO: 1481 - protein, 735 aa, Streptococcus agalactiae
TTGACTAAGTATTTTCCTCTAAAACCTATTTATTTAGCATTGTTGGTCTTCCAAATTTACTTACTAGTGTTTTCTTGGACAATGCTTGGTTGTGCCTTTCTTTTATTTTCTTTTATTTTTCTGATTTATCAATATGATCGTGAAACTATTTTTAAAACAATAGCAATAGTAATTTTTTTCTTATTTTATTTTTTATGGCAAAATCACAATATGAATGTCCAATATCAAAGAGTACCGAATCATATTAGCCAGATTAAAGTGCGTATTGATACTATTTCTATCAATGGTGATGTTTTATCATTCCAGGCAGATGCTTCAGGTAACACTTATCAAGCTTTTTACACATTAAAAAATAAAAGTGAGAAAGATTATTTTCAAAATCTTGATAATAATATAATGATAATTGCAGATATCAAACTTGAAGAAGCAGAGGAGAGAAGGCATTTTAATGGCTTTGATTATCGTCAGTATTTAAAAAGACATGGAATTTATCGTATCGCCAAAGTGACAAAGATAAAACAGATACGCTTATTTCAACATAGGTCTTTCTTTGCTCTTATGTCTAAGTGGCGTAGAAGTGCAATTGTTATTAGTCAAACTTTTCCAAATCCTATGCGTCACTATATGTCAGGGCTTTTGTTTGGATATCTAGATAAGACCTTTGATGACATGTCCGATTTATATAGTAGTCTAGGTATTATACATTTATTTGCTTNNNNNCATTCCATTCATTAA

SEQ ID NO: 1482 - protein, 244 aa, Streptococcus agalactiae
  VARIANT 239, 240: Xaa = Any Amino Acid
MTKYFPLKPIYLALLVFQIYLLVFSWTMLGCAFLLFSFIFLIYQYDRETIFKTIAIVIFFLFYFLWQNHNMNVQYQRVPNHISQIKVRIDTISINGDVLSFQADASGNTYQAFYTLKNKSEKDYFQNLDNNIMIIADIKLEEAEERRHFNGFDYRQYLKRHGIYRIAKVTKIKQIRLFQHRSFFALMSKWRRSAIVISQTFPNPMRHYMSGLLFGYLDKTFDDMSDLYSSLGIIHLFAXXHSIH

SEQ ID NO: 1483 - protein, 636 aa, Streptococcus agalactiae
TTGACGCGTTTGGCTGCTGATATCGTTGGTAAAGAAGGTGATGTTGTAGGAATTGATATTAATGAGCAACTTTTATGGCAAGCTAGACATGATAATGGCTATGCTAATGTTAGTTATCAAAACGCAGATTTAGCAGCACTTTCCTCCTTTGAAACAAAAAGTTTTGATGCAATTATTGGACGTCGTGTATTAATGTATCAAAAAGATCCAAAGAAAGTAATAGAAAGTTTAACACCTTTGTTAAAGCCAAATGGTTTTTATGTTTTTCAAGAAAGTGATGCAATGTGTTTAGAACTAGCTAAGCCTAGCTTTGTAAATATGAATAAAATACAATCACTAATCTGGCAAACTGTTGAGAAGGAAGGAGGACACATTCATATTGGAAGTCAACTTGAGCAATTAATGTTAGAAGCAGGCTTAATCGTTGACCATTTTGTATCAGAAAATGTCATTCAAACGTCACAAACTGGTACAGATTTATCTTGGCTACTAAATATCATGAAAGAAAGAATACAAAAATATAGTGACCTTCAGGGATTAGAAGATGTCAATTTACAAAAAGAATTAGAAGAGAATAATGACCATTTTATCCGAGATTGTCAATTTGGAATTATTTCTCATAGAGTTGATGAATGA

SEQ ID NO: 1484 - protein, 211 aa, Streptococcus agalactiae
MTRLAADIVGKEGDVVGIDINEQLLWQARHDNGYANVSYQNADLAALSSFETKSFDAIIGRRVLMYQKDPKKVIESLTPLLKPNGFYVFQESDAMCLELAKPSFVNMNKIQSLIWQTVEKEGGHIHIGSQLEQLMLEAGLIVDHFVSENVIQTSQTGTDLSWLLNIMKERIQKYSDLQGLEDVNLQKELEENNDHFIRDCQFGIISHRVDE

SEQ ID NO: 1485 - protein, 944 aa, Streptococcus agalactiae
ATGAAAGAGAAGCTATTTCAGGTAATTGGATTCAATAAAGACGATTTAGCCTATTCTTATTTTGATTTAAGTGAAGAAGACTATCAAAATGCGGAATTAGACTTAGAAAGTTTACCTTTTTTATCAGACTACAAGGTTGTTATTTTTGATCAGTTTCAAGATATTACAACTGATAAAAAAACTTATTTAGATGAACAAGCAATGAAGCGCTTTGAAGCCTACTTGCAGAATCCTGTAGATACTACGAGACTTGTTATTTGTGCTCCAGGAAAACTTGATGGAAAACGTCGACTTGTAAAGTTATTGAAACGTGATGCTCGTGTTTTAGAGGCTAATACTTTAAAAGAATCAGATTTAAAGACGTATTTTCAAAAATATGCTCACCAAGAAGGATTAGTTTTTGAAGCAGGTGTTTTTGATGAGTTATTGATTAAGTCTAACTATGATTTTAGTGATACTTTAACGAATATCGCTTTCTTAAAGTCATATAAAACAGACGGTCATATTTCGTCCAATGATGTTAGAGAGGCTATCCCTAAAAGCCTGCAAGATAATATATTTGATTTGACTCAAGATGTCTTACTTGGCAGGATAGATTTAGCGCGTGATTTAGTAAGAGATTTACGTCTACAAGGCGAAGACGAAATCAAATTGATTGCAATCATGTTAGGACAGTTTCGGATGTTTTTGCAAGTTAAAATATTGGCTAGTAAAGGGAAGTCAGAGAGTCAAATTGTTTCTGAACTATCCCATTACATAGGACGTAAAATCAACCCTTATCAAGTAAAATTTGCTGTCAGAGATTCTAGAAACCTTCCCCTTGCTTTTTAAAAGAAGCGATTAGGATTTTAATCGAGACTGACTATGCTATTAAAAGAGGGACTTATGATAAGGATTATCTCTTTGATTTAGCCTTATTAAAAATTGCTCATAAAAAGCCCTAA

SEQ ID NO: 1486 - protein, 314 aa, Streptococcus agalactiae
MKEKLFQVIGFNKDDLAYSYFDLSEEDYQNAELDLESLPFLSDYKVVIFDQFQDITTDKKTYLDEQAMKRFEAYLQNPVDTTRLVICAPGKLDGKRRLVKLLKRDARVLEANTLKESDLKTYFQKYAHQEGLVFEAGVFDELLIKSNYDFSDTLTNIAFLKSYKTDGHISSNDVREAIPKSLQDNIFDLTQDVLLGRIDLARDLVRDLRLQGEDEIKLIAIMLGQFRMFLQVKILASKGKSESQIVSELSHYIGRKINPYQVKFAVRDSRNLPLAFLKEAIRILIETDYAIKRGTYDKDYLFDLALLKIAHKKP

SEQ ID NO: 1487 - protein, 609 aa, Streptococcus agalactiae
ATGGCAATTATTTTACCAGATTTACCCTATGCATATGATGCGCTTGAGCCACATATTGATGCTGAGACAATGACACTACATCATGATAAGCACCATGCAACTTATGTTGCTAATGCAAATGCTGCTCTTGAGAAACATCCTGAAATTGGAGAAGACTTAGAGGCGCTCTTAGCTGATGTTTCTCAAATTCCAGAAGATATTCGTCAGGCAGTCATCAATAACGGTGGTGGACATCTTAACCACGCTCTTTTCTGGGAATTGATGTCACCAGAAGAAACTCAAATTTCACAAGAGTTATCTGAAGACATTAATGCAACTTTTGGTTCATTTGAAGACTTTAAAGCTGCTTTCACAGCAGCAGCAACAGGACGTTTTGGTTCAGGTTGGGCTTGGCTTGTTGTTAATGCTGAAGGCAAACTTGAAGTGCTTTCAACTGCCAATCAAGATACTCCAATTATGGAAGGCAAGAAACCTATTTTAGGGCTTGATGTATGGGAGCATGCTTATTACTTAAACTATCGTAATGTTCGTCCTAACTACATCAAAGCTTTCTTTGAAATTATTAACTGGAATAAAGTAAATGAACTTTACCAAGCTGCTAAAGCTTAA

SEQ ID NO: 1488 - protein, 202 aa, Streptococcus agalactiae
MAIILPDLPYAYDALEPHIDAETMTLHHDKHHATYVANANAALEKHPEIGEDLEALLADVSQIPEDIRQAVINNGGGHLNHALFWELMSPEETQISQELSEDINATFGSFEDFKAAFTAAATGRFGSGWAWLVVNAEGKLEVLSTANQDTPIMEGKKPILGLDVWEHAYYLNYRNVRPNYIKAFFEIINWNKVNELYQAAKA

SEQ ID NO: 1489 - protein, 852 aa, Streptococcus agalactiae
ATGATTATAAAACGCGTATTAAATCATAATGCAGTCATATCAGTAACACATCAAGGATTAGATGTGCTACTGATGGGGAAAGGAATTGCATTTAAGAAAAGAATAGGTGATAGGATTAATAGCGATGCTATTGAGAAGTCATTTGTTTTAAAAAATAGTGATAACATGAACCGTTTTACGGAGTTATTTATTACTGTTCCAGAAGAAGTAGTTGCATGTTCAGAACGAATTATCAACCTAGGTAAAATCAAATTGGGTAAGAACTTAGATGAAATTCTTTATATCAATTTGACAGATCATATTCATTCGGCTATTGAAAGACATGAACAAGGAATGGTTATCCAAAATCCACTAAGGTTGGAAATCCAACGTTACTATCCTGATGAATACTCCATTGGGATGAAGGCTCTGGAACTTATAAAGGATGAATTGGGCATTTGTTTAACAATCGATGAGTCGGCTTTTATTGCTATGCACTTTGTAAATGCTGGATTGGATAATCCGTTTAATGAAGCGCATAAAATCACTGAGATTGTATCTTACATTGAACAGAAAGTAAAAATAGATTTTCGAACAGAACTAGATGAAAGTTCAATTGATTATTATCGTTTCATGACACATACCAAATTATTTGCTCAACGCGTTTTATCAGGAATGAAATACGAAGATGATGATGCTGATTTACTTTTGGTAGTTAAGAAAAAATATCCGAGAGAATATAAATGTGTTAAAGAGATCGGCAACAATATGGCTATCCAATACCAATATCAACTTAATTCAAGTGAACTCCTATATCTGACGGTGCATGTTAAACGATTAGTTAAAAATTTAAAGGAGATATCAGATGACTAA

SEQ ID NO: 1490 - protein, 283 aa, Streptococcus agalactiae
MIIKRVLNHNAVISVTHQGLDVLLMGKGIAFKKRIGDRINSDAIEKSFVLKNSDNMNRFTELFITVPEEVVACSERIINLGKIKLGKNLDEILYINLTDHIHSAIERHEQGMVIQNPLRLEIQRYYPDEYSIGMKALELIKDELGICLTIDESAFIAMHFVNAGLDNPFNEAHKITEIVSYIEQKVKIDFRTELDESSIDYYRFMTHTKLFAQRVLSGMKYEDDDADLLLVVKKKYPREYKCVKEIGNNMAIQYQYQLNSSELLYLTVHVKRLVKNLKEISDD

SEQ ID NO: 1491 - protein, 224 aa, Streptococcus agalactiae
ATGACTAAATACCAAGAGACTGCTAAAGCTATTTTAGCAGCAGTAGGGGGAGAAAAAAATATTCAACACGTAACCCACTGTGTGACACGATTACGATTAGTTTTAGACAATGATGAAATTGTCAACGATCAGGTTATTAAAACTATTCCGAATGTTATCGGTGTTATGCGTAAAAATGATCAATACCAAATTATTTTGGGAAATGATGTCAATAATTATTATAA

SEQ ID NO: 1492 - protein, 74 aa, Streptococcus agalactiae
MTKYQETAKAILAAVGGEKNIQHVTHCVTRLRLVLDNDEIVNDQVIKTIPNVIGVMRKNDQYQIILGNDVNNYL

SEQ ID NO: 1493 - protein, 1506 aa, Streptococcus agalactiae
ATGCTCAAGGTTATAGGTATTTTGCTCCCTATGCTCGGTATAGCAAGCTCTAGTTCTCAAACAGTAGCTTTTATCAATTTTTTTGGTGATGCCGCTTATTATTTTATGCCAATAATGATTGCTTATTCAGCTGCGTCACGATTTAAAGTTACACCTGTATTAGCTGCTACAGTAGGAGGGATTCTCTTACACCCTGCTTTTGTGACAATGGTAGCTGAAGGAAAACCATTATCTTTATTTGGAGCTCCGGTTACACTGGCTAGTTATGGTTCTTCTGTTATTCCAATCTTAATTATGGTTTTTCTTATGCAATATATTGAGAGATGGATTAATAAAATTGTTCCTAGTGTAATGAAGAGTTTTTTACAACCGACTTTGATTATTCTCATTTCTGGCTTTTTAGCTTTAGTGGTCGTGGGGCCACTGGGGGTAATTATTGGTAAAGGATTGTCTAGTGCAATGCTTTCGATTTACCATGTGGCGCCATGGTTAGCTTTATCTATTCTTGGTGCTATTATGCCATTGGTTGTTATGACAGGAATGCACTGGGCATTTGCTCCAATATTTTTAGCTGCTTCTGTTGCGACACCAGATGTTTTGATTTTACCAGCAATGTTAGCTTCTAATTTAGCTCAAGGTGCGGCTTCTCTTGCTGTTGCAGTTAAGGCTAAACAAAAACAAACACGTCAGGTGGCCTTTGCAGCAGGTTTATCAGCACTACTAGCTGGTATCACAGAACCTGCACTTTATGGTGTCACACTGAAATTCAAGAAGCCTTTATACGCTGCAATGATATCAGGTGGTTTAGTAGGAGCTTATATTGGATTAGTTAATATTGCTTCCTATACATTTGTAGTACCATCTATTATTGGTTTGCCACAATATATCAATCCACAGGGGGGCAATAATTTCAGTAATGCTGTTATTGCAGCAATAGCTACTATTATTTTGACTTTCATTATTACATGGTTCTTGGGAATTGATGAAGGAGAAAACGAAAAAAGTAGTATTAATGCTCAAGAGCACACACATATTAGAAGTGGTTTATCAAAAAAAGAGACATTGTATTCACCTATGGTAGGCAATGTATTACCTTTATCTAAAGTACCCGATGAAACATTTTCATCTAAATTACTAGGTGAAGGTTTAGCAATCACTCCTAGTGTGGGTGAAGTTTATGCACCATTTGATGGTGAAATTATAAGTTTATTTCCTACAAAACATGCCATTGCCTTAAAGGATGATAAGGGAGTCGAAGTGTTAATCCATATTGGAATAGATACTGTAGAACTAAATGGAGAAGGTTTTGAACAATTGGTCAAAGTTGGCGATTTTGTTAAACGAGGACAGTTACTTTTGCGAATGGATATTGATTTTATTAGTTCAAAGGGGTATTCTCTTATTAGTCCGGTTGTAGTTACAAATTCAATTGACCAACTTGAAATTATCGTTAAAGACGCAGAGACAATGGTTACAAATGAAGATGATTTACTTGTAATTCTTTAA

SEQ ID NO: 1494 - protein, 501 aa, Streptococcus agalactiae
MLKVIGILLPMLGIASSSSQTVAFINFFGDAAYYFMPIMIAYSAASRFKVTPVLAATVGGILLHPAFVTMVAEGKPLSLFGAPVTLASYGSSVIPILIMVFLMQYIERWINKIVPSVMKSFLQPTLIILISGFLALVVVGPLGVIIGKGLSSAMLSIYHVAPWLALSILGAIMPLVVMTGMHWAFAPIFLAASVATPDVLILPAMLASNLAQGAASLAVAVKAKQKQTRQVAFAAGLSALLAGITEPALYGVTLKFKKPLYAAMISGGLVGAYIGLVNIASYTFVVPSIIGLPQYINPQGGNNFSNAVIAAIATIILTFIITWFLGIDEGENEKSSINAQEHTHIRSGLSKKETLYSPMVGNVLPLSKVPDETFSSKLLGEGLAITPSVGEVYAPFDGEIISLFPTKHAIALKDDKGVEVLIHIGIDTVELNGEGFEQLVKVGDFVKRGQLLLRMDIDFISSKGYSLISPVVVTNSIDQLEIIVKDAETMVTNEDDLLVIL

SEQ ID NO: 1495 - protein, 1428 aa, Streptococcus agalactiae
ATGACGGTTTTTCCTAAACATTTTCTATGGGGAGGTGCAGTTGCTGCCAATCAGGTAGAGGGTGCATTTAGAACAGATGGCAAAGGTTTATCTGTACAAGATGTACTTCCAAATGGTGGTTTAGGCGATTTCACCGCCAAACCTACTCCAGACAATTTGAAGCTAGAAGCAATTGATTTTTATCATAACTATAAAAATGATATAAAACTGTTTGCAGAGATGGGCTTTAAAGTTTTTAGAACCTCTATTGCCTGGTCTCGAATTTTTCCAAATGGTGATGATAGTGCTCCAAACGAAGCTGGCTTACAATTTTATGATAATTTATTTGATGAGTTGCTTAAATATAATATCGAGCCCTTGGTTACCTTATCTCATTATGAAACACCGCTTCATCTTGCAAAAACTTATAATGGTTGGGCTGATAGACGTTTGATAGCATTTTTTGAGAAATTTGCTCAAACAGTCATGGAGCGTTATAAAGATAAGGTGAAATATTGGTTGACTTTTAATGAAGTGAATTCTATTTTACATATGCCTTTCACCAGTGGTGCTATTATGACCGACAAATCACAACTAAGTCCTCAGGAGCTTTATCAAGCTATTCATCATGAATTAGTAGCATCGGCTAGAGTGACAAAATTAGGGCGTTCTATCAATCCTAATTTTAAAATTGGCTGTATGATTCTGGCTATGCCAGCTTATCCTATGACATCTGATCCAAGAGATGTCCTGGCTGCAAGACAATTTGAACAACATAATCTGCTATTTTCAGATATACATGTCAGAGGTAAATATCCCACTTATATTCAGTCCTATTTCAAAAATAATGGTATTAAAATTAAATTTGAAGAAGGAGATGAGGAAGTATTGGCACAAAATACAGTAGATTTTCTATCGTTTAGTTACTATATGAGCGTGACACAAGCTTATGACTTTGAAAATTATCAAAGTGGTCAGGGAAATATCCTTGGAGGCCTAACTAATCCTCATTTAACAACTTCAGAATGGGGATGGCAAATCGATCCCATCGGGCTACGCCTAGTCTTAAATCAGTATTATGAACGTTATCAGATTCCGTTGTTTATTGTAGAAAATGGATTGGGAGCAAAAGATCAATTGATAGAAACACTAGACGGTGATTATACTGTCGAAGATGATTATCGTATTGATTATATGAATCAACATTTAGTTCAAGTTGCTAAAGCTATTGAAGATGGTGTTGAAATAATGGGATATACATCTTGGGGGTGTATTGATTGTGTATCCATGTCTACAGCTCAACTAAGTAAACGTTATGGTCTAATATATGTTGATCGAAATGATGATGGAACAGGGAGTCTACAACGTTACAAGAAGAAGTCATTTGGTTGGTACCAAAAAGTGATTAAGACAAATGGCCAATCATTGTTTGAACATCATAACAGATAA

SEQ ID NO: 1496 - protein, 475 aa, Streptococcus agalactiae
MTVFPKHFLWGGAVAANQVEGAFRTDGKGLSVQDVLPNGGLGDFTAKPTPDNLKLEAIDFYHNYKNDIKLFAEMGFKVFRTSIAWSRIFPNGDDSAPNEAGLQFYDNLFDELLKYNIEPLVTLSHYETPLHLAKTYNGWADRRLIAFFEKFAQTVMERYKDKVKYWLTFNEVNSILHMPFTSGAIMTDKSQLSPQELYQAIHHELVASARVTKLGRSINPNFKIGCMILAMPAYPMTSDPRDVLAARQFEQHNLLFSDIHVRGKYPTYIQSYFKNNGIKIKFEEGDEEVLAQNTVDFLSFSYYMSVTQAYDFENYQSGQGNILGGLTNPHLTTSEWGWQIDPIGLRLVLNQYYERYQIPLFIVENGLGAKDQLIETLDGDYTVEDDYRIDYMNQHLVQVAKAIEDGVEIMGYTSWGCIDCVSMSTAQLSKRYGLIYVDRNDDGTGSLQRYKKKSFGWYQKVIKTNGQSLFEHHNR

SEQ ID NO: 1497 - protein, 1095 aa, Streptococcus agalactiae
ATGAAATTAAGAAAACAACTCGCACAACAAATCGTTACCTCTATCAAAGATGTTTGTCAACAAGATATTAATTTTATTAATACCAAAGGAATCATTTTCGCTAGTACCAATCCAAAACGTGTTGGAGAATTCCATGAAATTGGTTTAAAAGTAGCACAGACAGGACAAATGATTGAAGTAACAGATCAAGAATCTTATTTTGGGACACAAGCAGGGATCAATATTCCTTTCTATTATAATTGTGAATTATTAGCTACTATTGGGATTAGTGGAAACCCCAACCAAGTAGGAAAATATGCTTTACTTGCTCAAAAAATGACTCGACTCATCTTAAAAGAGCATGAATTAGATTATCTGGATTTCGGGCGAAAAAACGAAGCTTCTATTGTCTTACATCATCTTGTTGAAGGCAGAGAGTTAGACTACTATTACCTCAATCAATTTTTAAACCAATACCACCTATCAGAAAAAACTGACTATCGTCTACTCACTTTTGAAATCAATAGTCAAAAACAAAAATTACTCTTAAGTCAATCTGAAATGTCACTCTTGAACTTTTTTGATAAACTTGACACTGCTATTTATACCTTTAATTATCCCAATCAATACTGGCTTTTACTTTCTGACCATATGTTTGACTATTATTATCCAAATATCCTATCAAAGTTTGAATGCGAAAAGGGCCTCTATAAAGTTGGTATCGGACAAAAATCATCTTTATCACTTTTAAAAAGATCATATGAAACGTCTATCTTAGCCCTGAAAGCTTTAAAAGGTCAACAAAAGGTCAACCTCGTCGACGACCTTGATCTTGAACTGTTATTAACAAGTATTGATTCTAATATTAAACAATATGTGCTAAATAAAGCGCTTGTAAACTTATCTGAAAATGATAAGATCTTGCTTAACTCATATTTTAAGCATAATCTATCATTAAAAGAATGTAGTCAGGAACTTTTTATCCATAAAAATACTGTTCAATATAGGTTAAATAAGATTTATGAATCAACGCAACTCAATCCAAGAAACTTTAAGGATGCAACTTTATTGTATCTAGCACTTAAATCAGAAGATATTAACCTTCATAAATTATAA

SEQ ID NO: 1498 - protein, 364 aa, Streptococcus agalactiae
MKLRKQLAQQIVTSIKDVCQQDINFINTKGIIFASTNPKRVGEFHEIGLKVAQTGQMIEVTDQESYFGTQAGINIPFYYNCELLATIGISGNPNQVGKYALLAQKMTRLILKEHELDYLDFGRKNEASIVLHHLVEGRELDYYYLNQFLNQYHLSEKTDYRLLTFEINSQKQKLLLSQSEMSLLNFFDKLDTAIYTFNYPNQYWLLLSDHMFDYYYPNILSKFECEKGLYKVGIGQKSSLSLLKRSYETSILALKALKGQQKVNLVDDLDLELLLTSIDSNIKQYVLNKALVNLSENDKILLNSYFKHNLSLKECSQELFIHKNTVQYRLNKIYESTQLNPRNFKDATLLYLALKSEDINLHKL

SEQ ID NO: 1499 - protein, 1143 aa, Streptococcus agalactiae
ATGAAGGTAGTAGTAGCTATTGATTCTTTGAAAGGGAGTCTTTCTTCTTTAGAAGCTGGCAATGCTATAAAGGAGTCAATTAATGAAGTAATCTCAGGGGCGGATGTGGAAGTACATCCATTAGCAGACGGGGGAGAAGGAACTGTTGAAGCTTTGACGCTAGGTATGGGGGGTACGATCGAAACAATCCCTGTTAAGGGGCCTCTTGGAGAAAAAGTACATGCGAGTTATGGTATTATTCCACAGCGTCAGTTAGCTATTATTGAAATGGCTGCAGCTGCTGGTATTACCCTAATTGCTACTGAAGAGAGAAATCCTCTCCACACAACCACTTATGGAGTTGGAGAAATGATAAAGGATGCTATAAGTAAAGGCTGTAGGCACTTTATTATTGGTATTGGAGGTAGTGCTACTAATGATGGTGGGGCAGGTATGCTACAAGCTTTGGGATATGCATTATTAGATAAAGATAATCAAGAAATCAGTTTGGGAGCACAAGGATTGGCAGATTTAAAATCTATCTCTACTGATAAGGTTATTGAGGAATTAAAAGAATGTGATTTTAAAATTGCATGTGATGTAACAAATCCTTTATGTGGTGCTCAAGGTTGTAGTTCGATTTTTGGACCGCAAAAAGGTGCTGATGAAGATATGATTACAAAAATGGATACTTGGTTAAGTAATTATGCTACCTTAGCTACTTCAGTTAGTGAAAAAGCAGATGCAACTATTGAAGGAACAGGTGCAGCGGGTGGGCTTGGATTTGCCTTTTTAGCCTTTACAAATGCTACCTTAGAACCTGGTATTGATATTATTCTATCAGAAATTAATATAGAAAAAGCGATTTCTGAAGCTGATTTAGTAGTTACTGGTGAAGGTCGTTTGGATGGGCAAACGGTGATGGGAAAAGCTCCAATTGGCGTAGCAAAATTAGCTAAAAAATATGGTAAGAAAGTAGTGGCATTTTCTGGATCTGTCACCGAAGATGCTATACTTTGTAATCAACATGGTATTGATGCTTTTTTTCCAATCGTACGACGCCTTATCAGCTTAGATGAGGCTATGTCTAAAGAGGTAGCTTATAAAAATATGAAAGAAACTGCTACTCAAGTCTTTAGATTAATCAATTTGTATAATCATTAA

SEQ ID NO: 1500 - protein, 380 aa, Streptococcus agalactiae
MKVVVAIDSLKGSLSSLEAGNAIKESINEVISGADVEVHPLADGGEGTVEALTLGMGGTIETIPVKGPLGEKVHASYGIIPQRQLAIIEMAAAAGITLIATEERNPLHTTTYGVGEMIKDAISKGCRHFIIGIGGSATNDGGAGMLQALGYALLDKDNQEISLGAQGLADLKSISTDKVIEELKECDFKIACDVTNPLCGAQGCSSIFGPQKGADEDMITKMDTWLSNYATLATSVSEKADATIEGTGAAGGLGFAFLAFTNATLEPGIDIILSEINIEKAISEADLVVTGEGRLDGQTVMGKAPIGVAKLAKKYGKKVVAFSGSVTEDAILCNQHGIDAFFPIVRRLISLDEAMSKEVAYKNMKETATQVFRLINLYNH

SEQ ID NO: 1501 - protein, 1257 aa, Streptococcus agalactiae
ATGGAAGCTACATTTACAACAACAGGGGCTTTAATAGGATTAGCGCTTGCTATTTTACTGATTATCAAAAAAGTTCATCCTGCCTATAGTCTCATTCTTGGAGCATTAGTTGGTGGTTTGATTGGTGGCGGTGATTTAGTTACAATTGTCAATACAATGGTATTAGGTGCGCAAGGGATGATGTCATCCATATTACGCATTTTAACATCAGGGATTTTAGCGGGTGCTTTAATTAAAACCGGATCAGCTGAAAAAATTGCAGAAAGTATCATTAAAAAATTAGGACAACAGCGAGCCATCACAGCTTTAGCCATCGCAACAATGATTATTTGTGCAGTAGGTGTCTTTATTGATATTGCAGTTATTACAGTTGCTCCGATTGCATTAGCAATAGGTAAAAAAGCTAATCTTTCTAAATCTAGCATACTGTTAGCAATGATTGGTGGTGGTAAGGCTGGGAATATTATCTCACCCAATCCTAATACAATTGCTGCTTCAGAAGCATTTAAGGTTGATTTAACAAGCTTAATGGTACAAAATATTATTCCTGCAATTGCAGCTTTAGTAGTTACGATTATATTAGCAAAGATTGTTTCCAAGAAAAATAACGATATTTCTTATGATAGTGAGGAGCAAGTGGGCTCTGATCTGCCAGCATTCTTACCGGCTATTTCTGGTCCACTTGTGGTTATCTGCTTATTAGCTCTTCGTCCTTTATTTGGAATCACTATTGATCCCTTGATTGCACTGCCGTTGGGTGGTCTAATTAGTATTTTAGCAACAGGTTACCTAAAAGAAACGGTACCGTTTGTTGAATACGGTTTATCAAAAGTTGTTGGCGTTTCAATTCTTTTGATTGGAACAGGTACGCTCTCAGGTATTATTAAAGCATCTAATCTACAATTTGATATGATTCATCTCCTTGAATTTTTAAATATGCCGACCTTTATCCTTGCCCCACTCTCAGGTATTTTTATGGGAGCAGCAACAGCATCAACGACTTCTGGAACAACTATTGCTTCACAAACGTTTGCTGAAACCTTGATTAAATCAGGGGTACCGGCGGTTTCGGGTGCAGCTATGATTCACGCAGGTGCGACTGTTTTGGATTCGCTACCTCATGGATCCTTCTTCCATGCGACAGGCGGAGCTGTCAATATGGCTATAAAAGATCGTATGAAACTAATTAGCTATGAAGCTTTGATTGGATTAACTAGCACAATAGTTGCTGTCGTTTACTATTGTTTCTTTGGGTAA

SEQ ID NO: 1502 - protein, 418 aa, Streptococcus agalactiae
MEATFTTTGALIGLALAILLIIKKVHPAYSLILGALVGGLIGGGDLVTIVNTMVLGAQGMMSSILRILTSGILAGALIKTGSAEKIAESIIKKLGQQRAITALAIATMIICAVGVFIDIAVITVAPIALAIGKKANLSKSSILLAMIGGGKAGNIISPNPNTIAASEAFKVDLTSLMVQNIIPAIAALVVTIILAKIVSKKNNDISYDSEEQVGSDLPAFLPAISGPLVVICLLALRPLFGITIDPLIALPLGGLISILATGYLKETVPFVEYGLSKVVGVSILLIGTGTLSGIIKASNLQFDMIHLLEFLNMPTFILAPLSGIFMGAATASTTSGTTIASQTFAETLIKSGVPAVSGAAMIHAGATVLDSLPHGSFFHATGGAVNMAIKDRMKLISYEALIGLTSTIVAVVYYCFFG

SEQ ID NO: 1503 - protein, 1065 aa, Streptococcus agalactiae
GTGAAACAAACAAAGAAAGAATTTATTTTAGGATTAACCATTATTATTACCCTTACTTTATTAATCATGCTGATTTTTTTAGTAATGTTTAATAAGTCCAGTAACTCTAAGTTGAAGCAGACAAAAGATAGAAGAATATCATCTACTTCAACCACAAGGACATCCAGTAGCTCACATGATCAAAAAATTGTAGAAAAGTCTCTTGAAAAAAAGAAAATGGTCATGGAACAAGATATGGAATTGATGAATGCCTATAGGCTCTATTATGATTATGCCCATTTGTCCTTGAAAGAGGTTGTTCTGGCCTATATGTCTGAATATGGCATTGAAAAAAATAGTGTTGCTTTTTCTTATAAAAATTTAAAAACAGGACAAAGGGACGCTATGAATGATACTCAGGCTATGACAGCAGGGAGCACCTATAAGTTACCTCTTAACATGTTGGTAGTAGATGCAGTGGTCAAGGGCAAGTTGTCCATGGAAGAACGCTTTGATATTACCGAGACTGACTATGAATATATTGGTGAACATAATAATTATGTTGCTGCTTTCTCGGGGGCAATGTCTATTGATGATATGCAAAAATACTCTTTAGTTTATTCAGAAAATACACCCGCCTATGCTTTAGCTGAGCGTATTGGTGGCATGGATAGTGCTTATTCAAAGTTTGGTCGTTATGGCCAATCTAAAGGAGACATCAAAAATATACAAAAAAACGGTAATAAAGTGACAACAGATTACTATATTCAAGTGCTAGACTATCTCTGGAAACATCGTAAAAAGTATGATAGTTTAATTACTTATTTAGAAGAAGCTTTTCCAACAGATTATTATCGTGCTTTGATACCATCTGATGTTGTTGTTGCTCAAAAGCCAGGGTATGTCCGTGAGGCGTTGAATGTTGGAGCAATTGTCAAAGAAGAAGTGCCTTATATTGTTGCTATTTATACTGCAGGTTTAGGTGGCTCTACTCAGGAAGATTCAGAAATTAATGGAGTGGGACTATATCAGCTAGAACAATTATGTTTTGTTATTAATCAATGGCATCGTGTTAATATGAATTAG

SEQ ID NO: 1504 - protein, 354 aa, Streptococcus agalactiae
MKQTKKEFILGLTIIITLTLLIMLIFLVMFNKSSNSKLKQTKDRRISSTSTTRTSSSSHDQKIVEKSLEKKKMVMEQDMELMNAYRLYYDYAHLSLKEVVLAYMSEYGIEKNSVAFSYKNLKTGQRDAMNDTQAMTAGSTYKLPLNMLVVDAVVKGKLSMEERFDITETDYEYIGEHNNYVAAFSGAMSIDDMQKYSLVYSENTPAYALAERIGGMDSAYSKFGRYGQSKGDIKNIQKNGNKVTTDYYIQVLDYLWKHRKKYDSLITYLEEAFPTDYYRALIPSDVVVAQKPGYVREALNVGAIVKEEVPYIVAIYTAGLGGSTQEDSEINGVGLYQLEQLCFVINQWHRVNMN

SEQ ID NO: 1505 - protein, 444 aa, Streptococcus agalactiae
ATGATAATGAGTAATCGAAGTATTTTAGACGAGCGATTATGTTTTACGGTTAGTGAAACACATCGACTTTTCAATAAATTTTACCAAAAAGCTTTGGATGAATTTCAATTGACTTATCTCCAATACGTTATCTTGTTAGTCCTTTGGGAAGAGGATCATCGGCATATGAAGGAACTTAGTTATGCACTATCTCTTAATTCGAATACCCTAACTCCAGTTTTAAAGCGTATGGAAAATCGTGGGTGGATTGTACGAGAAAAACCAAGAGATGATAAAAGGCAACTCATTATTCATCTAAGTAACAAAGGTATTGAGTCACAAGATGCCGTTGTCAATGCGGTGCAATCGTGCGGGTATTTTTTCTCAGAAATTAGTCCTGAATCTTATCAAAAAACTGTTTCTGCCCTTTCTTCACTTAACCAAGTTATAAAATCACATTTATAA

SEQ ID NO: 1506 - protein, 147 aa, Streptococcus agalactiae
MIMSNRSILDERLCFTVSETHRLFNKFYQKALDEFQLTYLQYVILLVLWEEDHRHMKELSYALSLNSNTLTPVLKRMENRGWIVREKPRDDKRQLIIHLSNKGIESQDAVVNAVQSCGYFFSEISPESYQKTVSALSSLNQVIKSHL

SEQ ID NO: 1507 - protein, 1029 aa, Streptococcus agalactiae
ATGAATACAAACGATTTTGATTTTTATTTACCAGAAGAACTCATTGCCCAAACACCACTTGAAAAAAGAGACGCTTCTAAATTATTAGTCATTGATCATAAGAATAAGACGATGACAGATAGCCATTTCGATCATATCTTAGATGAACTCAAGCCTGGTGATGCTTTAGTAATGAATAACACACGTGTTCTGCCCGCTCGCCTTTATGGTGAAAAGCAAGATACACACGGCCATGTAGAGTTATTACTTCTCAAAAATACAGAAGGCGATCAATGGGAAGTGCTTGCTAAACCCGCTAAACGCTTACGAGTAGGGACCAAAGTTTCATTTGGTGATGGTCGGTTAATAGCAACAGTCACAAAGGAATTAGAACATGGTGGGCGTATTGTAGAATTCTCATATGATGGTATTTTTCTAGAAGTCCTTGAAAGTTTGGGCGAAATGCCACTTCCGCCATATATTCATGAAAAACTAGAAGATCGTGACCGCTATCAGACTGTGTATGCAAAAGAAAATGGTTCTGCTGCTGCACCAACAGCCGGTCTCCATTTTACAAAAGAACTATTGGAAAAAATTGAAACAAAAGGTGTGAAGCTTGTCTATTTGACGCTTCACGTTGGACTTGGAACTTTCCGTCCTGTTTCAGTTGATAATCTTGATGAACACGAAATGCATTCTGAGTTTTACCAATTATCTAAAGAAGCTGCTGATACTCTCAATGCAGTTAAAGAATCTGGTGGACGTATTGTAGCTGTTGGTACAACTTCTATTCGCACATTAGAGACAATCGGTTCTAAATTCAATGGTGAATTAAAAGCCGACTCAGGGTGGACAAATATTTTTATCAAGCCTGGTTATCAGTTCAAGGTTGTAGACGCTTTTTCAACCAACTTTCACTTACCAAAGTCTACTCTTGTCATGTTAGTATCAGCATTTGCTGGACGTGATTTTGTACTAGAAGCTTACAACCATGCAGTTGAAGAACGATATCGTTTCTTCAGCTTTGGTGATGCTATGTTTGTTAAGTAA

SEQ ID NO: 1508 - protein, 342 aa, Streptococcus agalactiae
MNTNDFDFYLPEELIAQTPLEKRDASKLLVIDHKNKTMTDSHFDHILDELKPGDALVMNNTRVLPARLYGEKQDTHGHVELLLLKNTEGDQWEVLAKPAKRLRVGTKVSFGDGRLIATVTKELEHGGRIVEFSYDGIFLEVLESLGEMPLPPYIHEKLEDRDRYQTVYAKENGSAAAPTAGLHFTKELLEKIETKGVKLVYLTLHVGLGTFRPVSVDNLDEHEMHSEFYQLSKEAADTLNAVKESGGRIVAVGTTSIRTLETIGSKFNGELKADSGWTNIFIKPGYQFKVVDAFSTNFHLPKSTLVMLVSAFAGRDFVLEAYNHAVEERYRFFSFGDAMFVK

SEQ ID NO: 1509 - protein, 243 aa, Streptococcus agalactiae
ATGAAAGAAGCAAAAAATTTTTCCCAACAATTGAATATTTTAAGAGCTGGTGTTCTTGGTGCTAATGATGGTATCATCTCTGTAGCTGGTGTTGTTATTGGTGTTGCGAGTGCAACTCATAACCTTTGGATTATTTTTTTATCAGCAGCTTCCGCGATTTTAGCTGGTGCATTTTCTATGGCTGGCGGGGAGTATGTTAGTGTTTCTACTCAAAAAGATNNNNNCATTCCATTCATTAATTAA

SEQ ID NO: 1510 - protein, 80 aa, Streptococcus agalactiae
  VARIANT 74, 75: Xaa = Any Amino Acid
MKEAKNFSQQLNILRAGVLGANDGIISVAGVVIGVASATHNLWIIFLSAASAILAGAFSMAGGEYVSVSTQKDXXIPFIN

SEQ ID NO: 1511 - DNA, 351 bp, Streptococcus agalactiae
atggattttcaaatccttggaattggtcgtaacggtcatattggttttaatgaaccaggtacaccttttgatattacaacacatgtggttgatttagctccaagtacaattgaagctaatagtcgtttctttaatagtattgatgatgtaccaaagcaagccttatcaatgggtataggctctattatgaaatcaaaaacaatcgtattagtggcgtatggtattgaaaaagcagaagcgattgcaagtatgattaaaggacctatcacagaagatatgccagcaagtatcctccaaaaacatgatgatgttgtgattattgtggatgaagcagcggcatcaaagttgtaa

SEQ ID NO: 1512 - protein, 116 aa, Streptococcus agalactiae
MDFQILGIGRNGHIGFNEPGTPFDITTHVVDLAPSTIEANSRFFNSIDDVPKQALSMGIGSIMKSKTIVLVAYGIEKAEAIASMIKGPITEDMPASILQKHDDVVIIVDEAAASKL

SEQ ID NO: 1513 - DNA, 957 bp, Streptococcus agalactiae
atgggacttttagtagatggcaaatgggttgatcaatggtatgatactgcatcaactggtggtaaattcgtccgaaccgttacacaattccgtcattgggttactaaagatggttcagcagggcctagtggggatgcaggttttaaagcagaatctggacgatatcatctctacgtttcactagcttgcccttgggcatcacgtgtattaatcatgagaaagcttaaaaatctagaatctcatatctctatctccattgttaaccctttaatgttggagaatggttggacttttcaagaatataaaggcgttattcctgatatgattaaccaaagccaatacctttaccaaatctatcaagcaagtcaaagtgattatacaggacgcgtgacagtccctgttctttgggataaaaaattccatacaatcgttaacaatgaatcatctgaaattatgcgtatgttaaatactgcatttaatcatattactggaaatactgacgattactatcccgattccttacaaggacaaattgacgaaatgaataattttatttatccaaaaataaataatggtgtctataaagctggttttgccacttctcagaacgtttatcaaaaggaagttgaaaccttattcacagctttagatcagttagaaaaacacttatctgataaccattatcttgttggagaacaatttaccgaagctgatattcgccttttcacaactttagttcgctttgacaccgtttattatggtcattttaaatgtaatttaaaagcgctacatgattacccacatttatggcattatacaaaacgtatttacaacctacctggaattgctgagacagttaattttgatcatatcaaaaaacactattacggtagccataaaaccattaaccctactggtattattccagctggacctaacttagactggacaatttaa

SEQ ID NO: 1514 - protein, 318 aa, Streptococcus agalactiae
MGLLVDGKWVDQWYDTASTGGKFVRTVTQFRHWVTKDGSAGPSGDAGFKAESGRYHLYVSLACPWASRVLIMRKLKNLESHISISIVNPLMLENGWTFQEYKGVIPDMINQSQYLYQIYQASQSDYTGRVTVPVLWDKKFHTIVNNESSEIMRMLNTAFNHITGNTDDYYPDSLQGQIDEMNNFIYPKINNGVYKAGFATSQNVYQKEVETLFTALDQLEKHLSDNHYLVGEQFTEADIRLFTTLVRFDTVYYGHFKCNLKALHDYPHLWHYTKRIYNLPGIAETVNFDHIKKHYYGSHKTINPTGIIPAGPNLDWTI

SEQ ID NO: 1515 - DNA, 96 bp, Streptococcus agalactiae
  misc_feature 69, 70, 71, 72, 73: n = A,T,C or G
atgcgtttagataaattattaggtcaggcaggatttgggtctagaaatcaggttaagaaattaatttgnnnnncattccattcattaattaattaa

SEQ ID NO: 1516 - protein, 31 aa, Streptococcus agalactiae
  VARIANT 23, 24, 25: Xaa = Any Amino Acid
MRLDKLLGQAGFGSRNQVKKLIXXXFHSLIN

SEQ ID NO: 1517 - DNA, 792 bp, Streptococcus agalactiae
  misc_feature 773, 774, 775, 776, 777: n = A,T,C or G
atgaaaacaagatcaaaacttgcagcaggctttttgacacttatgtcagttgccacattagctgcctgctcaggtaaaacatcaaatggaacaaatgttgttacaatgaagggcgacactattacagtctctgatttttatgatcaagtaaaaacatcaaaagctgcacaacaatcaatgcttacattgatcctctcacgtgtttttgatacacagtatggtgataaagtttcagataaaaaagtatcagaagcttataataagacagctaaaggctatggtaattcattttcaagcgcactttcacaagcaggtttgactccggaaggttacaaacaacaaattcgcacaactatgcttgtggaatatgctgtaaaagaagcagctaagaaagaattaacagaagcaaactataaagaagcatataaaaactatactcctgaaacttctgtacaagtaatcaaattggatgcagaagataaagctaaatctgtccttaaagatgtaaaggctgatggagctgattttgcaaagattgcaaaagaaaaaacaacagctactgataagaaagttgagtataaatttgattctgcagggacaaccctccctaaagaagttatgtcagcagcctttaagctagataaaaatggtgtttcagatgtggtttcaacggttgattcaacaacttataaaacaagttactacatcattaaagtaactgataagacagagaaaaaatctgattggaaaatctacaaaaatcgccttaaaannnnncattccattcattaa

SEQ ID NO: 1518 - protein, 263 aa, Streptococcus agalactiae
  VARIANT 258, 259: Xaa = Any Amino Acid
MKTRSKLAAGFLTLMSVATLAACSGKTSNGTNVVTMKGDTITVSDFYDQVKTSKAAQQSMLTLILSRVFDTQYGDKVSDKKVSEAYNKTAKGYGNSFSSALSQAGLTPEGYKQQIRTTMLVEYAVKEAAKKELTEANYKEAYKNYTPETSVQVIKLDAEDKAKSVLKDVKADGADFAKIAKEKTTATDKKVEYKFDSAGTTLPKEVMSAAFKLDKNGVSDVVSTVDSTTYKTSYYIIKVTDKTEKKSDWKIYKNRLKXXHSIH

SEQ ID NO: 1519 - DNA, 486 bp, Streptococcus agalactiae
atggctacttttcaaattaaagaaaaaatgttttctctaggcggtaaatttactattacagacctgactgggcttccctgttatcacgttgaaggaagtttgttccctctacctaagacttttaaagtctttgacgaagaggaacatctcattagtcagattgagaagaaggttttaagttttttaccaaagtttaatgtgacattagccaatgggaatcatttcacgattaagaaagatttctcatttttgaaacctcattacaccattgaagaccttgatatggaagttaagggaaatttttgggatatggatttccaactcttaaaagacaatcaagttatagcaaacatatctcaacagtggtttcgtatgacttcaacttatcaggtagaagtttacagtgaaacttacaacgatttgacaatttcgcttgtcatagcgatcgactatgtcaaagagttagaaaaaaatgcatcaaactaa

SEQ ID NO: 1520 - protein, 161 aa, Streptococcus agalactiae
MATFQIKEKMFSLGGKFTITDLTGLPCYHVEGSLFPLPKTFKVFDEEEHLISQIEKKVLSFLPKFNVTLANGNHFTIKKDFSFLKPHYTIEDLDMEVKGNFWDMDFQLLKDNQVIANISQQWFRMTSTYQVEVYSETYNDLTISLVIAIDYVKELEKNASN

SEQ ID NO: 1521 - protein, 2619 aa, Streptococcus agalactiae
ATGAAAGAATTATCGTCTGCACAAATCCGCCAAATGTGGTTGGATTTCTGGAAATCCAAAGGACATTCCGTTGAGCCTTCAGCTAACTTGGTTCCTGTTAATGACCCAACGCTTCTTTGGATCAACTCAGGTGTTGCAACCTTGAAAAAATATTTTGATGGTTCAGTGATTCCAGAAAATCCACGTATTACCAATGCACAAAAATCAATTCGTACTAATGATATTGAAAATGTTGGTAAAACAGCACGTCACCATACTATGTTTGAAATGCTTGGTAACTTCTCAATTGGAGACTATTTCCGTGATGAAGCTATTGAGTGGGGATTTGAACTCTTGACAAGTCCTGAATGGTTTGACTTCCCTAAAGACAAGCTCTACATGACTTATTACCCAGATGACAAGGATTCATATAACCGTTGGATTGCTTGTGGCGTTGAACCAAGTCACTTGGTGCCAATCGAGGATAACTTCTGGGAAATCGGTGCTGGTCCTTCAGGTCCAGATACTGAGATTTTCTTCGACCGTGGTGAAGATTTTGATCCAGAAAATATTGGACTTCGTCTTTTGGCTGAAGATATCGAAAACGATCGTTACATCGAAATCTGGAACATTGTTCTCTCACAATTCAATGCTGACCCAGCCGTACCACGTTCAGAATACAAAGAATTGCCAAACAAAAACATTGATACGGGTGCGGGTCTTGAACGTCTTGCAGCTGTTATGCAAGGGGCAAAAACAAACTTTGAAACTGACCTTTTCATGCCTATCATCCGTGAAGTAGAGAAATTGTCAGGTAAAACTTACGATCCAGATGGCGACAACATGAGCTTCAAGGTTATCGCTGATCACATCCGTGCGCTTTCATTTGCCATCGGTGATGGTGCGCTTCCTGGAAATGAAGGTCGTGGTTATGTTCTTCGTCGTCTTCTCCGTCGTGCGGTTATGCACGGTCGCCGTCTTGGCATCAACGAAACTTTCCTTTACAAATTGGTTCCGACTGTTGGACAAATCATGGAAAGCTACTATCCAGAAGTGCTTGAAAAACGTGATTTTATTGAGAAAATCGTTAAACGTGAGGAAGAAACATTTGCTCGTACTATCGATGCTGGTAGCGGTCACTTAGATTCATTGCTTGCGCAGCTTAAGGCTGAAGGTAAAGACACACTTGAAGGTAAAGATATCTTCAAACTTTATGATACTTATGGATTCCCAGTTGAATTGACAGAGGAATTGGCAGAAGATGCAGGCTATAAGATTGACCACGAAGGCTTTAAGTCAGCCATGAAAGAACAACAAGACCGTGCGCGTGCAGCTGTTGTTAAGGGTGGTTCGATGGGGATGCAAAATGAAACCCTAGCTGGTATTGTTGAAGAATCACGATTCGAATACGACACATATAGTCTTGAATCAAGTCTTTCAGTCATCATCGCTGACAATGAACGTACTGAAGCAGTTTCAGAAGGTCAAGCTCTTCTTGTCTTTGCTCAAACACCATTCTATGCTGAAATGGGTGGACAGGTTGCTGACCACGGTGTCATCAAAAATGATAAGGGTGACACAGTTGCTGAGGTTGTTGATGTTCAAAAAGCACCAAATGGTCAACCTCTACACACTGTAAACGTTTTGGCATCACTTTCAGTTGGAACAAACTACACACTTGAAATCAACAAAGAGCGTCGTTTGGCTGTTGAGAAAAACCACACAGCAACTCACTTGCTCCATGCAGCTCTTCACAATGTTATCGGTGAACACGCAACTCAGGCTGGTTCATTGAACGAAGAAGAATTCTTGCGCTTTGATTTTACTCACTTTGAAGCAGTAAGCAATGAGGAACTTCGTCACATTGAACAAGAAGTTAATGAGCAAATTTGGAACGATCTTACGATCACAACGACTGAAACTGACGTTGAAACCGCAAAAGAGATGGGAGCAATGGCACTTTTTGGTGAGAAATATGGTAAAGTGGTTCGTGTGGTTCAAATTGGTAATTATTCTGTTGAACTTTGCGGTGGAACTCACTTAAATAATTCTTCAGAAATCGGTCTCTTCAAGATTGTCAAAGAAGAAGGTATTGGTTCAGGTACTCGTCGTATTATTGCAGTTACTGGTAGACAAGCTTTTGAAGCTTATCGTAACCAAGAGGATGCACTAAAAGAGATCGCTGCTACTGTAAAAGCTCCGCAATTGAAAGATGCAGCAGCTAAAGTACAAGCTCTTAGCGACTCACTTCGTGATCTTCAAAAAGAAAATGTAGAGCTTAAAGAAAAAGCAGCAGCTGCAGCAGCTGGTGATGTCTTTAAAGATATTCAAGAAGCTAAGGGCGTGCGCTTCATTGCTAGTCAAGTTGATGTTGCAGACGCAGGTGCACTTCGTACATTTGCTGATAACTGGAAACAAAAAGACTACTCTGATGTGCTTGTTCTCGTAGCAGCTATTGGTGAGAAGGTTAATGTCCTTGTTGCAAGCAAAACTAAAGATGTCCACGCTGGTAACATGATCAAAGGATTGGCACCAATTGTAGCAGGTCGTGGTGGTGGTAAACCAGACATGGCTATGGCAGGTGGTAGCGATGCAAGTAAAATTGCAGAGTTGCTAGCAGCAGTTGCAGAAAATTTATAA

SEQ ID NO: 1522 - protein, 872 aa, Streptococcus agalactiae
MKELSSAQIRQMWLDFWKSKGHSVEPSANLVPVNDPTLLWINSGVATLKKYFDGSVIPENPRITNAQKSIRTNDIENVGKTARHHTMFEMLGNFSIGDYFRDEAIEWGFELLTSPEWFDFPKDKLYMTYYPDDKDSYNRWIACGVEPSHLVPIEDNFWEIGAGPSGPDTEIFFDRGEDFDPENIGLRLLAEDIENDRYIEIWNIVLSQFNADPAVPRSEYKELPNKNIDTGAGLERLAAVMQGAKTNFETDLFMPIIREVEKLSGKTYDPDGDNMSFKVIADHIRALSFAIGDGALPGNEGRGYVLRRLLRRAVMHGRRLGINETFLYKLVPTVGQIMESYYPEVLEKRDFIEKIVKREEETFARTIDAGSGHLDSLLAQLKAEGKDTLEGKDIFKLYDTYGFPVELTEELAEDAGYKIDHEGFKSAMKEQQDRARAAVVKGGSMGMQNETLAGIVEESRFEYDTYSLESSLSVIIADNERTEAVSEGQALLVFAQTPFYAEMGGQVADHGVIKNDKGDTVAEVVDVQKAPNGQPLHTVNVLASLSVGTNYTLEINKERRLAVEKNHTATHLLHAALHNVIGEHATQAGSLNEEEFLRFDFTHFEAVSNEELRHIEQEVNEQIWNDLTITTTETDVETAKEMGAMALFGEKYGKVVRVVQIGNYSVELCGGTHLNNSSEIGLFKIVKEEGIGSGTRRIIAVTGRQAFEAYRNQEDALKEIAATVKAPQLKDAAAKVQALSDSLRDLQKENVELKEKAAAAAAGDVFKDIQEAKGVRFIASQVDVADAGALRTFADNWKQKDYSDVLVLVAAIGEKVNVLVASKTKDVHAGNMIKGLAPIVAGRGGGKPDMAMAGGSDASKIAELLAAVAENL

SEQ ID NO: 1523 - protein, 717 aa, Streptococcus agalactiae
ATGGTTGGTTTAGGAACAGTTATCAATGTTATTCTTATTATAGTTGGAGGCTTTGTAGGTTTATTTTTGAAAAATTTTTTGAAAGAATCACTTCAAAAGAGCCTTATGCAAGCCATGGGAGTTGCAGTTTTATTTATTTCGATATCAGGTGTTTTGGAGAAAATGATGTTAGTCGAAAAGTCACATCTCATCTCTAATCATACAAATATGATGATTATTACTCTTGCTCTAGGTACGGTACTTGGAGAGTTGCTATCACTAGATTCGTATATTGATAAATTTGGGAACTATCTTAAGCAAAAAACAGGAAGTGGTAACGATATTAAATTTGTGGAGGCATTCGTCACCTCAACTTGTACCGTTTGTATTGGAGCAATGGCCGTTGTTGGTAGCATTCAAGATGGTATAGCAGCAGATCATTCGATTTTATTTGCTAAGGGAATGTTAGACATGATTATTATTGCAATTATGACAGTGTCTTTAGGGAAAGGAGCTCTATTTTCTGCACTTCCTGTCGCTTTACTACAAGGTAGCCTTACGATTGTTGCTTTTTTCATGGGGAGTCTACTTAATCCATCATCTTTAGATTACCTTAACTTAGTAGGAAATATGCTTATATTCTGTGTCGGTGTTAATTTACTCTTTAACCTAAATATTAAAGTTATCAATATGTTGCCAGCAATTATTTTAGCTATATTATGGGGAAGTTTTATATAA

SEQ ID NO: 1524 - protein, 238 aa, Streptococcus agalactiae
MVGLGTVINVILIIVGGFVGLFLKNFLKESLQKSLMQAMGVAVLFISISGVLEKMMLVEKSHLISNHTNMMIITLALGTVLGELLSLDSYIDKFGNYLKQKTGSGNDIKFVEAFVTSTCTVCIGAMAVVGSIQDGIAADHSILFAKGMLDMIIIAIMTVSLGKGALFSALPVALLQGSLTIVAFFMGSLLNPSSLDYLNLVGNMLIFCVGVNLLFNLNIKVINMLPAIILAILWGSFI

SEQ ID NO: 1525 - protein, 819 aa, Streptococcus agalactiae
ATGAATCTATTATTTTCTATTGATGATATGTACGTAGATCATTTTAAAGTGATGCTTTATTCGCTTGTCCGACAAACCAAGAATCGTAAGTTAGAGATATATGTCTTACAAAAAACATTACTCAAACGTCATACAGAACTTATTCAATATACTCAAAATTTAGAAGTTGGCTATCATCCAATAATTGTAGGTACCGAAGTATTTGCTCAGGCACCTACAACTGATCGCTATCCAGATACAATATATTATCGACTTTTGGCTCATAAATTTTTACCTGAGACCTTAGATAGGATACTTTATTTAGATGCAGATATGCTTTGCTTAAATGATTTCTCAAGTTTATATGATATGGAGTTAGGTGATCAACTATATGCAGCGGCAAGTCATAATACTGATGGTAAGTTTCTAGATTATGTCAATAAATTACGGTTAAAAAATGTAGAGCTAGAATCCTCTTATTTCAATACAGGGGTACTCTTGATGAACTTGCCTGCTATACGAAAAGTTGTTCATCAACAAACTATCTTAGATTACATAATGCAAAACCGTGGTCGTCTAATCTTACCAGATCAGGATATCTTAAATGGCTTATACGCTAATTTGGTTAAACCAATACCTGATGAAATTTATAATTATGATGCTAGGTATAGTCTTATTTATCAATTAAAAAGTCGCAATGAATGGGATTTAGAGTGGGTTATTAACCATACTGTTTTTTTACATTTTGCAGGACGAGATAAACCATGGAAAAAAGATTATAGAGGACGTTACTCGGGCCTTTATAAGTTTATGGCTAAAGAGGCTTTAACTAAAAATTGA

SEQ ID NO: 1526 - protein, 272 aa, Streptococcus agalactiae
MNLLFSIDDMYVDHFKVMLYSLVRQTKNRKLEIYVLQKTLLKRHTELIQYTQNLEVGYHPIIVGTEVFAQAPTTDRYPDTIYYRLLAHKFLPETLDRILYLDADMLCLNDFSSLYDMELGDQLYAAASHNTDGKFLDYVNKLRLKNVELESSYFNTGVLLMNLPAIRKVVHQQTILDYIMQNRGRLILPDQDILNGLYANLVKPIPDEIYNYDARYSLIYQLKSRNEWDLEWVINHTVFLHFAGRDKPWKKDYRGRYSGLYKFMAKEALTKN

SEQ ID NO: 1527 - protein, 288 aa, Streptococcus agalactiae
ATGACGTATATTGGTGTACCTAAAGAGCAAAAGGCACTCAGTCGTAGGGGTAAACAATTAGAAAAAATAAATCAGGGAGGAAAAACACTTATGTCACAAATGATTCAAGATTTAGTAGGAAGCACATGTATGATTTATTTAGAGGATGGTTCTCAAACTCATCCTTATGAGATTTTAAAGGTAGATGAGGATTGGGTACAGATTCGTCGCAACTTGAAACGAAGTAAAGAGGAGGTGCGTATTGTCCGTATTCATGATATCAAGGAATTGCGTCCAGTCAATAAATAG

SEQ ID NO: 1528 - protein, 95 aa, Streptococcus agalactiae
MTYIGVPKEQKALSRRGKQLEKINQGGKTLMSQMIQDLVGSTCMIYLEDGSQTHPYEILKVDEDWVQIRRNLKRSKEEVRIVRIHDIKELRPVNK

SEQ ID NO: 1529 - protein, 216 aa, Streptococcus agalactiae
ATGGGATTAATTTTAAAAAATAGACTCAAAGAATTGCGTGCACGAGATGGTATCAATCAAACAGAACTCGCTAAATTAACAGGAGTCTCAAGACAAACAATTAGCCTAATTGAACGCGGAGAATATACGCCATCTGTTATTATTGCTATGAAGATTTCTCAAGTATTTAAAGAATCCCTAGAGAATGTTTTTAGTTTAGTGTCAATGGAGGAATAA

SEQ ID NO: 1530 - protein, 71 aa, Streptococcus agalactiae
MGLILKNRLKELRARDGINQTELAKLTGVSRQTISLIERGEYTPSVIIAMKISQVFKESLENVFSLVSMEE

SEQ ID NO: 1531 - DNA, 423 bp, Streptococcus agalactiae
  misc_feature 396, 397, 398, 399, 400: n = A,T,C or G
atgatgaaaaattttataaaacaaagtgatactacatttgttcgaattatcaaaagtcttttaattggtggttttataggggccatacttggttccgtaggagctctttttatcatatttggtcaagataagtacttatctgaaattaatattgttcaatatttcctatgggttagtcgtattgttgtaattataacagctctctttagtctcatctacctctatcagattcaaaaatatcagaaagtttttttcaatgttgatgaaagtcaatctgaagaaatttatcgccagattaatttaagacattcttatgggatgacttttgtgtcaatttcaatagtactcagtatagttaatactttatttaactataaactaaatatttttgatgannnnncattccattcattaattaattaa

SEQ ID NO: 1532 - protein, 140 aa, Streptococcus agalactiae
  VARIANT 132, 133, 134: Xaa = Any Amino Acid
MMKNFIKQSDTTFVRIIKSLLIGGFIGAILGSVGALFIIFGQDKYLSEINIVQYFLWVSRIVVIITALFSLIYLYQIQKYQKVFFNVDESQSEEIYRQINLRHSYGMTFVSISIVLSIVNTLFNYKLNIFDXXXFHSLIN

SEQ ID NO: 1533 - DNA, 960 bp, Streptococcus agalactiae
atgacaacttactacgaagctataaactggaacgaaattgaagatgttattgataaatcaacttgggaaaaactaaccgaacaattttggctcgatacacgtatccctttatcaaatgacttagacgattggcgcaaactttctgctcaagaaaaagatcttgttggcaaggtttttggaggcttaaccctacttgataccatgcaatcagaaactggtgttgaagctattcgtgccgatgttcgcacgcctcacgaagaagctgtcttaaacaatattcaattcatggaatctgttcacgctaaatcttattcttcaattttctcaactttaaatactaaatcagaaattgaagaaattttcgagtggactaataataatgagttccttcaagaaaaagcacgtattatcaatgacatttatgctaatggaaatgcccttcaaaaaaaggtggcttccacctacctcgaaactttccttttttattctggctttttcacacctctttactatttgggaaataataagttagcaaatgttgctgaaatcattaaattaattattcgtgatgaatctgtacatggtacttatatcggttacaaattccagcttggttttaacgaattaccagaagatgagcaagagaattttcgtgattggatgtatgacctcctttatcagctgtatgaaaacgaagaaaaatacaccaagacactttatgatggcgtaggatggactgaagaagttatgacctttttacgctacaatgctaataaagctcttatgaatttaggacaagatcctttattcccagatacagcaaatgatgtcaacccaattgttatgaatggtatttcaacaggaacatcaaaccatgacttcttctctcaagtaggtaatggttacctacttggtagcgttgaagctatgcatgatgatgactataactatggattataa

SEQ ID NO: 1534 - protein, 319 aa, Streptococcus agalactiae
MTTYYEAINWNEIEDVIDKSTWEKLTEQFWLDTRIPLSNDLDDWRKLSAQEKDLVGKVFGGLTLLDTMQSETGVEAIRADVRTPHEEAVLNNIQFMESVHAKSYSSIFSTLNTKSEIEEIFEWTNNNEFLQEKARIINDIYANGNALQKKVASTYLETFLFYSGFFTPLYYLGNNKLANVAEIIKLIIRDESVHGTYIGYKFQLGFNELPEDEQENFRDWMYDLLYQLYENEEKYTKTLYDGVGWTEEVMTFLRYNANKALMNLGQDPLFPDTANDVNPIVMNGISTGTSNHDFFSQVGNGYLLGSVEAMHDDDYNYGL

SEQ ID NO: 1535 - DNA, 2115 bp, Streptococcus agalactiae
atgagtttaaaaaatattggcgatgtatcttactttcgcctaaataatgaaattaaccgtcctgttaatggacaaatcccactccataaagataaagaagccttaactgcttttttcaaagaaaacgtacagcctaattcaaaagcttttgactcaatcactgataaaattgcttacctccttaagtatgattatcttgaagaagctttcctcaataaatatcgtcctgaatttattgaagaattatctaccaaactcttcgataaaaagtttcgttttaaatccttcatggcagcctataagttttatcagcagtatgcattaaaaacaaatgatggagaatactatttagaaagtattgaagatcgcgttctctttaacgctctttattttgcagacggtgatgaagaactagcaactgacttagctctagaaatgatttcacaacgctatcaacctgcaacaccaagttttttaaatgctggtcgaagtcgtcgcggagaattagtctcatgtttcttaatccaagtaactgatgatatgaatgctattggtcgttcgattaattcagctcttcaattatctcgtattggtggtggggttggaatatcacttagtaaccttcgtgaggctggagctcctatcaaaggttttgctggtgctgcttctggagtcgttccagtcatgaaattatttgaagacagtttttcttactccaaccaacttggacaacgccaaggtgctggagttgtttaccttgacgttttccatccagatattatttcattcttatcaactaaaaaagaaaatgctgatgaaaaagtacgtgttaaaacattgtcattagggattactgtacccgataaattctatgaactagcacgtaacaatcaagaaatgtacttgtttagtccttatagtatcgaacgtgaatatggtgttcctttcagctatattgatattaccgaaaaatacgatgaattagtcgctaaccctaatatcactaaaacaaaaatcaatgctcgtgatttagaaacagagatttctaaacttcaacaagaatcaggttatccttacatcatcaatattgacactgctaatcgtactaaccctgttgatggaaaaattatcatgtcaaatctttgctctgagattttgcaagtacaaaaaccaagtcttatcaatgatgctcaagaataccttgaaatgggaactgatatttcttgtaaccttggctcaactaatgttttaaatatgatgacatctcctgattttggaaaatcaattaaaacaatgactcgtgctttaactttcgttactgactcatcaaatattgaagctgttccaactattaaaaacggaaatgctcaagcacatacatttggacttggagcaatgggactccactcctatttggcaaaaaatcatatcgaatatggtagtccagaatcaattgaatttactgatatttatttcatgctaatgaactactggaccttagtagaatcaaacaatattgcccgcgaacgtcaaacaacatttgtaggttttgaaaaatcaaaatacgctgacggtacatactttgataaatatgtatctggaaaatttgttccacaatctgacaaagtaaaatccctatttgctaatcattttatccccgaagctaaagattgggaaaaccttagatacgcagttatgaaagacggactatatcatcaaaatcggcttgcagttgctccgaatggttctatttcgtatatcaacgattgttcagcatctatccaccctattacacaacgtattgaagagcgtcaagagaaaaaaatcgggaaaatttattatccagctaatggcttagctacagatactatcccttattacacttctgcctatgatatggatatgcgtaaagtaatagacgtctatgccgcagcaactgagcacgtagaccaaggtctctcaatgacactctttttacgaagcgaattaccaaaggagttgtacgagtggaaaacagaaagtaagcagactactcgcgactcttycaatcctacgcaactatgctttcaacaaaggtgtgaaatcaatctactatatccgtacttttacagatga

SEQ ID NO: 1536 - protein, 704 aa, Streptococcus agalactiae
  VARIANT 682: Xaa = Any Amino Acid
MSLKNIGDVSYFRLNNEINRPVNGQIPLHKDKEALTAFFKENVQPNSKAFDSITDKIAYLLKYDYLEEAFLNKYRPEFIEELSTKLFDKKFRFKSFMAAYKFYQQYALKTNDGEYYLESIEDRVLFNALYFADGDEELATDLALEMISQRYQPATPSFLNAGRSRRGELVSCFLIQVTDDMNAIGRSINSALQLSRIGGGVGISLSNLREAGAPIKGFAGAASGVVPVMKLFEDSFSYSNQLGQRQGAGVVYLDVFHPDIISFLSTKKENADEKVRVKTLSLGITVPDKFYELARNNQEMYLFSPYSIEREYGVPFSYIDITEKYDELVANPNITKTKINARDLETEISKLQQESGYPYIINIDTANRTNPVDGKIIMSNLCSEILQVQKPSLINDAQEYLEMGTDISCNLGSTNVLNMMTSPDFGKSIKTMTRALTFVTDSSNIEAVPTIKNGNAQAHTFGLGAMGLHSYLAKNHIEYGSPESIEFTDIYFMLMNYWTLVESNNIARERQTTFVGFEKSKYADGTYFDKYVSGKFVPQSDKVKSLFANHFIPEAKDWENLRYAVMKDGLYHQNRLAVAPNGSISYINDCSASIHPITQRIEERQEKKIGKIYYPANGLATDTIPYYTSAYDMDMRKVIDVYAAATEHVDQGLSMTLFLRSELPKELYEWKTESKQTTRDSXNPTQLCFQQRCEINLLYPYFYR

SEQ ID NO: 1537 - DNA, 225 bp, Streptococcus agalactiae
atggcagctattactgttttttcgaaaaacaactgtatgcaatgtaaaatgactaagaaatttcttgaccagcacggcgctgattttgaagaaattaatattgatgaaaaaccagaaaaaattgaatatgtgaaaaatctcggcttttctgcggctccagtgattgaagctggtaatgttgttttttcaggtttccaaccaagcaaactaaaagaacttgtttaa

SEQ ID NO: 1538 - protein, 74 aa, Streptococcus agalactiae
MAAITVFSKNNCMQCKMTKKFLDQHGADFEEINIDEKPEKIEYVKNLGFSAAPVIEAGNVVFSGFQPSKLKELV

SEQ ID NO: 1539 - DNA, 264 bp, Streptococcus agalactiae
atggcttcaaaagatttccacattgttgcagaaacaggtattcacgcacgtccagctactttgcttgtccaaacagctagcaaatttgcttcagacatcacgcttgattacaaaggtaaagcagtaaaccttaaatcaatcatgggtgttatgagtcttggtgttggtcaaggtgctgatgttactatttcagcagaaggtgcagatgcagatgatgcaattgcagctatcgaagaaacaatgacaaaagaaggattggcataa

SEQ ID NO: 1540 - protein, 87 aa, Streptococcus agalactiae
MASKDFHIVAETGIHARPATLLVQTASKFASDITLDYKGKAVNLKSIMGVMSLGVGQGADVTISAEGADADDAIAAIEETMTKEGLA

SEQ ID NO: 1541 - protein, 1725 aa, Streptococcus agalactiae
ATGCTTAAAGGAATCGCAGCCTCTGATGGTGTTGCAGTTGCTAAAGCATATCTACTTGTCCAACCGGATTTGTCATTTGAGACTGTAACAGTCGAAGATACAAACGCAGAAGAAGCTCGCCTTGATGTTGCACTCCAAGCTTCACAAGACGAGCTTTCTGTTATCCGTGAGAAGGCAGTAGAAAGCTTAGGCGAAGAAGCCGCAGCTGTATTTGATGCTCATTTAATGGTTCTTTCTGACCCAGAAATGATTAATCAAATTAAAGAGACTATTCGTGCAAAACAAGTAAATGCAGAAACAGGTCTTAAAGAAGTGACTGATATGTTCATCACTATCTTTGAAGGTATGGAAGATAACCCATACATGCAAGAACGTGCAGCAGATATCCGTGATGTTGCCAAACGTGTCTTAGCACATCTTTTGGGTGTTAAATTACCAAACCCAGCAACTATCAATGAAGAATCAATCGTTATTGCACACGATTTGACACCTTCTGATACAGCTCAATTAAATAAACAATTTGTTAAAGCTTTTGTAACAAATATTGGAGGGCGTACAAGTCACTCAGCTATTATGGCACGTACACTCGAAATCGCAGCTGTTCTTGGTACAAATGATATTACTGAACGTGTTCAAGATGGTCAGTTGATTGCTGTTAATGGTATTACTGGTGAAGTTATCATTGAACCAACTGAAGCTCAAATTTCAGCCTTCAAGGCAGCAGGTGAAGCTTATGCCAAACAAAAAGCTGAATGGGCACTTCTTAAGGATGCACAAACAGTTACTGCTGATGGTAAACATTTTGAATTAGCTGCTAATATCGGTACACCTAAAGATGTTGAGGGTGTTAACGAAAATGGAGCAGAAGCAGTTGGTCTTTACCGTACAGAGTTCTTATATATGGATTCACAAGATTTCCCAACAGAAGATGAGCAATATGAAGCATATAAAGCAGTTCTTGAGGGTATGAATGGTAAACCAGTTGTTGTTCGTACAATGGATATCGGTGGAGATAAAGAGCTTCCTTACTTTGATCTTCCAAAAGAGATGAACCCATTCTTAGGATTCCGTGCATTGCGTATTTCAATTTCTGAAACTGGTGATGCAATGTTCCGCACACAAATCCGAGCACTTCTTCGTGCTTCAGTTCATGGACAGCTACGCATCATGTTCCCAATGGTTGCTTTGCTTAAAGAATTCCGTGCTGCTAAAGCTATATTTGAAGAAGAGAAAGCGAACTTGTTAGCTGACGGTGTAGCAGTAGCTGAAGGCATTGAAGTTGGTATTATGATTGAAATCCCAGCGGCAGCTATGCTTGCAGACCAATTTGCAAAAGAAGTTGATTTCTTCTCAATTGGTACTAATGATCTTATCCAATACACAATGGCTGCGGACCGTATGAATGAGCAAGTTTCATACCTCTATCAACCATACAATCCATCAATCCTTCGTTTGATTAACAACGTTATCAAAGCTGCTCATGCTGAAGGTAAATGGGCAGGTATGTGTGGTGAGATGGCCGGTGATCAAACTGCGGTTCCACTTCTTGTTGGTATGGGATTGGATGAATTCTCAATGTCAGCAACCTCAGTACTTCGTACACGTAGCTTAATGAAAAAATTGGACACAGCTAAAATGGAAGAATACGCTAATCGTGCTCTTTCAGAGTGTTCAACTATGGAAGAAGTTATCGAACTTCAAAAAGAATACGTTGACTTTGACTGA

SEQ ID NO: 1542 - protein, 574 aa, Streptococcus agalactiae
MLKGIAASDGVAVAKAYLLVQPDLSFETVTVEDTNAEEARLDVALQASQDELSVIREKAVESLGEEAAAVFDAHLMVLSDPEMINQIKETIRAKQVNAETGLKEVTDMFITIFEGMEDNPYMQERAADIRDVAKRVLAHLLGVKLPNPATINEESIVIAHDLTPSDTAQLNKQFVKAFVTNIGGRTSHSAIMARTLEIAAVLGTNDITERVQDGQLIAVNGITGEVIIEPTEAQISAFKAAGEAYAKQKAEWALLKDAQTVTADGKHFELAANIGTPKDVEGVNENGAEAVGLYRTEFLYMDSQDFPTEDEQYEAYKAVLEGMNGKPVVVRTMDIGGDKELPYFDLPKEMNPFLGFRALRISISETGDAMFRTQIRALLRASVHGQLRIMFPMVALLKEFRAAKAIFEEEKANLLADGVAVAEGIEVGIMIEIPAAAMLADQFAKEVDFFSIGTNDLIQYTMAADRMNEQVSYLYQPYNPSILRLINNVIKAAHAEGKWAGMCGEMAGDQTAVPLLVGMGLDEFSMSATSVLRTRSLMKKLDTAKMEEYANRALSECSTMEEVIELQKEYVDFD

SEQ ID NO: 1543 - protein, 484 aa, Streptococcus agalactiae
TTGTTAGCTGACGGTGTAGCAGTAGCTGAAGGCATGAAGTTGGTATTATGATGAAATCCCAGCGGCAGCTATGCTTGCAGACCAATTTGCAAAAGAAGTTGATTTCTTCTCAATTGGTACTAATGATCTTATCCAATACACAATGGCTGCGGACCGTATGAATGAGCAAGTTTCATACCTCTATCAACCATACAATCCATCAATCCTTCGTTTGATTAACAACGTTATCAAAGCTGCTCATGCTGAAGGTAAATGGGCAGGTATGTGTGGTGAGATGGCCGGTGATCAAACTGCGGTTCCACTTCTTGTTGGTATGGGATTGGATGAATTCTCAATGTCAGCAACCTCAGTACTTCGTACACGTAGCTTAATGAAAAAATTGGACACAGCTAAAATGGAAGAATACGCTAATCGTGCTCTTTCAGAGTGTTCAACTATGGAAGAAGTTATCGAACTTCAAAAAGAATACGTTGACTTTGACTGA

SEQ ID NO: 1544 - protein, 161 aa, Streptococcus agalactiae
MLADGVAVAEGIEVGIMIEIPAAAMLADQFAKEVDFFSIGTNDLIQYTMAADRMNEQVSYLYQPYNPSILRLINNVIKAAHAEGKWAGMCGEMAGDQTAVPLLVGMGLDEFSMSATSVLRTRSLMKKLDTAKMEEYANRALSECSTMEEVIELQKEYVDFD

SEQ ID NO: 1545 - protein, 1428 aa, Streptococcus agalactiae
TTGACAAAAGAATATCAAAATTATGTCAATGGCGAATGGAAATCATCTGTTAATCAGATTGAGATTTTGTCACCAATTGATGATTCTTCATTGGGATTCGTGCCAGCGATGACTCGAGAAGAAGTTGATCATGCTATGAAAGCGGGTCGTGAGGCTTTACCAGCCTGGGCTGCTTTGACAGTATATGAACGTGCACAATACCTTCATAAAGCCGCAGACATTATTGAACGTGATAAAGAAGAAATTGCTACTGTTTTAGCAAAAGAAATTTCTAAAGCTTACAATGCTTCAGTAACTGAGGTTGTAAGGACAGCTGATCTTATTCGTTATGCAGCAGAAGAAGGAATTCGTTTATCAACTTCAGCTGACGAAGGTGGAAAAATGGATGCTTCAACAGGTCATAAGTTGGCTGTTATTCGTCGTCAACCAGTAGGTATCGTTTTAGCAATCGCACCTTATAATTACCCTGTTAACCTCTCAGGATCAAAAATTGCGCCAGCTCTAATTGGTGGAAACGTTGTGATGTTTAAACCACCAACACAAGGTTCAGTCTCAGGACTTGTTTTAGCAAAAGCTTTTGCAGAAGCAGGTCTTCCAGCAGGTGTCTTTAATACTATTACAGGACGCGGTTCTGAGATTGGAGATTACATTGTTGAGCATGAAGAAGTTAATTTTATTAACTTTACAGGATCAACGCCAGTTGGAAAACGTATTGGTAAGTTAGCAGGAATGCGTCCAATTATGCTTGAGTTGGGTGGTAAGGATGCAGGTGTCGTCTTAGCTGATGCTGACCTTGACAACGCTGCTAAACAAATCGTTGCAGGTGCTTATGATTACTCCGGACAACGCTGTACGGCAATTAAGCGTGTACTTGTCGTTGAAGAAGTTGCAGATGAATTGGCAGAAAAAATATCTGAAAATGTAGCAAAATTATCAGTAGGTGATCCATTTGATAATGCAACGGTGACACCGGTTATTGATGATAATTCAGCCGACTTTATTGAAAGCTTAGTAGTAGATGCACGTCAAAAAGGTGCGAAAGAATTGAATGAATTTAAACGTGATGGTCGTCTATTAACTCCAGGATTGTTTGATCATGTTACTTTAGATATGAAACTAGCTTGGGAAGAGCCTTTTGGACCAATTCTCCCAATTATTCGTGTCAAGGATGCAGAAGAAGCTGTTGCTATTGCCAACAAATCTGATTTTGGATTACAATCATCAGTCTTTACACGTGATTTCCAAAAAGCATTTGATATAGCAAATAAACTTGAAGTTGGTACAGTTCACATTAACAATAAGACTGGACGTGGTCCTGATAATTTCCCATTCTTAGGACTCAAAGGATCTGGTGCAGGTGTTCAAGGTATCAGATATTCAATTGAAGCAATGACAAATGTAAAATCGATAGTTTTTGATATGAAATAG

SEQ ID NO: 1546 - protein, 475 aa, Streptococcus agalactiae
MTKEYQNYVNGEWKSSVNQIEILSPIDDSSLGFVPAMTREEVDHAMKAGREALPAWAALTVYERAQYLHKAADIIERDKEEIATVLAKEISKAYNASVTEVVRTADLIRYAAEEGIRLSTSADEGGKMDASTGHKLAVIRRQPVGIVLAIAPYNYPVNLSGSKIAPALIGGNVVMFKPPTQGSVSGLVLAKAFAEAGLPAGVFNTITGRGSEIGDYIVEHEEVNFINFTGSTPVGKRIGKLAGMRPIMLELGGKDAGVVLADADLDNAAKQIVAGAYDYSGQRCTAIKRVLVVEEVADELAEKISENVAKLSVGDPFDNATVTPVIDDNSADFIESLVVDARQKGAKELNEFKRDGRLLTPGLFDHVTLDMKLAWEEPFGPILPIIRVKDAEEAVAIANKSDFGLQSSVFTRDFQKAFDIANKLEVGTVHINNKTGRGPDNFPFLGLKGSGAGVQGIRYSIEAMTNVKSIVFDMK

SEQ ID NO: 1547 - protein, 599 aa, Streptococcus agalactiae
ATGAAGAAATTAATTATAGGTATTTTTAGTCTAATTATTATAGCGATTCTTGCTTGGCAAGGTTTTTCGTTTTTGAAACATAAAGAAATAAAACTTCAACAAGCTGTTGTTGAAAAAGAAATTCGCATAGCCGAGAAAACGGTAGAAGTGGTGAAAAGACAGAAAACTGAACGTGTTCTTTTTCTTGAACCTAAAGGATATGACAAAAGTCTAAGCGCTGATATTTTAAAGTGGAATCAAAAAAGCTTTGAGCATAAAAAATTTTATGACAATCAATACATTATTCTACGTCCTCAATTAGCAGATTCTAACTTTGCAAATGTTAAAAAATTATCCATTTATCAAATCTTATATCAAAAAGAAAAAGGAAGTATGTTTCAAAAATCAAGTCGCCTTTTGAGAACCTACTTACTTGATCAAAATAAGAAACCTTTTGAATTAGATGAGCTTTTAGCTCATAATATATCTGGATTTAAGGCTATTTTAGAAAATATAGCTCCAGGAACTCAACTAAAGGAACATGATAGCAATAAAGAATTTTAAAAACTGGAAGAGTAACAGATGGGCTAGAGTTAAAGANNNNNCATTCCATTCATTAA

SEQ ID NO: 1548 - protein, 199 aa, Streptococcus agalactiae
  VARIANT 194, 195: Xaa = Any Amino Acid
MKKLIIGIFSLIIIAILAWQGFSFLKHKEIKLQQAVVEKEIRIAEKTVEVVKRQKTERVLFLEPKGYDKSLSADILKWNQKSFEHKKFYDNQYIILRPQLADSNFANVKKLSIYQILYQKEKGSMFQKSSRLLRTYLLDQNKKPFELDELLAHNISGFKAILENIAPGTQLKEHDSNKEFLKTGRVTDGLELKXXHSIH

SEQ ID NO: 1549 - protein, 1007 aa, Streptococcus agalactiae
TTGAGCATAAAAAATTTTATGACAATCAATACATTATTCTACGTCCTCAATTAGCAGATTCTAACTTTGCAAATGTTAAAAAATTATCCATTTATCAAATCTTATATCAAAAAGAAAAAGGAAGTATGTTTCAAAAATCAAGTCGCCTTTTGAGAACCTACTTACTTGATCAAAATAAGAAACCTTTTGAATTAGATGAGCTTTTAGCTCATAATATATCTGGATTTAAGGCTATTTTAGAAAATATAGCTCCAGGAACTCAACTAAAGGAACATGATAGCAATAAAGAATTTTTAAAAACTGGAAGAGTAACAGATGGGCTAGATGTTAAAGATGGTAAGTTAATTATTAATGATTTAAAATTACCACTTGATAAATTATATAATGTGATCGATGAGTCATATTTAAAATCAAGTGATCTAGATTTAGTTTCTAATTTAAAAGCTAAAGCACCACGTGTTGCACTTACCTTTGATGATGGACCAAATGAAAAAACGACTCCTAAAGCCTTAGAAATCCTTAAAAGATATAATGCTAAAGCGACTTTCTTTGTAATGGGACAAAGTGCTGTAGGGCACACAGATATTTTACAAAGGATGCATGCTGAAGGTCATGAGATTGGTAATCATACATGGGATCATCCTAATTTAACCAAACTACCAGCGGAGAAAATCAAGGAAGAGATTCATAAGACTAATGATCTGATTATGAAAGCAACAGGACAAAAACCGGTGTACTTACGTCCCCCTTACGGAGCAACAAATGCTACTGTAAAAACAGTGACAGGATTGAAAGAAATGTTGTGGTCAGTTGATACAGAAGACTGGAAAAATCATAATACACAAGCAATGATGACCAATATCAAAAAACAATTACGTCCTGGAGGAGTGATTTTGATGCATGATATTCACCAGACAACCATAGATGCTCTGCCTACAATTATGGATTATCTGACAACCCAGGGCTATTATTTTGTTACTGTAGGTGAATTATATTCAACGCCTTAA

SEQ ID NO: 1550 - protein, 335 aa, Streptococcus agalactiae
MSIKNFMTINTLFLRPQLADSNFANVKKLSIYQILYQKEKGSMFQKSSRLLRTYLLDQNKKPFELDELLAHNISGFKAILENIAPGTQLKEHDSNKEFLKTGRVTDGLDVKDGKLIINDLKLPLDKLYNVIDESYLKSSDLDLVSNLKAKAPRVALTFDDGPNEKTTPKALEILKRYNAKATFFVMGQSAVGHTDILQRMHAEGHEIGNHTWDHPNLTKLPAEKIKEEIHKTNDLIMKATGQKPVYLRPPYGATNATVKTVTGLKEMLWSVDTEDWKNHNTQAMMTNIKKQLRPGGVILMHDIHQTTIDALPTIMDYLTTQGYYFVTVGELYSTP

SEQ ID NO: 1551 - DNA, 1083 bp, Streptococcus agalactiae
atgataacaaaatttccagaccaatggcaggataaattaacccagcgtcaatttgatgatctaacagatattcaaaataaactttttcaacctattactgatggtgataatatccttggaattagccctacaggtactggtaaaactctagcataccttttcccaacgcttcttaagttgcaacctaaaaagagccaacaactcttaattttagctccaaattcagaattagctggacaaatcttcgacgttacaaaagaatgggctgaaccattaggactgaccgcacaactattcctttcaggttctagtcaaaaacgccaaattgagcgactaaaaaaaggaccagaaattcttataggaactgctggacgcgtatttgaacttgtgaaactaaaaaaaataaaaatgatgaacattaatactatcgtccttgatgaattcgatgaattactcggcgactcacaatatcattttgtggacaatattattaatcgcgttcctcgtgatcagcaaatgatttacattagtgccaccaacaaactggacaatagtaaacttgccgataacactataacaatcgatctatctaatcaaaaacttgatactataaaacattattatattacagttgataaaagagagcgtactgacctacttcgtaaattttcaaatattcctgattttagaggtcttgtcttttttaacagcttatcagacttaggtgcatgtgaagaacgtttacaatttaatagggcctcggcagtttctttagcaagcgatattaatattaaattccgtaaagttatcttagagaaatttaaaaaccatgatatttcattactcctaggaactgatttggtagctcgtggcattgatatcgacaacctagaatatgtgattaattttgatatcgcacgcgacaaagaaacatatacacatcgttctggacgaactggtcgtatggggaaagagggatgtgttattacatttgtaacacataaagaagagctcaaacaacttaaaaaatacgccaccgttacagaacttgtacttcacaatcaaaaattacatttaaaataa

SEQ ID NO: 1552 - protein, 360 aa, Streptococcus agalactiae
MITKFPDQWQDKLTQRQFDDLTDIQNKLFQPITDGDNILGISPTGTGKTLAYLFPTLLKLQPKKSQQLLILAPNSELAGQIFDVTKEWAEPLGLTAQLFLSGSSQKRQIERLKKGPEILIGTAGRVFELVKLKKIKMMNINTIVLDEFDELLGDSQYHFVDNIINRVPRDQQMIYISATNKLDNSKLADNTITIDLSNQKLDTIKHYYITVDKRERTDLLRKFSNIPDFRGLVFFNSLSDLGACEERLQFNRASAVSLASDINIKFRKVILEKFKNHDISLLLGTDLVARGIDIDNLEYVINFDIARDKETYTHRSGRTGRMGKEGCVITFVTHKEELKQLKKYATVTELVLHNQKLHLK

SEQ ID NO: 1553 - DNA, 327 bp, Streptococcus agalactiae
  misc_feature 300, 301, 302, 303, 304: n = A,T,C or G
atgcgtaaaaaacctattattattggtgttacaggtggatctggtggtggtaaaaccagtgtttctcgggcgattttatcaaatttcccagatcaaaaaattaccatgattgaacatgattcttactataaagatcaaagtcatttaacttttgaagaacgtgtaaaaaccaattatgatcatccccttgcttttgataccaatttgatgattgagcaattgaacgaattgattgagggacgtccggtcgatattccggtttatgattacacaaaacatacccgtagtgatagaactatnnnnncattccattcattaattaattaa

SEQ ID NO: 1554 - protein, 108 aa, Streptococcus agalactiae
  VARIANT 100, 101, 102: Xaa = Any Amino Acid
MRKKPIIIGVTGGSGGGKTSVSRAILSNFPDQKITMIEHDSYYKDQSHLTFEERVKTNYDHPLAFDTNLMIEQLNELIEGRPVDIPVYDYTKHTRSDRTXXXFHSLIN

SEQ ID NO: 1555 - DNA, 255 bp, Streptococcus agalactiae
  misc_feature 12, 13, 14, 15, 16: n = A,T,C or G
atgaatgaatgnnnnnttgatacagatgatgatattcgtattattcgtcgtattaagcgtgatatggaagagcgcgatagaagtttagatagtattattgaacagtatacagaagttgtaaaacctatgtatcatcaatttatcgaaccaacaaagcgttatgcggatattgtaattccagaaggagtaagtaatattgtcgctattgatttaatcaataccaaagtggctagcatcttaaatgaagcaaaataa

SEQ ID NO: 1556 - protein, 84 aa, Streptococcus agalactiae
  VARIANT 4, 5, 6: Xaa = Any Amino Acid
MNEXXXDTDDDIRIIRRIKRDMEERDRSLDSIIEQYTEVVKPMYHQFIEPTKRYADIVIPEGVSNIVAIDLINTKVASILNEAK

SEQ ID NO: 1557 - DNA, 498 bp, Streptococcus agalactiae
atgaacaagtctaagaaaatcgaaaattatcaattattattactacaagcgcaagctctattctcagatgaaacaaatgctcttgccaacttatcaaatgcttcagctatgctaaatgctatgcttccaaattctgtatttacaggcttttatttatttgatggagaagagttaattcttggccctttccagggtggtgtatcatgtgtgcatattactttaggaaaaggtgtttgtggtgaatctgcacaaactgctaagacgctgatcgttgatgatgttacaaagcatgctaactatatctcctgtgattcaaaagctatgagtgaaatcgtagtacctatgtttaaaaatggcaaacttctaggagttctagatttagattcttctttagtagcagattatgatgagattgatcaagaatacttagaaaaatttgtaggtattctagtagaacatacgatttggaatttggatatgtttggagttgaaaagtaa

SEQ ID NO: 1558 - protein, 165 aa, Streptococcus agalactiae
MNKSKKIENYQLLLLQAQALFSDETNALANLSNASAMLNAMLPNSVFTGFYLFDGEELILGPFQGGVSCVHITLGKGVCGESAQTAKTLIVDDVTKHANYISCDSKAMSEIVVPMFKNGKLLGVLDLDSSLVADYDEIDQEYLEKFVGILVEHTIWNLDMFGVEK

SEQ ID NO: 1559 - DNA, 1665 bp, Streptococcus agalactiae
atgtatcaggccctttatcggaaatatcgtagccaaacatttgatgaaatggttggacaaagtgttatttcaactactttaaagcaagctgtgtccagcaaaaaaattagccatgcttaccttttttcaggacctaggggaactggaaaaacaagtgctgctaaaatatttgcaaaagcgatgaattgcccaaatcaaattaatggcgaaccttgtaatcattgtgatatttgtcgagatattacaaatggtagtttagaggatgtcattgaaattgatgctgcgtcaaataatggtgtcgatgaaattcgtgatatcagggacaaatcaacttatgctccaagtagggcaacctataaagtttatattattgatgaggttcatatgttgtctacaggtgccttcaatgcactattgaaaacacttgaagagccaacagaaaatgttgtttttatattagcaacaacagaactccataaaatccctgcaacaatcttatctcgtgtccagcgctttgaatttaaagcgattaaattattagctattcgagatcatttagcacagattttagataaagaagctatttcatatgatttggatgctctgacactagtcgctagacgagccgaaggtggtatgcgtgatgctttatcaattctcgatcaagccttgagtttagcgaaagataaccacatttctttagatgtagcagaagaaattacagggagcatttccttatctgctatagatgattatgtatcgaatatattggctcacgatacaactgaagcactcgctaaacttgaagtaatctttgatagtggcaaaagtatgagtcgttttgcaacagatttattgatgtacttaagagatttacttgttgttcaagcaggtggtgaagatagtcattcaagtgatacttttatagccaatcttaatgttaaacaagatattttatttgaaatgattgataaagtgacatctgttcttcctgagataaaaaatggtagccatcctaaagtttatgcagagatgatgaccatccaattgtctgaaatggtagaaaaaaattcgtcaaacatacccgcagatgtgacagcagaattagatagtcttcgtcgagagttaaaatcgttaaaaaacgaaatgagccaactctctcgagcagatcaaagttcatcaactcaaaaagtaaaggttaataataagacattcacatttaaagttgaccgtacaaagattttgaccattatggaagaaacggttgtagatagtcaacgttcacgtgaatacttagaagctttaaagagcgcttggaacgagatattagataatattacggctcaagatagagccttattaatgggatctgaacctgtcttagctaatagcgagaatgctattttggcatttgatgcggcctttaatgctgaacaagctatgaaacgtaccgatctcaatgatatatttggtaatattatgagtaaagcagcaggtttttcacctaatattttagctgtacctagaaatgattttaatcaaattcggagcgattttgcaaagaaaatgaaagctcaaaagacggaaacagaacctgaagttaatcatcaaattccagaagacttttcttatctagcagaacgaatagcaatcgttgaagattaa

SEQ ID NO: 1560 - protein, 554 aa, Streptococcus agalactiae
MYQALYRKYRSQTFDEMVGQSVISTTLKQAVSSKKISHAYLFSGPRGTGKTSAAKIFAKAMNCPNQINGEPCNHCDICRDITNGSLEDVIEIDAASNNGVDEIRDIRDKSTYAPSRATYKVYIIDEVHMLSTGAFNALLKTLEEPTENVVFILATTELHKIPATILSRVQRFEFKAIKLLAIRDHLAQILDKEAISYDLDALTLVARRAEGGMRDALSILDQALSLAKDNHISLDVAEEITGSISLSAIDDYVSNILAHDTTEALAKLEVIFDSGKSMSRFATDLLMYLRDLLVVQAGGEDSHSSDTFIANLNVKQDILFEMIDKVTSVLPEIKNGSHPKVYAEMMTIQLSEMVEKNSSNIPADVTAELDSLRRELKSLKNEMSQLSRADQSSSTQKVKVNNKTFTFKVDRTKILTIMEETVVDSQRSREYLEALKSAWNEILDNITAQDRALLMGSEPVLANSENAILAFDAAFNAEQAMKRTDLNDIFGNIMSKAAGFSPNILAVPRNDFNQIRSDFAKKMKAQKTETEPEVNHQIPEDFSYLAERIAIVED

SEQ ID NO: 1561 - protein, 870 aa, Streptococcus agalactiae
ATGGCAAATCAACTTAATATTTCCCGCACAGCTATTTGGAAAGGTATAAAAACGTTAGAAGAATTAGGCCTAGAGATTGAGTCTGTCACTAACAAGGGCTACCGATTGGTATCAGGTGACATATTATTACCAGAACAACTCGAACAAGAAATTGGTATTAAGGTTAGTCTTAATAATAATAGTGCTTCAACCCAACTAGATGCTAAAATGGGGATAGAAAGTAAATTAAAGACTCCACACCTTTTTTTAGCTCCTAATCAAAAAAAAGCTAAAGGACGTTTTGATAGACCTTTCTTTACATCAAATCAAGGCGGCATCTATATGTCTCTTTTATTACAACCTAATGTACCGATTGAAGATATAAAACCTTATACTGTCATGGTAGCCTCTAGTGCTGTAAAAGCTATCTCACGGTTAMCAGGAATTAATCCTGAAATTAAGTGGGTCAATGATATTTATTTAGATAATAAAAAAATAGCTGGTATTTTAACCGAGGCTATCGCTTCTGTTGAGAGTGGGTTGGTAACGAATGTTATTATAGGATTAGGTATCAATTTCTATATCAAAGAGTTCCCTAGGGCGTTAACTAAGCGCGCAGGTAGTCTCTTTACAGAGCAACCGACCATAACTAGAAATCAATTGATTACAGAAATCTGGAATCTCTTTTTCAATATTCCACTAGAGGATCACTTAAAGGTATATAGAGAAAAATCCCTAGTCTTAGATAGAACCGTTAGCTTTATGGATGGTCAAACAATGTATTCTGGGAAAGCTATTGATATTACAGATAAAGGATATTTAGTGGTTGAGTTAGATGATGGTCAGTTGAAAACACTTCGCAGTGGCGAAATCAGTCTTTCTTCTTGGTAG

SEQ ID NO: 1562 - protein, 289 aa, Streptococcus agalactiae
  VARIANT 140: Xaa = Any Amino Acid
MANQLNISRTAIWKGIKTLEELGLEIESVTNKGYRLVSGDILLPEQLEQEIGIKVSLNNNSASTQLDAKMGIESKLKTPHLFLAPNQKKAKGRFDRPFFTSNQGGIYMSLLLQPNVPIEDIKPYTVMVASSAVKAISRLXGINPEIKWVNDIYLDNKKIAGILTEAIASVESGLVTNVIIGLGINFYIKEFPRALTKRAGSLFTEQPTITRNQLITEIWNLFFNIPLEDHLKVYREKSLVLDRTVSFMDGQTMYSGKAIDITDKGYLVVELDDGQLKTLRSGEISLSSW

SEQ ID NO: 1563 - protein, 195 aa, Streptococcus agalactiae
ATGACAAAACGACAATTTATTTTTATGGCGCTTTTATGCTCTTTTGAAACTTATTTTTTTAATCAATCCGTTATGGATGGCTCCTGGATTTTTGCTATTTTTTGGGGAGTTTTATTACTTCGAGATCTTCAAAAGGTGTATGCGATTTCAAAATTCACAAAAGAGCTTATCAAATCTACCAAGAAGAAAGACTGA

SEQ ID NO: 1564 - protein, 64 aa, Streptococcus agalactiae
MTKRQFIFMALLCSFETYFFNQSVMDGSWIFAIFWGVLLLRDLQKVYAISKFTKELIKSTKKKD

SEQ ID NO: 1565 - protein, 1197 aa, Streptococcus agalactiae
ATGTCAGAACGTAAACTTTTCACGTCTGAGTCAGTATCTGAGGGACATCCTGATAAGATTGCTGACCAAATTTCCGATGCGATTTTAGATGCAATTTTAGAGCAAGATCCAGATGCCCACGTAGCAGCCGAAACAGCTGTTTATACAGGGTCGGTTCATGTATTTGGCGAAATATCAACGACAGCCTATGTTGATATTAACCGAGTTGTCCGTAACACAATCGCTGAAATTGGCTATGATAAAGCTGAATATGGCTTCTCAGCTGAATCTGTTGGAGTGCATCCGTCACTCGTTGAACAGTCGCCAGACATTGCACAGGGAGTCAATGAAGCTCTTGAGGTACGTGGTTCTCTTGAACAAGATCCTTTAGATTTAATTGGTGCAGGTGACCAAGGTTTGATGTTTGGGTTTGCTGTTGATGAAACACCTGAGTTAATGCCATTGCCAATTTCTTTAGCTCATCAGTTAGTTAAGAAATTGACAGATCTACGTAAGTCTGGGGAACTCACTTATCTTCGACCAGATGCAAAATCTCAAGTAACGGTTGAATATGATGAAAATGATCAACCAATTCGTGTGGATGCAGTAGTTATTTCGACACAGCATGATCCTAATGTAACTAATGACCAACTCCATAAGGACGTGATTGAGAAAGTTATCAATGAAGTTATTCCAAGCCATTATTTAGATGACCAAACAAAATTCTTTATCAATCCTACAGGGCGCTTTGTTATTGGAGGCCCTCAAGGAGATTCAGGACTAACAGGTCGTAAGATTATTGTAGATACTTATGGTGGTTATTCTCGTCATGGTGGTGGTGCATTTTCAGGTAAAGATGCTACTAAAGTAGATCGTTCAGCATCTTATGCAGCTCGTTATATTGCAAAAAATATTGTTGCAGCTGATTTAGCTAAAAAAGTAGAAGTACAACTTGCTTATGCAATTGGTGTTGCCCAGCCTGTCTCTGTGCGTGTAGATACATTTGGAACAGGTGTTATAGCAGAAGCAGACCTAGAGGCAGCTGTACGTCAAATATTTGATTTGCGACCAGCAGGCATTATTAATATGTTGGACCTCAAACGACCTATTTATCGACAAACAGCAGCCTATGGGCATATGGGACGTACTGATATCGATTTGCCATGGGAGCGAGTTGATAAAGTCCAGGCCTTAAAGGATTTTATTGCTAGCAAATAA

SEQ ID NO: 1566 - protein, 398 aa, Streptococcus agalactiae
MSERKLFTSESVSEGHPDKIADQISDAILDAILEQDPDAHVAAETAVYTGSVHVFGEISTTAYVDINRVVRNTIAEIGYDKAEYGFSAESVGVHPSLVEQSPDIAQGVNEALEVRGSLEQDPLDLIGAGDQGLMFGFAVDETPELMPLPISLAHQLVKKLTDLRKSGELTYLRPDAKSQVTVEYDENDQPIRVDAVVISTQHDPNVTNDQLHKDVIEKVINEVIPSHYLDDQTKFFINPTGRFVIGGPQGDSGLTGRKIIVDTYGGYSRHGGGAFSGKDATKVDRSASYAARYIAKNIVAADLAKKVEVQLAYAIGVAQPVSVRVDTFGTGVIAEADLEAAVRQIFDLRPAGIINMLDLKRPIYRQTAAYGHMGRTDIDLPWERVDKVQALKDFIASK

SEQ ID NO: 1567 - protein, 2262 aa, Streptococcus agalactiae
ATGAAAAAACAATTTTTAAAATCAGCAGCGATTCTATCGCTAGCAGTAACAGCAGTATCTACAAGTCAGCCGGTAGGGGCGATAGTGGGAAAAGATGAAACGAAATTAAGACAGCAACTTGGGTATATTGATTCAAAAAAATCTGGAAAGAAAATTGATGAGAGATGGGGTGAAAAAATTTATAACTATCTAAGTTATGAGCTCATTGAAGCAAACGAATGGATTAACCGAAGTGAGTTTCAGGAACCTGAGTATAGAACTATTTTATCAGAATTTAAAGATAAAATAGATAGTATTGAATACTACTTAATTAACTTAAGTAATATTGCTAAAGAAGATGCGCATCAAAGAAATATTCTTCAATCATTAGATAAATATGAAAAAAGTGGAATATATAATTTAGACCAAGGTGTTTATAATTATATATATCAAGAAATTAGTTCAGCGAAGCACAAGTTTTCGGATGGGGTAGATAAAATTTATCGTTTAGATAGTACTTTATTTCCTTTCTCTGTATGGTATGATAAACATTTAGATAATAATGATAACTACAAGGATAATAAAGATTTTAAAGAGTACATTGCTTTATTAAATGAAATTACACGAAAAGCAAGGTTAGGATATCAAATTGTAAATAACCATAAAGATGGGGAGCATAAAGATGAAGCAGAAATACTGGATATTTTAATCAGAGATATAACTTTTGTTTCAAAAGATGCTCCTGGATATAAATATATTCCAAATAAAAGAATTGCAGCGAAAATAATTGAAGATTTAGATGGAATTATCAATGACTTTTTTAAGAATACAGGAAAAGATAAGCCTTCTCTTGAAAAGTTAAAGGACACAGAATTCCATAAAAAATATCTTAATTCAACTGAACCGTATAGTATTGAAACTAACTTACCTTCAAATTATAAAGAATTGAAGGAAAAGCAAATAAAAAAATTGGAATATGGATACAAAAAGTCTTCTAAAATTTATACGTCTGCTCATTATGCACTATATAGTGAAGAAATTGATGCTGCAAAAGAATTGCTTCAAAAAGTGAAGATTGCAAAAGATAATTATAATGAAATTAAGTCCATGAATCTAAGCCCTTCAATTTTTAATCAGTATTTACAACTTCTTCAAATAGTTATAAGTTCAGAGATAAATCTAAAAAAGGCACTCGATAACACTGTGGATTTACCCATAGAAAATAATTTTAATACATTGGACATTCAATATAATAAATTAGACACTGCTATTAAGTCACTTCGAAAATTTGTAACTAAGTATAAACAAGAAGTAAGAAAAGCTACTAAGAGTTATTCTAAAAAAGAATTAGTAAATGCAGAGTTAACAAAAGTAATTTCTAATGACAATATTTTATTAGACATGCAAGCAATTAGTTCCAATTATGGGTCTACTAAAAAGTTTGTTTATTCAGTCAAAAGATTACCTTACGTCCCGCAAGTAATTATGACAACAACGTCTAATGTACTTATGCCTCAAAAGCAAGTTGAAAAAGTGAAGCTACTCACCCCATTTACAATTTCTAATAAAGAAGTATTGAATCATGACTCACTAGTAGAAAATGATGCTCAAAAACAAAAAGTAGAACAGGAAAAAACTAAATCGCTAGCTCCTCAAAAAGGGGCTGTAAAAGAACAAACTGAGCAAAAAGTATCTGGAAATACTCAAGAGATAGAAAAGAAATCTGAAACTGTGGCAACTCCACAACAAAGTTCAGTTGCGCAAACTTCTGTCCAACAGCCGGCTCCGGTTCAATCAGTTGTTCAAGAATCCAAAGCTTCTCAAGAGGAGATTAATGCAGCACACGATGCTATTTCGGCGTATAAATCAACAGTCAATATTGCTAATACAGCCGGTGTAACAACTGCGGAAATGACCACGCTCATTAATACTCAAACTTCTAATCTTTCTGATGTTGAGAAAGCTTTAGGAAATAATAAGGTTAATAATGGTGCAGTCAATGTATTGAGAGAAGATACAGCTCGTCTTGAGAATATGATTTGGAATCGTGCTTACCAAGCTATTGAAGAATTCAACGTCGCTCGTAATACTTATAATAACCAAATCAAGACAGAAACAGTTCCAGTTGATAATGATATTGAAGCTATTTTAGCAGGTTCTCAAGCTAAAATTAGCCATTTGGACAATCGTATCGGAGCGCGCCACATGGATCAAGCTTTTGTAGCTAGTTTATTAGAAGTTACTGAGATGAGTAAATCAATCTCATCGCGTATAAAAGAGTAG

SEQ ID NO: 1568 - protein, 753 aa, Streptococcus agalactiae
MKKQFLKSAAILSLAVTAVSTSQPVGAIVGKDETKLRQQLGYIDSKKSGKKIDERWGEKIYNYLSYELIEANEWINRSEFQEPEYRTILSEFKDKIDSIEYYLINLSNIAKEDAHQRNILQSLDKYEKSGIYNLDQGVYNYIYQEISSAKHKFSDGVDKIYRLDSTLFPFSVWYDKHLDNNDNYKDNKDFKEYIALLNEITRKARLGYQIVNNHKDGEHKDEAEILDILIRDITFVSKDAPGYKYIPNKRIAAKIIEDLDGIINDFFKNTGKDKPSLEKLKDTEFHKKYLNSTEPYSIETNLPSNYKELKEKQIKKLEYGYKKSSKIYTSAHYALYSEEIDAAKELLQKVKIAKDNYNEIKSMNLSPSIFNQYLQLLQIVISSEINLKKALDNTVDLPIENNFNTLDIQYNKLDTAIKSLRKFVTKYKQEVRKATKSYSKKELVNAELTKVISNDNILLDMQAISSNYGSTKKFVYSVKRLPYVPQVIMTTTSNVLMPQKQVEKVKLLTPFTISNKEVLNHDSLVENDAQKQKVEQEKTKSLAPQKGAVKEQTEQKVSGNTQEIEKKSETVATPQQSSVAQTSVQQPAPVQSVVQESKASQEEINAAHDAISAYKSTVNIANTAGVTTAEMTTLINTQTSNLSDVEKALGNNKVNNGAVNVLREDTARLENMIWNRAYQAIEEFNVARNTYNNQIKTETVPVDNDIEAILAGSQAKISHLDNRIGARHMDQAFVASLLEVTEMSKSISSRIKE

SEQ ID NO: 1569 - protein, 546 aa, Streptococcus agalactiae
ATGAAAAAAATAACAACTTTAATCTTAGCTAGTAGCTTATTACTAGTTGCAACGACATCGGTTAAAGCTGATGATAACTTTGAAATGCCAACGCGTTATGTTAAAATGAGTGAAAAATCAAAAGCATTTTATCAAAGACTACAAGAAAAACAACGTAAGGCACATACTACTGTGAAGACTTTTAATAATTCAGAAATAAGGCATCAACTACCTCTTAAACAAGAAAAGGCTAGAAATGATATCTACAATTTAGGCATTCTTATTTCTCAGGAGTCTAAAGGGTTCATCCAACGTATTGATAATGCCTATTCTTTGGAAAATGTCTCAGATATTGTTAATGAAGCTCAGGCTTTGTATAAACGTAACTATGATTTATTTGAAAAAATCAAATCTACACGTGATAAGGTTCAAGTCTTACTTGCATCGCATCAAGATAATACAGACTTAAAAAACTTTTATGCTGAGTTGGACGATATGTATGAACATGTTTATCTCAATGAAAGTAGAGTGGAGGCGATAAACAGAAATATCCAAAAATATAATTAG

SEQ ID NO: 1570 - protein, 181 aa, Streptococcus agalactiae
MKKITTLILASSLLLVATTSVKADDNFEMPTRYVKMSEKSKAFYQRLQEKQRKAHTTVKTFNNSEIRHQLPLKQEKARNDIYNLGILISQESKGFIQRIDNAYSLENVSDIVNEAQALYKRNYDLFEKIKSTRDKVQVLLASHQDNTDLKNFYAELDDMYEHVYLNESRVEAINRNIQKYN

SEQ ID NO: 1571 - DNA, 567 bp, Streptococcus agalactiae
atgactaatcataaaacaaaaaaattaacggttttagcaattatgattgctttagatgtttttttaacgcccatttttagaatagaaggcatggcctttatgtctagtgtggttaatattatcgctggagttataatgggaccaatctatgcattagttatggcacttgtaacggcttttattcgtattttaactcaagcaggagtagcatctgttgcacctttagctattctaggagctggtccaggagctttcttagcgggttggttttatcggttttatgcgaaagactggatgtcttgggtgggtgagtttataggaacagggataattggagcacttttatcagctccaattatggtctggttttggacttggacagcggatggaaatcacgaagtgttagctaaagcatctgcagctcaatccatttttctttttatgccaaggtttataggggcgactataattggcggtgttattgctttgttgctacttcagggattaaagcgggttcctgtatttatgacaatacaagcattatttaaaggagaaaaagtaaaatga

SEQ ID NO: 1572 - protein, 188 aa, Streptococcus agalactiae
MTNHKTKKLTVLAIMIALDVFLTPIFRIEGMAFMSSVVNIIAGVIMGPIYALVMALVTAFIRILTQAGVASVAPLAILGAGPGAFLAGWFYRFYAKDWMSWVGEFIGTGIIGALLSAPIMVWFWTWTADGNHEVLAKASAAQSIFLFMPRFIGATIIGGVIALLLLQGLKRVPVFMTIQALFKGEKVK

SEQ ID NO: 1573 - DNA, 291 bp, Streptococcus agalactiae
atgaaattgagtttaaaagatgtattattgattgctctattagcggttgttctgggcgttgtttactttggagcaggctatatttcaaatgcttttgtaccttttgtaggccctatagcgcatgaagttatttatggtatttggtttgtggcaggttcaatggctctttatatattgaggaaaccaggaaccgctattgtagcagaattgttagctgctttgatagaggttttaattggatcaatttatggaccaagtggtactcgttattggtacccttcaaaggtttag

SEQ ID NO: 1574 - protein, 96 aa, Streptococcus agalactiae
MKLSLKDVLLIALLAVVLGVVYFGAGYISNAFVPFVGPIAHEVIYGIWFVAGSMALYILRKPGTAIVAELLAALIEVLIGSIYGPSGTRYWYPSKV

SEQ ID NO: 1575 - DNA, 288 bp, Streptococcus agalactiae
  misc_feature 269, 270, 271, 272, 273: n = A,T,C or G
atgctatctgttgaaaaattagcttgcacccatggcgatagtcattatttatttgatgaagtgacttttagtcttagcccaggagaacgaattttaatcagcggctattcagggtgtggtaagagtacattggctcttttactatcatggttaaaagaaagtgggaaaggtcaagttttattaaacggctcattaatagaaccaagcgatgtggggtttctttttcaaaatcctgatttgcaattttgtatggatactgtggcgcatgnnnnncattccattcattaa

SEQ ID NO: 1576 - protein, 95 aa, Streptococcus agalactiae
  VARIANT 90, 91: Xaa = Any Amino Acid
MLSVEKLACTHGDSHYLFDEVTFSLSPGERILISGYSGCGKSTLALLLSWLKESGKGQVLLNGSLIEPSDVGFLFQNPDLQFCMDTVAHXXHSIH

SEQ ID NO: 1577 - DNA, 1038 bp, Streptococcus agalactiae
  misc_feature 8, 9, 10, 11, 12: n = A,T,C or G
atgaatgnnnnngcgcatgagttgtattttattttagaaaatttacaaatagaaccggagcaaatgcaagatagaagtgagtttgtattggcacaagttggtttaaaaggatttcagaatcggttgatttatactttatctcaaggtgaaaaacagcgattagcattggcgaccatttttttaaaatctcctaaacttattattttagatgaagcttttgcgaatttggatcaagagagtgccagtcaactattacaattagttcttaattatcaagcaaacaatcaatcaatgctgattgtaatcgatcatttgattacttattatcaagatataatggatcactatttttggttggaaaaacggttgacaagggtcaattttgattatatgctcaatcgtttgaatgtcttcgaattagaaaagaaaagtcataatacaggtgacaaactgttatcaattaaagatttccaagttaaactttcaaaaaacaaattcatctcttaccttgattttgatttagcaagtggggagaggttgtgcttagatggaccaagtggcgtggggaagtctagtttgtttatgggattgttagggctttataggactaaagggaaaaaacaatttactcatagaaagcaaattcctataagctttttatttcaaaatcccttagaccaatttattttttcaacagtttatgacgaaatttttcaggtttgcaaggatagtaacaaagcgagggatattttggaaaccataaatctttgggataagaaacagttttcaccatttcaactaagtcaaggccaacagaggcgattagccattggcagtattttagctagtgatagtaaacttctattattagatgaaccaacttatggacaagatgcctatcacgctaatatgattacaactcttcttttgagttattgtcacaaaaatcattgtggggttatttttactagccatgatcctcacttaaaagagtgttttgcaacacgtttcttggaggtgtcatcttgttcaatttga

SEQ ID NO: 1578 - protein, 345 aa, Streptococcus agalactiae
  VARIANT 3, 4: Xaa = Any Amino Acid
MNXXAHELYFILENLQIEPEQMQDRSEFVLAQVGLKGFQNRLIYTLSQGEKQRLALATIFLKSPKLIILDEAFANLDQESASQLLQLVLNYQANNQSMLIVIDHLITYYQDIMDHYFWLEKRLTRVNFDYMLNRLNVFELEKKSHNTGDKLLSIKDFQVKLSKNKFISYLDFDLASGERLCLDGPSGVGKSSLFMGLLGLYRTKGKKQFTHRKQIPISFLFQNPLDQFIFSTVYDEIFQVCKDSNKARDILETINLWDKKQFSPFQLSQGQQRRLAIGSILASDSKLLLLDEPTYGQDAYHANMITTLLLSYCHKNHCGVIFTSHDPHLKECFATRFLEVSSCSI

SEQ ID NO: 1579 - DNA, 126 bp, Streptococcus agalactiae
atgcttcgtaaaggtttctttaaaaacttgggcgaaggtcaatctgatatcatttgtgatgggactctctttatttctagggacgtatttttggggaaaattaccccatcaattcgtcttagctag

SEQ ID NO: 1580 - protein, 41 aa, Streptococcus agalactiae
MLRKGFFKNLGEGQSDIICDGTLFISRDVFLGKITPSIRLS

SEQ ID NO: 1581 - protein, 669 aa, Streptococcus agalactiae
TTGTTCAATTTGAAAAACTATCATCCAGCTATTACCTTCCTATGTTTATTAATACCAACCTTTTCGTTTAGTTTCACATTGAGGTTAAGAACGTCTTTGTTATTTCTAATTATAGTAGTAACACTGCAATGCTTCGTAAAGGTTTCTTTAAAAACTTGGGCGAAGGTCAATCTGATATCATTTGTGATGGGACTCTCTTTATTTCTAGGGACGTATTTTTGGGGAAAATTACCCCATCAATTCGTCTTAGCTAGTCTAGTGGCCTGTCGTCCGCTTATTTTTATGAACGTGGGTTTGTTATTTCATGCATCACATTCTAATTATGATTTTATAGAATCTCTTTATCAAACTTTCAAAGTGCCTAGTCATTTTGCATATGGTATTTTTGCGGTCTTTAATCTTCTACCATTAATTAAATTACAATACCAACGTAATCGACTCGCATTCCGACTGAAGAATCAGGTAACTTGGGCATTATCGCCTAGACTAATATTGTCAGTTTTATTAAAGACGATATATTGGGTAGAACAGTTAGAGTTAGCAATGCTTTCTAAAGGTTTTGAAGTGGGTAAAGAGCGAACACATGCTTCAACTTATCCCGTTCGTTTTCGAGATTATAGTTTACTTGGTATGAGTATTTTATTGTCTATAGGAATGATTTTTAAATAA

SEQ ID NO: 1582 - protein, 222 aa, Streptococcus agalactiae
MFNLKNYHPAITFLCLLIPTFSFSFTLRLRTSLLFLIIVVTLQCFVKVSLKTWAKVNLISFVMGLSLFLGTYFWGKLPHQFVLASLVACRPLIFMNVGLLFHASHSNYDFIESLYQTFKVPSHFAYGIFAVFNLLPLIKLQYQRNRLAFRLKNQVTWALSPRLILSVLLKTIYWVEQLELAMLSKGFEVGKERTHASTYPVRFRDYSLLGMSILLSIGMIFK

SEQ ID NO: 1583 - protein, 681 aa, Streptococcus agalactiae
ATGTTAAAAGATAAGATGATTGCTAAAGGAGCAAAATATATCCAATCCATCTATCAAGATCCATTTATTCAAGGAATTATAAAAGGGCGTTTAGACCATGACGTAATCTGCCATTATTTACAGGCAGATAATATCTACCTTGGGAAATTTGCTGATATTTATGCCCTGTGCTTGGCAAAATCTGATAATTTACGAGATAAACAATTTTTCCTTGAACAAATTGACTTTACATTAAATCGGGAGTTAGCAGATGGTGAAGGCCCACATCAAGCCTTGGCCGCTTATACTAATCGATCTTATCAGGATATTATCGAAAAGGGTGTATGGTACCCGTCAGCAGATCATTACATTAAACATATGTATTTTCATTTTTACGAAAATGGTATTGCTGGTGCTTTAGCTGCAATGAGCCCATGTCCATGGATTTACCATCAATTGGCTAAAAAAATAATTGAGGAGAACCAGTTTTTGAATGGTAACCCTTTTAATAATTGGATAACTTTTTATGCTAACGATACAGTTGAAGAGTTAATGGAAAACTATTTTCGTATGATGGATTATTATGCGCAGAATTTGTCAAAAGAGAAGCAAGCTGATTTGGTAGATGCTTTTGTGAAATCTTGTCAGCATGAGAGACGTTTTTTTCAAATGGCAATAAATCAAGAAAAATGGGAGGATTAA

SEQ ID NO: 1584 - protein, 226 aa, Streptococcus agalactiae
MLKDKMIAKGAKYIQSIYQDPFIQGIIKGRLDHDVICHYLQADNIYLGKFADIYALCLAKSDNLRDKQFFLEQIDFTLNRELADGEGPHQALAAYTNRSYQDIIEKGVWYPSADHYIKHMYFHFYENGIAGALAAMSPCPWIYHQLAKKIIEENQFLNGNPFNNWITFYANDTVEELMENYFRMMDYYAQNLSKEKQADLVDAFVKSCQHERRFFQMAINQEKWED

SEQ ID NO: 1585 - protein, 798 aa, Streptococcus agalactiae
ATGACTTATTTAGCACCAGTTTTAACTATTGCAGGAACTGATCCTAGCGGTGGAGCAGGGATTATGGCGGATTTAAAGACATTTCAAGCTCGTCGGACTTACGGGATGGCTGTTGTGACTAGTGTTGTTGCTCAGAACACTTGTGGGGTTAGAGGCGTTCAGCATATAGAAACAGCTATCATTGATCAACAACTAGCTTGTGTCTATGATGATATTAAGCCAAAGGCGGTTAAAACAGGAATGTTAGCGGAGAGGGAAACAATTAGTTTAGTCGCTTCATATTTAAAAAAATATCCGCAACCTTATGTATTAGATCCTGTTATGGTGGCAACTAGCGGACATCGTTTAATTGATTCAGATGCCGTAGAAGCATTAAAAGAAGACTTATTGCCATTAGCAACTATTATCACACCAAATTTACCAGAAGCTGAGGTTTTAGTGGGATATGACTTATCAGATGAAGTAAGTATTATTAAAGCAGGTTACGATATTCAAAAACAATATTCTGTTAGAAATGTTCTTATAAAGGGAGGACATCTAGATGGCTTGGCTAAAGATTATTTATTTTTGGAAAAAGAAGGGTTGATAACTCTTAGTAATCAACGTATCAATACTATTCATACTCATGGGACTGGGTGTACATTTGCAGCAGTCGTTGCAGCGGAGTTAGCTAAAGGGCAATCAATTCTAAACGCGGTAAGTACCGCTAAATCATTTATTACTTCAGCTATCGAAACAGCGCCTGAGTTGGGCCTTGGAAACGGTCCTGTCAATCATACTAGCTATCAAGGAGACTAA

SEQ ID NO: 1586 - protein, 265 aa, Streptococcus agalactiae
MTYLAPVLTIAGTDPSGGAGIMADLKTFQARRTYGMAVVTSVVAQNTCGVRGVQHIETAIIDQQLACVYDDIKPKAVKTGMLAERETISLVASYLKKYPQPYVLDPVMVATSGHRLIDSDAVEALKEDLLPLATIITPNLPEAEVLVGYDLSDEVSIIKAGYDIQKQYSVRNVLIKGGHLDGLAKDYLFLEKEGLITLSNQRINTIHTHGTGCTFAAVVAAELAKGQSILNAVSTAKSFITSAIETAPELGLGNGPVNHTSYQGD

SEQ ID NO: 1587 - protein, 771 aa, Streptococcus agalactiae
ATGTATTTAGAACAATTAAAAGAGGTAAATCCTTTAACCATTTGTATCACTAATAATGTGGTCAAAAACTTTACAGCCAATGGTTTATTAGCTTTAGGAGCTTCTCCGGCTATGAGCGAGTGCATAGAGGACTTAGAAGACTTGTTAAAAGTTGCAGATGCATTATTAATTAATATAGGAACACTAACAAAAGAAAGTTGGCAACTTTACCAAGAAGCAATCAAAATAGCAAATAAAAACCAAGTTCCAGTTGTATTAGATCCTGTAGCGGCAGGAGCAAGTCGTTTTCGATTAGAAGTGTCACTTGATTTATTGAAGAATTATTCTATTAGTTTACTTAGAGGAAATGGTAGTGAAATCGCTGCTTTGATTGGTGAAAAACAAGCGTCTAAAGGGGCAGATGGCGGAAAAGTGGCTGATTTAGAATCAATTGCTGTAAAAGCCAATCAAGTTTTTGATGTGCCAGTGGTTGTCACAGGAGAAACTGATGCTATCGCTGTTAGAGGAGAAGTTCGCTTATTACAAAATGGTAGTCCTTTAATGCCACTTGTTACAGGAACTGGATGTCTATTAGGGGCAGTATTGGCTGCTTTTATTGGTAGTTCTGACAGAAGCGATGATCTTGCTTGTCTGACAGAGGCCATGACTGTTTATAATGTTGCTGGAGAAATTGCAGAGAAGGTGGCAAAAGGTAAGGGGGTGGGAAGTTTCCAAGTTGCATTTTTAGATGCCCTTTCCCAGATGAAATCAGAAATGATTATGGACAAATAG

SEQ ID NO: 1588 - protein, 256 aa, Streptococcus agalactiae
MYLEQLKEVNPLTICITNNVVKNFTANGLLALGASPAMSECIEDLEDLLKVADALLINIGTLTKESWQLYQEAIKIANKNQVPVVLDPVAAGASRFRLEVSLDLLKNYSISLLRGNGSEIAALIGEKQASKGADGGKVADLESIAVKANQVFDVPVVVTGETDAIAVRGEVRLLQNGSPLMPLVTGTGCLLGAVLAAFIGSSDRSDDLACLTEAMTVYNVAGEIAEKVAKGKGVGSFQVAFLDALSQMKSEMIMDK

SEQ ID NO: 1589 - protein, 534 aa, Streptococcus agalactiae
ATGAAAGATACATTGAAATTATATTTTGTTTGTGGAACTGTGGATTGCTCTAGGAAGAATATATTGACTGTTGTTGAAGAAGCCTTACAAGCAGGTATAACTCTATTTCAATTTAGAGAAAAAGGTTTTACAGCATTACAAGGTAAGGAAAAAATTGCTATGGCTAAGCAACTCCAAATACTTTGTAAGCAATATCAAGTTCCTTTTATTATTGATGATGACATTGACTTAGTTGAGTTAATTGATGCTGATGGTCTTCATATTGGACAAAATGATTTACCTGTTGATGAGGCACGGAGACGTTTACCAGATAAAATCATCGGTTTATCTGTGAGTACAATGGATGAATATCAGAAATCACAATTATCTGTTGTTGATTACATCGGAATTGGTCCTTTTAATCCGACACAATCAAAAGCAGATGCTAAGCCTGCTGTTGGCAATAGGACAACAAAGGCAGTTAGAGAAAATTATCAGATATTTCCATCCGTGCATAGGGGCGGAATCACTAGTGATTTTGTTCATGATATATAG

SEQ ID NO: 1590 - protein, 177 aa, Streptococcus agalactiae
MKDTLKLYFVCGTVDCSRKNILTVVEEALQAGITLFQFREKGFTALQGKEKIAMAKQLQILCKQYQVPFIIDDDIDLVELIDADGLHIGQNDLPVDEARRRLPDKIIGLSVSTMDEYQKSQLSVVDYIGIGPFNPTQSKADAKPAVGNRTTKAVRENYQIFPSVHRGGITSDFVHDI

SEQ ID NO: 1591 - DNA, 276 bp, Streptococcus agalactiae
  misc_feature 249, 250, 251, 252, 253: n = A,T,C or G
atgcgtaaaattattattaacggtggcaagcaactgacgggagaagttgctgtatcgggtgccaaaaatagtgtagttgccttgattcctgccactattcttgctgatgatgttgtggtcttagatggagttccggctatttctgatgttgacagtttagttgacattatggaaactatgggagctaagattaagcgttatggtgagacgcttgaaattgatccatgtggcgttaaagatattccaatnnnnncattccattcattaattaattaa

SEQ ID NO: 1592 - protein, 91 aa, Streptococcus agalactiae
  VARIANT 83, 84, 85: Xaa = Any Amino Acid
MRKIIINGGKQLTGEVAVSGAKNSVVALIPATILADDVVVLDGVPAISDVDSLVDIMETMGAKIKRYGETLEIDPCGVKDIPXXXFHSLIN

SEQ ID NO: 1593 - DNA, 294 bp, Streptococcus agalactiae
  misc_feature 8, 9, 10, 11, 12: n = A,T,C or G
atgaatgnnnnngttcttataaagggaggacatctagatggcttggctaaagattatttatttttggaaaaagaagggttgataactcttagtaatcaacgtatcaatactattcatactcatgggactgggtgtacatttgcagcagtcgttgcagcggagttagctaaagggcaatcaattctaaacgcggtaagtaccgctaaatcatttattacttcagctatcgaaacagcgcctgagttgggccttggaaacggtcctgtcaatcatactagctatcaaggagactaa

SEQ ID NO: 1594 - protein, 97 aa, Streptococcus agalactiae
  VARIANT 3, 4: Xaa = Any Amino Acid
MNXXVLIKGGHLDGLAKDYLFLEKEGLITLSNQRINTIHTHGTGCTFAAVVAAELAKGQSILNAVSTAKSFITSAIETAPELGLGNGPVNHTSYQGD

SEQ ID NO: 1595 - DNA, 771 bp, Streptococcus agalactiae
atgtatttagaacaattaaaagaggtaaatcctttaaccatttgtatcactaataatgtggtcaaaaactttacagccaatggtttattagctttaggagcttctccggctatgagcgagtgcatagaggacttagaagacttgttaaaagttgcagatgcattattaattaatataggaacactaacaaaagaaagttggcaactttaccaagaagcaatcaaaatagcaaataaaaaccaagttccagttgtattagatcctgtagcggcaggagcaagtcgttttcgattagaagtgtcacttgatttattgaagaattattctattagtttacttagaggaaatggtagtgaaatcgctgctttgattggtgaaaaacaagcgtctaaaggggcagatggcggaaaagtggctgatttagaatcaattgctgtaaaagccaatcaagtttttgatgtgccagtggttgtcacaggagaaactgatgctatcgctgttagaggagaagttcgcttattacaaaatggtagtcctttaatgccacttgttacaggaactggatgtctattaggggcagtattggctgcttttattggtagttctgacagaagcgatgatcttgcttgtctgacagaggccatgactgtttataatgttgctggagaaattgcagagaaggtggcaaaaggtaagggggtgggaagtttccaagttgcatttttagatgccctttcccagatgaaatcagaaatgattatggacaaatag

SEQ ID NO: 1596 - protein, 256 aa, Streptococcus agalactiae; identical to SEQ ID NO: 1588

SEQ ID NO: 1597 - DNA, 672 bp, Streptococcus agalactiae
atgaaagatacattgaaattatattttgtttgtggaactgtggattgctctaggaagaatatattgactgttgttgaagaagccttacaagcaggtataactctatttcaatttagagaaaaaggttttacagcattacaaggtaaggaaaaaattgctatggctaagcaactccaaatactttgtaagcaatatcaagttccttttattattgatgatgacattgacttagttgagttaattgatgctgatggtcttcatattggacaaaatgatttacctgttgatgaggcacggagacgtttaccagataaaatcatcggtttatctgtgagtacaatggatgaatatcagaaatcacaattatctgttgttgattacatcggaattggtccttttaatccgacacaatcaaaagcagatgctaagcctgctgttggcaataggacaacaaaggcagttagagaaattaatcaagatattccaatcgttgcaataggcggaatcactagtgattttgttcatgatattatagaatcaggtgcagatgggattgctgttatatcggctatttcaaaagcaaatcatattgtagatgcaaccagacaattgcgttatgaagttgaaaaagctctggttaataggcaaaaacacagtgatgtaatcaaataa

SEQ ID NO: 1598 - protein, 223 aa, Streptococcus agalactiae
MKDTLKLYFVCGTVDCSRKNILTVVEEALQAGITLFQFREKGFTALQGKEKIAMAKQLQILCKQYQVPFIIDDDIDLVELIDADGLHIGQNDLPVDEARRRLPDKIIGLSVSTMDEYQKSQLSVVDYIGIGPFNPTQSKADAKPAVGNRTTKAVREINQDIPIVAIGGITSDFVHDIIESGADGIAVISAISKANHIVDATRQLRYEVEKALVNRQKHSDVIK

SEQ ID NO: 1599 - DNA, 1260 bp, Streptococcus agalactiae
atgcgtaaaattattattaacggtggcaagcaactgacgggagaagttgctgtatcgggtgccaaaaatagtgtagttgccttgattcctgccactattcttgctgatgatgttgtggtcttagatggagttccggctatttctgatgttgacagtttagttgacattatggaaactatgggagctaagattaagcgttatggtgagacgcttgaaattgatccatgtggcgttaaagatattccaatgccttatggcaaaatcaatagtcttcgtgcatcctattatttctatggaagcttattggggcgttatggtcaagcaacattaggtttacctggtggttgtgatttaggcccccgtccgattgatttacatttaaaagcttttgaagcgatgggagctagtgtttcttatgaaggtgattcaatgcgtctagcaacaaacggaaagcctttgcaaggagcaaatatttatatggatactgtcagtgttggtgcgacaattaacactataatcgcagcagctaaggcaaatggccgtacggttattgaaaatgctgcacgtgaaccagaaattattgacgtggctactcttttaaataatatgggagctcatattcgtggtgctgggactgatgttattacaattgaaggtgtgaaatcgctccatggcacgcgtcatcaagtaattccagatcgtattgaagcaggaacttatattgctatggcagcagctatcggacgaggaataaaagtgaccaatgtgttatatgaacaccttgagagtttcattgctaagttagatgagatgggagttcgaatgacagttgaagaggattcaatttttgtcgaagaacaagaaaggttaaaagctgtatccataaaaacctcaccttacccaggatttgctacagatttacaacaacctctaactcctttattactaacagcagaaggaaacgggagtttattagatactatctatgagaaacgtgttaatcatgttcccgaattagcacgtatgggagctaatatttctaccctagggggcaaaatagtttatagtggtcctaatcaattatctggtgcacctgtaaaagcgacagatttgcgtgcaggcgctgctttagttatcgctggcttaatggcagagggacgaactgaaattacgaatatcgagtttattttacgtggatattctaatatcatcgagaaactaacatcattgggtgcggatatccaattggttgaggaatag

SEQ ID NO: 1600 - protein, 419 aa, Streptococcus agalactiae
MRKIIINGGKQLTGEVAVSGAKNSVVALIPATILADDVVVLDGVPAISDVDSLVDIMETMGAKIKRYGETLEIDPCGVKDIPMPYGKINSLRASYYFYGSLLGRYGQATLGLPGGCDLGPRPIDLHLKAFEAMGASVSYEGDSMRLATNGKPLQGANIYMDTVSVGATINTIIAAAKANGRTVIENAAREPEIIDVATLLNNMGAHIRGAGTDVITIEGVKSLHGTRHQVIPDRIEAGTYIAMAAAIGRGIKVTNVLYEHLESFIAKLDEMGVRMTVEEDSIFVEEQERLKAVSIKTSPYPGFATDLQQPLTPLLLTAEGNGSLLDTIYEKRVNHVPELARMGANISTLGGKIVYSGPNQLSGAPVKATDLRAGAALVIAGLMAEGRTEITNIEFILRGYSNIIEKLTSLGADIQLVEE

SEQ ID NO: 1601 - protein, 573 aa, Streptococcus agalactiae
TTGTGGTATAATATTATCATGGATATATGGACAAATTTAGGACGGTTTGCATTCATTGAAACAGAACATGTTAACCTACGTCCTGTTGCCTACACTGATAGGGAAGCTTTTTGGCGAATAGCTTCAAAAAGGACAAATTTACAATTTATTTTTCCTGTTCAAACCAGTAAGAAGGAAAGTGATTTTCTTTTAGTTCATTCTTTTATGAAAGAGCCATTGGGAGTTTGGGCGATTGAAGATAAAGTTAGTCATAAAATGTTTGGAGTTATCCGTTTTGAAAACATTGATTTATCTAAAAAGACAGCTGAAATTGGCTATTTTTTGAAAGAAAGTTCTTGGGGTCAAGGCATTATGACTGAATGTCTAAAGACACTTTCTTTTTTTGCTTTTCGAGAGTTTGGGATGGACAAATTGATCATAGTAACACATAAAGAGAATATTGCTAGTCAGAAGGTTGCTTTGAAGGCGCATTTCAAACAATCTAGGAGTTTTAAAGGAAGCGACCGTTACACACGCCGTATAAGAGACTATATTGAGTTTCAATTAACTAGGGGTGATTATCGTTATGAGTAA

SEQ ID NO: 1602 - protein, 190 aa, Streptococcus agalactiae
MWYNIIMDIWTNLGRFAFIETEHVNLRPVAYTDREAFWRIASKRTNLQFIFPVQTSKKESDFLLVHSFMKEPLGVWAIEDKVSHKMFGVIRFENIDLSKKTAEIGYFLKESSWGQGIMTECLKTLSFFAFREFGMDKLIIVTHKENIASQKVALKAHFKQSRSFKGSDRYTRRIRDYIEFQLTRGDYRYE

SEQ ID NO: 1603 - protein, 1284 aa, Streptococcus agalactiae
ATGAGTAAACATCAAGAAATTTTGGAGTACCTAGAAAATTTAGCTGTTGGTAAGAGGGTTAGTGTACGCAGTATTTCAAATCATTTAAAGGTGAGTGATGGCACTGCATACCGCGCTATAAAAGAGGCAGAAAATAGGGGTATTGTTGAGACTAGACCGCGTAGTGGGACAGTACGTGTTGCTCAAAAAGCAAAGGTTAATATTGAAAAACTGACTTATGCTGAAATTGCAAGGATTAGTGACTCACAAGTTGTTGCAGGAATAGAGGGACTCAGCAAGGAGTTTAGTAAATTTTCTATAGGTGCAATGACTCACAGAAATATTGAAAAATATTTGGTGCAAGGAGGGTTATTGATTGTTGGCGACCGTGATGAGATACAACATTTAGCCTTACAACATCAAAACGCTATCTTAGTTACAGGTGGCTTTAATGTTTCCCCATCTGTTTGTCGTTTAGCAGATAAACTTCAAATTCCCGTAATGGTAACACACTATGATACATTCACAGTATCAACGATGATTAATCACACTTTGTCAAATGCCAAAATTCGTACTGATTTAAAGACCGTTGAACAAGTCTATCAGTCGCAAATGGATTACGGTTTCTTAGCGCAGGATGATACCGTAAAAGAATTTAATCTTCTTGTTAAACAAACTAAAAATGTTCGTTTTCCAATAGTCAACCAAGCTAATGTTGTCGTTGGTGTTGTTAGTGTTCAAGATATTCTTGGAAAAGATAAAGAAGTAAAATTGGCAACAGTCATGTCAAAAAATATCATTGTTGCTAAACCTCGAATGAGTCTAGCTAATATCAGTCAAAAAATGATTTTTGAAGATTTGAATATGATGCCAGTAGTATCGGATGACTTTGAATTATTAGGCGTTATTACAAGACGACAAGCTGTAGAAAATTTATCGATGTCGCAAGGGACGGATTTATACACCTATAGTGATCAAATCTTGTCTAATTTACAAATTGAAGATGGTCACTTTTCGTTTTTAGTAGAACCCGCTATGATTGACCATACAGGTAGCTTAACACAAGGAGTTTTGACGGAGTTCTTAAAAGAAATTTGTATTCGTGTCTTAACTCGTAAGCATCAACGCAGTATTGTTGTTAAACAAATGACACTTTATTTCTTGCAACCTGTTCAAATTGATGAAATAATAATGGTAACGCCAACAATTATTTCAGAAAAACGGCGCGAAGCTACACTCGATTTAGAATTAAAATTAGAAAATAAAATTATTGCTAAAGCTATGATAGCGGTAAAAATTAATTAG

SEQ ID NO: 1604 - protein, 427 aa, Streptococcus agalactiae
MSKHQEILEYLENLAVGKRVSVRSISNHLKVSDGTAYRAIKEAENRGIVETRPRSGTVRVAQKAKVNIEKLTYAEIARISDSQVVAGIEGLSKEFSKFSIGAMTHRNIEKYLVQGGLLIVGDRDEIQHLALQHQNAILVTGGFNVSPSVCRLADKLQIPVMVTHYDTFTVSTMINHTLSNAKIRTDLKTVEQVYQSQMDYGFLAQDDTVKEFNLLVKQTKNVRFPIVNQANVVVGVVSVQDILGKDKEVKLATVMSKNIIVAKPRMSLANISQKMIFEDLNMMPVVSDDFELLGVITRRQAVENLSMSQGTDLYTYSDQILSNLQIEDGHFSFLVEPAMIDHTGSLTQGVLTEFLKEICIRVLTRKHQRSIVVKQMTLYFLQPVQIDEIIMVTPTIISEKRREATLDLELKLENKIIAKAMIAVKIN

SEQ ID NO: 1605 - protein, 753 aa, Streptococcus agalactiae
ATGTGGGAAGTTGAAGAATACGTTCGTAGACGTTGTAAAGAAGAAAACGTATTGCCATTGCAAATCGGGGTTGATGGTGCAGTTATGGATTACCCATATGCTACTTGTTGTGGGCTTAATGATGAAGTGGCTCATGCCTTTCCTCGTCATTATACCCTAAAACAAGGTGACCTTTTAAAAGTAGATATGGTTTTAAGCGAACCTTTAGATAAATCAATTGTTGACGTTTCATCGTTAAACTTTGACAACGTGGCTCAAATGAAAAAGTACACGGAAACATATAGTGGTGGTTTGGCAGACTCGTGTTGGGCTTATGCTGTAGGTGAAGTTTCACAAGAGGTGAAAGACTTAATGTCTGTGACAAGAGAAGCAATGTATATTGGGATTGAAAAAGCAGTTATCGGAAACCGCATTGGTGATATTGGAGCTGCTATTCAGGATTATGCAGAGAGTCGTGGTTATGGAGTTGTTCGTGATTTGGTTGGTCACGGTGTTGGTCCAACAATGCATGAAGAGCCTATGGTGCCTAACTATGGTACAGCAGGTCGAGGTCTCCGTCTTCGTGAGGGGATGGTTTTAACCATCGAACCAATGATTAATACTGGTACTTGGGAAATTGATACAGACATGAAAACTGGTTGGGCACATAAAACCTTAGATGGTGGTCTTTCTTGTCAATATGAACATCAATTTGTTATCACTAAAGATGGTCCTGTTATTTTAACGAGTCAAGGAGAAGAAAGAACTTACTAA

SEQ ID NO: 1606 - protein, 250 aa, Streptococcus agalactiae
MWEVEEYVRRRCKEENVLPLQIGVDGAVMDYPYATCCGLNDEVAHAFPRHYTLKQGDLLKVDMVLSEPLDKSIVDVSSLNFDNVAQMKKYTETYSGGLADSCWAYAVGEVSQEVKDLMSVTREAMYIGIEKAVIGNRIGDIGAAIQDYAESRGYGVVRDLVGHGVGPTMHEEPMVPNYGTAGRGLRLREGMVLTIEPMINTGTWEIDTDMKTGWAHKTLDGGLSCQYEHQFVITKDGPVILTSQGEERTY

SEQ ID NO: 1607 - protein, 921 aa, Streptococcus agalactiae
ATGAAATTAAAAAAATTCTTTGAGGATTTGCTGGCTAAACTAGAATATAGACCCATTCAAGTTTTTATGCGTCATTTTCAAAGTGCAGAGATGGACTTATCAGCCATAGCAGTTGCTTATTATCTATTAGTGACAGCTTTTCCATTACTAGTTATTGCTGCTAATATTTTTCCTTATTTTCATATTAATGTGTCGGATTTATTGTCACTTATGCAAAAAAATCTTCCGAAAAATATTTATGAACCTGCCTCACGCTTAGCAGTAGATGCTTTTTCGAAACCGTCTACCGGCATTTTGGGATTCGCGTCATTAACAGCTTTTTGGACAATGTCTAAAAGTTTGACCTCTCTTCAAAAAGCCATTAATAAAGCATACGGTGTTGACCAACACAGAGACTTTGTGATTAGTCGTTTAGTGGGTGTGGGGACTGGGCTGATCATCCTATTTTTACTGACTTTTGTTTTAATTTTTTCAACCTTTTCAAAACCAGTTTTACAGATAATTGTAAACATGTATGATTTGGGAGATACTCTAACGGCGTGGCTTTTAAATCTTGCACAACCAGTTACATTTTTGACTATATTTTTAGGTATTGGAATTTTATACTTTATTTTACCTAACGCACGAATTAGAAAAGTACGTTATGTCATTCCAGGGACATTATTTTCAACGTTTGTTATTGGTTTTTTTAGTAATTTAATTAGCCAATACGTCTTAAATAGGGTTGAGAAAATGGTAGATATTAAAACGTTTGGTTCGGTCGTTATCTTTATCTTAATGCTATGGTTTATTTTCTTAGCCCACATTATGATTTTAGGTGCAATACTGAATGCCAGCGTTCAAGAAATTGCGACAGGAAAAATTGAATCAAGGCGTGGAGATATTATGTCTCTTATCCAAAAATCCAAAGAAGAAAAATAA

SEQ ID NO: 1608 - protein, 306 aa, Streptococcus agalactiae
MKLKKFFEDLLAKLEYRPIQVFMRHFQSAEMDLSAIAVAYYLLVTAFPLLVIAANIFPYFHINVSDLLSLMQKNLPKNIYEPASRLAVDAFSKPSTGILGFASLTAFWTMSKSLTSLQKAINKAYGVDQHRDFVISRLVGVGTGLIILFLLTFVLIFSTFSKPVLQIIVNMYDLGDTLTAWLLNLAQPVTFLTIFLGIGILYFILPNARIRKVRYVIPGTLFSTFVIGFFSNLISQYVLNRVEKMVDIKTFGSVVIFILMLWFIFLAHIMILGAILNASVQEIATGKIESRRGDIMSLIQKSKEEK

SEQ ID NO: 1609 - protein, 456 aa, Streptococcus agalactiae
ATGGTTAAATTAAAATCGTTACTGAAAAAAAGTATTCAAAATGAAGTCAGCTTATATTTACTGTTCGGACTATTAACATCCCTTCTTTATTTAGTTATTCGACAAGGGATTTTTAATTTCTCGCAGGACGCTCCATTCTCTGCAATAGTTGCTAACATAATAGCTATACTTTTTGCTTTTTTTACAAATGATCGATTTGTTTTTAAACAAACTAAAATTGGACAGCTTCAACGCTTACAAACATTTGTCATCGCTAGATTAGGCACATTAGGATTAGATTTGATATTAGCTGTTATTTTTGTTGATCAATTTCCTTCTATTATCGGACAATTCGTTCAGCACAATTTAAATAAAATCAACACCATTGAAAGCCTTGTATCTCAAATATTAATTATTTTACTCAACTACATCTTGAGCAAATTTGTTATTTTTAAAGACAAAAAAAGACAACTCTAA

SEQ ID NO: 1610 - protein, 151 aa, Streptococcus agalactiae
MVKLKSLLKKSIQNEVSLYLLFGLLTSLLYLVIRQGIFNFSQDAPFSAIVANIIAILFAFFTNDRFVFKQTKIGQLQRLQTFVIARLGTLGLDLILAVIFVDQFPSIIGQFVQHNLNKINTIESLVSQILIILLNYILSKFVIFKDKKRQL

SEQ ID NO: 1611 - protein, 510 aa, Streptococcus agalactiae
ATGAACACATTTACAACTCGCGATTACGCTCACATGGCTATTGTAACAGCTATCTATATCGTTTTAACCATAACGCCACCTTTTAATGCTATTGCTTATGGTGCTTATCAATTCCGTGTTTCAGAAATGCTAAATTTCTTGGCCTTTTACCACCGAAAATACCTTTTTGCGGTAACGTTAGGATGTATGATTTCTAATCTTTATAGTTTTGGAATGATTGATGTCTTTGTAGGTGGTGGTTCAACCTTACTTTTTGTTTATCTTGGAACCATTTTATTCAAGCAATATCAAAAAGATTATCTATTTAATGGCCTTATTAACAAAGCATTCTTTTTCTTTTCTTTCTTCTTTGCTGCTTCAATGATTACGGTAGCAGTTGAATTGAAAATTGTAGCAGGATTACCTTTATTATTAACATGGTTAACGACAGCTGTTGGTGAATTGGCTTCACTTTTGGTTGGAGCAGTCCTTGTGGATAAGTTGAGTAGACACGTCGATTTTACAAAATAA

SEQ ID NO: 1612 - protein, 169 aa, Streptococcus agalactiae
MNTFTTRDYAHMAIVTAIYIVLTITPPFNAIAYGAYQFRVSEMLNFLAFYHRKYLFAVTLGCMISNLYSFGMIDVFVGGGSTLLFVYLGTILFKQYQKDYLFNGLINKAFFFFSFFFAASMITVAVELKIVAGLPLLLTWLTTAVGELASLLVGAVLVDKLSRHVDFTK

SEQ ID NO: 1613 - protein, 1947 aa, Streptococcus agalactiae
ATGAATGAATTAGTATCTTTGTTGAATCAGTACGCAAAAGAGTATTATACACAAGATAATCCCACAGTTTCTGACAGTCAATATGACCAGTTATATCGAGAGTTAGTAGAATTAGAAAAGCAACATCCAGAAAACATTTTGCCAAATAGTCCCACACATCGAGTGGGTGGTTTAGTTTTAGAAGGCTTTGAAAAATACCAACATGAATATCCTTTGTATTCATTGCAGGATGCTTTCTCAAAAGAAGAATTGATAGCCTTTGATAAACGTGTTAAAGCAGAGTTTCCAACTGCTGCTTATATGGCAGAGCTGAAAATTGATGGTCTATCTGTCTCGTTGACTTATGTAAATGGTGTTTTACAGGTTGGGGCAACACGTGGTGATGGCAATATTGGAGAAAATATTACTGAAAATTTAAAGCGTGTTCATGATATTCCTCTACATTTAGACCAAAGTTTAGATATTACTGTTCGCGGAGAGTGCTACCTTCCCAAAGAATCTTTTGAAGCTATTAACATAGAAAAACGAGCAAATGGTGAGCAGGAATTTGCTAATCCTAGGAATGCAGCAGCAGGAACCTTGCGCCAATTAAACACAGGAATTGTTGCGAAACGTAAATTAGCAACTTTTCTTTATCAAGAAGCTAGCCCTACGCAAAAAGAAACACAAGATGATGTTTTAAAAGAGCTAGAAAGCTATGGCTTTTCAGTCAATCATCATCGTTTAATTAGCTCGTCTATGGAGAAAATTTGGGATTTTATCCAAACTATAGAAAAAGATAGAGTTTCCCTCCCTTATGATATCGATGGTATTGTTATTAAGGTTAATAGCTTAGCAATGCAAGAAGAGCTGGGCTTCACTGTAAAGGCACCTCGTTGGGCGATTGCATATAAATTTCCTGCTGAAGAAAAGGAAGCAGAAATATTATCTGTTGATTGGACAGTTGGGCGAACAGGAGTCGTAACACCAACAGCTAACCTAACTCCAGTTCAACTAGCAGGGACAACCGTTAGTAGGGCCACTCTGCATAATGTAGATTATATTGCCGAAAAAGATATCCGTATTGGAGATACTGTTGTTGTATACAAAGCAGGGGATATCATCCCTGCAGTCTTAAATGTCGTTATGAGTAAGCGAAACCAGCAAGAAGTCATGCTTATTCCTAAACTATGTCCTTCTTGTGGTAGTGAATTAGTTCATTTTGAAGGTGAGGTGGCTTTACGTTGTATTAATCCGCTGTGCCCCAACCAAATCAAAGAACGTTTAGCTCATTTTGCTAGCCGAGATGCTATGAATATTACAGGTTTTGGTCCATCCTTAGTCGAAAAATTATTTGATGCTCATTTAATAGCAGATGTTGCAGATATTTATCGTTTAAGTATAGAGAATTTATTAACTTTAGATGGTATTAAAGAGAAATCTGCAACTAAGATTTATCATGCAATCCAATCTTCAAAAGAAAATTCTGCTGAAAAACTTCTTTTTGGCCTAGGTATTCGTCATGTGGGAAGCAAGGCGAGCCGCCTTTTATTGGAGGAATTTGGTAATTTGAGGCAACTAAGTCAAGCAAGTCAAGAAAGTATTGCCTCAATTGATGGACTAGGAGGGGTTATTGCCAAATCACTTCATACCTTCTTTGAAAAAGAAGAGGTAGATAAACTACTAGAGGAATTAACTTCCTATAACGTTAATTTTAATTATCTAGGAAAACGAGTTAGTACAGATGCACAACTTTCAGGTTTAACAGTCGTTTTAACCGGTAAGCTTGAAAAAATGACTCGTAATGAAGCAAAAGAGAAATTACAAAACCTTGGTGCTAAGGTGACAGGTAGCGTTTCTAAAAAGACTGATTTAATTGTTGCAGGAAGCGATGCAGGAAGTAAACTAACCAAGGCTCAAGATTTAGGGATTACAATACAAGATGAAGACTGGTTACTCAACCTTTAA

SEQ ID NO: 1614 - protein, 648 aa, Streptococcus agalactiae
MNELVSLLNQYAKEYYTQDNPTVSDSQYDQLYRELVELEKQHPENILPNSPTHRVGGLVLEGFEKYQHEYPLYSLQDAFSKEELIAFDKRVKAEFPTAAYMAELKIDGLSVSLTYVNGVLQVGATRGDGNIGENITENLKRVHDIPLHLDQSLDITVRGECYLPKESFEAINIEKRANGEQEFANPRNAAAGTLRQLNTGIVAKRKLATFLYQEASPTQKETQDDVLKELESYGFSVNHHRLISSSMEKIWDFIQTIEKDRVSLPYDIDGIVIKVNSLAMQEELGFTVKAPRWAIAYKFPAEEKEAEILSVDWTVGRTGVVTPTANLTPVQLAGTTVSRATLHNVDYIAEKDIRIGDTVVVYKAGDIIPAVLNVVMSKRNQQEVMLIPKLCPSCGSELVHFEGEVALRCINPLCPNQIKERLAHFASRDAMNITGFGPSLVEKLFDAHLIADVADIYRLSIENLLTLDGIKEKSATKIYHAIQSSKENSAEKLLFGLGIRHVGSKASRLLLEEFGNLRQLSQASQESIASIDGLGGVIAKSLHTFFEKEEVDKLLEELTSYNVNFNYLGKRVSTDAQLSGLTVVLTGKLEKMTRNEAKEKLQNLGAKVTGSVSKKTDLIVAGSDAGSKLTKAQDLGITIQDEDWLLNL

SEQ ID NO: 1615 - protein, 1020 aa, Streptococcus agalactiae
ATGAAGAAACAAAAAAAAGCGCGTTTAATTTATAACCCAACTTCTGGTCAAGAAATTATGAAAAAAAATGTAGCGGAAGTTCTTGATATACTTGAAGGATTTGGGTATGAAACATCAGCCTTTCAAACAACACCAACTAAAAATTCTGCCAGAGATGAAGCTACTAGAGCTGCTCAAGCTGGTTTTGATTTGATTGTTGCAGCAGGTGGAGATGGTACTATTAATGAAGTTGTTAATGGTATTGCACCTTTGAAACGTCGTCCTAAGATGGCAATTATTCCAACTGGAACAACTAATGATTTTGCTCGTGCCTTAAAAATACCGCGAGGTAATCCTATTGAAGCAACTAAATTAATTGGTAAAAATCAAATCGTTAAGATGGACATTGGTCAAGCTCAAGAGGACAATTATTTTATTAATATTGCAGCTGCAGGTAGTTTGACAGAGTTAACTTATAGTGTACCAAGTCAATTGAAAACAACGTTTGGCTATCTTGCTTATCTAGCAAAGGGTGTTGAATTATTACCTCGAGTTCGAAAAGTACCAGTCAAAATTACTCACGATAAGGGTGAATTTATCGGTGATGCTTCAATGATTTTTGTTGCCATCACAAATTCTGTAGGAGGGTTTGAACAAATTGCACCTGATGCCAAATTGGATGATGGGAAATTTACCCTTATTTTAGTAAAAACTGCAAATCTTATTGAGATTATGCATCTCATTCGTTTGGTGCTAGCAGGTGGAAAACATATTAATGATAAACGAGTAGAGTATATTAAAACGTCTTATCTAACTATCGAACCCCTATCAGACGAGCGTATGATGATTAACTTAGATGGAGAATATGGAGGAGATGCTCCCATTACTCTAGCAAACCTTAAAAATCATATTAGGTTCTTTGCTAATACTGATGAAATTTCAGATGATGCTTTAGTTTTAGATAAAGATGAACTAGCGATAGAAGCTATTGCACAGAAGTTTGCTAATGAGGTAGATGATTTAGAAGGATTAGGAGATTGA

SEQ ID NO: 1616 - protein, 339 aa, Streptococcus agalactiae
MKKQKKARLIYNPTSGQEIMKKNVAEVLDILEGFGYETSAFQTTPTKNSARDEATRAAQAGFDLIVAAGGDGTINEVVNGIAPLKRRPKMAIIPTGTTNDFARALKIPRGNPIEATKLIGKNQIVKMDIGQAQEDNYFINIAAAGSLTELTYSVPSQLKTTFGYLAYLAKGVELLPRVRKVPVKITHDKGEFIGDASMIFVAITNSVGGFEQIAPDAKLDDGKFTLILVKTANLIEIMHLIRLVLAGGKHINDKRVEYIKTSYLTIEPLSDERMMINLDGEYGGDAPITLANLKNHIRFFANTDEISDDALVLDKDELAIEAIAQKFANEVDDLEGLGD

SEQ ID NO: 1617 - protein, 2301 aa, Streptococcus agalactiae
ATGGATAATACTGTCATTGTACATTACCATAGCCGAAAGAAAAATTACTTTAATTTAAGTTTATGGCAGTGGCGCGATGGCTCAGAGGGTCAAGATGCTCATTTTTCACGGTTTGACAGTTTCGGTGCTGTTGCGATACTAAAATATCCCTTGCCATATTTTTTAAGCCATTATTATGTGATTGTTAAGGATAAAAATTGGCATCATAAAACAATAGATTATCGCATTGATTGTACTCAAGGTGGTGCACGTAAAGAAGTTTGGATTGTAGATGGGGATGACAATCTGTATTATTCTCGTCAAGCAGCAGTTAGTAGCCATCATTATAGTAGACGCCAACCTCATGCCTACGACATGGCAATCAATAGTAGAGCGTTTGACAAAAAATGGGGATTTGATGGTTGGTTAGGTTTTGAATATTCAGAAACTAAAACGGCTTTTAGATTATGGGCCCCTACTGCGGAACGTGTAGAACTGATTTTATATCATTCGACAGATGAAACAGCAAGTGTATCAAAAGTTCTTTCTATGAAAAGAGGGACAGCCGTCAATTATAAAAATCATAAAGAAAATACCCATGGAGTCTGGTTTACTGAACTTGAAGGAAACTATAATTACCAAGCATATACTTATCGAGTCTACTATAGACGACGTACCTTTAAAATTACGAGAGACCCTTATTCCATTGCAACGACTGCAAATGGTAAAAGGTCTATTGTTATTGCTCCAGAAGCATTAACTCCGGAAGGGTTTAAAATAAGTCATGGAAAAGAAGCTAAGTGGCGGCTCGAAAACCCCAATCAAGCAGTCATTTACGAAATGCATGTGCGTGATTTTTCGATATCTGAGACTTCAGGAGTTAAGACAGATTATCACGGAAAATTTAAGGGATTGCATCAAAAAGGTACGGTTAATCAGCATGGTGATAAAACGACCTTTGATTATGTACAAGACCTAGGAGTTAACTATATCCAACTTCAACCAATTTTCGATCATCATCAGACATTTGATGATGATGGTCACTATGCTTATAATTGGGGATATGATCCTGAAAACTACAATGTTCCAGAAGCAAGCTTCTCTAGTAATCCACATGAACCTGCAACGCGTATTTTAGAATTAAAATCTGCTATCCAAGCGTACCATGATGCAGGCATTGGTGTTATTATGGATGTTGTCTATAATCATACTTTTTCATCAACTGATTCTGCATTTCAACTAACGGTTCCAGATTATTATTATCGAATGAATCACAATGGAACATTTCAAAATGGGTCAGGCTGTGGTAATGAAACAGCTAGTGAAAAAGAAATGTGTCGTAAGTATATTCTTGATTCAGTTTTGTATTGGGTGAAAGAATATAATATTGATGGTTTTCGATTTGATTTGATGGGACTACATGATGTAGAAACGATGAACATTATAAGAAATGAGCTAAATAAAATCGACCCTCGTATTTTGGTTTATGGAGAAGGATGGGACATGGGAGCTGGTCTCACGCCTCAAAATAAAGCTAAAAAAGATAATGCTTATCAGATGCCTGGAATTGGCTTTTTCAATGATGATGTAAGAGACGCTGTCAAAGGTGCGGAAATTTACGGAGAATTTAAAAAAGGCTTAGTTTCTGGAAACAGTACAGAAGATATTGTTGCAAAAGGCATTTTAGGAAGTGATGAGTTAGTATCATACATTGATCCTAGTCAAGTTTTAAATTATGTTGAAGCACATGACAACTACAACTTAAATGATTTGCTATGGGAATTACATCCTAATGACAACGAGAAACAACATATTTACCGAGTTGAAGTAGCTAGTGCTATGAATCTATTGATGCAAGGGATGGCTTTCATGCAATTAGGTCAGGAGTTTCTTCGAACAAAGTGTTATCCTACAGGTGATAAAGGTCAACTTACTCAAGCAGATAAAGAAAGGGCTATGAATTCTTACAATGCCCCAGACCAAGTTAATCAGGTCAACTGGGATAATGTTACCTTTCATAAGAGTACTATTAATTTTATTAGGAAAATAATTACTTTGAAGACAAACTCTCCTTACTTTTCTTATTCTAGCTTTGAAGAGATTCGCAAACATGTTTTTGTAGAGTCTGCTCAATACCATTCAGGTTTCATAAGTTTTACAGTCGAAGAACATAAGAAAATAAAAATAATTTTCAATATTAAAGGAAAACGCTTGCAGAATTCTTTCATAGGTGATATAATAATATCAAATCATGAAGAAGGAAAAGCGATAGATTCATTAGATGATGAGCTTTCTGTAATGATCCTTGATATCACAAAATAA

SEQ ID NO: 1618 - protein, 766 aa, Streptococcus agalactiae
MDNTVIVHYHSRKKNYFNLSLWQWRDGSEGQDAHFSRFDSFGAVAILKYPLPYFLSHYYVIVKDKNWHHKTIDYRIDCTQGGARKEVWIVDGDDNLYYSRQAAVSSHHYSRRQPHAYDMAINSRAFDKKWGFDGWLGFEYSETKTAFRLWAPTAERVELILYHSTDETASVSKVLSMKRGTAVNYKNHKENTHGVWFTELEGNYNYQAYTYRVYYRRRTFKITRDPYSIATTANGKRSIVIAPEALTPEGFKISHGKEAKWRLENPNQAVIYEMHVRDFSISETSGVKTDYHGKFKGLHQKGTVNQHGDKTTFDYVQDLGVNYIQLQPIFDHHQTFDDDGHYAYNWGYDPENYNVPEASFSSNPHEPATRILELKSAIQAYHDAGIGVIMDVVYNHTFSSTDSAFQLTVPDYYYRMNHNGTFQNGSGCGNETASEKEMCRKYILDSVLYWVKEYNIDGFRFDLMGLHDVETMNIIRNELNKIDPRILVYGEGWDMGAGLTPQNKAKKDNAYQMPGIGFFNDDVRDAVKGAEIYGEFKKGLVSGNSTEDIVAKGILGSDELVSYIDPSQVLNYVEAHDNYNLNDLLWELHPNDNEKQHIYRVEVASAMNLLMQGMAFMQLGQEFLRTKCYPTGDKGQLTQADKERAMNSYNAPDQVNQVNWDNVTFHKSTINFIRKIITLKTNSPYFSYSSFEEIRKHVFVESAQYHSGFISFTVEEHKKIKIIFNIKGKRLQNSFIGDIIISNHEEGKAIDSLDDELSVMILDITK

SEQ ID NO: 1619 - protein, 1869 aa, Streptococcus agalactiae
ATGTCCAATAAAGATGAGTTATATACTTTTGGAATAGGTGAAAATTTTCATCTCCAGAATTATTTAGGCGTACATAGCGAAAATGGAAGCTTTTGTTTCAGAGTTTGGGCTCCTAATGCTGAAAATGTTCAAGTTATTGGAGATTTTACAGATTGGCGAAATCGACCTCTCCAAATGAACAAAAATCAAGCAGGAGTTTGGGAAGCTAACAGTTTGGATGCGCGCGAAGGTGATTTATATAAATATTTGGTTACTCGTAAAGGTGGTCAAGTAGTTGAGAAAATCGATCCTATGGCAGTTTATATGGAAAGACGTCCTGGAACTGCAAGTGTTATTAAAGTTCTTAGAAATAAAAAGTGGGAAGATGGTCTTTGGATGGGAAGGCGCAAACGTCTGGGTTTTCAGAAGCGTCCAATTAATATTTACGAAGTTCATGCTGGTTCATGGAAAAAAGATGATTTTGGACATCCTATGACTTTTTCTCAGTTAAAAGATTACTTAATCCCCTACCTTGTTGAGATGAATTATACTCATGTTGAATTTATGCCCTTAATGGCACATCCGCTTGATATGAGTTGGGGATATCAATTAATGGGGTATTTTGCTTTTGAACATACCTATGGTACTCCAGAAGAATTTCAAGACTTTGTAGAAGCATGTCATAAAAATAATATAGGAGTTCTTGTAGATTGGGTTCCAGGACACTTTATTCAGAATGACGATGCTTTAGCCTATTTCGATGGAACTGCTACTTATGAGTATCAAAATCATGATCGTGCGCATAACTATCGATGGGGAGCTCTGAACTTTGATTTAGGAAAAAATCAAGTACAATCCTTTTTGATTTCGAGTGCCTTGTTCTGGATTGAACATTATCATATTGATGGTATTCGTGTTGATGCGGTTAGTAATATGTTATATCTCGATTATGATGAAGGACCATGGGAAGCTAACCAATTTGGGGATAATCGTAATTTGGAAGGATATCACTTTTTAAGGAAACTTAACAAAGTAATTAAAGAGCGTCATCCTAATGTTATGATGATTGCTGAAGAGTCAACAGCTTCTACCCCAATAACTAAAGACTTAGAGTCTGGAGGATTGGGTTTTGACTTTAAATGGAATATGGGCTGGATGAATGATATCCTGCGTTTTTATGAAGAAGATCCTCTCTATAGGCAATATGATTTTAATTTAGTGACTTTTAGTTTTATGTATATATTCAATGAGAACTTTGTACTAGCTTTTTCACATGATGAAGTAGTACATGGTAAAAAGAGTATGATGCATAAAATGTGGGGTGACCGTTATAATCAATTTGCTGGTTTACGTAATTTATATGCATATCAAATGTGTCATCCTGGGAAAAAACTTCTCTTTATGGGAAGTGAGTTTGGTCAATTTTTAGAATGGAAATATAATGATCAACTAGAATGGGAAAACTTAAATGATGATATGAACCAAAAGATGCAACGCTATACTAAACAATTGAATCAATTTTATAAAGATCATAAGTGCCTATGGCGTATTGATGATTCCTTTGACGGGCTAGAAATTATTGATGCGGATAATAAATCTGAAACTGTTTTATCTTTTATACGAAAAGATGATAAAGGCGATTTGTTACTTTGTGTCTTTAATATGACTCCTGTAGAACGCCCTAACTTTACTATTGGTGTTCCGCAAGCGGGTATTTATGAAGAAGTTTTAAATACTGAAATGGAAGAGTTTGGAGGTGTTTGGAAAAACCACAATCCTGTAACGAAAACACAAGTGGCTACATGGAAAGATTATGATCATACTTTAAGTTTTACATTACCAGCCCTTGGGGCAAGTGTTTGGAGAATAAAACGTCGGCTTCGTAAATAA

SEQ ID NO: 1620 - protein, 622 aa, Streptococcus agalactiae
MSNKDELYTFGIGENFHLQNYLGVHSENGSFCFRVWAPNAENVQVIGDFTDWRNRPLQMNKNQAGVWEANSLDAREGDLYKYLVTRKGGQVVEKIDPMAVYMERRPGTASVIKVLRNKKWEDGLWMGRRKRLGFQKRPINIYEVHAGSWKKDDFGHPMTFSQLKDYLIPYLVEMNYTHVEFMPLMAHPLDMSWGYQLMGYFAFEHTYGTPEEFQDFVEACHKNNIGVLVDWVPGHFIQNDDALAYFDGTATYEYQNHDRAHNYRWGALNFDLGKNQVQSFLISSALFWIEHYHIDGIRVDAVSNMLYLDYDEGPWEANQFGDNRNLEGYHFLRKLNKVIKERHPNVMMIAEESTASTPITKDLESGGLGFDFKWNMGWMNDILRFYEEDPLYRQYDFNLVTFSFMYIFNENFVLAFSHDEVVHGKKSMMHKMWGDRYNQFAGLRNLYAYQMCHPGKKLLFMGSEFGQFLEWKYNDQLEWENLNDDMNQKMQRYTKQLNQFYKDHKCLWRIDDSFDGLEIIDADNKSETVLSFIRKDDKGDLLLCVFNMTPVERPNFTIGVPQAGIYEEVLNTEMEEFGGVWKNHNPVTKTQVATWKDYDHTLSFTLPALGASVWRIKRRLRK

SEQ ID NO: 1621 - protein, 390 aa, Streptococcus agalactiae; identical to SEQ ID NO: 881

SEQ ID NO: 1622 - protein, 129 aa, Streptococcus agalactiae; identical to SEQ ID NO: 882

SEQ ID NO: 1623 - protein, 384 aa, Streptococcus agalactiae; identical to SEQ ID NO: 879

SEQ ID NO: 1624 - protein, 127 aa, Streptococcus agalactiae; identical to SEQ ID NO: 880

SEQ ID NO: 1625 - protein, 1140 aa, Streptococcus agalactiae
ATGAAAAATGAAATGTTAGCACTCATTCTCGCCGGAGGACAAGGCACTCGACTCGGAAAATTGACTCAGAGCATTGCGAAACCTGCTGTTCAATTTGGAGGTCGTTACCGTATTATTGACTTTGCGCTTTCAAATTGTGCGAATTCAGGTATTAATAATGTTGGAGTTATTACTCAGTATCAACCGCTGGAACTCAATACTCATATTGGAAACGGATCTAGCTGGGGACTAGATGGTATCGATTCGGGAGTAACTGTATTACAGCCATATTCTGCAACAGAAGGTAATCGCTGGTTTCAAGGTACCAGCCACGCTATCTATCAAAATATTGACTACATTGATCGTATTAATCCAGAATATGTACTCATTCTCTCTGGGGACCACATCTATAAAATGAACTATGATGACATGCTACAGACGCATAAAGATAATTTAGCAAGCCTAACAGTCGCTGTTTTAGATGTTCCTTTAAAAGAAGCAAGCCGTTTTGGAATTATGAATACTGATTCAAACGACCGTATTGTCGAATTTGAAGAAAAACCTGAACATCCTAAGTCAACAAAGGCTTCAATGGGAATATACATTTTTGACTGGAAGAGATTACGGACAGTTTTAATTGATGGTGAAAAGAACGGCATAGACATGTCAGACTTTGGTAAAAATGTTATACCAGCATACCTTGAATCGGGTGAACGTGTTTATACCTATAATTTTGATGGGTATTGGAAAGATGTTGGTACTATTGAATCCCTTTGGGAAGCTAATATGGAATATATTGGAGAAGATAACAAATTACATAGTCGTGATCGTTCATGGAAAATCTATTCTAAAAATTTGATTGCACCACCTAATTTCATGACAGAAGATGCAAATGTTAAAGATTCTTTAGTTGTAGATGGATGCTTTGTTGCAGGAAATGTTGAGCACTCCATTTTATCAACTAATGTCCAGGTAAAACCAAATGCTATTATTAAAGACTCCTTTGTTATGAGTGGCGCGACTATCGGTGAAGGTGCAAAGATAAATCGAGCTATTATCGGTGAGGATGCTGTTATTGGTGATGGTGTTGTGATTGATGGAAGTAAAGAAGTAGAAGTTATTGGTTATAAAGAAGTAGCGGGGGTTCCAAATGAAGATTGA

SEQ ID NO: 1626 - protein, 379 aa, Streptococcus agalactiae
MKNEMLALILAGGQGTRLGKLTQSIAKPAVQFGGRYRIIDFALSNCANSGINNVGVITQYQPLELNTHIGNGSSWGLDGIDSGVTVLQPYSATEGNRWFQGTSHAIYQNIDYIDRINPEYVLILSGDHIYKMNYDDMLQTHKDNLASLTVAVLDVPLKEASRFGIMNTDSNDRIVEFEEKPEHPKSTKASMGIYIFDWKRLRTVLIDGEKNGIDMSDFGKNVIPAYLESGERVYTYNFDGYWKDVGTIESLWEANMEYIGEDNKLHSRDRSWKIYSKNLIAPPNFMTEDANVKDSLVVDGCFVAGNVEHSILSTNVQVKPNAIIKDSFVMSGATIGEGAKINRAIIGEDAVIGDGVVIDGSKEVEVIGYKEVAGVPNED

SEQ ID NO: 1627 - protein, 1134 aa, Streptococcus agalactiae
ATGAAGATTGATAAATATACTGCGATTTTAGGAAATACTGTTAGTTACCCAGATATGCACAGTTTGACGGATAATCGTCCGCTTGCTTCTCTACCTTTTGATGGTAAGTATCGTTTAATTGATTTTCAATTATCCTCTTTAGCTAATGCAGGCGTTAGAAGTATTTATGGTATTTTTCGTGGGAATAATGTTCGCTCTGTTTTTGACCATATTAGAAGTGGTCGTGAGTGGGGCTTAGGTACACTGTTGAGTCACTATTCTTTAGGATTCTATGATACAGACGATGATACTCGTACAGTCAATGGGGATTATTACGATCAAATTTTAACTTACTTGAGGCGTTCGGGTAGCGACCAGACGATATATATGAGTTGTGATATGCTTTGTAATATTGACTTAAGTCAAGTAATCCACTTGCATAATGCAAATGGTGCGCAAGCCACCGTGGTTTATAAAAAAATGCCGAGATCAGCTATTGCAGAGGCTAATCAAGTCTTGACCATTGATGAATCTGATCATGTAGTGAGTCTAGGTAAAGCTGTAGATAATGACGATAACCAAAAAATGTCTGCTGAGATTTATGTTATCGATACACCTTGGTTAATCGAAAAAATGGAAGAGGAAGCTCAAAATAATGAACCACGTAAACTCCGCTTCTTACTTCGTGATTTAATTGTTGAAAGTAATGCTTTGGCTTTTGAATACACTGGTTATTTGTCAAACATTTCTTCTATTAAATCCTATTATGATGCTAACATGGACATGTTAACACCAAATAAATTTTATTCGCTCTTCTTTTCAAACCAAAAAGTTTATACTAAGGTGAAAAATGAGGAAGCTACTTATTTTGATAAACAATCAAATGTCTCTAATTCGCAACTAGCCTCTGGAAGTATTATTAAAGGTTATTTAGACCATTCTATCGTTTCTAGAAATTGTCTCCTTGAAAAAGGGACTCGAGTAGTCAATAGTATTATCTTTCCAAAAGTAAAAATCGGAGAAGGGGCAACCATTGAAAATACTATTATTGACAAATGCGTTAAGGTTGCATCCGGAGTTACATTGAAAGGTAGTTTAGATAAACCGTTAGTGATTCCTAAATTTTCAGAGATTAATGAGGATATTATACAATGA

SEQ ID NO: 1628 - protein, 377 aa, Streptococcus agalactiae
MKIDKYTAILGNTVSYPDMHSLTDNRPLASLPFDGKYRLIDFQLSSLANAGVRSIYGIFRGNNVRSVFDHIRSGREWGLGTLLSHYSLGFYDTDDDTRTVNGDYYDQILTYLRRSGSDQTIYMSCDMLCNIDLSQVIHLHNANGAQATVVYKKMPRSAIAEANQVLTIDESDHVVSLGKAVDNDDNQKMSAEIYVIDTPWLIEKMEEEAQNNEPRKLRFLLRDLIVESNALAFEYTGYLSNISSIKSYYDANMDMLTPNKFYSLFFSNQKVYTKVKNEEATYFDKQSNVSNSQLASGSIIKGYLDHSIVSRNCLLEKGTRVVNSIIFPKVKIGEGATIENTIIDKCVKVASGVTLKGSLDKPLVIPKFSEINEDIIQ

SEQ ID NO: 1629 - protein, 1431 aa, Streptococcus agalactiae
ATGAAAATAATGTTTGTTGCGGCAGAGGGTGCTCCCTTTGCTAAAACAGGTGGTTTGGGAGATGTGATTGGCGCACTCCCAAAATCACTTAGTAAAAAAGGTCATGATGTCGCTGTTGTCATGCCATATTATGATATGGTAGACCAAAAATTTGGAGACCAAATAGAAAACCTCATGTATTTCTATACAGATGTTGGCTGGCGTCATCAATATGTAGGAGTTAAGAGACTTTCTCAAGATAATGTTACGTTCTACTTTATTGATAATCAATATTATTTTTATAGAGGTCATGTCTATGGTGATTGGGATGATGGGGAGCGTTTTGCTTATTTCCAATTAGCTGCTTTAGAGTTGATGGAGAAAATCGATTTTATTCCCGATGTCTTACACGTCCATGATTATCATACAGCAATGATTCCTTTCTTATTGAAAGAGAAGTACCACTGGATTCAGGCCTATAATAATATAAGAGCAGTTTTTACTATTCACAATATTGAATTTCAAGGGCAGTTTGGTCCAGAAATGTTAGGAGATTTATTTGGAGTTGGCGCTGAGAGATATGAAGATGGAACTCTTAGATGGAATAATTGTCTTAATTGGATGAAAGCAGCAATTCTTTACTCAGATAGAGTGACAACGGTATCACCAAGCTACGCAAATGAAATAAAAACTCCAGAATTTGGTAAAGGTTTAGATCAAATTATGCGTATGGAAGCAGGCAAATTATCTGGAATTGTAAATGGTATTGATAGCGATTTGTTAAATCCAGAAACAGATGCTTTTTTGCCATATCATTTTTCAAAAAGCAACTTAGAGGGCAAAATTAAAAATAAGTTGGCTTTACAGGAAAATTTGGGCTTACCTCAAGATAAAAATGTACCATTAATTGGTATTGTTTCACGACTTACCGATCAAAAAGGATTTGATATTATTGCTTCTGAATTGGACAATATGCTTCAACAAGATATTCAAATGGTTATTTTAGGAACAGGCTATCACCATTTTGAAGAAACGTTCTCTTATTTTGCTAGTCGTTACCCTGAAAAACTATCTGCTAATATTACTTTTGACTTAAGATTAGCGCAACAGATTTATGCGGCTTCAGATATCTTCATGATGCCAAGTGCTTTTGAACCTTGTGGTCTCTCGCAGATGATGGCTATGAGATATGGTAGCTTGCCCTTGGTACATGAAGTTGGAGGATTAAAAGATACTGTGGTAGCCTTCAATCAATTTGATGGTAGTGGTACAGGTTTTTCATTTAATCATTTTTCAGGCTATTGGTTAATGCAAACTCTAAAACTAGCATTAGAAGTTTATAATGATTATCCTGAAGCGTGGAAAAAGTTACAATGGCAAGCTATGTCAAAAGATTTTTCATGGGATACAGCATGTGTTGCTTACGAACAACTGTATCAGCAACTACAATAA

SEQ ID NO: 1630 - protein, 476 aa, Streptococcus agalactiae
MKIMFVAAEGAPFAKTGGLGDVIGALPKSLSKKGHDVAVVMPYYDMVDQKFGDQIENLMYFYTDVGWRHQYVGVKRLSQDNVTFYFIDNQYYFYRGHVYGDWDDGERFAYFQLAALELMEKIDFIPDVLHVHDYHTAMIPFLLKEKYHWIQAYNNIRAVFTIHNIEFQGQFGPEMLGDLFGVGAERYEDGTLRWNNCLNWMKAAILYSDRVTTVSPSYANEIKTPEFGKGLDQIMRMEAGKLSGIVNGIDSDLLNPETDAFLPYHFSKSNLEGKIKNKLALQENLGLPQDKNVPLIGIVSRLTDQKGFDIIASELDNMLQQDIQMVILGTGYHHFEETFSYFASRYPEKLSANITFDLRLAQQIYAASDIFMMPSAFEPCGLSQMMAMRYGSLPLVHEVGGLKDTVVAFNQFDGSGTGFSFNHFSGYWLMQTLKLALEVYNDYPEAWKKLQWQAMSKDFSWDTACVAYEQLYQQLQ

SEQ ID NO: 1631 - protein, 201 aa, Streptococcus agalactiae
ATGAATTTAGCTATTTTAGCACTTGGTTTCGCCGTGATGGGTGTTTCAATCGGTGAAGGAATTTTGGTTGCAAATATTGCCAAATCAGCGGCTCGTCAGCCTGAAATGTTTAGCAAACTGCAAACATTGATGTTTACAGGTGTGGCCTTCATTGAAGGTACCTTCTTCGTTCTATTTGCGTTTACATTCTTAGTAAGATAG

SEQ ID NO: 1632 - protein, 66 aa, Streptococcus agalactiae
MNLAILALGFAVMGVSIGEGILVANIAKSAARQPEMFSKLQTLMFTGVAFIEGTFFVLFAFTFLVR

SEQ ID NO: 1633 - protein, 717 aa, Streptococcus agalactiae
TTGGAATCTACAAGTAATCCAACCGTATCTTTTTTAGGCATTGATTTTGATTTAACCATCCTAGCTATGTCTCTCTTGACAATTACTATTATCTTTATCTTAGTCTTCTGGGCTAGTCGTAAGATGACAATAAAACCAAAAGGTAAGCAGAATGTCTTAGAATATGTCTATGAGCTTGTTAATAATACAATCTCACAAAATTTAGGACACTATACTAAAAATTATAGTTTATTGATGTTTATTTTATTCAGTTTTGTCTTCATTGCTAACAACTTAGGATTGATGACATCATTGAAAACACATGAGCATAATTTTTGGACATCTCCGACCGCTAATTTTGGTGTAGATATTACATTATCATTATTAGTAGCATTTATTTGTCATATTGAAGGTATTCGCAAAAAAGGAATTGGTGGTTATCTCAAAGGTTTCTTATCACCAACACCAGCAATGCTTCCGATGAATTTATTGGAAGAAGTTACTAATGTTGCTTCATTAGCATTGCGTCTTTTTGGTAATATCTTTTCTGGTGAAGTTGTCACTGGATTACTTTTACAACTTGCAGTTTTATCACCATTTACAGGTCCACTAGCTTTTGCATTGAATATCGTTTGGACAGCATTCTCAATGTTTATTGGTTTCATCCAAGCGTATGTGTTCATTATCTTGAGCTCAAGTTATATTGGACACAAAGTTCATGGTGACGAAGAAGAATAA

SEQ ID NO: 1634 - protein, 238 aa, Streptococcus agalactiae
MESTSNPTVSFLGIDFDLTILAMSLLTITIIFILVFWASRKMTIKPKGKQNVLEYVYELVNNTISQNLGHYTKNYSLLMFILFSFVFIANNLGLMTSLKTHEHNFWTSPTANFGVDITLSLLVAFICHIEGIRKKGIGGYLKGFLSPTPAMLPMNLLEEVTNVASLALRLFGNIFSGEVVTGLLLQLAVLSPFTGPLAFALNIVWTAFSMFIGFIQAYVFIILSSSYIGHKVHGDEEE

SEQ ID NO: 1635 - protein, 437 aa, Streptococcus agalactiae
ATGTCAATACTTATTAATAGTACAACGATTGGTGATATCATTATCGTATCTGGCTCTGTGCTTCTCTTATTTATCTTAATTAAGACTTTTGCATGGAAACAAATCACAGGTATTTTTGAAGCCCGTGAACAAAAGATAGCTAATGATATTGATACTGCTGAACAGGCACGTCAACAAGCTGAAGCTTTTGCAACTAAGCGCGAGGAAGAACTATCTAACGCTAAAACTGAAGCTAATCAAATCATTGATAACGCTAAAGAGACAGGTCTTGCAAAAGGTGATCAAATTATTTCAGAAGCAAAACTGAAGCTGATCGATTAAAAGAAAAAGCACATCAAGATATTGCCCAAAATAAGGCAGAAGCACTAGCAGATGGTAAGGGTGAAGTAGCAGATTTAACAGTTTTATTAGCTGAAAAAATATGGTATCAATCTTGA

SEQ ID NO: 1636 - protein, 145 aa, Streptococcus agalactiae
MSILINSTTIGDIIIVSGSVLLLFILIKTFAWKQITGIFEAREQKIANDIDTAEQARQQAEAFATKREEELSNAKTEANQIIDNAKETGLAKGDQIISEAKTEADRLKEKAHQDIAQNKAEALADGKGEVADLTVLLAEKIWYQS

SEQ ID NO: 1637 - protein, 144 aa, Streptococcus agalactiae
ATGAATGNNNNNTCCCTAGCTTTTGCATTGAATATCGTTTGGACAGCATTCTCAATGTTTATTGGTTTCATCCAAGCGTATGTGTTCATTATCTTGAGCTCAAGTTATATTGGACACAAAGTTCATGGTGACGAAGAAGAATAA

SEQ ID NO: 1638 - protein, 47 aa, Streptococcus agalactiae
  VARIANT 3, 4: Xaa = Any Amino Acid
MNXXSLAFALNIVWTAFSMFIGFIQAYVFIILSSSYIGHKVHGDEEE

SEQ ID NO: 1639 - protein, 497 aa, Streptococcus agalactiae
ATGTCAATACTTATTAATAGTACAACGATTGGTGATATCATTATCGTATCTGGCTCTGGCTTCTCTTATTTATCTTAATTAAGACTTTTGCATGGAAACAAATCACAGGTATTTTTGAAGCCCGTGAACAAAAGATAGCTAATGATATTGATACTGCTGAACAGGCACGTCAACAAGCTGAAGCTTTTGCAACTAAGCGCGAGGAAGAACTATCTAACGCTAAAACTGAAGCTAATCAAATCATTGATAACGCTAAAGAGACAGGTCTTGCAAAAGGTGATCAAATTATTTCAGAAGCAAAAACTGAAGCTGATCGATTAAAAGAAAAAGCACATCAAGATATTGCCCAAAATAAGGCAGAAGCACTAGCAGATGTTAAGGGTGAAGTAGCAGATTTAACAGTTTTATTAGCTGAAAAAATTATGGTATCAAATCTTGATAAAGAAGCTCAGAGTAATCTCATTGATAGCTATATTAAAAAGCTAGGAGATGCCTAA

SEQ ID NO: 1640 - protein, 165 aa, Streptococcus agalactiae
MSILINSTTIGDIIIVSGSVLLLFILIKTFAWKQITGIFEAREQKIANDIDTAEQARQQAEAFATKREEELSNAKTEANQIIDNAKETGLAKGDQIISEAKTEADRLKEKAHQDIAQNKAEALADVKGEVADLTVLLAEKIMVSNLDKEAQSNLIDSYIKKLGDA

SEQ ID NO: 1641 - protein, 537 aa, Streptococcus agalactiae
ATGAATAAAAAGACGCAGGCTCTAATTGAGCAATATTCAAAAAGCCTTGTTGAAGTTGCCATTGAACATAAAATTGTTGAAAAAATCCAACAAGAAGTAGCAGCTTTAATTGATATTTTTGAAACAAGCGAGCTTGAGGGTGTCCTGTCAAGTCTTGCCGTTTCACATGATGAAAAACAACATTTTGTGAAGACATTGCAAACATCATGTTCAACTTATCTTGTTAATTTCCTTGAGGTTATTGTACAAAATGAACGTGAAGCACTTCTATATCCTATTTTGAAATCAGTTGATCAGGAACTTATCAAAGTGAATGGTCAATATCCAATTCAAATTACAACTGCAGTTGCTTTGTCTCCAGAACAAAAAGAACGTCTTTTTGATATTGCTAAAACTAAATTAGCTTTACCAAATGGACAGTTAGTTGAGCACATTGACCCATCTATTGTTGGTGGATTTGTTGTCAATGCAAACAATAAAGTAATTGATGCAAGTGTTCGTAATCAATTACATCAATTTAAAATGAAATTAAAATAG

SEQ ID NO: 1642 - protein, 178 aa, Streptococcus agalactiae
MNKKTQALIEQYSKSLVEVAIEHKIVEKIQQEVAALIDIFETSELEGVLSSLAVSHDEKQHFVKTLQTSCSTYLVNFLEVIVQNEREALLYPILKSVDQELIKVNGQYPIQITTAVALSPEQKERLFDIAKTKLALPNGQLVEHIDPSIVGGFVVNANNKVIDASVRNQLHQFKMKLK

SEQ ID NO: 1643 - protein, 1506 aa, Streptococcus agalactiae
TTGGCAATTAATGCACAAGAAATTAGCGCTTTAATTAAAAAGCAAATTGAAGACTTCCAGCCAAATTTTGACGTCACAGAAACTGGTATTGTTACATATATCGGTGATGGTATTGCTCGTGCTCGTGGGCTAGATAATGCTATGAGTGGAGAACTTCTTGAATTTTCAAATGGTGCGTACGGTATGGCTCAAAACCTTGAGTCTAATGACGTGGGTATCATTATTTTGGGTGATTTCTCAGAAATTCGTGAAGGTGATGTGGTAAAACGTACTGGTAAAATTATGGAAGTACCAGTAGGGGAAGCTATGATTGGACGTGTCGTCAATCCGCTTGGTCAACCAGTTGATGGACTAGGTGAAATTGAGACGACAGCAACACGCCCAGTTGAAACACCAGCACCTGGTGTTATGCAACGTAAATCAGTTTTTGAGCCTCTTCAAACAGGTCTCAAAGCGATTGATGCTTTGGTTCCTATCGGACGTGGTCAACGCGAATTGATTATCGGTGACCGCCAAACTGGTAAGACGTCTGTAGCGATTGATGCAATCTTGAATCAAAAAGGTCAAGATATGATCTGTATCTATGTGGCTATCGGTCAAAAAGAGTCTACAGTACGTACACAAGTTGAAACTTTGCGTAAATACGGTGCCCTTGATTATACAATCGTTGTGACAGCTTCAGCATCACAACCATCTCCATTACTTTTCATTGCTCCATATGCAGGAGTAGCAATGGCTGAGGAATTCATGTATAACGGGAAACACGTTTTGATTGTTTATGATGATTTATCAAAACAAGCCGTAGCTTATCGTGAACTTTCGCTTCTTCTTCGCCGTCCTCCAGGTCGCGAAGCTTACCCAGGGGATGTTTTCTACCTTCATAGTCGTCTTTTGGAACGTTCAGCTAAAGTATCAGATGCTTTAGGTGGAGGTTCGATTACAGCGCTTCCGTTCATTGAAACACAAGCAGGTGATATCTCAGCATATATTGCTACAAACGTTATTTCAATTACTGACGGCCAAATTTTCTTGCAAGAAAATCTCTTTAACTCAGGTATTCGTCCAGCGATTGATGCAGGTTCATCAGTATCTCGTGTTGGTGGTGCAGCGCAAATTAAAGCGATGAAGAGAGTTGCAGGTACGCTTCGTCTAGATCTTGCTTCTTATCGCGAACTTGAGGCATTCACTCAATTTGGTTCAGACCTTGATGCAGCAACACAAGCAAAACTAAATCGTGGTCGTCGCACAGTGGAAGTGTTAAAACAACCATTACACAAACCATTACCAGTTGAGAAACAAGTTGTGATTTTATATGCTCTAACACATGGATTCCTTGATGATGTACCTGTAAATGATATTTTAGCTTTTGAAGAAGCTTTGTATGATTACTTTGATGCTCATTATGATAATCTCTTCGAAACAATCCGCACAACAAAAGATTTACCAGAAGAAGCAGAATTAGATGCTGCTATTCAAGCATTTAAAGATCAATCACAATTTAAATAA

SEQ ID NO: 1644 - protein, 501 aa, Streptococcus agalactiae
MAINAQEISALIKKQIEDFQPNFDVTETGIVTYIGDGIARARGLDNAMSGELLEFSNGAYGMAQNLESNDVGIIILGDFSEIREGDVVKRTGKIMEVPVGEAMIGRVVNPLGQPVDGLGEIETTATRPVETPAPGVMQRKSVFEPLQTGLKAIDALVPIGRGQRELIIGDRQTGKTSVAIDAILNQKGQDMICIYVAIGQKESTVRTQVETLRKYGALDYTIVVTASASQPSPLLFIAPYAGVAMAEEFMYNGKHVLIVYDDLSKQAVAYRELSLLLRRPPGREAYPGDVFYLHSRLLERSAKVSDALGGGSITALPFIETQAGDISAYIATNVISITDGQIFLQENLFNSGIRPAIDAGSSVSRVGGAAQIKAMKRVAGTLRLDLASYRELEAFTQFGSDLDAATQAKLNRGRRTVEVLKQPLHKPLPVEKQVVILYALTHGFLDDVPVNDILAFEEALYDYFDAHYDNLFETIRTTKDLPEEAELDAAIQAFKDQSQFK

SEQ ID NO: 1645 - protein, 882 aa, Streptococcus agalactiae
ATGGCAGGCTCTCTTAGTGAAATTAAAGACAAGATTCTCTCTACAGAAAAAACAAGTAAGATTACTAGTGCGATGCAGATGGTCTCATCTGCTAAGTTGGTTAAATCTGAACAAGCTGCTAGAGATTTTCAAGTGTATGCCTCTAAAATTCGTCAAATTACTACTAACCTCTTAAAGTCAGACTTAGTATCTGGATCAGATAACCCTATGTTATCTTCACGTCCGGTGAAGAAAACAGGTTATATTGTTATTACTTCTGATAAGGGTTTAGTTGGTGGTTACAATTCAAAAATCTTAAAAGCGATGATGGACACTATAACTGACTATCATACTGAGAATGATGATTATGCCATCATTTCAATTGGTAGTGTTGGTTCTGATTTTTTCAAAGCACGTGGAATGAATGTTTCTTTCGAATTACGTGGTTTAGAGGACCAACCAAGTTTTGATCAAGTTGGTAAAATTATTGCTCAAGCAGTTGAAATGTACAAAAATGAGTTGTTCGATGAATTATATGTTTGCTACAATCACCATGTTAACAGTTTAACTAGCCAAGTCAGAATGCAACAAATGCTTCCTATCAAAGAATTGGATGCAGAAGAGGCTTCTGAGGATAGAGTGATTACTGGTTTTGAACTTGAGCCAAACCGTGAAGTTATATTGGAGCAATTATTGCCTCAATATACTGAGAGTTTGATTTATGGAGCTATTATTGATGCTAAAACAGCAGAGCATGCGGCTGGTATGACAGCTATGCAGACTGCAACTGATAATGCTAAAAATGTTATCAATGATTTAACTATTCAATATAACCGCGCTCGTCAAGCAGCTATCACACAGGAAATTACAGAAATTGTTGCAGGTGCTAATGCACTTGAATAA

SEQ ID NO: 1646 - protein, 293 aa, Streptococcus agalactiae
MAGSLSEIKDKILSTEKTSKITSAMQMVSSAKLVKSEQAARDFQVYASKIRQITTNLLKSDLVSGSDNPMLSSRPVKKTGYIVITSDKGLVGGYNSKILKAMMDTITDYHTENDDYAIISIGSVGSDFFKARGMNVSFELRGLEDQPSFDQVGKIIAQAVEMYKNELFDELYVCYNHHVNSLTSQVRMQQMLPIKELDAEEASEDRVITGFELEPNREVILEQLLPQYTESLIYGAIIDAKTAEHAAGMTAMQTATDNAKNVINDLTIQYNRARQAAITQEITEIVAGANALE

SEQ ID NO: 1647 - protein, 1407 aa, Streptococcus agalactiae
ATGAGCTCAGGCAAAATTGCTCAGGTAGTTGGACCTGTCGTTGACGTTGTATTTGCAAGTGGCGACAAACTTCCTGAGATTAATAATGCATTGATTGTCTATAAAAATGGCGATAAGTCACAAAAAGTAGTACTTGAAGTTGCTCTTGAACTTGGTGACGGCCTCGTTCGTACAATCGCTATGGAATCAACTGATGGGCTTACACGTGGTTTGGAAGTATTAGATACTGGTCGCGCAATTAGTGTGCCGGTTGGTAAGGATACTTTGGGTCGTGTCTTCAACGTTCTTGGAGATGCTATTGACCTTGAAGAGCCTTTTGCAGAAGATGCAGAACGTCAACCAATCCATAAAAAAGCACCATCGTTTGATGAATTATCAACATCATCAGAAATCTTAGAAACTGGTATTAAAGTTATTGACTTATTAGCACCTTACTTAAAAGGTGGTAAAGTTGGACTTTTCGGTGGTGCAGGTGTTGGTAAAACCGTTCTTATTCAAGAATTAATCCACAACATCGCCCAAGAACATGGTGGTATTTCAGTATTTACTGGTGTAGGAGAACGTACTCGTGAAGGGAATGACCTTTATTGGGAAATGAAAGAATCTGGCGTTATTGAAAAAACGGCTATGGTCTTTGGTCAAATGAATGAACCACCAGGAGCACGTATGCGTGTGGCACTTACTGGTCTTACAATAGCTGAGTACTTCCGTGATGTAGAAGGACAAGATGTGCTTCTCTTCATTGATAATATCTTCCGTTTCACACAAGCTGGGTCAGAAGTGTCAGCGCTTTTAGGTCGTATGCCTTCAGCCGTTGGTTATCAACCAACACTTGCTACAGAAATGGGACAATTACAAGAGCGTATCACTTCAACTAAAAAAGGTTCTGTTACATCAATCCAAGCTATTTATGTGCCAGCAGATGACTATACTGACCCTGCGCCAGCTACAGCCTTTGCTCACTTAGATTCAACAACTAACCTTGAACGTAAATTGACACAAATGGGGATTTATCCAGCCGTTGACCCATTAGCTTCAAGTTCTCGTGCACTCACACCAGAAATCGTTGGAGATGAGCACTATGAAGTTGCAACAGAAGTACAGCGTGTTCTTCAACGTTACCGTGAGTTACAAGATATCATTGCGATTTTAGGTATGGATGAATTATCAGATGAGGAAAAAACGTTAGTTGGACGTGCACGTCGTATCCAATTCTTCCTTTCTCAAAACTTCAATGTTGCAGAAACATTTACTGGTCAACCAGGTTCATATGTTCCGGTTGAAGAAACTGTTCGCGGATTCAAAGAAATCCTAGATGGTAAACATGATCAAATTCCAGAAGATGCCTTCCGTATGGTTGGTGGTATTGAGGATGTTATCGCAAAAGCAGAAAAAATGAACTATTAA

SEQ ID NO: 1648 - protein, 468 aa, Streptococcus agalactiae
MSSGKIAQVVGPVVDVVFASGDKLPEINNALIVYKNGDKSQKVVLEVALELGDGLVRTIAMESTDGLTRGLEVLDTGRAISVPVGKDTLGRVFNVLGDAIDLEEPFAEDAERQPIHKKAPSFDELSTSSEILETGIKVIDLLAPYLKGGKVGLFGGAGVGKTVLIQELIHNIAQEHGGISVFTGVGERTREGNDLYWEMKESGVIEKTAMVFGQMNEPPGARMRVALTGLTIAEYFRDVEGQDVLLFIDNIFRFTQAGSEVSALLGRMPSAVGYQPTLATEMGQLQERITSTKKGSVTSIQAIYVPADDYTDPAPATAFAHLDSTTNLERKLTQMGIYPAVDPLASSSRALTPEIVGDEHYEVATEVQRVLQRYRELQDIIAILGMDELSDEEKTLVGRARRIQFFLSQNFNVAETFTGQPGSYVPVEETVRGFKEILDGKHDQIPEDAFRMVGGIEDVIAKAEKMNY

SEQ ID NO: 1649 - protein, 414 aa, Streptococcus agalactiae
ATGGCACAATTGACTGTTCAAGTAGTAACACCAGATGGTATTAGATATGACCATCACGCTAGTCTCATTACTGTTAGAACGCCAGATGGTGAAATGGGAATTTTACCAGGTCACATAAATTTGATTGCTCCCCTTAATGTTCATCAGATGAAGATTAATCGTTCTCATCAAGAAGGTGTAGACTGGGTAGCTGTTAATGGTGGTATAATTGAAGTTAATGAGGATCAGGTGACAATTGTTGCGGATTCAGCAGAACGAGCACGTGATATAGACCTTAACCGTGCAGAACGGGCTAAGGAACGCGCTGAGCGTGCATTAGAAAAAGCTCAAACAACTCAGAATATTGATGAGATGCGTAGAGCTGAGGTTGCTCTTCGTCGCGCAATTAACCGTATTAGCGTCGGTAAAAAGTAG

SEQ ID NO: 1650 - protein, 137 aa, Streptococcus agalactiae
MAQLTVQVVTPDGIRYDHHASLITVRTPDGEMGILPGHINLIAPLNVHQMKINRSHQEGVDWVAVNGGIIEVNEDQVTIVADSAERARDIDLNRAERAKERAERALEKAQTTQNIDEMRRAEVALRRAINRISVGKK

SEQ ID NO: 1651 - protein, 548 aa, Streptococcus agalactiae
ATGGATAAAATTATTGTGGAAGGTGGGCAAACGCAGCTTCAAGGTCAAGTTGTTATTGAAGGAGCTAAAAATGCAGTTTTACCTCTTTTAGCAGCCACAATTTTACCAAGCCAAGGGAAAACATTGTTGACCAATGTTCCTATCTTGTCTGATGTATTTACAATGAACAATGTTGTTCGTGGTTTAGATATTCAAGTTGACTTTAATTGCGATAAAAAAGAAATCTTAGTGGATGCCTCAGGTGATATTTTAGATGTTGCACCTTATGAATTTGTTAGTCAAATGAGAGCTTCTATTGTTGTTTTGGGACCTATTTTAGCTAGAAATGGCCATGCTAAGGTTTCAATGCCAGGCGGTTGTACAATTGGTAGCCGACCAATTGACCTTCATCTTAAAGGTTTAGAAGCTATGGGAGCTACGATTACACAAAATGGTGGTGATATTACTGCCCAAGCTGAAAAGCTTAAGGGAGCTAATATATACATGGATTTTCCCTCAGTCGGTGCCACTCAAAACTTAATGATGGCTNNNNNCATTCCATTCATTAA

SEQ ID NO: 1652 - protein, 182 aa, Streptococcus agalactiae
  VARIANT 177, 178: Xaa = Any Amino Acid
MDKIIVEGGQTQLQGQVVIEGAKNAVLPLLAATILPSQGKTLLTNVPILSDVFTMNNVVRGLDIQVDFNCDKKEILVDASGDILDVAPYEFVSQMRASIVVLGPILARNGHAKVSMPGGCTIGSRPIDLHLKGLEAMGATITQNGGDITAQAEKLKGANIYMDFPSVGCHSKLNDGXXHSIH

SEQ ID NO: 1653 - protein, 1007 aa, Streptococcus agalactiae
GTGGGCAACGCAGCTCAAGGTCAAGTTGTTATGAAGGAGCTAAAAATGCAGTTTTACYTCTTTTAGCAGCCACAATTTTACCAAGCCAAGGGAAAACATTGTTGACCAATGTTCCTATCTTGTCTGATGTATTTACAATGAACAATGTTGTTCGTGGTTTAGATATTCAAGTTGACTTTAATTGCGATAAAAAAGAAATCTTAGTGGATGCCTCAGGTGATATTTTAGATGTTGCACCTTATGAATTTGTTAGTCAAATGAGAGCTTCTATTGTTGTTTTGGGACCTATTTTAGCTAGAAATGGCCATGCTAAGGTTTCAATGCCAGGCGGTTGTACAATTGGTAGCCGACCAATTGACCTTCATCTTAAAGGTTTAGAAGCTATGGGAGCTACGATTACACAAAATGGTGGTGATATTACTGCCCAAGCTGAAAAGCTTAAGGGAGCTAATATATACATGGATTTTCCCTCAGTCGGTGCCACTCAAAACTTAATGATGGCTGCTACACTTGCTTCAGGCACAACAACGATAGAGAATGCTGCACGTGAACCAGAAATTGTAGACCTTGCGCAGTTACTAAATAAAATGGGAGCTAAAGTAAAGGGTGCTGGTACGGAAACATTAACGATCATTGGTGTTGATGCTTTACATGGTACAGAACATGATGTTGTCCAAGATCGTATTGAAGCTGGAACCTTTATGGTGGCAGCTGCTATGACTTCTGGAAATGTTCTAGTAAAGGATGCTATTTGGGAACATAACCGTCCTTTAATCTCTAAATTGATGGAGATGGGTGTTGAAGTGTCAGAGGAAGAAGATGGTATTCGTGTAAAAGCTGATACTAAAAAATTGAAGCCAGTGACTGTGAAAACACTCCCTCATCCAGGATTTCCTACTGATATGCAAGCTCAATTTACAGCTCTAATGGCAGTAGTTAATGGCGAATCAACTATGATTGAGACAGTTTTGAAAATCGTTTCAACTCNNNNNCATTCCATTCATTAA

SEQ ID NO: 1654 - protein, 336 aa, Streptococcus agalactiae
  VARIANT 21, 331, 332: Xaa = Any Amino Acid
MGKRQLQGQVVIEGAKNAVLXLLAATILPSQGKTLLTNVPILSDVFTMNNVVRGLDIQVDFNCDKKEILVDASGDILDVAPYEFVSQMRASIVVLGPILARNGHAKVSMPGGCTIGSRPIDLHLKGLEAMGATITQNGGDITAQAEKLKGANIYMDFPSVGATQNLMMAATLASGTTTIENAAREPEIVDLAQLLNKMGAKVKGAGTETLTIIGVDALHGTEHDVVQDRIEAGTFMVAAAMTSGNVLVKDAIWEHNRPLISKLMEMGVEVSEEEDGIRVKADTKKLKPVTVKTLPHPGFPTDMQAQFTALMAVVNGESTMIETVLKIVSTXXHSIH

SEQ ID NO: 1655 - protein, 726 aa, Streptococcus agalactiae
ATGAATGAATGNNNNNATGCTGCACGTGAACCAGAAATTGTACACCTTGCGCAGTTACTAAATAAAATGGGAGCTAAAGTAAAGGGTGCTGGTACGGAAACATTAACGATCATTGGTGTTGATGCTTTACATGGTACAGAACATGATGTTGTCCAAGATCGTATTGAAGCTGGAACCTTTATGGTGGCAGCTGCTATGACTTCTGGAAATGTTCTAGTAAAGGATGCTATTTGGGAACATAACCGTCCTTTAATCTCTAAATTGATGGAGATGGGTGTTGAAGTGTCAGAGGAAGAAGATGGTATTCGTGTAAAAGCTGATACTAAAAAATTGAAGCCAGTGACTGTGAAAACACTCCCTCATCCAGGATTTCCTACTGATATGCAAGCTCAATTTACAGCTCTAATGGCAGTAGTTAATGGCGAATCAACTATGATTGAGACAGTTTTTGAAAATCGTTTTCAACATTTGGAAGAAATGCGTCGCATGGGATTACAAACGGAAATTTTACGAGATACTGCAATGATTCATGGTGGGAGAGCTTTACAAGGTGCACCGGTCATGTCTACTGACTTACGAGCTAGTGCAGCTTTAATCTTGGCAGGAATGGTTGCGCAAGGGCAAACAGTAGTTGGCCAATTAACCCATTTAGACCGTGGTTATTATCAATTCCATGAAAAATTAGCGGCTCTTGGTGCTAATATTAAACGTGTAAGTGAGGCGTAA

SEQ ID NO: 1656 - protein, 241 aa, Streptococcus agalactiae
  VARIANT 4, 5, 6: Xaa = Any Amino Acid
MNEXXXAAREPEIVHLAQLLNKMGAKVKGAGTETLTIIGVDALHGTEHDVVQDRIEAGTFMVAAAMTSGNVLVKDAIWEHNRPLISKLMEMGVEVSEEEDGIRVKADTKKLKPVTVKTLPHPGFPTDMQAQFTALMAVVNGESTMIETVFENRFQHLEEMRRMGLQTEILRDTAMIHGGRALQGAPVMSTDLRASAALILAGMVAQGQTVVGQLTHLDRGYYQFHEKLAALGANIKRVSEA

SEQ ID NO: 1657 - protein, 204 aa, Streptococcus agalactiae
GTGAGGCGTAATATGGCATCTAGTGGTTGGAAATATGTATTAAAACAAATCGGTCTAATAGTATTAGTCATACTATTAGCCTTGCTGTTTTTAGCGGTTGGATTGATGTTGGGTTATAGTGTTTTTGGTGACGGAGAGCATGCTTACTCTATTTTATCGCTGGATAAATGGCAAAATATTATTGGAAAATTTTTAGGAAAATAG

SEQ ID NO: 1658 - protein, 67 aa, Streptococcus agalactiae
MRRNMASSGWKYVLKQIGLIVLVILLALLFLAVGLMLGYSVFGDGEHAYSILSLDKWQNIIGKFLGK

SEQ ID NO: 1659 - protein, 858 aa, Streptococcus agalactiae
ATGACAAAAAAACAAAAACAAATAACAGCTTCGATTGTAACTTTGCTTTTTTCATTACTGGCAATAGGGTTAGGTGAAAGCAAATCTTTGCCTAATGATCACATTTTAAAACAGGTGACAGATTTAATTATTAGTAATGAATCTGGCAAAAATACTTCCCTTAAAAATGTATCAGGAACTCCTAGTAGAGAGTTATCTGAATCTGTTTTGACTAGCAATGTTAAAAAACAATTGGGAACAAATATAGCTTGGAACCAGTCAGGTGCTTTTATCATTAATCAAAATAAAACAGATTTGAATGCTAAAGTGTCAAGTGCACCATATGCTATTAATGAAATAAAGAAGGTTAATAACCAAATTGTTCCGACTAAAGCAAATGCCTTATTAACAAAAGCAACTCGTCAATATCGAAATCGAGAAGAAACAGGGAATGGTAGAACTTATTGGAAACCAGCTGGATGGCATCAGATAAATGGATTAAAAGGGAGCTATAACCACGCTGTGGACAGAGGCCATTTAATTGGTTATGCTTTAGTAGGGAGTTTAAGAGGATTTGATGCCTCCACAAGTAATCCTAAAAATATTGCCACACAAGCAGCTTGGGCAAACCAAGCTAATAGCAACCAATCAACAGGGCAAAATTATTATGAAACTTTAGTTCGTAAAGCATTGGATCGTCATAAAACTGTTAGGTATCGTGTGACTTTAATTTATGACAGAGATAATCTTTTATCTTCGGGATCACATATTGAGGCTAAATCTTCAGATGGAAGTTTAGAATTTAACGTTTTTATTCCTAATGTACAATCGGGATTATTATTTGATTATGCAACAGGAAAAGTGAAGCAGACAAAGTAA

SEQ ID NO: 1660 - protein, 285 aa, Streptococcus agalactiae
MTKKQKQITASIVTLLFSLLAIGLGESKSLPNDHILKQVTDLIISNESGKNTSLKNVSGTPSRELSESVLTSNVKKQLGTNIAWNQSGAFIINQNKTDLNAKVSSAPYAINEIKKVNNQIVPTKANALLTKATRQYRNREETGNGRTYWKPAGWHQINGLKGSYNHAVDRGHLIGYALVGSLRGFDASTSNPKNIATQAAWANQANSNQSTGQNYYETLVRKALDRHKTVRYRVTLIYDRDNLLSSGSHIEAKSSDGSLEFNVFIPNVQSGLLFDYATGKVKQTK

SEQ ID NO: 1661 - protein, 1041 aa, Streptococcus agalactiae
ATGGATTTACAAAAACAATTAGAAGAGTTGAAAATATCAACTCAAGAAAAGCTTAAAGAAATGACTGGGAACCACACTAAAGAATTACAAGACTTACGTGTACAAGTTTTAGGAAAAAAAGGTTCTCTAACAGAATTACTAAAAGGTCTGAAAGATTTATCTAATGATTTACGACCAGTTGTTGGAAAACAAGTCAATGAAGTACGTGATATTTTAACAAAAGCGTTTGAGGAACAAGCTAAAGTAGTGGAAGCTGCGAAGATTCAAGCACAGTTAGAGTCTGAGAGTGTCGACGTTACCTTGCCTGGTCGTCAAATGACATTAGGTCACCGTCATGTCTTAACACAAACTAGCGAAGAGATTGAAGATATCTTTTTAGGTATGGGATTCCAAGTGGTTGATGGTTTTGAAGTTGAGAAAGACTACTATAATTTTGAACGAATGAATTTACCAAAAGATCATCCAGCCCGTGATATGCAAGATACTTTTTATATTACAGAAGAAATCTTGCTACGTACTCATACTTCGCCTGTTCAAGCACGAACAATGGACCAACATGATTTTTCTAAAGGGCCTTTAAAAATGATTTCTCCTGGACGTGTTTTCCGTCGTGATACTGATGATGCTACTCATAGCCATCAATTCCATCAAATTGAAGGCTTAGTTGTTGGAGAAAATATTTCAATGGGCGATCTCAAAGGAACACTTCAACTGATTTCTCAAAAAATGTTTGGAGCAGAGCGTAAAATCCGACTTCGTCCTTCATATTTCCCATTCACAGAACCTTCAGTTGAAGTTGATGTCTCTTGCTTCAAGTGCGGAGGTAAGGGATGTAATGTCTGCAAACAGACAGGTTGGATTGAGATATTGGGTGCTGGTATGGTTCACCCAAGTGTTTTGGAAATGTCTGGTATTGATTCTGAGAAATACTCCGGTTTTGCCTTTGGTTTAGGTCAAGAACGTATTGCAATGTTACGCTACGGTATCAATGACATTCGTGGCTTCTATCAAGGTGATGTTCGCTTCACAGATCAATTTTAA

SEQ ID NO: 1662 - protein, 346 aa, Streptococcus agalactiae
MDLQKQLEELKISTQEKLKEMTGNHTKELQDLRVQVLGKKGSLTELLKGLKDLSNDLRPVVGKQVNEVRDILTKAFEEQAKVVEAAKIQAQLESESVDVTLPGRQMTLGHRHVLTQTSEEIEDIFLGMGFQVVDGFEVEKDYYNFERMNLPKDHPARDMQDTFYITEEILLRTHTSPVQARTMDQHDFSKGPLKMISPGRVFRRDTDDATHSHQFHQIEGLVVGENISMGDLKGTLQLISQKMFGAERKIRLRPSYFPFTEPSVEVDVSCFKCGGKGCNVCKQTGWIEILGAGMVHPSVLEMSGIDSEKYSGFAFGLGQERIAMLRYGINDIRGFYQGDVRFTDQF

SEQ ID NO: 1663 - protein, 522 aa, Streptococcus agalactiae
ATGTCTCAAATTACTTTTAAAAAGGTTAGCCTTGATAATGTGAATATTTTACAGAATATTGCTATAGAAACCTTTCGGCAGACGTTTTCTCATGATAATAGTGAGGAACAACTTCAAGCATTTTTCAATGAGTCTTACACTTTACCAGTATTAAAATCGGAAATTACCCATGCTGAATCTGATACTTATTTTGTTTATCTTGATACAGATTTAGTGGGTTATTTAAAAGTAAACTGGGGAAGTCAGCAAACTGAAAAAGATCTTGATAAAGCATTTGAAATTCAAAGGATTTATCTTCTAGATGCCTACCAAGGGCAAGGTATAGGTAAGGCTACTTTCGAATTTGCTTTGGATTTAGCTTATAAATCAGGCTTAGATTGGGCTTGGTTAGGTGTTTGGGAGTTTAATCATAAAGCTCAGGCATTTTACGCTAAATACGGATTTGAAAAATTTTCTGAGCACCAATTTTCAGTAGGTGATAAAGTGGATACGGATTGGTTATTAAGAAAAAGTTTACACTAA

SEQ ID NO: 1664 - protein, 173 aa, Streptococcus agalactiae
MSQITFKKVSLDNVNILQNIAIETFRQTFSHDNSEEQLQAFFNESYTLPVLKSEITHAESDTYFVYLDTDLVGYLKVNWGSQQTEKDLDKAFEIQRIYLLDAYQGQGIGKATFEFALDLAYKSGLDWAWLGVWEFNHKAQAFYAKYGFEKFSEHQFSVGDKVDTDWLLRKSLH

SEQ ID NO: 1665 - protein, 1704 aa, Streptococcus agalactiae
ATGTTAGTATCGTATAAATGGTTAAAAGAGTTAGTGGATGTTGATGTTACAACAGCAGAACTAGCTGAGAAAATGTCAACCACTGGTATTGAGGTTGAAGGTGTGGAGACACCAGCGGAAGGTTTATCAAAATTAGTTGTAGGTCATATTGTTTCGTGTGAAGATGTTCCAGATACCCACTTACATTTGTGTCAAGTTGATACAGGGGATGATGAACTTCGTCAAGTTGTCTGTGGTGCTCCAAATGTCAAGACTGGTATTAATGTTATCGTAGCGGTTCCTGGTGCTCGTATTGCAGATAACTATAAGATTAAAAAAGGTAAAATCCGTGGTATGGAGTCACTTGGAATGATTTGTTCACTTCAAGAGTTGGGCTTATCGGAAAGTATCATTCCAAAAGAGTTTTCTGATGGTATCCAAATTTTACCTGAGGGAGCTATACCTGGTGATAGTATTTTCTCTTATCTTGACTTAGATGATGAAATTATTGAATTATCAATTACACCAAACCGTGCAGATGCTCTTTCAATGCGTGGTGTTGCCCATGAGGTAGCAGCAATTTATGGGAAAAAAGTTCATTTTGAAGAAAAAAATCTCATTGAAGAAGCAGAAAGAGCAGCTGATAAGATTTCTGTTGTCATTGAATCAGATAAAGTTTTATCTTACTCGGCTCGTATTGTTAAGAATGTAACAGTTGCACCAAGTCCACAATGGCTTCAAAATAAACTGATGAATGCTGGTATACGTCCAATTAATAATGTTGTTGATGTGACAAACTATGTTCTTTTGACTTATGGTCAACCAATGCATGCTTTTGATTTTGATAAATTTGATGGGACAACTATAGTAGCACGTAATGCTGAGAATGGGGAAAAGTTAATTACTCTTGATGGTGAAGAGCGTGACTTAATAGCTGATGACTTGGTCATTGCGGTAAATGATCAACCAGTTGCTTTGGCAGGCGTTATGGGAGGACAATCAACTGAAATTGGTAGTTCTTCTAAGACAGTGGTCCTTGAAGCGGCAGTATTTAATGGAACAAGTATCCGCAAAACAAGTGGAAGACTCAACCTTCGTTCAGAATCATCTTCTCGCTTTGAAAAAGGTATCAATTATGATACAGTTTCAGAGGCTATGGATTTTGCGGCTGCAATGTTACAAGAATTGGCAGGTGGTCAAGTTCTTTCTGGTCAAGTTACAGAAGGAGTTCTTCCAACTGAGCCGGTAGAGGTATCAACGACTCTTGGTTACGTTAATACTCGTTTGGGAACAGAACTTACCTATACTGATATTGAAGAAGTATTTGAAAAACTCGGCTTTGCTATTTCTGGTTCAGAAGTGAAATTTACTGTGTTGGTACCGCGTCGTAGATGGGATATTGCCATTCAAGCTGACTTAGTTGAAGAGATTGCCCGTATTTATGGTTACGAAAAATTACCAACAACATTGCCAGAAGCCGGAGCGACTGCAGGAGAATTAACGAGTATGCAACGCTTACGTCGTAGAGTCCGTACGGTTGCTGAAGGAGCAGGATTATCTGAAATTATCACCTATGCTTTAACAACTCCAGAAAAAGCAGTGCAGTTCTCAACTCAAGCAACTAATATAACTGAACTTATGTGGCCGATGACTGTTGATCGCTCAGCACTTCGCCAAAATGTGTTTCAGGAATGCTTGATACAATNNNNNCATTCCATTCATTAA

SEQ ID NO: 1666 - protein, 567 aa, Streptococcus agalactiae
  VARIANT 562, 563: Xaa = Any Amino Acid
MLVSYKWLKELVDVDVTTAELAEKMSTTGIEVEGVETPAEGLSKLVVGHIVSCEDVPDTHLHLCQVDTGDDELRQVVCGAPNVKTGINVIVAVPGARIADNYKIKKGKIRGMESLGMICSLQELGLSESIIPKEFSDGIQILPEGAIPGDSIFSYLDLDDEIIELSITPNRADALSMRGVAHEVAAIYGKKVHFEEKNLIEEAERAADKISVVIESDKVLSYSARIVKNVTVAPSPQWLQNKLMNAGIRPINNVVDVTNYVLLTYGQPMHAFDFDKFDGTTIVARNAENGEKLITLDGEERDLIADDLVIAVNDQPVALAGVMGGQSTEIGSSSKTVVLEAAVFNGTSIRKTSGRLNLRSESSSRFEKGINYDTVSEAMDFAAAMLQELAGGQVLSGQVTEGVLPTEPVEVSTTLGYVNTRLGTELTYTDIEEVFEKLGFAISGSEVKFTVLVPRRRWDIAIQADLVEEIARIYGYEKLPTTLPEAGATAGELTSMQRLRRRVRTVAEGAGLSEIITYALTTPEKAVQFSTQATNITELMWPMTVDRSALRQNVFQECLIQXXHSIH

SEQ ID NO: 1667 - protein, 1272 aa, Streptococcus agalactiae
ATGGATTTTGCGGCTGCAATGTTACAAGAATTGGCAGGTGGTCAAGTTCTTTCTGGTCAAGTTACAGAAGGAGTTCTTCCAACTGAGCCGGTAGAGGTATCAACGACTCTTGGTTACGTTAATACTCGTTTGGGAACAGAACTTACCTATACTGATATTGAAGAAGTATTTGAAAAACTCGGCTTTGCTATTTCTGGTTCAGAAGTGAAATTTACTGTGTTGGTACCGCGTCGTAGATGGGATATTGCCATTCAAGCTGACTTAGTTGAAGAGATTGCCCGTATTTATGGTTACGAAAAATTACCAACAACATTGCCAGAAGCCGGAGCGACTGCAGGAGAATTAACGAGTATGCAACGCTTACGTCGTAGAGTCCGTACGGTTGCTGAAGGAGCAGGATTATCTGAAATTATCACCTATGCTTTAACAACTCCAGAAAAAGCAGTGCAGTTCTCAACTCAAGCAACTAATATAACTGAACTTATGTGGCCGATGACTGTTGATCGCTCAGCACTTCGCCAAAATGTTGTTTCAGGAATGCTTGATACAATTGCTTATAACGTTGCTCGCAAAAACAGTAACCTTGCAGTTTATGAGATAGGAAAAGTTTTTGAACAAACTGGTAATCCAAAAGAAGATTTACCAACTGAAGTAGAGACGTTTACTTTTGCCTTAACAGGTCTAGTAGAGGAAAAAGATTTCCAAACAAAAGCCAAGCCAGTTGATTTCTTCTACGCCAAAGGTATTGTAGAGGCGCTCTTTATTAAATTAAAATTAGATGTTACTTTTGTAGCACAAAAAGGTTTAGCAAGTATGCACCCAGGTCGTACAGCAACTATCTTATTAGATGGGAAAGAGATTGGTTTTGTTGGTCAAGTACACCCACAAACTGCAAAACAATATGATATTCCTGAAACTTATGTTGCTGAAATCAATCTATCAACTATTGAAAGTCAAATGAACCAAGCGTTGATTTTTGAAGATATTACGAAGTATCCGTCTGTATCTCGCGATATTGCATTATTACTTGCAGAATCTGTTAGTCATCATGATATTGTGTCAGCAATTGAGACATCAGGGGTAAAACGTCTAACAGCGATTAAACTGTTTGATGTCTACGCTGGAAATAATATTGCAGAAGGGTATAAATCAATGGCTTATAGCTTAACTTTCCAAAACCCTAATGACAATCTAACGGACGAAGAAGTGGCTAAATATATGGAAAAAATCACTAAATCACTCGTTGAGAAAGTTAATGCAGAAATAAGATAA

SEQ ID NO: 1668 - protein, 423 aa, Streptococcus agalactiae
MDFAAAMLQELAGGQVLSGQVTEGVLPTEPVEVSTTLGYVNTRLGTELTYTDIEEVFEKLGFAISGSEVKFTVLVPRRRWDIAIQADLVEEIARIYGYEKLPTTLPEAGATAGELTSMQRLRRRVRTVAEGAGLSEIITYALTTPEKAVQFSTQATNITELMWPMTVDRSALRQNVVSGMLDTIAYNVARKNSNLAVYEIGKVFEQTGNPKEDLPTEVETFTFALTGLVEEKDFQTKAKPVDFFYAKGIVEALFIKLKLDVTFVAQKGLASMHPGRTATILLDGKEIGFVGQVHPQTAKQYDIPETYVAEINLSTIESQMNQALIFEDITKYPSVSRDIALLLAESVSHHDIVSAIETSGVKRLTAIKLFDVYAGNNIAEGYKSMAYSLTFQNPNDNLTDEEVAKYMEKITKSLVEKVNAEIR

SEQ ID NO: 1669 - protein, 903 aa, Streptococcus agalactiae
ATGAAAATAGATGACCTAAGAAAAAGCGACAATGTTGAAGATCGTCGCTCCAGTAGCGGAGGTTCATTCTCTAGCGGAGGAAGTGGATTACCGATTCTTCAACTTTTATTGCTGCGAGGGAGTTGGAAAACCAAGCTTGTGGTTTTAATCATCTTACTGCTACTTGGCGGAGGGGGACTAACCAGCATTTTTAATGACTCATCCTCACCTTCTAGTTACCAATCTCAGAATGTCTCACGTTCTGTTGATAATAGCGCAACGAGAGAACAAATCGATTTCGTTAATAAAGTCCTTGGCTCAACTGAGGATTTCTGGTCACAAGAATTCCAAACCCAAGGTTTTGGAAATTATAAGGAACCAAAACTTGTTCTTTACACCAATTCAATTCAAACAGGTTGTGGTATAGGTGAATCTGCTTCAGGACCATTTTATTGTTCAGCAGATAAAAAAATCTATCTTGATATTTCTTTTTACAATGAATTATCACATAAATATGGTGCTACTGGTGATTTTGCTATGGCCTACGTCATCGCCCACGAAGTTGGTCACCACATTCAAACAGAGTTAGGCATTATGGATAAGTATAATAGAATGCGACACGGACTTACTAAGAAAGAAGCAAATGCTTTAAATGTTCGGCTAGAACTTCAAGCAGATTATTATGCAGGGGTATGGGCTCACTACATCAGGGGAAAAAATCTCTTAGAACAAGGAGACTTTGAAGAGGCCATGAATGCTGCCCACGCCGTCGGAGACGATACCCTTCAGAAAGAAACCTACGGAAAATTAGTGCCTGATAGCTTTACCCATGGAACAGCTGAACAACGCCAACGTTGGTTTAACAAAGGCTTTCAATATGGTGACATCCAACACGGTGATACTTTCTCCGTAGAACATCTATAA

SEQ ID NO: 1670 - protein, 300 aa, Streptococcus agalactiae
MKIDDLRKSDNVEDRRSSSGGSFSSGGSGLPILQLLLLRGSWKTKLVVLIILLLLGGGGLTSIFNDSSSPSSYQSQNVSRSVDNSATREQIDFVNKVLGSTEDFWSQEFQTQGFGNYKEPKLVLYTNSIQTGCGIGESASGPFYCSADKKIYLDISFYNELSHKYGATGDFAMAYVIAHEVGHHIQTELGIMDKYNRMRHGLTKKEANALNVRLELQADYYAGVWAHYIRGKNLLEQGDFEEAMNAAHAVGDDTLQKETYGKLVPDSFTHGTAEQRQRWFNKGFQYGDIQHGDTFSVEHL

SEQ ID NO: 1671 - protein, 1443 aa, Streptococcus agalactiae
ATGAAATTACTTTATACTGATATTAATCATGATATGACAGAAATCTTAGTCAATCAGGCCGCGCATGCTGCTGAAGCTGGATGGCGTATTTTTTATATTGCTCCAAACTCTTTATCTTTTGAAAAAGAGCGTGCAGTATTAGAGAACCTTCCTCAAGAAGCCTCTTTTGCTATTACAATTACTCGCTTTGCTCAATTGGCACGTTATTTTACTTTAAACCAGCCTAATCAAAAAGAAAGTTTAAACGATATTGGATTAGCAATGATCTTTTATCGTGCTTTAGCAAGTTTTGAAGATGGACAATTAAAAGTTTTTGGACGATTGAAGCAAGATGCTTCCTTTATCAGTCAATTGGTAGACCTATACAAAGAATTGCAGACAGCAAATCTGAGTATTTTAGAGTTAAAATATTTACATTCTCCTGAAAAATTTGAAGATTTATTAGCTATTTTTCTAGTGGTTTCAGATCTTTTAAGAGAAGGAGAATACGACAATCAATCTAAAATTGCCTTTTTTACAGAACAAGTAAGGTCAGGCCAGCTAGATGTGGATTTAAAGAACACTATCCTTATAGTCGATGGTTTTACCCGTTTCTCAGCTGAAGAAGAAGCTTTAATTAAAAGTCTGAGTTCACGTTGTCAAGAGATTATCATCGGAGCTTATGCTAGCCAAAAAGCGTATAAGGCTAACTTTACTAATGGAAATATTTATTCTGCAGGGGTTGATTTTTTAAGATATCTAGCAACGACATTTCAAACAAAACCAGAATTTATCTTGTCCAAGTGGGAAAGTAAATCTGGTTTTGAAATGATTTCGAAAAATATCGAAGGTAAACATGATTTTACAAATAGTAGTCACATTTTAGACGACACTGCTAAAGATTGTATAACAATTTGGGAGTGCATTAATCAAAAAGATGAAGTGGAACATGTGGCTAGAGCTATACGTCAGAAACTTTATCAAGGATATCGCTACAAAGATATTTTAGTTTTACTAGGAGATGTAGATAGTTATAAACTACAATTAAGTAAGATTTTTGAGCAGTATGATATTCCTTATTATTTCGGTAAAGCTGAAACAATGGCTGCGCACCCTTTAGTTCATTTTATGGATTCCTTGTCTCGAATAAAACGTTATCGATTTAGAGCTGAAGATGTTTTAAATCTTTTTAAGACAGGTATTTATGGAGAGATTAGCCAAGATGATTTAGATTATTTTGAGGCTTATATCTCATATGCAGACATTAAAGGTCCTAAGAAGTTCTTTACAGATTTTGTTGKGGGGKCTAAAAWWTKWKWTWKRGSGYSTYWWMACWMTWYKYSWSWSYCYCYYYWYWCYMCWSKRRARKTTTGKGRAAACSRAAAAMAMRASSGKWWWAAAACMMCWMCCMMWWYWYRTKTTTYYYYWYWCWSGKRGRKTTKWGWGWSAAWTTWTCGCGATTAG

SEQ ID NO: 1672 - protein, 481 aa, Streptococcus agalactiae
  VARIANT 427, 429, 431, 432, 433, 434, 435, 436, 437, 438, 439, 440,441, 442, 443, 444, 445, 446, 447, 448, 449, 450, 452: Xaa = Any Amino Acid
  VARIANT 454, 455, 456, 457, 458, 459, 460, 462, 464, 465, 466, 467,468, 469, 470, 471, 472, 473, 474, 475, 476, 477, 478: Xaa = Any Amino Acid
  VARIANT 479: Xaa = Any Amino Acid
MKLLYTDINHDMTEILVNQAAHAAEAGWRIFYIAPNSLSFEKERAVLENLPQEASFAITITRFAQLARYFTLNQPNQKESLNDIGLAMIFYRALASFEDGQLKVFGRLKQDASFISQLVDLYKELQTANLSILELKYLHSPEKFEDLLAIFLVVSDLLREGEYDNQSKIAFFTEQVRSGQLDVDLKNTILIVDGFTRFSAEEEALIKSLSSRCQEIIIGAYASQKAYKANFTNGNIYSAGVDFLRYLATTFQTKPEFILSKWESKSGFEMISKNIEGKHDFTNSSHILDDTAKDCITIWECINQKDEVEHVARAIRQKLYQGYRYKDILVLLGDVDSYKLQLSKIFEQYDIPYYFGKAETMAAHPLVHFMDSLSRIKRYRFRAEDVLNLFKTGIYGEISQDDLDYFEAYISYADIKGPKKFFTDFVXGXKXXXXXXXXXXXXXXXXXXXXLXKXXXXXXXKXSXXXXXXXXXXXXXXXXRD

SEQ ID NO: 1673 - protein, 1134 aa, Streptococcus agalactiae
ATGAACAAGAAAAACATCAAGAAGTTTGGAAAACATTTACAGATATTTTAGAGCAGTTTCAAACAATATTTGGTCAAGAAAAATTAAATTTAGACGAATTTTTATCGTTATTAAATTCAGGTATGATGCAAGCCGAGTATCGTATGGTCCCTGCTACTGTTGATGTGGTTACTGTTAAGTCTTACGATTTGGTAGAACCACATAGTAATCAATTTGTCTATGCCCTAGGCATGACACAATCACATTTTCCAAAGATTGCTCAAAACAAATCTTTAATATCTGATATTGAACGTCAGCTTATAAATGATGCCAATGACACTGATGGTCATTTTGACATTATGACGCAAGAAAATTTGAAGAAAAACCATTTTGCTGCCCTCTCTCTTTTTAATGCTGCTAAACAAGAATTAGTGTTGACTATACCACAATTATTGAATGAGTCTGAAGATCAGATGTCACCATATCTTGTCGAACTAAGAGATATAGGTGTTCCTTTTAATCATAAAGGACGCCAATCGTTAAAAGAAGAAGCTGATAATATTGGGAATTACAAAGCTTTATTATCGCGTGTTGTTGACTTGTATCGCTCTGCTATTGACAAAGAGATGACTAAAGAAGAACAAACTTTTTGGTCAGTTGCTGTTCGTTATTTGCGTCGTCAATTAACTTCTAAAGGGATTGAGATACCAATAATTACAGATAGTCTTGATACTGTGACAGTTTCATCAGATGTGATGACCAGACGCTTCCCAGAAGATGACCCACTTAAATTATCCTCATCTGCTTTGACAACTTTTTATAATAATCAATATAAGTATTTTTTACAATATGTGTTAGGTTTGGAAGAACAAGACTCAATTCATCCAGATATGCGGCACCATGGAACGTACCTTCATCGTGTTTTTGAAATTCTGATGAAAAACCAAGGGATAGAATCTTTTGAAGAGAAACTCAACTCTGCAATTAATAAAACCAATCAAGAAGATGTTTTCAAATCCTTGTATTCAGAAGATGCAGAAAGTCGTTATTCTTTAGAAATTTTAGAAGATATCGCGCGTGCAACTGCAACCATATTACGACAAGATAGTCAGATGACTGTTGAAAGTGAAGAAGAACGATTTGAACTAATGATGA

SEQ ID NO: 1674 - protein, 379 aa, Streptococcus agalactiae
  VARIANT 379: Xaa = Any Amino Acid
MNKKNIKEVWKTFTDILEQFQTIFGQEKLNLDEFLSLLNSGMMQAEYRMVPATVDVVTVKSYDLVEPHSNQFVYALGMTQSHFPKIAQNKSLISDIERQLINDANDTDGHFDIMTQENLKKNHFAALSLFNAAKQELVLTIPQLLNESEDQMSPYLVELRDIGVPFNHKGRQSLKEEADNIGNYKALLSRVVDLYRSAIDKEMTKEEQTFWSVAVRYLRRQLTSKGIEIPIITDSLDTVTVSSDVMTRRFPEDDPLKLSSSALTTFYNNQYKYFLQYVLGLEEQDSIHPDMRHHGTYLHRVFEILMKNQGIESFEEKLNSAINKTNQEDVFKSLYSEDAESRYSLEILEDIARATATILRQDSQMTVESEEERFELMIX

SEQ ID NO: 1675 - protein, 119 aa, Streptococcus agalactiae
TTGGGTGTCGTGGACTATAAATCAAGCGCTCAAAAATTCGATATCCAAAAATTTTATAACGGTCTAAGTCCACAATTAGTCACCTACATTGATGCTATCAGTCGTGACAAGGAAGTTGA

SEQ ID NO: 1676 - protein, 39 aa, Streptococcus agalactiae
MGVVDYKSSAQKFDIQKFYNGLSPQLVTYIDAISRDKES

SEQ ID NO: 1677 - protein, 183 aa, Streptococcus agalactiae
TTGATCAATCCATATACAGAAGATGCTAAAACAGTTGACGGAGATCAGTTTAAGAGTATTACGGGATTCGAGGCGGATAGGCATATGGCACGTGCCAGAGCGCTTTATAAATTACCTGCTAAGGAAAAACGTCAAGGTTTCTTAACATTAATGCAGCAAGAGGAGGAAAATGATGACCTTTAA

SEQ ID NO: 1678 - protein, 60 aa, Streptococcus agalactiae
MINPYTEDAKTVDGDQFKSITGFEADRHMARARALYKLPAKEKRQGFLTLMQQEEENDDL

SEQ ID NO: 1679 - protein, 2340 aa, Streptococcus agalactiae
ATGACCTTTAAGCCTTTCTTAAATCCAGAAGATATTGCTGTTATTCAGACAGAAGAAAAAAATTCTGATAAAAAACAAAAGCGAACGCCTGAACAAATTGAAGCCATTTATACTTTTGGTAACAATGTCCTGGTATCAGCTTCGGCTGGTTCTGGAAAGACTTTTGTAATGGTTGAGCGGATTTTAGATAAACTTTTAAGAGGGGTTCCGATTGACTCTTTGTTTATCTCAACATTTACAGTAAAAGCGGCAGGTGAGCTCAAAGAACGTTTAGAAAAGAAAATAAACGAGTCTTTGAAATCCGCAGAATCAGATGATTTAAAACAGTTTCTCACCCAGCAACTTGTCGGCATTCAAACAGCTGATATTGGTACTATGGATGCTTTTACGCAAAAAATAGTTAACCAATATGGTTATACTTTGGGCATATCACCTATATTTAGGATTTTACAAGATAAAAATGAGCAAGACGTCATAAAGAATGAGGTCTATGCTGATTTATTTTCTGACTACATGACTGGGAAGAATGCAGCTTCATTCATAAAATTAGTCAAAAATTTCTCAGGTAATCGTAAAGATAGCAAAGCTTTTCGAGAAATGGTTTATAAAGTTTATGCTTTTAGCCAGTCCACCGATAACCCCAAGCGCTGGATGCAAACAGTTTTTCTAAAAGGTGCACAAACTTACACTGATTTTGAAGCTATTCCAGATCAAGAAGTTTCAAGCCTTTTAAATGTAATGCAAACAACTGCTAATCAATTACGTGATTTAACGGATCAAGAAGATTATAAGCAATTAACTGCTAAAGGGGTTCCGACAGCAAATTACAAAAAACACCTTAAAATAATTGAAAATTTAGTCCATTGGTCTCAAGACTTTAATTTGCTGTATGGAAAAAAAGGATTGACTAATTTGGCACGTGATATCACTAATGTGATTCCTTCAGGCAATGATGTTACAGTTGCTGGCGTTAAATATCCTATCTTTAAACAATTGCATAATCGTATCGTTGGACTTAAGCACTTAGAAGTTATTTTTAAGTATCAAGGAGAATCTCTTTTCTTGTTAGAATTATTGCAATCCTTTGTTTTAGATTTCTCAGAACAATATTTACAGGAGAAGATTCAAGAAAATGCTTTTGAATTTTCTGATATTGCCCATTTTGCAATTCAAATATTGGAAGAAAATCATGATATTAGGCAACTTTATCAAGATAAGTATCATGAAGTAATGGTTGATGAGTATCAGGACAATAACCATACCCAAGAGAGAATGTTAGAATTATTGTCTAATGGACATAATCGTTTCATGGTTGGAGACATAAAACAATCAATTTACCGTTTTCGTCAGGCTGATCCACAAATTTTTAATGATAAATACAAAGCTTACCAAGACAATCCAAGTCAAGGGAAATTAATTATTCTGAAAGAGAATTTTCGGAGTCAATCAGAGGTTTTAGACAGTACAAATAGTGTGTTTACACATCTTATGGATGAAGAAGTAGGAGACATTCTTTATGATGAAAGTCACCAATTAAAAGCTGGTAGTCCAAGACAGCAAGAAAGACATCCGAATAATAAAACACAAGTTTTACTATTAGATACTGATGAAGATGATATAGATGACAGTGATAGTCAACAATATGATATTAGCCCAGCTGAAGCAAAGTTAGTCGCAAAAGAAATTATTCGATTGCATAAAGAAGAGAATGTTCCCTTTCAAGATATCACCCTCTTAGTTTCTTCAAGGACAAGGAATGATGGTATCTTACAAACTTTTGACCGTTATGGTATTCCTTTGGTAACTGACGGTGGGGAGCAAAATTACTTAAAATCAGTCGAAGTGATGGTAATGCTTGATACTTTGCGGTCAATTGATAATCCCTTAAATGATTATGCTCTAGTTGCTCTTTTGAGATCTCCCATGTTTGGCTTTAATGAAGATGATTTAACAAGAATTGCTATTCAGGATGTCAAAATGGCTTTTTATCATAAAGTGAAATTGTCTTATCATAAAGAAGGTCATCATAGTGATTTAATTACTCCAGAATTATCTTCTAAAATAGATCACTTTATGAAAACATTCCAGACTTGGCGTGATTTTGCTAAATGGCATTCGCTTTATGATTTAATATGGAAAATATATAATGACCGTTTTTATTATGATTATGTAGGAGCTCTGCCTAAAGCTGAGCAACGTCAAGCCAATCTATATGCCTTGGCACTTCGAGCAAATCAGTTTGAAAAAACAGGTTTCAAGGGTTTATCACGCTTTATTCGAATGATTGATAAAGTTTTAGAAAATGAAAATGANNNNNCATTCCATTCATTAATTAATTAA

SEQ ID NO: 1680 - protein, 779 aa, Streptococcus agalactiae
  VARIANT 771, 772, 773: Xaa = Any Amino Acid
MTFKPFLNPEDIAVIQTEEKNSDKKQKRTPEQIEAIYTFGNNVLVSASAGSGKTFVMVERILDKLLRGVPIDSLFISTFTVKAAGELKERLEKKINESLKSAESDDLKQFLTQQLVGIQTADIGTMDAFTQKIVNQYGYTLGISPIFRILQDKNEQDVIKNEVYADLFSDYMTGKNAASFIKLVKNFSGNRKDSKAFREMVYKVYAFSQSTDNPKRWMQTVFLKGAQTYTDFEAIPDQEVSSLLNVMQTTANQLRDLTDQEDYKQLTAKGVPTANYKKHLKIIENLVHWSQDFNLLYGKKGLTNLARDITNVIPSGNDVTVAGVKYPIFKQLHNRIVGLKHLEVIFKYQGESLFLLELLQSFVLDFSEQYLQEKIQENAFEFSDIAHFAIQILEENHDIRQLYQDKYHEVMVDEYQDNNHTQERMLELLSNGHNRFMVGDIKQSIYRFRQADPQIFNDKYKAYQDNPSQGKLIILKENFRSQSEVLDSTNSVFTHLMDEEVGDILYDESHQLKAGSPRQQERHPNNKTQVLLLDTDEDDIDDSDSQQYDISPAEAKLVAKEIIRLHKEENVPFQDITLLVSSRTRNDGILQTFDRYGIPLVTDGGEQNYLKSVEVMVMLDTLRSIDNPLNDYALVALLRSPMFGFNEDDLTRIAIQDVKMAFYHKVKLSYHKEGHHSDLITPELSSKIDHFMKTFQTWRDFAKWHSLYDLIWKIYNDRFYYDYVGALPKAEQRQANLYALALRANQFEKTGFKGLSRFIRMIDKVLENENXXXFHSLIN

SEQ ID NO: 1681 - protein, 1260 aa, Streptococcus agalactiae
ATGNNNNNATCAAAGGGGCTTGAGTTTAAGTATGTATTTATTTTAAATATTGATAAGAAATTTTCAATGGTAGACATAACTTCCCCTCTTATTTTAAGCCGAAATCAAGGAATTGGTATTAAATATGTTGATGATATGCGACATGATCTCGAAGAAGAGATACTGCTTGCAGTAAAGGTTAGCATGGAAACACTTCCTTACCACCTTAATAAAAGAGAGTTACGCTTAGCTACTTTATCAGAGCAAATGCGTTTACTCTACGTAGCTATGACACGTGCAGAGAAAAAATTATATCYGGTTGGTARGGCTAGTCAAACCAAATGGGCTGATCATTATGACTTAGTATCTGAAAATAATCATCTCCCATTAGCTAGTCGTGAGACTTTTGTGACCTTTCAAGATTGGTTACTGGCTGTTCATGAAACCTATAAGAAACAAGAGTTGTTTTATGACATCAACTTCGTATCATTAGAGGAATTAACAGATCACCACATAGGGATGGTTAACCCTAGTCTACCTTTCAATCCCGATAATAAGGTAGAGAATCGTCAGTCTGAAGATATCGTGCGTGCGATTAGCGTGTTAGAATCTGTTGAGCAGATTAATCAAACTTATAAAGCGGCTATTGAGTTACCGACAGTGAGAACACCAAGTCAAGTCAAAAAATTCTATGAGCCTATTCTAGATATAGAAGGTGTTGATGTGATGGAAACTATTACTAAAACATCAGTAGATTTTAAGTTACCTGATTTTTCTACAAGTAAAAAGCAAGACCCAGCAGCTTTAGGATCTGCTGTACATGAATTAATGCAACGCATAGAGATGTCATCTCATGTCAAAATGGAAGATATTCAAAAAGCTTTGACAGAAGTGAATGCTGAAACAAGTGTCAAAGCGGCTATTCAGATTGAAAAAATCAACTATTTTTTCCAAGAAACCTCACTCGGTAAGTATATACAAGAAGAAGTAGAACATCTGCATCGAGAGGCACCTTTTGCCATGTTAAAAGAAGATCCGGAGAGTGGTGAGAAATTCGTTGTACGTGGTATTATTGATGGGTATCTACTATTAGAAAATCGGATAATTCTATTTGATTATAAGACTGATAAATTTGTCAATCCTCTAGAATTAAAAGAACGCTATCAGGGACAAATGGCTTTATATGCAGAAGCTTTAAAAAAATCTTACGAGATAGAAAAGATAGACAAATACTTAATTCTTTTAGGTGGTAAACAGCTAGAAGTGGTAAAAATGGATTAA

SEQ ID NO: 1682 - protein, 419 aa, Streptococcus agalactiae
  VARIANT 2, 3, 99, 102: Xaa = Any Amino Acid
MXXSKGLEFKYVFILNIDKKFSMVDITSPLILSRNQGIGIKYVDDMRHDLEEEILLAVKVSMETLPYHLNKRELRLATLSEQMRLLYVAMTRAEKKLYXVGXASQTKWADHYDLVSENNHLPLASRETFVTFQDWLLAVHETYKKQELFYDINFVSLEELTDHHIGMVNPSLPFNPDNKVENRQSEDIVRAISVLESVEQINQTYKAAIELPTVRTPSQVKKFYEPILDIEGVDVMETITKTSVDFKLPDFSTSKKQDPAALGSAVHELMQRIEMSSHVKMEDIQKALTEVNAETSVKAAIQIEKINYFFQETSLGKYIQEEVEHLHREAPFAMLKEDPESGEKFVVRGIIDGYLLLENRIILFDYKTDKFVNPLELKERYQGQMALYAEALKKSYEIEKIDKYLILLGGKQLEVVKMD

SEQ ID NO: 1683 - protein, 183 aa, Streptococcus agalactiae
ATGATAGTCGAACAAAAATTTGGAAATGGTTTTACTTGGATTAACATTGAAGCAGAGCAATTGCGAACAGAAACATCGGAAATTCAAGCAAAATATTTGGATAGTGAGATTATTACATATGCTCTGGATGATTATGAACGAGCCTTTATGGAATGTTCTCATATTAAAGGAAAAGAAGTCTGA

SEQ ID NO: 1684 - protein, 60 aa, Streptococcus agalactiae
MIVEQKFGNGFTWINIEAEQLRTETSEIQAKYLDSEIITYALDDYERAFMECSHIKGKEV

SEQ ID NO: 1685 - protein, 285 aa, Streptococcus agalactiae
ATGTTAGTAATTTCCAAGAAAGAGAGAGACTTTATGTCTATTACAAAAGAATTTGATACCATCGCAGCTATTTCAACTCCTCTCGGTGAGGGAGCTATTGGTATTGTCCGTATATCTGGTACAGATGCCTTAAAGATAGCATCAAAAATTTATCGTGGAAAAGATCTATCCGCGATCCAATCCCATACCTTAAACTATGGTCATATTGTGGACCCAGATAAAAATGAAATCTTGGATGAAGTTATGTTAGGCGTTATGCTTGCTCCNNNNNCATTCATTCATTAA

SEQ ID NO: 1686 - protein, 94 aa, Streptococcus agalactiae
  VARIANT 90, 91: Xaa = Any Amino Acid
MLVISKKERDFMSITKEFDTIAAISTPLGEGAIGIVRISGTDALKIASKIYRGKDLSAIQSHTLNYGHIVDPDKNEILDEVMLGVMLAPXXFIH

SEQ ID NO: 1687 - protein, 1911 aa, Streptococcus agalactiae
ATGATTATACTACAAGGAAACAAAATTGAGCGCTCATTTTCAGGTGATGTGCTTTTTGATAATATTAATATTCAAGTTGATCAACGTGATCGTATTGCTCTTGTTGGACGTAATGGTGCTGGCAAATCAACGCTTCTTAAAATTTTAGTTGGTGAAGAGGCTCCGACAAAAGGAGAAATAAATAAAAAGCGTGATTTGAGTTTGTCCTACTTGGCACAAGATAGTCGTTTTCAATCTGAAAATACGATTTTCCAAGAAATGTTACAAGTTTTTGACTCATTAAGAGAAGTAGAGAAGCGCTTACGTGAATTGGAATTACAAATGGGGCAAGTTTCAGGAAGTGACCTGGAACAATTGATGAAAACATACGATATTTTGTCAGAAGAGTTTCGTGAAAAAGGTGGCTTTACCTATGAATCAGATATAAAGGCTATTTTAAATGGTTTTAAGTTTAACAGTGATATGTGGGAAATGCCTATTAGTGAATTGTCTGGCGGGCAAAATACACGATTAGCGCTTGCAAAAATGCTACTTGAAAAGCCAGAATTACTTGTTTTAGATGAACCAACGAACCATTTAGACATTGATACGATTGCTTGGTTAGAAAATTATCTTGTAAATTATCAAGGAGCCCTTATTATTGTCAGCCATGACCGCTATTTTTTAGACAAGGTAGCTACAGTAACTTATGATTTAACGACACATTCTCTAGACCGCTATGTAGGCAATTATTCGAAATTTATGGATCTTAAGGCAGAGAAAATAGCGACTGAAGAAAAGAATTTTGAAAAACAACAAAAAGAAATTGCTAAGTTAGAAGATTTTGTACAACGTAACATTGTTAGGGCTTCAACCACTAAACGAGCACAAGCTCGTCGTAAACAATTAGAAAAGATGGAACGACTCGACAAACCGAATGTAGAGCAAAAATCAGCTAATATGACTTTTCATGCTGGGAAAGTCTCAGGGAATGTTGTTTTAACACTTGAGAATGCAGCTATTGGTTATGAAGGTGTTTCTTTATCGGAGCCAATCGATTTGGACGTGAAGAAATTTGATGCTATTGCAATTGTAGGTCCAAATGGTATCGGGAAATCAACTTTAATCAAATCGCTTGTTGGGCAAATTCCTTTTATCAAAGGAGAAGCAAAATTAGGAGCAAATGTCGAAACTGGGTATTACGATCAAAGTCAAAGTAATTTAACAAAAACGAATACTGTTTTAGATGAGTTATGGGATGCTTTTTCAACAACGCCAGAAGTTGAAATTAGAAACCGTTTAGGAGCTTTTCTTTTTTCAGGTGATGATGTTAAAAAATCAGTTTCAATGCTATCAGGTGGTGAACGAGCGCGTTTGCTATTGGCAAAATTATCTATGGAAAATAATAATTTTCTCATATTAGATGAGCCAACAAACCACTTGGATATTGATAGTAAAGAAGTCTTAGAAAATGCACTCATCGAATTTGATGGCACATTACTTTTTGTTAGTCATGATCGCTATTTTATTAATCGTGTGGCAACTAAGGTTCTCGAAATTTCTGATAAGGGAAGTACTCTCTATCTAGGAGATTATGATTATTACCTCACTAAGAAAGCCGAACTAGAGGAATTAGCACGTTTAAATGAAGAAGAAGTGAGTGCTTCAAAAACAGAAATCGACGTTACATCAGATTATGAGACACAAAAAGCAAATCAAAAGGAATTTAGGAAAATTACCCGTCGCGTTGTAGAAATTGAGGCGCGTTTGGAAGTTCTTGAAAATGATGAAAACAATATCAATGGTTTAATGTTAGAAACCAATGACATCGGAAAACTCTCTGATTTGCAAAAAGAGCTGGAATCAATCCAAGAAGAACAATTGCTATTAATGGAAGAGTGGGAAAATCTAAATATGAGACTAGATTTGTGA

SEQ ID NO: 1688 - protein, 636 aa, Streptococcus agalactiae
MIILQGNKIERSFSGDVLFDNINIQVDQRDRIALVGRNGAGKSTLLKILVGEEAPTKGEINKKRDLSLSYLAQDSRFQSENTIFQEMLQVFDSLREVEKRLRELELQMGQVSGSDLEQLMKTYDILSEEFREKGGFTYESDIKAILNGFKFNSDMWEMPISELSGGQNTRLALAKMLLEKPELLVLDEPTNHLDIDTIAWLENYLVNYQGALIIVSHDRYFLDKVATVTYDLTTHSLDRYVGNYSKFMDLKAEKIATEEKNFEKQQKEIAKLEDFVQRNIVRASTTKRAQARRKQLEKMERLDKPNVEQKSANMTFHAGKVSGNVVLTLENAAIGYEGVSLSEPIDLDVKKFDAIAIVGPNGIGKSTLIKSLVGQIPFIKGEAKLGANVETGYYDQSQSNLTKTNTVLDELWDAFSTTPEVEIRNRLGAFLFSGDDVKKSVSMLSGGERARLLLAKLSMENNNFLILDEPTNHLDIDSKEVLENALIEFDGTLLFVSHDRYFINRVATKVLEISDKGSTLYLGDYDYYLTKKAELEELARLNEEEVSASKTEIDVTSDYETQKANQKEFRKITRRVVEIEARLEVLENDENNINGLMLETNDIGKLSDLQKELESIQEEQLLLMEEWENLNMRLDL

SEQ ID NO: 1689 - protein, 969 aa, Streptococcus agalactiae
ATGGTAACTCTATCTAAAGAACAACACTTGGATATGTTTCTAAAAATGCAACGTATTCGTGATGTTGATATGAAATTTAACAAATTGGTTCGTCGTGGTTTCGTCCAAGGGATGACTCACTTCTCTGTTGGTGAAGAAGCTGCTTCAGTAGGTGCTATCCAAGATTTAACAGATTCAGATATCATTTTCTCAAACCACCGTGGACACGGACAAACTATTGCAAAAGGTATTGATATTGGTGGAATGTTTGCTGAACTTGCTGGTAAAGCAACAGGAACATCAAAAGGTCGTGGAGGCTCAATGCACTTAGCAAACCTTGAAAAAGGTAACTATGGAACAAACGGTATCGTCGGTGGAGGATATGCGCTTGCAGTAGGTGCTGCCCTTACACAGCAATATGAAGGAACTGATAACATTGTTATCGCCTTTTCGGGTGACTCAGCGACTAACGAGGGCTCATTCCATGAGTCAGTTAACTTAGCTGCTGTTTGGAACTTACCAGTTATCTTCTTTATCATCAACAACCGTTATGGTATCTCAACAGACATCACATACTCAACTAAAATTCCTCACCTTTACATGCGTGCTGATGCGTACGGTATTCCAGGGCATTATGTTGAAGATGGTAATGACCTTATGGCTGTTTACGAGAAAATGCATGAAGTTATCAATTACGTGCGTTCAGGAAATGGACCAGCTATTGTAGAGGTTGAATCATACCGTTGGTTTGGTCATTCAACTGCTGATGCTGGGGTATACCGTACTAAAGAAGAAGTTGATTCATGGAAAGCTAAAGATCCAGTAAAACGCTACCGTGCATACTTAATTGAAAATGAAATCGCTACTGAAGAAGAGCTTGCAGCTATTGAAGCACAAGTGATTAAAGAAGTTGAAGAAGGGGTTAAATTCGCTGAAGAAAGTCCATTCCCTGATATGTCTGTTGCATTTGAAGACGTTTTTGTGGACTAA

SEQ ID NO: 1690 - protein, 322 aa, Streptococcus agalactiae
MVTLSKEQHLDMFLKMQRIRDVDMKFNKLVRRGFVQGMTHFSVGEEAASVGAIQDLTDSDIIFSNHRGHGQTIAKGIDIGGMFAELAGKATGTSKGRGGSMHLANLEKGNYGTNGIVGGGYALAVGAALTQQYEGTDNIVIAFSGDSATNEGSFHESVNLAAVWNLPVIFFIINNRYGISTDITYSTKIPHLYMRADAYGIPGHYVEDGNDLMAVYEKMHEVINYVRSGNGPAIVEVESYRWFGHSTADAGVYRTKEEVDSWKAKDPVKRYRAYLIENEIATEEELAAIEAQVIKEVEEGVKFAEESPFPDMSVAFEDVFVD

SEQ ID NO: 1691 - protein, 861 aa, Streptococcus agalactiae
ATGTTAGAAGAGTTTGGTGCTAAGCGCGTTCGCGACACACCAATCTCAGAGGCTGCGATTGCAGGTTCAGCTATCGGTGCTGCACAAACAGGTTTGCGTCCTATCGTTGATTTGACATTCATGGATTTTGTAACAATCGCAATGGATGCTATCGTTAACCAAGGTGCTAAAACGAATTATATGTTTGGTGGAGGTCTATCAACTCCAGTTACTTTCCGTGTGGCATCAGGGTCAGGTATTGGTTCGGCTGCACAACACTCACAATCATTAGAAGCTTGGTTAACACACATTCCAGGTCTAAAAGTTGTTGCACCTGGTACTGTTAATGAGTCAAAAGCACTTTTGAAATCTTCTATTCTTGACAATAACCCAGTTATCTTCTTAGAGCCAAAAGCTCTCTATGGTAAGAAAGAAGAAGTTAATATGGACCCTGATTTCTATATTCCACTTGGTAAAGGGGATATTAAGCGTGAGGGGACTGACTTAACAATTGTTTCTTATGGCCGTATGCTTGAGCGTGTTATGCAAGCTGCTGAAGAAGTTGCTGAGGAAGGTATTAACGTTGAGGTTGTTGATCCACGTACACTTATTCCGCTTGATAAAGAATTAATTATCGATTCTGTTAAGAAAACTGGTAAATTGATCTTGGTTAACGATGCTTATAAAACTGGTGGTTTCACTGGTGAAATTGCAACTATGGTTGCTGAAAGTGAAGCATTTGATTACCTTGATCATCCTATCGTGCGTCTTGCAAGTGAAGATGTTCCAGTACCGTATTCACGTGTACTTGAACAAGGAATCTTACCTGATGTAGCAAAAATTAAAGATGCTATCTATAAAGTAGTTAACAAAGGTAAATAA

SEQ ID NO: 1692 - protein, 286 aa, Streptococcus agalactiae
MLEEFGAKRVRDTPISEAAIAGSAIGAAQTGLRPIVDLTFMDFVTIAMDAIVNQGAKTNYMFGGGLSTPVTFRVASGSGIGSAAQHSQSLEAWLTHIPGLKVVAPGTVNESKALLKSSILDNNPVIFLEPKALYGKKEEVNMDPDFYIPLGKGDIKREGTDLTIVSYGRMLERVMQAAEEVAEEGINVEVVDPRTLIPLDKELIIDSVKKTGKLILVNDAYKTGGFTGEIATMVAESEAFDYLDHPIVRLASEDVPVPYSRVLEQGILPDVAKIKDAIYKVVNKGK

SEQ ID NO: 1693 - protein, 1394 aa, Streptococcus agalactiae
ATGGCTGTCGAAATTATTATGCCTAAACTCGGGGTTGATATGCAAGAAGGCGAAATCCTTGAGTGGAAAAAACAGGTAGGTGATGTTGTTAATGAAGGTGACGTCCTACTTGAAATTATGTCAGATAAAACAAATATGGAGATTGAAGCAGAAGACTCAGGTGTTTTACTAAAAATCACACATGGGAATGGAGATGTTGTTCCTGTAACTGAGACAATTGGTTATATTGGTGCTGAAGGTGAAGAAGTAACAGAAGCATCTTCTTCTGAAAATACATCAGTTGAAGAAAACGCGACACAAGTAACTTCAGAACCAGAAAAAGTTGAAGAAACATCAGAACCAAGTGTGCCAGCAGCTACAAGTGGTGAAAAAGTACGTGCCACTCCTGCAGCTCGTAAATTAGCAAGAGAGATGTCTATTGACCTTGCACTAGTATCTGGAACAGGGGCAAATGGTCGCGTTCACAGAGAAGATGTTGAAAACTTCAAGGGTGCTCAACCACGTATTACACCATTGGCACGTCGAATTGCTGAAGATCAAGGAGTTGATATAGCAGAAATCACTGGCAGTGGTATTCGTGGTAAAATTGTTAAAAATGATGTTTTGGCTGCTATGTCACCGCAAGCAGCAGAGGCTCCTGTAGAAACTAAAGCTACACCAACAACAGAAGAAAAACAATTACCAGAAGGTGTTGAAGTCATTAAGATGTCTGCAATGCGTAAGGCTATTTCTAAAGGTATGACTAACTCTTACCTCACTGCTCCAAGCTTTACACTTAACTATGACATTGATATGACTGAAATGATGGCTCTTCGCAAGAAATTAATTGATCCAATCATGGCTAAAACAGGCTTGAAAGTCAGCTTTACTGATTTGATTGGAATGGCCGTTGTTAAGACATTGATGAAACCAGAGCATCGATACCTAAATGCTTCATTAATTAACGATGCACAAGAAATTGAGCTTCATAATTTTGTTAATATTGGAATCGCAGTTGGTCTTGATGATGGTTTGATTGTTCCTGTTGTTCACAATGCTGATCAAATGTCACTTTCTGACTTTGTTATAGCATCTAAAGATGTTATTAAGAAAACTCAAGAAGGTAAATTAAAATCAGCTGAAATGTCAGGTTCAACATTCTCAATTACTAACTTAGGTATGTTTGGTACTAAGACGTTTAACCCAATTATCAATCAACCGAACTCAGCAATCCTTGGAGTAGGAGCTACTATTCCGACTCCAACAGTGGTTGATGGTGAAATTGTAGCTCGACCATTATGGSAATGTGTTTAACAATTGACCACCGTATTGTTGATGGAATGAATGGTGCTAAGTTTATGGTTGATCTTAAGAACTTAATGGGAAANNNNNCATTCCATTCATTAATTAATTAA

SEQ ID NO: 1694 - protein, 464 aa, Streptococcus agalactiae
  VARIANT 428, 456, 457, 458: Xaa = Any Amino Acid
MAVEIIMPKLGVDMQEGEILEWKKQVGDVVNEGDVLLEIMSDKTNMEIEAEDSGVLLKITHGNGDVVPVTETIGYIGAEGEEVTEASSSENTSVEENATQVTSEPEKVEETSEPSVPAATSGEKVRATPAARKLAREMSIDLALVSGTGANGRVHREDVENFKGAQPRITPLARRIAEDQGVDIAEITGSGIRGKIVKNDVLAAMSPQAAEAPVETKATPTTEEKQLPEGVEVIKMSAMRKAISKGMTNSYLTAPSFTLNYDIDMTEMMALRKKLIDPIMAKTGLKVSFTDLIGMAVVKTLMKPEHRYLNASLINDAQEIELHNFVNIGIAVGLDDGLIVPVVHNADQMSLSDFVIASKDVIKKTQEGKLKSAEMSGSTFSITNLGMFGTKTFNPIINQPNSAILGVGATIPTPTVVDGEIVARPIMXMCLTIDHRIVDGMNGAKFMVDLKNLMGXXXFHSLIN

SEQ ID NO: 1695 - protein, 684 aa, Streptococcus agalactiae
ATGTCTGCAATGCGTAAGGCTATTTCTAAAGGTATGACTAACTCTTACCTCACTGCTCCAAGCTTTACACTTAACTATGACATTGATATGACTGAAATGATGGCTCTTCGCAAGAAATTAATTGATCCAATCATGGCTAAAACAGGCTTGAAAGTCAGCTTTACTGATTTGATTGGAATGGCCGTTGTTAAGACATTGATGAAACCAGAGCATCGATACCTAAATGCTTCATTAATTAACGATGCACAAGAAATTGAGCTTCATAATTTTGTTAATATTGGAATCGCAGTTGGTCTTGATGATGGTTTGATTGTTCCTGTTGTTCACAATGCTGATCAAATGTCACTTTCTGACTTTGTTATAGCATCTAAAGATGTTATTAAGAAAACTCAAGAAGGTAAATTAAAATCAGCTGAAATGTCAGGTTCAACATTCTCAATTACTAACTTAGGTATGTTTGGTACTAAGACGTTTAACCCAATTATCAATCAACCGAACTCAGCAATCCTTGGAGTAGGAGCTACTATTCCGACTCCAACAGTGGTTGATGGTGAAATTGTAGCTCGACCAATTATGGCAATGTGTTTAACAATTGACCACCGTATTGTTGATGGAATGAATGGTGCTAAGTTTATGGTTGATCTTAAGAACTTAATGGAAAACCCATTTGGTTTACTTATTTGA

SEQ ID NO: 1696 - protein, 227 aa, Streptococcus agalactiae
MSAMRKAISKGMTNSYLTAPSFTLNYDIDMTEMMALRKKLIDPIMAKTGLKVSFTDLIGMAVVKTLMKPEHRYLNASLINDAQEIELHNFVNIGIAVGLDDGLIVPVVHNADQMSLSDFVIASKDVIKKTQEGKLKSAEMSGSTFSITNLGMFGTKTFNPIINQPNSAILGVGATIPTPTVVDGEIVARPIMAMCLTIDHRIVDGMNGAKFMVDLKNLMENPFGLLI

SEQ ID NO: 1697 - protein, 1758 aa, Streptococcus agalactiae
ATGGCTTTTGATGTAATTATGCCAAAACTTGGGGTTGACATGCAAGAAGGCGAAATCCTTGAGTGGAAAAAAAATGAAGGTGACACCGTTAATGAAGGTGATGTCCTTCTTGAAATCATGTCTGATAAAACCAATATGGAAATCGAAGCAGAAGACACTGGTGTACTTTTAAAAATTGTACATCAGGCAGGAGATGTTGTTCCCGTCACTGAAGTGATTGCCTATATCGGAGAAGAAGGTGAAGAAGTAGGTACGTCATCACCTTCAGCTGATGCAACTATCACAGCTGAAGATGGTCAATCAGTTTCTGGACCTGCTGCTCCTTCACAAGAGACAGTTGCAGCAGCAACTCCTAAAGAAGAACTTGCAGCTGATGAGTACGATATCGTAGTCGTAGGTGGTGGGCCTGCAGGTTATTACGCAGCAATCCGCGGTGCTCAACTTGGAGGAAAAATTGCCATTGTTGAGAAAACTGAATTTGGCGGTACGTGTTTGAATGTTGGTTGTATCCCTACAAAAACATATCTTAAAAATGCTGAAATCCTAGATGGTTTGAAAGTAGCAGCTGGACGTGGTATCAACCTTGCTTCAACTAACTATGCAATTGATATGGATAAGACTGTTGCCTTTAAAAATTCTGTAGTTAAGACACTGACTGGTGGTGTACGTGGTCTCTTGAAAGCGAACAAAGTTGAAATTTTCAATGGACTTGGACAAGTAAACCCTGATAAGTCTGTTGTTATTGGCGATAAAGTTATCAAAGGTCGTAACGTCGTCCTTGCGACTGGTTCTAAGGTATCTCGTATTAATATTCCAGGTATTGAATCACCATTAGTATTAACATCAGATGATATTCTTGATTTACGTGAAATTCCTAAGTCACTTGCTGTTATGGGTGGTGGTGTCGTAGGTATTGAGCTTGGTCTTGTATGGGCTTCATATGGTGTTGACGTAACTGTTATTGAAATGGCTGATCGCATCATTCCAGCAATGGATAAAGAAGTATCGCTAGAACTTCAAAAAATCCTTGCTAAGAAGGGAATGAAGATTAAAACATCAGTTGGTGTTTCTGAAATTGTTGAAGCCAATAATCAATTAACGCTTAAATTAAACAACGGTGAAGAAGTTGTTGCTGATAAAGCTCTTCTTTCAATTGGACGTGTTCCACAAATGAATGGTCTTGAAAATCTTGAGCCTGAACTTGAGATGGAACGTGGACGTATTAAAGTTAATGCTTATCAAGAAACTTCAATTCCAGGTATCTATGCACCAGGTGATGTTAATGGAACTCGTATGTTAGCTCATGCTGCATACCGTATGGGTGAAGTAGCTGCTGAAAACGCACTCGGCGGTAATAAGCGTAAAGCACATCTAGATTTCACTCCAGCAGCTGTTTATACTCATCCTGAAGTAGCAATGGTGGGGATGACAGAAGAGCAAGCACGTGAACAATATGGTGACATATTAGTTGGTAAAAATAGCTTTACAGGCAATGGTCGTGCTATCGCTTCAAACGAAGCACATGGTTTTGTAAAAGTAATTGCTGAACCTAAGTATAAAGAGATTCTTGGTGTTCACATTATTGGTCCAGCTGCAGCGGAATTGATTAATGAAGCTTCTACGATTATGGAAAATGAGTTGACTGTCTACGATGTAGCACAATCTATCCATGGTCACCCAACATTCTCTGAAGTTATGTACGAAGCTTTCTTAGATGTTCTCGGTGAAGCTATTCACAACCCTCCAAAACGCAAATAA

SEQ ID NO: 1698 - protein, 585 aa, Streptococcus agalactiae
MAFDVIMPKLGVDMQEGEILEWKKNEGDTVNEGDVLLEIMSDKTNMEIEAEDTGVLLKIVHQAGDVVPVTEVIAYIGEEGEEVGTSSPSADATITAEDGQSVSGPAAPSQETVAAATPKEELAADEYDIVVVGGGPAGYYAAIRGAQLGGKIAIVEKTEFGGTCLNVGCIPTKTYLKNAEILDGLKVAAGRGINLASTNYAIDMDKTVAFKNSVVKTLTGGVRGLLKANKVEIFNGLGQVNPDKSVVIGDKVIKGRNVVLATGSKVSRINIPGIESPLVLTSDDILDLREIPKSLAVMGGGVVGIELGLVWASYGVDVTVIEMADRIIPAMDKEVSLELQKILAKKGMKIKTSVGVSEIVEANNQLTLKLNNGEEVVADKALLSIGRVPQMNGLENLEPELEMERGRIKVNAYQETSIPGIYAPGDVNGTRMLAHAAYRMGEVAAENALGGNKRKAHLDFTPAAVYTHPEVAMVGMTEEQAREQYGDILVGKNSFTGNGRAIASNEAHGFVKVIAEPKYKEILGVHIIGPAAAELINEASTIMENELTVYDVAQSIHGHPTFSEVMYEAFLDVLGEAIHNPPKRK

SEQ ID NO: 1699 - protein, 990 aa, Streptococcus agalactiae
ATGAAATATATCGTTAACACGTCTAATGATCCGGCTTACAATGTTGCTTTAGAAGCTTACGCCTTTCAAAAGTTGACAGATATCGATGAAATCTTTATTCTTTGGATTAATGAACCGGCTATCATTATTGGACGCCATCAAAATACAATTCAAGAAATTAACAAAGAGTTCATTGATAAAAATGGCATCCATGTTGTCCGTCGTTTGTCAGGAGGCGGAGCAGTTTATCATGACTTGAATAATTTAAACTACACTATTATTTCTAATAATACACAAGAAGGTGCCTTTGATTTCCAAACTTTTTCAAAACCAGTTATTGATACTCTTGCTAAATTAGGTGTTAAAGCAGAATTTACTGGTCGTAATGATTTAGAAATCAATGGACAAAAATTTGCAGGAAATGCTCAAGCTTATTACAAAGGTCGTATGATGCATCATGGTTGTCTTTTATTTGATGTTGATATGTCAGTCTTAGGGCAAGCACTCAAAGTATCTAAAGACAAAATTGAATCTAAAGGGATAAAATCTGTACGCGCACGTGTTACAAATATTGTTGACCATCTTTCAGATAAAATTACAGTACAAGAATTTAGCGATGCCATTTTAGCTCAAATGAAGGAAGAATATCCAGAGATGGATGAATATGTTTTGAGTGATGCCGAGTTATCAGAAATCCAAGCTATGCGCGATAATCAATTTGCTACATGGGATTGGACGTATGGTAAAGCACCTGAATACACCATTGAACGTGGTGTCCGCTATCCAGCTGGAAAAATTACGACTTATGCTAATGTTGAAAATTCAACGATAAAATCTGTCAAAATCTTTGGTGACTTCTTTGGAGTGAAACCTGTGGATGATATTGAAAAAATGTTGGAGGGTGTCCGCTACGATTACAAAGATGTTTTAGCAGCGCTTAAAACAGTTGATACAAGTCAATACTTCTCACGTATGACACCCGAAGAGATTACAAAAGCTATTGTAGACTAA

SEQ ID NO: 1700 - protein, 329 aa, Streptococcus agalactiae
MKYIVNTSNDPAYNVALEAYAFQKLTDIDEIFILWINEPAIIIGRHQNTIQEINKEFIDKNGIHVVRRLSGGGAVYHDLNNLNYTIISNNTQEGAFDFQTFSKPVIDTLAKLGVKAEFTGRNDLEINGQKFAGNAQAYYKGRMMHHGCLLFDVDMSVLGQALKVSKDKIESKGIKSVRARVTNIVDHLSDKITVQEFSDAILAQMKEEYPEMDEYVLSDAELSEIQAMRDNQFATWDWTYGKAPEYTIERGVRYPAGKITTYANVENSTIKSVKIFGDFFGVKPVDDIEKMLEGVRYDYKDVLAALKTVDTSQYFSRMTPEEITKAIVD

SEQ ID NO: 1701 - protein, 486 aa, Streptococcus agalactiae
ATGNNNNNAGTACTTGCTATTTGTGGAGGTTTCCAACTTTTAGGACAATACTATATTCAAGCTAATGGAGAACGAATAGAGGGCATTGGCGTTATGGGACACTATACGCTAAACCAAAATAATAATCGCTATATTGGTGATATCAAGATTCACAACGATGAATTCAATGAAACATATTATGGCTTTGAGAATCATCAAGGACGTACCTTTTTATCAGAAGACGAAAAACCTTTAGGAACCGTCATTTATGGAAATGGGAATAACAAAGAAGATGGTACTGAAGGGGTTCATTATAAGAATGTTTTTGGGTCATACTTTCACGGTCCAATCCTTTCTCGTAATGCTAATCTAGCTTACCGTCTTGTGGCAACTGCCCTCCGTAACAAATACGGTAAAGAGATTGTCCTCCCTAGTTATGAAGAAATTTTATCTTTAGAGATTCCTGAAGAATACGGAGACGTTAAATCAAAAGCAGATTTTGAATAA

SEQ ID NO: 1702 - protein, 161 aa, Streptococcus agalactiae
  VARIANT 2, 3: Xaa = Any Amino Acid
MXXVLAICGGFQLLGQYYIQANGERIEGIGVMGHYTLNQNNNRYIGDIKIHNDEFNETYYGFENHQGRTFLSEDEKPLGTVIYGNGNNKEDGTEGVHYKNVFGSYFHGPILSRNANLAYRLVATALRNKYGKEIVLPSYEEILSLEIPEEYGDVKSKADFE

SEQ ID NO: 1703 - protein, 684 aa, Streptococcus agalactiae
TTGTTTATCATCATTAGATTTGTGTCAGAATGGATAGGGCTAACAACGATTACATTTTTGATGAATCAGATTGTTACTTATGGTGTAATTGCAGGTGTTGTCATCTTTGCTCCAGAGATTAGAACAGGTCTCGAAAAATTTGGGCGAACACCACAACTATTTACGCAACGTTCTCAATTAAGCAGTGATGAAAAGCTAGTAGATGCCCTTGTTAAGGCAGTTGCTTATATGAGTCCGCGTAAAATAGGAGCCTTGATTTCAATTGAACGTACCCAAACTTTGCAAGAGTATATAGCTACAGGTATCCCATTAGATGCAGATATTTCCAGTGAATTGTTAATTAATATTTTCATTCCTAATACACCACTGCATGATGGTGCTGTTATTGTAAAAGATAAAAAAATTGCTACAGCATGCTCGTACTTACCTCTATCAGAATCATCTTCGATTTCAAAAGAATTTGGAACACGCCACAGAGCAGCGATTGGTCTATCAGAGAATTCAGATGCACTAACAGTTATTGTTTCTGAAGAGACTGGTGGTATTTCTGTTGCTTTGAAAGGTGAATTTTTACATGATCTTTCTAAAGATAGCTTTGAAGCAATTCTGAGAACTCAGTTGATTCAAAATCAAGAGGAAAACTCAAAATTAGCTTGGTATAATCAACTATTGAGGAGGAAGTAG

SEQ ID NO: 1704 - protein, 227 aa, Streptococcus agalactiae
MFIIIRFVSEWIGLTTITFLMNQIVTYGVIAGVVIFAPEIRTGLEKFGRTPQLFTQRSQLSSDEKLVDALVKAVAYMSPRKIGALISIERTQTLQEYIATGIPLDADISSELLINIFIPNTPLHDGAVIVKDKKIATACSYLPLSESSSISKEFGTRHRAAIGLSENSDALTVIVSEETGGISVALKGEFLHDLSKDSFEAILRTQLIQNQEENSKLAWYNQLLRRK

SEQ ID NO: 1705 - protein, 801 aa, Streptococcus agalactiae
ATGAATGNNNNNAAATACGATAGTGATGATTACTTTATTAGTGGATATTCTTATGGGGCAGATGTCTATATGTCATCGGTTAATCGTGTTAAGTTAGATTCTGAAATAAATGAGGATACACGAAAATTTAAAGTAGTCGCCGATTTGACAAATATGAAACCAGGGACTCACAAAGTCCCACTAAAGGTAGTAAATTTGCCATCTGGTGTAAATGCTACGGTTTCTCCAACAACAATTACAGTAACTATGGGTAAAAAGAAAACAAAAGAGTTTCCGGTTTATGGACATGTTAATGATAAGCAAATTAAAGCTGGTTATGCAGTCGATAAGATGTCAGTTGATGTGTCAAAAGTTAAAGTTACTAGTGATGAATCTATTATAGATCGTATTGACCATGTCGCTGCCAATATCCCTGATGATAAAGTTCTTGATGATGATTTTAACAAGACAGTTACTTTACAAGCTGTAACAGCAGATGGTACAGTATTAGCAAGTATTATTCACCCTTCTAAAGCAACTTTATCTGTCAAAGTAAAAAAATTGACCAAGACAGTACCGATTAATTTGATACCAGTAGGACAATTCAGCGATAGTATTTCAAAAATTAACTACAAGTTGAGTCAAGAAAAAGCAGTAATTTCAGGAACAAAAGAGGCTTTAGAAGCTATTTCTGTTATTAATGCTGAGGTAGATATTTCAGACGTAACTAAAAATACAGAAAAGAAAATTAATCTTTCTGCAAACAATGTTTCAGTTGATCCTGCTCAAGTAACAGTTCAATTGACAACTACTAAAAAATAA

SEQ ID NO: 1706 - protein, 266 aa, Streptococcus agalactiae
  VARIANT 3, 4: Xaa = Any Amino Acid
MNXXKYDSDDYFISGYSYGADVYMSSVNRVKLDSEINEDTRKFKVVADLTNMKPGTHKVPLKVVNLPSGVNATVSPTTITVTMGKKKTKEFPVYGHVNDKQIKAGYAVDKMSVDVSKVKVTSDESIIDRIDHVAANIPDDKVLDDDFNKTVTLQAVTADGTVLASIIHPSKATLSVKVKKLTKTVPINLIPVGQFSDSISKINYKLSQEKAVISGTKEALEAISVINAEVDISDVTKNTEKKINLSANNVSVDPAQVTVQLTTTKK

SEQ ID NO: 1707 - protein, 1049 aa, Streptococcus agalactiae
ATGGGAAAATATTTTGGTACAGATGGTGTTCGCGGTGAAGCTAATGTTGAACTGACGCCAGAATTGGCTTTTAAATTAGGACGTTTKGGAGGATATGTTCTAAGTCAACACGAAACTGATCGTCCGAGAGTTTTTGTAGCTCGTGATACTCGTATTTCTGGTGAAATGCTGGAATCTGCTTTGATTGCTGGTCTACTTTCAGTAGGTATTGAGGTTTATAAACTTGGTGTTTTAGCCACTCCTGGAGTGTCTTACCTTGTCCGTACAGAAAAAGCTAGTGCAGGGGTTATGATTTCAGCAAGCCACAATCCAGCACTTGATAATGGTATTAAGTTCTTTGGTAGTGATGGTTTTAAACTTGATGATGATCGTGAATTAGAAATTGAAGCTTTACTTGATGCGAAGGAAGACACTTTACCACGTCCATCAGCACAAGGTTTAGGTACTTTAGTAGATTATCCTGAAGGACTTCGGAAATATGAGAAGTTTATGGAATCAACTGGTATTGATTTAGAAGGTATGAAGGTTGCGTTGGATACAGCAAATGGAGCAGCAACAGCCTCAGCTCGGAATATCTTTTTAGACTTGAATGCTGATATAAGTGTTATTGGTGATCAACCAGATGGTTTGAATATCAATGATGGTGTTGGTTCGACACATCCTGAGCAATTACAAAGTTTAGTTAGAGAAAATGGTTCCGACATCGGTCTAGCTTTTGATGGTGATAGTGATCGTTTGATCGCTGTTGATGAAAATGGAGAGATTGTAGATGGTGATAAAATTATGTTTATCATTGGGAAATATCTCTCTGATAAAGGGCAGCTTGCTCAGAATACAATCGTAACAACGGTTATGTCAAATCTCGGCTTTCATAAAGCGCTCGACCGTGAAGGAATTCATAAAGCGATTACCGCTGTAGGAGACCGCTACGTGGTTGAAGAAATGCGTAAATCAGGATATAATCTTGGCGGAGAGCAATCAGGCCACGTTATTATCATGGATTACAATACTACAGGGGATGGACAATTAACAGCCATCCAATTGACTAA

SEQ ID NO: 1708 - protein, 349 aa, Streptococcus agalactiae
  VARIANT 29: Xaa = Any Amino Acid
MGKYFGTDGVRGEANVELTPELAFKLGRXGGYVLSQHETDRPRVFVARDTRISGEMLESALIAGLLSVGIEVYKLGVLATPGVSYLVRTEKASAGVMISASHNPALDNGIKFFGSDGFKLDDDRELEIEALLDAKEDTLPRPSAQGLGTLVDYPEGLRKYEKFMESTGIDLEGMKVALDTANGAATASARNIFLDLNADISVIGDQPDGLNINDGVGSTHPEQLQSLVRENGSDIGLAFDGDSDRLIAVDENGEIVDGDKIMFIIGKYLSDKGQLAQNTIVTTVMSNLGFHKALDREGIHKAITAVGDRYVVEEMRKSGYNLGGGAIRPRYYHGLQYYRGWTINSHPID

SEQ ID NO: 1709 - protein, 258 aa, Streptococcus agalactiae
GTGACGATTTATCCTCAAAAATTAGTAAATATTCGTGTTGAAAATAACATGAAAGATAAAGCGATGGAAGTTCCTGCAATTGCGGAAATTATTGCTAAAATGGAAGAAGAGATGGATGGCAATGGTCGTATTCTAGTACGTCCTAGTGGTACTGAGCCTCTTCTTAGAGTTATGGCAGAAGCGCCAACAAATGAAGCGGTTGATTATTATGTTGATACTATCGCAGATGTCGTTCGTACAGAAATTGGTTTAGATTAA

SEQ ID NO: 1710 - protein, 85 aa, Streptococcus agalactiae
MTIYPQKLVNIRVENNMKDKAMEVPAIAEIIAKMEEEMDGNGRILVRPSGTEPLLRVMAEAPTNEAVDYYVDTIADVVRTEIGLD

SEQ ID NO: 1711 - DNA, 387 bp, Streptococcus agalactiae
  misc_feature 360, 361, 362, 363, 364: n = A,T,C or G
atgactaaagaagcagaattattatgggctaaacacaagtatttagtcttaagtaaatctcagaaaatttatttggatattagacaaactttgaaatcaccaaattgtaccgttttagacgttcagtcactcattgaccaagcagtgcttttagaagaatcaccatcacaagtgactaatgcttatatgcatatatggggctattttaaaaataaggcagagcgtcaagaaaaagaagaatttttaaccttgctggaaaaatacaggaaaacaggttatcaacgaagaaaactgttagcttttctaaaacagctattagctaaatacccaaattcttatttacaaaactcttctattttnnnnncattccattcattaattaattaa

SEQ ID NO: 1712 - protein, 128 aa, Streptococcus agalactiae
  VARIANT 120, 121, 122: Xaa = Any Amino Acid
MTKEAELLWAKHKYLVLSKSQKIYLDIRQTLKSPNCTVLDVQSLIDQAVLLEESPSQVTNAYMHIWGYFKNKAERQEKEEFLTLLEKYRKTGYQRRKLLAFLKQLLAKYPNSYLQNSSIXXXFHSLIN

SEQ ID NO: 1713 - DNA, 1131 bp, Streptococcus agalactiae
atgttaaagaaaccaacctcagcatatgtacacattccattttgtacccaaatatgttattattgtgatttttcaaaagtttttattaaaaatcagcctgtagacgcttatcttcaggctcttatccgtgaatttcggtcttatgatattacagaattgcgcaccttatatattggaggagggacacctacatctataagcgctgtgcaactggactatttattgacggagttaagtagagatttaaacttaaatactttagaggagttcactatcgaagctaatccaggagatttamccgttgataaaatagaggtgcttcaaaagtcagctgtcaatagagtttctctaggagttcagacctttaatgataaacatttaaagcgtattggacgcagtcacaatgaggcacaaatttattctacaattgatgctcttaaaacagctggttttcaaaatatctctattgacctaatttatgccttacctggacaaacgatggatgatgttagaagtaatgtagccaaagctctctctctaaatattcctcatttgagtttatatagtttaattttagaacaccatactgtatttatgaataaaatgcgtcgtgggaaattacatttgccaacagaagatttagaagccgagatgtttgaatatatcatttctgaaatggaaagaaatggttttgagcattatgaaatttctaattttacaaagccgggttttgaaagtcgtcataatttgatgtactgggataatgtagaatattatggtgttggtgcaggcgcttctggttatcttgatggtattcgttatcgtaatagagggccaatacaacattatctaaagggggtttcagaaggtaatgcaaggttatctgaagaagtattatcaaaaaatgaaatgatggaagaggagcttttcctcggtcttcgtaaaaaagagggtgtttccatcggaaaatttgaacaaaaatttggaacgtcctttgagaaacgttacggtcagattgttcaagaactccaaagtgatgggcttttgaaagaaaataatggttttatccagatgactaaaaaaggtctcttcttaggagatacggttgccgagaaatttattgtggagtaa

SEQ ID NO: 1714 - protein, 376 aa, Streptococcus agalactiae
  VARIANT 100: Xaa = Any Amino Acid
MLKKPTSAYVHIPFCTQICYYCDFSKVFIKNQPVDAYLQALIREFRSYDITELRTLYIGGGTPTSISAVQLDYLLTELSRDLNLNTLEEFTIEANPGDLXVDKIEVLQKSAVNRVSLGVQTFNDKHLKRIGRSHNEAQIYSTIDALKTAGFQNISIDLIYALPGQTMDDVRSNVAKALSLNIPHLSLYSLILEHHTVFMNKMRRGKLHLPTEDLEAEMFEYIISEMERNGFEHYEISNFTKPGFESRHNLMYWDNVEYYGVGAGASGYLDGIRYRNRGPIQHYLKGVSEGNARLSEEVLSKNEMMEEELFLGLRKKEGVSIGKFEQKFGTSFEKRYGQIVQELQSDGLLKENNGFIQMTKKGLFLGDTVAEKFIVE

SEQ ID NO: 1715 - DNA, 738 bp, Streptococcus agalactiae
atgggtttattatatcgagaaacttacgaagtgcctttttatgaatcagacactaatcattatatgaaattaccgcagttgttggctttagcgttacaaatttcagccaaacaatctttaaaattaggaataggcgatgacatcgtttttaaaagatacggattggtttgggtcgttacagattatattattgatattgagcgtttacccaagcatgctgaaaagatagtcattgagactgaagccaaagctcataataaattattgtgttaccgctatttttatatttatggtgaagacgggcaaaaaataataacgatttcatctgcttttgtcttaatggattttaaaacacggaagattcatcctgttcttgatgatattacttcaatttaccaatcccaaagaatcaaaaaagttattcgagggccgaaatatcatcccattggagatagtaaagttaaacaataccatgttcgttattttgatttagatatgaatggacatgttaataatagtaagtatctagaatggatgtatgatgtgttggacttagattttctaagtagccacattcctaaaaaaattgatttaaaatatattaaggaaattcaatatggaacggatattaagtctcattggtatcaagatggtcttgtgacacgtcatgatattattggtggcgatgctattcatgctcaagctaggattgaatggcaggaaaaaaaggaggattaa

SEQ ID NO: 1716 - protein, 245 aa, Streptococcus agalactiae
MGLLYRETYEVPFYESDTNHYMKLPQLLALALQISAKQSLKLGIGDDIVFKRYGLVWVVTDYIIDIERLPKHAEKIVIETEAKAHNKLLCYRYFYIYGEDGQKIITISSAFVLMDFKTRKIHPVLDDITSIYQSQRIKKVIRGPKYHPIGDSKVKQYHVRYFDLDMNGHVNNSKYLEWMYDVLDLDFLSSHIPKKIDLKYIKEIQYGTDIKSHWYQDGLVTRHDIIGGDAIHAQARIEWQEKKED

SEQ ID NO: 1717 - DNA, 771 bp, Streptococcus agalactiae
atggcttataaaggatatcttattgatttagatggtactatttacaaagggaaaagtcgtatcccagcaggagagcgttttatcgaacgtttgcaagaaaaaggcattccttatatgttagtaactaataatacgactcgtacaccagaaagcgttcaggaaatgcttcgaggcttcaatgttgaaacaccacttgaaacaatctataccgcaactatggctacggttgactatatgaatgatatgaaccgtggaaaaacagcttacgttattggtgaagaagggcttaaaaaagctattgcagatgcaggttatgtggaggatacaaaaaatccagcctatgtggttgttggtttagattggaatgttacttatgataaattggcaactgctacgttagcaattcaaaatggtgctttatttattggaaccaatccagatttgaatattcctactgaacgtggtttattacccggtgctggctccttaaatgctttattagaagccgcaacgcgtataaaaccagtctttattggaaagccaaatgccatcattatgaataaggcacttgaaattttaaatattcctagaaatcaagcagtcatggtcggtgataattatttgacagatatcatggctggtattaataatgatattgatactttgttagtaacaacgggttttacaacagttgaagaagtaccagatttaccaattcaaccaagttatgttttagcaagtttagatgaatggacatttaatgaaggataa

SEQ ID NO: 1718 - protein, 256 aa, Streptococcus agalactiae
MAYKGYLIDLDGTIYKGKSRIPAGERFIERLQEKGIPYMLVTNNTTRTPESVQEMLRGFNVETPLETIYTATMATVDYMNDMNRGKTAYVIGEEGLKKAIADAGYVEDTKNPAYVVVGLDWNVTYDKLATATLAIQNGALFIGTNPDLNIPTERGLLPGAGSLNALLEAATRIKPVFIGKPNAIIMNKALEILNIPRNQAVMVGDNYLTDIMAGINNDIDTLLVTTGFTTVEEVPDLPIQPSYVLASLDEWTFNEG

SEQ ID NO: 1719 - DNA, 672 bp, Streptococcus agalactiae
atgaatggacatttaatgaaggataagttattagtagttttaacttggatttggattatatcgttagcaactctagctacaatttatattgcttggttgatctatcctatagaaattcagtttttaaaattagaaaaggttgtgtatttaaaggctgaaacaatttattataattttaataagttgatgatatatctgactcatccttttatctctgatttaaatatgcccagctttccttcttcagaggatggtttaaagcattttgcggatgtaaaatatctttttactctagcgcatgggctttttgttatactaacttttccagttatttattttttaagacgtggatggaagcaaaaaagtatctttctatatgaaggctttttcaagatagctattatgttgcctatttttattgtagtatgtgcctttctgttgggttttgaccagtttttcactctatttcatgaggtgctttttccaggagattctacttggcaatttaatcctctaacggatccagtaatttggatacttcctgaaacttttttcctccattgtttcatcatttttttgttaatctatgaaacaataactataattcttttgataataggtagaaaacatttaaaattaagaaaatataaaaacaaaatgcaagccttataa

SEQ ID NO: 1720 - protein, 223 aa, Streptococcus agalactiae
MNGHLMKDKLLVVLTWIWIISLATLATIYIAWLIYPIEIQFLKLEKVVYLKAETIYYNFNKLMIYLTHPFISDLNMPSFPSSEDGLKHFADVKYLFTLAHGLFVILTFPVIYFLRRGWKQKSIFLYEGFFKIAIMLPIFIVVCAFLLGFDQFFTLFHEVLFPGDSTWQFNPLTDPVIWILPETFFLHCFIIFLLIYETITIILLIIGRKHLKLRKYKNKMQAL

SEQ ID NO: 1721 - protein, 2343 aa, Streptococcus agalactiae
ATGAATAAGCCATATTCAATAGGCCTTGACATCGGTACTAATTCCGTCGGATGGAGCATTATTACAGATGATTATAAAGTACCTGCTAAGAAGATGAGAGTTTTAGGGAACACTGATAAAGAATATATTAAGAAGAATCTCATAGGTGCTCTGCTTTTTGATGGCGGGAATACTGCTGCAGATAGACGCTTGAAGCGAACTGCTCGTCGTCGTTATACACGTCGTAGAAATCGTATTCTATATTTACAAGAAATTTTTGCAGAGGAAATGAGTAAAGTTGATGATAGTTTCTTTCATCGATTAGAGGATTCTTTTCTAGTTGAGGAAGATAAGAGAGGGAGCAAGTATCCTATCTTTGCAACATTGCAGGAAGAGAAAGATTATCATGAAAAATTTTCGACAATCTATCATTTGAGAAAAGAATTAGCTGACAAGAAAGAAAAAGCAGACCTTCGTCTTATTTATATTGCTCTAGCTCATATCATTAAATTTAGAGGGCATTTCCTAATTGAGGATGATAGCTTTGATGTCAGGAATACAGACATTTCAAAACAATATCAAGATTTTTTAGAAATCTTTAATACAACTTTTGAAAATAATGATTTGTTATCTCAAAACGTTGACGTAGAGGCAATACTAACAGATAAGATTAGCAAGTCTGCGAAGAAAGATCGTATTTTAGCGCAGTATCCTAACCAAAAATCTACTGGCATTTTTGCAGAATTTTTGAAATTGATTGTCGGAAATCAAGCTGACTTCAAGAAATATTTCAATTTGGAGGATAAAACGCCGCTTCAATTCGCTAAGGATAGCTACGATGAAGATTTAGAAAATCTTCTTGGACAGATTGGTGATGAATTTGCAGACTTATTCTCAGCAGCGAAAAAGTTATATGATAGTGTCCTTTTGTCTGGCATTCTTACAGTAATCGACCTCAGTACCAAGGCGCCACTTTCAGCTTCTATGATTCAGCGTTATGATGAACATAGAGAGGACTTGAAACAGTTAAAACAATTCGTAAAAGCTTCATTGCCGGAAAAATATCAAGAAATATTTGCTGATTCATCAAAAGATGGCTACGCTGGTTATATTGAAGGTAAAACTAATCAAGAAGCTTTTTATAAATACCTGTCAAAATTGTTGACCAAGCAAGAAGATAGCGAGAATTTTCTTGAAAAAATCAAGAATGAAGATTTCTTGAGAAAACAAAGGACCTTTGATAATGGCTCAATTCCACACCAAGTCCATTTGACAGAGCTGAAAGCTATTATCCGCCGTCAATCAGAATACTATCCCTTCTTGAAAGAGAATCAAGATAGGATTGAAAAAATCCTTACCTTTAGAATTCCTTATTATATCGGGCCACTAGCACGTGAGAAGAGTGATTTTGCATGGATGACTCGCAAAACAGATGACAGTATTCGACCTTGGAATTTTGAAGACTTGGTTGATAAAGAAAAATCTGCGGAAGCTTTTATCCATCGTATGACCAACAATGATTTTTATCTTCCTGAAGAAAAAGTTTTACCAAAGCATAGTCTTATTTATGAAAAATTTACGGTCTATAATGAGTTGACTAAGGTTAGATATAAAAATGAGCAAGGTGAGACTTATTTTTTTGATAGCAATATTAAACAAGAAATCTTTGATGGAGTATTCAAGGAACATCGTAAGGTATCCAAGAAGAAGTTGCTAGATTTTCTGGCTAAAGAATATGAGGAGTTTAGGATAGTAGATGTTATTGGTCTAGATAAAGAAAATAAAGCTTTCAACGCCTCATTGGGAACTTACCACGATCTCGAAAAAATACTAGACAAAGATTTTCTAGATAATCCAGATAATGAGTCTATTCTGGAAGATATCGTCCAAACTCTAACATTATTTGAAGACAGAGAAATGATTAAGAAGCGTCTTGAAAACTATAAAGATCTTTTTACAGAGTCACAACTAAAAAAACTCTATCGTCGTCACTATACTGGCTGGGGACGATTGTCTGCTAAGTTAATCAATGGTATTCGAGATAAAGAGAGTCAAAAAACAATCTTGGACTATCTTATTGATGATGGTAGATCTAATCGCAACTTTATGCAGTTGATAAATGATGATGGTCTATCTTTCAAATCAATTATCAGTAAGGCACAGGCTGGTAGTCATTCAGATAATCTAAAAGAAGTTGTAGGTGAGCTTGCAGGTAGCCCTGCTATTAAAAAGGGAATTCTACAAAGTTTGAAAATTGTTGATGAGCTTGTTAAAGTCATGGGATACGAACCTGAACAAATTGTGGTTGAGATGGCGCGTGAGAATCAAACAACAAATCAANNNNNCATTCCATTCATTAATTAA

SEQ ID NO: 1722 - protein, 780 aa, Streptococcus agalactiae
  VARIANT 774, 775: Xaa = Any Amino Acid
MNKPYSIGLDIGTNSVGWSIITDDYKVPAKKMRVLGNTDKEYIKKNLIGALLFDGGNTAADRRLKRTARRRYTRRRNRILYLQEIFAEEMSKVDDSFFHRLEDSFLVEEDKRGSKYPIFATLQEEKDYHEKFSTIYHLRKELADKKEKADLRLIYIALAHIIKFRGHFLIEDDSFDVRNTDISKQYQDFLEIFNTTFENNDLLSQNVDVEAILTDKISKSAKKDRILAQYPNQKSTGIFAEFLKLIVGNQADFKKYFNLEDKTPLQFAKDSYDEDLENLLGQIGDEFADLFSAAKKLYDSVLLSGILTVIDLSTKAPLSASMIQRYDEHREDLKQLKQFVKASLPEKYQEIFADSSKDGYAGYIEGKTNQEAFYKYLSKLLTKQEDSENFLEKIKNEDFLRKQRTFDNGSIPHQVHLTELKAIIRRQSEYYPFLKENQDRIEKILTFRIPYYIGPLAREKSDFAWMTRKTDDSIRPWNFEDLVDKEKSAEAFIHRMTNNDFYLPEEKVLPKHSLIYEKFTVYNELTKVRYKNEQGETYFFDSNIKQEIFDGVFKEHRKVSKKKLLDFLAKEYEEFRIVDVIGLDKENKAFNASLGTYHDLEKILDKDFLDNPDNESILEDIVQTLTLFEDREMIKKRLENYKDLFTESQLKKLYRRHYTGWGRLSAKLINGIRDKESQKTILDYLIDDGRSNRNFMQLINDDGLSFKSIISKAQAGSHSDNLKEVVGELAGSPAIKKGILQSLKIVDELVKVMGYEPEQIVVEMARENQTTNQXXIPFIN

SEQ ID NO: 1723 - protein, 1074 aa, Streptococcus agalactiae
ATGTATACAGGGGAAGCTCTAGATATTGACAATTTAAGTCAATATGATATTGACCACATTATTCCTCAAGCTTTCATAAAAGATGATTCTATTGATAATCGTGTTTTGGTATCATCTGCTAAAAATCGTGGAAAGTCAGATGATGTTCCTAGCCTTGAAATTGTAAAAGATTGTAAAGTTTTCTGGAAAAAATTACTTGATGCTAAGTTAATGAGTCAGCGTAAGTATGATAATTTGACTAAGGCAGAGCGCGGAGGCCTAACTTCCGATGATAAGGCAAGATTTATCCAACGTCAGTTGGTTGAGACACGACAAATTACCAAGCATGTTGCCCGTATCTTGGATGAACGCTTTAATAATGAGCTTGATAGTAAAGGTAGAAGGATCCGCAAAGTTAAAATTGTAACCTTGAAGTCAAATTTGGTTTCAAATTTCCGAAAAGAATTTGGATTCTATAAAATTCGTGAAGTTAACAATTATCACCATGCACATGATGCCTATCTTAATGCAGTAGTTGCTAAAGCTATTCTAACCAAATATCCTCAGTTAGAGCCAGAATTTGTCTACGGCGACTATCCAAAATATAATAGTTACAAAACGCGTAAATCCGCTACAGAAAAGCTATTTTTCTATTCAAATATTATGAACTTCTTTAAAACTAAGGTAACTTTAGCGGATGGAACCGTTGTTGTAAAAGATGATATTGAAGTTAATAATGATACGGGTGAAATTGTTTGGGATAAAAAGAAACACTTTGCGACAGTTAGAAAAGTCTTGTCATACCCTCAGAACAATATCGTGAAGAAGACAGAGATTCAGACAGGTGGTTTCTCTAAGGAATCAATCTTGGCGCATGGTAACTCAGATAAGTTGATTCCAAGAAAAACGAAGGATATTTATTTAGATCCTAAGAAATATGGAGGTTTTGATAGTCCGATAGTAGCTTACTCTGTTTTAGTTGTAGCTGATATCAAAAAGGGTAAAGCACAAAAACTAAAAACAGTTACGGAACTTTTAGGAATTACCATCATGGAGAGGTCCGAGATNNNNNCATTCCATTCATTAATTAATTAA

SEQ ID NO: 1724 - protein, 357 aa, Streptococcus agalactiae
  VARIANT 349, 350, 351: Xaa = Any Amino Acid
MYTGEALDIDNLSQYDIDHIIPQAFIKDDSIDNRVLVSSAKNRGKSDDVPSLEIVKDCKVFWKKLLDAKLMSQRKYDNLTKAERGGLTSDDKARFIQRQLVETRQITKHVARILDERFNNELDSKGRRIRKVKIVTLKSNLVSNFRKEFGFYKIREVNNYHHAHDAYLNAVVAKAILTKYPQLEPEFVYGDYPKYNSYKTRKSATEKLFFYSNIMNFFKTKVTLADGTVVVKDDIEVNNDTGEIVWDKKKHFATVRKVLSYPQNNIVKKTEIQTGGFSKESILAHGNSDKLIPRKTKDIYLDPKKYGGFDSPIVAYSVLVVADIKKGKAQKLKTVTELLGITIMERSEXXXFHSLIN

SEQ ID NO: 1725 - protein, 555 aa, Streptococcus agalactiae
ATGAATGNNNNNATTGCACAAAAAATTTTGAATCAGTCTTTTTATCTCGGTGAGTGTTCTTTCTTTGAAAAATCCCAGTCTATTATGAATCTCTACCATGACTTAGAACCTTTTGATCCTTCTAATCGTGAGGGGCATGCTGCTAGGATTTATTTCAATACACTTTTTGGAAATGATTTTTCAAGAGAGCAGGATAATCCAATAAATGCTGGTTTAGACTACGGATATTCATTGCTTTTGAGTATGTTTGCGCGTGAAGTTGTTAAGTGTGGTTGCATGACACAATTTGGCTTGAAGCATGCTAATCAATTTAATCAGTTCAACCTAGCAAGCGATATTATGGAACCATTTCGCCCAATCGTTGATAGGATTATTTATGAAAATAGGCAGAGTGATTTKGTCAAAATGAAAAGAGAACTCTTTTCTATGTTTTCAGAGACATACAGCTACAATGGTAAAGAAATGTATCTCTCAAATATTGTCAGCGACTATACCAAAAAAGTTATTAAGTCGCTAAATAGTGATGGGAATGGAATTCCGGAGTTTAGGATATGA

SEQ ID NO: 1726 - protein, 184 aa, Streptococcus agalactiae
  VARIANT 3, 4, 133: Xaa = Any Amino Acid
MNXXIAQKILNQSFYLGECSFFEKSQSIMNLYHDLEPFDPSNREGHAARIYFNTLFGNDFSREQDNPINAGLDYGYSLLLSMFAREVVKCGCMTQFGLKHANQFNQFNLASDIMEPFRPIVDRIIYENRQSDXVKMKRELFSMFSETYSYNGKEMYLSNIVSDYTKKVIKSLNSDGNGIPEFRI

SEQ ID NO: 1727 - protein, 327 aa, Streptococcus agalactiae
ATGCGAATGATTTTAATGTTTGATATGCCTACTGAAACAGCAGAAGAACGGAAGGCGTATCGTAAGTTTAGAAAGTTTCTCTTGAGCGAAGGCTTTATCATGCATCAGTTTTCTGTTTATAGTAAATTATTACTCAATAATACAGCTAATAATGCTATGATAGGTCGGCTTAAAGTGAATAATCCTAAAAAGGGTAATATCACACTCTTAACAGTTACGGAAAAACAATTTGCGAGAATGGTTTACCTCCATGGAGAACGCAACACAAGTGTTGCCAACTCTGATAGTCGCTTGGTTTTCCTAGGAGATTCTTATGATCAAGATTAA

SEQ ID NO: 1728 - protein, 108 aa, Streptococcus agalactiae
MRMILMFDMPTETAEERKAYRKFRKFLLSEGFIMHQFSVYSKLLLNNTANNAMIGRLKVNNPKKGNITLLTVTEKQFARMVYLHGERNTSVANSDSRLVFLGDSYDQD

SEQ ID NO: 1729 - protein, 666 aa, Streptococcus agalactiae
ATGATCAAGATTAATTTTCCAATTTTAGATGAACCATTAGTGTTAAGTAATGCTACGATTTTAACGATAGAAGATGTTTCAGTTTATTCTTCATTGGTGAAACATTTTTATCAATATGACGTAGATGAACATTTGAAATTATTTGATGATAAGCAGAAAAGTCTGAAGGCAACAGAGTTAATGCTGGTTACAGATATCTTAGGATACGATGTCAACTCAGCACCTATTCTAAAGTTGATACATGGTGACTTAGAAAATCAATTCAACGAAAAGCCAGAAGTGAAATCAATGGTAGAAAAATTAGCAGCTACTATTACAGAACTTATCGCATTTGAGTGTCTAGAGAATGAGCTTGATTTAGAATACGATGAAATTACGATTTTAGAACTCATTAAGGCACTGGGAGTCAAAATTGAGACACAGAGCGACACTATCTTTGAAAAATGTTTTGAAATTATACAAGTTTACCATTATTTAACGAAAAAGAATCTCTTGGTTTTTGTTAATAGCGGAGCTTATCTTACCAAAGATGAAGTTATAAAATTATGTGAATACATCAATTTAATGCAAAAGTCAGTACTCTTTCTAGAACCTAGAAGACTCTATGATTTACCGCAATATGTTATTGATAAGGATTATTTCTTGATAGGCGAAAATATGGTATAA

SEQ ID NO: 1730 - protein, 221 aa, Streptococcus agalactiae
MIKINFPILDEPLVLSNATILTIEDVSVYSSLVKHFYQYDVDEHLKLFDDKQKSLKATELMLVTDILGYDVNSAPILKLIHGDLENQFNEKPEVKSMVEKLAATITELIAFECLENELDLEYDEITILELIKALGVKIETQSDTIFEKCFEIIQVYHYLTKKNLLVFVNSGAYLTKDEVIKLCEYINLMQKSVLFLEPRRLYDLPQYVIDKDYFLIGENMV

SEQ ID NO: 1731 - DNA, 342 bp, Streptococcus agalactiae
ttgggtctagcagcaagttttggaaccattcgaaacagcacagctctaaaactttatgcaaagcagtcaccagcatttagaagttttggaaccattcgaaacagcacagctctaaaacaattgacgcttgatagtttaaatcttttaagttttggaaccattcgaaacagcacagctctaaaacacggtgttgcacactctatcacttataaaagttttggaaccattcgaaacagcacagctctaaaacaaagaaaaaaacgaaaagtatcacacagttgttttggaaccattcgaaacagcacagctctaaaacaaacgtgcgtattatgtaggaaataa

SEQ ID NO: 1732 - protein, 113 aa, Streptococcus agalactiae
MGLAASFGTIRNSTALKLYAKQSPAFRSFGTIRNSTALKQLTLDSLNLLSFGTIRNSTALKHGVAHSITYKSFGTIRNSTALKQRKKRKVSHSCFGTIRNSTALKQTCVLCRK

SEQ ID NO: 1733 - DNA, 417 bp, Streptococcus agalactiae
atggaacaaaccttttttatgataaaacctgatggtgtaaaacgtggttttattggagaagttattagtcgtattgagcgtcgaggcttctctattgatcgcttagaggttagatatgcagatgcagatattttgaaaagacattatgcagaactgacggatagaccattctttccaacattagtagattatatgactagtggtccagtaatcattggagttatttcgggagaagaggtcatttcaacttggcgcaccatgatggggagtactaaccccaaagatgcccttccaggaactattcgaggagattttgcacaagctccctctccaaaccaagcgacatgtaatattgttcatgggtcagactcacctgaatctgcaactcgcgagatagccatttggttcaataactaa

SEQ ID NO: 1734 - protein, 138 aa, Streptococcus agalactiae
MEQTFFMIKPDGVKRGFIGEVISRIERRGFSIDRLEVRYADADILKRHYAELTDRPFFPTLVDYMTSGPVIIGVISGEEVISTWRTMMGSTNPKDALPGTIRGDFAQAPSPNQATCNIVHGSDSPESATREIAIWFNN

SEQ ID NO: 1735 - DNA, 1833 bp, Streptococcus agalactiae
atgaatattgaagatttgaagaaacgtcaagaaaagattagaaacttttcgattatcgctcatattgaccatggaaaatcaaccttagcagaccgtattttagagaaaacagaaacggtttctagtcgtgaaatgcaggcgcaactgttggactctatggatctagaacgtgagcgtggaattactataaagttaaatgctattgagcttaattatactgctaaagatggtgaaacttacatttttcacttgattgacacgccagggcatgttgacttcacatatgaagtatcacgttcattggcagcttgtgagggtgctatactggttgttgatgcagcccaaggaattgaagctcaaactctggcaaatgtttatttggctctagacaatgatttagagatactaccagttattaataaaattgatttaccagcagcagatccagaacgtgtacgtgcagaagtagaggatgttattggtctagatgcttcagaagctgtgcttgcctcagctaaggcagggattggtattgaagaaattttagagcagatcgttgaaaaagttcctgcaccgactggggaagtagatgctcctcttcaagctctaatttttgattctgtttatgatgcttatcgtggagtaattcttcaagtaaggattgtaaatggtatggttaagccaggagataagattcaaatgatgtctaatggtaaaaccttcgacgttactgaggttggtattttcactcccaaagcagttggacgtgattttttagcaactggagatgtagggtatattgctgcctcaattaaaacggttgctgatacacgtgttggtgataccattacccttgctaataacccagcaatagaacccttgcatggctataagcaaatgaacccaatggtttttgccggtctttatccaattgaatcaaataagtataacgatctgcgtgaagcccttgaaaaattacaattgaatgatgctagtctacagtttgaaccggaaacatcacaagcattagggtttggtttccgttgtggtttcttaggacttttacatatggacgttatccaagagcgcttggaacgagagttcaatattgatcttattatgactgcaccatcagtagtttatcatgttaatacaactgacggtgaaatgcttgaagtttcgaatccatctgaatttcctgatcctactcgtgttgacagcattgaagaaccatatgttaaggcgcaaattatggttcctcaagaatttgtcggtgctgtaatggagttagcacaacgtaaacgtggtgactttgtaacaatggattatattgatgataatcgtgttaatgttatttaccaaattcctttagctgaaattgtgtttgacttctttgataagcttaaatcatcaacacgtggctatgctagttttgattatgaaatttccgaatatcgtcgctcacaattagttaaaatggatattcttttaaatggtgataaagtggatgctttaagctttattgttcacaaagaatttgcctatgaacgtggtaaattgatcgttgataagttgaaaaaaatcattcctcgtcagcagtttgaagttcctatccaagcagctattggacaaaaaattgtggcccgttctgatataaaagcactacgtaaaaatgtcttagcaaaatgttatggtggtgacgtttcacgtaaacgtaagttgcttgaaaaacaaaaagctggtaaaaagcgcatgaaagcaattggttccgtcgaagttcctcaggaagctttcttaagtgttttatcaatggacgatgatgacaaaaaataa

SEQ ID NO: 1736 - protein, 610 aa, Streptococcus agalactiae
MNIEDLKKRQEKIRNFSIIAHIDHGKSTLADRILEKTETVSSREMQAQLLDSMDLERERGITIKLNAIELNYTAKDGETYIFHLIDTPGHVDFTYEVSRSLAACEGAILVVDAAQGIEAQTLANVYLALDNDLEILPVINKIDLPAADPERVRAEVEDVIGLDASEAVLASAKAGIGIEEILEQIVEKVPAPTGEVDAPLQALIFDSVYDAYRGVILQVRIVNGMVKPGDKIQMMSNGKTFDVTEVGIFTPKAVGRDFLATGDVGYIAASIKTVADTRVGDTITLANNPAIEPLHGYKQMNPMVFAGLYPIESNKYNDLREALEKLQLNDASLQFEPETSQALGFGFRCGFLGLLHMDVIQERLEREFNIDLIMTAPSVVYHVNTTDGEMLEVSNPSEFPDPTRVDSIEEPYVKAQIMVPQEFVGAVMELAQRKRGDFVTMDYIDDNRVNVIYQIPLAEIVFDFFDKLKSSTRGYASFDYEISEYRRSQLVKMDILLNGDKVDALSFIVHKEFAYERGKLIVDKLKKIIPRQQFEVPIQAAIGQKIVARSDIKALRKNVLAKCYGGDVSRKRKLLEKQKAGKKRMKAIGSVEVPQEAFLSVLSMDDDDKK

SEQ ID NO: 1737 - DNA, 954 bp, Streptococcus agalactiae
  misc_feature 927, 928, 929, 930, 931: n = A,T,C or G
atggccaaagatattgatctaagtaagccaattccaaatccacatcatgatgatgaagatcatcacaaaggtcatcaccatgatgagtccgaccataagcatgaagaacacgagcacactaagtcaaataaattatctgatgaagatcaaaagaaattaatttatttagcagagaagcttggtttaaatcctaatcaaattgaagtattaacgtcagaggatggaagtatcatctttaagtatccacatgatgaccactcacacaccatagcaagtaaggatattgaaattgggaagcctatcccagatggacaccacgatcactctcatgcaaaagataaagttggtatggcaactctaaaacaaattggttttgatgatgagattattcaggatattctgcatgcagatgctccaacaccattcccatcaaatgaaactaatcctgaaaaaatgcgtcagtggcttgcaactgttactaagattaacattggacaaagaaccaatccattccagcgttttggtctatcattgatgcctaatattgaagttctaggaattgggtttactccgattaatgatatgacgccagttttgcaattcaaaaaacttaaacagctttggatgacaaatactggtattacagattattctttccttgataagatgccactattagaaggattggatatttcacaaaacggtattaaggatttatctttccttacaaaatataaacaattaagtcttattgctgcagctaataatggcattacttcgctaaaamcattggctgaattaccaaaccttcaattcttagttttgagtcataacaatatctctgacttgacaccgttatcaaacttgacaaaactccaagaattgcaccttgatcataataatggtgaagaatttaagtgcactttnnnnncattccattcattaattaattaa

SEQ ID NO: 1738 - protein, 317 aa, Streptococcus agalactiae
  VARIANT 263, 309, 310, 311: Xaa = Any Amino Acid
MAKDIDLSKPIPNPHHDDEDHHKGHHHDESDHKHEEHEHTKSNKLSDEDQKKLIYLAEKLGLNPNQIEVLTSEDGSIIFKYPHDDHSHTIASKDIEIGKPIPDGHHDHSHAKDKVGMATLKQIGFDDEIIQDILHADAPTPFPSNETNPEKMRQWLATVTKINIGQRTNPFQRFGLSLMPNIEVLGIGFTPINDMTPVLQFKKLKQLWMTNTGITDYSFLDKMPLLEGLDISQNGIKDLSFLTKYKQLSLIAAANNGITSLKXLAELPNLQFLVLSHNNISDLTPLSNLTKLQELHLDHNNGEEFKCTXXXFHSLIN

SEQ ID NO: 1739 - DNA, 330 bp, Streptococcus agalactiae
  misc_feature 8, 9, 10, 11, 12: n = A,T,C or G
atgaatgnnnnngacgaatcaaagcctatctttgtttatgaatcagacgagggtaaagttgttgcccacttgtttcttcaattacaagaaaaacgtgacttacctcgaaagtcatttaaaactctctatatagatgatttgtgcattgatgaggaagtaagaggtcagcaaattggacaaaagttgatggattttgcaagacaatatgctaagaaacatgggtgttataatataactttaaatgtttggaatgataatcagagagcggtctctttttatgaaaaattaggttttaaacctcaacaaactcaaatggaggagatactataa

SEQ ID NO: 1740 - protein, 109 aa, Streptococcus agalactiae
  VARIANT 3, 4: Xaa = Any Amino Acid
MNXXDESKPIFVYESDEGKVVAHLFLQLQEKRDLPRKSFKTLYIDDLCIDEEVRGQQIGQKLMDFARQYAKKHGCYNITLNVWNDNQRAVSFYEKLGFKPQQTQMEEIL

SEQ ID NO: 1741 - protein, 435 aa, Streptococcus agalactiae
ATGAAAGAAACACAAGAAGAATTACGTCAGCGTATTGGACATACAGCTTATCAAGTAACCCAAAATTCAGCTACGGAACATGCTTTTACTGGGAAGTATGATGATTTTTTTGAAGAGGGGATATATGTAGATATCGTCAGTGGAGAGGTTTTATTCTCTTCTTTAGATAAATTTCAATCTGGTTGTGGTTGGCCAGCATTTTCAAAACCAATTGAGAATCGAATGGTGACAAATCATCAAGATCACTCTCATGGAATGCATCGTATTGAGGTTAGGAGTCGTCAAGCTGACTCTCATTTAGGGCATGTATTTAATGATGGACCGGTTGATGCAGGTGGTTTACGCTATTGTATCAATTCAGCTGCCTTAGATTTTATTCCTTATGACCAGATGGCAAAGAGAGGCTATGGGGACTACCTATCACTTTTTGATTAA

SEQ ID NO: 1742 - protein, 144 aa, Streptococcus agalactiae
MKETQEELRQRIGHTAYQVTQNSATEHAFTGKYDDFFEEGIYVDIVSGEVLFSSLDKFQSGCGWPAFSKPIENRMVTNHQDHSHGMHRIEVRSRQADSHLGHVFNDGPVDAGGLRYCINSAALDFIPYDQMAKRGYGDYLSLFD

SEQ ID NO: 1743 - protein, 2793 aa, Streptococcus agalactiae
ATGGCTTCTACAAATAATGTTTCAGATACAAACACACGTTTTGCTAAAGAGGAGTTAGAAGAGGTTTTCGAAGAATTAGGGACAACTCAAGGTGGTTTATCAGATGAAGAGGTTGCTGTACGTCAGAAAAAATATGGTTTAAACCTGTTATCTGAAGTAAAGCAAGAATCGATTATTTTATTGTTTCTGAAAAATTTTACTAGTCTTATGGCAATACTATTATGGGTTGGAGGATTTGTGGCTATTGTTTCTAATAGCTTAGAGCTAGGTCTTGCCATTTGGATGGTTAATGTGATTAATGGTATTTTTAGTTTCATTCAGGAATACCGTGCAAGCCAAGCAACACAAGCTCTCGAGAAAATGTTACCATCTTATTCACGTGTTCTTAGAAAAGGCTCAGAAGAAAAGATATTATCAGAGCAACTAGTCCCAGGCGATATTGTTCTTATTGAAGAAGGAGACCGTATTTCAGCAGATGGTCGCTTGATTAAAACAACAGATTTGCAAGTAAACCAATCAGCCTTGACAGGGGAATCAAATCCTATTTATAAAGATAGCAATGTTGAAAACGACCAGTCTAAAACATTGATTGAATGTGATAATATGGTTTTCGCAGGAACGACGGTCTCCAGTGGTAGCGCAACAATGGTTGTTACGGCAATTGGAATGCAAACTCAATTTGGTCAAATCGCTGATTTAACACAAGGGATGAAATCAGAAAAAAGCCCTCTTCAAAGAGAACTTGATCGGTTGACCAAACAGATTTCTATCATTTCAATTACGGTAGGAATTATCTTTTTCTTAGCAGCGACTTTTTTTGTTAAGGAGCCAGTGTCAAAATCATTTATCTTTGCCTTGGGGATGATCGTTGCATTTATCCCAGAAGGTTTACTACCTACCGTTACACTTTCTCTAGCTATGGCAGTCCAACGAATGGCTAAAGAACACGCACTTGTCAAAAAACTTTCTTCAGTTGAGACTCTTGGAGCAACCTCAGTTATCTGTTCTGATAAGACTGGTACATTAACGCAAAATGAAATGACCGTCAATCATTTGTGGCAAAATGGAAAGAGTTACCAAGTGACAGGACTGGGTTATGCTCCAGAAGGACAGATTCTTTTTGAAGGTGACAATATTTGCTTTGGTAATAGTGATAGAGGAGACTTAGAAAAACTTATTCGTTTTGCTCATCTCTGTAGCAACGCTCAAGTATTACCACCAAATGATGATCGTTCAACTTATACTGTACTTGGAGATCCGACAGAAGCTTGTTTGAATGTTTTATTGGAAAAATCAGGGATAAACATACAAGAAAATCGTAAGTTTGCACCACGTTTGAAAGAATTACCTTTTGATTCGGTTAGAAAACGCATGACAACTATTCATAGCTTAGGAGGCGATGAAAAGGATAAAAAAATTTCAATTACAAAAGGTGCGCCGAAAGAAATACTTGATTTATCAGATTATGTCTTATCTGATGGCAAAGTTATCCCCTTAAACAAGGAAGAACGTAATAAAATACAGTTGGCTAACGATACATTTGCTAAAGATGGACTTCGCGTCTTAGCTGTTTCATACTGCGATATTGAAGGCTTTTCAAAAGAACAATGGACGCAAGAAAATTTGGAACAACACATGGTGTTTATAGGGTTGATAGCAATGAGTGATCCACCTCGTGAAGGCGTTCGCGAAGCTATTGATAAATGTCATGCAGCAAGCATTCGTATTATTATGGTGACTGGAGATTACGGATTAACGGCACTAAGTATCGCTAAAAATATTGGTATTATTCGTAACGATGATGCTAAAGTAATTTCAGGTTTAGAGTTATCAGAAATGACGGATAGCCAATTGAAAAAAGAATTGTCAGGTGAAGTCGTTTTTGCTCGTGTAGCACCAGAACAAAAATATCGAGTAGTAACGATATTACAGGAGATGGGTGAAGTAGTAGCAGTTACAGGAGACGGGGTCAATGATGCGCCTGCGCTAAAAAAATCCGATATTGGTGTAGCCATGGGTGTTACCGGTACTGATGTTGCTAAAGAATCAGCTGATATGATTCTGACAGATGATCATTTTGCTTCTATTGTACATGCTGTGGAAGAAGGACGGGCTGTTTATCAAAACATTAAGAAATTCTTGACGTATATTTTTAATAGTAATACTCCTGAGGCTGTTCCGTCGGCATTCTTCCTTTTTTCTAAAGGTTTTATTCCTTTACCATTGACTGTAATGCAAATACTTGCTGTTGATTTGGGAACCGATATGCTTCCCGCTTTAGGTCTGGGCGTGGAACCACCAGAAACAGACGTTATGAATCGTCCTCCAAGACGGCTAACAGATCGCTTATTGGACAAAGGGCTACTTATAAAATCTTTCCTTTGGTACGGCACTATTGAATCCGTATTAGCTATGGGTGGTTTTTTCTGGGCTCATTACTTACGTTATGGTAATTTTACTTTTTTCGTCGCAAACGGCATACCGTACAGAGAAGCGACAACTATGACACTTGGAGCTATTATCTTTAGCCAGATAGGTATGGTTATGAATAGCAGAACGAGCTATCAATCTATTAAAGCACTATCTATTTTTGGTAATAAATTAATTAATTTTGGTATAATAATGGAGATTTTAGCATTTTTAGTCTTAGTATACGTGCCACTATTCCATAACTTATTCAACACAGCAAGCCTAGGTTTATCACATTGGCTCTATTTAATAAGCTGCCCATTTATCATGATAGGTTTAGATGAAGTTCGGAAATTATTCAGCAGTAGAAAGAATAAACGGTGA

SEQ ID NO: 1744 - protein, 930 aa, Streptococcus agalactiae
MASTNNVSDTNTRFAKEELEEVFEELGTTQGGLSDEEVAVRQKKYGLNLLSEVKQESIILLFLKNFTSLMAILLWVGGFVAIVSNSLELGLAIWMVNVINGIFSFIQEYRASQATQALEKMLPSYSRVLRKGSEEKILSEQLVPGDIVLIEEGDRISADGRLIKTTDLQVNQSALTGESNPIYKDSNVENDQSKTLIECDNMVFAGTTVSSGSATMVVTAIGMQTQFGQIADLTQGMKSEKSPLQRELDRLTKQISIISITVGIIFFLAATFFVKEPVSKSFIFALGMIVAFIPEGLLPTVTLSLAMAVQRMAKEHALVKKLSSVETLGATSVICSDKTGTLTQNEMTVNHLWQNGKSYQVTGLGYAPEGQILFEGDNICFGNSDRGDLEKLIRFAHLCSNAQVLPPNDDRSTYTVLGDPTEACLNVLLEKSGINIQENRKFAPRLKELPFDSVRKRMTTIHSLGGDEKDKKISITKGAPKEILDLSDYVLSDGKVIPLNKEERNKIQLANDTFAKDGLRVLAVSYCDIEGFSKEQWTQENLEQHMVFIGLIAMSDPPREGVREAIDKCHAASIRIIMVTGDYGLTALSIAKNIGIIRNDDAKVISGLELSEMTDSQLKKELSGEVVFARVAPEQKYRVVTILQEMGEVVAVTGDGVNDAPALKKSDIGVAMGVTGTDVAKESADMILTDDHFASIVHAVEEGRAVYQNIKKFLTYIFNSNTPEAVPSAFFLFSKGFIPLPLTVMQILAVDLGTDMLPALGLGVEPPETDVMNRPPRRLTDRLLDKGLLIKSFLWYGTIESVLAMGGFFWAHYLRYGNFTFFVANGIPYREATTMTLGAIIFSQIGMVMNSRTSYQSIKALSIFGNKLINFGIIMEILAFLVLVYVPLFHNLFNTASLGLSHWLYLISCPFIMIGLDEVRKLFSSRKNKR

SEQ ID NO: 1745 - protein, 1104 aa, Streptococcus agalactiae
ATGTCAAATATAATAACTTATTTAAAAAATAATTCAAACTTAACTTTTGATGAATTAGCATTAAACGATGTTGACATTCTTTGTTTAAATGAATTTGGCTATATTTCTTTTGAAAAACTTATAAACACTACAGAAATGAAGTCAGTTTTAGTCTGTGAGTTATATCATGAGTACCTTCAAACTATGGCTAAATCATATAGCTTTATGTTCACATCACAACGACATGATTTATGTCAGTTAATGATGACCTCGAAACGTTTTAAAAACTTAACTTTATCTTATTATCGAGCTGAGATTAGTTTAGAATTTGAAAAACAATTTGCAGCTATGGTTTTTACTATTCCTAACATTAATTATCATCAGGTTGTATTTCGTGGTACTGATGCCAACCTTATTGGTTGGAAAGAAGATTTTAAATTGACTTATATGAGAGAAATATCGGCTCATCGTTCAGCGATTAAATACTTAAATACAATACTGCCTTATTTTGATAAAGTAGTTCTCTCAGGTCATTCTAAGGGGGGTAATTTAGCCTTGTACGCTGCAATGTTTACAAAGCCAGATTTAAAAGCAAAAATTGATTTGATTTGGCTTATTGACTCCCCAGGACTACAAAAAACTTTGTTACCTACTACAGAGTATAAAACTACTAAACAAAAGTGCATTCGCTTACTACCAGAAGAATCTATTGTTGGTATGATGCTTTATAGTGATATAGAGCCGCTAATTATTAGTAGCAATGCGCGTGGAATTCTGCAACACGATGTTACAACTTGGGAAATTCAAGAACCAGCTATTTTAAAGACTGGAACAGGACTATCGCTAAAAAGTATTTGTTTTGAAAAGACATTTCAACAGTGGATGGCTGAATTAAAAAGTCAAGAAAGAAAATTATTTTTTGATTTATTATTTGATAGCTTCCTATCAAGTGGCGTATCTAGTTTGGATGACTTCAACTTGGCTTCCAGAGCAAAAATGATGAAAGCTTTTCATAGCTTTAGAGAACTAGATGATGATAAAAAAAGGTTATTTAACAAATCTTTAAAATTATTAGTAACCATATTTTGGGGAGCTTATCATGATAATAGCAGAGAGACTAAGTAG

SEQ ID NO: 1746 - protein, 367 aa, Streptococcus agalactiae
MSNIITYLKNNSNLTFDELALNDVDILCLNEFGYISFEKLINTTEMKSVLVCELYHEYLQTMAKSYSFMFTSQRHDLCQLMMTSKRFKNLTLSYYRAEISLEFEKQFAAMVFTIPNINYHQVVFRGTDANLIGWKEDFKLTYMREISAHRSAIKYLNTILPYFDKVVLSGHSKGGNLALYAAMFTKPDLKAKIDLIWLIDSPGLQKTLLPTTEYKTTKQKCIRLLPEESIVGMMLYSDIEPLIISSNARGILQHDVTTWEIQEPAILKTGTGLSLKSICFEKTFQQWMAELKSQERKLFFDLLFDSFLSSGVSSLDDFNLASRAKMMKAFHSFRELDDDKKRLFNKSLKLLVTIFWGAYHDNSRETK

SEQ ID NO: 1747 - protein, 639 aa, Streptococcus agalactiae
ATGGCTAGTATTTTAAAAAAACATTTAGAGAAACGTTTAGAGCTTAAAAATGATCCTATGAGGACAGATATGAGTACTGGTGCCAGTTACCCTAAATATGGATTCTCGGTAGGAAAGTACACATATGGATATCAACAATTCTTTTACGAAGGCGTTAACTTAAAAGAAATTGGAGCATTTTGCTCAATAGCCCAGAACGTTACTATTACTGGTCTGAATCATCCAACCGATCACATTACCACTAACCCTTTTATTTACTATAAGTCAAGGGGATTTATAAATGAGGATAGGGCGGACTTAATAGATGAAAAGAAAAATGGAAAAGTTATTATTGGCAACGATGTCTGGATAGGAACTAATGTCACTATACTTCCATCTGTTACAATAGGTAATGGAGCAATTATTGGAGCAGGTTCAGTTATTACCAAAGACATTCCTGACTATGCTGTTGTCGCTGGAACACCTGCTAAAATTATCAAATATCGCTTTTCAGAGGAAGAAATAACATTATTAAATGCATCTCAGTGGTGGAATTGGTCAGATGAAGCTATTAAGGAACATATTAGCGAATTTTCAGATAAGAAGGAATTCTTCAATACTCTAAAAAGTATTTCCGAAAACAAAAATCATAAACTCTAG

SEQ ID NO: 1748 - protein, 212 aa, Streptococcus agalactiae
MASILKKHLEKRLELKNDPMRTDMSTGASYPKYGFSVGKYTYGYQQFFYEGVNLKEIGAFCSIAQNVTITGLNHPTDHITTNPFIYYKSRGFINEDRADLIDEKKNGKVIIGNDVWIGTNVTILPSVTIGNGAIIGAGSVITKDIPDYAVVAGTPAKIIKYRFSEEEITLLNASQWWNWSDEAIKEHISEFSDKKEFFNTLKSISENKNHKL

SEQ ID NO: 1749 - protein, 1148 aa, Streptococcus agalactiae
TTGACCTTTAATAAGGTCTTTTACTATACTTTATTAGTTAAATTTGGAGATGATAAGCAATGCGAATAGAATCATATAAAAAGAAAAACGGTACTACTGCTTATAAATTTCTTTTGTATGCTGGCTATGTTGACGGTAAAAGAAAATATATTCGGAGGTCTGGATTCAGCACAAGACAATCTGCAAGAGCTGCACTGATTAATTTACAAGCTGAACTTGAGAAACCTAAATCAAGTATGACGTTTGGTATGTTAACTAAACAATGGCTAAAAGAATATGAAAAAACCGTCCAAGGAAGCACATACTTAAAAACGGAAAGAAATATTAATAAACATATTTTGCCAAAACTTGATAAAGTTACGATTGGAGATATTAATCCACTTCTTGTTCAAAACTTAACTGAAGAATGGTGTTCTCAGTTAAAATACGGCGGGAAAATCCTTGGACTAGTCCGAAATATTCTGAATCTTGCTGTCAGATATGGTTATATTAGCAACAATCCAGCTTTACCTATTACTGCACCAAAAATCAAGAGGGAGCGTAAAACAGGTAATAATTTTTATACTCTAAATCAGCTAAAACAATTTTTAGAACTTGTTGAAAAAACCGATAACATCGAAAAGATAGCTCTGTTTAGATTACTAGCGTTCACTGGCATACGAAAAGGAGAGTTGCTAGCGCTAACCTGGGATGATTTGAATCGTAATACTTTATCAATTAACAAAGCTGTTACACGTACTCAAACTGGACTAGAAATAGATGTTACGAAGACTAAGTCAAGTGATAGATTAATCAGCTTAGATGACGAGACTTTGGAAATTTTACAACAACTTCATGAAACTTTCCCAAGTTCTACTTTTATGTTCCAATCTGAATCAGGTGGAATTATGACACCAAGTTTACCACGGAAGTGGCTCTTGCAAATTATCAAAGGGACAGACTTACCACAAATCACAGTTCACGGTTTCAGACACACTCATGCAAGCTTACTTTTTGAATCTGGTTTATCCTTGAAACAAGTACAACACAGATTGGGCCATGGAGATCTACAGACAACTATGAATGTATATACCCATATTACACAATCGGCGATTGATGATATTGGAACTAAATTCAATCAATTTGTTACTAACAAGCAACTAAATTGA

SEQ ID NO: 1750 - protein, 382 aa, Streptococcus agalactiae
MTFNKVFYYTLLVKFGDDKQWRIESYKKKNGTTAYKFLLYAGYVDGKRKYIRRSGFSTRQSARAALINLQAELEKPKSSMTFGMLTKQWLKEYEKTVQGSTYLKTERNINKHILPKLDKVTIGDINPLLVQNLTEEWCSQLKYGGKILGLVRNILNLAVRYGYISNNPALPITAPKIKRERKTGNNFYTLNQLKQFLELVEKTDNIEKIALFRLLAFTGIRKGELLALTWDDLNRNTLSINKAVTRTQTGLEIDVTKTKSSDRLISLDDETLEILQQLHETFPSSTFMFQSESGGIMTPSLPRKWLLQIIKGTDLPQITVHGFRHTHASLLFESGLSLKQVQHRLGHGDLQTTMNVYTHITQSAIDDIGTKFNQFVTNKQLN

SEQ ID NO: 1751 - DNA, 783 bp, Streptococcus agalactiae
atgtttggaaaattattaaaatatgaattaaaatcagttggtaagtggtatctaacactcaacgctgcggttttattagtatctattattttaggactggtattaaaggcacttggcggcaatttttctactgatactaatagtactagcgcccaaatattcactataatactcgttttattgttagcgatggttatttcaggatctctgttatccacccttgctattattatcaaacgtttttatagcaatatcttcggccgtcaaggatatctaaccttaacgctcccagtaactacgaatcagattatttgttcaaagctactagcttctcttctttggagtatttttaatatttttattgtcattattggaatcatattggtcatattacctttagtaggtattggtcagttcgttgtcgcttttccagaaatctataaaattatttcatcttcgaacgctccactttttatcgcctatttctttctatcgtacgttgcagggacattactgatttatctctctatcgctgtagggcaattatttacaaacaaacgtgtattgatgggaattgtttcttattttggaatatcactcttaattactttcttaacattaataatagatagtatttttcatattgatttattcaactctcatgcaaatgcaacattctctcaacctgtattgctctacaatatacttgttagcattgttgaaattgctatattctatatgttgacacactctattattaagtacaaacttaatatacaataa

SEQ ID NO: 1752 - protein, 260 aa, Streptococcus agalactiae
MFGKLLKYELKSVGKWYLTLNAAVLLVSIILGLVLKALGGNFSTDTNSTSAQIFTIILVLLLAMVISGSLLSTLAIIIKRFYSNIFGRQGYLTLTLPVTTNQIICSKLLASLLWSIFNIFIVIIGIILVILPLVGIGQFVVAFPEIYKIISSSNAPLFIAYFFLSYVAGTLLIYLSIAVGQLFTNKRVLMGIVSYFGISLLITFLTLIIDSIFHIDLFNSHANATFSQPVLLYNILVSIVEIAIFYMLTHSIIKYKLNIQ

SEQ ID NO: 1753 - DNA, 699 bp, Streptococcus agalactiae
atgacacagttattacaacttcatcatgttacaaagaaatatcacaaacatactgctgttaatgatgtgactgtaagtattccaacaggaaagattataggtttattaggtccaaatggtagcggaaaaacaacaatcatcaaaatgataaatggattacttcagccagataagggagatatcgttattgatggttacagaccgtctgttgaaaccaaaaaaattatttcatatctccctgatacttcatatttacaagaaaatatgaaaatcaaagacgtcgttacattatttgaagatttctataacgattttgattcaaaggtagcatatcaactatttgaggatcttaacctaaatcctagggaacgtctaaaaaacctatcaaaagggaacaaggaaaaagttcaattaatacttgttatgagtcgtaaagctaggctctacatccttgatgaacctattggtggtgtagaccctgcagcgcgtgactacattttaaaaacaatcattagcaactactctaatgatgcttctgttttaatttcgactcacttaatttctgacattgaacctatccttgatgaagttatcttccttaaagaaggagaaattgacctacaaggcaatgctgatgacttaagagaagagcacaactgttcgattgatgctctctttcgtgaaagattcaagaaataa

SEQ ID NO: 1754 - protein, 232 aa, Streptococcus agalactiae
MTQLLQLHHVTKKYHKHTAVNDVTVSIPTGKIIGLLGPNGSGKTTIIKMINGLLQPDKGDIVIDGYRPSVETKKIISYLPDTSYLQENMKIKDVVTLFEDFYNDFDSKVAYQLFEDLNLNPRERLKNLSKGNKEKVQLILVMSRKARLYILDEPIGGVDPAARDYILKTIISNYSNDASVLISTHLISDIEPILDEVIFLKEGEIDLQGNADDLREEHNCSIDALFRERFKK

SEQ ID NO: 1755 - DNA, 231 bp, Streptococcus agalactiae
  misc_feature 9, 10, 11, 12, 13: n = A,T,C or G
atggaatgnnnnntgcaacgtgccttcactgaattggaacgtgaaggaatggtattctcacaacgtacttccggacgctttgttacagaagacaacttactaattggtaaaattcgtcaacaagttgcaaaagcagagttagcaacttttgtcaacaacatgaaaaaaataggatataaattagatgaaattacggttgctctcgatcattttataaaggagattaattaa

SEQ ID NO: 1756 - protein, 76 aa, Streptococcus agalactiae
  VARIANT 3, 4, 5: Xaa = Any Amino Acid
MEXXXQRAFTELEREGMVFSQRTSGRFVTEDNLLIGKIRQQVAKAELATFVNNMKKIGYKLDEITVALDHFIKEIN

SEQ ID NO: 1757 - DNA, 1875 bp, Streptococcus agalactiae
  misc_feature 8, 9, 10, 11, 12: n = A,T,C or G
atgaatgnnnnnaacttagctttcagacaaataatagatagtaaaattgaataccaaaaagcctatgatattgctaagcgtattgaaggaaatcctagacagacttctattcatgccgctggggtagtaatgagtgacgatttgttaacagatcatattcctttaaaaaacggtgaggatatgatgataacgcaatatgatgctagttctgttgaggataatggtcttctaaaaatggactttctaggtcttcgaaatttgacatttgttcagaaaatgaaggagaaagtcgataaggactacggtatctctatacaattagaaactattgatttagaagataaagagactctaaaactatttgcagctggtcaaacaaaggggatttttcaatttgagcaaagtggagctattaatttgttgcgacgtattaggccagagtgttttgaagatgtggtagctaccaccagcttgaataggcctggtgcaagtgattatactgagaattttataaaccgtcgttttggtaaagaaaaaatcgatttagtagatcctgtcatagctccaattttacaacctacctatggcataatgctctatcaagaacaggttatgcagattgcccagacctacgcaggttttacgctaggcaagtctgatttgctcagacgtgctatgtctaagaaaaattctaaggagatgcaaaagatgtctcaatccttcttagagggtgcagtatctaagggacatcgtcaagaagatgctcgacttatatttgaacgcatggctaaatttgcaggttatgggtttaatcgcagccatgcgtttgcttattcggctttagcttttcaattagcctatttcaaagcccattattccgatgtcttttatgacatcatgataaattattcaaatagtgattatctaatcgatgctattgattttggttttgttattgaaaaaccttcaattaatactatttcatacagagaccgcatctataaaaagaaaatttatttaggtttaaaaaatattaagggtgttcctaacgatttggcttattggatttctaaaaatcaaccgtttcagagtattgaagattttctaatgaggctgccacagcagtttcaaaaaagtggttttatttctccgctaattgctattggagcatttgacgaatttgataataatagacggaaaatcacctctaatcttgattctttatttacatttgtaaatgaactaggtagtttatttgcagatacctcatatcattggctagaagtagaagatttctctaattctgagaaatatgaaatggaacaagatatcttaggagtaggaatcagcccgcaccctttagtggggatttcacaaaaagctagccgtccgtttataccaattagtcaagttcaagaaaatagcgaagctactattttagttcagctaaagcaggtcaaagttattaggacaaaaagttctgggcaacaaatggctttcttgactgttatggatattaattcaaaaatggatattactgtttttcctgaaactttcaatattgtaagagatgatttacaagaagggaaatattattacttgcatggaaaaattcagaagcgagatgagcgattacagatggttttaaacggtgttcaagaagcaacggaggaacgtttttggatacttctaaaaaatcatgataacgacaaaaaaatatcggaaatattgtccaaatacaaagggcatattcctgtctatttgcattatgaaacaactaaagaaactatccaaagcaaagtacatttggttagaaaagatagtggcttagcccttgatttatctgaatttgttgtgaaaacggtttatcaataa

SEQ ID NO: 1758 - protein, 624 aa, Streptococcus agalactiae
  VARIANT 3, 4: Xaa = Any Amino Acid
MNXXNLAFRQIIDSKIEYQKAYDIAKRIEGNPRQTSIHAAGVVMSDDLLTDHIPLKNGEDMMITQYDASSVEDNGLLKMDFLGLRNLTFVQKMKEKVDKDYGISIQLETIDLEDKETLKLFAAGQTKGIFQFEQSGAINLLRRIRPECFEDVVATTSLNRPGASDYTENFINRRFGKEKIDLVDPVIAPILQPTYGIMLYQEQVMQIAQTYAGFTLGKSDLLRRAMSKKNSKEMQKMSQSFLEGAVSKGHRQEDARLIFERMAKFAGYGFNRSHAFAYSALAFQLAYFKAHYSDVFYDIMINYSNSDYLIDAIDFGFVIEKPSINTISYRDRIYKKKIYLGLKNIKGVPNDLAYWISKNQPFQSIEDFLMRLPQQFQKSGFISPLIAIGAFDEFDNNRRKITSNLDSLFTFVNELGSLFADTSYHWLEVEDFSNSEKYEMEQDILGVGISPHPLVGISQKASRPFIPISQVQENSEATILVQLKQVKVIRTKSSGQQMAFLTVMDINSKMDITVFPETFNIVRDDLQEGKYYYLHGKIQKRDERLQMVLNGVQEATEERFWILLKNHDNDKKISEILSKYKGHIPVYLHYETTKETIQSKVHLVRKDSGLALDLSEFVVKTVYQ

SEQ ID NO: 1759 - DNA, 1023 bp, Streptococcus agalactiae
atgaaacgtattgctgttttaactagtggtggtgacgcccctggtatgaacgctgctatccgtgcagttgttcgtaaagcaatttctgaaggtatggaagtttacggcatcaaccaaggttactatggtatggtgacaggggatattttccctttggatgctaattctgttggggatactatcaaccgtggaggaacgtttttacgttcagcacgttatcctgaatttgctgaacttgaaggtcagcttaaagggattgaacagcttaaaaaacacggtattgaaggtgtagtagttatcggtggtgatggttcttatcatggtgctatgcgtctaactgagcacggtttcccagctgttggtttgccgggtacaattgataacgatatcgttggcactgactatactattggttttgacacagcagttgcgacagcagttgagaatcttgaccgtcttcgtgatacatcagcaagtcataaccgtacttttgttgttgaggttatgggaagaaatgcaggagatatcgctctttggtcaggtatcgctgcaggtgcagatcaaattattgttcctgaagaagagttcaatattgatgaagttgtctcaaatgttagagctggctatgcagctggtaaacatcaccaaatcatcgtccttgcagaaggtgttatgagtggtgatgagtttgcaaaaacaatgaaagcagcaggagacgatagcgatcttcgtgtgacgaatttaggacatctgctccgtggtggtagtccgacggctcgtgatcgtgtcttagcatctcgtatgggagcgtacgctgttcaattgttgaaagaaggtcgtggtggtttagccgttggtgtccacaacgaagaaatggttgaaagtccaattttaggtttagcagaagaaggtgctttgttcagcttgactgatgaaggaaaaatcgttgttaataatccgcataaagcggaccttcgcttggcagcacttaatcgtgaccttgccaaccaaagtagtaaataa

SEQ ID NO: 1760 - protein, 340 aa, Streptococcus agalactiae
MKRIAVLTSGGDAPGMNAAIRAVVRKAISEGMEVYGINQGYYGMVTGDIFPLDANSVGDTINRGGTFLRSARYPEFAELEGQLKGIEQLKKHGIEGVVVIGGDGSYHGAMRLTEHGFPAVGLPGTIDNDIVGTDYTIGFDTAVATAVENLDRLRDTSASHNRTFVVEVMGRNAGDIALWSGIAAGADQIIVPEEEFNIDEVVSNVRAGYAAGKHHQIIVLAEGVMSGDEFAKTMKAAGDDSDLRVTNLGHLLRGGSPTARDRVLASRMGAYAVQLLKEGRGGLAVGVHNEEMVESPILGLAEEGALFSLTDEGKIVVNNPHKADLRLAALNRDLANQSSK

SEQ ID NO: 1761 - protein, 1299 aa, Streptococcus agalactiae
ATGGCTACTGTTCGTAAAGCAGAAGAGATTGCAGGACAAAAAGTTGGCTTCCTCCTTGATACTAAAGGACCTGAAATTCGTACAGAACTTTTTGAAGATGGTGCAGATTTCCATTCATATACAACAGGTACAAAATTACGTGTTGCTACTAAGCAAGGTATCAAATCAACTCCAGAAGTGATTGCATTGAATGTTGCTGGTGGACTTGACATCTTTGATGACGTTGAAGTTGGTAAGCAAATCCTTGTTGATGATGGTAAACTAGGTCTTACTGTGTTTGCAAAAGATAAAGACACTCGTGAATTTGAAGTAGTTGTTGAGAATGATGGCCTTATTGGTAAACAAAAAGGTGTAAACATCCCTTATACTAAAATTCCTTTCCCAGCACTTGCAGAACGCGATAATGCTGATATCCGTTTTGGACTTGAGCAAGGACTTAACTTTATTGCTATCTCATTTGTACGTACTGCTAAAGATGTTAATGAAGTTCGTGCTATTTGTGAAGAAACTGGCAATGGACACGTTAAGTTGTTTGCTAAAATTGAAAATCAACAAGGTATCGATAATATTGATGAGATTATCGAAGCAGCAGATGGTATTATGATTGCTCGTGGTGATATGGGTATCGAAGTTCCATTTGAAATGGTTCCAGTTTACCAAAAAATGATCATTACTAAAGTTAATGCAGCTGGTAAAGCAGTTATTACAGCAACAAATATGCTTGAAACAATGACTGATAAACCACGTGCGACTCGTTCAGAAGTATCTGATGTCTTCAATGCTGTTATTGATGGTACTGATGCTACAATGCTTTCAGGTGAGTCAGCTAATGGTAAATACCCAGTTGAGTCAGTTCGTACAATGGCTACTATTGATAAAAATGCTCAAACATTACTCAATGAGTATGGTCGCTTAGACTCATCTGCATTCCCACGTAATAACAAAACTGATGTTATTGCATCTGCGGTTAAAGATGCAACACACTCAATGGATATCAAACTTGTTGTAACAATTACTGAAACAGGTAATACAGCTCGTGCCATTTCTAAATTCCGTCCAGATGCAGACATTTTGGCTGTTACATTTGATGAAAAAGTACAACGTTCATTGATGATTAACTGGGGTGTTATCCCTGTCCTTGCAGACAAACCAGCATCTACAGATGATATGTTTGAGGTTGCAGAACGTGTAGCACTTGAAGCAGGATTTGTTGAATCAGGCGATAATATCGTTATCGTTGCAGGTGTTCCTGTAGGTACAGGTGGAACTAACACAATGCGTGTTCGTACTGTTAAATAA

SEQ ID NO: 1762 - protein, 432 aa, Streptococcus agalactiae
MATVRKAEEIAGQKVGFLLDTKGPEIRTELFEDGADFHSYTTGTKLRVATKQGIKSTPEVIALNVAGGLDIFDDVEVGKQILVDDGKLGLTVFAKDKDTREFEVVVENDGLIGKQKGVNIPYTKIPFPALAERDNADIRFGLEQGLNFIAISFVRTAKDVNEVRAICEETGNGHVKLFAKIENQQGIDNIDEIIEAADGIMIARGDMGIEVPFEMVPVYQKMIITKVNAAGKAVITATNMLETMTDKPRATRSEVSDVFNAVIDGTDATMLSGESANGKYPVESVRTMATIDKNAQTLLNEYGRLDSSAFPRNNKTDVIASAVKDATHSMDIKLVVTITETGNTARAISKFRPDADILAVTFDEKVQRSLMINWGVIPVLADKPASTDDMFEVAERVALEAGFVESGDNIVIVAGVPVGTGGTNTMRVRTVK

SEQ ID NO: 1763 - protein, 558 aa, Streptococcus agalactiae
ATGGTTAAACGCGATTTTATTAGAAATATTATTTTAGCATTGATTGCTGTATTGATTTTGATTCTCTTGAGATATTTTGTTTTTGCAACCTTTAAAGTACATAAGGATGCTACAAATTCTTATTTTAGCAACGGAGATGTTGTTGTTGTTAATCGTAATAGGACGCCTAAGTACAAAGACTTTATTGTCTATAAGGTTGGAAAGATTTTCTATATTAGTCGTGTTATTGGTGAGCCAAATCAAAAAGTGAGAGTAATGGATGATATTTTATATTTGAATGATGTTTTCAAGGATGAGCCTTACATTGAAAAAATGAAAAATGCTTATTCTGAAAAGAAAGACGGTCAAATGCCCTTTACTTCCGACTTCTCAGTTGAAACATTAACACGAAATAAAGAAAGCAGAGTTCCTAAGGGTTCTTATCTTGTGTTAAATGATAATCGACAAAATAAAAATGATAGTCGAAAATTTGGATTAATCAAAGAGAAAGATATTCGTGGTGTTATTACCTTTAAAGTATACCCTCTAAGTGAATTTGGTTTTACAGCTTCAGAGTAG

SEQ ID NO: 1764 - protein, 185 aa, Streptococcus agalactiae
MVKRDFIRNIILALIAVLILILLRYFVFATFKVHKDATNSYFSNGDVVVVNRNRTPKYKDFIVYKVGKIFYISRVIGEPNQKVRVMDDILYLNDVFKDEPYIEKMKNAYSEKKDGQMPFTSDFSVETLTRNKESRVPKGSYLVLNDNRQNKNDSRKFGLIKEKDIRGVITFKVYPLSEFGFTASE

SEQ ID NO: 1765 - protein, 144 aa, Streptococcus agalactiae
ATGTTTTTGTTTGTCAATAAAAAAATTGGTATAGTCTTTTTGATTTTCTGTGATAACGAGATAAACGCTATCAAAAATTCTATCTATCTTAAAAAAATATATTTCTTAGCCATTTTATTACATAAAAAGAATGGTATCAAATAA

SEQ ID NO: 1766 - protein, 47 aa, Streptococcus agalactiae
MFLFVNKKIGIVFLIFCDNEINAIKNSIYLKKIYFLAILLHKKNGIK

SEQ ID NO: 1767 - protein, 1815 aa, Streptococcus agalactiae
ATGTGTGGTATCGTAGGTGTAGTTGGAAATACAAATGCAACGGATATTTTAATTCAAGGCTTAGAAAAGCTAGAGTACCGAGGATATGACTCAGCAGGTATTTTTGTAGTAGGTGATAACAAAAGTCAACTTGTGAAGTCAGTCGGTCGAATCGCGGAGATTCAGGCAAAAGTAGGAGATTCTGTTAGTGGTACGACAGGTATCGGTCATACACGTTGGGCAACCCATGGTAAACCTACTGAAGGAAATGCACATCCTCACACTTCAGGATCTGGTCGTTTTGTATTGGTACACAATGGTGTTATTGAAAATTACCTTCAAATTAAAGAAACTTACTTAACAAAACATAACCTCAAGGGTGAAACTGATACAGAAATAGCTATTCATTTAGTTGAACACTTTGTTGAAGAAGATAACTTATCAGTGCTTGAAGCCTTTAAAAAAGCCTTACATATTATAGAAGGATCATACGCATTTGCTCTTATTGATTCTCAAGATGCTGATACGATTTACGTAGCTAAAAATAAATCACCTCTTCTAATAGGTTTGGGAAATGGTTATAATATGGTGTGTTCAGATGCCATGGCTATGATACGTGAGACAAGTGAATATATGGAAATCCACGATAAAGAACTCGTTATTGTTAAAAAAGATAGCGTTGAAGTTCAAGATTATGATGGTAATGTCATTGAACGTGGTAGCTACACAGCAGAGCTTGACTTATCAGATATTGGTAAGGGGACTTATCCATTCTACATGCTTAAAGAAATTGATGAGCAACCAACTGTGATGCGTAAGTTGATTTCAACTTATGCGAACGAATCTGGAGATATGAATGTGGATTCTGATATTATAAAATCAGTCCAAGAAGCAGATCGTCTTTACATATTGGCTGCAGGAACGTCATATCATGCTGGTTTTGCTGCTAAGACCATGATCGAAAAATTAACTGATACACCTGTTGAACTTGGAGTTTCTTCAGAATGGGGTTACAACATGCCACTTTTGAGTAAGAAGCCAATGTTTATTTTACTTAGTCAATCGGGAGAAACAGCAGATAGTAGACAAGTTTTAGTTAAAGCAAACGAAATGGGAATCCCTAGTTTAACTATAACAAATGTGCCTGGCTCAACACTTTCTCGTGAAGCAACCTATACGATGCTCATTCATGCAGGACCTGAAATCGCTGTTGCTTCTACAAAAGCATATACTGCTCAAGTTGCAACGTTAGCTTTCTTAGCAAAAGCGGTAGGAGAAGCAAATGGTAAGGCAGAAGCAAAAGATTTTGATTTGGTTCATGAATTGTCAATTGTAGCACAATCAATTGAAGCGACCTTATCAGAAAAAGATGTTATCTCTGAGAAGGTAGAGCAGTTGTTAATCTCGACACGTAATGCCTTCTACATTGGTCGTGGTAACGACTATTATGTTACAATGGAGGCTGCACTGAAGCTAAAAGAGATTTCTTATATTCAGACAGAAGGTTTTGCTGCAGGTGAATTAAAACATGGTACAATTTCGTTGATTGAAGACAATACTCCTGTTATTGCTTTAATATCTGCTGATTCAACTATTGCAGCGCATACTCGTGGAAATATCCAAGAAGTTGTTTCTCGCGGAGCAAATGCTTTGATTATTGTAGAAGAAGGGTTGGAACGTGAAGGTGATGATATTATTGTTAATAAAGTTCACCCATTCTTATCAGCCATTTCAATGGTTATTCCGACTCAATTAATTGCTTACTATGCTTCATTACAACGTGGCTTAGATGTTGATAAACCACGTAATTTGGCAAAAGCTGTAACTGTTGAATAG

SEQ ID NO: 1768 - protein, 604 aa, Streptococcus agalactiae
MCGIVGVVGNTNATDILIQGLEKLEYRGYDSAGIFVVGDNKSQLVKSVGRIAEIQAKVGDSVSGTTGIGHTRWATHGKPTEGNAHPHTSGSGRFVLVHNGVIENYLQIKETYLTKHNLKGETDTEIAIHLVEHFVEEDNLSVLEAFKKALHIIEGSYAFALIDSQDADTIYVAKNKSPLLIGLGNGYNMVCSDAMAMIRETSEYMEIHDKELVIVKKDSVEVQDYDGNVIERGSYTAELDLSDIGKGTYPFYMLKEIDEQPTVMRKLISTYANESGDMNVDSDIIKSVQEADRLYILAAGTSYHAGFAAKTMIEKLTDTPVELGVSSEWGYNMPLLSKKPMFILLSQSGETADSRQVLVKANEMGIPSLTITNVPGSTLSREATYTMLIHAGPEIAVASTKAYTAQVATLAFLAKAVGEANGKAEAKDFDLVHELSIVAQSIEATLSEKDVISEKVEQLLISTRNAFYIGRGNDYYVTMEAALKLKEISYIQTEGFAAGELKHGTISLIEDNTPVIALISADSTIAAHTRGNIQEVVSRGANALIIVEEGLEREGDDIIVNKVHPFLSAISMVIPTQLIAYYASLQRGLDVDKPRNLAKAVTVE

SEQ ID NO: 1769 - protein, 330 aa, Streptococcus agalactiae
ATGTCATTACCAAATTGCCCTAAGTGTAACTCTGAATATGTCTATGAAGACGGTATTTTACTGGTTTGTCCAGAATGTGCTTACGAGTGGAATCCAGAAGAAATCGAAGAAGAAGTAGGTTTAATTGTATTGGATAGCAATGGAACGCGCTTATCAGATGGAGATACTGTGACAGTTATTAAGGATTTAAAAGTAAAAGGAGCGCCTAAGGATATTAAGCAAGGCACTCGTGTTAAAAATATTCGTTTAGTTGATGGCGATCATAATATCGATTGTAAAATTGATGGTTTTGGAGCTATGAAACTAAAATCTGAGTTTGTAAAAAAATAG

SEQ ID NO: 1770 - protein, 109 aa, Streptococcus agalactiae
MSLPNCPKCNSEYVYEDGILLVCPECAYEWNPEEIEEEVGLIVLDSNGTRLSDGDTVTVIKDLKVKGAPKDIKQGTRVKNIRLVDGDHNIDCKIDGFGAMKLKSEFVKK

SEQ ID NO: 1771 - DNA, 642 bp, Streptococcus agalactiae
atgtcttatattttagaaatcttacctagcttattagtaggtgcgcaagtgacattgcaagttttctttattgttatttgtttatcaattccacttggtattgttgtagccttcctaatgaaagttcattttaagccgcttcaatggctactgacaacttatatttggattatgcgaggcacgcctctgttattacagcttatctttttttattactttttaccaagtgtagggatttcttttgatcgtatgccagctgcgattattgcttttacgatgaattatgcagcttattttgcagagatttttcgaggaggtattgagtctattcctaaagggcaatatgaagctgcaaaggtattaaagttttctaagtttcaaacggtttggtacatagtattacctcaagtcttcaaaatagtcttaccgagtgttttcaatgaaacgattactttagtgaaagattcctcattggtttacatacttggtgtgggcgacttacttctagaaagtaagacagccgcaaatagggatgcaacacttgcaccaatgtttatagcaggtggtatttacctattattaattggtcttttaactattttatctaaacaagttgaaaagcgttttaactactataaataa

SEQ ID NO: 1772 - protein, 213 aa, Streptococcus agalactiae
MSYILEILPSLLVGAQVTLQVFFIVICLSIPLGIVVAFLMKVHFKPLQWLLTTYIWIMRGTPLLLQLIFFYYFLPSVGISFDRMPAAIIAFTMNYAAYFAEIFRGGIESIPKGQYEAAKVLKFSKFQTVWYIVLPQVFKIVLPSVFNETITLVKDSSLVYILGVGDLLLESKTAANRDATLAPMFIAGGIYLLLIGLLTILSKQVEKRFNYYK

SEQ ID NO: 1773 - DNA, 630 bp, Streptococcus agalactiae
atgttagaattaaaaaatatttctaaatgctatgggcaaaaagaaatctttaaagatttcaatctgactgtagaagaaggtaaaattctctctttagtaggaccttctggaggtggaaaaacaacactattacgtatgttagctggattggaaaagattgattcagggactattgttcacgatggtaaagaagtatctgttgatcatttggaaacactaaatcttttaggattcgtcttccaagactttcaattattcccacatttaacagtattagataatttgatcctctctcctgttaaaacgatgggattatcaaaagaacttgctaaagaaaaagccttagtattacttgaacgcttgggacttaaagaccatgctttagtctatccattttcattatctggggggcaaaagcaacgtgtcgcactagctcgtgcgatgatgattgatccacagattattggttatgatgagccaactagcgctcttgatccagagttgcgtcaagaagtagaaaaactaattttacaaaatagagaaacaggtatgacacaaattgtagtaacacatgatcttcaatttgctgaaagtatatctgatacgattctcaaaattaatcctaagtag

SEQ ID NO: 1774 - protein, 209 aa, Streptococcus agalactiae
MLELKNISKCYGQKEIFKDFNLTVEEGKILSLVGPSGGGKTTLLRMLAGLEKIDSGTIVHDGKEVSVDHLETLNLLGFVFQDFQLFPHLTVLDNLILSPVKTMGLSKELAKEKALVLLERLGLKDHALVYPFSLSGGQKQRVALARAMMIDPQIIGYDEPTSALDPELRQEVEKLILQNRETGMTQIVVTHDLQFAESISDTILKINPK

SEQ ID NO: 1775 - DNA, 906 bp, Streptococcus agalactiae
atgatcttcaatttgctgaaagtatatctgatacgattctcaaaattaatcctaagtagacttgggggtagattgttgactcacaaaaatatattattaaccattatatttggattatttatgattatattatcagcatgtggtatgtctaataaggaaatggctggtattgataattgggaacattatcaaaaggaaaagaaaattactattggatttgataatacttttgttcctatgggatttgaaagtcgttctggtgactataccggctttgatattgatttagctaatgctgtttttaaagaatacggtatttcagtgaaatggcagcctattaactgggatatgaaagaaactgaacttaataatggtaatatagaccttatttggaatggttattcaaaaacggcagaacgtgctaaaaaagtcgcttttacaaacccatatatgaataatcatcaagtaattgttactaaaacttcatcacatattaatagtattaaggatatgaaggggaaaaaactaggagcccagtcgggttcatctggttttgatgcttttaacgctaaacctgatattttaaaaaagtttgtaaaaggaaaagaagcagttcaatacgatactttcactcaggctttgattgatttaaaaaataaccgtattgatggtcttttgattgatgaagtttatgctaactattatttaaagcaagaaggaaatataaaagcttattattttgttaaaactgcttatcaaggagaaaattttgtagtaggagctcgtaaagttgatcgtagactaattgaaaagattaacaaagctttcaaacagcttcataataaggggagatttcaaaaaatctcttacaaatggtttggtgaagatgtttatagtaaagaataa

SEQ ID NO: 1776 - protein, 301 aa, Streptococcus agalactiae
MIFNLLKVYLIRFSKLILSRLGGRLLTHKNILLTIIFGLFMIILSACGMSNKEMAGIDNWEHYQKEKKITIGFDNTFVPMGFESRSGDYTGFDIDLANAVFKEYGISVKWQPINWDMKETELNNGNIDLIWNGYSKTAERAKKVAFTNPYMNNHQVIVTKTSSHINSIKDMKGKKLGAQSGSSGFDAFNAKPDILKKFVKGKEAVQYDTFTQALIDLKNNRIDGLLIDEVYANYYLKQEGNIKAYYFVKTAYQGENFVVGARKVDRRLIEKINKAFKQLHNKGRFQKISYKWFGEDVYSKE

SEQ ID NO: 1777 - DNA, 243 bp, Streptococcus agalactiae
gtgaaaacattggcaaatattaaatcagctatcaaacgcgctgaacttaacgttaaacaaaacgaaaaaaactcagcacaaaaatcagctatgcgtactgctattaaagcatttgaagctaacccttcagaagaactttaccgcgctgcttcttcaagcatcgacaaagctgcttctaaaggtttaattcacacaaacaaagcaagccgcgataaagcacgtcttgcaactaaacttggttaa

SEQ ID NO: 1778 - protein, 80 aa, Streptococcus agalactiae
MKTLANIKSAIKRAELNVKQNEKNSAQKSAMRTAIKAFEANPSEELYRAASSSIDKAASKGLIHTNKASRDKARLATKLG

SEQ ID NO: 1779 - DNA, 723 bp, Streptococcus agalactiae
  misc_feature 4, 5, 6, 7, 8: n = A,T,C or G
atgnnnnntttttctaaagcaatatttcttaaaaaggaaaattatcaacgtccttttattatcggcatatcagggtcagttgctgttggaaaatcaactaccagtcgcttactacaattactaatttcacgaacttttaaagatagtcacgtcgaattagtcactactgatggctttttatatcctaacgagaaactcatacaaaatggaattttaaaccgtaaaggtttcccggaatcctatgatatggagtcacttctaaatttcttagatactataaagaacggtataaccgcgaaaatcccaatttattctcatgaaatctacgatatcgttccaaatcaattgcaaactattgaaacaccagattttttaattttagaaggaataaatgtctttcaaaaccaacaaaaccatcgactttacatgaatgattattttgatttttcaatatacattgatgctgaaaataaacaaattgaagaatggtatttacaacgatttaacagtcttctacaattagccgaagcagaccctagtaattactatcataaattcacacaaataccgccacataaagctatggaactagctaaagatatttggaaaactattaatttagtcaaccttgaaaaatatatagaaccaaccagaaatagggctgattttattattcataaagggaaacatcataaaattgatgaaatttatctcaaaaagtga

SEQ ID NO: 1780 - protein, 240 aa, Streptococcus agalactiae
  VARIANT 2, 3: Xaa = Any Amino Acid
MXXFSKAIFLKKENYQRPFIIGISGSVAVGKSTTSRLLQLLISRTFKDSHVELVTTDGFLYPNEKLIQNGILNRKGFPESYDMESLLNFLDTIKNGITAKIPIYSHEIYDIVPNQLQTIETPDFLILEGINVFQNQQNHRLYMNDYFDFSIYIDAENKQIEEWYLQRFNSLLQLAEADPSNYYHKFTQIPPHKAMELAKDIWKTINLVNLEKYIEPTRNRADFIIHKGKHHKIDEIYLKK

SEQ ID NO: 1781 - protein, 533 aa, Streptococcus agalactiae
ATGGCTAATATGTATTATACAGAGAATCCTAATGTTGAACATGATATTCATGAGCTAAATGTCAAATTATTAGGAGAATCATTCAGTTTTTTAACTGATGCAGGAGTTTTCTCTAAAAGAATGATAGATTATGGTAGTCAAGTCCTTCTAAATAGTTTACATTTTGAAAAAAATAAATCCTTGTTAGACCTTGGGTGTGGATACGGTCCGCTGGGAATTTCTCTAGCCAAAGTGCAAGGAGTTAAAGCAACTATGGTTGACATTAATACGAGAGCATTGGAATTAGCTAAGAAAAATGCAACACGCAATGGAGTAGTAGTTGAAGTCTTTCAGTCAAACATTTATGAAAATATTTCTAAAACTTTCGACTATATTATAAGCAACCCACCTATTCGTGCTGGAAAGCAAGTTGTTCATTCTATTATCGAAGAAAGTATCTGTTACCTTAATACAGGCGGTAGCCTTACCATTGTCATTCAAAAGAAACAAGGCGCTCCAAGTGCAAAAGCTAAAATGCTAGATACTTTTGGTAA

SEQ ID NO: 1782 - protein, 177 aa, Streptococcus agalactiae
MANMYYTENPNVEHDIHELNVKLLGESFSFLTDAGVFSKRMIDYGSQVLLNSLHFEKNKSLLDLGCGYGPLGISLAKVQGVKATMVDINTRALELAKKNATRNGVVVEVFQSNIYENISKTFDYIISNPPIRAGKQVVHSIIEESICYLNTGGSLTIVIQKKQGAPSAKAKMLDTFW

SEQ ID NO: 1783 - protein, 567 aa, Streptococcus agalactiae
ATGNNNNNTGGCTTTGTAGGTGGTATGGAATCTGAGGTTATTACCCGTTTTGAAAAAGGTTTTGAAGCAGGTGTCAAATCAGTTGATAAATCAATTAAAATTAAAGTTGACTATGCTGGTTCATTCGGTGATGCTGCTAAGGGTAAGACAATTGCAGCCGCACAATATGCTTCTGGCGCAGATATTGTTTATCAAGTAGCTGGTGGAACTGGTGCAGGTGTATTCAGTGAAGCAAAATCACGCAATGAATCTTTAAAAGAAGCTGACAAAGTTTGGGTATTAGGTGTAGACCGTGACCAAGCAGCAGAAGGTAAGTATACTTCTAAAGATGGTAAGGCTTCTAACTTTGTTTTGGCTTCATCAATTAAAGAAGTTGGAAAATCAGTTGAATTGATTGCTACTAAAACAAGTAAAGGTAAATTCCCAGGTGGTAATGTAACAACTTATGGTTTGAAGGATGGTGGAGTTGATATAGCAACTACAAACCTTTCAGATGACGCCGTTAAAGCGATTAAAGAGGCTAAAGCTAAAATTATTTCAGGAGATATCAAAGTTCCTAGCAAATAA

SEQ ID NO: 1784 - protein, 188 aa, Streptococcus agalactiae
  VARIANT 2, 3: Xaa = Any Amino Acid
MXXGFVGGMESEVITRFEKGFEAGVKSVDKSIKIKVDYAGSFGDAAKGKTIAAAQYASGADIVYQVAGGTGAGVFSEAKSRNESLKEADKVWVLGVDRDQAAEGKYTSKDGKASNFVLASSIKEVGKSVELIATKTSKGKFPGGNVTTYGLKDGGVDIATTNLSDDAVKAIKEAKAKIISGDIKVPSK

SEQ ID NO: 1785 - protein, 1536 aa, Streptococcus agalactiae
ATGACACAGAATGTCATTGAAATGAAAGAAATCACTAAGAAATTCGGTGATTTTGTGGCAAATGATCATATCAATTTGACGGTTGAAAAAGGTGAGATACATGCTCTGCTTGGCGAAAACGGTGCAGGGAAATCAACTTTAATGAACATGTTAGCAGGTTTACTAGAACCAACAGACGGTCAAATTTTTATTAATGGTCAGCCTGTAACTATTGATTCACCTTCCAAATCGTCACAATTGGGGATTGGTATGGTACATCAGCATTTCATGCTTGTTGAAGCATTTACTGTAGCTGAAAATATTGTTCTAGGAAATGAAACCACCCAAAATGGTGTTTTAGACATTAAGACAGCAGCTAAAGAAATAAAGGAACTATCAGAGAAATATGGTTTGTCAGTAAATCCAAATGCTAAAATATCTGATATTTCTGTAGGAGCACAGCAGCGTGTTGAAATTTTGAAGACACTTTATCGCGGTGCAGATATTTTAATTTTTGATGAGCCGACGGCGGTGCTTACACCATCAGAAATAAAAGAATTGATGACAATTATGAAGAGCCTTGTTAAAGAAGGCAAATCCATTATACTAATTACCCATAAATTGGATGAAATTCGGGCAGTTGCTGATAAAGTTACTGTGATTCGCCGTGGTAAAAGTATTGAAACAGTCCCTGTTGCAGGCGCAAGTTCTCAACAACTGGCGGAAATGATGGTTGGACGATCTGTTTCCTTCAGAACTGAAAAAAAGGAAGCTAATCCGACTGACATAATCCTTTCTGTAAAGGATTTAGTTGTAGAAGAAAATAGAGGCGGCGTTCTAGCTGTTAAAAATCTGTCGTTAGATGTTCGAGCAGGTGAAATTGTAGGTATAGCTGGTATTGATGGTAATGGACAAAGTGAATTAATTCAAGCTATTACAGGTTTAAGAAAGGTAACTTCTGGTCAAATTGTAATTAAAGGTAAAGATGTCACAAAATTTTCAAGTCGACAAATTACAGAATTAAGTGTAGGTCATGTTCCAGAAGATCGTCATAGAGATGGTTTGGTTCTAGATATGACGATGGCAGAAAATTTAGCTTTACAAACTTATTATAAAGAGCCATTGAGTCATAAAGGTATCCTTAATTTTGCTAAAATTAAAGAGTATGCTCGTCAATTAATGACAGAATTTGATGTGCGTGGTGCTGGTGAACATGTTTTAGCAAGAGGATTTTCTGGTGGTAACCAACAAAAAGCAATTATTGCTCGTGAAGTGGATCGCGATCCAGACCTACTCATTGTTAGCCAACCGACTCGTGGTCTAGATGTTGGTGCTATCGAGTATATTCATAAACGTTTGATTGAAGAGCGCGATAAAGGGAAAGCGGTCTTAGTAGTTAGCTTTGAGTTAGATGAAATCTTAAACTTATCAGATCGTATTGCAGTTATTCATGATGGTAAAATTCAAGGAATTGTTAAACCCGACCAAACCAACAAGCAAGAATTGGGTATTTTGATGGCTGGTGGAAAAATTGAAAAGGAGGAGAGAGATGTCTAA

SEQ ID NO: 1786 - protein, 511 aa, Streptococcus agalactiae
MTQNVIEMKEITKKFGDFVANDHINLTVEKGEIHALLGENGAGKSTLMNMLAGLLEPTDGQIFINGQPVTIDSPSKSSQLGIGMVHQHFMLVEAFTVAENIVLGNETTQNGVLDIKTAAKEIKELSEKYGLSVNPNAKISDISVGAQQRVEILKTLYRGADILIFDEPTAVLTPSEIKELMTIMKSLVKEGKSIILITHKLDEIRAVADKVTVIRRGKSIETVPVAGASSQQLAEMMVGRSVSFRTEKKEANPTDIILSVKDLVVEENRGGVLAVKNLSLDVRAGEIVGIAGIDGNGQSELIQAITGLRKVTSGQIVIKGKDVTKFSSRQITELSVGHVPEDRHRDGLVLDMTMAENLALQTYYKEPLSHKGILNFAKIKEYARQLMTEFDVRGAGEHVLARGFSGGNQQKAIIAREVDRDPDLLIVSQPTRGLDVGAIEYIHKRLIEERDKGKAVLVVSFELDEILNLSDRIAVIHDGKIQGIVKPDQTNKQELGILMAGGKIEKEERDV

SEQ ID NO: 1787 - protein, 1062 aa, Streptococcus agalactiae
ATGTCTAAGAAGGCGCAAAAAATTGCAGTTCCTCTGATTTCAGTTGTACTAGGAATCATTCTAGGAGCTATTATTATGCTGATATTTGGTTATGATCCACTTTGGGGTTATGAGGGATTGTTCCAAACAGCATTCGGTAGTATAAAAAATATTGGTGAAATTTTCCGTGCAATGGGACCATTAATTTTAATTGCTCTAGGTTTCTCAGTTGCCAGTCGTGCAGGTTTCTTTAATATTGGACTTCCAGGGCAAGCCTTATCAGGATGGATTGCCGCAGGTTGGTTCGCTCTTTCACACCCAGATATGCCACGTCCAGCAATGATTCTTTGTACTATTATTATTGGTATCGTTGCTGGGGGAATCACTGGAGCTATTCCAGGTATTCTCAGAGCATACCTTGGAACAAGTGAAGTTATTGTAACTATTATGATGAACTATATTGTTCTTTATTCAGGAAATGCTATTGTACAACGTGTTTTCCCAAAAAGCATTATGCGTACAAGTGACTCGAGTGTATATGTTTCTGCCAATGCATCATACCAGACAGATTGGTTATCTAGTTTAACGAATAATTCACGTATCAATATTGGTATCTTCATTGCTATTATTGCAGTTGTGTTAGTTTGGTTCCTATTAAATAAAACAACGCTTGGATTTGAAATTCGTTCAGTTGGTTTAAATCCAAATGCTAGTGAGTACGCTGGTATGTCTGCAAAGCGTACAATTATTCTATCAATGATTATTTCTGGAGCTTTTGCAGGACTTGGTGGTGTTGTTGAAGGACTAGGTACATTTGAGAATGTATTTGTACAGCCATCCTCGTTAGCTATTGGCTTTGACGGTATGGCAGTAAGTCTACTCGCAGCGAATAGTCCAATAGGTATTTTATTTGCAGCATTTCTATTTGGTGTTCTAAGTGTTGGTGCGCCTGGTATGAACATTGCAGGTATTCCACCTGAGTTAATTAAAGTTGTAACAGCTTCAATCATCTTCTTCGTAGGTGTCCATTACATTATTGAGTATGTTATTAAACCTAAAAAACAAATGAAAGGTGGTAAGTAA

SEQ ID NO: 1788 - protein, 353 aa, Streptococcus agalactiae
MSKKAQKIAVPLISVVLGIILGAIIMLIFGYDPLWGYEGLFQTAFGSIKNIGEIFRAMGPLILIALGFSVASRAGFFNIGLPGQALSGWIAAGWFALSHPDMPRPAMILCTIIIGIVAGGITGAIPGILRAYLGTSEVIVTIMMNYIVLYSGNAIVQRVFPKSIMRTSDSSVYVSANASYQTDWLSSLTNNSRINIGIFIAIIAVVLVWFLLNKTTLGFEIRSVGLNPNASEYAGMSAKRTIILSMIISGAFAGLGGVVEGLGTFENVFVQPSSLAIGFDGMAVSLLAANSPIGILFAAFLFGVLSVGAPGMNIAGIPPELIKVVTASIIFFVGVHYIIEYVIKPKKQMKGGK

SEQ ID NO: 1789 - protein, 957 aa, Streptococcus agalactiae
TTGAGTTTAACAACGATTTTTGCATTGCTATTTTCATCAATGCTAATTTACGCAACACCTCTTATCTTTACAAGTATTGGGGGAACCTTCTCTGAACGTGGTGGTATCGTCAACGTTGGTTTAGAAGGAATTATGGTAATTGGAGCTTTCTCAGGCGTTGTATTTAATTTAGAGTTTGCTTCTGTTTTTGGTGATGCGACTCCATGGATTTCTGTACTAGTTGGTGGTTTAGTTGGTTTAATTTTTTCTGTTATCCATGCAGTTGCGACAGTTAATTTTCGTGCAGATCATATTATCAGCGGAACCGTTCTTAATTTAATGGCACCTTCATTAGCTGTTTTCTTGATTAAGGTTCTTTATAATAAAGGTCAAACTGATAATATTCAAGAATCATTTGGAAAATTTAATTTCCCTATACTATCAGATATTCCTTTTGTTGGTGATATCTTCTTTAAAGGAACAAGCTTAGTCGGTTATATTGCTATTCTTTTCTCATTCCTTGCTTGGTTTATTCTATATAAAACTCGCTTTGGATTAAGATTACGCTCAGTTGGAGAACATCCTCAAGCAGCAGACACCTTAGGTATTAATGTTTATCTTATGCGTTACTCTGGTGTCTTGATTTCAGGTTTCCTTGGTGGAATAGGAGGAGCTGTATATGCTCAATCTATTTCTGTTAACTTTGCAGCGACAACTATATTAGGACCGGGCTTTATCTCCTTAGCGGCGATGATTTTTGGTAAGTGGAATCCAATTGGTGCAATGCTTGCTAGTCTATTCTTTGGTTTATCGCAAAGTTTAGCAGTTATCGGTAGCCATTTACCACTTTTGAGCAATATTCCAACAGTTTATCTACAAATTGCTCCATATGTCCTCACTATCATTGTATTAGCAGCTTTCTTTGGACAAGCAGTAGCTCCTAAGGCGGATGGTATTAATTATATTAAAACGAAATAA

SEQ ID NO: 1790 - protein, 318 aa, Streptococcus agalactiae
MSLTTIFALLFSSMLIYATPLIFTSIGGTFSERGGIVNVGLEGIMVIGAFSGVVFNLEFASVFGDATPWISVLVGGLVGLIFSVIHAVATVNFRADHIISGTVLNLMAPSLAVFLIKVLYNKGQTDNIQESFGKFNFPILSDIPFVGDIFFKGTSLVGYIAILFSFLAWFILYKTRFGLRLRSVGEHPQAADTLGINVYLMRYSGVLISGFLGGIGGAVYAQSISVNFAATTILGPGFISLAAMIFGKWNPIGAMLASLFFGLSQSLAVIGSHLPLLSNIPTVYLQIAPYVLTIIVLAAFFGQAVAPKADGINYIKTK

SEQ ID NO: 1791 - DNA, 1371 bp, Streptococcus agalactiae
atgagtaaaatcgttgtcgtagggacaaaccacgctggtacagcagcaattaaaacaatgcttagtaattatggtgaagccaatgaaattgtaacatttgatcaaaattccaatatctctttcttaggatgtggtatggctctttggattggtgaacagattgatggtccagaaggattgttctactctgataaagagcagttggaaagtatgggagctaaggtttacatgaactctccagtacttaatattgactacgataaaaaagaagttacagctttagtagatggaaaagaacatgttgaaagttatgaaaaacttattttagcaactggttcacaacctatcattccaccaattaaaggtgttgaaattcaagaaggatctcgtgaatttaaagctactcttgaaaaccttcaatttgtgaaactttatcaaaattcagaagaagttattgaaaagttagctaaacctggtatcaatcgtgttgctgttgttggggctgggtatattggtgtagaattagcagaagctttccaacgtattggaaaagaagtaacacttgttgatgttgctgatacttgtatgggtggttactatgatcgtgactttactgatatgatgagtaaaaaccttgaagaccatggtattcgtcttgctttcggacaagctgttcaagcagttgaaggtgatggtaaagtagaacgtcttgttactgataaagaaacatttgatgttgatatggtgatcttagctgttggattccgtccaaatacagaactcggtgcaggtaaattagatacattccgtaatggcgcttgggtagttgataagaagcaagaaacaagcgtgaaagatgtttatgctataggtgattgtgcgacaatttgggataattctcgtgatgatatcaattatattgctcttgcttcaaacgccgttcgtactggtattgtagcagctcacaatgcatgtggtacagagcttgaaggtgctggtgtccaagggtcaaatggtatctcaatctatggccttaacatggtgtcaactggtttgactttagaaaaagcaaaacaagctgggtacaatgcagttgaaacaggctttaatgaccttcaaaaaccagaatttatcaaacacaataatcatgaagtagctattaagattgtctatgataaagatagccgagttatccttggttgccaaatggtctcacacgaagatgtatctatgggaattcatatgttctcacttgctattcaagaaaaagttactattgaaaagcttgctttgaccgatatcttcttcttaccacattttaataagccatataactatattacaatggctgcattaggcgctaaagattaa

SEQ ID NO: 1792 - protein, 456 aa, Streptococcus agalactiae
MSKIVVVGTNHAGTAAIKTMLSNYGEANEIVTFDQNSNISFLGCGMALWIGEQIDGPEGLFYSDKEQLESMGAKVYMNSPVLNIDYDKKEVTALVDGKEHVESYEKLILATGSQPIIPPIKGVEIQEGSREFKATLENLQFVKLYQNSEEVIEKLAKPGINRVAVVGAGYIGVELAEAFQRIGKEVTLVDVADTCMGGYYDRDFTDMMSKNLEDHGIRLAFGQAVQAVEGDGKVERLVTDKETFDVDMVILAVGFRPNTELGAGKLDTFRNGAWVVDKKQETSVKDVYAIGDCATIWDNSRDDINYIALASNAVRTGIVAAHNACGTELEGAGVQGSNGISIYGLNMVSTGLTLEKAKQAGYNAVETGFNDLQKPEFIKHNNHEVAIKIVYDKDSRVILGCQMVSHEDVSMGIHMFSLAIQEKVTIEKLALTDIFFLPHFNKPYNYITMAALGAKD

SEQ ID NO: 1793 - DNA, 990 bp, Streptococcus agalactiae
atgactgcaactaaacaacataaaaaagttattctcgttggtgatggtgccgtaggttcttcttacgcttttgcacttgttaaccaaggtattgcgcaagagttaggtatcattgaaatcccagctttatttgataaagctgttggtgatgctgaagatctttcacatgcccttgcatttacatcacctaaaaaaatctacgcagctacttatgcagactgcgcagatgctgaccttgttgtcattactgctggcgcacctcaaaaaccaggtgaaactcgacttgaccttgttggtaaaaacttagcaattaacaaatcaatcgtaactcaagttgttgaatcaggtttcaacggtatcttcttagtagcggctaaccctgtagatgtacttacatattcaacttggaaattctcaggtttccctaaggaacgcgttattggttcaggtacttcacttgactctgcacgtttccgtcaagctttagcagataaaattggtgttgatgctcgttcagttcacgcatacatcatgggtgaacacggtgactcagaatttgccgtttggtcacatgctaacgttgctggtgtccaacttgaacaatggttacaagaaaatcgcgatattgatgaacaaggacttgttgatttgtttatttcagttcgtgacgctgcatactcaatcatcaacaaaaaaggtgctacatattacggtattgctgtcgcacttgctcgtattactaaagctatccttgatgatgaaaatgcagttcttccattatctgtatatcaagaaggccaatacggtgatgttaaagatgtctttatcggtcagcctgcaatcgtaggtgcacatggtatcgttcgtccagttaatatcccattaaatgatgctgaacttcaaaaaatgcaagcctcagctgaacaattaaaagatattattgacgaagcttggaaaaacccagaattccaagaagcatcaaaaaactaa

SEQ ID NO: 1794 - protein, 329 aa, Streptococcus agalactiae
MTATKQHKKVILVGDGAVGSSYAFALVNQGIAQELGIIEIPALFDKAVGDAEDLSHALAFTSPKKIYAATYADCADADLVVITAGAPQKPGETRLDLVGKNLAINKSIVTQVVESGFNGIFLVAANPVDVLTYSTWKFSGFPKERVIGSGTSLDSARFRQALADKIGVDARSVHAYIMGEHGDSEFAVWSHANVAGVQLEQWLQENRDIDEQGLVDLFISVRDAAYSIINKKGATYYGIAVALARITKAILDDENAVLPLSVYQEGQYGDVKDVFIGQPAIVGAHGIVRPVNIPLNDAELQKMQASAEQLKDIIDEAWKNPEFQEASKN

SEQ ID NO: 1795 - DNA, 2460 bp, Streptococcus agalactiae
atgcaagataaaaatttagtagatgttaatctaactagtgaaatgaaaacgagttttatcgattacgccatgagtgtcattgttgctcgtgcacttccagatgttagagatggtttaaaacctgttcatcgtcgtattttatatggtatgaatgaactaggtgtgacacctgataaacctcataagaaatcagcacgtattactggtgatgttatgggtaaataccatccacatggtgattcatctatttacgaagcaatggtgcgtatggcacaatggtggtcatatcgtcatatgctcgttgatggtcatggaaactttggttcaatggatggggatggtgctgccgcacagcgttatacagaagcacgtatgagtaaaattgctcttgagatgcttcgtgatatcaataaaaatacagttgattttcaagataactatgatggcagtgaacgtgaacctcttgttttaccagcgcgtttccctaatttattagtcaatggtgcaactggtattgctgtaggtatggcaacaaatattccaccacataatctaggtgagtctatagatgctgtcaaattggttatggataaccctgatgttactacacgggagttaatggaagttattcctggtccagattttcctactggtgccttggtgatgggacgttcaggtattcaccgtgcctatgaaactgggaagggatcaattgtcttacgttcacggactgaaattgaaacaacttcaaatgggaaagagcgtattgttgtcacagagtttccatatggcgttaataaaacaaaagtacacgagcatattgtacgtttagcacaagaaaagcgcattgaaggtattactgctgttcgtgatgaatcaagtcgtgaaggcgttcgttttgttattgaagttcgtcgtgctgcttcagcaaatgtgattttaaataatcttttcaaattaactagcttgcagacaaattttagcttcaatatgcttgctattgaaaaaggtgttccaaaaattttgtcattacgacaaatcattgataactatattgaacaccaaaaggaagttattgttcgtcgtactcagtttgacaaagctaaagcaggagcccgtgctcatatcttagaaggtttacttgtggcgcttgatcacttggatgaagttatcacaattattcgtaatagtgagacagacaccattgctcaagcagagttgatgtcacgttttgaattatcggagcgtcagagtcaagctattttagatatgcgtcttcgtcgtttaactggattagaacgcgataaaatccaatcagaatacaatgacttactagctttaattgctgatttagcagatatcttagctaagcctgaacgtgttgttaccattataaaagaagagatggatgaggttaagcgtaagtatgctgatgcccgtcgtacagaattaatgattggtgaagttttatcacttgaagatgaagaccttattgaggaagaagatgttcttattactctctcaaacaagggatatatcaagcgtctcgctcaagatgagtttagagcacaaaaacgtggaggacgcggtattcaagggactggagttaataacgatgattttgttcgtgaattggtttcaacaagtactcacgatactgtgcttttctttacaaatttagggcgtgtgtatcgtttgaaagcatatgaaattccagaatatggacgtacagctaaaggcctccctatcgttaaccttttaaaacttgacgaaggtgagacaattcaaacaattattaacgctagaaaagaagatgtcgctaataaatatttctttttcacaactcagcaaggtatagtgaaacgtacaagtgtttctgaatttagtaacattcgtcaaaatggacttcgtgctattaatttgaaagagaatgacgagttgattaacgtcctcttgattgatgaaaatgaagatgttattatcgggacacgtacaggctactctgttcgcttcaaagtgaacgctgtacgtaatatgggacgcacagcgactggggtacgaggcgttaatcttcgtgaaggtgataaagttgtgggagcttctcgtatcgttaatggacaagaagtactaatcatcactgaaaaaggttatggcaagagaacagaagcttcggaatatcctacaaaaggccgtggtggtaaaggaataaaaaccgctaatattactgctaaaaatgggccattagcacgcttagtgacgattaatggaaatgaggacatcatggtcattacagatacaggtgttattattcgaaccaatgttgctaatatttctcaaactggtcgttctaccatgggtgttaaagtgatgagacttgatcaagaagctaaaatcgtcactgttgcgctagtggaacaagaaattgaagataagtctaatatagaggatacaaaagaatag

SEQ ID NO: 1796 - protein, 819 aa, Streptococcus agalactiae
MQDKNLVDVNLTSEMKTSFIDYAMSVIVARALPDVRDGLKPVHRRILYGMNELGVTPDKPHKKSARITGDVMGKYHPHGDSSIYEAMVRMAQWWSYRHMLVDGHGNFGSMDGDGAAAQRYTEARMSKIALEMLRDINKNTVDFQDNYDGSEREPLVLPARFPNLLVNGATGIAVGMATNIPPHNLGESIDAVKLVMDNPDVTTRELMEVIPGPDFPTGALVMGRSGIHRAYETGKGSIVLRSRTEIETTSNGKERIVVTEFPYGVNKTKVHEHIVRLAQEKRIEGITAVRDESSREGVRFVIEVRRAASANVILNNLFKLTSLQTNFSFNMLAIEKGVPKILSLRQIIDNYIEHQKEVIVRRTQFDKAKAGARAHILEGLLVALDHLDEVITIIRNSETDTIAQAELMSRFELSERQSQAILDMRLRRLTGLERDKIQSEYNDLLALIADLADILAKPERVVTIIKEEMDEVKRKYADARRTELMIGEVLSLEDEDLIEEEDVLITLSNKGYIKRLAQDEFRAQKRGGRGIQGTGVNNDDFVRELVSTSTHDTVLFFTNLGRVYRLKAYEIPEYGRTAKGLPIVNLLKLDEGETIQTIINARKEDVANKYFFFTTQQGIVKRTSVSEFSNIRQNGLRAINLKENDELINVLLIDENEDVIIGTRTGYSVRFKVNAVRNMGRTATGVRGVNLREGDKVVGASRIVNGQEVLIITEKGYGKRTEASEYPTKGRGGKGIKTANITAKNGPLARLVTINGNEDIMVITDTGVIIRTNVANISQTGRSTMGVKVMRLDQEAKIVTVALVEQEIEDKSNIEDTKE

SEQ ID NO: 1797 - DNA, 744 bp, Streptococcus agalactiae
atgcgtaataaaaaaaaatcacatggtttctttaactttgttagatggttattggttgtattgctaattattgttgggttggctttggtgttcaataaaccaattcgcaatgctttcatagctcatcaatcaaatcattatcaaatttcacgagttagtaaaaaaacaattgaaaaaaataagaaatctaaaacaagttatgacttttcatcagtcaaatctattagtacagaatcgattttatctgctcaaacgaaatcacataatttgcctgtaataggagggattgctataccagatgtcgaaatcaatctcccaattttcaaaggactgggcaatacagagttgagttatggtgcaggaacgatgaaagaaaaccagattatgggaggcccaaataactatgccttagctagtcaccatgtctttggtttgacaggttcttctaagatgctcttttcacctttagaacatgctaagaaaggtatgaaagtttacctcactgataaaagcaaagtatacacttacactattactgaaatttcaaaggtaacaccagaacatgttgaggttattgatgatacacctggcaagagccaactcactttagtgacctgtacggatccagaagccacagaacgtattattgtgcatgctgaattagaaaaaacaggtgaattttcaacagcagatgagtcgatattaaaagcattttcgaaaaaatataatcaaattaatctctag

SEQ ID NO: 1798 - protein, 247 aa, Streptococcus agalactiae
MRNKKKSHGFFNFVRWLLVVLLIIVGLALVFNKPIRNAFIAHQSNHYQISRVSKKTIEKNKKSKTSYDFSSVKSISTESILSAQTKSHNLPVIGGIAIPDVEINLPIFKGLGNTELSYGAGTMKENQIMGGPNNYALASHHVFGLTGSSKMLFSPLEHAKKGMKVYLTDKSKVYTYTITEISKVTPEHVEVIDDTPGKSQLTLVTCTDPEATERIIVHAELEKTGEFSTADESILKAFSKKYNQINL

SEQ ID NO: 1799 - DNA, 414 bp, Streptococcus agalactiae
atgaaattaaaggctgttcatcatattgcgataattgtttctgactatgaaaagtcaaaagacttctatgttaataagctaggatttgaaattattcgtgaaaaccatcgtccggagcgtcatgattataaattagatttacggtgcggtgatattgagcttgaaatatttggaaatcgtcttgatgatccagaatatgaaactcctcctcagagaataggtaggccgaattggccacgtgaagcatgtggtttacgacaccttgccttttacgttccagatgtggaagcgtacaaggtagaactggagaatttaggaatttttgtagagcctattcgttacgatgactatactggcaaaaagatgacctttttctttgatccagatggtttacctttagaattacatgaataa

SEQ ID NO: 1800 - protein, 137 aa, Streptococcus agalactiae
MKLKAVHHIAIIVSDYEKSKDFYVNKLGFEIIRENHRPERHDYKLDLRCGDIELEIFGNRLDDPEYETPPQRIGRPNWPREACGLRHLAFYVPDVEAYKVELENLGIFVEPIRYDDYTGKKMTFFFDPDGLPLELHE

SEQ ID NO: 1801 - protein, 963 aa, Streptococcus agalactiae
ATGAGTATTAAAAAGCTATTGTTTGCAGGCCTTGCTTTTATTTTATTTACCCTAGCGAGTCCAGCATATGCTGCATCAGATGTTCAGAAAGTTATTGATGAAACTTATGTTCAACCTGATTATGTCTTAGGTTATTCGCTAAATCAAGAACAGCGTGCACAGACATTACAACTTCTGAATTATGATGAATCTAGAGACACGAAAGTTAAAACGCTAAATACTAGCTCATATGCTAAAATAATGAATATAGCTGATGATGCAAGCATCCAATTATATTCATCTGTTAAAATAAAAAAATTAGGGTCTAACGATACCTTAGCAGTAAACATTGTTACACCTGAGAATATTACTAAAGTTACAGAAGATATGTATCGCAATGCTGCAGTTACATTAGGTATTGAGCATGCAACGATATCAGTGGCTGCTCCAATAAAAGTAACTGGGGAGAGTGCTCTTGCAGGTATCTATTATTCATTAGAGAAAAATGGAGCAAGTGTATCATCAGAAAATAAACAACTAGCACAAGAAGAGTTAAGTACTTTATCTGGTATTAATGCTGAGAATAAGGGTAAGGAAGGTTATGACGCCGACAAGCTTAATGTAGCTTTAACGGATATTAAGTCAGCCGTAGCTAAAGGAGGATCTGATCTTTCAAAAGATGATATTCGAAAAATTGTTGAGGAAACATTGAAAAATTATCATCTTGATAACGCTGTAACGGAAAATCAAATAAATTTAATTGTTAATTTTGCAGTTAATCTTTCACAAAGTAATGTCATCAAAAATAGTGATTTCACGAACACCTTGAATAATTTGAAAGACAACATTGTTTCGAAAGCAGGATCTAAATTTAAAAATATCAATGTCAATTTTAATGCTAATAAAGCTGTTGAATCAGGTAAGGGATTTTTAGCTAATATTTGGCAACAAATTGTTAATTTTTTCCAGCAGTTTGGTAGTTAA

SEQ ID NO: 1802 - protein, 320 aa, Streptococcus agalactiae
MSIKKLLFAGLAFILFTLASPAYAASDVQKVIDETYVQPDYVLGYSLNQEQRAQTLQLLNYDESRDTKVKTLNTSSYAKIMNIADDASIQLYSSVKIKKLGSNDTLAVNIVTPENITKVTEDMYRNAAVTLGIEHATISVAAPIKVTGESALAGIYYSLEKNGASVSSENKQLAQEELSTLSGINAENKGKEGYDADKLNVALTDIKSAVAKGGSDLSKDDIRKIVEETLKNYHLDNAVTENQINLIVNFAVNLSQSNVIKNSDFTNTLNNLKDNIVSKAGSKFKNINVNFNANKAVESGKGFLANIWQQIVNFFQQFGS

SEQ ID NO: 1803 - protein, 447 aa, Streptococcus agalactiae
ATGGAATGNNNNNTGAGTTCTATCATTGGTTCGTTTTTTGCAGGATTAGCTATTGGACAAACTTCTTTTGTTGATAAGGTAGAACATAAAATTTCACTTCTTAGTTACACCTTCTTTATCCCAATTTTCTTCGCTTCAATTGCACTACCTCTTAAATTCGATGGAATGATGTCTCACCTTCACACGATATTAATCTTTACTGCTTTGGCTGTTTTATCAAAATTAATTCCAGGGTACTTTGTCGGTCGAGGCTTTAATTTTTCAAAATTAGAATCTTTAACAATTGGTGGTGGAATGGTCAGTCGTGGCGAGATGGCTCTCATTATAGTTCAAGTTGGATTAGCTGCTAAAATTATTTCAAGCACTACTTATTCCGAGCTTGTTATTGTTGTTATACTATCAACTATTATTGCGCCATTTATTCTTAAATATTCATTTAAAGATTAG

SEQ ID NO: 1804 - protein, 148 aa, Streptococcus agalactiae
  VARIANT 3, 4, 5: Xaa = Any Amino Acid
MEXXXSSIIGSFFAGLAIGQTSFVDKVEHKISLLSYTFFIPIFFASIALPLKFDGMMSHLHTILIFTALAVLSKLIPGYFVGRGFNFSKLESLTIGGGMVSRGEMALIIVQVGLAAKIISSTTYSELVIVVILSTIIAPFILKYSFKD

SEQ ID NO: 1805 - protein, 510 aa, Streptococcus agalactiae
ATGCATATTATCATTCAAATTACAATCATTTTGTTGGCAAGCGTTCTTGCAACTCTTATTTCAAAAAGAATTGGAATACCGGCTGTTGTTGGACAACTACTTGTAGGTATCATCATCGGACCTGCAATGCTAGGACTTGTTCATCAAAATCAGGTATTACATGTCTTGTCAGAAATTGGTGTTATCTTACTCATGTTTTTAGCGGGTCTTGAAGCTAATTTTGATCTTTTAAAGAAGTATCTTAAGCCCAGTCTACTGGTCGCAATTACTGGTGTTATTGTTCCTATGGCTCTCTTCTACTTCTTGACACGCTTGTTTGGGTTCCAAATCAATACTGCTATCTTTTACGGGCTCGTATTTGCTGCAACTAGTATTTCTATCACAGTTGAAGTTTTACAAGAATACAATCGTGTAAAAACAGATACTGGTGCTATTATTTTAGGTGCTGCTGTTGCTGATGATGTCTTAGCTGTTTTGCTTCTGNNNNNCATTCATTCATTAATTAATTAA

SEQ ID NO: 1806 - protein, 169 aa, Streptococcus agalactiae
  VARIANT 162, 163: Xaa = Any Amino Acid
MHIIIQITIILLASVLATLISKRIGIPAVVGQLLVGIIIGPAMLGLVHQNQVLHVLSEIGVILLMFLAGLEANFDLLKKYLKPSLLVAITGVIVPMALFYFLTRLFGFQINTAIFYGLVFAATSISITVEVLQEYNRVKTDTGAIILGAAVADDVLAVLLLXXIHSLIN

SEQ ID NO: 1807 - protein, 384 aa, Streptococcus agalactiae; identical to SEQ ID NO: 879

SEQ ID NO: 1808 - protein, 127 aa, Streptococcus agalactiae; identical to SEQ ID NO: 880

SEQ ID NO: 1809 - protein, 390 aa, Streptococcus agalactiae
ATGAAGGCTCAGGCGATTGTCACAAGCCAAGGGAGAATTGTTTCTTTGGATATTGCAGTGAACTATTGCCACGATATGAAGTTGTTCAAAATGAGTCGCAGAAACATCGGACAAGCTGCTAAAATCTTGGCAGACAGTGGTTATCAAGGGATCATGAAGATGTATTCACAAGCGCAAACTCCGAGGAAATCAAGCAAACTTAAGCCACTAACTCTTGAAGATAAAACATATAACCATACGCTATCCAAAGAGAGAATCAAGGTTGAGAATATTTTTGCCAAAGTAAAAACGTTTAAAATATTTTCAACAACCTATCGAAATCGACGCAAACGGTTTGGATTACGAATGAATTTGATTGCTGGAATGATCAACCGTGAACTAGGATTTTAG

SEQ ID NO: 1810 - protein, 129 aa, Streptococcus agalactiae; identical to SEQ ID NO: 882

SEQ ID NO: 1811 - protein, 1563 aa, Streptococcus agalactiae
ATGACTGATATTTCTATATTGAATGATATCCAAAAAATTATCGTTCTAGATTACGGTAGTCAATATAACCAGCTTATCGCACGTCGTATCCGTGAATTTGGTGTATTTTCTGAGTTAAAATCACATAAAATTACGGCTGATGAAATTCGCGATATTAATCCTATTGGTATCGTACTTTCAGGTGGTCCAAATTCCGTATACGCTGATGGCGCTTTTGGAATCGATGAAGAAATTTTTGAATTAGGAATTCCAATCTTAGGAATTTGTTATGGCATGCAACTGATTACCCATAAACTCGGTGGTAAGGTTCTTCCTGCGGGAGAAGCTGGTCATCGTGAGTATGGTCAATCAGCACTTCGCCTACGCTCAGAATCAGCACTCTTTGCTGGCACTCCTCAAGAACAACTTGTTTTGATGAGCCATGGTGATGCTGTCACTGAAATTCCTGAGGGTTTCCATCTCGTTGGTGACTCTGTTGACTGTCCATTTGCTGCAATGGAAAATACTGAAAAACAATTTTATGGTATCCAATTCCACCCCGAAGTTCGTCACTCAGTATATGGCAATGATATCCTTAAAAATTTTGCTGTTAATATCTGTGGCGCACGTGGTGATTGGTCAATGGATAACTTCATTGATATGGAAATTGCAAAAATACGTGAAACTGTAGGCGATCGTAAAGTACTTCTTGGACTATCTGGCGGTGTTGATTCATCTGTTGTCGGAGTACTCCTACAACGTGCTATCGGTGATCAATTAACATGTATTTTTGTAGATCATGGTTTATTACGTAAAAATGAAGGTGACCAAGTTATGGATATGCTTGGTGGTAAATTTGGACTTAATATTATCCGTGTTGATGCTTCAAAACGCTTCCTAGATCTTCTTTCTGGTGTTGAAGATCCCGAGAGAAAACGAAAAATCATCGGAAATGAGTTCGTGTACGTTTTTGATGATGAGGCAAGTAAACTTAAAGGCGTTGATTTCCTTGCTCAAGGTACCCTCTACACAGATATTATTGAATCTGGGACAGAAACAGCCCAAACAATCAAGTCACACCATAATGTTGGTGGATTGCCAGAAGATATGCAATTTGAATTGATTGAGCCACTTAACACATTATTCAAAGATGAGGTTCGCGCTCTTGGTACTGCACTTGGAATGCCTGATGAAGTTGTATGGCGTCAACCATTCCCTGGGCCTGGTCTTGCTATTCGCGTTATGGGTGAAATTACCGAAGAAAAACTTGAAACAGTCCGCGAATCAGATGCTATTCTTCGTGAAGAAATCGCTAAAGCTGGTCTAGATCGTGACGTATGGCAGTATTTCACAGTTAATACTGGCGTACGTTCTGTCGGTGTTATGGGAGATGGTCGTACTTATGACTATACAATTGCTATCCGTGCAATTACTTCAATTGATGGCATGACAGCTGACTTTGCGCAACTTCCTTGGGATGTACTTAAGAAAATTTCGACACGTATTGTTAACGAAGTTGATCACGTTAACCGTATTGTTTATGATATTACAAGTAAACCACCTGCAACTGTTGAGTGGGAATAA

SEQ ID NO: 1812 - protein, 520 aa, Streptococcus agalactiae
MTDISILNDIQKIIVLDYGSQYNQLIARRIREFGVFSELKSHKITADEIRDINPIGIVLSGGPNSVYADGAFGIDEEIFELGIPILGICYGMQLITHKLGGKVLPAGEAGHREYGQSALRLRSESALFAGTPQEQLVLMSHGDAVTEIPEGFHLVGDSVDCPFAAMENTEKQFYGIQFHPEVRHSVYGNDILKNFAVNICGARGDWSMDNFIDMEIAKIRETVGDRKVLLGLSGGVDSSVVGVLLQRAIGDQLTCIFVDHGLLRKNEGDQVMDMLGGKFGLNIIRVDASKRFLDLLSGVEDPERKRKIIGNEFVYVFDDEASKLKGVDFLAQGTLYTDIIESGTETAQTIKSHHNVGGLPEDMQFELIEPLNTLFKDEVRALGTALGMPDEVVWRQPFPGPGLAIRVMGEITEEKLETVRESDAILREEIAKAGLDRDVWQYFTVNTGVRSVGVMGDGRTYDYTIAIRAITSIDGMTADFAQLPWDVLKKISTRIVNEVDHVNRIVYDITSKPPATVEWE

SEQ ID NO: 1813 - protein, 699 aa, Streptococcus agalactiae
TTGTTACCAGCATATATTAAAATTCACGACGCTATTAAAAAGGAAATCGATAAAGGGACTTGGAAGATTGGGCAGCGGTTACCTAGCGAAAGAGATTTAGCGGATGATTATAGTGTAAGTCGTATGACACTTCGCCAATCAATTACATTGTTAGTTGAAGAAGGTATTTTGGAGAGACGAGTTGGTAGTGGCACCTATGTTGCTAGTCATCGTGTTCAAGAAAAAATGCGGGGAACAACTAGTTTTACAGAAATTGTCAATTCTCAAGGGCGTAAGCCATCCAGTAAACTAATCTCATTTCAAAGAAAACTAGCAAATGAAACCGAAATTCAAAAATTAAATTTATCACAGTCAGATTATGTGGTTCGTATGGAAAGGGTACGTTATGCTGATAAGGTACCGTTGGTTTATGAGGTAGCCTCTATACCAGAGAATTTAATTAAAGGTTTTGAACAATCAGAGGTTACAGAACATTTCTTTAAAACCTTAACAGAGAATGGCTACGAAATTGGGAAAAGCCAACAAACTATATATGCTAGAAATGCTAGTGAACGTGTTGCTTCGCATTTAGAAGTTAACGCAGGCCATGCTATTTTGGCATTGACACAAGTTTCATACTTTACTGATGGTAAGCCTTTTGAATATGTTCATGGGCAATATGTTGGAGATCGTTTTGAGTTTTATTTAGAGAATAACTAG

SEQ ID NO: 1814 - protein, 232 aa, Streptococcus agalactiae
MLPAYIKIHDAIKKEIDKGTWKIGQRLPSERDLADDYSVSRMTLRQSITLLVEEGILERRVGSGTYVASHRVQEKMRGTTSFTEIVNSQGRKPSSKLISFQRKLANETEIQKLNLSQSDYVVRMERVRYADKVPLVYEVASIPENLIKGFEQSEVTEHFFKTLTENGYEIGKSQQTIYARNASERVASHLEVNAGHAILALTQVSYFTDGKPFEYVHGQYVGDRFEFYLENN

SEQ ID NO: 1815 - protein, 1335 aa, Streptococcus agalactiae
ATGTCTCAATCTTACATTAATGTTATCGGCGCTGGTTTGGCTGGTTCTGAAGCAGCTTATCAAATTGCTAAACGTGGAATACCAGTTAAGCTTTATGAAATGCGTGGGGTTAAATCAACCCCTCAACATAAAACAGATAATTTTGCAGAATTAGTATGTTCCAATTCATTCCGCGGTGATTCTCTAACAAATGCAGTTGGTCTTTTAAAAGAAGAAATGCGTCGTTTGGATTCTATCATTATGAGAAATGGGGAGGCACATCGAGTTCCAGCAGGTGGAGCCATGGCCGTTGATAGAGAAGGTTATTCTGAAGCTGTTACTGAGGAAATCCATAAACATCCATTAATCGAAGTAATTCGTGATGAAATCACAGATATCCCTGGAGATGCTATTACAGTTATCGCTACAGGACCATTAACAAGTGATAGTCTGGCAGCTAAAATCCATGAACTTAATGGTGGTGATGGTTTTTATTTTTACGATGCCGCCGCTCCAATTGTCGATAAAAATACGATTGACATAAATAAAGTTTACCTTAAGTCTAGGTATGACAAAGGTGAAGCAGCTTATCTAAATTGTCCAATGACCAAAGAAGAATTTATGGCTTTTCATGAAGCTTTAACTACAGCTGAGGAAGCACCACTAAATTCTTTTGAGAAAGAAAAATACTTCGAAGGTTGTATGCCTATCGAAGTGATGGCTAAGCGTGGTATTAAAACGATGCTTTATGGTCCAATGAAACCAGTTGGTTTGGAGTATCCTGAGGACTACAAAGGACCGCGAGATGGTGAATTTAAAACACCATATGCTGTTGTTCAATTACGTCAAGATAATGCTGCAGGCTCTCTTTATAACATAGTTGGTTTCCAAACTCATCTTAAGTGGGGAGAACAAAAACGTGTATTTCAAATGATTCCTGGTCTTGAAAATGCTGAATTTGTCCGGTATGGTGTTATGCATCGCAATTCTTATATGGATTCACCAAATCTTTTAAACCAAACCTTTGCTACACGTAAGAACCCAAATCTTTTCTTTGCTGGACAAATGACCGGTGTTGAAGGTTATGTAGAATCGGCAGCAAGTGGTCTTGTAGCGGGAATCAATGCTGTCCGTCGCTTCAATGGGGAGAGTGAAGTAGTTTTCCCACAAACTACTGCTATTGGTGCACTGCCACATTATATTACACATACAGACAGCAAACATTTCCAACCAATGAATGTTAACTTTGGTATCATCAAAGAATTAGAAGGTCCACGAATTCGTGATAAGAAAGAGCGTTATGAAGCTATTGCTACACGAGCTTTGAAAGATTTAGAAAAATTTCTCAACTATTGA

SEQ ID NO: 1816 - protein, 444 aa, Streptococcus agalactiae
MSQSYINVIGAGLAGSEAAYQIAKRGIPVKLYEMRGVKSTPQHKTDNFAELVCSNSFRGDSLTNAVGLLKEEMRRLDSIIMRNGEAHRVPAGGAMAVDREGYSEAVTEEIHKHPLIEVIRDEITDIPGDAITVIATGPLTSDSLAAKIHELNGGDGFYFYDAAAPIVDKNTIDINKVYLKSRYDKGEAAYLNCPMTKEEFMAFHEALTTAEEAPLNSFEKEKYFEGCMPIEVMAKRGIKTMLYGPMKPVGLEYPEDYKGPRDGEFKTPYAVVQLRQDNAAGSLYNIVGFQTHLKWGEQKRVFQMIPGLENAEFVRYGVMHRNSYMDSPNLLNQTFATRKNPNLFFAGQMTGVEGYVESAASGLVAGINAVRRFNGESEVVFPQTTAIGALPHYITHTDSKHFQPMNVNFGIIKELEGPRIRDKKERYEAIATRALKDLEKFLNY

SEQ ID NO: 1817 - protein, 744 aa, Streptococcus agalactiae
ATGCACTATAAAGAATTACTTGAGTCATCCGAAAAAGCTTATTTGGAAACTAATCGGTATAAACATTTTAAGAATATAATCATTTCAGAGCGTTATTTTTCAAACTATATTAGCTACAAAATAATGCCTACAGTAAGTGAGTTTTTACAGGATATGATCTATTTAGCAGATGAACAAAAAGATTATCAGTCTGATTTTGCTTTTGTATTTTTTGAGGAAAATGCTGAATTGAGCAGTGAATTACAGAGAACTTTATCACAACAAGGCTTTGAATCAGAGAAACATATCATATTTACAAATTCATTAAATCATCTTAAACTTTTTGAAAAAGAATTTGATGACATCACATTTACTAAACTTAATGAAAATTACCTAGAAAAATACCTAAAGTTCAAATATAAACAAAGTATAGTTTACGGAGAAATTTACGCTAAGCAAATGTATAATGATAATCGTGTTAATCTTTTAAATAATAATGCTAAAGTTTACCTAGCTATTAAAGATAATCAAATTATTGGAGATGTAACAGCTTGGGACTATGGTGAATACGTGGAAATAGATGATTTTTATGTCCAAGAGTCCTACAGAGGACAAGGAATTGGTACGCGCCTACAATTTGATGCAAGTAGGGGGTTTAAGAAAGTTATCTTAATTTCAGAAGAAGAAAACAGAAAAATGTATGAGCACCAAGGTTATGAGGAAGTCGCCTATTATTGGACCGCTTTACGGAGCCCTCGAAAGTAA

SEQ ID NO: 1818 - protein, 247 aa, Streptococcus agalactiae
MHYKELLESSEKAYLETNRYKHFKNIIISERYFSNYISYKIMPTVSEFLQDMIYLADEQKDYQSDFAFVFFEENAELSSELQRTLSQQGFESEKHIIFTNSLNHLKLFEKEFDDITFTKLNENYLEKYLKFKYKQSIVYGEIYAKQMYNDNRVNLLNNNAKVYLAIKDNQIIGDVTAWDYGEYVEIDDFYVQESYRGQGIGTRLQFDASRGFKKVILISEEENRKMYEHQGYEEVAYYWTALRSPRK

SEQ ID NO: 1819 - protein, 849 aa, Streptococcus agalactiae
ATGAAAATCAAAAAGCTATTAGGGTTAACGACAACAGTAGTAATTTCAGCACTTATTTTAGGAGCCTGTGGTCAGTCTAAAAATGAAGACGCCAAAGTCGTTAGAGTTGGAACAATGGTAAAGAGTAAAACTGAAAAAGCTCGTTGGGATAAAATCGAAGAATTAGTTAAGAAAAAAGGCGTTAAGCTAAAATTTACGGAATTCACAGATTATACACAACCTAATAAAGCTTTAGAAAGTGATGAGATTGATATTAATGCTTTCCAGCATTATAATTACTTAAACAATTGGAATAAAGCAAATAAGACCAATCTTGTTTCCGTTGCTGAGACATACTTTACTTCCTTTAGATTATACTCTGGTACTAAGAACGGTAAAGGTAAATACCAAACAGTTTCTGAAATTCCAAATAAAGCAACTATTACTATCCCAAACGATGCAGTTAACGAAAGTCGCTCTCTCTACTTGTTACAATCAGCAGGCTTGCTAAAATTGAAAGTATCAGGTGATGCATTAGCAACAATGTCAGATGTTGTTTCCAATCCTAAATCTTTAGATTTAAAAGAAGTAGATGCAGCACAGACCGCACGTTCTTTGGATTCCACAGATGCAGCAGTTATTAATAATGATTTTGTGACAGAAGCAGGAATAAATCCTAAATCAGCTATTTTTATTGAACCAAAAAGTAAAAATGCAAAACAATGGTACAACCTTTTAGTTGCTCAAAAAGGTTGGCAAGACAAATCAAAAGCTAAAGCCATTAAAGAAGTTGTGAAAGCTTACCATACAGATGCGGTTAAAAAAGTTATCGAAAAAACATCTCAAGGTTTAGATCAACCTGTTTGGTAA

SEQ ID NO: 1820 - protein, 282 aa, Streptococcus agalactiae
MKIKKLLGLTTTVVISALILGACGQSKNEDAKVVRVGTMVKSKTEKARWDKIEELVKKKGVKLKFTEFTDYTQPNKALESDEIDINAFQHYNYLNNWNKANKTNLVSVAETYFTSFRLYSGTKNGKGKYQTVSEIPNKATITIPNDAVNESRSLYLLQSAGLLKLKVSGDALATMSDVVSNPKSLDLKEVDAAQTARSLDSTDAAVINNDFVTEAGINPKSAIFIEPKSKNAKQWYNLLVAQKGWQDKSKAKAIKEVVKAYHTDAVKKVIEKTSQGLDQPVW

SEQ ID NO: 1821 - protein, 489 aa, Streptococcus agalactiae
ATGGCCAAGACAAGTAAAAAATTGACAAAATCTTTAGGGCCTATTGGTAAATTAATTTCAATAATCCCTGACACAACTGAACTTATTGGAAAAGCAATTGATAATTCTCGTCCAATTATTGAAAAAGAACTTGACCGTCGTCATGAAAAAAAACAGACTTATACTCAGCTTGATAATGTAGTACACCTTGATATCAATGATGCGCAAGTTTACTTAGAGCAACGCCATTTTAATGTATCAAGGATTGTTGCTGAACCAAATTCAAAGTGGGCAACCCTACATCCTAATCAAGTTGTGAATATGTCGCCTAAAGCTGGTAGGGTCAGAATCGGTTCATTAGTGAAGTTGTACTATATTACAGAGGATATCCTTGAAGAAAGTAAGACACTACTTTTATCTAAATCCGAAAAAAGTAAAGCACGACAACAACGGTTAACAGAAGTATTGAGTACCCCTAGTCAATTACTCAAAAAAAATCGAAATAAATAA

SEQ ID NO: 1822 - protein, 162 aa, Streptococcus agalactiae
MAKTSKKLTKSLGPIGKLISIIPDTTELIGKAIDNSRPIIEKELDRRHEKKQTYTQLDNVVHLDINDAQVYLEQRHFNVSRIVAEPNSKWATLHPNQVVNMSPKAGRVRIGSLVKLYYITEDILEESKTLLLSKSEKSKARQQRLTEVLSTPSQLLKKNRNK

SEQ ID NO: 1823 - protein, 963 aa, Streptococcus agalactiae
ATGCGGCGAAAAATAGTTTTACTTTTTGTAGTTCCAATGCTTATAGTTTTAGGAATTTTAGGAGTGGTAGTTCATTATTATGGTTCAGCATTAAATATTTATCTATTACCTCCTAGTAGCGAACGTTATGGACGTGTTATTTTAGATCGTGTTGAACAGCGTGGTTTGTATTCGCAAGGTCGTCAATGGCAAATTATAAGACAACGATCAGAAAAAAAGTTGAAAACGTCAAAATCTTACCAAGAGAGTCGCAACATTGTACAGGAAGCAGTACGGTATGGAGGCGGTAAACATAGTCAAATATTATCCAAAGAGACTGTACGAAGAGATACCCTAGATAGTCGATATCCAGAATATCGAAGATTAAACGAAGACATTCTCTTAATTACTATTCCTTCTATAAGTAAGTTAGATAAACGATCTATTAGCCATTATAGTGGTAAATTACAAAATATATTGATGGAAAAAAGTTATAAGGGACTCATTTTAGACTTATCGAATAATACTGGCGGCAATATGATCCCTATGATTGGGGGGGTAGCCTCTATTTTACCAAATGATACCCTATTTCATTATACTGATAAGTATGGAAATAAGAAAACAATCACGATGAAAAATATACCGCTAGAAGCATTAAAAATATCTAGGAAAACAATCAATACTAAGCATGTTCCAATCGCTATTATAACTAATCATAAAACTGCTAGTTCGGCAGAAATGACTTTTTTATCATTTAAAGGATTACCTAATGTTAAAAGCTTTGGTCAAGCTACAGCAGGATATACGACTGTTAATGAAACTTTCATGCTTTACGACGGTGCTAGATTAGCTTTAACTACAGGAATAGTTAGTGATCGACAAGGATATAAATACGAGAACACCCCTATCTTACCAGATCAAGTAACCAGCCTTCCTTTACAAGAGTCACAGTCTTGGTTAAAGAGTAGAATCAATCAAAATTAG

SEQ ID NO: 1824 - protein, 320 aa, Streptococcus agalactiae
MRRKIVLLFVVPMLIVLGILGVVVHYYGSALNIYLLPPSSERYGRVILDRVEQRGLYSQGRQWQIIRQRSEKKLKTSKSYQESRNIVQEAVRYGGGKHSQILSKETVRRDTLDSRYPEYRRLNEDILLITIPSISKLDKRSISHYSGKLQNILMEKSYKGLILDLSNNTGGNMIPMIGGVASILPNDTLFHYTDKYGNKKTITMKNIPLEALKISRKTINTKHVPIAIITNHKTASSAEMTFLSFKGLPNVKSFGQATAGYTTVNETFMLYDGARLALTTGIVSDRQGYKYENTPILPDQVTSLPLQESQSWLKSRINQN

SEQ ID NO: 1825 - protein, 753 aa, Streptococcus agalactiae
ATGTTATTAGAAATCAATCACTTAGAAAAAGTTTTTCGTACACGTTTTTCAAAAGAAGAGACAAGGGCTCTACAAGACGTCGATTTTAAAGTTGAACAAGGGGAATTCATTGCTATTATGGGAGAGTCTGGTTCGGGAAAAACAACTCTGCTAAATATTTTAGCTACTTTAGAAAAACCGACAAATGGACAAGTGATTTTAAATGGGGAAGATATTACGAAAATTAAAGAGGCAAAATTAGCGAGTTTTCGTTTGAAAAATCTTGGTTTCGTCTTTCAGGACTTCAACCTTTTGGATACTCTCTCTGTAAGAGATAATATCTATCTTCCTTTAGTTCTTGATCGTAAACGTTACAAAGAAATGGATCATCGTTTGTCAGAATTATCTTCTCATCTGAGAATTGATGACTTATTAGATAAGAGACCTTTCGAGCTCTCTGGTGGGCAAAAGCAACGTGTAGCGATTGCTCGTAGTTTGATAACCAACCCTCAAATTTTATTAGCAGATGAACCAACAGCAGCGTTAGATTACCGTAATTCAGAAGACTTGCTGAATTTATTTGAAACTATTAACTTGGATGGACAAACTATTTTGATGGTAACCCATTCAGCAAATGCTGCTAGTCATGCCAAACGCGTTTTATTTATCAAAGATGGACGTATTTTTCACCAACTTTATCGTGGTAATAAGAATAATAGCGAATTCAATAAAGATATTTCTTTAACAATGTCTGCCATATTAGGGGGTGAATAA

SEQ ID NO: 1826 - protein, 250 aa, Streptococcus agalactiae
MLLEINHLEKVFRTRFSKEETRALQDVDFKVEQGEFIAIMGESGSGKTTLLNILATLEKPTNGQVILNGEDITKIKEAKLASFRLKNLGFVFQDFNLLDTLSVRDNIYLPLVLDRKRYKEMDHRLSELSSHLRIDDLLDKRPFELSGGQKQRVAIARSLITNPQILLADEPTAALDYRNSEDLLNLFETINLDGQTILMVTHSANAASHAKRVLFIKDGRIFHQLYRGNKNNSEFNKDISLTMSAILGGE

SEQ ID NO: 1827 - protein, 1956 aa, Streptococcus agalactiae
ATGTTTTATCTCAAAATAGCCTGGCATAATTTAAAACATTCTATAGACCAGTACATACCATTCCTCTTAGCCAGTTTATTACTTTATTCATTGACTTGTTCTACGCTACTAATCTTAATGAGTGCTGTTGGAAGAGATATGGGGACAGCGGCAACGGTTCTTTTTCTTGGAGTGATTGTTTTGTCAATCTTTGCGGTAGTCATGGAACATTATAGCTACAATATCTTGATGAAACAGCGTAGTAGTGAATTTGGACTGTATAACATTTTGGGGATGAATAAACGTCAAGTTGCGCGTGTAGCTAGTCTAGAGCTGTTTATTATTTATATATTTCTTATTTCTATAGGAAGTCTGTTTAGTGCTTTTTTTGCTAAATTTATTTATTTAATTTTTGTCAACATTATTAACTATCATGCACTAAATCTTAGTTTAAGTTTATGGCCATTTATTATTTGTATCGTTATATTTACAGGTATTTTTCTGACTTTAGAAGTTCCAGTTATTCGACATGTTCATTTATCATCCCCATTAAGTCTTTTTAGAAAGAAACAACAGGGAGAAAAAGAACCAAAAGGTAATCTTATACTTGCAATTTTAGCGTTAGTAGCTATCGCCATCGCTTATACAATGGCTCTTACTTCAGGTAAAGCACCTGCATTAGCTGTTATCTATCGTTTCTTCTTTGCAGTACTTTTAGTTATTGCTGGTACTTATCTTTTTTATATTAGTTTTATGACATGGTACTTAAAAAGGTTGCGTCAAAACAAGCATTATTATTATAAATCTGAGCATTTTGTATCAACTTCGCAAATGATTTTTCGAATGAAGCAAAATGCAGTAGGGTTAGCAAGTATCACTTTATTAGCTGTTATGGCTCTAGTTACTATTGCTACAACAGTCTCACTTTATTCAAATACACAAAATGTTGTTACCGGACTATTTCCAAAATCAGTAAGTTTATCAATAGATAATTCAAAAGGTGACGCGAAAAATATATTTGAAGAAAAGATTTTGAAGAAACTAGGTAAGTCATCTAAGGAAGCTATCACTTATAATCAGACAATGATTTCGATGCCAGTTAGTCAATCAAGTGAACTTAATATCACATCTAAAAACGTCAAACATGTTGATATCACAAAAACGGGTTTTATGTACCTAATTACTCAGAATGATTTCCGTCGTTTAGGTCACCAATTACCAAAATTAAAAGATAACCAAGTGGCTTACTTTGTTCAAAAAGGTGATAGCCGTTTGAAAAAAATAAATCTATTGGGAAATAAATTTGACGTTGTAAAAAATTTAAAAGAGGCTTATGTCCCAGAGACTACAAATACTTACAACCCGGGTTTGATTATATTTGCAAACAACAAACAAATTGACAATATTAGAAAAGCATATTTACCTTATACTAAGAACATCAATACTTTTCCAAAAACCTTTAAGGCATATTTGGATTTGAATAGTCAAGAGATAAATTCAATTTCTAAAAACGACATAATAGAGGTAGATGGTAAGTATGTTGGAAATATTAGCACTAAACAGAGTTTTCTAAAAGAAGGTTATCAAATGTTTGGTGGGTTATTATTTACTGGATTTCTGTTAGGTATAAGCTTTTTGCTAGGTATAGCTCTAATTGTTTACTATAAGCAATACTCAGAAGGTCATGAAGATAAGAGATCTTATCGTATCTTACAAGAAGTAGGTATGAGCAAAAAATTAGTTAAACGGACTATTAATTCTCAAATTATGATTTTCTTCTTCCAACCTTTAGTGGTAGCAGTTATTCACTTTGGAGTTGCTATTCCAATGCTAAAACAGATGCTTTTGGTATTTGGGGTGCTTAACTCAACAATCGTATATGTAGTAAGTGGTTTGACAGTACTTGCGATTTCTATAATTTACTTTATCATTTACCGTATAACTAGTCGAACTTATTATCATATTATTGAACGCTAA

SEQ ID NO: 1828 - protein, 651 aa, Streptococcus agalactiae
MFYLKIAWHNLKHSIDQYIPFLLASLLLYSLTCSTLLILMSAVGRDMGTAATVLFLGVIVLSIFAVVMEHYSYNILMKQRSSEFGLYNILGMNKRQVARVASLELFIIYIFLISIGSLFSAFFAKFIYLIFVNIINYHALNLSLSLWPFIICIVIFTGIFLTLEVPVIRHVHLSSPLSLFRKKQQGEKEPKGNLILAILALVAIAIAYTMALTSGKAPALAVIYRFFFAVLLVIAGTYLFYISFMTWYLKRLRQNKHYYYKSEHFVSTSQMIFRMKQNAVGLASITLLAVMALVTIATTVSLYSNTQNVVTGLFPKSVSLSIDNSKGDAKNIFEEKILKKLGKSSKEAITYNQTMISMPVSQSSELNITSKNVKHVDITKTGFMYLITQNDFRRLGHQLPKLKDNQVAYFVQKGDSRLKKINLLGNKFDVVKNLKEAYVPETTNTYNPGLIIFANNKQIDNIRKAYLPYTKNINTFPKTFKAYLDLNSQEINSISKNDIIEVDGKYVGNISTKQSFLKEGYQMFGGLLFTGFLLGISFLLGIALIVYYKQYSEGHEDKRSYRILQEVGMSKKLVKRTINSQIMIFFFQPLVVAVIHFGVAIPMLKQMLLVFGVLNSTIVYVVSGLTVLAISIIYFIIYRITSRTYYHIIER

SEQ ID NO: 1829 - protein, 669 aa, Streptococcus agalactiae
ATGTCACAAGAGCAAGGAAAAATTTATATTGTAGAAGATGATATGACGATTGTGTCACTTTTAAAAGATCATTTATCAGCTAGCTATCATGTCTCTAGTGTCAGCAATTTTCGTGATGTGAAACAAGAAATTATCGCATTTCAACCCGATTTGATACTAATGGATATTACGTTACCCTATTTTAATGGTTTTTACTGGACTGCAGAATTGCGTAAGTTTTTAACAATTCCTATTATTTTCATTTCATCTAGTAATGATGAAATGGATATGGTTATGGCATTAAATATGGGGGGTGATGACTTTATTTCAAAACCATTCTCTCTAGCTGTATTAGATGCTAAGCTAACTGCTATTTTAAGGAGAAGTCAACAATTTATCCAACAGGAATTAACTTTTGGGGGATTTACGTTGACAAGAGAAGGGTTATTGTCTAGCCAAGATAAAGAGGTTATTTTATCGCCAACAGAAAATAAAATCCTATCTATCTTGCTCATGCATCCTAAACAAGTAGTCTCAAAAGAGTCTCTATTAGAGAAACTTTGGGAAAATGATAGTTTTATTGATCAAAATACACTTAATGTTAATATGACACGCTTACGTAAAAAAATTGTCCCAATAGGTTTTGATTACATTCATACAGTGAGAGGAGTTGGGTATTTACTACAATGA

SEQ ID NO: 1830 - protein, 222 aa, Streptococcus agalactiae
MSQEQGKIYIVEDDMTIVSLLKDHLSASYHVSSVSNFRDVKQEIIAFQPDLILMDITLPYFNGFYWTAELRKFLTIPIIFISSSNDEMDMVMALNMGGDDFISKPFSLAVLDAKLTAILRRSQQFIQQELTFGGFTLTREGLLSSQDKEVILSPTENKILSILLMHPKQVVSKESLLEKLWENDSFIDQNTLNVNMTRLRKKIVPIGFDYIHTVRGVGYLLQ

SEQ ID NO: 1831 - protein, 939 aa, Streptococcus agalactiae
ATGATACGCCAGTTTTTAAGAGAACACTTGATTTGGTATATTTTATATATCATGATGTTTGTCCTATTTTTTATTAGTTTCTATCTATATCATTTACCAATGCCCTATTTGTTTAATTCCTTAGGTTTAAATGTTATTGTTTTACTAGGAATTAGTATTTGGCAATACAGTCGTTACAGGAAAAAAATGTTACATCTCAAATATTTTAATAGTAGTCAGGACCCCTCTTTCGAACTTCAACCGAGTGATTACGCTTATTTTAATATTATTACACAATTAGAAGCTAGAGAAGCGCAAAAAGTTTCTGAAACAATTGAACAAACCAATCATGTTGCACTTATGATAAAGATGTGGTCGCACCAAATGAAAGTTCCATTGGCAGCTATTTCATTAATGGCCCAGACAAATCATCTCGATCCTAAGGAAGTTGAACAACAATTATTGAAATTGCAACATTATCTTGAAACGTTGTTAGCATTTTTGAAATTTAGACAATATCGTGACGATTTTCGTTTTGAAGCTGTTAGCCTTAGAGAAGTAGTAGTAGAAATTATAAAATCGTATAAGGTTATTTGTCTATCCAAAAGCTTATCTATCATAATTGAAGGCGATAATATCTGGAAAACAGACAAAAAGTGGTTAACTTTTGCTCTTTCACAGGTGCTAGATAATGCCATAAAATATTCTAATCCTGAGTCAAAGATAATAATAAGCATAGGAGAAGAGAGTATTAGAATACAAGACTACGGTATCGGCATACTCGAAGAAGATATCCCTAGACTTTTTGAAGATGGCTTTACGGGTTACAACGGTCATGAGCACCAAAAGGCAACAGGCATGGGGTTATATATGACAAAAGAAGTCTTATCTAGTCTGAATTTGTCCATTTCGGTGGATAGCAAAATTAATTATGGGACTGCTGTTTCTATACATAAATAA

SEQ ID NO: 1832 - protein, 312 aa, Streptococcus agalactiae
MIRQFLREHLIWYILYIMMFVLFFISFYLYHLPMPYLFNSLGLNVIVLLGISIWQYSRYRKKMLHLKYFNSSQDPSFELQPSDYAYFNIITQLEAREAQKVSETIEQTNHVALMIKMWSHQMKVPLAAISLMAQTNHLDPKEVEQQLLKLQHYLETLLAFLKFRQYRDDFRFEAVSLREVVVEIIKSYKVICLSKSLSIIIEGDNIWKTDKKWLTFALSQVLDNAIKYSNPESKIIISIGEESIRIQDYGIGILEEDIPRLFEDGFTGYNGHEHQKATGMGLYMTKEVLSSLNLSISVDSKINYGTAVSIHK

SEQ ID NO: 1833 - protein, 1071 aa, Streptococcus agalactiae
ATGAAACGTGAATTACTACTCGAAAAAATCGATGAACTAAAAGAAATTATGCCTTGGTATGTTCTAGAATATTATCAATCAAAGCTTTCTGTTCCTTATAGTTTCACAACACTCTACGAATATTTAAAAGAATATAGACGTTTTCTTGAATGGTTATTGGATTCTGGTGTTGCTAATTGTCATCACATTGCAGAAATTGAGCTTTCAGTTTTAGAAAACCTTACTAAAAAAGATATGGAAGCTTTTATACTATATTTACGAGAACGCCCTTTATTAAATGCTAACACAAGGCAAAATGGGGTGTCTCAAACCACCATTAACAGAACTCTATCTGCCTTATCTAGTCTTTTCAAATACCTTACTGAAGAGGTTGAGAATGCTGACGGGGAGCCTTACTTTTATCGCAATGTCATGAAAAAAGTCTCAACCAAAAAGAAAAAGGAAACTTTAGCTTCTCGGGCAGAAAATATTAAACAAAAGTTATTTTTGGGCAATGAAACGATAGAATTCTTAGAGTATATAGATTGTGAATATCAAAACAAACTTTCCAAACGTGCTTTAGCTTTTTTCAACAAAAATAAAGAGAGAGATTTAGCTATTATTGCTTTGCTACTAGCTTCAGGAGTGCGTCTATCTGAGGCAGTAAACTTAGATTTAAAGGATATTAACCTTAATGTAATGGTTATTGATGTCACACGAAAAGGGGGGAAAAGGGACTCTGTCAATGTCGCTAGCTTTGCGAAGCCCTACCTTGCTAATTATTTAGACATCCGTAAAAATAGATACAAAGCAGAAAATCAGGACATTGCTCTATTTTTATCAGAATACCGTGGGGTGCCAAATCGTATTGATGCTTCAAGTGTAGAGAAAATGGTTGCTAAGTATTCCCAGGATTTTAAGGTTCGTGTAACACCTCATAAACTAAGGCATACTCTTGCTACTAGGCTATATGATGCTACAAAATCTCAAGTATTAGTTAGCCACCAACTAGGTCATGCTTCCACTCAAGTTACTGACCTATATACCCATATTGTTAACGATGAACAAAAGAACGCTTTAGATAAACTATAG

SEQ ID NO: 1834 - protein, 356 aa, Streptococcus agalactiae
MKRELLLEKIDELKEIMPWYVLEYYQSKLSVPYSFTTLYEYLKEYRRFLEWLLDSGVANCHHIAEIELSVLENLTKKDMEAFILYLRERPLLNANTRQNGVSQTTINRTLSALSSLFKYLTEEVENADGEPYFYRNVMKKVSTKKKKETLASRAENIKQKLFLGNETIEFLEYIDCEYQNKLSKRALAFFNKNKERDLAIIALLLASGVRLSEAVNLDLKDINLNVMVIDVTRKGGKRDSVNVASFAKPYLANYLDIRKNRYKAENQDIALFLSEYRGVPNRIDASSVEKMVAKYSQDFKVRVTPHKLRHTLATRLYDATKSQVLVSHQLGHASTQVTDLYTHIVNDEQKNALDKL

SEQ ID NO: 1835 - protein, 1662 aa, Streptococcus agalactiae
ATGTCTAGTTTTAATAGAAAAAAACTTAAGTTTTTGGGTATATCTTTGGCGACTCTAACAGCCACCACAGTTACCCTGGTTGCCTGTGGTAATGAGTCAAAGAACTCTGGAGATAATAAAGTTATTAATTGGTATATTCCTACTGAAATCAGTACATTGGACATTTCAAAGAATACAGATGCTTATTCAAACTTAGCTATAGGTAATTCAGGCAGCAATTTACTTAGAATTGATAAAGAGGGCAAACCAAAACCCGATTTAGCTAAAAAAGTATCCGTTTCTTCTGATGGTCTTACTTATACTGCTACACTTCGTGATAATTTAAAATGGTCAGATGGAAGCAAACTAAGCGCTGAAGATTTTGTTTACACATGGCGGAGAATAGTTGATCCTAAAACTGCATCTGAATATGCTTACTTGGCGACAGAATCGCACCTTTTAAATGCTGATAAGATTAATTCTGGAGATATTAAAGATTTAAATAAACTTGTTGTAACAGCTAAAGGCAATCAAGTGACCTTTAAATTGACAAGTCCATGCCCTCAATTTAAATATTATTTAGCCTTCTCTAATTTTATGCCTCAAAAACAATCGTATGTTGAAAAAGTTGGTAAAGATTATGGTACAACATCAAAAAATCAAATTTACTCAGGTCCTTACCTTGTTAAGGATTGGAATGGTTCAAATGGTAAATTTAAATTAGTCAAAAATAAATATTATTGGGATTCTAAACATGTTAAAACAAATAGTGTCATAGTTCAAACTATCAAAAAACCAGATACTGCAGTTCAAATGTACAAGCAAGGTCAGATTGATTTTGCTGAAATATCAGGAACTTCTGCTATTTATCAAGCTAATAAAAATAATAAAGATGTAGTAGATGCGTCTGATGCACGTACTACATATATTATTTATAACCAAACTGGTTCGGTTAAAGCATTGACAAATCAGAAAATTAGGCAAGCTTTGAATTTAGCGACTGATCGTAAAGGTGTTGTTAAAGCGGCAGTTGATACAGGTTCAACTCCTGCTGAATCTCTGGTCCCTAAAAAATTAGCCAAATTACCTAATGGTGAGGATCTTTCCAAGTATACTGCCCCAGGTTATACGTATAATACAAGTAAAGCTCAAAAACTTTTTAAAGAAGGTCTTGCTGAGGTTGGTCAGTCATCTCTCAAGTTAACAATCACAGCTGATTCGGACTCTCCAGCAGCTAAAAATGCTGTTGACTATGTGAAATCTACATGGGAGAGTGCTTTGCCTGGTCTAACTGTTGAAGAAAAATTTGTTACTTTCAAGCAACGCCTTGAAGATGCAAAAAATGAAAATTTTGATGTCGTGCTCTTCTCATGGGGAGGAGATTATCCAGAAGGATCAACTTTCTATGGGTTATTCACGACTAATTCTGCGTATAATTATGGTAAATTTTCTTCTAAAGAGTATGACAATGCCTATCAAAAGGCAATTACTACTGACGCCTTGAAACCAGGAGATGCCGCTAATGATTACAAAACTGCTGAAAAAGCTTTATTTGATCAATCATATTATAACCCAGTTTATTACCTAGGGAAAAAAGGACTCCAAAATTCTAAATTAAAGGGGTTGGTAAGAAATTCAACTGGTTTGAATGTTGATTTTACTTATGCTTATAAGACAGAATAA

SEQ ID NO: 1836 - protein, 553 aa, Streptococcus agalactiae
MSSFNRKKLKFLGISLATLTATTVTLVACGNESKNSGDNKVINWYIPTEISTLDISKNTDAYSNLAIGNSGSNLLRIDKEGKPKPDLAKKVSVSSDGLTYTATLRDNLKWSDGSKLSAEDFVYTWRRIVDPKTASEYAYLATESHLLNADKINSGDIKDLNKLVVTAKGNQVTFKLTSPCPQFKYYLAFSNFMPQKQSYVEKVGKDYGTTSKNQIYSGPYLVKDWNGSNGKFKLVKNKYYWDSKHVKTNSVIVQTIKKPDTAVQMYKQGQIDFAEISGTSAIYQANKNNKDVVDASDARTTYIIYNQTGSVKALTNQKIRQALNLATDRKGVVKAAVDTGSTPAESLVPKKLAKLPNGEDLSKYTAPGYTYNTSKAQKLFKEGLAEVGQSSLKLTITADSDSPAAKNAVDYVKSTWESALPGLTVEEKFVTFKQRLEDAKNENFDVVLFSWGGDYPEGSTFYGLFTTNSAYNYGKFSSKEYDNAYQKAITTDALKPGDAANDYKTAEKALFDQSYYNPVYYLGKKGLQNSKLKGLVRNSTGLNVDFTYAYKTE

SEQ ID NO: 1837 - protein, 774 aa, Streptococcus agalactiae
ATGATTTCTGATTTTTTAAGGGATAATCCAATCCTAACTTTATTATTTTGTGCACATTTTTTAGCTGACTTTCAGTGGCAAAGTCAATCCTTAGCAGATAGTAAATCACATAGTTGGAGGGGACTCTGGAGACATCTCTTGATTGTTTTCCTCCCCCTAGCAGCTTTAATGATATTGATACCAGAAACTACTTTGTTAAATTTAAGCATATGGGGAAGTCATATTGTTATTGATAGTATAAAGAAATTGAGTTACCCTTGGGTAGAGGAAGGGCATTTCCAAAAAGCAGCTTTTATTATAGACCAACTAGCCCACTATACTTGCATTATCGTTTTTTACCATGCGCTTCCTACATATTTACCGCCTAATCATTGGCTTTTGCCTATCAAGCACTTTATTGTCATAGCTCTGGTTTTTATCATTATCACCAAACCCATTAATATTGTGTTTAAAATTTTCTTTAATAAATTTCAAGCTAAAGAATTATCATCATTATTAACACAAGAAAAAACAAAAATAATGAAAGAAAAATCTGAAGATCATGAAGAAACAATTGAAGGAGCAGGAGCTATGATTGGTAATTTAGAGCGTCTAATTATGGCTATATTACTAATCTCAGGACAGTATGCTGCTATAGGTCTTGTTTTTACTGCAAAATCCATTGCACGTTACGATAAAATTTCTAAAAGTCAGGTTTTTGCCGAATATTATTTAATTGGATCATTGTTCTCAATTATAAGTGTTTTGATAACTCATTGGTTACTTTTGGTATAG

SEQ ID NO: 1838 - protein, 257 aa, Streptococcus agalactiae
MISDFLRDNPILTLLFCAHFLADFQWQSQSLADSKSHSWRGLWRHLLIVFLPLAALMILIPETTLLNLSIWGSHIVIDSIKKLSYPWVEEGHFQKAAFIIDQLAHYTCIIVFYHALPTYLPPNHWLLPIKHFIVIALVFIIITKPINIVFKIFFNKFQAKELSSLLTQEKTKIMKEKSEDHEETIEGAGAMIGNLERLIMAILLISGQYAAIGLVFTAKSIARYDKISKSQVFAEYYLIGSLFSIISVLITHWLLLV

SEQ ID NO: 1839 - protein, 687 aa, Streptococcus agalactiae
ATGTATTTAGCATTAATCGGTGATATCATTAATTCAAAACAGATACTTGAACGTGAAACTTTCCAACAGTCTTTTCAGCAACTAATGACCGAACTATCTGATGTATATGGTGAAGAGCTGATTTCTCCATTCACTATTACAGCTGGTGATGAATTTCAAGCTTTATTGAAACCATCAAAAAAGGTATTTCAAATTATTGACCATATTCAACTAGCTCTAAAACCTGTTAATGTAAGGTTCGGCCTCGGTACAGGAAACATTATAACATCCATCAATTCAAATGAAAGTATCGGTGCTGATGGTCCTGCCTACTGGCATGCTCGCTCAGCTATTAATCATATACATGATAAAAATGATTATGGAACAGTTCAAGTAGCTATTTGCCTTGATGATGAAGACCAAAACCTTGAATTAACACTAAATAGTCTCATTTCAGCTGGTGATTTTATCAAGTCAAAATGGACTACAAACCATTTTCAAATGCTTGAGCACTTAATACTTCAAGATAATTATCAAGAACAATTTCAACATCAAAAGTTAGCCCAACTGGAAAATATTGAACCTAGTGCGCTGACTAAACGCCTTAAAGCAAGCGGTCTGAAGATTTACTTAAGAACGAGAACACAGGCAGCCGATCTATTAGTTAAAAGTTGCACTCAAACTAAAGGGGGAAGCTATGATTTCTGA

SEQ ID NO: 1840 - protein, 228 aa, Streptococcus agalactiae
MYLALIGDIINSKQILERETFQQSFQQLMTELSDVYGEELISPFTITAGDEFQALLKPSKKVFQIIDHIQLALKPVNVRFGLGTGNIITSINSNESIGADGPAYWHARSAINHIHDKNDYGTVQVAICLDDEDQNLELTLNSLISAGDFIKSKWTTNHFQMLEHLILQDNYQEQFQHQKLAQLENIEPSALTKRLKASGLKIYLRTRTQAADLLVKSCTQTKGGSYDF

SEQ ID NO: 1841 - protein, 1566 aa, Streptococcus agalactiae
ATGGCTTTCGAAAGTTTAACAGAGCGCCTGCAAGGAGTTTTTAAAAATATTCGTGGTAAGAAAAAGTTATCTGAAAAAGATGTGCAAGAAGTCACCAAGGAGATTCGTCTAGCTCTTTTAGAAGCTGACGTTGCTCTTCCAGTTGTTAAAACCTTTATTAAACATGTTCGTGAACGTGCTGTTGGACATGAAATCATTGATACACTAGATCCTACGCAACAAATTGTTAAGATTGTCAATGAAGAGCTAACAGATTTATTAGGGGCTGAGACCTCTGAAATTGAAAAATCCCCTAAAATTCCAACCATCATTATGATGGTTGGTCTACAAGGTGCTGGTAAAACAACTTTTGCCGGTAAGTTAGCAAACAAACTAATCAAAGAAGACAATGCTCGTCCTATGATGATAGCAGCTGATATTTATCGACCAGCTGCTATTGATCAGTTAAAAACCCTTGGTAGCCAGATTAATGTTCCTGTCTTTGATATGGGAACTAACCATTCAGCAGTTGAGATTGTCACTAAAGGTTTAGAACAGGCTCGTGAAAATCGTAATGACTATGTTCTTATTGATACAGCCGGACGCCTACAAATTGATGCAACCCTTATGCAGGAATTGCATGATGTCAAAGCCATAGCTCAACCTAATGAAATACTCCTTGTCGTTGACAGCATGATTGGACAGGAAGCTGCAAATGTCGCTGAAGAATTTAACCGTCAGCTCAGCATTAGTGGTGTTGTTCTGACAAAGATTGACGGTGATACACGCGGTGGTGCTGCCCTTTCAGTACGCGAAATTACTGGAAAACCAATTAAATTTACAGGGACAGGGGAAAAAATCACTGATATTGAAACTTTCCATCCCGATCGTATGGCAAGCCGTATATTGGGGATGGGAGACCTGCTAACACTTATTGAGCGCGCTAGTCAAGAATACGACGAAAAACGTTCAATGGAATTAGCGGAGAAAATGCGTGAAAACACCTTTGACTTCAACGATTTTATTGATCAATTAGATCAAGTTCAAAATATGGGGCCAATGGAAGATCTCCTTAAAATGCTTCCAGGAATGGCTAACAATCCAGCAATGAAAAACTTCAAAGTGGATGAAAACGAAATTGCTCGCAAAAGAGCCATTGTGTCATCAATGACTCCAGAAGAGAGAGAAAATCCAGATCTCCTCAATCCAAGTCGTAGACGTCGTATTGCTGCTGGATCAGGTAATACTTTCGTTGATGTTAATAAATTCATTAAAGATTTTAACCAGGCAAAACAAATGATGCAAGGCGTGATGTCCGGTGATATGAATAAAATGATGAAAAAAATGGGAATTGATCCTAATAACCTCCCTAAAGATATGCCTGGAATGGACGGAATGGATATGTCTAATTTAGAAGGTATGATGGGGCAAAATGGCATGCCTGACTTATCTAGTTTAGGTGGCGATATGGACTTCAGCCAAATGTTTGGTGGTGGCTTAAAAGGAAAAGTAGGAGCCTTTGCAGCTAAACAATCAATGAAACGTATGGCTAATAAAATGAAGAAAGCTAAGAAGAAACGCAAATAA

SEQ ID NO: 1842 - protein, 521 aa, Streptococcus agalactiae
MAFESLTERLQGVFKNIRGKKKLSEKDVQEVTKEIRLALLEADVALPVVKTFIKHVRERAVGHEIIDTLDPTQQIVKIVNEELTDLLGAETSEIEKSPKIPTIIMMVGLQGAGKTTFAGKLANKLIKEDNARPMMIAADIYRPAAIDQLKTLGSQINVPVFDMGTNHSAVEIVTKGLEQARENRNDYVLIDTAGRLQIDATLMQELHDVKAIAQPNEILLVVDSMIGQEAANVAEEFNRQLSISGVVLTKIDGDTRGGAALSVREITGKPIKFTGTGEKITDIETFHPDRMASRILGMGDLLTLIERASQEYDEKRSMELAEKMRENTFDFNDFIDQLDQVQNMGPMEDLLKMLPGMANNPAMKNFKVDENEIARKRAIVSSMTPEERENPDLLNPSRRRRIAAGSGNTFVDVNKFIKDFNQAKQMMQGVMSGDMNKMMKKMGIDPNNLPKDMPGMDGMDMSNLEGMMGQNGMPDLSSLGGDMDFSQMFGGGLKGKVGAFAAKQSMKRMANKMKKAKKKRK

SEQ ID NO: 1843 - protein, 333 aa, Streptococcus agalactiae
ATGGAAATTGAAAAAACAAATCGTATGAATGCCCTTTTTGAGTTTTATGCGGCATTATTAACAGATAAACAAATGAATTATATCGAGTTATACTACGCCGATGACTACAGCCTTGCTGAAATAGCTGAAGAATCCGGTGTTAGCCGACAAGCTGTCTATGATAATATCAAACGAACTGAAAAAATTCTTGAGGCGTACGAAATGAAACTACATATGTATTCAGATTATATTGTCCGTAGTCAGATTTTTGATGACATTCTAGAAAAATATACCGATGATGCCTTTTTACAAGAAAAAATTTCCATTCTAAGTAGCATTGATAATAGAGATTAA

SEQ ID NO: 1844 - protein, 110 aa, Streptococcus agalactiae
MEIEKTNRMNALFEFYAALLTDKQMNYIELYYADDYSLAEIAEESGVSRQAVYDNIKRTEKILEAYEMKLHMYSDYIVRSQIFDDILEKYTDDAFLQEKISILSSIDNRD

SEQ ID NO: 1845 - protein, 1314 aa, Streptococcus agalactiae
ATGTCGAAACCGATTAAGATAAGTAAATTCAAAAAAAATGTCTCAGATAGTCATTTTATCCATTTTTTCACAGTTTTTAGTGGTATTTTTCTGGTTATGACTGTTATCATCCTCCAAGTCATGCGCTATGGTGTTTATTCTTCTGTTGATAGTAGTTTAAAGTATATCAGTACCCATCCTAAAAATTACATCAATATGGTTATGTCACGTACTGCTGCCTACCTAGATAACTCCAATATCGCAAGTGTCAAGTTAAAACCCGGCGGTCAGACAGTAGCTAATACTGATATTATTCTTTTTACATCAGAAGAAGAAGTCATTAACTATTTTGACGCATTTTCAAACTATCAGTTTTTAAAACCTAATAAAAAAAATCTAGGTGGCATTAGTGAATTAACTTTAACCAACATCTTTGGTCAAGATGAGACATATCATGCTGTCACCGTAAAAGTTAATAACCCTGCTTATCCTAATGTGACTTACATGACAGCTATTGTTAATATTGATCAATTAGTAAATGCTAAAGAACGCTATGAAAAAATTATTATATTTGTCATGACTACTTTTTGGATTATTTCAATTGGAGCAAGTATCTACTTAGCTAAATGGGCACAAAAACCGATTATAGAAAACTACGAAAGACAGAAGGCTTTTGTCGAAAATGCTAGCCACGAGCTGCGTACTCCCCTAGCTGTCTTACAAAATCGCCTAGAAACGCTATTCAGAAAACCGAATGCCACCATTTTAGAAAATAGTGAAAATATCGCTTCAAGTCTAGATGAAGTACGAAATATGCGTATTTTAACCACTAATCTTTTAAACTTAGCAAGACGTGATGATGGAATCAAACCAGAATTAGCTGTTATTAAGCCTACACTTTTTGATAGTATCTTTGAGAATTATGATCTAATCACCCAAGAGAATGGTAAAAATTTTACTGGACATAATATGATCCAAGATAGTTTCAAAACAGATAAGACACTGCTAAAACAACTCATGACTATTTTATTTGATAATGCTATAAAATATACTGACAATGATGGTAGCATTGACTTTACCATATCTGAAACTGATAAGTATCTCTTTTTAGAAATCGCTGATAATGGACCAGGAATTTCAGAGGAGGATAAAGTCAGAATTTTTGATCGTTTTTACCGTGTTGACAAAGCAAGAACACGACAACAAGGAGGGTTTGGCCTCGGCCTTTCTTTAGCTCAACAAATCGTTAACTCACTGCGAGGTAATATTACAGTAATTGATAATAAACCTAGAGGCAGTATTTTTAAGATAAAACTACCAAAAGTAAAAGGTTAG

SEQ ID NO: 1846 - protein, 437 aa, Streptococcus agalactiae
MSKPIKISKFKKNVSDSHFIHFFTVFSGIFLVMTVIILQVMRYGVYSSVDSSLKYISTHPKNYINMVMSRTAAYLDNSNIASVKLKPGGQTVANTDIILFTSEEEVINYFDAFSNYQFLKPNKKNLGGISELTLTNIFGQDETYHAVTVKVNNPAYPNVTYMTAIVNIDQLVNAKERYEKIIIFVMTTFWIISIGASIYLAKWAQKPIIENYERQKAFVENASHELRTPLAVLQNRLETLFRKPNATILENSENIASSLDEVRNMRILTTNLLNLARRDDGIKPELAVIKPTLFDSIFENYDLITQENGKNFTGHNMIQDSFKTDKTLLKQLMTILFDNAIKYTDNDGSIDFTISETDKYLFLEIADNGPGISEEDKVRIFDRFYRVDKARTRQQGGFGLGLSLAQQIVNSLRGNITVIDNKPRGSIFKIKLPKVKG

SEQ ID NO: 1847 - protein, 681 aa, Streptococcus agalactiae
ATGATAAAAATTTTATTAATTGAAGATGACTTGAGTCTTTCCAATTCCGTTTTTGATTTCCTTGATGACTTTGCCGATGTCATGCAAATTTTTGATGGAGAAGAGGGTCTTTACGAAGCCGAAAGTGGAGTCTATGATCTGATTCTTCTAGATCTCATGTTACCTGAAAAAAACGGCTTCCAAGTGTTGAAAGAGCTACGTGAAAAAGGTATTACAACCCCTGTATTAATAATGACCGCTAAAGAAAGCATTGATGATAAGGGACAAGGTTTCGACTTAGGTGCTGATGATTATCTAACAAAACCTTTTTACCTAGAAGAACTAAAAATGCGAATTCAGGCTCTTTTAAAGCGTTCTGGAAAATTTAATGATAACAGCCTAATTTATGGTGATATTCGCGTAGACATGTCTACTAACTCAACCTTTGTTAATCAAACAGAAGTTGAGCTCTTAGGTAAAGAGTTTGATCTTTTAGTCTATTTCCTTCAAAATCAAAATGTTATCTTACCGAAATCTCAAATCTTTGATCGTATTTGGGGATTTGATAGTGATACAACGATTTCAGTTGTAGAAGTCTATGTCTCTAAGGTTCGGAAAAAATTAAAAGGAACACTTTTTTCAGAAAACCTTCAAACTTTGCGTAGTGTAGGATATATTTTAAAGCATGTCGAAACCGATTAA

SEQ ID NO: 1848 - protein, 226 aa, Streptococcus agalactiae
MIKILLIEDDLSLSNSVFDFLDDFADVMQIFDGEEGLYEAESGVYDLILLDLMLPEKNGFQVLKELREKGITTPVLIMTAKESIDDKGQGFDLGADDYLTKPFYLEELKMRIQALLKRSGKFNDNSLIYGDIRVDMSTNSTFVNQTEVELLGKEFDLLVYFLQNQNVILPKSQIFDRIWGFDSDTTISVVEVYVSKVRKKLKGTLFSENLQTLRSVGYILKHVETD

SEQ ID NO: 1849 - protein, 2550 aa, Streptococcus agalactiae
ATGAAAACTGTAGAACATTTTGTTACCAAATTTGTCCCTGAAAACTATAACCTTTTCTTGGATATTAATCGTCAAACTAAAACCTTTTCAGGTAACGTTGCTGTGTCTGGCGAAGCCTTAGATAACAATATCTCTTTTCACCAAAAAGGGTTAACCATTAAATCTGTCTTATTAGATAATCAACCATTAGATTTCCAACTAGATGAAGACAATGAAGCTATGCATATTCAATTGCATGAAACTGGTAGCATGGTATTAGTCTTTGAATTCAGCGGTCACATTACCGATAATATGACAGGTATGTATCCATCTTACTATACAGTTAATGGCATCAAAAAAGAGGTTATCTCCACACAATTTGAAAGTCATTTTGCTCGTGAAGTATTCCCAAGTATTGACGAACCAGAAGCAAAAGCAACCTTTGATTTGAGCCTAAAATTCGATCAAAAAGAAGGAGAGATTGCTCTTTCAAATATGCCGGAAATCAATGCTGAACAACGTCAAGAAACAGGTTTATGGACATTTGACACCACACCTAAAATGTCCTCATATTTATTAGCTTTTGCCTTGGGGGAATTGCATGGTAAAACAACACATACCAAAAACGGCACTCTTGTTGGCTCATATGCCACAAAAGCCCATCAGTTAAATGAATTAGATTTTTCTTTAGATATCGTTGTGCGTGTTATTGAGTTTTATGAGGACTACTTTGGTGTACGTTATCCTATTCCTCAGTCACTCCACGTTGCTCTACCTGATTTTTCTGCTGGAGCTATGGAAAATTGGGGATTAGTAACATATCGTGAAGTCTATCTTTTAGTAGATGAGAACTCTAGTGTTTCCAGCCGTCAGCAAGTAGCATTAGTTGTAGCACATGAAATAGCTCACCAGTGGTTTGGTAACCTCGTTACTATGAAATGGTGGGATGATTTATGGTTAAATGAATCATTTGCTAATATGATGGAATATGTATCAATTGATTATATTGAACCAAAACTTAATATATTTGAAGACTTTCAAACAGGTGGTCTACCATTAGCTCTTAAGCGTGATGCCACAGATGGCGTCCAATCTGTTCACGTTGAGGTCAATCATCCTGATGAAATTAACACACTTTTTGATCCAGCTATCGTTTATGCAAAAGGTAGCCGCCTCATGCACATGTTACGTCGCTGGTTAGGCGATACAGATTTTGCCGCAGGACTAAAAATTTATTTTGAAAAACATCAATATCAAAATACTATTGGTCGTGACCTTTGGAATGCACTTTCTCAAACCTCAGGAAAAGATGTTGCAGCTTTCATGGATTCTTGGTTAGAGCAACCAGGATACCCTGTGATGGCAGCCAAAATAGAAGAAGATGAGCTCATTTTAACTCAAAAACAATTCTTTATTGGTGAACACGAAGATAAGTCTCGCTTGTGGCAAATTCCTCTTAATAGTAATTGGGAAGGAATCCCAGAGATATTAACCGAGGAAACGGTAGTAATCCCCAATTTTAGTCAGTTAGCTGAAAAGAACAAAGAAAATGGTGCACTGCGTTTCAATACTGAAAATACTGCACATTACATTACTAACTATCAAGGTCAACTCTTAGAGCATATCATTTCTGATCTTCCTCTTATGGATAACATTTCTAAACTACAAATTGTACAAGAACGTCATTTACTTGCTGAAAGTGGTATGATTTCATATAGTAGTTTAATACCTTTAGTCTCTCTTTTGAGCCAAGAGACATCATATCTTGTTAACTCTGCTATTAAGAGTGTTATTGATGGTTTATCCTTATTCGTCCAGGAAGATAGCCAAGATGAATTCGACTTTAAAGAATTTGTTAATAAATTATCAGCATTTAATTTTAATAGACTTGGCTTTGAAAAAAGAGAAGGAGAAGGAGATGATAGCGAAATGGTCCGTCATCTATCCCTAAGCCTTGCTCTCTACTCAGATAATGAACATGCTATTGAAGAAGCTCACCATATTTTTAAAGCCCACGAAAATAATATCGCTGCTATACCAGCTGCAATTCGCCTGTTAGTTCTTACCAATGAAATGAAGCATTTCGAATCCAAAGAACTTAGCCACTTGTTATTAGAGACTTATAGTACTACTACCGATGGGAATTTCAAACGACAACTAGCGAGTGCTTTATCTCATACTACAGATAGCAAGACACTCAAGAAATTATTGTCAGATTGGAAAAATAAAGATATTGTGAAACCACAAGACTTAGCTATGAGTTGGTATGCTACTTTCCTTAAAAATTCTTTTACACAAGAAAGTGTCTGGGAGTGGGCCCAAGAAAACTGGGAATGGATCAAAGCAACTCTAGGTGGTGATATGAGTTTTGATAAATTTGTGATTTATCCCTCAAGTAGTTTCAAAACAGAAGAACGCCTTGAACAATATAAAAACTTTTTCGAGCCTCAATTAAGCGATATGGCGATTAGCCGTAATATTTCAATGGGAATTAAAGAAATTTCTGCTCGTGTCCTTTTAATCACGAAGCAAAAAGAAGAAGTTATCAATACTATCAAAAAATATATCTAA

SEQ ID NO: 1850 - protein, 849 aa, Streptococcus agalactiae
MKTVEHFVTKFVPENYNLFLDINRQTKTFSGNVAVSGEALDNNISFHQKGLTIKSVLLDNQPLDFQLDEDNEAMHIQLHETGSMVLVFEFSGHITDNMTGMYPSYYTVNGIKKEVISTQFESHFAREVFPSIDEPEAKATFDLSLKFDQKEGEIALSNMPEINAEQRQETGLWTFDTTPKMSSYLLAFALGELHGKTTHTKNGTLVGSYATKAHQLNELDFSLDIVVRVIEFYEDYFGVRYPIPQSLHVALPDFSAGAMENWGLVTYREVYLLVDENSSVSSRQQVALVVAHEIAHQWFGNLVTMKWWDDLWLNESFANMMEYVSIDYIEPKLNIFEDFQTGGLPLALKRDATDGVQSVHVEVNHPDEINTLFDPAIVYAKGSRLMHMLRRWLGDTDFAAGLKIYFEKHQYQNTIGRDLWNALSQTSGKDVAAFMDSWLEQPGYPVMAAKIEEDELILTQKQFFIGEHEDKSRLWQIPLNSNWEGIPEILTEETVVIPNFSQLAEKNKENGALRFNTENTAHYITNYQGQLLEHIISDLPLMDNISKLQIVQERHLLAESGMISYSSLIPLVSLLSQETSYLVNSAIKSVIDGLSLFVQEDSQDEFDFKEFVNKLSAFNFNRLGFEKREGEGDDSEMVRHLSLSLALYSDNEHAIEEAHHIFKAHENNIAAIPAAIRLLVLTNEMKHFESKELSHLLLETYSTTTDGNFKRQLASALSHTTDSKTLKKLLSDWKNKDIVKPQDLAMSWYATFLKNSFTQESVWEWAQENWEWIKATLGGDMSFDKFVIYPSSSFKTEERLEQYKNFFEPQLSDMAISRNISMGIKEISARVLLITKQKEEVINTIKKYI

SEQ ID NO: 1851 - protein, 654 aa, Streptococcus agalactiae
ATGTTAAGATCAAAATTTGATGAAGAATTAGATAAACTGCATAACCAATTCTATGCAATGGGAATTGAAGCTATCGGACAAATCAAAAAAACAGTTCGTGCTTTTGTCAGTCATGATCGAGAGTTAGCTAAAGAAGTGATAGAAGATGATGTAACGCTTAACAACTTTGAAACGAAGTTAGAGAAAAAATCATTGGAAATTATTGCACTCCAGCAGCCTGTATCACAAGACTTACGCACCGTTATTACCGTTTTAAAAGCTACTAGTGATGTTGAGCGTATGGGAGACCATGCAGCAGCAGTTGCAAAAGCAACCATCCGTATGAAGGGCGAGGAAAGAATCCCAGCAGTAGAATTAGAAATCAATAATATGGGAAAAGCAGTTAAAAACATGCTTGAAGAAGCCTTAACAGCTTATATCAATGGTGATGATGAAAAAGCTTACGAAGTAGCAGCAATGGATGAAATAGTTGATGATTACTTCCGTGATATCCAAAAAATGGTAGTTGAAACAATTCAAAAGCATCCTGACGTAGCATTTGCCGCCAAAGAATACTTCCAAGTATTGATGCACTTGGAGCGAATTGGAGATTATGGCAAAAATATCTGTGAATGGATTGTTTATTTAAAAACTGGAAAAATTATCGAGTTATGA

SEQ ID NO: 1852 - protein, 217 aa, Streptococcus agalactiae
MLRSKFDEELDKLHNQFYAMGIEAIGQIKKTVRAFVSHDRELAKEVIEDDVTLNNFETKLEKKSLEIIALQQPVSQDLRTVITVLKATSDVERMGDHAAAVAKATIRMKGEERIPAVELEINNMGKAVKNMLEEALTAYINGDDEKAYEVAAMDEIVDDYFRDIQKMVVETIQKHPDVAFAAKEYFQVLMHLERIGDYGKNICEWIVYLKTGKIIEL

SEQ ID NO: 1853 - protein, 558 aa, Streptococcus agalactiae
ATGTATAACGGACATAATGTTTATAGCCCGCGCACTGATACCGTAGAACTTCGTAAAGAAATTGGGATGGTTTTTCAGCAGCCTAATCCATTTCCTATGTCAGTATTTGAAAATGTTGTTTATGGTCTTAGACTCAAAGGAATAAAAGACAAAGCTACGTTAGATGAAGCCGTAGAGACTTCATTGAAGGGCGCGTCTATCTGGGACGAGGTCAAAGATAGATTACACGACTCTGCTCTTGGTTTATCTGGTGGTCAACAACAACGTGTTTGTATTGCCAGAACCCTTGCTACCAAGCCTAAAATTATCCTTCTAGATGAGCCAACCTCTGCACTTGACCCAATTTCTGCTGGTAAAATTGAAGAGACTTTACATGGTCTAAAAGATCAATATACCATGTTACTTGTTACACGTTCTATGCAGCAAGCCTCACGTATTTCTGATCGTACAGGTTTCTTCTTAGACGGTAACTTAATTGAATATGGCAATACAAAAGAAATGTTTATGAATCCTAAACATAAAGAAACTGAAGATTACATTACAGGTAAATTCGGTTAA

SEQ ID NO: 1854 - protein, 185 aa, Streptococcus agalactiae
MYNGHNVYSPRTDTVELRKEIGMVFQQPNPFPMSVFENVVYGLRLKGIKDKATLDEAVETSLKGASIWDEVKDRLHDSALGLSGGQQQRVCIARTLATKPKIILLDEPTSALDPISAGKIEETLHGLKDQYTMLLVTRSMQQASRISDRTGFFLDGNLIEYGNTKEMFMNPKHKETEDYITGKFG

SEQ ID NO: 1855 - protein, 804 aa, Streptococcus agalactiae
ATGGCAGAATATAATTGGGACGAACGCCATATCATTACCTTCCCTGAAGAAAATTCAGCTCTCACCACAAAAGATTTACACGTTTACTACGGTGAGAAAGAAGCTATCAAGGGAATTGATATGCAATTTGAAAAAAATAAAATTACAGCCTTAATCGGCCCATCTGGATGTGGAAAATCAACATATCTTCGTAGCTTAAATCGTATGAATGATACGATTGATATTGCACGCGTGACTGGACAAATCATGTATGAAGGAATTGATGTTAACGCTCAAGATATCAATGTTTACGAGATGCGAAAACATATCGGAATGGTTTTCCAACGTCCAAACCCGTTTGCAAAATCAATTTATAAAAACATTACCTTTGCATATGAGCGTGCTGGTGTAAAAGATAAAAAATTCTTAGATGAAGTTGTCGAAACCTCACTAAAACAAGCTGCTCTATGGGATCAAGTAAAAGATGACCTTCATAAATCAGCATTCACTTTATCTGGCGGTCAACAGCAGCGATTATGTATTGCACGTGCTATCGCAGTTAAACCAGAAATTCTCTTAATGGATGAACCTGCTTCAGCACTCGATCCGATTGCAACTATGCAACTAGAAGAGACAATGTTTGAACTCAAGAAAAATTACACTATAATTATCGTAACACATAATATGCAACAAGCAGCACGTGCTAGTGATTATACTGCATTTTTCTATCTTGGAGACTTAATCGAATACGATAAAACGAATAACATTTTCCAAAATGCTAAATGTCAATCTACTAGCGATTATGTTTCTGGTCGATTTGGATAG

SEQ ID NO: 1856 - protein, 267 aa, Streptococcus agalactiae
MAEYNWDERHIITFPEENSALTTKDLHVYYGEKEAIKGIDMQFEKNKITALIGPSGCGKSTYLRSLNRMNDTIDIARVTGQIMYEGIDVNAQDINVYEMRKHIGMVFQRPNPFAKSIYKNITFAYERAGVKDKKFLDEVVETSLKQAALWDQVKDDLHKSAFTLSGGQQQRLCIARAIAVKPEILLMDEPASALDPIATMQLEETMFELKKNYTIIIVTHNMQQAARASDYTAFFYLGDLIEYDKTNNIFQNAKCQSTSDYVSGRFG

SEQ ID NO: 1857 - protein, 888 aa, Streptococcus agalactiae
ATGAACGCTAAAAAGGCTGACAAATTAGCAACTACAATACTCTATAGTATTGCAGCTATCATCGTTACAATCCTCGCCTCTCTTTTAATTTTTATTCTTGTTCGCGGATTGCCACACGTATCTTGGTCATTTTTAACTGGGAAATCATCATCATATGAAGCAGGAGGCGGTATTGGAATACAATTATACAATTCCTTTTTCCTACTTATTGTTACTCTGATTATTTCTATTCCTCTATCTTTAGGAGCTGGAATATACCTCTCAGAATATGCTAAAAAAGGACGTTTAACAAACTTTGTTAGAACATGTATCGAAATTTTGTCATCTCTTCCTTCTGTTGTAGTTGGTCTGTTTGGTTACCTAATCTTCGTTGTTCAATTTCAATATGGCTTCTCAATTATCTCAGGTGCCTTAGCACTTACTGTTTTTAACTTACCCCAAATGACACGTAGTGTTGAAGATAGCCTTCAAAATGTACACCACACACAGCGTGAAGCAGGATTGGCCCTAGGTATTTCTCGTTGGGAAACGGTCATTTACGTCGTTGTCCCTGAAGCTCTGCCAAGTATTGTAACTGGTGTTGTGCTAGCTTCAGGACGTATTTTCGGTGAGGCAGCAGCACTTATTTATACAGCTGGTCAATCTGCTCCAGCACTTGATTGGTCAAATTGGAACGTCCTTAGTGTTACAAGTCCAATCTCAATTTTCCGTCAAGCAGAAACTTTAGCTGTTCATATTTGGAAAGTTAATAGCGAAGGGACAATCCCTGATGCAACACAAGTATCTGCCGGTAGCGCCGCAGTCTTATTGGTTGTTATTCTTATTTTCAACCTTTCAGCTCGCTCGATCGGTAAGAAACTTCATTCGAAATTAACCTCGTCTAATTAA

SEQ ID NO: 1858 - protein, 295 aa, Streptococcus agalactiae
MNAKKADKLATTILYSIAAIIVTILASLLIFILVRGLPHVSWSFLTGKSSSYEAGGGIGIQLYNSFFLLIVTLIISIPLSLGAGIYLSEYAKKGRLTNFVRTCIEILSSLPSVVVGLFGYLIFVVQFQYGFSIISGALALTVFNLPQMTRSVEDSLQNVHHTQREAGLALGISRWETVIYVVVPEALPSIVTGVVLASGRIFGEAAALIYTAGQSAPALDWSNWNVLSVTSPISIFRQAETLAVHIWKVNSEGTIPDATQVSAGSAAVLLVVILIFNLSARSIGKKLHSKLTSSN

SEQ ID NO: 1859 - protein, 918 aa, Streptococcus agalactiae
ATGAAAAATCAAGAATTAGCTAAAAAATTAACATCTCCTTCAAAAAACTCTCGATTAGAAAAATTTGGTAAAGGAATAACTTTTCTTTCGCTTGCCCTAATCGTCTTCATTGTTGCGATGATTTTGATTTTTGTTGCTCAAAAAGGACTATCTACATTTTTTGTTGATGGCGTTAAATTAACAGACTTCTTATTTAATACAAAATGGGAACCAAGTGCTAAGTCATTTGGTGCTTTTCCAATGATAGCTGGATCATTTATTGTTACTATTCTATCAGCTATCATTGCTACACCATTTGCTATCGGTGCTGCCGTATTTATGACTGAAATCTCACCTAAATATGGTTCTAAAATTTTACAACCTGCAGTTGAATTACTAGTTGGGATTCCTTCTGTTGTTTACGGTTTTATTGGTTTACAGATTATTGTTCCCTTCGTTCGCTCTATTTTTGGGGGAACAGGTTTTGGCATTTTATCTGGGGTCTGTGTCCTCTTCGTCATGATTCTACCAACTGTTACTTTCATGACAGTAGATAGCCTTAGAGCTGTGCCACGTCACTATAAAGAAGCAAGTTTAGCCATGGGGGCAACTCGTTGGCAAACAATTTGGCGTGTTATATTAAACGCTGCACGTCCAGGAATTTTCACTGCAATTGTTTTTGGTATGGCACGTGCATTTGGTGAAGCTCTAGCAATTCAGATGGTTGTCGGAAACTCTGCAATTTTACCAACGTCATTGACAACACCAGCAGCAACATTAACGTCTGTTCTAACAATGGGTATTGGTAATACTGTAATGGGAACTGTACAAAACAATGTCCTCTGGTCGCTAGCCTTAGTACTTTTAATTATGAGTTTAGCATTTAATACAGTTATTAAGTTAATTACAAGGGAAGGAAAGAAAAACTATGAACGCTAA

SEQ ID NO: 1860 - protein, 305 aa, Streptococcus agalactiae
MKNQELAKKLTSPSKNSRLEKFGKGITFLSLALIVFIVAMILIFVAQKGLSTFFVDGVKLTDFLFNTKWEPSAKSFGAFPMIAGSFIVTILSAIIATPFAIGAAVFMTEISPKYGSKILQPAVELLVGIPSVVYGFIGLQIIVPFVRSIFGGTGFGILSGVCVLFVMILPTVTFMTVDSLRAVPRHYKEASLAMGATRWQTIWRVILNAARPGIFTAIVFGMARAFGEALAIQMVVGNSAILPTSLTTPAATLTSVLTMGIGNTVMGTVQNNVLWSLALVLLIMSLAFNTVIKLITREGKKNYER

SEQ ID NO: 1861 - protein, 861 aa, Streptococcus agalactiae
ATGAAAAAAAACATTTTTTTGTTAACCTTGCTAGCCACCGTCTTATTGACGCTGTCTGGTTGTGCTAATTGGATTGATAAAGGTCAATCAATCACCAGCGTTGGTTCAACCGCCTTACAGCCACTTGTAGAAGCTGCAGCAGATGAGTTTGGTAAGACAAACCTCGGTAAGACTATCAATGTCCAAGGAGGAGGCTCAGGAACAGGCTTATCACAAGTACAGTCTGGAGCTGTTCAAATTGGTAATAGCGACTTATTTGCAGAAGAAAAAGATGGTATTGATGCTAAGAAATTGAAAGACCATCAAGTCGCAGTAGCTGGATTAGCTGTTATTGTTAATAAAAAAGTTAATGTTAAAAATCTAACCACCCACCAACTTCGTGATATTTTTGCAGGAAAAATCAAGAATTGGAAAGAAGTGGGAGGACAAGATTTAGATATTTCCATCATCAATCGAGCAGCAAGTTCTGGATCCCGTGCAACCTTCGATAATACTATTATGGGAAATGTTGCTCCTATTCAAAGCCAAGAACAAGATTCAAATGGTATGGTGAAATCAATTGTTTCTCAAACACCTGGTGCGATTTCATACCTCGCTTTTGCATACGTTGATAAATCTGTCGGAACATTAAAACTAAATGGTTTTGCGCCAACAGCTAAAAATGTTACTACCGACAACTGGAAACTTTGGTCATATGAACATATGTATACAAAAGGTAATGAAACAGGTCTAACAAAAGAATTCTTAGACTACATGAAAAGTGATAAAGTTCAAAGTAGTATCGTACAACATATGGGATATATCTCTATTAACGACATGAAAGTTGTTAAAGATGCTGAAGGTAAAGTAACCCCAAAATAA

SEQ ID NO: 1862 - protein, 286 aa, Streptococcus agalactiae
MKKNIFLLTLLATVLLTLSGCANWIDKGQSITSVGSTALQPLVEAAADEFGKTNLGKTINVQGGGSGTGLSQVQSGAVQIGNSDLFAEEKDGIDAKKLKDHQVAVAGLAVIVNKKVNVKNLTTHQLRDIFAGKIKNWKEVGGQDLDISIINRAASSGSRATFDNTIMGNVAPIQSQEQDSNGMVKSIVSQTPGAISYLAFAYVDKSVGTLKLNGFAPTAKNVTTDNWKLWSYEHMYTKGNETGLTKEFLDYMKSDKVQSSIVQHMGYISINDMKVVKDAEGKVTPK

SEQ ID NO: 1863 - protein, 1311 aa, Streptococcus agalactiae
ATGAAATTACCGAATGAATTTATTGAAAAATATCAGACTATACTTAAAGATGAAGCAGAAGCTTTTTTTGACAGTTTTGAACAAAAACCCATATCGGCATATCGCACCAATCCTCTCAAAGAAAAGCAACTTGATTTTCCAAATGCCATCCCAAGTACCCCTTGGGGGCATTATGGGAAAATATCAGGAAAATCAATAGAACACACAACTGGCCTTGTTTATTCTCAAGAACCTGCTGCTCAGATAGTGGCTCAGATTGCTGAACCACAAGAAGGAATGAAAGTGCTAGATTTAGCAGCTGCACCTGGTGGAAAAACAACACACCTTCTATCATATTTAAACAATACTGGTCTATTAGTTAGTAATGAAATTTCAAATAAACGTAGTAAAATTTTAGTCGAAAATGTCGAACGTTTTGGTGCTAGAAATGTTATCGTGACTAATGAAAGCTCCCAACGACTAGCCAAATGTTTTAATTCTTTTTTTGATCTTATTGTTTTTGACGGTCCGTGTTCTGGTGAGGGAATGTTCCGCAAAGATCCTCAAGCAATACAATATTGGCACAAAGATTACCCCACTGAATGTGCACAGTTACAAAGAGATATTTTAAAAGAAGCAATCAAAATGCTAGCTCATGGTGGTATACTTGTATACTCTACTTGTACATGGTCACCAGAAGAGAACGAAGAAGTGGTTAATTGGCTCCTTCAAGAGTATGATTACTTAGAACTTGTTGATATTCCTAAACTAAATGGGATGGTTGAAGGGATTAATGTACCACAAGTTGCAAGGATGTACCCTCATCATTTTCAAGGTGAAGGACAATTCGTTGCAAAACTGAGAGATACTAGATCTAAGGAAGCACAGAAAATTAAGCCAAAAGCACAGAAAATAAATAAAATGCAGTTACAATTGTGGCAACAATTTGCACAAGACCATTTAAAGATAGACTTGAACGGTGTTTTAGATGTTTTCGGCGACCAACTCTATCTTCTACCTAATGGTCTCCCCGATTTGTCTAAATTAAAAATAGCACGCAATGGTCTCCATCTAGGCACTTTCAAGAAGAATCGTTTTGAGCCATCGTTTGCTTTAGGAATGGCACTTAGCGAACATGACCTAGTACAGTCTATTGAAATTGATATAGAACAGTTTGAGGTGTACGTATCTGGAAATGTAGTCAAACTAGACAAGACTGTTCCAAACGGTTGGTATCAAATTCTTGTAAAAGGCAATGGATTAGGTTTTGCAAAAGTGACAAATAATACTCTTAAAAATTATTACCCTAAAGGACTACGATTTCAGACATAA

SEQ ID NO: 1864 - protein, 436 aa, Streptococcus agalactiae
MKLPNEFIEKYQTILKDEAEAFFDSFEQKPISAYRTNPLKEKQLDFPNAIPSTPWGHYGKISGKSIEHTTGLVYSQEPAAQIVAQIAEPQEGMKVLDLAAAPGGKTTHLLSYLNNTGLLVSNEISNKRSKILVENVERFGARNVIVTNESSQRLAKCFNSFFDLIVFDGPCSGEGMFRKDPQAIQYWHKDYPTECAQLQRDILKEAIKMLAHGGILVYSTCTWSPEENEEVVNWLLQEYDYLELVDIPKLNGMVEGINVPQVARMYPHHFQGEGQFVAKLRDTRSKEAQKIKPKAQKINKMQLQLWQQFAQDHLKIDLNGVLDVFGDQLYLLPNGLPDLSKLKIARNGLHLGTFKKNRFEPSFALGMALSEHDLVQSIEIDIEQFEVYVSGNVVKLDKTVPNGWYQILVKGNGLGFAKVTNNTLKNYYPKGLRFQT

SEQ ID NO: 1865 - protein, 765 aa, Streptococcus agalactiae
TTGGACGCTAAATTTGATTTCGCTAAACAATTAGTGTATAAAGCTGGTCAATTCATTAAATCTGAGATGCAAAATACTTTTGATGTTGAGGAAAAGTCTCGATTTGATGATTTAGTGACAAGTCTTGATAAAAAAACACAAAAATTATTAATTCAAGAAATTATTCAACATTACCCAGATGATAATATACTTGCCGAAGAAGATGATGTGCGCTCACCCATTGCACAAGGTAATGTTTGGGTTTTAGACCCTATTGATGGAACTGTTAATTTTATTGTTCAAAAAGATAACTTTGCTGTTATGTTAGCTTATTACGAAGAAGGCGTTGGACAATTTGGTATCATCTACGACGTTATGGCTGATATTCTTTACAGCGGGGGAGGACATTTTGATGTCTATGCTAACGATAAAAAAATTGTTCCTTTTCAAGAGTGTCCTTTAGAACGTTGCTTACTTGGAGTAAATTCTGCTATGTATGCAGAAAATGATTGCGGTATTGCCCATTTAGCTTCTGAAACCTTAGGTGTTCGTATCTATGGTGGTGCTGGAATTAGCATGGCAAAAGTCATGCAGGGCAAATTATTAGCTTATTTTTCGTATATTCAACCTTGGGATTATGCTGCAGCAAAAATCATGGGGGAGACATTAGGATTTACCTTATTAACGCTTGACGGGGAAGAACCCAACTATTCAACAAGACAAAAAGTAATGTTCCTACCAAAGTCGAAATTAAATCTTATCCAATCCTACCTTACCAAAAAATAA

SEQ ID NO: 1866 - protein, 254 aa, Streptococcus agalactiae
MDAKFDFAKQLVYKAGQFIKSEMQNTFDVEEKSRFDDLVTSLDKKTQKLLIQEIIQHYPDDNILAEEDDVRSPIAQGNVWVLDPIDGTVNFIVQKDNFAVMLAYYEEGVGQFGIIYDVMADILYSGGGHFDVYANDKKIVPFQECPLERCLLGVNSAMYAENDCGIAHLASETLGVRIYGGAGISMAKVMQGKLLAYFSYIQPWDYAAAKIMGETLGFTLLTLDGEEPNYSTRQKVMFLPKSKLNLIQSYLTKK

SEQ ID NO: 1867 - protein, 114 aa, Streptococcus agalactiae
ATGGAATGNNNNNAAATTGACCGTGAATTCCAGAGAACTAGCGGTTATTCCACTTATCAAGCTGTTAAAGCAGCACAACAACAAGCGAAAGGATTTATTTCACTTGGACGCTAA

SEQ ID NO: 1868 - protein, 37 aa, Streptococcus agalactiae
  VARIANT 3, 4, 5: Xaa = Any Amino Acid
MEXXXIDREFQRTSGYSTYQAVKAAQQQAKGFISLGR

SEQ ID NO: 1869 - protein, 447 aa, Streptococcus agalactiae
ATGAAGATTAGAACTGCTACACTAGACGATAGTGAAAAATTAGTCCCTTTGTATCAAGAATTAGGATACGCAATATCATTATCAGAGATTCAATCTATTTTAAAGGTTATTCTTACTCATTCAGATTATGGCTTTTTGATAGCTGAGGATAATGGCAAACTCCTCGCCTTCGTTGGATATCATAAACTTTACTTTTTTGAAAAAAGTGGGACTTACTATCGTATTTTAGCACTAGTAGTTAATGAAAAGCACCGTCGTAAAGGCATCGCTAGTCAACTTATTAATCACGTTAAACAGCTAGCTAAAACAGATGGAAGTGAAGTACTGGCTTTAAATAGCAGTTTAAAAGAATATCGTCAGGAAGCTTATCATTTTTATGAAAACCTAGGGTTCAAGAAGGTTAGTACCAGGCTTTTCATANNNNNCATTCATTCATTAATTAATTAA

SEQ ID NO: 1870 - protein, 148 aa, Streptococcus agalactiae
  VARIANT 141, 142: Xaa = Any Amino Acid
MKIRTATLDDSEKLVPLYQELGYAISLSEIQSILKVILTHSDYGFLIAEDNGKLLAFVGYHKLYFFEKSGTYYRILALVVNEKHRRKGIASQLINHVKQLAKTDGSEVLALNSSLKEYRQEAYHFYENLGFKKVSTRLFIXXIHSLIN

SEQ ID NO: 1871 - protein, 279 aa, Streptococcus agalactiae
ATGAAAGAACAAAATATTGACATCACACATTTTGAAGAAGATTTAGATATTTTCAAAAATGCATTTGCTAAAAATTATAATTCTGCAAGCAAAAATTTCCAGAAAGCAATCGATGAAATAGATAAATCTATTAAACGTATGGAAGCTGTTAAGGCTGCTTTAACAACGTCTGAAAATCAACTACGTCTTGCAAATAATAAATTAGACGATGTTTCTGTCAAGAAATTAACAAGAAAAAATCCAACAATGAAAGCAAAATTCGATGCTCTAAAAGACTAA

SEQ ID NO: 1872 - protein, 92 aa, Streptococcus agalactiae
MKEQNIDITHFEEDLDIFKNAFAKNYNSASKNFQKAIDEIDKSIKRMEAVKAALTTSENQLRLANNKLDDVSVKKLTRKNPTMKAKFDALKD

SEQ ID NO: 1873 - protein, 356 aa, Streptococcus agalactiae
ATGGAATGNNNNNATACATATCAAGTCGTGCTCAAGGGGGGACTTATCTATCGAGAAAAGGATGAAAATGACCCTGAGTTTTTAAGTATCATGTTTGAAATGAAAAATGAGTCTGATGATACTATCAAGAAGCATAAAATGAAAGATTTTTTCAAAGAATTAGATAAAGATCGTCGTGAAAAATCTTGCGAATACGCAGTTTTAGTAACTATGCTTGAAGCAGACAATGACTATTATAATACTGGAATTGTTGATGTTAGTCACAAATACCCTAAAATGTACGTTATACGTCCACAATTTTTTATCCAATTAATTGGTATTCTAAGAAATGCAGCACTCAATACCTTAAAATATAA

SEQ ID NO: 1874 - protein, 118 aa, Streptococcus agalactiae
  VARIANT 3, 4, 5: Xaa = Any Amino Acid
MEXXXTYQVVLKGGLIYREKDENDPEFLSIMFEMKNESDDTIKKHKMKDFFKELDKDRREKSCEYAVLVTMLEADNDYYNTGIVDVSHKYPKMYVIRPQFFIPINWYSKKCSTQYLKI

SEQ ID NO: 1875 - protein, 681 aa, Streptococcus agalactiae
TTGATATTACTATTTACAGCAGATTTCCTTACCTATATTATTATTGAATTGATTATCTCGCTTGATTTTTGGAAACTAGAGTGGGATAGCGATATCGTCCAGTTAATCATTTTACTAGCAACTTCAATTAGTACGGTAATGTTATTTATGTGGGTGAAATTTAAAGAGAAGCGTCCAATTAGTTCTCTAGGGCTATTTAAAGAAGGAGCCCTAACAGAATTATCTAGAGGATGGTTAGTCGGGAGCGTTCTCTTTGGAGCCTGCTTAATATTAACAATAATTTCAGGCTCTGGAGTTATCGAAACTGTTCGTTTTACAGCTGATAAATTGATTTGGTTTCTTATTTTTGCTGTTGGATGGCAGGTACAAAGCGCATCTGTTGAAATATTGTGTCGTGGATGGTTACTTCCGGTGAGTGCCACAAAGTATAGTAAGATAGTTTCTGTCAGTATCAGTTCAATCTTTTTCGGTCTTCTGCATAGCGCTAATAATCATGTAAGCCTTATCTCGATTTTCAATCTGTGTCTCTTTGGACTATTTCTATCGCTCTATGTTATTTTAAAAGGTAACATCTGGGGGGCGTGTGGTATTCATGGCGCCTGGAACTGTGTACAAGGGAGTGTCTTTGGAATCRAAGTTAGTGGAGAGCCAATGGTGTCTAACTCCCTAGTCCATGTTTAA

SEQ ID NO: 1876 - protein, 227 aa, Streptococcus agalactiae
MILLFTADFLTYIIIELIISLDFWKLEWDSDIVQLIILLATSISTVMLFMWVKFKEKRPISSLGLFKEGALTELSRGWLVGSVLFGACLILTIISGSGVIETVRFTADKLIWFLIFAVGWQVQSASVEILCRGWLLPVSATKYSKIVSVSISSIFFGLLHSANNHVSLISIFNLCLFGLFLSLYVILKGNIWGGVVVFMAPGTVYKGVSLESKLVEKPMVSNSLVHV

SEQ ID NO: 1877 - protein, 2496 aa, Streptococcus agalactiae
ATGGGAAAGACATTTTGGAAAGATATCTATCGATCAATTACGACTTCAAAAGGTAGATTTTCATCAATCCTCTTACTTATGATGTTAGGCTCATTTGCTTTTATAGGACTGAAGGTCTCAGCACCTAATATGCAAAGAACAGCACAAAATTACCTTGCTCATCATCATGTTATGGATATTACCGTTTTCAATTCTTGGGGACTTGACAAACATGATCAAACTGTTTTAGAAAGCTTAAAAGGATCACAAGTTGAATTTTCTTACTTTGTAGATACAACCCCTCAACAGAATAGTAAATCTTATCGATTGTATTCCAATACCAAAACGATATCAACCTTTGATCTTGTTAAGGGACGTCTCCCTTTAAATAAATCAGAAATTGCTCTCTCATTTCAGGAACGAAAAAAATATGCAATAGGTGATAAAATTAATTTTAAACAAGATAAAAACAAACTGTTTTCAAATACAGGTCCTCTAACTATTGTAGGTTTTGTTAATTCTACCGAGATTTGGTCTAAGACAAACCTTGGTAGTTCTCAAACAGGGGACGGCGACTTAGATAGTTATGGCGTATTAGATAAGACAGCATTTCACTCTCCAGTATATACAATGGCAAGGGTAACTTTTAAAGATCTTAGGTTGATTAACCCTTTCTCAATAAGTTACAAAGAAAAAGTAGCGAAATACCAAGAAAAGGTATCGCGAAAATTAAATATTCACAATAAAATAAGATATACCAAAACAAAAAAAGAGAGCCTACGTAAAATCGATGAGGAGGAAAAAAGCCTACTAAAAGCTCAAAAACAAATCAATCGGTTAGATAATGATAGCCTAGCGATGCCACTATCTCAAAGACAAGCTATTCAAATGAAAATTAAACAAGACCGACTATCTCTTTTGAAACGAACAAAAGAGCTTCTAAAATTGAGACATAACACCCAAATAATGGAATCGCCTCAAATTATTGTCTACAACCGTACTACCTTTCCTGGAGGACAAGGATATAACACTTTTGACTCCAGTACAAATAGCACTTCTAAAATCAGTAATCTTTTCCCCATTATTTTATATTTAGTCGCAGCATTAGTAACCTTAACAACAATGACTAGGTTCGTCGAGGAAGAAAGAACCAACGCAGGCATATTAAAAGCACTAGGCTATAGTGACCGCCAAGTTATCTTTAAATTTATTATTTATGGTTTTATAGCAGGAACATTAGGGACTACTTTGGGTATCATTGGAGGGCATTATCTTTTACCTCGTATTATTTCTGATATCATTTCCAAAGACCTGACTATTCCAAACACACAGTATCATCTTTTCTTAAATTACAGTTTACTAGCCTTTGTTTTTTCATTATTAAGCATTGTTCTTCCAGTTTTTGTTATCACTCGACGTGAGTTGAAAGAAAAAGCAGCATTTTTATTATTACCAAAACCACCAGCTAAAGGATCTAAAATAGCTTTAGAGTATATCAATTGGATTTGGAAAAAACTGTCCTTCACACAAAAAGTAACTGCTAGAAATATTTTTCGTTACAAACAAAGGATGATTATGACCATATTTGGAGTTGCTGGATCAGTAGCGCTCTTATTTTCAGGTCTAGGAATACAATCCTCCTTAAAGCAAACCGTCAATGAACATTTCGGTCGTATTATGCCCTATGATATATTGCTAACATATAACACAAATGCTTCTCCCCCAAAAATACTTGAACTACTTTCAAAAGATTCAAAAATAGACAAATACCAACCAATACACCTTGAACATCTTGACGAATCCATTCCTGGACAAATTAATAAACAGTCAATTTCCCTATTCATAACAGACAAAAAACAATTACTACCTTTTATTTATTTACAAGAAGCAACAACTAATAAGTCATTGCACTTGAATAATAAAGGGATTATTATTTCTAAAAAATTAGCTCAATTTTATCATGTTAATACCGGTGATTTTATCCATTTATCTCATTCACAAACACTTCCTTCTAGAAAATTAAAAATAACAGGAGTTGTCAATGCGAATGTTGGTCACTATATTTTTATGACAAAACAATACTATCGAACTATTTTTAAGAAAGAAGCTAAAGATAACGCTTTTTTGGTTAAGTTAACCAAACATAAAATCGCAAATAACTTAGCAGAAAAACTTTTAGAAATTAATGGAGTTGAGTCTCTTACGCAAAATGCTCTTCAGCTGGCTAGTGTAGAAGCCGTTGTGCGTTCTTTAGATGGCTCTATGACTATTTTAGTTGTCGTATCTTTATTGTTAGCCATTGTAATTCTCTATAATCTCACTAATATTAATTTAGCAGAACGTAAGCGGGAGCTATCAACTATAAAGGTATTAGGTTTTTATAATGAAGAAGTAACTTTATACATTTACCGCGAAACCATTATTTTATCAACCATCGGTGTGATTCTAGGCACCATTAGCGGTACTTATTTACACCGTCAAATGATGTTGNNNNNCATTCATTCATTAATTAATTAA

SEQ ID NO: 1878 - protein, 831 aa, Streptococcus agalactiae
  VARIANT 824, 825: Xaa = Any Amino Acid
MGKTFWKDIYRSITTSKGRFSSILLLMMLGSFAFIGLKVSAPNMQRTAQNYLAHHHVMDITVFNSWGLDKHDQTVLESLKGSQVEFSYFVDTTPQQNSKSYRLYSNTKTISTFDLVKGRLPLNKSEIALSFQERKKYAIGDKINFKQDKNKLFSNTGPLTIVGFVNSTEIWSKTNLGSSQTGDGDLDSYGVLDKTAFHSPVYTMARVTFKDLRLINPFSISYKEKVAKYQEKVSRKLNIHNKIRYTKTKKESLRKIDEEEKSLLKAQKQINRLDNDSLAMPLSQRQAIQMKIKQDRLSLLKRTKELLKLRHNTQIMESPQIIVYNRTTFPGGQGYNTFDSSTNSTSKISNLFPIILYLVAALVTLTTMTRFVEEERTNAGILKALGYSDRQVIFKFIIYGFIAGTLGTTLGIIGGHYLLPRIISDIISKDLTIPNTQYHLFLNYSLLAFVFSLLSIVLPVFVITRRELKEKAAFLLLPKPPAKGSKIALEYINWIWKKLSFTQKVTARNIFRYKQRMIMTIFGVAGSVALLFSGLGIQSSLKQTVNEHFGRIMPYDILLTYNTNASPPKILELLSKDSKIDKYQPIHLEHLDESIPGQINKQSISLFITDKKQLLPFIYLQEATTNKSLHLNNKGIIISKKLAQFYHVNTGDFIHLSHSQTLPSRKLKITGVVNANVGHYIFMTKQYYRTIFKKEAKDNAFLVKLTKHKIANNLAEKLLEINGVESLTQNALQLASVEAVVRSLDGSMTILVVVSLLLAIVILYNLTNINLAERKRELSTIKVLGFYNEEVTLYIYRETIILSTIGVILGTISGTYLHRQMMLXXIHSLIN

SEQ ID NO: 1879 - protein, 702 aa, Streptococcus agalactiae
ATGTCCTATATTGAAATGAAGCATTCCTATAAGCGTTATCAAACAGGTGAAACCGAAATTGTTGCTAACAATGATATTAGTTTCAGTATTGAAAGAGGTGAGTTGGTGGTTATTCTTGGTGCATCCGGCGCTGGCAAATCTACTGTTCTCAATATACTAGGAGGGATGGATAGTAATAGTGAAGGTGAAGTTTTAATTGATGGTAAGAATATTGCTAATTATACCATCAGGGAATTGACTCGTTACCGTAGATATGATGTCGGGTTTGTTTTTCAATTCTATAACTTAGTCCCTAATCTAACAGCACTAGAGAATGTAGAATTGGCTTCAGAAATTGTTCCAAAGGCATTAGATGCCCAACAGGCATTAGAAAACGTAGGTTTGGGACACCGTATCAATCATTTTCCAGCACAGCTTTCCGGTGGCGAACAGCAACGCGTTGCAATAGCACGAGCTATTGCCAAAAAACCTAAACTGTTACTTTGTGATGAACCTACTGGTGCTTTAGATTACCAAACTGGAAAACAAGTACTAGCCATCCTGCAAAAGATGGCGCAATCAAAAGAAACAACTGTGATCATTGTTACTCATAATACTGCCTTAGCGCCAATTGCAAATCGCGTGATCCATATGCATGATTCAAAAATCAGTGATATTGTAATAAACGAGAATCCAAGTGATATTCAGAACATAGAATATTAG

SEQ ID NO: 1880 - protein, 233 aa, Streptococcus agalactiae
MSYIEMKHSYKRYQTGETEIVANNDISFSIERGELVVILGASGAGKSTVLNILGGMDSNSEGEVLIDGKNIANYTIRELTRYRRYDVGFVFQFYNLVPNLTALENVELASEIVPKALDAQQALENVGLGHRINHFPAQLSGGEQQRVAIARAIAKKPKLLLCDEPTGALDYQTGKQVLAILQKMAQSKETTVIIVTHNTALAPIANRVIHMHDSKISDIVINENPSDIQNIEY

SEQ ID NO: 1881 - protein, 2121 aa, Streptococcus agalactiae
ATGGCAACTACGACAAAAACGTCGACCAAAAAAACAAGTAAAAAAAAATCAGCTACTGCTAAAAAAAATCTAGTTATTGTGGAGTCTCCTGCAAAAGCAAAGACTATCGAAAAATACTTAGGACGTAACTATAAAGTTGTAGCCTCAGTAGGTCATATCCGTGATTTAAAAAAGTCAAGTATGTCCATTGATTTTGAGAATAATTACGAACCACAATATATTAATATTCGTGGTAAAGGACCTCTCATTAATGATTTAAAAAAAGAAGCTAAAAAGGCTAAAAAAGTTTACCTCGCGAGTGACCCGGACCGTGAAGGAGAAGCTATTTCCTGGCATTTAGCGCATATTTTAGATTTAGACAAAGAAGACAGAAACCGTGTTGTTTTCAATGAAATCACAAAAGATGCTGTTAAAAATGCTTTTGTGGAACCTCGTCAGATTAACATGGATCTCGTTGATGCTCAGCAAGCACGACGTGTTTTAGATCGCATTGTTGGTTATTCTATCTCACCTATTTTATGGAAAAAAGTAAAAAAAGGGCTATCAGCTGGACGTGTACAATCAGTTGCTCTTAAACTAATCATTGATCGTGAAAATGAGATTAAGGCTTTCCAACCGGAGGAGTATTGGACTATTGACGGTTCCTTTAAAAAAGGAACACGTAAATTCAATGCCACTTTCTACGGTTTAGACGGAAAGAAATTCAAATTATCGAATAATGAAGACGTCAAAACAGTTCTAAAACGTATTAAAACTGATGAATTCTTAGTTGAAAAAGTTGAAAAAAAAGAGCGTCGTCGTAATGCACCATTACCGTATACAACTTCTTCATTGCAACAAGATGCAGCTAATAAAATCAATTTTCGAACTCGTAAAACCATGATGATTGCGCAACAGCTGTACGAAGGACTTAGCTTAGGCACAGCAGGTCATCAAGGTCTGATTACCTATATGCGTACTGATTCTACACGTATTAGTCCGTTAGCACAAAATGAAGCAACAGAATTTATTACTAACCGTTTTGGTGCAAATTATTCTAAACATGGGAATAAAGTTAAAAATGCTTCTGGAGCACAAGACGCTCACGAAGCTATTCGCCCATCTAGTGTTAATCATACACCCGAAAGTATTGCTAAGTATTTAGACAAAGATCAACTAAAACTTTACACTCTTATCTGGAACCGTTTTATTGCAAGCCAAATGACAGCAGCAGTCTTTGACACAATGAAAGTTAATTTAACGCAAAATGGTGTTACTTTTATTGCTAATGGTAGCCAAGTCAAGTTTGATGGTTACATGGCTGTTTATAACGATACTGACAAAAATAAAATGTTACCAGATATGGAGGAAGGAGAAAGTGTTAAAAAGGTTAATACGAATCCTGAACAACACTTCACTCAACCTCCTGCAAGGTTTTCAGAAGCAAGTCTCATTAAAACACTTGAAGAAAACGGTGTAGGTCGTCCTTCAACTTATGCCCCAACGCTTGAGACTATTCAAAAACGTTATTATGTTAAGCTTGCAGCTAAACGCTTCGAACCAACTGAACTTGGTGAAATTGTTAATAGCCTTATTGTAGAATTTTTCCCAGATATTGTTGATGTTACCTTCACTGCCGAAATGGAAGGGAAACTAGACGAAGTTGAGATTGGTAAAGAGCAGTGGCAAAAGATTATCGATGAATTTTATAAACCATTTGAAAAAGAACTTGCAAAAGCAGAAACTGAAATGGAGAAAATTCAAATAAAGGATGAACCTGCTGGATTTGATTGCGAGCTATGTGGATCACCAATGGTAATAAAACTAGGACGTTATGGAAAGTTTTATGCGTGTAGCAATTTCCCTGAATGTCATAACACAAAAGCTATCACTAAGGAAATAGGTGTTATTTGTCCTATCTGTCAAAAAGGACAAGTTATTGAGCGAAAAACAAAACGCAATCGTATCTTTTATGGCTGTGACCGCTACCCAGAATGTGAGTTTACATCTTGGGACAAACCTATTGGACGAACTTGCCCCAAATCAAATGATTTCTTAGTGGAGAAAAAAGTACGCGGTGGTGGTAAACAAGTTGTTTGCTCAAATGAAAAATGCGACTACCAAGAAGAGAAAATTAAATAA

SEQ ID NO: 1882 - protein, 706 aa, Streptococcus agalactiae
MATTTKTSTKKTSKKKSATAKKNLVIVESPAKAKTIEKYLGRNYKVVASVGHIRDLKKSSMSIDFENNYEPQYINIRGKGPLINDLKKEAKKAKKVYLASDPDREGEAISWHLAHILDLDKEDRNRVVFNEITKDAVKNAFVEPRQINMDLVDAQQARRVLDRIVGYSISPILWKKVKKGLSAGRVQSVALKLIIDRENEIKAFQPEEYWTIDGSFKKGTRKFNATFYGLDGKKFKLSNNEDVKTVLKRIKTDEFLVEKVEKKERRRNAPLPYTTSSLQQDAANKINFRTRKTMMIAQQLYEGLSLGTAGHQGLITYMRTDSTRISPLAQNEATEFITNRFGANYSKHGNKVKNASGAQDAHEAIRPSSVNHTPESIAKYLDKDQLKLYTLIWNRFIASQMTAAVFDTMKVNLTQNGVTFIANGSQVKFDGYMAVYNDTDKNKMLPDMEEGESVKKVNTNPEQHFTQPPARFSEASLIKTLEENGVGRPSTYAPTLETIQKRYYVKLAAKRFEPTELGEIVNSLIVEFFPDIVDVTFTAEMEGKLDEVEIGKEQWQKIIDEFYKPFEKELAKAETEMEKIQIKDEPAGFDCELCGSPMVIKLGRYGKFYACSNFPECHNTKAITKEIGVICPICQKGQVIERKTKRNRIFYGCDRYPECEFTSWDKPIGRTCPKSNDFLVEKKVRGGGKQVVCSNEKCDYQEEKIK

SEQ ID NO: 1883 - protein, 843 aa, Streptococcus agalactiae
ATGAATCATTTTGAACTATTTAAGCTTAAAAAAGCTGGATTAACAAATCTTAATATCAACAATATTATCAACTATCTCAAAAAGAATAGTTTAACTTCTCTATCTGTTCGCAATATGGCCGTAGTATCAAAATGTAAAAATCCTACTTTCTTTATAGAAAATTATAAACAGCTAGACCTTAAAAAACTTCGACAAGAATTCAAAAAATTTCCAGTTCTATCGATTTTGGATTCTAACTATCCTTTAGAGTTAAAAGAAATATATAATCCACCAGTTCTACTTTTTTATCAGGGTAATATTGAACTTCTATCTAAACCTAAATTAGCTGTAGTGGGGGCAAGACAGGCATCTCAGATAGGTTGTCAGTCTGTTAAAAAGATTATCAAGGAGACTAACAATCAATTTGTTATCGTAAGTGGTTTAGCGCGTGGCATTGATACAGCAGCACATGTTAGTGCTTTAAAAAATGGCGGCAGTAGTATAGCTGTTATCGGGAGTGGTTTAGATGTTTATTATCCAACGGAGAATAAGAAACTTCAAGAATATATGTCATATAATCATCTCGTATTATCAGAATATTTTACCGGAGAACAACCCTTGAAATTTCATTTCCCCGAACGTAACCGTATTATTGCAGGGCTGTGTCAAGGTATTGTGGTTGCCGAAGCTAAGATGAGATCTGGAAGTTTAATTACCTGTGAAAGAGCATTAGAAGAGGGACGAGAAGTTTTTGCCATTCCCGGAAATATTATCGATGGCAAATCAGATGGATGCCACCATCTTATCCAAGAAGGAGCTAAATGCATTATTTCAGGAAAAGATATCCTTTCTGAATATCAGTAG

SEQ ID NO: 1884 - protein, 280 aa, Streptococcus agalactiae
MNHFELFKLKKAGLTNLNINNIINYLKKNSLTSLSVRNMAVVSKCKNPTFFIENYKQLDLKKLRQEFKKFPVLSILDSNYPLELKEIYNPPVLLFYQGNIELLSKPKLAVVGARQASQIGCQSVKKIIKETNNQFVIVSGLARGIDTAAHVSALKNGGSSIAVIGSGLDVYYPTENKKLQEYMSYNHLVLSEYFTGEQPLKFHFPERNRIIAGLCQGIVVAEAKMRSGSLITCERALEEGREVFAIPGNIIDGKSDGCHHLIQEGAKCIISGKDILSEYQ

SEQ ID NO: 1885 - protein, 1029 aa, Streptococcus agalactiae
ATGACAAAAAAACTTATTATTGCTATATTAGCACTATGCACTATCTTAACCACTTCTCAAGCTGTTTTAGCTAAAGAAAAATCACAAACTGTTACCATAAAAAACAACTATTCGGTCTATATTAAAAAAGAAAAAAGAGACAAGCCGGATAATAAAAAGCAAATCAGCGAGACACTTAAAGTTCCTTTAAAACCCAAAAAAGTAGTTGTTTTTGATATGGGAGCTTTGGATACTATCACAGCTTTAGGAGCTGAAAAATCTGTTATTGGTATCCCGAAGGCTAAAAATGCTCTAAGTTTATTGCCCAATAACGTCAAATCTGTTTATAAAGCTAAGAGATACCAAGACGTAGGAAGTCTCTTCGAACCAAACTTTGAAGCTATTGCTCGTATGCAACCTGATGTGGTTTTCCTAGGAGCACGTATGGCTTCTGTTGATAATATTGAAAAATTAAAGGAGGCTGCACCTAAAGCAGCATTAGTATATGCTGGAGTCGACTCAAAAAAAGTATTTGACAAAGGAGTTGCTGAGCGTGTCACAATGTTAGGGAAAATCTTCGACCAAAATAAAAAGGCAAAAACCTTTAATAAAGATATCGCACAAGCTGTTCTTAAATTGCAGAAAACTATTGAGAAAAAAGGTAAACCTACAGCTCTATTTGTAATGGCAAACAGCGGTGAACTTTTAACTCAATCACCTTCTGGTCGTTTTGGTTGGATTTTCTCTGTAGGTGGATTTAAAGCAGTCAATGAAAATGAAAAACTAAGTTCACATGGTACTCCCGTATCTTATGAATACATCGCTGAAAAAAATCCTAACTATCTCTTTGTTTTAGATCGTGGAGCGACTATTGGACAAGGAGCTTCATCAAAAGAACTTTTTAATAACGATGTTATTAAAGCAACTGATGCTGTCAAAAACAAACGTGTTCATGAGGTAGATGGAAAAGATTGGTATATCAATTCAGGCGGAAGCCGAGTAACACTCCGTATGATTAAAGATGTACAGAACTTTGTTGATAATCGTTAA

SEQ ID NO: 1886 - protein, 342 aa, Streptococcus agalactiae
MTKKLIIAILALCTILTTSQAVLAKEKSQTVTIKNNYSVYIKKEKRDKPDNKKQISETLKVPLKPKKVVVFDMGALDTITALGAEKSVIGIPKAKNALSLLPNNVKSVYKAKRYQDVGSLFEPNFEAIARMQPDVVFLGARMASVDNIEKLKEAAPKAALVYAGVDSKKVFDKGVAERVTMLGKIFDQNKKAKTFNKDIAQAVLKLQKTIEKKGKPTALFVMANSGELLTQSPSGRFGWIFSVGGFKAVNENEKLSSHGTPVSYEYIAEKNPNYLFVLDRGATIGQGASSKELFNNDVIKATDAVKNKRVHEVDGKDWYINSGGSRVTLRMIKDVQNFVDNR

SEQ ID NO: 1887 - protein, 762 aa, Streptococcus agalactiae
ATGATTCAAATAAACAATTTACATAAGTTCTATGGCCAAAAGGAAATATTAAAAGACATTAATATTTCGATTCCTAAAGGAAAAGTAACAGCTATTTTAGGTCCAAATGGATCTGGAAAGAGTACATTGCTGAGTTGTATCAGTCGACTTGAACCTTATGATAATGGTGAAATTTTCCTTGATAAAGTACCATTAGCCCACTACAGTTCAAATGACTTAGCCAAAACATTAGCCATATTAAGACAATCTAATCACTTAACACTCAAGATAAAGGTGAGAGACTTGATAGGATTCGGTAGATTTCCTTATAGTAAAGGACGGTTAAGTCAAAAAGATAAAGCTGTCATAGAATCAGTTATATCTTATATGGATTTAAACGATATAGCTGACGAGTTCATTAATAACCTCAGCGGAGGTCAAATTCAAAGAGCTTTTATCGCAATGACAATGGCACAAGATACTCAATATATTTGCTTAGATGAGCCACTCAACAATTTAGATATGAAATATGCTGTTCAAATGATGGATCTTATCAAACGATATGCGTATGAGTTTAATAAAACTATAGTGATTATTATTCACGACATCAATTTTGCAACTCACTACGCTGACAATGTTGTCGCTTTAAAAGAAGGACAAGTGGTGACTTGTGGGACTGTCGAAGATGTTATGCAAGAAAAAATCCTTTCTCATTTATTTGATATGCCTATCCGTATCGAAACTGTTGATGGTAAACCAATTATCCTTTTTTGTACAACGTAA

SEQ ID NO: 1888 - protein, 253 aa, Streptococcus agalactiae
MIQINNLHKFYGQKEILKDINISIPKGKVTAILGPNGSGKSTLLSCISRLEPYDNGEIFLDKVPLAHYSSNDLAKTLAILRQSNHLTLKIKVRDLIGFGRFPYSKGRLSQKDKAVIESVISYMDLNDIADEFINNLSGGQIQRAFIAMTMAQDTQYICLDEPLNNLDMKYAVQMMDLIKRYAYEFNKTIVIIIHDINFATHYADNVVALKEGQVVTCGTVEDVMQEKILSHLFDMPIRIETVDGKPIILFCTT

SEQ ID NO: 1889 - protein, 975 aa, Streptococcus agalactiae
ATGATTAAGGATTTAGAGATACCAAAATTACTTATTTTACTGATACTACTAATTGCTGCTATTATTTTGTTTTTAATTTATGGTATTCCAACTGACGCAAATGAATTTTTGATTATCTATATCCTAAAAACACGTTATCAAAAACTGATTGCATTAATTTTGGTTGGTATCTGCATTGGTAGTTCTAGTCTTATTTTTCAAACTCTAACCAATAACCGACTTTTAACTCCGTCCATTATTGGTTTAGATAGCTTATATATCCTTATCCAAACAGGATTAATGTATTTAATCGGAGCTCAGCGTGTCATAAAATTTTCATCTTTTAGTAGCTTCCTCCTTTCATTATTATTAATGGTTGGATTTGCTTACTTATTATTTACGATACTTTTTCGAAATAAAAAACAGTCTTTGTATTTTGTTCTATTAGCTGGACTCATATTTAATACATTATTTTCTTCTATCTCATCCTTTATTCAAGCCATTATGGACCCCAACGATTTTATGATTTTACAAAATCAGCTCTTTGCTAGTTTCAATGCTATTAACACCAAGATCCTTTGGATTTCTTTCATTATCATTGTCGTTAGCTTTGTCATTAATTGGCCTTTTATAAAGGAATTGGATGTCTTACTATTGGGTAAAGAAAATGCGATATCACTCGGCATCTCATATCAAAAGCTTACTACTAGATTTTTTTTATGGTTAGCATTGATGGTAGCTATAGCAACAGCATTAGTTGGGCCGATTACTTTTTTAGGCTTACTTGTAGCACATATTACCTATCACAGTTTTCATACCTTTAGACATCAAATATTAGTTCCTATAGCCATTGTTATCTGTATCTTTACACTTGTCTTAGGGCAGCATCTCGTTCAAAATCTATTACACCTCACTGTTCAACTAAGTGTTCTCCTCAACCTTATCGGGGGAAGTTATTTTATATTCACCTTAATCAAAGGAAGGAAAAACTTATGA

SEQ ID NO: 1890 - protein, 324 aa, Streptococcus agalactiae
MIKDLEIPKLLILLILLIAAIILFLIYGIPTDANEFLIIYILKTRYQKLIALILVGICIGSSSLIFQTLTNNRLLTPSIIGLDSLYILIQTGLMYLIGAQRVIKFSSFSSFLLSLLLMVGFAYLLFTILFRNKKQSLYFVLLAGLIFNTLFSSISSFIQAIMDPNDFMILQNQLFASFNAINTKILWISFIIIVVSFVINWPFIKELDVLLLGKENAISLGISYQKLTTRFFLWLALMVAIATALVGPITFLGLLVAHITYHSFHTFRHQILVPIAIVICIFTLVLGQHLVQNLLHLTVQLSVLLNLIGGSYFIFTLIKGRKNL

SEQ ID NO: 1891 - protein, 963 aa, Streptococcus agalactiae
ATGAAAAAGCTATTAACCACTCCTGTAATGGGTTGTACTTTGGTTATACTTTCTCTAACGTCCCTATTTGTTGGTGTGAAATCTATCCCACTGGAGCAAATAACACACCTTGATCAATCACAGGTAGATATTTTTTTAACGAGTCGCTTACCAAGAACCATTAGTATCCTAATATCTGGTGCAAGTTTGTCAGTCTGTGGCCTGCTGATGCAACAACTAACCCAAAACAAGTTCGTTTCACCGACAACTTCAGGGACTATGGATTGGGCGAAATTAGGAGTAGTTGTTACGCTGATTTTCTTTAAAAATACCTCTATTTTTATTCAACTATGTATAGCTTCAGGTTTTGCCATTTTAGGATCGCTTCTTTTTGTAACCATTTTAAAAATGATTACTTTTAAGGATAATATTTTTATACCTCTTATCGGACTGATGCTTGGACAAATTGTAGCAGCAGCAACAGTATTTTTAGGAACACATTTTCAAGTACTACAATCTGTCAACAGTTGGCTTCAAGGTAATTTTTCCATCATGACTAGCCATCGCTACGAAATTCTTTACTTAGCATTGCCATGTTTGTTTTTAGTATATTTTTTTGCTCATCAGTTTACCATTGTTGGGCTTGGAGAAAGCTTCGCTAAGAATTTAGGGGTTGCTTATGAAAAGATGATTTACTTTGGTTTAGTTTTGGTTTCAATTATGACATCCCTAGTCATTATTATCGTAGGAGCTTTACCTTTCTTAGGTTTAATCGTACCTAATCTAATTAGCATAACTAAAGGAGATCATATGTCCTCAACTATCTTAGAGACATCGCTTTTAGGGGCTTGTATCGTCATGATATGTGATCTTTTTGGTCGCTTAGTTATTTTTCCTTATGAAGTCTCAATAGGAGTTACGCTAGGAGTATTAGGTAGTGCCTTTTTCCTGATTTCAATTATAAGAAATGAGGGAAAATCATGA

SEQ ID NO: 1892 - protein, 320 aa, Streptococcus agalactiae
MKKLLTTPVMGCTLVILSLTSLFVGVKSIPLEQITHLDQSQVDIFLTSRLPRTISILISGASLSVCGLLMQQLTQNKFVSPTTSGTMDWAKLGVVVTLIFFKNTSIFIQLCIASGFAILGSLLFVTILKMITFKDNIFIPLIGLMLGQIVAAATVFLGTHFQVLQSVNSWLQGNFSIMTSHRYEILYLALPCLFLVYFFAHQFTIVGLGESFAKNLGVAYEKMIYFGLVLVSIMTSLVIIIVGALPFLGLIVPNLISITKGDHMSSTILETSLLGACIVMICDLFGRLVIFPYEVSIGVTLGVLGSAFFLISIIRNEGKS

SEQ ID NO: 1893 - protein, 591 aa, Streptococcus agalactiae
ATGACCGAAAAAGAAAAAATGTTAGCAGGACAATATTATCGTCCATCAGCACCTGAACTACGCAAGGATAGAGAAGTTGCACTAAAAAATATGCAAGCCTTTAACAATGAAGATAATAGTAGCAAACGTAACGTCATTTTACAAAAATGGTTTGGTGCTACTGGGAAGAGTATCCATATGGAACAACGTTTTGTCTGCGATTATGGTTGTAATATTTATGTTGGTGAAAACTTCTACGCCAATTTTAACCAAACTTTCTTAGATGTTTGTGAAATTCGTATTGGCGATAACTGTATGTTTGGCCCAAACTGTCAACTCCTCACCCCACTCCATCCTCTAGATCCAATAGAAAGAAATTCAGGATTAGAATACGGTGCCCCAATCCAAATCGGGAATAATGTCTGGCTAGGTGGAGGAGTGACTATTTTACCAGGTGTTGTATTAGGAGATAATGTCGTCGTTGGCGCTGGAAGTGTCGTTACGAAATCATTTGAAAATAACGTTGTTATAGCAGGAAACCCTGCTAAGATAATCAAAAAAATTAGCTTAAAATTAGAAAAAACCTTTAATTATAACGAAGGTTTTTTCTAA

SEQ ID NO: 1894 - protein, 196 aa, Streptococcus agalactiae
MTEKEKMLAGQYYRPSAPELRKDREVALKNMQAFNNEDNSSKRNVILQKWFGATGKSIHMEQRFVCDYGCNIYVGENFYANFNQTFLDVCEIRIGDNCMFGPNCQLLTPLHPLDPIERNSGLEYGAPIQIGNNVWLGGGVTILPGVVLGDNVVVGAGSVVTKSFENNVVIAGNPAKIIKKISLKLEKTFNYNEGFF

SEQ ID NO: 1895 - protein, 762 aa, Streptococcus agalactiae
ATGGCAACAATTAAAGAAATCAAAGCAATTTTAGAGACTATTGTTGATTTAAAAGACAAACGTTGGCAAGAATATCAAACAGATTCACGCGCAGGTGTTCAAAAAGCAATCCTTCAACGAAAAAAAAATATTCAGTCAGATTTAGACGAAGAAGCGCGCTTAGAACAAATGTTGGTCTACGAAAAAAAACTTTACATTGAACATATAAACCTTATTGCAGGAATCGATGAAGTAGGTAGAGGTCCTTTAGCGGGACCAGTAGTAGCTGCTGCTGTTATTCTTCCACCAAACTGTAAAATAAAACATCTCAATGACTCCAAAAAAATTCCAAAGAAAAAGCATCAAGAAATCTATCAAAATATTTTAGATCAAGCGTTAGCAGTTGGTATTGGTATTCAAGACAGCCAATGTATTGATGATATCAACATTTATGAAGCTACAAAACATGCTATGATTGATGCAGTTTCTCATTTATCTGTGGCTCCTGAACATCTTTTAATTGATGCTATGGTTTTAGATCTATCAATTCCACAAACTAAAATTATCAAAGGTGATGCTAATTCACTCTCTATTGCAGCAGCTTCAATCGTAGCTAAAGTGACCAGAGATAAAATAATGTCTGATTATGATAGCACATATCCTGGATATGCATTTTCTAAAAATGCTGGCTATGGTACTAAAGAGCATTTAGAAGGTTTGCAAAAATACGGTATTACTCCGATACATCGTAAAAGTTTTGAACCTATAAAATCAATGTTGTAA

SEQ ID NO: 1896 - protein, 253 aa, Streptococcus agalactiae
MATIKEIKAILETIVDLKDKRWQEYQTDSRAGVQKAILQRKKNIQSDLDEEARLEQMLVYEKKLYIEHINLIAGIDEVGRGPLAGPVVAAAVILPPNCKIKHLNDSKKIPKKKHQEIYQNILDQALAVGIGIQDSQCIDDINIYEATKHAMIDAVSHLSVAPEHLLIDAMVLDLSIPQTKIIKGDANSLSIAAASIVAKVTRDKIMSDYDSTYPGYAFSKNAGYGTKEHLEGLQKYGITPIHRKSFEPIKSML

SEQ ID NO: 1897 - protein, 852 aa, Streptococcus agalactiae
ATGGCTACTATTCAATGGTTCCCAGGACACATGTCCAAAGCTCGCCGTCAAGTTCAAGAAAATATTAAGCATGTTGATTTTGTTACAATTTTAGTGGATGCAAGGTTACCTCTTTCTAGTCAAAATCCAATGCTAACCAAAATCGTCGGAGACAAACCCAAACTAATGATCCTCAATAAAGCTGATCTAGCAGATCCTATTCGAACTAAAGAATGGAGAGATTTTTATGAATCTCAAGGTTTAAAGACATTAGCTATTAATTCTAAAGAACAATCAACAGTTAAAAAAGTAACCGACATCGCTAAAATATTAATGTCCGATAAAATTGCTAAGCTACGGGGACGTGGTATTCAAAAAGAGACACTTCGTACGATGATTATTGGAATTCCGAATGCAGGTAAATCGACTCTAATGAATCGCCTAGCAGGTAAAAAAATTGCAGTGGTTGGTAATAAACCAGGTGTCACAAAAGGTCAGCAATGGCTCAAATCTAATAAGGAACTGGAAATTTTGGACACTCCTGGTATCTTGTGGCCCAAATTTGAAGATGAATTAGTTGGATTAAAGCTAGCATTAACAGGGGCAATCAAAGATCAATTATTGCCTATGGATGAGGTAACAATATTTGGATTGAATTACTTTAAAACCTATTATCCTGATCGTCTCAAAGAGCGTTTTAAAAGCATTAATTTAGAGGATGAAGCTCCTGAAATCATCATGGCCTTAACACAAAAATTAGGTTATCGTGACGATTACGATCGCTTTTATAATTTATTTGTCAAAGAAGTTCGCGATGGTAAATTAGGACGCTATACGTTAGATATCGTCGGAGAACATGATGGCAACAATTAA

SEQ ID NO: 1898 - protein, 283 aa, Streptococcus agalactiae
MATIQWFPGHMSKARRQVQENIKHVDFVTILVDARLPLSSQNPMLTKIVGDKPKLMILNKADLADPIRTKEWRDFYESQGLKTLAINSKEQSTVKKVTDIAKILMSDKIAKLRGRGIQKETLRTMIIGIPNAGKSTLMNRLAGKKIAVVGNKPGVTKGQQWLKSNKELEILDTPGILWPKFEDELVGLKLALTGAIKDQLLPMDEVTIFGLNYFKTYYPDRLKERFKSINLEDEAPEIIMALTQKLGYRDDYDRFYNLFVKEVRDGKLGRYTLDIVGEHDGNN

SEQ ID NO: 1899 - protein, 573 aa, Streptococcus agalactiae
ATGAGAAAACGTTCAATTTTGCCAATATTAGCTGTCTTATTTGTTTTCATGAGTATCTTTAGCGTATATTCTATTTTTCGTGGTGATAAAGCCAAAGAAAAAGCAAGTGTCATAAAACAAGCATCTCAAACAAGTCAAACTTCAAAAAAAGAGGTCTTACAAAAGAAGACTTATCCAAATCTAAATAAATATTCAAATCTAGAAATTCATGTTTCATCTACGAGGCAAACAATGACAATAACCTCGAATGACAAGGTCATCTTTAAAACGATTGTTTCAACAGGAGCAAAAGAGAGCCCTACCCCAAAAGGAACTTTTGTCATAGAACCGGAACGAGGAGATTTTTTCTATAACGCCTCATCAAAAGAAGGAGCCTATTATTGGGTCTCCTTTAAAGAACATGGTATTTATCTCTTTCATAGCGTTCCGACTGATCAACAAGGAAATGAGATTCCAGAAGAAGCAAAGCAATTAGGAAAAGCCGCCTCACATGGCTGTGTGCGTATGTCAAGGGCGGATGCAAAATGGTTCTATGAAAATATTCCTCAAGGAACGACTGTTACCATCAAATAG

SEQ ID NO: 1900 - protein, 190 aa, Streptococcus agalactiae
MRKRSILPILAVLFVFMSIFSVYSIFRGDKAKEKASVIKQASQTSQTSKKEVLQKKTYPNLNKYSNLEIHVSSTRQTMTITSNDKVIFKTIVSTGAKESPTPKGTFVIEPERGDFFYNASSKEGAYYWVSFKEHGIYLFHSVPTDQQGNEIPEEAKQLGKAASHGCVRMSRADAKWFYENIPQGTTVTIK

SEQ ID NO: 1901 - protein, 1485 aa, Streptococcus agalactiae
ATGGTAACATTTTTAGGAGGGGTAGCCCTTTTAATTGTTGGTTATTTCACGTACGGTAGATACATTGAAAAGAATTTTCAAATTGATGAAAATCGCCAAACACCTGCAGAAGCATTAAGGGATGGATATGATTTTGTTCCTATGCCAAAATGGAAGAATGGGATGATTGAGTTATTGAACATCGCAGGAACCGGACCTATCTTTGGACCTATTTTAGGAGCACTCTATGGTCCAGTTGCTTATATCTGGATAGTCTTAGGATGTATTTTTGCAGGGGCTGTTCATGATTATATGATTGGAATGATTTCTCTTAGAAATAATGGTGCATATCTTCCTGAATTAGCTAGTCGCTATCTTGGAAAGTCAATGAAGCATGTGATCAACATTTTTTCAATGCTATTACTTATTTTAGTTGCAACCGTATTTGTGGTAACTCCAGCTAATCTTATCCTAAGTATTTTACCAGCTGGGACACTATCTTTACCTTGGATAATCGGTCTTATTTTCGTTTATTACCTTATTTCTACAGTCTTACCTATTGATAAAGCACTTGGTAAAGTTTATCCTGTATTCTGCGTCATCTTAATGGTTAGTACGGCAGCAGTTGGCTTCCGTTTATTAACTGGTGGCTTTGATATGCCAAACTTAACTTTTGAAACCTTTAAAAATATGCATCCAGCTGGGCTTGGGATATTCCCTGCTTTATTCTTTACCATTTCATGTGGAGCCATCTCTGGTTTCCATGCTACCCAAGCACCTATGGTCTCAAGAACAACTGTTAATGAGAGAGAAGGGCGTTTCACTTTCTACGGCATGATGATTGCAGAAGGAGTAATTGCGATGATTTGGGCAGGTGCTTCAATGAGCTTGTTCAAAGGTCAAAATCTCTATGAAATGATTGCTGCTGGGACACCTTCTGCAGTTGTCAATCAAGTAATGTTAATGTTACTCGGTAGTGTAATTGGAACTATCGCTATCATTGGTGTTATTGTTCTCCCTGTTTCATCTGGTTTATCAGCTTTCCGTAGCTTACGTACTATCGTTGCTGATTATATCCATGTCAAACAAGATACTCTTCCAAAAATCTTTGCTGTAACTATCCCATTATATGTTATTTCATTTGTCCTTACACACGTTGATTTTAATCTCCTATGGCGTTACTTTAACTGGGCAAATCAAGTAACTGCTGTTATTGGTTTATTAGTTGCTACAAGATATCTCATCCTAAAAAGACGAAATTATTGGGTAACATTTGTACCAGCTATGTTCATGTTGTATGCAGTAGTTGTTTATATTTTATCTCAACCAATTGGATTTAATATGGGCTTAGGCATCTTAACTTATTCACTTGCTTTAGTGTTAACAGGTATTCTTGTTGGACTTTTCTGGAAATCTGGTCAAAAACAATTAAAAACTGTTCATCCTGAAGCATTCCTGTTTAACGATCATAGACCAATTAATTATTACAGTAGTTTAGATTCTTAA

SEQ ID NO: 1902 - protein, 494 aa, Streptococcus agalactiae
MVTFLGGVALLIVGYFTYGRYIEKNFQIDENRQTPAEALRDGYDFVPMPKWKNGMIELLNIAGTGPIFGPILGALYGPVAYIWIVLGCIFAGAVHDYMIGMISLRNNGAYLPELASRYLGKSMKHVINIFSMLLLILVATVFVVTPANLILSILPAGTLSLPWIIGLIFVYYLISTVLPIDKALGKVYPVFCVILMVSTAAVGFRLLTGGFDMPNLTFETFKNMHPAGLGIFPALFFTISCGAISGFHATQAPMVSRTTVNEREGRFTFYGMMIAEGVIAMIWAGASMSLFKGQNLYEMIAAGTPSAVVNQVMLMLLGSVIGTIAIIGVIVLPVSSGLSAFRSLRTIVADYIHVKQDTLPKIFAVTIPLYVISFVLTHVDFNLLWRYFNWANQVTAVIGLLVATRYLILKRRNYWVTFVPAMFMLYAVVVYILSQPIGFNMGLGILTYSLALVLTGILVGLFWKSGQKQLKTVHPEAFLFNDHRPINYYSSLDS

SEQ ID NO: 1903 - protein, 735 aa, Streptococcus agalactiae
ATGAAAGTTTTAGTAGTTGATGATGAACCAGTTGCACGTAACGAATTAATTTACCTTCTTAATAAGTATGATTCTAACCTCGTTATAGCAGAGGCGCATGATATGGCTACTGCATTAGCTATTTTACTTAGAGAAACTTTTGATGTAGCACTGTTAGATATCCATCTCAGAGATGATTCTGGGTTGCAATTAGCAGAGTATATCAATAAAATGCCCAAACCACCATTATTGATATTTGCGACTGCTTATGATCAATATGCTATTCAGGCTTTTGAGCATGATGCGCGTGATTATTTGTTAAAACCCTATGATTTTGATAGGCTAAAGCAAGCTATGGATAGAGTAAAAGGAGCGCTAAGTACATCTACAATTATAGAGAGCGTAACTTCCGGTCCTCTCTTCAAGCAACAGTATCCATTGACAGTAGAAGATCGAATCTATCTGGTGTCGGCGGATGATATCCTTTTGATTGAAGCTATGCAAGGAAAACTGATTATACAAACACCTGATAAAAATTATGAAATTGATGGCTCTCTACAACAATGGCAAGATAAACTACCATCATCTCAATTTGTACGGGTACATCGCTCTTACATTGTGAACATTAATGCTATTAAAACGATTGAACCTTGGTTTAACCAAACACTTCAGTTACACCTTTGTAATAAAATAACAGTTCCTGTTAGCAGAGCAAATGTAAAACCCCTAAAACAAATGTTAGGCATATCTACCTAA

SEQ ID NO: 1904 - protein, 244 aa, Streptococcus agalactiae
MKVLVVDDEPVARNELIYLLNKYDSNLVIAEAHDMATALAILLRETFDVALLDIHLRDDSGLQLAEYINKMPKPPLLIFATAYDQYAIQAFEHDARDYLLKPYDFDRLKQAMDRVKGALSTSTIIESVTSGPLFKQQYPLTVEDRIYLVSADDILLIEAMQGKLIIQTPDKNYEIDGSLQQWQDKLPSSQFVRVHRSYIVNINAIKTIEPWFNQTLQLHLCNKITVPVSRANVKPLKQMLGIST

SEQ ID NO: 1905 - protein, 1740 aa, Streptococcus agalactiae
ATGACACTCTTTTTAATTATGATGGAGCGAGCGGGGTTAATCATATTATTAGCCTATGCCTTTGTGCATATCCCCTTTATAAAACAAACTTTGAAGCAACCCGAATTAAAAAAACACCAGTATATTCTGCTTATCTTATTTAGCTTATTTGCTATTATTTCTAATTTTACAGGGGTAGAAATTCAGTCAGATTTATCTATCATTCCACAAACTCTTAATCATATAGCAGATCAATCATCGGTTGCCAATACACGTGTTTTAACCATTGGTGTATCAGGTCTAATCGGTGGCCCCATAGTCGGTATTATAGTTGGTCTCTTATCTGTATTCGTTAGGTATTTGCAAGGAGGATTAGCCCCTCATATTTATGTCATTTCTTCCTTACTAATTGGTTTATGCTCTGGATTATCAGGCAATTATCTTCGTAAAAATTATAATAAAATTCGTGTTTTAGATGCAATGGTTGTTGGTTTCGGTATGGAAATTCTACAAATGATCTGTATCCTCATTTTTAGTGTTGACTTTAATCAGGCGCTTCGCTTAGTATCTTTTATCAGCATGCCAATGATTTTAAGTAATACTTTAGGTTTAGGTATATTTATATCCATTATTTCATCTACTCAAAAATTAGAAGAACATGCTAAAGCATTTCAAACCCATCAAGTACTTGAATTAGCAAATTTAACCCTTCCTTACCTTAGAAAGGGACTGACAACAGAATCTTGTCAACCAGTAGCTGAAATTATTCATAAACATATGGATGTGAGTGCTGTTAGCCTGACTAGTCAATCAGCCATTTTAGCCTATGTAGGAGATGGAGCTGACCATCATCTTCCTAATACTCAAATATTAACAAAGCTTGCTAAAAGAGCAATAGATACTGGTAAAGTTAGTGTCGCAACTGATAAAAGTGAAATCGAATGCGACCATAAGAATTGCCCACTTAGTTCAGCAATTGTTATTCCATTACACATCCACGATGTTATAGTGGGTACTTTGAAATTATATTTTTCAGACGCACAACATATGACTTACGTTGACCGTCAATTAGCTGAAGGATTAGGCAATATCTTTTCCACTCAGTTAGCTTTGGGACAAGCTGAGGAAGCAACAAGGTTACTACAGGATGCGGAAATGAAGTCTCTCCAAGCGCAGGTTAATCCGCATTTTCTTTTTAATGCACTTAATACTATTTATGGTTTAATTCGCATGGATAGCGAAAAAGCAAGAAAGCTCGTCCAAGATTTTAGCAAGGTTATTCGTGCTAATCTTCAACGGGCAAAGCAAAATTTAATTCCTCTTCATGATGAATTGGAACAGGTTAACGCCTATTTAGCCCTTGAAGAAGCAAGATTTCCCAACATGGTGGCCTTTAATTTAGACAACCAAACAAATTCAGATGACAACTTAATGATTCCTCCCTTTACATTGCAGGTCTTGATTGAAAACTCTTATAAACACGCTTTTAAGCATGTTAATAAAAATAACCAGCTAAAGGTTACTATTGCAAGAAATAATGATAGGCTTCATATCATTGTCCAAGACAATGGTATTGGGATTCCAAAAGAAAAATTAATAACGCTTGGAAAAAAAACTCAAATTTCAAAACAAGGTTCTGGTACAGCTATTGAGAATCTCGTTCGTCGCTTGAATATTATTTATGATGGACAAGCAAGTTTAAAATTTGAATCAAATGATTCAGGAACTTGTGCTATTGTTAATATCCCCATTAAAAATTAG

SEQ ID NO: 1906 - protein, 579 aa, Streptococcus agalactiae
MTLFLIMMERAGLIILLAYAFVHIPFIKQTLKQPELKKHQYILLILFSLFAIISNFTGVEIQSDLSIIPQTLNHIADQSSVANTRVLTIGVSGLIGGPIVGIIVGLLSVFVRYLQGGLAPHIYVISSLLIGLCSGLSGNYLRKNYNKIRVLDAMVVGFGMEILQMICILIFSVDFNQALRLVSFISMPMILSNTLGLGIFISIISSTQKLEEHAKAFQTHQVLELANLTLPYLRKGLTTESCQPVAEIIHKHMDVSAVSLTSQSAILAYVGDGADHHLPNTQILTKLAKRAIDTGKVSVATDKSEIECDHKNCPLSSAIVIPLHIHDVIVGTLKLYFSDAQHMTYVDRQLAEGLGNIFSTQLALGQAEEATRLLQDAEMKSLQAQVNPHFLFNALNTIYGLIRMDSEKARKLVQDFSKVIRANLQRAKQNLIPLHDELEQVNAYLALEEARFPNMVAFNLDNQTNSDDNLMIPPFTLQVLIENSYKHAFKHVNKNNQLKVTIARNNDRLHIIVQDNGIGIPKEKLITLGKKTQISKQGSGTAIENLVRRLNIIYDGQASLKFESNDSGTCAIVNIPIKN

SEQ ID NO: 1907 - protein, 123 aa, Streptococcus agalactiae
ATGTTTAAAGGATTTAAAAAATTGATTATTATTATGGGAGGGATAAGCTTAATGATGATTTTAACAGCATGTGACTTAGTAAAAAAAATCACCAATGGGTTCAAGAACATTGAAAATACTTAG

SEQ ID NO: 1908 - protein, 40 aa, Streptococcus agalactiae
MFKGFKKLIIIMGGISLMMILTACDLVKKITNGFKNIENT

SEQ ID NO: 1909 - protein, 684 aa, Streptococcus agalactiae
TTGAAACAGAGCAACCATAGATATCATGGACCGTTAATTGAGTTTGAAATAGAATATTCATATATTAAAATTTTTCCATGGATTGGACTATTTATATCTTGCATAGGGTTATATGCAAGTAATTTTGGTGATCCTTTAGGTTTTATAAAATTCATATTTTCTGTATGCATTTTTGTTAATTTGGTCTCAATAATTATTTCGCTTTTTTTTAAAAAAATATCTAATTTTTTAAAAAAAATTTCTTATATTTTATTATCATTAGTATTCCTAACACTTATTATAGGTTTTGATTTTATAGGCTTGGCAATGTTTTTAAATAATAGAAATTTTGGACATGTTCAATCAATTTATTATACTGAGATGGCAAAAATGTATATTATGATAATGTTAATTATTTTTATTGTATTTTCTGGAATATATTATTTCTATTATTTACCAAAAAATCAGGGGAAAAAATGGAAATTTAATCAGTGGAAATTACAAAAAGGAAAAAAGGAACAATTAAAAATTAATTATGGAATTATTTTTGGTTTAGTGATGCTTTCTCCAGTCTTTCTTGTAGGTAGTATTGAAAATATTTTTGGTTTGATTGGAGGTGTATTATTTACGGCAACTTTTCCAGCTCTGATTGTCGATTCCCTTTATGCAGCATATTATATTCATAAGCATCCCGAATATGAGTGA

SEQ ID NO: 1910 - protein, 227 aa, Streptococcus agalactiae
MKQSNHRYHGPLIEFEIEYSYIKIFPWIGLFISCIGLYASNFGDPLGFIKFIFSVCIFVNLVSIIISLFFKKISNFLKKISYILLSLVFLTLIIGFDFIGLAMFLNNRNFGHVQSIYYTEMAKMYIMIMLIIFIVFSGIYYFYYLPKNQGKKWKFNQWKLQKGKKEQLKINYGIIFGLVMLSPVFLVGSIENIFGLIGGVLFTATFPALIVDSLYAAYYIHKHPEYE

SEQ ID NO: 1911 - DNA, 324 bp, Streptococcus agalactiae
ttgaataatgcagcaataaaatcccttaaaaatgaagtccttgaattaaatcccaaaaatgcttttaaaggatggggaaaattaggaagaattgctaaagctggtaaagtattaggttggactgggaaaatagtcaatatagaaactaatgccaaaaaagacttttttgatgataagacttctacactagatcaaaaaatcaaaaactttgctatagattcaggtgtagatgcattgtccggtgcagcaataggaactttggtaggaggacctgtgggaaccgttgttggagcagtgcagggctggcatttgattttgctttga

SEQ ID NO: 1912 - protein, 107 aa, Streptococcus agalactiae
MNNAAIKSLKNEVLELNPKNAFKGWGKLGRIAKAGKVLGWTGKIVNIETNAKKDFFDDKTSTLDQKIKNFAIDSGVDALSGAAIGTLVGGPVGTVVGAVQGWHLILL

SEQ ID NO: 1913 - DNA, 534 bp, Streptococcus agalactiae
atgggaaatgataatgtaactataaaactagaacatcgggttaaaacatcagcagatttatcagattatgtatacaaatatgagagggcttatacagatgctttaaataatggtgatgacataaaagaagcaagtgaaagtactaaaaaagagttaaatcaactaattgatagaactgatttaacttatagtgacggtatgtatgacaaagagactggtattgcagctattgctgtaaaagataaaaatactggtgagacttatatagcttatgcgggtactaataaggatgctgatggggcaaccgactttatttcagatgcaaatatcggtgctaataactctgcttatttaaaacgattaggagacaaagctactagcttttatgatcgtgttcaaagtaatggcgataatattactgtcacaacaggtcattcttatggtgactttctcgcttctagagtggcaattgagctaattccattctttattaactttagaaaagttaatgattcatttcacttttgttattag

SEQ ID NO: 1914 - protein, 177 aa, Streptococcus agalactiae
MGNDNVTIKLEHRVKTSADLSDYVYKYERAYTDALNNGDDIKEASESTKKELNQLIDRTDLTYSDGMYDKETGIAAIAVKDKNTGETYIAYAGTNKDADGATDFISDANIGANNSAYLKRLGDKATSFYDRVQSNGDNITVTTGHSYGDFLASRVAIELIPFFINFRKVNDSFHFCY

SEQ ID NO: 1915 - DNA, 561 bp, Streptococcus agalactiae
atgaaaaaacaaaaactattactgcttattggaggcttattaataatgataatgatgacagcatgtaaggattcaaaaatcccagaaaaccgcacaaaggaagagtaccaagctgaacaaaattttaaaccgttttttgagtttttagcacaaaaagataaagatttgagcaaaatacaaaaatacttactattagtatcggattcaggtgatgcattagatttagaatatttctatagtattcaagatttaaaaaaaaataaggatttagggaagtttgaaacaagaaaaagtcaaatagaaaagccgggtggctataatgagttagaaaataaagaggtcccatttgaatattttaaaaataatatagtttatccaaaaggaaaaccgaatattacatttgatgactttattatcggagcaatggatactaaagaattaaaagaattaaaagaattaaaaaaattaaaagtaaaaagttatttattaaaacatccggaaactgagttgaaagatataacatatgaattgccggcacagtcgaagcttattaaaaaatga

SEQ ID NO: 1916 - protein, 186 aa, Streptococcus agalactiae
MKKQKLLLLIGGLLIMIMMTACKDSKIPENRTKEEYQAEQNFKPFFEFLAQKDKDLSKIQKYLLLVSDSGDALDLEYFYSIQDLKKNKDLGKFETRKSQIEKPGGYNELENKEVPFEYFKNNIVYPKGKPNITFDDFIIGAMDTKELKELKELKKLKVKSYLLKHPETELKDITYELPAQSKLIKK

SEQ ID NO: 1917 - DNA, 450 bp, Streptococcus agalactiae
ttgacagaacaacaaattgaatatatcaataatcgaagtgaaatagcagggcatttagaagctattgtttcagaaatctatttaatagaagaatctggtaaaatagaatcatggtttgttactattcctgatatgaatagttttgtggcagaaacaaatatggatagagaacagattttattcttacttgactcggctcacaaatatcatatttatttcttatttggtggtttagcatcataccttatgactaatatctcagatgttccaaaagctattagaacacaggcacagtatgttctcttaggaatgagagttatggatcagtcagtattaccgaaatcatataattcaaaagaaccttatttgaaaccagatatgatttatattcatgatagaagacaagaaagaatgcttaaaatcactcaagaaatagaaatggagcattga

SEQ ID NO: 1918 - protein, 149 aa, Streptococcus agalactiae
MTEQQIEYINNRSEIAGHLEAIVSEIYLIEESGKIESWFVTIPDMNSFVAETNMDREQILFLLDSAHKYHIYFLFGGLASYLMTNISDVPKAIRTQAQYVLLGMRVMDQSVLPKSYNSKEPYLKPDMIYIHDRRQERMLKITQEIEMEH

SEQ ID NO: 1919 - DNA, 261 bp, Streptococcus agalactiae
atgggtaatggtggcgattggaaaaataagccgggctatcaaaccacacacgaggcaaaaacaggctacgccatctcatttagccccggccaagctggtgctgatagaacttacggccacgtggccatcgtcgaagacgttaaggaagacggatctatcccgatctccgaatcaaatgtcctaggacttggcaccatctcctaccgcaccttcagtgcagcagaagcagcacaattgacttatgtagttggggagaagtag

SEQ ID NO: 1920 - protein, 86 aa, Streptococcus agalactiae
MGNGGDWKNKPGYQTTHEAKTGYAISFSPGQAGADRTYGHVAIVEDVKEDGSIPISESNVLGLGTISYRTFSAAEAAQLTYVVGEK

SEQ ID NO: 1921 - protein, 810 aa, Streptococcus agalactiae
GTGGTGCCAAGCCAACCTCAAGTGACAGCAACACCTCAGAAATCTGAAGTTGTGACACCAGCCATTACGAGTGGCATTGATTTGCCAGATGTTGCCATACCTACGGCAATGGCTAGCGCAGCTTATGTCAAACACTGGATAGGCAATGATGCTTATACACACAATCTATTGTCTCACCGTTACGGCATTACTGCCGCACAGCTTGATGGATTCTTACAGTCGACAGGTATCACATACGATAGCAGTCGCATCGACGGTCAAAAAATCTTAGACCGAGAGAAATCATCTGGTCTGGATGCGCGTGCAATCATTGCCATTGCTATCGCAGAAAGTTCGCTTGGTACACAAGGCGTTGCCACAGCACCAGGTGCTAATATGTTTGGTTTTGGGGCAGTTGACAACAATACAACTAACGCTCAAAACTTTAGTGATGACAAGGCTGTCATTAAAATGACGCAGGAAACCATCATCCAAAACCAAAACACCAGCTTTGCCATTCAAGACCAAAAAGCACAATTCTTGTCAACTGGCAACTTGAATGTAGCGGCTCGAGGTGGGGTTTACTTCACGGATGCTAGCGGTTCTGGTAAACGTCGTGCGGCCATTATGGAGAGCATTGACAAGTGGATTGACGCGCATGGCGGAATTTCTGAGATTTCAAAGGAACTGCTCAACACGTCGTCCGTCGCTATGATGGCAGTCCCAACGAGTTACTCTGTTTCAAGAGCTAATCAAGCGGGCAACTATGTGGCAGGCACTTACCCTTGGGGCCAAAGAACTTGGCTACCAGTTTGGACCATTTATGGGTAA

SEQ ID NO: 1922 - protein, 269 aa, Streptococcus agalactiae
MVPSQPQVTATPQKSEVVTPAITSGIDLPDVAIPTAMASAAYVKHWIGNDAYTHNLLSHRYGITAAQLDGFLQSTGITYDSSRIDGQKILDREKSSGLDARAIIAIAIAESSLGTQGVATAPGANMFGFGAVDNNTTNAQNFSDDKAVIKMTQETIIQNQNTSFAIQDQKAQFLSTGNLNVAARGGVYFTDASGSGKRRAAIMESIDKWIDAHGGISEISKELLNTSSVAMMAVPTSYSVSRANQAGNYVAGTYPWGQRTWLPVWTIYG

SEQ ID NO: 1923 - protein, 429 aa, Streptococcus agalactiae
TTGAAAAAAGATAAATATATTGCATTGTGTTTGTTGTGTGCAATTGCCACGTCAAACTTATCGGCTGTTACGGTTTTTGCTCAGGATGCACAAACTATTTTGACGCAAGCTACGACTGTAACTGATCAAACAAGTGAAAAAGCTGGAGAAAATTCATCAGCTGAGGCGACAAGCGCTTCTGAGTCAGTTTCATCAGAAGCGACGACAGTGGTACCTGAGGCAAGTCTGCCTTCAACTGATCTCCATGCCCAACCAGCAGATAGCAAAACAGCTCCTACTGAGACTGTAATTGAGGGACAAACAGAAACTAATCCGACGACTAGTCCAGATAAACAGTTCCTTCAACAAGTGATTCCAAAGGAGAAACACAGGCTGGGACGCAAACAGATACAAGCAAACCCGAAACTCCAGCTCCTAGTCAGTCTGTAA

SEQ ID NO: 1924 - protein, 142 aa, Streptococcus agalactiae
MKKDKYIALCLLCAIATSNLSAVTVFAQDAQTILTQATTVTDQTSEKAGENSSAEATSASESVSSEATTVVPEASLPSTDLHAQPADSKTAPTETVIEGQTETNPTTSPDKQFLQQVIPKEKHRLGRKQIQANPKLQLLVSL

SEQ ID NO: 1925 - protein, 255 aa, Streptococcus agalactiae
ATGGATAAAATACATACTCTAGGAAGTGTCATTGAATTAAAAAATGATAGTCAGAAAGTCATGATTACATCAAGATTTCCGTTATATGACAATGAAGGTCAATTGGGATATTTTGATTATTCTGGATGTATTTTCCCAATTAGTATAGTTGGAAATGAAACTTATTTTTTCAATTTGGAAGATATAGATAAAGTCTTGTTTGAAGGTTACTATGATGAAAATGAAGAGGAGATGCAAAAAATATTTTTGAAATAA

SEQ ID NO: 1926 - protein, 84 aa, Streptococcus agalactiae
MDKIHTLGSVIELKNDSQKVMITSRFPLYDNEGQLGYFDYSGCIFPISIVGNETYFFNLEDIDKVLFEGYYDENEEEMQKIFLK

SEQ ID NO: 1927 - protein, 591 aa, Streptococcus agalactiae
TTGATACATAGAGAGAAATCATATGCAGAAATATATCATGACGGAAATCAAGGTTATTATTATAATTTTGATACAAAAATTTTTTACATTAAAAGTTTTGAAACGCCTAATTATCAAAAAGAAAATTTAGAAAATATTAAAAAATATTCTAGTATTATTACGTTTCTTGTTCTCATACTCATTCCTATTAATAATTGGTATAGAACAATAGCTAATTTAAAGTTGAATTTAATTCTTGCAATAATGTTTATCGTAATTGCACTAGTAGTAGTTAACAAATTAAACAATATAGTTTCGAAACAAAAGAGAAATATCGATAATATTAGTTACGAGAAAATGGAATTTGACAAAGAAAAAATAGCAAATATAATTGTTTCTGCTGAAGAATTGTCGAATAAACTGTTATTTTTATTAGTAATTTCATTATTTATATCCCTACTCCTAATAATGTTATATTTTAAATACTCAGTATTGATATTTTTTCCTATAGCACTTATGTTACTAATATTATCAAGATTGTTATTAGAAAATATTGATTTTTTTGAAAGAAAAAATGCAATAAATGAAATAAAAAAGCAATATAATTTTTAA

SEQ ID NO: 1928 - protein, 196 aa, Streptococcus agalactiae
MIHREKSYAEIYHDGNQGYYYNFDTKIFYIKSFETPNYQKENLENIKKYSSIITFLVLILIPINNWYRTIANLKLNLILAIMFIVIALVVVNKLNNIVSKQKRNIDNISYEKMEFDKEKIANIIVSAEELSNKLLFLLVISLFISLLLIMLYFKYSVLIFFPIALMLLILSRLLLENIDFFERKNAINEIKKQYNF

SEQ ID NO: 1929 - protein, 306 aa, Streptococcus agalactiae
ATGAAGACAGGAGCACCCGTAATAATTGGTAGTGCTGCAAAAGTTGTAGGAACGGCTGCGGGTACCGCAACAGCTGGACTATTAATTTCAACAGGTGTACTTGCACCGCCTGCTCCTGTTGTTGGTTCTGCTGTGGACTTTGGTGCTACAGCAGTAATAGGTGTAGGTGGATCGATGGTGTTCGATTATGTTTATGATAATAAAGATGAAATAAATCATATTATAAAAAGAGCATCGAAGGATACAATTAACAATGTTAGTGATTTTTTTGAATTAATGTATGATTCAACAGGTAGTATAAATTGA

SEQ ID NO: 1930 - protein, 101 aa, Streptococcus agalactiae
MKTGAPVIIGSAAKVVGTAAGTATAGLLISTGVLAPPAPVVGSAVDFGATAVIGVGGSMVFDYVYDNKDEINHIIKRASKDTINNVSDFFELMYDSTGSIN

SEQ ID NO: 1931 - DNA, 435 bp, Streptococcus agalactiae
  misc_feature 4, 5, 6, 7, 8: n = A,T,C or G
atgnnnnnagtattggcggacatttttaatgcacagtcaactgttamccaagcactagcggctgtttcaacaggattttctggatataatagtaaaaccggagcttttggaaaaccaacatccggacagatggaatggacaaagacagttaagaagaattggaaagagcgagaagacgccaaagctgaagaactgaaaagtaaaaaggctgaagaaagtaagaaagcttcaaaaattgaaaatactactaaaaaaagtaatgtttcagttgataaaaagaaattaataaaagcggctaatgaagcgtataaattaggagaaattaaaaaagatacctatgaatcaattatcagtggtttaagtaatgcatcggctgccttacttaaagaggtagctaaatcaaaattgactgacacagctcggctattgatgtaa

SEQ ID NO: 1932 - protein, 144 aa, Streptococcus agalactiae
  VARIANT 2, 3, 16: Xaa = Any Amino Acid
MXXVLADIFNAQSTVXQALAAVSTGFSGYNSKTGAFGKPTSGQMEWTKTVKKNWKEREDAKAEELKSKKAEESKKASKIENTTKKSNVSVDKKKLIKAANEAYKLGEIKKDTYESIISGLSNASAALLKEVAKSKLTDTARLLM

SEQ ID NO: 1933 - DNA, 198 bp, Streptococcus agalactiae
  misc_feature 180, 181, 182, 183, 184: n = A,T,C or G
atgaagacaggagcacccgtaataattggtagtgctgcaaaagttgtaggaacggctgcgggtaccgcaacagctggactattaatttcaacaggtgtacttgcaccgcctgctcctgttgttggttctgctgtggactttggtgctacagcagtaataggtgtaggtggatcgaggtcnnnnncattcattcattaa

SEQ ID NO: 1934 - protein, 65 aa, Streptococcus agalactiae
  VARIANT 61, 62: Xaa = Any Amino Acid
MKTGAPVIIGSAAKVVGTAAGTATAGLLISTGVLAPPAPVVGSAVDFGATAVIGVGGSRSXXFIH

SEQ ID NO: 1935 - DNA, 915 bp, Streptococcus agalactiae
atggtaaaagttagtgtaagttctgtaggaactcaagcatcaacagtagctatttctatgtttagtcgtgtatcggctttaaatgatgcaataacaaaactatcatcttttgcagaggctgcaactcttcaagggactgcttattcaaatgcaaaaagctatgctactggaacgttaactccgatgcttcaaggaatgattcttttctctgaaacattgagtgagaaatgtacagaattacaaaccttatatgtctcaatttgtggtgatgaggatttagactctgtcgttttagaatcaaaattagcaagtgatagggcatcattaaagattgctgaagcacttttagagcatcttaacgatgatccagaaccttccaaatctgccataagttctacaaaaagtaatattaaaaaattaaaaaaacgtataaaatctaatcaaaagaaattagacaaccttaatgaatttaacgcccattcagcaacagtatttgcggacatttctaatgcacagtcaactgttaaccaagcactagcggctgtttcaacaggattttctggatataatagtaaaaccggagcttttggaaaaccaacatccggacagatggaatggacaaagacagttaagaagaattggaaagagcgagaagacgccaaagctgaagaactgaaaagtaaaaaggctgaagaaagtaagaaagcttcaaaaattgaaaatactactaaaaaaagtaatgtttcagttgataaaaagaaattaataaaagcggctaatgaagcgtataaattaggagaaattaaaaaagatacctatgaatcaattatcagtggtttaagtaatgcatcggctgccttacttaaagaggtagctaaatcaaaattgactgacacagctcggctattgatgtaa

SEQ ID NO: 1936 - protein, 304 aa, Streptococcus agalactiae
MVKVSVSSVGTQASTVAISMFSRVSALNDAITKLSSFAEAATLQGTAYSNAKSYATGTLTPMLQGMILFSETLSEKCTELQTLYVSICGDEDLDSVVLESKLASDRASLKIAEALLEHLNDDPEPSKSAISSTKSNIKKLKKRIKSNQKKLDNLNEFNAHSATVFADISNAQSTVNQALAAVSTGFSGYNSKTGAFGKPTSGQMEWTKTVKKNWKEREDAKAEELKSKKAEESKKASKIENTTKKSNVSVDKKKLIKAANEAYKLGEIKKDTYESIISGLSNASAALLKEVAKSKLTDTARLLM

SEQ ID NO: 1937 - DNA, 363 bp, Streptococcus agalactiae
atgactgaacgaacattcgaagatattgaacttgacttaaagttattccaaataaagcttgataatgctgagaatagtaaaaggctcttacaaaaattgaaaaacgacgtcatggagttacaaatagagttactagaatcattaaaactcggtgatgcctatttaacagaatcagaagaattagaagagaataatgactttattctaacggtaaatagtgaaacactaagtttagaagaatcctatgacaataggataaacttagtttctaaagagattatggattatgaaaatgcattagataagttgtattatgaaaaacagagtttgatgcaaaaaagtaatgaaagaaaaggaggttaa

SEQ ID NO: 1938 - protein, 120 aa, Streptococcus agalactiae
MTERTFEDIELDLKLFQIKLDNAENSKRLLQKLKNDVMELQIELLESLKLGDAYLTESEELEENNDFILTVNSETLSLEESYDNRINLVSKEIMDYENALDKLYYEKQSLMQKSNERKGG

SEQ ID NO: 1939 - DNA, 132 bp, Streptococcus agalactiae
gtgaatgagtttgaagctattgaccaaaaaattagccaagagattgcggcaaatactaaatatacaatgcctagtaatgacagctctgttatatcaaatccggattttaagcctaaatatagtttgttttaa

SEQ ID NO: 1940 - protein, 43 aa, Streptococcus agalactiae
MNEFEAIDQKISQEIAANTKYTMPSNDSSVISNPDFKPKYSLF

SEQ ID NO: 1941 - protein, 3930 aa, Streptococcus agalactiae
ATGAAATTCAAATCTGGGGGGGCTGATTATGAAACATCATTAACTAAGAAAGTTATGTCAGCTTATCAATTTTACGAAGGCTATCCTGATTTTCACCGCTCACCTCGTATTATTTATCGTTCCAGTGAAGATAAAATTACAGTTAATGCGCCTGGTAATGAACCTAATAAGTCTAAAGATGAACTGTTAAAATTAATTGTTCCTCCTCTAGTGATGATTGGAGTCAGCATTCTTATTTCTATTTTTCGTCCTCGTGGTATCTATATCATTGCAACAATGTCAATGGCTCTAGTGACGATGATTTTCTCTATCACTGGTTACTTTAAAAATCGTAAACAGTATAAGCAGGACTTACAAGAACGCATTGATTCCTATCATGACTATTTATCTGATAAGTCAATTGAACTTCAGAAGTTAGCTAAAGAGCAAAAGCGTGGGCAACACTATCATTACCCAACGATTGAAGGTTTACAGGAAATGGCTGATACTTATCACCATCGTATTTATGAAAAGACACCACTTCATTTTGACTTCTTGTATTATCGCCTAGGTTTGGGAGAAGTACCAACGAGCTATAATATTCATTATTCTCAACCAGAACGTTCTGGGAAAAAAGATCCTTTAGAGAACGAAGGCTATAACCTCTACTTTAACAATCGTTATATTAAAAATATGCCGATTGTTGCGAATTTATCACATGGACCAGTTGGCTATATAGGACCACGAGGTTTAGTATTGGAGCAACTCCAATTGATGGTTAATCAATTAGCTTTTTTCCATTCTTACCATGATGTTCAATTTATTACTATTGTTCCAGAGGAAGAGATGGATAAGTGGTCTTGGATGCGTTGGTTGCCACATGAAACCTTACAAGATGTCAATGTTCGTGGCTTTGTTTATAATCAAAGAAGCCGTGATCAAGTGCTCAACAGTCTTAACCAAATTTTAAAATTACGTCGCACACAACGCGAAGATAAATCTGCCAAAGAAGGGACTTTATTTTCTCCGCATTATGTCGTTATTGTAACTGATGAAAAGTTAATTTTAGATCACGTCATCATGGAATTCTTTACGGAAGATCCTACAGAATTGGGATGTTCTCTCATCTTTGTTCAAGATGTTATGAGTTCACTTTCAGAAAATATCAAAACCATTATTAATATTAAAGACCGTAATACTGGTCAGTTAGTTATAGAAGAAGGAGAGCTTAAAGAAACAGATTTTGAATTAGATCATTTCTTAGAGGATTATGACAAGGAAAATATTTCACGTCGCCTAGCTCCGTTAAATCACCTACAAAATCTTAAATCTTCAATACCAGAAGCAGTTACTTTTATGGAAATGTATCAAGCAGAAGAATTTGAAGATTTGCATGTTCAAGAGCGTTGGATAAGCCATGCTCCGTATAAAAGCTCAGCTGTTCCACTTGGCTTACGTGGTCAGGATGATATTGTTTATCTAAACCTACATGAAAAAGCTCATGGTCCTCATGGATTAGTTGCAGGAACAACGGGATCAGGGAAGTCAGAAATTATACAGTCCTATATCCTTTCTTTAGCTGTTAATTTCCATCCACACGATGTAGCTTTCCTTCTCATAGACTACAAAGGTGGGGGGATGGCAAACCTCTTTAAGGACCTGCCACACTTACTTGGCACCATCACCAACTTAGATGGTGCCCAATCGATGCGTGCTTTGGTTTCTATTAATGCTGAATTGAAACGTCGTCAACGTTTATTTGCTAAAGCTGATGTTAATCATATTAACCAGTATCAGAAGAAATACAAACTTGGAGAAGTTTCAGAACCAATGCCTCATCTCTTCTTAATCTCCGATGAGTTTGCCGAATTGAAATCCAACCAACCTGAGTTTATGAAAGAGCTTGTCTCAACAGCGCGAATTGGGCGTTCCCTAGGGATTCACTTAATCCTAGCGACCCAAAAACCATCTGGTGTGGTAGATGACCAAATCTGGTCAAACTCACGCTTCAAACTAGCTCTTAAAGTAGCAGACCGCGGCGACTCCATGGAAATGCTCCATACTCCAGATGCCGCCGAGATTACACAAGCAGGACGTGCCTACCTCCAAGTTGGTAATAATGAAGTCTATGAACTCTTCCAATCAGCATGGTCAGGAGCAGATTACCAACCTGAAAAAGACGACCAAGGGATTGAAGACCATACCATTTATTCCATCAACGACCTTGGCCAATACGAAATCCTAAATGATGATCTTTCAGGCTTAGACCAAGCCGAAAATATTAAAGAAGTACCTACGGAATTAGATGCTATCGTTGAAAACATTCAAGCTTTAACCAAAGAAATGGGCATCTCAGACTTACCTCAACCGTGGCTACCGCCTCTAAGCAATCAGATTGCAGTAACCGATCTCCGTAAGGAGGGATCAGTAGACCTCTGGAGCAAGGCCCCATCTTACAAAGCTGTTCTTGGCTTTATGGATATACCAAGCCAACAAGCACAAGAAGTGGCTTACCACGATTTTGAAGACGATGGGCATTTGTCAATTTTTGCAGGACCAAGTATGGGGAAATCCACAGCCCTTCAAACTGTAACAATGGACTTAGCACGTCATAATAGTCCAGAATTTTTAAACCTTTACCTCTTTGATTTTGGTACCAATGGCCTCTTACCTCTAAGACGTTTGCCACATGTAGCAGATTTCTTTACCATTGATGATGACGAAAAAATAGCCAAGTTTATTGCCCGTATCAAAGTTGAAATGTCTGATCGTAAAAAAGCCCTCAGTCGCTACAATGTCGCGACAGCAAAACTTTACCGTCAGGTATCTGGGGAAACCATGCCTCAAATCCTGATTGTTATTGACAGTTATGAAGGGCTACGGGAAGCTCAAACACCGACTAACTTAGAAGCTTGTTTCCAAAATATTTCGCGTGATGGGTCGTCACTTGGCATTTCCTTAGTTATCTCAGCTGGTCGTACGGCAGCTTTGAGGTCGTCCTTAATGGCAAACCTTAAAGAACGTATCGCTCTTAAATTAACAGATGACTCTGAATCACGGACACTTGTCGGTCGTCACCAACACATCATGGAAGATATTCCAGGACGTGGATTAATCAAACGTGATGACATTGAAGTGTTACAAGTGGCTCTCTCAACAGAAGGCACTGAAACCTTTGACATCATCAATAACATCCAAAACGAATCTGACGCCATGAACAGCAAATGGACTGGACCAAGACCAAAAGCAATACCAATTGTTCCCGAAGAATTAACCTTTGACGACTTTATGGCTACAGATAGTGTTCAAGCTGACCTATCAGCTAATCGTTTACCACTTGGGCTTGAAATGGTTGACGTTGAAAGTTATAGTTTAGCACTTAATCGCTTTAAGCATATGCTTTACATGTCTGATTCTGACGAGTCACTCGAAGCAGTTGGTTCCCATATCATCAAGGTCTTGCTTAACGTCCCAAATTACCATAACATGATCATCGATTCGCTTGGCGAATATGAAAGCTATCAAGGTCAGGTACGTACTTATGTGGGTTCTGATATGATTGAAGATATGGCGGATCAGTTGATCTATGAGTTGCAGCAACGTGAAAGCCAATCTGAGATAGCTGAATGGTTTATCATGATTCCAGATTTTGAAAGCTTTGTGGCTAAGAGCAATATGAAGCTTGAACAGGTTCAGGCATTGCTTGACAATGGACCACGCTATGGTTTACATCTGATTCTTGGATCAAGCTATAACTATGTTGGGACTAAGATCGATGCTGTGCCTAAATACGTTCGCACAACGACCCAGTATGTGCTGGCTGGCATGAGGCTCATGGATCAAACCTTCCTTGAAAAAGTGTATAATAGTAAGGAAATCCGTCCAAACAAAGACGAAGCCTACATTCACGATAGAAAAACCTATCAAAAATTAAAACTCACCATAGACTAA

SEQ ID NO: 1942 - protein, 1309 aa, Streptococcus agalactiae
MKFKSGGADYETSLTKKVMSAYQFYEGYPDFHRSPRIIYRSSEDKITVNAPGNEPNKSKDELLKLIVPPLVMIGVSILISIFRPRGIYIIATMSMALVTMIFSITGYFKNRKQYKQDLQERIDSYHDYLSDKSIELQKLAKEQKRGQHYHYPTIEGLQEMADTYHHRIYEKTPLHFDFLYYRLGLGEVPTSYNIHYSQPERSGKKDPLENEGYNLYFNNRYIKNMPIVANLSHGPVGYIGPRGLVLEQLQLMVNQLAFFHSYHDVQFITIVPEEEMDKWSWMRWLPHETLQDVNVRGFVYNQRSRDQVLNSLNQILKLRRTQREDKSAKEGTLFSPHYVVIVTDEKLILDHVIMEFFTEDPTELGCSLIFVQDVMSSLSENIKTIINIKDRNTGQLVIEEGELKETDFELDHFLEDYDKENISRRLAPLNHLQNLKSSIPEAVTFMEMYQAEEFEDLHVQERWISHAPYKSSAVPLGLRGQDDIVYLNLHEKAHGPHGLVAGTTGSGKSEIIQSYILSLAVNFHPHDVAFLLIDYKGGGMANLFKDLPHLLGTITNLDGAQSMRALVSINAELKRRQRLFAKADVNHINQYQKKYKLGEVSEPMPHLFLISDEFAELKSNQPEFMKELVSTARIGRSLGIHLILATQKPSGVVDDQIWSNSRFKLALKVADRGDSMEMLHTPDAAEITQAGRAYLQVGNNEVYELFQSAWSGADYQPEKDDQGIEDHTIYSINDLGQYEILNDDLSGLDQAENIKEVPTELDAIVENIQALTKEMGISDLPQPWLPPLSNQIAVTDLRKEGSVDLWSKAPSYKAVLGFMDIPSQQAQEVAYHDFEDDGHLSIFAGPSMGKSTALQTVTMDLARHNSPEFLNLYLFDFGTNGLLPLRRLPHVADFFTIDDDEKIAKFIARIKVEMSDRKKALSRYNVATAKLYRQVSGETMPQILIVIDSYEGLREAQTPTNLEACFQNISRDGSSLGISLVISAGRTAALRSSLMANLKERIALKLTDDSESRTLVGRHQHIMEDIPGRGLIKRDDIEVLQVALSTEGTETFDIINNIQNESDAMNSKWTGPRPKAIPIVPEELTFDDFMATDSVQADLSANRLPLGLEMVDVESYSLALNRFKHMLYMSDSDESLEAVGSHIIKVLLNVPNYHNMIIDSLGEYESYQGQVRTYVGSDMIEDMADQLIYELQQRESQSEIAEWFIMIPDFESFVAKSNMKLEQVQALLDNGPRYGLHLILGSSYNYVGTKIDAVPKYVRTTTQYVLAGMRLMDQTFLEKVYNSKEIRPNKDEAYIHDRKTYQKLKLTID

SEQ ID NO: 1943 - protein, 111 aa, Streptococcus agalactiae
GTGATTCCACTGGCTCCTGATTGTATTGCAGTTGCACAGGTGGATGCGACGGAGGCATCACTTTGTATTTTTGCCATTTGGTCTCCTTTCTTAGTCTATGGTGAGTTTTAA

SEQ ID NO: 1944 - protein, 36 aa, Streptococcus agalactiae
MIPLAPDCIAVAQVDATEASLCIFAIWSPFLVYGEF

SEQ ID NO: 1945 - protein, 96 aa, Streptococcus agalactiae
GTGCAGCAGTTACCTTTAAGTTTAGGTGATGAGATTAGCTTCCAAGGAACAATTGTTAAGCTTTTCCCAGATGAAATTCAAATCTGGGGGGGCTGA

SEQ ID NO: 1946 - protein, 31 aa, Streptococcus agalactiae
MQQLPLSLGDEISFQGTIVKLFPDEIQIWGG

SEQ ID NO: 1947 - protein, 168 aa, Streptococcus agalactiae
ATGTTAGTTATTTGTTATTATCAATCACTCCGCTACGAATTTAATATTGAAGAGGAGAAATCCTTTCTAATATCATCAAACGGCAAGTCGCCAATACCAGTATCAGATTTAGAAAATGACATCACGCTAAAAAATATACAAGGTCAATTGGTATATATTATTGACTAA

SEQ ID NO: 1948 - protein, 55 aa, Streptococcus agalactiae
MLVICYYQSLRYEFNIEEEKSFLISSNGKSPIPVSDLENDITLKNIQGQLVYIID

SEQ ID NO: 1949 - protein, 1275 aa, Streptococcus agalactiae
ATGGAAACAGATTCGTTTGTATTTGAAGAACAAGACTTTCAATTTGAAAAAGGACCAGATTTTTGGCAGTTATCTCTTAAGCGTTCAAAAGTAGGAACTCAAAATCTGCAACAACTGCAATTGTTAGAAATTCACCATTCTTTGTTGATGCCTATGACAACTGCAATTGATGCAGATACCATTCAATTTCAATTCCAGACAGAAGCGCACGCTCTATTTTTTGAAAGCTTTAAAAAAGAAACTTTATCTGAAAAATTACGATTAGCCTTGAATGTCTTGGATTTAGATAAGGCTTTGTCTTTGTCAGTAAATTTCATTTTGCATCCCTCTAATCTATTTTTAACAAAAAATGCAACTGCTAAAATAGCTTATCGTAGCCTTCCTGGGATTATGAGACCTGAGAAATTTGGTCCAGAAGAGTTTTTATATCAATTCAAATGTTTTGTCTTTGCATTATTGACGCAACATGACTATATAGAGTTGTATAATGGTGCTATTTCTGTTATTGAAGTATCAGATTTCCTAAAAAGCATTTATCATGCAGAAACTATTCAGGCTGTTAGAGACATCATTACTATTGATTATGAGCAGCAAGTAGAAGTAGAAACTCATACGTTAGCAAAAGTATCAAGGGCAAAATATAAGCTTTATAAATACATAAGTGTTTGGCTAGGAGCTTTATCTACAATACTCTTGATTCCGCTAGTATATCTGGTTTTTATTCACAATCCATTCAAAGAAAAAATGTTGGCAGCGGATACTTCATTTATTAAAGTTGATTATAATCAAGTGATTAATCGACTAGAACATGTAAAAGTAAGTAAGTTACCTTATACACAGAAGTACGAGTTGGCCTATTCCTATATTAATGGAATGTCATTTTCTGAAGAACAGCGTGAAGTTATTTTAAACAATGTTACGCTCAAGACTGATGAGCTCTATCTTGATTATTGGATTAATATTGGCCGTGGTTTAGATGATGATGCTATTGATGCTGCCAAACGTTTAGACGATTCTGACCTTGTTATTTATGCTATTGTTCAGAAAATGGATCAGGTTAGAAAAGACAATAGTTTATCTGGTAAAGATCGTGAACAAAAACTTTCTGAGCTACAAACAGACTATGATAAATATTGGAAAGACCGTAAGACAGCCTTAACAGATGAGGAATCCAAATCGAAAAATAGCAATAATCATTCGACAAATTCCAACAAAGAGTCATCTGAATCATCAAGTACTACAGCAAGTACATCTTCTAAAACTAAAAGTAGGTAG

SEQ ID NO: 1950 - protein, 424 aa, Streptococcus agalactiae
METDSFVFEEQDFQFEKGPDFWQLSLKRSKVGTQNLQQLQLLEIHHSLLMPMTTAIDADTIQFQFQTEAHALFFESFKKETLSEKLRLALNVLDLDKALSLSVNFILHPSNLFLTKNATAKIAYRSLPGIMRPEKFGPEEFLYQFKCFVFALLTQHDYIELYNGAISVIEVSDFLKSIYHAETIQAVRDIITIDYEQQVEVETHTLAKVSRAKYKLYKYISVWLGALSTILLIPLVYLVFIHNPFKEKMLAADTSFIKVDYNQVINRLEHVKVSKLPYTQKYELAYSYINGMSFSEEQREVILNNVTLKTDELYLDYWINIGRGLDDDAIDAAKRLDDSDLVIYAIVQKMDQVRKDNSLSGKDREQKLSELQTDYDKYWKDRKTALTDEESKSKNSNNHSTNSNKESSESSSTTASTSSKTKSR

SEQ ID NO: 1951 - DNA, 243 bp, Streptococcus agalactiae
atgaatacacatattaacattactctagatatgggggaaacctcaaaagatttacgtatccctttgaaaattagcgttaagcaattagtaatggaattagatagtatttttagccgtactgaaaggcgtaccaaatatcaactaagagttataaataaaggtattttattgggagagaacgatatattagcgcaccatccagtaacaactggtgatcgtataaggatagaggagttttattaa

SEQ ID NO: 1952 - protein, 80 aa, Streptococcus agalactiae
MNTHINITLDMGETSKDLRIPLKISVKQLVMELDSIFSRTERRTKYQLRVINKGILLGENDILAHHPVTTGDRIRIEEFY

SEQ ID NO: 1953 - DNA, 3012 bp, Streptococcus agalactiae
atgaaaagaaataactttagaatactttggtatattatagctgttgctctctttttagtagctattgctggccttaatcttaagcttcaaggcgatcatgcaaaagagaataaaacaacacagtcagctactaacactaaactaaatatagcattagtcaacgaagatcaaaatgtatctaacggtaaagaaagttataatttaggagctagttatattaagtctatcgaacgtgataatagtcaaaattggtcagttgttagtcgaggtactgctcaaaatggattagacaaaggtgattatcaattaatggttatcatccctaataacttttctcaaaaacttcttgatgtcaataaagcaaatgcagagcaaacaactatctcttataaggttaatgccaaggggaatttagcattagagaaaaaggcaactgaaaaagagaaagatattgtttcagagttaaatagccacttagtaaatatgtacatggcaagtattttaagtaacttatatacagctcaagaaaatgtacaggccatggtaaatgttcagtcaggtaatatctcaaattaccaaaaaaatcttttagattctgcaactaatttccaaaatatctttccagccctcgttaaccagtctagtagttccattactgctaacgaatcactgaaaaaatctttagaagcttctgataacatgtttaatgatttggtgacaacccagacaaatactggaaaagatttatcaagcttaatagaacagcgccatcaagatagcatttcgtatgaagcgttttcgacctcattactagaaatgaataacgagttattagagaagcaattatctgatattatcacacaagcacaaaaagaccaagaaacattatcatcacaactcaatagtattatgggtgatgataacaatcataatcataaagaaaactcatcagcttatctaaatgttgcaaggcaaaaaatccaagaactatctgaagcactcaagtcacaagataacattgctaaagatcaaagtgaacaactagataaaattgttagagagggactagcaagttactttgctaagaataataaagataatattactttattagaattattgaagagtcattctactaatgagaagactttgaaagattttaaagctaaggtagcagatttcacaaattctctcatttcaagcattccttcactaaacctttcggagttgcacttaacccaagaagaagaaaaagccattcagtttacatcttctgattcggaaatcattaaaaaagtaagcaacgaaagaactctgtatttaaatactaatttattgaatcgtctttttgaagctaggaaaaatagagatgaagctaaaaataaagttaatcaattaaaattgtcatctagttctactcgaactggtgagcagatagtttctgttgaatcaaataatccagattacagggtagatacctggacggttaatggtaagcaaacaagaaccttggaccccagccaaaacaataatattattatcaatagcagttatcaaagggaatcatctaactctagtattacgaaaccaagctatacaatcactatcgggaatcagaaacaaattgtacaaaatgatgacggtaaaatccaacggtcttactttgaggcagaggcaacgtatcaacgaactctacaagaagtaaatgatgcatataacaccactcacggattagtagctaaatactacattatttctgatggcgaagaaccgcaaaatttatttgatcaatttttaaatcaaagtgttaacgatacgatggttgatctggtcaaaaatggtataactaagtatttgatggatgaaaacactgctgatgcgcaacagaaagttaaagatgtcatggaggaagttgaaaatagtcaagatggattggcggatcaaatggcaaaagtaactgagacaaatgtacgactaacagatgcaatcaaaaaacagcttgaaacccttcaatcaattaacatgaaggtccaaaacatcacacaggatcaatctaaagtaaacgactcacagaaaacaactgatcaacaattatctgatttgaagaaccagctagatgggctaatgacctctgcagcgggcgtaaaagatatgtccaaatctaatagtcaagaggcggaccaagttaatcaaatattcacatcattcaataaagatgttcaagatgctaaaaattcgggcaacaaactttcgacggatgcaaccgatttaatggctaacttccaaaaagaattggccaataatggtgatttcgtagcttctttctctaaagtttttaatactgcttataaaaatggagtgccaaatgatattctccttaatttcttatcacgacctgtcgctgaatcagcgtctgcagttagggcaactgaaaatacttatcgcccattcacttggatactattattagaagttgttagcctatttacagcatatatctttgcgactcaaaaccttattaagaaattgacagataggtataatgtcaaccgctggcttcaaacagactttttaaatgtcattgtcatttcaggcctctctcttgttattggtttagcactgggagttatctcaagcagaagtcttcatgtcatgcctgaatatgtaccatcttggttcctagttatgactctgtttagttttttattaattcatagtcagtatttctttattaaaaattttaaagcagttggtatgggtttagctttgtttatgattattagttttgtgtatctatcaaatgccgtaggcacagtagcgactgttagtggacttccaaaattactaaaagctattaatccactatctatccttgaaaatcaattatcatcttattttgataatgtgacaactggatttattttccttatcttagtacttcttgtggatgttgcttttattatcatgaatatttttatcaccttaaattttgaagctaaagtaaaagagtga

SEQ ID NO: 1954 - protein, 1003 aa, Streptococcus agalactiae
MKRNNFRILWYIIAVALFLVAIAGLNLKLQGDHAKENKTTQSATNTKLNIALVNEDQNVSNGKESYNLGASYIKSIERDNSQNWSVVSRGTAQNGLDKGDYQLMVIIPNNFSQKLLDVNKANAEQTTISYKVNAKGNLALEKKATEKEKDIVSELNSHLVNMYMASILSNLYTAQENVQAMVNVQSGNISNYQKNLLDSATNFQNIFPALVNQSSSSITANESLKKSLEASDNMFNDLVTTQTNTGKDLSSLIEQRHQDSISYEAFSTSLLEMNNELLEKQLSDIITQAQKDQETLSSQLNSIMGDDNNHNHKENSSAYLNVARQKIQELSEALKSQDNIAKDQSEQLDKIVREGLASYFAKNNKDNITLLELLKSHSTNEKTLKDFKAKVADFTNSLISSIPSLNLSELHLTQEEEKAIQFTSSDSEIIKKVSNERTLYLNTNLLNRLFEARKNRDEAKNKVNQLKLSSSSTRTGEQIVSVESNNPDYRVDTWTVNGKQTRTLDPSQNNNIIINSSYQRESSNSSITKPSYTITIGNQKQIVQNDDGKIQRSYFEAEATYQRTLQEVNDAYNTTHGLVAKYYIISDGEEPQNLFDQFLNQSVNDTMVDLVKNGITKYLMDENTADAQQKVKDVMEEVENSQDGLADQMAKVTETNVRLTDAIKKQLETLQSINMKVQNITQDQSKVNDSQKTTDQQLSDLKNQLDGLMTSAAGVKDMSKSNSQEADQVNQIFTSFNKDVQDAKNSGNKLSTDATDLMANFQKELANNGDFVASFSKVFNTAYKNGVPNDILLNFLSRPVAESASAVRATENTYRPFTWILLLEVVSLFTAYIFATQNLIKKLTDRYNVNRWLQTDFLNVIVISGLSLVIGLALGVISSRSLHVMPEYVPSWFLVMTLFSFLLIHSQYFFIKNFKAVGMGLALFMIISFVYLSNAVGTVATVSGLPKLLKAINPLSILENQLSSYFDNVTTGFIFLILVLLVDVAFIIMNIFITLNFEAKVKE

SEQ ID NO: 1955 - DNA, 291 bp, Streptococcus agalactiae
atggcacaaattaaattaacaccagaagaacttcgctcatcagcacaaaagtacacagctggttctcaacaagtaacagaagttcttaatttgcttactcaagagcaagcagttattgacgaaaattgggatggatctacttttgattcttttgaagcacaattcaatgaattatctccaaaaattacagaatttgctcaattactcgaagatattaaccagcaattattaaaagttgcagatatcattgagcagacggatgcagatattgcttctcaaattagtggatag

SEQ ID NO: 1956 - protein, 96 aa, Streptococcus agalactiae
MAQIKLTPEELRSSAQKYTAGSQQVTEVLNLLTQEQAVIDENWDGSTFDSFEAQFNELSPKITEFAQLLEDINQQLLKVADIIEQTDADIASQISG

SEQ ID NO: 1957 - DNA, 783 bp, Streptococcus agalactiae
atgattccagatagtagttttaaagtgctatcagatatggcatataatattgaaaaatccaaagcagaaagtaatggacaccttcaaattatagaaggtagtcaaattattgatttccatcaaaaacgctcttttatggtattagaggttaatgatgatatcaataatggtatgcaggctatggcatgtcagtctttggatgaaagtaatcatattgttatagcatattcaggaacgaacgcttttaataagaaagatatcttaacagatatcgattcagttgtattggggaagaacaataaattgctaacttgtccttcaagtattaccctgagagaggatggcatttctctgccttgtaaaaatccaagtcaaattacaacatctaaactatttgcacaaaaaattaagatgaactatcctgatgcaaccctctggttaacaggccattctctaggtggttatttggccatgattgtggcttcagaaatgagattatcagcgcgtgtttttaattcccctagtcccattaacaatatgtctgaagcagccacatcctatgtaatttcacatccagagaagtatcatagttaccgtattaataaagattacattggtaattttggtattaatagttcagatgataaattaggtatttctaaaagagtcaatgctaagaagcaacatggtttttataaaaagattttctttcacgaattgacacgatttcgattaaatcaacaaggacagattgttgatatagatgaaaataaacaggattaa

SEQ ID NO: 1958 - protein, 260 aa, Streptococcus agalactiae
MIPDSSFKVLSDMAYNIEKSKAESNGHLQIIEGSQIIDFHQKRSFMVLEVNDDINNGMQAMACQSLDESNHIVIAYSGTNAFNKKDILTDIDSVVLGKNNKLLTCPSSITLREDGISLPCKNPSQITTSKLFAQKIKMNYPDATLWLTGHSLGGYLAMIVASEMRLSARVFNSPSPINNMSEAATSYVISHPEKYHSYRINKDYIGNFGINSSDDKLGISKRVNAKKQHGFYKKIFFHELTRFRLNQQGQIVDIDENKQD

SEQ ID NO: 1959 - DNA, 324 bp, Streptococcus agalactiae
atgttaaaaacacgaacacatattaatgaattagaaacaaaaatcgcccttgatttagtacacagatatctaggtattcaacaacttgttttttcaaagtggaggcattctttagaaactggttcatggtcttctattataacaataaatggcgttaatattatcaattacattgttgatgatattagtgacagtaatagtatttcaggtattatttgtcatcctaaaagttttcatctcagacctagagaaaaaaaggaacctattcagtctattgatgagttagatatcacctggtctttgaatagagaggaaaatgaatga

SEQ ID NO: 1960 - protein, 107 aa, Streptococcus agalactiae
MLKTRTHINELETKIALDLVHRYLGIQQLVFSKWRHSLETGSWSSIITINGVNIINYIVDDISDSNSISGIICHPKSFHLRPREKKEPIQSIDELDITWSLNREENE

SEQ ID NO: 1961 - protein, 3183 aa, Streptococcus agalactiae
ATGCCAAAGCGCACAGACATACGTAAAATTATGGTTATCGGTTCTGGCCCGATTGTGATTGGACAAGCAGCAGAGTTTGACTATTCTGGTACACAAGCCTGTCTCTCTTTAAAAGAGGAGGGATACCAAGTTGTTTTGGTCAATTCGAATCCAGCTACTATCATGACAGATAAAGATATTGCTGATAAAGTTTATATTGAACCTATTACCTTGGAGTTTGTCACAAGAATTCTCAGGAAGGAAAGACCTGATGCTCTCCTTCCAACTCTTGGAGGTCAAACTGGATTGAATATGGCTATGGCTCTATCAAAAAATGGTATCCTAGAAGAATTGAATGTTGAACTATTAGGGACCAAATTATCAGCCATTGATAAAGCTGAAGATCGTGATTTATTTAAACAGTTGATGGAAGAACTCAATCAACCTATTCCAGAATCTGAGATTGTTAATTCGGTAGAAGAAGCTATTCAATTTGCAGAGCAAATCGGGTATCCATTAATTGTTCGTCCTGCCTTTACTTTAGGAGGTACAGGTGGAGGCATGTGCGATAATCAAGAACAATTGGTTGACATCACGACGAAGGGGTTAAAGTTATCGCCTGTGACACAGTGCCTTATTGAACGTTCAATTGCTGGCTTTAAAGAGATTGAATACGAAGTTATGCGTGATGCAGCAGATAACGCTCTTGTTGTTTGTAATATGGAGAATTTTGATCCTGTTGGTATCCATACAGGGGACTCTATAGTTTTTGCACCCGCACAAACGTTATCTGATGTGGAAAATCAGTTATTACGAGATGCGAGTTTAGATATTATAAGAGCTTTGAAAATTGAAGGAGGATGCAATGTTCAACTAGCCCTTGATCCGAATAGTTTTAAATACTATGTCATTGAAGTTAATCCAAGAGTATCAAGATCTTCTGCTTTAGCTTCAAAAGCTACTGGATATCCAATTGCTAAATTAGCAGCTAAGATAGCTGTTGGTTTGACACTAGATGAGGTAATTAATCCTATTACAAAAACGACTTACGCTATGTTTGAACCTGCTTTAGATTACGTAGTCGCAAAAATGCCGAGATTTCCTTTTGATAAATTTGAAAGTGGCGATAGAAAATTGGGAACACAGATGAAAGCTACAGGCGAAGTCATGGCAATAGGACGGAATATAGAAGAATCTTTGTTGAAAGCTTGTCGTTCACTAGAAATAGGTGTCGATCACATTAAAATAGCAGATTTAGATAATGTATCAGATGATGTTTTATTAGAAAAAATAAGAAAGGCAGAAGATGATCGCTTATTTTATCTAGCAGAAGCTTTACGTAGACATTATAGTATTGAAAAATTAGCAAGTTTGACTAGCATTGATTCTTTCTTCCTTGATAAGTTAAGAGTGATTGTAGAGTTAGAAGATCTATTATCTAAAAACAGACTGGATATCAATATTCTCAAAAAGGTTAAAAATAAAGGTTTTTCAGATAAAGCTATAGCGAGTTTATGGCAAATAAACGAAGATCAAGTTCGTAACATGCGAAAAGAAGCAGGAATTCTTCCAGTTTATAAGATGGTTGATACATGTGCGTCTGAGTTTGATTCAGCAACGCCCTACTTTTATTCGACTTATGCCGTAGAAAACGAGTCATTGATATCAGATAAAGCCTCTATTTTGGTTTTAGGATCGGGCCCAATCCGAATTGGACAGGGAGTTGAATTTGATTATGCAACGGTTCATTCTGTTAAAGCCATCAGAGAGTCTGGTTTTGAAGCGATTATCATGAACTCTAATCCAGAGACGGTCTCAACGGATTTCTCTATTTCAGATAAGCTTTACTTTGAACCTTTGACTTTTGAAGATGTTATGAATGTTATTGACTTAGAAAAACCTGAAGGGGTCATCTTACAATTCGGTGGTCAGACTGCTATTAATCTAGCAAAAGATTTAAACAAGGCAGGGGTTAAAATACTAGGCACACAATTAGAAGATTTGGATCGTGCTGAAAATAGAAAACAATTTGAAGCCACTTTACAAGCTCTAAATATCCCTCAACCACCAGGTTTTACCGCCACTACGGAGGAAGAGGCAGTTAATGCAGCGCAAAAGATTGGTTATCCCGTGTTGGTTAGACCATCATATGTTCTTGGTGGACGAGCTATGAAGATAGTTGAAAACGAAGAAGATTTACGTCATTATATGACAACCGCGGTAAAGGCAAGCCCAGATCATCCAGTGCTTATAGATGCATACCTTATAGGTAAAGAGTGTGAGGTTGATGCTATATCCGATGGTCAGAATATACTGATTCCTGGAATAATGGAACATATAGAGCGATCTGGTGTTCATTCAGGAGATTCCATGGCTGTATATCCTCCTCAAACATTGTCTGAGACCATTATCGAAACTATTGTAGATTATACAAAACGCTTAGCAATTGGATTAAACTGTATCGGTATGATGAATATTCAGTTTGTAATCAAGGATCAGAAAGTATATGTTATTGAAGTTAATCCTCGTGCTAGTAGAACACTTCCATTCTTATCAAAAGTAACTCACATTCCTATGGCCCAAGTAGCAACAAAAGTTATCTTAGGAGATAAACTCTGCAATTTTACATATGGTTATGATCTCTATCCAGCTTCAGATATGGTCCACATTAAAGCCCCTGTCTTTAGTTTTACCAAACTTGCTAAAGTAGATAGTTTATTAGGTCCTGAAATGAAATCAACAGGCGAAGTGATGGGATCAGATATTAATCTTCAGAAAGCCTTGTATAAAGCCTTTGAAGCAGCATATCTCCATATGCCAGACTATGGTAACATTGTTTTTACAGTAGATGATACAGATAAAGAAGAAGCTTTAGAACTTGCAAAAGTCTATCAAAGTATTGGTTATCGTATTTATGCTACCCAAGGGACTGCAATTTATTTTGATGCTAATGGTTTAGAGACAGTTTTAGTAGGTAAGTTAGGAGAGAACGATCGAAATCATATTCCTGATTTAATTAAAAATGGTAAGATTCAAGCAGTTATCAACACAGTTGGACAAAATAACATTGATAACCATGATGCTCTCATCATCAGACGTTCTGCAATTGAACAAGGAGTTCCTCTATTTACATCTTTAGATACTGCACATGCAATGTTCAAAGTTCTTGAAAGCAGAGCATTTACATTAAAAGTACTAGATTAA

SEQ ID NO: 1962 - protein, 1060 aa, Streptococcus agalactiae
MPKRTDIRKIMVIGSGPIVIGQAAEFDYSGTQACLSLKEEGYQVVLVNSNPATIMTDKDIADKVYIEPITLEFVTRILRKERPDALLPTLGGQTGLNMAMALSKNGILEELNVELLGTKLSAIDKAEDRDLFKQLMEELNQPIPESEIVNSVEEAIQFAEQIGYPLIVRPAFTLGGTGGGMCDNQEQLVDITTKGLKLSPVTQCLIERSIAGFKEIEYEVMRDAADNALVVCNMENFDPVGIHTGDSIVFAPAQTLSDVENQLLRDASLDIIRALKIEGGCNVQLALDPNSFKYYVIEVNPRVSRSSALASKATGYPIAKLAAKIAVGLTLDEVINPITKTTYAMFEPALDYVVAKMPRFPFDKFESGDRKLGTQMKATGEVMAIGRNIEESLLKACRSLEIGVDHIKIADLDNVSDDVLLEKIRKAEDDRLFYLAEALRRHYSIEKLASLTSIDSFFLDKLRVIVELEDLLSKNRLDINILKKVKNKGFSDKAIASLWQINEDQVRNMRKEAGILPVYKMVDTCASEFDSATPYFYSTYAVENESLISDKASILVLGSGPIRIGQGVEFDYATVHSVKAIRESGFEAIIMNSNPETVSTDFSISDKLYFEPLTFEDVMNVIDLEKPEGVILQFGGQTAINLAKDLNKAGVKILGTQLEDLDRAENRKQFEATLQALNIPQPPGFTATTEEEAVNAAQKIGYPVLVRPSYVLGGRAMKIVENEEDLRHYMTTAVKASPDHPVLIDAYLIGKECEVDAISDGQNILIPGIMEHIERSGVHSGDSMAVYPPQTLSETIIETIVDYTKRLAIGLNCIGMMNIQFVIKDQKVYVIEVNPRASRTLPFLSKVTHIPMAQVATKVILGDKLCNFTYGYDLYPASDMVHIKAPVFSFTKLAKVDSLLGPEMKSTGEVMGSDINLQKALYKAFEAAYLHMPDYGNIVFTVDDTDKEEALELAKVYQSIGYRIYATQGTAIYFDANGLETVLVGKLGENDRNHIPDLIKNGKIQAVINTVGQNNIDNHDALIIRRSAIEQGVPLFTSLDTAHAMFKVLESRAFTLKVLD

SEQ ID NO: 1963 - protein, 1077 aa, Streptococcus agalactiae
ATGAAGCGTCTATTATTACTGGAAGATGGTAGTGTGTTTGAGGGTGAGGCTTTCGGAGCGGATGTAGAAACAAGTGGTGAAATCGTTTTTAGTACAGGAATGACAGGGTATCAAGAATCTATAACAGATCAATCTTACAACGGTCAAATTATTACTTTTACTTATCCTCTTATTGGAAATTATGGGATAAATCGAGACGATTACGAATCTATTAGACCAACATGTAAGGGAGTAGTTATTTATGAATGGGCAGAGTATCCAAGTAACTGGCGTCAACAGATGACACTTGATGAATTTTTAAAATTAAAAGGAATACCTGGAATTTCAGGTATAGATACTCGAGCATTAACAAAAATTATTCGAAAACATGGAACAATGAAAGCTTGTTTAATAAACGAGGGAAATTCTATTCATGAAGCACTAGAAAACCTTCAAAAAAGTGTTCTTTTAAATGATCAAATTGAACAAGTATCAACCAAATTAGCTTATGCTTCGCCTGGAGTTGGCAAAAATATTGTATTAGTTGACTTTGGTTTAAAACATTCTATTCTAAGAGAACTGTCACAACGTCAATGTCATATTACAGTCGTTCCTCATACTACGACAGCGCAAGAAATCTTAAATCTCAATCCAGATGGAGTACTCTTATCTAACGGCCCTGGGAACCCAGAACAATTACCGAATGCTTTACAAATGATCCAAGAAATTCAAGGTAAAATTCCAATTTTTGGTATTTGTATGGGACATCAACTATTTGCTAAAGCTAATGGTGCAAAGACTTATAAAATGACTTTTGGTCATCGAGGTTTTAATCATGCTGTTCGTCATTTGCAAACAGGACAGGTTGATTTTACAAGTCAAAATCATGGTTATGCTGTCTCGAGAGAAGATTTCCCTGAGGCTCTCTTCATTACACATGAAGAGATTAATGATAAAACTGTCGAAGGTGTTCGACATAAATACTATCCTGCCTTTTCAGTGCAGTTTCACCCAGATGCAGCACCAGGGCCGCATGATACATCTTATCTTTTTGATGAATTTATTAATATGATTGATGATTTCCAGCAAAAAAGCTAG

SEQ ID NO: 1964 - protein, 358 aa, Streptococcus agalactiae
MKRLLLLEDGSVFEGEAFGADVETSGEIVFSTGMTGYQESITDQSYNGQIITFTYPLIGNYGINRDDYESIRPTCKGVVIYEWAEYPSNWRQQMTLDEFLKLKGIPGISGIDTRALTKIIRKHGTMKACLINEGNSIHEALENLQKSVLLNDQIEQVSTKLAYASPGVGKNIVLVDFGLKHSILRELSQRQCHITVVPHTTTAQEILNLNPDGVLLSNGPGNPEQLPNALQMIQEIQGKIPIFGICMGHQLFAKANGAKTYKMTFGHRGFNHAVRHLQTGQVDFTSQNHGYAVSREDFPEALFITHEEINDKTVEGVRHKYYPAFSVQFHPDAAPGPHDTSYLFDEFINMIDDFQQKS

SEQ ID NO: 1965 - protein, 924 aa, Streptococcus agalactiae
ATGAATCATCAAACACAAACACTTTCATTAGAACATTTTGTCAGTTTAGAAGAATTATCAAATCAAGAAGTTATGTCTTTGATAAAGAGAAGTATCGAAGTTAAAGAAAATCCTAGCAACATTGGTTTTGATAAAGATTACTATGTGTCAAATCTCTTTTTTGAGAATTCAACAAGAACACATAAGTCATTTGAAATGGCAGAACTCAAATTAGGATTAAAAACAATTGAATTTAATGCTGATACAAGTTCTGTTAATAAAGGAGAAACCCTTTATGACACTATCTTAACAATGAGTGCTCTAGGATTGGACGTTTGTGTCATTAGGCATCCTGATATTGACTATTATAAAGAATTGATTGCTAGTCCGAACATTCATTCAGCTATTGTCAATGGGGGTGATGGCTCAGGCCAACATCCAAGCCAATCACTTTTGGATTTGGTAACTATTTACGAAGAATTTGGATACTTCAAAGGGCTAAAAATTGCGATTGTAGGAGATTTAACTCACTCACGGGTAGCTAAATCTAACATGCAAGTGCTAAAACGATTAGGAGCTGAAATTTTCTTTTCTGGACCCAAAGAATGGTATAGTAGTCAATTCGATGAATATGGGCAATATTTACCAATAGATCAGTTAGTTGATCAAATTGATGTCCTTATGCTTTTACGTGTTCAACACGAACGTCATGATGGTAAAGGGGTGTTTTCAAAAGAAAGCTATCATCAACAATTTGGTCTTACAAAAGAACGCTATAAACATTTAAGGGATACAGCAATTATTATGCACCCAGCACCCGTCAATAGGGATGTAGAGATTGCTAGCGATTTGGTAGAAGCAGATAAGGCTCGAATAGTGAAACAGATGAGTAATGGCGTCTATGCAAGGATAGCTATCTTAGAAGCAGTGCTCAATAGCAGATAA

SEQ ID NO: 1966 - protein, 307 aa, Streptococcus agalactiae
MNHQTQTLSLEHFVSLEELSNQEVMSLIKRSIEVKENPSNIGFDKDYYVSNLFFENSTRTHKSFEMAELKLGLKTIEFNADTSSVNKGETLYDTILTMSALGLDVCVIRHPDIDYYKELIASPNIHSAIVNGGDGSGQHPSQSLLDLVTIYEEFGYFKGLKIAIVGDLTHSRVAKSNMQVLKRLGAEIFFSGPKEWYSSQFDEYGQYLPIDQLVDQIDVLMLLRVQHERHDGKGVFSKESYHQQFGLTKERYKHLRDTAIIMHPAPVNRDVEIASDLVEADKARIVKQMSNGVYARIAILEAVLNSR

SEQ ID NO: 1967 - protein, 1293 aa, Streptococcus agalactiae
ATGTATATCATTAAAAACGGATTGATTATCGACCCTCAAAGTGGTTTTAATCAAGTATCAGACATGCTGATTGATCAAGGAAAAATTAAACAAATATCGAAAGAAATTGATATTAAAGGCATTCCAATCATTGATGCAAGCAATAAAATTGTAGCTCCAGGATTAGTCGATATTCATGTACATTTTCGTGAGCCTGGACAGACACATAAAGAAAATATCCATACAGGGGCCCTATCAGCTGCAGTAGGTGGTTTTACGACAGTTCTTATGATGGCCAATACTAACCCAACGATTTCTAGCCCAGAAATTGTAAAACAAGTTAAGGAGAGTGCAGCAAAAGAAGCAATTAAGATTGAAACAGTTGCTACAATTACTAAATCTCTGAATGGTAAAGATTTAGTTAATTTCGAAGAACTATTAGAGGCTGGAGTTGCTGGATTCTCAGACGATGGTATTCCTTTGACAGATACTAAGGTTTTGCAAGAAGCTATGAACTTAGCTAGAAAACATGATGTTGTCCTATCGTTACATGAAGAAGATCCATCGTTAAATGGTGTCCTTGGTATCAACGAACATATTGCTCAGAAAATTTATCATGTCTGTGGAGCTAGTGGTCTTGCTGAATATTCAATGATTGCGCGAGATGCTATGATTGCTTACCAAACACAGGCGAAAGTCCATATCCAGCATTTGTCAAGTTCAGAATCAGTAGAAGTAGTTGATTTTGCGCAGAAGCTTGGTGCTAACTTAACAGCAGAAGTAACCCCCCAACATTTTTCAAAGACAGAGAACTTACTTTTAACTAAGGGTGCTAATGCAAAATTAAACCCACCACTGCGACTTGAAAAGGATAGACAAGCCCTCATTGATGGACTTAAAAGTGGTGTTATTTCAATTATTGCAAGTGACCACGCTCCCCATCATATTATGGAGAAAGCAGCAGATAATATTAGTCAAGCGCCCTCTGGTATGACTGGCTTAGAGACATCATTAGCCTTAGGGATTACTTATTTAGTATCTACTAAAGAACTCTCAATGATTGACTTTTTGGCAAAAATGACATGTAATCCTGCACAGTTATATGGATTTGATGCAGGTTATCTCAGAGAAGGTGGACCTGCAGATATCGTTATTTTTGATCAAGCTGAAGAGAGAATAATAAAGGCAGAATTTGCCTCCAAATCCAGCAACTCTCCTTTTATCGGTGATAAATTGAAGGGAGTTATTCACTACACAATTTGCAATGGTGAAATAGTCTATCAAAAAGATAGCCACGCAGCGACATTGGTATAG

SEQ ID NO: 1968 - protein, 430 aa, Streptococcus agalactiae
MYIIKNGLIIDPQSGFNQVSDMLIDQGKIKQISKEIDIKGIPIIDASNKIVAPGLVDIHVHFREPGQTHKENIHTGALSAAVGGFTTVLMMANTNPTISSPEIVKQVKESAAKEAIKIETVATITKSLNGKDLVNFEELLEAGVAGFSDDGIPLTDTKVLQEAMNLARKHDVVLSLHEEDPSLNGVLGINEHIAQKIYHVCGASGLAEYSMIARDAMIAYQTQAKVHIQHLSSSESVEVVDFAQKLGANLTAEVTPQHFSKTENLLLTKGANAKLNPPLRLEKDRQALIDGLKSGVISIIASDHAPHHIMEKAADNISQAPSGMTGLETSLALGITYLVSTKELSMIDFLAKMTCNPAQLYGFDAGYLREGGPADIVIFDQAEERIIKAEFASKSSNSPFIGDKLKGVIHYTICNGEIVYQKDSHAATLV

SEQ ID NO: 1969 - protein, 630 aa, Streptococcus agalactiae
ATGGATTTAGCAAGACAGATTGCCATGGAACTATTAGATATTCAAGCTGTTTACTTAAGACCCCAACAACCCTTTACTTGGGCTTCGGGGGTCAAATCGCCAATTTACACTGATAATCGTGTAACCTTATCGTATCCTGAGACAAGGACACTGATTGAAAATGGTTTTGTTAAACAAATACAGAAACATTTCCCAAACGTTGATATCATAGCAGGGACAGCGACTGCAGGCATACCACATGGCGCTATTATAGCTGATAAGATGAACTTGCCCTTTGCCTATATACGATCGAAGGCAAAGGATCATGGTGTGGGGAATCAAATCGAGGGACGTGTTTACTCAGGCCAAAAAATGGTTATCATTGAAGATTTGATTTCAACAGGAGGATCTGTTTTAGAGGCTGTTACGGCTGCGCAGAGTCAAGGTATTGAGGTTTTAGGGGTAGTAGTGATATTTACATATCAATTAGCTAAGGCTGAACAAGCATTTCGTGAAGCTGATATTCCTTTGGTGACTTTGACGGATTACAATCAATTAATTAAAGTTGCTAAAGTTAATGGATATATTACAGCTGACCAACTGGTATTACTGAAAAAATTTAAAGAAGATCAAATGAATTGGCAAAGTTAG

SEQ ID NO: 1970 - protein, 209 aa, Streptococcus agalactiae
MDLARQIAMELLDIQAVYLRPQQPFTWASGVKSPIYTDNRVTLSYPETRTLIENGFVKQIQKHFPNVDIIAGTATAGIPHGAIIADKMNLPFAYIRSKAKDHGVGNQIEGRVYSGQKMVIIEDLISTGGSVLEAVTAAQSQGIEVLGVVVIFTYQLAKAEQAFREADIPLVTLTDYNQLIKVAKVNGYITADQLVLLKKFKEDQMNWQS

SEQ ID NO: 1971 - DNA, 702 bp, Streptococcus agalactiae
atgttagaaaaatgccctatcattgccttagatttttctgatttggcttctgtaacaacttttttagaacattttccaaaagaagaattgctttttgtcaaaataggaatggagctttattattccgaaggtccctcaattattagatatattaaatccttaggacatcgcatttttttggatttaaaattacatgatatccctaatacagttcgatcatctatgtctgtcttagccaaattaggcattgatatgactaatgtgcatgctgcaggaggagtcgaaatgatgaaagcagctagagaaggtttgggggagggtccaatactattagcagtgacacaattaacctcgacttcacaagaacaaatgcaggtggatcaacatattaacttaagtgtagttgattcggtttgccattatgctcaaaaagctcaagaagcaggcttagatggagtagtcgcatcggctcaagaggtaaagcaaatcaagaaacagactaacgaacatttcatttgcttaacgcctggtatcagacctccacaaaccaatcagttagatgatcaaaaaagaacgatgactcctgagcaagcacgtatagttggggctgattatatcgttgtgggaagacctataacgaaagcagaaaatccatatcaagcatatctagagataaaagaagaatggaatcgtattaaataa

SEQ ID NO: 1972 - protein, 233 aa, Streptococcus agalactiae
MLEKCPIIALDFSDLASVTTFLEHFPKEELLFVKIGMELYYSEGPSIIRYIKSLGHRIFLDLKLHDIPNTVRSSMSVLAKLGIDMTNVHAAGGVEMMKAAREGLGEGPILLAVTQLTSTSQEQMQVDQHINLSVVDSVCHYAQKAQEAGLDGVVASAQEVKQIKKQTNEHFICLTPGIRPPQTNQLDDQKRTMTPEQARIVGADYIVVGRPITKAENPYQAYLEIKEEWNRIK

SEQ ID NO: 1973 - DNA, 1221 bp, Streptococcus agalactiae
atgagcgttgttcttagagcaggtaaattactgattgaaagcggagcagaagtctatcgtgtcgaagacacaatgaagcattttgctaaggctcttcagatagaaaattttgaagcttatgtggttagtagcagtattatcgcttccgggattaaccgctatggtaaacaagaagctaaagtatgcaatacagatggtgtaacagcaaatttaggtagacttgaagctgttaataacctttctaggcaaattgctaaacaagacttagtatctccagaagaaattgtaaagcagttagacttaattgaacatcaaaaagattatagtttacttgttactttaatttcttatttttgtggagcgggtagtttttctttagccttaggtagttccttattagattcattttccgctgctgtaacaggcttaattttaggatattttctgaatttgatggaaagtcgtatacatacaggatttcttttgaccattctaggtagttctgtagtggctttaagtgctaatttattatatttttcaggattaggtgagcatcgtagcattattatattaggggcactaatggttatggtgccaggggctgcctttgttaattcggtgagagaattttcacagaataatttttcaacaggtttagctttgattatgtctgctttactcatttgtatttctatatcagcaggtgtggctattacaattgaaattattccgtttgcagaacaaatgacaggttctttttctggtgttcctaataccatccttgagattatcatcagaacactaatggccggtttagggacgatagccttctctattctctaccatgttccaaaacgttatttccttgacttaggtatactaggagcaatatcttggatgctctacctgatcttatggcaacaatttcacatggatgctatagccgtattttttccagggcttttcatcacttatttttcacggctattagctgctaaacgtaagtgtcctgccactgtctttttagcgacaagtatgtttcctcttattccaggacttagcttctatagagctgtttactttttattgacgggagcagatgccgtagcaatggaatattttagatcctgttttgtaacagcttttacaattgctatagcaatcagtattgtacagcagattcctctatcgttctttattagacgtaaaatgataaaataa

SEQ ID NO: 1974 - protein, 406 aa, Streptococcus agalactiae
MSVVLRAGKLLIESGAEVYRVEDTMKHFAKALQIENFEAYVVSSSIIASGINRYGKQEAKVCNTDGVTANLGRLEAVNNLSRQIAKQDLVSPEEIVKQLDLIEHQKDYSLLVTLISYFCGAGSFSLALGSSLLDSFSAAVTGLILGYFLNLMESRIHTGFLLTILGSSVVALSANLLYFSGLGEHRSIIILGALMVMVPGAAFVNSVREFSQNNFSTGLALIMSALLICISISAGVAITIEIIPFAEQMTGSFSGVPNTILEIIIRTLMAGLGTIAFSILYHVPKRYFLDLGILGAISWMLYLILWQQFHMDAIAVFFPGLFITYFSRLLAAKRKCPATVFLATSMFPLIPGLSFYRAVYFLLTGADAVAMEYFRSCFVTAFTIAIAISIVQQIPLSFFIRRKMIK

SEQ ID NO: 1975 - DNA, 1542 bp, Streptococcus agalactiae
atgagtattttagaagtaaaaaacttaagtcacggttttggtgatcgtgctatttttgagaatgtttcttttcgccttttaaaaggtgaacatataggacttattggtgctaatggtgaaggaaaatcaacattcatgtcaattgtcacaggtcatcttcaacctgatgaaggaaaaattgaatggtcaaaatatgtaactgctggttaccttgatcaacatactgtattagaagaaggtcaaacagttcgtgatgttttgcgaacagcatttgatgaactttttaaaacagaggcacgtatcaatgatatatatatatccatggcagatgatggcgcagatgtagatagccttatggaagaagttggagaactacaagatcgtttagaatcacgtgatttttatacacttgatgctaaaattgatgaagttgcacgggcattaggagttatggattttggtatggattctgaagttactgaattatctggtggtcaaaggacaaaggttcttttagcaaaactgttattagaaaagccagacatcctcctgcttgatgagcctacaaactaccttgatgctgaacacattgattggttaaaacgctatttacaaaattatgaaaatgcttttgttttaatctcacacgatattccatttttgaacgatgttatcaatattgtctatcatgttgaaaatcaagatttagtaagatattccggtgattatactaattttgaatcagtctatgcaatgaaaaaggctcaattagaagcagcctatgaacgtcaacaaaaggaaatagctgatttacaagattttgttaatcgtaataaagcacgcgtcgcaacacgtaatatggcaatgtctcgtcaaaagaaactagacaaaatggatattattgagttacaagcagagaaaccaaagccaagtttcgaatttaaagaatctcgcacaccaggacgttttattttccaagctaaagatcttcaaattggatatgatcgtgctttaacaaaacctctaaacctaacatttgaacgtaatcaaaaaatagctattgttggagcaaatgggataggaaaaacaacattacttaagagtttactaggtattatcccccctatttctggtaatgttgaacgaggtgattttattgatttaggttattttgaacaagaagtacccggaggaaatcgccaaactccactcgaagcagtatgggatgcttttcctgctttgaaccaagcagaggttagggcagctcttgctcgttgtggtttaacttcaaagcatattgaaagtcagattcaggtgttatctggtggggagcaatcaaaggtcagattttgcttattaatgaatcgcgaaaataatgtccttgtacttgacgaaccaaccaatcatttagatgtagatgctaaagatgagttaaaacgtgctttaaaagcttataagggatcaatcttgatggtatgtcatgaaccggacttttatgaaggatggatggatgatgtttgggactttaaccaacttagttaa

SEQ ID NO: 1976 - protein, 513 aa, Streptococcus agalactiae
MSILEVKNLSHGFGDRAIFENVSFRLLKGEHIGLIGANGEGKSTFMSIVTGHLQPDEGKIEWSKYVTAGYLDQHTVLEEGQTVRDVLRTAFDELFKTEARINDIYISMADDGADVDSLMEEVGELQDRLESRDFYTLDAKIDEVARALGVMDFGMDSEVTELSGGQRTKVLLAKLLLEKPDILLLDEPTNYLDAEHIDWLKRYLQNYENAFVLISHDIPFLNDVINIVYHVENQDLVRYSGDYTNFESVYAMKKAQLEAAYERQQKEIADLQDFVNRNKARVATRNMAMSRQKKLDKMDIIELQAEKPKPSFEFKESRTPGRFIFQAKDLQIGYDRALTKPLNLTFERNQKIAIVGANGIGKTTLLKSLLGIIPPISGNVERGDFIDLGYFEQEVPGGNRQTPLEAVWDAFPALNQAEVRAALARCGLTSKHIESQIQVLSGGEQSKVRFCLLMNRENNVLVLDEPTNHLDVDAKDELKRALKAYKGSILMVCHEPDFYEGWMDDVWDFNQLS

SEQ ID NO: 1977 - DNA, 339 bp, Streptococcus agalactiae
atgcaaatcatcaaacgtgatggacagattgttgaatttgatcctgaaaaaatctaccaagctatcttgaaagctgctcaaacagtttatgtgcttgatgagtcacttcgtcaagaccttgctcaagtgactaaaaaagtaatcttagatttagaggatgctcaggttgaacgaccaacgatcaatatgattcagtctttggttgaaaatcgtttattggatgcaggatacattcatactgctgaacactatatttcataccgtttgcaacgtgatttagagcgaaatggctatgatgatcaaatcactgttcatttacactttgaaaaaattaagtaa

SEQ ID NO: 1978 - protein, 112 aa, Streptococcus agalactiae
MQIIKRDGQIVEFDPEKIYQAILKAAQTVYVLDESLRQDLAQVTKKVILDLEDAQVERPTINMIQSLVENRLLDAGYIHTAEHYISYRLQRDLERNGYDDQITVHLHFEKIK

SEQ ID NO: 1979 - DNA, 144 bp, Streptococcus agalactiae
atgttaactaataattctagaacaatttcagtgataaataaattacctaaaacaggtgatgatcaaaatgtcatttttaaacttgtaggttttggtttaattttgttaacaagtcgctgcggtttgagacgcaatgaaaattaa

SEQ ID NO: 1980 - protein, 47 aa, Streptococcus agalactiae
MLTNNSRTISVINKLPKTGDDQNVIFKLVGFGLILLTSRCGLRRNEN

SEQ ID NO: 1981 - protein, 1596 aa, Streptococcus agalactiae
TTGATTTGGAGGGGGGAAAAACTTATCAGTAATAAAGTCAAAATTGTTCGTTTACTTAATAAGAGTAAGAAAAGTTTACTAAGGGGTATATTTAGTCGAACAACCGTTATCGCTATTTTATTGATTTTACAATTATTGTTTTTACTAGCCTCTTACTCATGGCTAGAGCAGTATCGTGTTTGGTTAGCAACCGTTGAGCATATCTTAACAATTGGAGCGGTCTTATATTTAGTTAATAGTGAAATGGATGCTTTGTCCCGAGTAACTTGGTTAATATTGGTAATGATTGCCCCTTTACTAGGGGCGATGTTCCTAATGTACACCAAATTTGACTGGGGTTATCGTGGTTTGAAACAAAGATTGGAGACATTGATTGATGAGAGTCAGATTTATCTAGAGGATGATCCTGAAACTTTGAATCAGCTTAAGTCAAGTACATCCACAACATATCATTTGGTTCAATATTTTGAAAAAGCACATGGAAATTTCCCAGTTTATCGAAATACTGATGTGACATTTCTACCAACGGGAGAAGCATTCTTTGAAAAAATGAAAGAAGAACTACTAAAAGCTAAAAAGTATATCTTTTTAGAATTCTTTATCATTGACGAAGGAATAATGTGGGGAGAAATACTTAGTATTTTAGAACAAAAGGTGGAAGAAGGTGTTGAAGTCCGTATCTTATATGATGGTATGATAGAAATTACAAAATTATCCTTTGATTATACGAAACGACTTGAGAAAATAGGAATAAAAGCAAAAGCATTTTCTCCGATTTCTCCTTTTATTTCAACTTATTATAACTATCGTGACCATCGAAAAATTGTTGTTATTGATGGAGTAGTAGGCATGACTGGTGGTGTAAACTTAGCCGATGAGTATATTAATCACATTGAGTTATTTGGGCATTGGAAAGATTCAGGTATTATGTTAAAGGGGAAAGCAGTGGATAGTTTCCTCCTACTTTTCTTACAGATGTGGTCCATTACTGAGGAAAAAATGTTAGTAGCGCCTTACCTCGGTGTACACGATGATTTAGTTGAAAATGAAGGCTATGTTATTCCTTATGGAGATTCTCCTTTAGACACTGATAAAGTAGGGGAAAATGTTTATATAGATATTCTTAATCATGCTAGAGAATATGTTTACATCATGACACCTTATTTAATATTAGACAGTGAATTGGAACATGCCATTCAGTTTGCTGCGGAACGTGGTGTAGATGTACGTATTATTATGCCGGGTATCCCAGATAAGCCAATCCCTTATGCTCTTGCTAAAACTTACTATCAAGCTTTAACAAAATCAGGTGTTAAAATATATGAATACACCCTTGGATTTGTTCATTCAAAAATATTCCTTAGTGATAATACAAAGGCTGTTGTAGGTACGATAAATCTTGATTACCGTAGCCTGTATCACCATTTTGAATGTGCTGTTTATCTTTATAAGGTAGATGCAATCCAAGACATTTATCGAGATTATATGGATACATTAAATAAATCAAGGTTAGTTAGCTTGAAAGATATAAATAATATTCCAAAATTCCAAAAAGTAATTGGCATAGTGACAAAAACTATTGCTCCCCTGCTTTAG

SEQ ID NO: 1982 - protein, 531 aa, Streptococcus agalactiae
MIWRGEKLISNKVKIVRLLNKSKKSLLRGIFSRTTVIAILLILQLLFLLASYSWLEQYRVWLATVEHILTIGAVLYLVNSEMDALSRVTWLILVMIAPLLGAMFLMYTKFDWGYRGLKQRLETLIDESQIYLEDDPETLNQLKSSTSTTYHLVQYFEKAHGNFPVYRNTDVTFLPTGEAFFEKMKEELLKAKKYIFLEFFIIDEGIMWGEILSILEQKVEEGVEVRILYDGMIEITKLSFDYTKRLEKIGIKAKAFSPISPFISTYYNYRDHRKIVVIDGVVGMTGGVNLADEYINHIELFGHWKDSGIMLKGKAVDSFLLLFLQMWSITEEKMLVAPYLGVHDDLVENEGYVIPYGDSPLDTDKVGENVYIDILNHAREYVYIMTPYLILDSELEHAIQFAAERGVDVRIIMPGIPDKPIPYALAKTYYQALTKSGVKIYEYTLGFVHSKIFLSDNTKAVVGTINLDYRSLYHHFECAVYLYKVDAIQDIYRDYMDTLNKSRLVSLKDINNIPKFQKVIGIVTKTIAPLL

SEQ ID NO: 1983 - protein, 1671 aa, Streptococcus agalactiae
ATGAAAACAGATATTGAAATAGCGCAAAGCGTCGCCCTAAAGCCTATTGCTGAGATTGTTGAGCAAGTAGGAATTGGTTTTGATGATATAGAATTGTATGGTAAATACAAAGCAAAATTATCTTTTGATAAGATTGAAGCTGTAAGATCTCAAAAAGTAGGAAAGTTAATTTTAGTAACTGCTATTAATCCGACACCAGCAGGTGAGGGAAAATCCACTATGAGCATTGGATTAGCTGATGCTTTAAATAAAATTGGTAAAAAAACGATGATTGCGCTTCGCGAACCTTCTTTAGGTCCTGTAATGGGTATTAAAGGAGGAGCTGCTGGAGGTGGATACGCACAAGTACTACCAATGGAAGATATTAATTTGCATTTTACTGGTGATATGCACGCAATCACAACTGCTAATAATGCTTTATCAGCTCTACTTGATAATCATATTCATCAAGGCAATGAATTAGATATTGACCAACGTCGAGTGATTTGGAAGCGTGTAGTTGATCTTAACGATCGTGCTCTTCGTCAGGTGATCGTTGGCTTAGGAAGCCCTGTCAATGGGATACCACGTGAAGATGGCTTTGATATTACTGTTGCTTCTGAAATAATGGCTATTCTATGTTTAGCTACTGACCTATCAGATTTAAAGAAACGCCTGTCAAATATTGTTGTGGCTTACTCAAGGGACCGTAAACCAATCTATGTTAAAGATTTGAAGATTGAAGGAGCTCTCACACTTATCCTAAAAGATGCTATCAAACCTAATTTGGTTCAAACCATTTATGGGACACCGGCTCTTGTCCATGGGGGACCATTTGCTAATATTGCACATGGATGTAATTCTGTCTTAGCGACTTCAACAGCTCTACGCTTAGCAGATTACGTTGTTACTGAAGCTGGTTTTGGAGCAGACTTGGGCGCTGAAAAGTTTCTTGATATAAAAACGCCAAACCTTCCGACTTCTCCCGATGCGATTGTTATTGTTGCTACATTGCGTGCATTGAAAATGCATGGAGGTGTTTCAAAAGAAGATCTTTCACAAGAGAACGTCAAAGCAGTTAAAAGAGGTTTTACAAATCTCGAGCGTCACGTTAACAATATGCGTCAATATGGTGTTCCGGTAGTTGTAGCTATCAATCAGTTTACTGCAGATACAGAAAGTGAAATTGCAACTCTTAAAACCTTATGTAGTAATATTGATGTGGCAGTTGAATTAGCAAGTGTGTGGGAAGATGGAGCAGACGGTGGCCTTGAACTTGCACAGACTGTTGCTAATGTGATTGAAACACAATCATCCAATTACAAACGCTTATATAATGATGAAGACACTATTGAAGAAAAAATTAAAAAAATTGTTACTAAAATATATGGTGGTAATAAAGTTCATTTTGGACCTAAGGCACAAATACAATTAAAAGAGTTTAGTGACAATGGCTGGGACAAGATGCCTATTTGTATGGCAAAGACACAATATAGCTTTTCTGATAATCCAAATTTACTTGGTGCTCCAACTGACTTTGATATAACTGTTCGTGAATTTGTTCCAAAAACAGGAGCTGGTTTTATAGTTGCTCTTACTGGAGACGTATTGACAATGCCTGGTTTACCTAAAAAACCTGCAGCTCTCAATATGGATGTTTTAGAAGACGGTACAGCCATTGGATTATTTTAA

SEQ ID NO: 1984 - protein, 556 aa, Streptococcus agalactiae
MKTDIEIAQSVALKPIAEIVEQVGIGFDDIELYGKYKAKLSFDKIEAVRSQKVGKLILVTAINPTPAGEGKSTMSIGLADALNKIGKKTMIALREPSLGPVMGIKGGAAGGGYAQVLPMEDINLHFTGDMHAITTANNALSALLDNHIHQGNELDIDQRRVIWKRVVDLNDRALRQVIVGLGSPVNGIPREDGFDITVASEIMAILCLATDLSDLKKRLSNIVVAYSRDRKPIYVKDLKIEGALTLILKDAIKPNLVQTIYGTPALVHGGPFANIAHGCNSVLATSTALRLADYVVTEAGFGADLGAEKFLDIKTPNLPTSPDAIVIVATLRALKMHGGVSKEDLSQENVKAVKRGFTNLERHVNNMRQYGVPVVVAINQFTADTESEIATLKTLCSNIDVAVELASVWEDGADGGLELAQTVANVIETQSSNYKRLYNDEDTIEEKIKKIVTKIYGGNKVHFGPKAQIQLKEFSDNGWDKMPICMAKTQYSFSDNPNLLGAPTDFDITVREFVPKTGAGFIVALTGDVLTMPGLPKKPAALNMDVLEDGTAIGLF

SEQ ID NO: 1985 - protein, 1020 aa, Streptococcus agalactiae
ATGTATCTTATTGAACCAATTAGAAATGGTAAGCGTATCACAGACGGTGCGATTGCACTTGCCATGCAAGTTTATATTTTACAAAATGTTTTTTTAGATGATGATATTTTATTTCCATACTATTGTGATCCTAAAGTTGAAATCGGAAAATTTCAGAATGCAGTTATAGAGACTAATCAAGAATATTTGAAAGAACATGATATTCCTGTTGTTCGTCGAGATACTGGTGGAGGGGCTGTTTACGTTGACTCAGGTGCTGTAAATATTTGCTATCTAATGAAAGATCATGGACAATTTGGTGATTTCAAACGCGCTTATGAGCCAGCTATTAAGGCCCTAAAAACTTTAGGTGCTTCTAGTGTTGAAATGAGGGGACGAAATGACTTAGTTATTGATGGTAAAAAAGTATCAGGTGCAGCAATGACGATAGTAAACGGTCGTATTTACGGTGGTTACTCTCTTTTATTAGATGTTGATTTTGATGCTATGGAAAAAGTGTTAAATCCTAATCGGAAAAAAATTGAATCTAAAGGGATAAAATCTGTCCGAAGTCGAGTAGGAGATATTCGTAGCCACTTGTCAGAAGATTATCGTCATATCACAACCGATCAATTTAAAGATTTAATGGTTTGTCAATTATTACATATTGATCATATTGATCAGGCAAAACGCTATCATCTAACCGAAAAAGATTGGGCTGCGATTGACGCTCTAGCTGATGAAAAATATAAGAATTGGGATTGGAATTATGGTAACTCACCACAGTATTCGTATCACAGAGATGCTCGTTTTCCGTCAGGAACTTACGATTTTCACTTAGAAATTGAGAAAGGTATTATTACGAATTGCCGTATTTATGGTGACTTTTTCAGTTCTAAAGATATTTCAGATATTGAAAACCTTCTCATTGGTTGCCCTATGAAAGAAGAATTAGTCTTGGAAAAATTAAGTACTGTATCACTAGAAGATTATTTTGGTCAGACTAGCCCAGAAGAAATAAAAGCAGTTTTATTTCCATAA

SEQ ID NO: 1986 - protein, 339 aa, Streptococcus agalactiae
MYLIEPIRNGKRITDGAIALAMQVYILQNVFLDDDILFPYYCDPKVEIGKFQNAVIETNQEYLKEHDIPVVRRDTGGGAVYVDSGAVNICYLMKDHGQFGDFKRAYEPAIKALKTLGASSVEMRGRNDLVIDGKKVSGAAMTIVNGRIYGGYSLLLDVDFDAMEKVLNPNRKKIESKGIKSVRSRVGDIRSHLSEDYRHITTDQFKDLMVCQLLHIDHIDQAKRYHLTEKDWAAIDALADEKYKNWDWNYGNSPQYSYHRDARFPSGTYDFHLEIEKGIITNCRIYGDFFSSKDISDIENLLIGCPMKEELVLEKLSTVSLEDYFGQTSPEEIKAVLFP

SEQ ID NO: 1987 - protein, 327 aa, Streptococcus agalactiae
ATGGAATGNNNNNTTAATAAACGTAACGAAGAAAAAGGTATGGTGGAAGATGCTGACTTTCATGCTCAACGACAACGTTATGAAAATTTCTTATCACAACATCAAAATGACAAAGTTCTTTATCTAGAGATTGGAGTTGGACATACCACGCCACAATTTATTAAGCATCCGTTTTGGCGATTCGTCTCTTTAAATGAAAACTCTTTATTTGTTACTCTTAATCACAAGCATTATCGCATTCCTCAAAAGATTCGCTCAAGGAGTGTGCAACTGACACAGCATATCGCTGAATTAATTGCTGAAGCGAAAAAAGAAATTATTGGATAA

SEQ ID NO: 1988 - protein, 108 aa, Streptococcus agalactiae
  VARIANT 3, 4, 5: Xaa = Any Amino Acid
MEXXXNKRNEEKGMVEDADFHAQRQRYENFLSQHQNDKVLYLEIGVGHTTPQFIKHPFWRFVSLNENSLFVTLNHKHYRIPQKIRSRSVQLTQHIAELIAEAKKEIIG

SEQ ID NO: 1989 - protein, 633 aa, Streptococcus agalactiae
ATGCCTAATCAAAAACAACTATTGCTAGCCATGATTGAGTATCTTCGGTCAGAAAAATTAACAGACGTTGATGACTTGAGGACCACCGATTTGCAAACGGTTTGGCGTGCTCTAGTTAATCAACAAGATCCTCAAAACATTAGTCAAGAGTACCTGTCTTTAGAAGATAGGTATTTGTCACATTGGTGGAATACTCAAAAAGTAAAAACGATAGACGTCTGTCATCAAACGGTATATTCAAATGTATTTACCTACCATGGGGATATTTGCTTATTACAAGTGGATGCTATTGTTAATGCAGCAAATGGTAAGTTGTTAGGTTGTTTTATTCCTAATCACCATTGTATTGACAATCATATTCATACGTTTGCAGGTTCACGATTACGTTTAGCATGTCATCAATTGATGACACAACAAGGACGAATGGAAGCCGTAGGACAAGCTAAACTTACCGAATCCTATCATCTTCCTTGTAAGTATGTTATTCATACAGTCGGACCTTACGTAAAAGTTGATCAAAAGCCATCTCGTATAAGAGAGGATTTATTAAAGTCTTCTTATAAATCCTGCTTACAGTTGGCAGTTCGAGCTAATCTTAAAACAATTGTCTTCCCNNNNNCATTCATTCATTAA

SEQ ID NO: 1990 - protein, 210 aa, Streptococcus agalactiae
  VARIANT 206, 207: Xaa = Any Amino Acid
MPNQKQLLLAMIEYLRSEKLTDVDDLRTTDLQTVWRALVNQQDPQNISQEYLSLEDRYLSHWWNTQKVKTIDVCHQTVYSNVFTYHGDICLLQVDAIVNAANGKLLGCFIPNHHCIDNHIHTFAGSRLRLACHQLMTQQGRMEAVGQAKLTESYHLPCKYVIHTVGPYVKVDQKPSRIREDLLKSSYKSCLQLAVRANLKTIVFPXXFIH

SEQ ID NO: 1991 - DNA, 333 bp, Streptococcus agalactiae
atgaaaaaaattgcgaactacttattaattgaaaaaaatgaagaacgttatactatcagcttaactcccgaacttcaagatgacttgggaactgttggatatgtagaattcacagatgatacaaatttagaagttgatgatgttattttaaatattgaagcttcaaagacggttatggcaattttatctcctcttacaggtaaagttgttaaagttaatacagctgcaagtcaagaaccaactttgttaaattctgaaaaagctgacgaaaattggttggttgtgttaacagacgttgattatgctgcttttgaagctttagaaaatgcctaa

SEQ ID NO: 1992 - protein, 110 aa, Streptococcus agalactiae
MKKIANYLLIEKNEERYTISLTPELQDDLGTVGYVEFTDDTNLEVDDVILNIEASKTVMAILSPLTGKVVKVNTAASQEPTLLNSEKADENWLVVLTDVDYAAFEALENA

SEQ ID NO: 1993 - DNA, 987 bp, Streptococcus agalactiae
atgaaattaagtgtccttgattatgggcttattgattatggaaaaactgcaagtgatgcaatacaagaaacgattcttttatcacaagaggcggagcgactaggatatcatcaattttgggtggctgaacatcacggtgttaaggcattcagtattagcaatccagaattaatgataatgcatttggctaaccagactaaatctatcaaaattggctctggaggtataatgcctctgcactatagtagttttaaactcgcggagactctcaagacattagagacatgtcatccgaatcgagtaagtattggtttaggaaattcactagggacagttaaagtttcaaatgcacttcgtagcttacataaagcacatgattacgaagaggtactggaggaattgaagtcatggcttattgatgaatcatccagtaaggaaccattagttcaaccgactctttctagcttcccagacttatatgtgttggggagtggtcaaaaatcagcttatttagcggctaaacttggcttaggctttaccttcggtgtttttccttttatggacaaagacccattgacagaagctaaaaagctttcatctctttattatcatcagtttgaagaatattatcctaataagtctcctaatttgatggtagctgcatttgtagttatagctgatacttcagaagaagctgaaaacatagcaaagactttagatatctggatgctaggaaataaagacttcaatgaatttgcaacatttcctactattgaagaagctaatcattaccaattgactcctgaacaaaaagcaaaaattaaatcaaatcgccaccgtatgattgtaggtgatccaaaacaagttaaagacagccttgacgctttagttaatgctagtcaagcagaagaactacttttgattcctcttgttccaggacttgatcaacgaatcaaatccttaaaattattatcacagttatattaa

SEQ ID NO: 1994 - protein, 328 aa, Streptococcus agalactiae
MKLSVLDYGLIDYGKTASDAIQETILLSQEAERLGYHQFWVAEHHGVKAFSISNPELMIMHLANQTKSIKIGSGGIMPLHYSSFKLAETLKTLETCHPNRVSIGLGNSLGTVKVSNALRSLHKAHDYEEVLEELKSWLIDESSSKEPLVQPTLSSFPDLYVLGSGQKSAYLAAKLGLGFTFGVFPFMDKDPLTEAKKLSSLYYHQFEEYYPNKSPNLMVAAFVVIADTSEEAENIAKTLDIWMLGNKDFNEFATFPTIEEANHYQLTPEQKAKIKSNRHRMIVGDPKQVKDSLDALVNASQAEELLLIPLVPGLDQRIKSLKLLSQLY

SEQ ID NO: 1995 - DNA, 1200 bp, Streptococcus agalactiae
atgaataatgtccaaggtaatttatttcgtccattaatacttcccaatggattgagcttagaaaatcgttttgttctatcacctatggtaactaattcttctacatcagaaggttttgtaactgatgacgacatagcatatgctgttcgtcgtgctaaatccgctccattacaaattactggagcagcatatgttacagaatatggtcagttatttgaatatggttttagcgtttcaaaggatgaggacattcctggtttgactaaattggctaaagcaatgaagtctaagggagcgaaagctgttttgcagctgacgcatgctggacgtttctcaagtcacactttggcaagacacggatatgtatatggtcccagccctatgcaattgcaatcgccatacccacatcaggttaaagaactaacacacaaagatatactaatgattatcgatgaatatgtccaggctacaagacgagctatacaagctggatttgatggtgttgaaatatcttctgcacaacgattactaattcaaacttttttctcaaccttctcaaatcaaagaaaagatgagtatggtcctcaaactttgactaatcgctgtcgtttaggcttagaagtttttaaagcggtacaaaaagttatcagagaagaagcagagtcagattttatccttggttttagagcgacgcctgaagaaactcgcggttcacaaattggatatagcattgaagagtttatggaatttcttgaaaaaattttagcgattgctcaggtagattatcttgctattgcaagctgggggcatgatgtctttagaaatactatacgttctgagggagtttacaaagggcagctggttaatcaagttatatttgaacattttggtgatagagttccaattatggcaactggaggtattaatagtgcttcaaaggtgtttgaagccttacaacatgctcatatggtaggagcttccacgcccttagtagttgatccggaatttttacaaaaaataaaagctaagcgttctgatcagattaatttaaggattaaagtgagtgatttagaaggtttggcgattccaaaagcctcctttaaagatattgttcctttgatggattatggagaatctttaccaaaggaagctcgagaagtttttagagaacttcgaagcaattatagggaggaaagatga

SEQ ID NO: 1996 - protein, 399 aa, Streptococcus agalactiae
MNNVQGNLFRPLILPNGLSLENRFVLSPMVTNSSTSEGFVTDDDIAYAVRRAKSAPLQITGAAYVTEYGQLFEYGFSVSKDEDIPGLTKLAKAMKSKGAKAVLQLTHAGRFSSHTLARHGYVYGPSPMQLQSPYPHQVKELTHKDILMIIDEYVQATRRAIQAGFDGVEISSAQRLLIQTFFSTFSNQRKDEYGPQTLTNRCRLGLEVFKAVQKVIREEAESDFILGFRATPEETRGSQIGYSIEEFMEFLEKILAIAQVDYLAIASWGHDVFRNTIRSEGVYKGQLVNQVIFEHFGDRVPIMATGGINSASKVFEALQHAHMVGASTPLVVDPEFLQKIKAKRSDQINLRIKVSDLEGLAIPKASFKDIVPLMDYGESLPKEAREVFRELRSNYREER

SEQ ID NO: 1997 - DNA, 837 bp, Streptococcus agalactiae
ttggaatggcaagatctagcgcagttacctgtatctatttttaaagactatgttacagatgctcaagacgcggaaaaaccttttatatggacagaagtatttttaagggagattaatcgctcaaatcaagaaattattttgcatatttggccgatgactaagacagtcattctggggatgttagatcgagaattaccacatttagaattagctaaaaaagaaatcatcagtcgtggctatgaaccagttgttcggaattttggtggtctcgcagttgtagctgatgaaggaattttaaatttttcattgattattccagatgtttttgagagaaaattgtctatctcagatgggtatcttataatggtcgattttattagaagtatattttcagatttttatcaacctattgagcactttgaagtagagacctcctattgtcctggtaagtttgatcttagtataaatggcaaaaaatttgctggcttggctcagcgccgtataaagaatggtattgcggtatcgatttaccttagcgtttgtggcgatcaaaaagagcggagtcgaatgatttcagatttttataagattggtctaggtgatacgggtagtccaattgcttatccaaatgtagatcctgaaattatggctaatctatctgatctattagattgtcctatgacagtagaagatgttattgatcgtatgttgattagccttaaacaagtaggttttaatgatcgtttactgatgattaggcccgatttagttgcagagtttgatagatttcaggctaagtctatggctaataaggggacggtgagcagagatgaataa

SEQ ID NO: 1998 - protein, 278 aa, Streptococcus agalactiae
MEWQDLAQLPVSIFKDYVTDAQDAEKPFIWTEVFLREINRSNQEIILHIWPMTKTVILGMLDRELPHLELAKKEIISRGYEPVVRNFGGLAVVADEGILNFSLIIPDVFERKLSISDGYLIMVDFIRSIFSDFYQPIEHFEVETSYCPGKFDLSINGKKFAGLAQRRIKNGIAVSIYLSVCGDQKERSRMISDFYKIGLGDTGSPIAYPNVDPEIMANLSDLLDCPMTVEDVIDRMLISLKQVGFNDRLLMIRPDLVAEFDRFQAKSMANKGTVSRDE

SEQ ID NO: 1999 - DNA, 702 bp, Streptococcus agalactiae
atgtacaatatggctatgaaaattttgattacatcaggtggaactaccgagaaaattgataccgttaggagtatcacgaatcacgcaacaggagctttaggaaaaataattgcagaaaaatatttacgagaaggacatcaggtgacactcgtgactactaaaaatgcaatcaaaccagaatctgctaccaacttatccatatttgagattgaggacgttgactcattaataaaaaccttgaagccattagtgaaagagcatgatattttaattcatagcatggcagtgtctgactatacccccgtctacatggctgatttcgaaaaggttaaatcaagcgatgatttagatacttttttgcgcaaagataaccacgaagggaaaatatcatctgaatcagaatatcaagtcctttttctcaaaaaaacaccaaaagttatcagccttgtaaaaaaatggaatcctcaaattattctagtaggttttaaactacttgtgaacgttactaaagaaaatctttttaaagttgctcgtcatagcttaatcaaaaataaagctacgtttattttagctaatgacctcattgatattacctcaaaacatcacatagcctacctacttgatcatgataatgtgtataaagctaccaccaaagaagacattgctcaattaatttacgaaaaggtaaaaaaatatgattaa

SEQ ID NO: 2000 - protein, 233 aa, Streptococcus agalactiae
MYNMAMKILITSGGTTEKIDTVRSITNHATGALGKIIAEKYLREGHQVTLVTTKNAIKPESATNLSIFEIEDVDSLIKTLKPLVKEHDILIHSMAVSDYTPVYMADFEKVKSSDDLDTFLRKDNHEGKISSESEYQVLFLKKTPKVISLVKKWNPQIILVGFKLLVNVTKENLFKVARHSLIKNKATFILANDLIDITSKHHIAYLLDHDNVYKATTKEDIAQLIYEKVKKYD

SEQ ID NO: 2001 - protein, 543 aa, Streptococcus agalactiae
ATGATTAAACGTATTACACTAGCCGTCACCGGTTCAATTTCGGCCTATAAAGCAGCAGACCTTACAAGTCAATTAACTAAAATTGGCTATGATGTTCATATCATAATGACACAAGCTGCCACAGAATTTATTACACCGTTAACTCTGCAAGTATTATCAAAAAATCCTATTCATTTAGATGTTATGGATGAGCATAACCCAAAAATCATCAACCATATCGAATTAGCAAAACGCACAGATTTATTTATCGTTGCACCTGCCTCTGCTAATACTATTGCTCATCTAGCATATGGCTTCGCTGATAACATCGTAACAAGCGTTGCTCTTGCTATGCCTGATGAAACTCCAAAACTTATCGCACCAGCAATGAATACAAAGATGTATCATAATACAATCACCCAACGTAACATTGATATTTTGAAAAAAATAGGTTATCAGGAAATTGAACCTCGTATTAGTTTGCTTGCCTGTGGTGATACCGGTCAAGGAGCCCTAGCTGATATCTCTACTATACTTAAATGTATACAAGAAGTTGCAAATTAG

SEQ ID NO: 2002 - protein, 180 aa, Streptococcus agalactiae
MIKRITLAVTGSISAYKAADLTSQLTKIGYDVHIIMTQAATEFITPLTLQVLSKNPIHLDVMDEHNPKIINHIELAKRTDLFIVAPASANTIAHLAYGFADNIVTSVALAMPDETPKLIAPAMNTKMYHNTITQRNIDILKKIGYQEIEPRISLLACGDTGQGALADISTILKCIQEVAN

SEQ ID NO: 2003 - protein, 573 aa, Streptococcus agalactiae
ATGAAAAAGAAAAACAAATCCTCTAACATTGCTATAATTGCAATCTTTTTTGCTATTATGCTTGTCATTCATTTTTTGTCATCATTTATTTTTAGTTTTTGGTTAGTCCCCATTAAACCTACTTTGATGCATATCCCAGTTATTATTGCATCTATAGCCTATGGACCTCGTATTGGTGCAACTCTAGGCGCCTTAATGGGTGGGATCAGCGTAGCTAACAGCAGCATTGTTCTATTACCAACGAGTTACCTCTTCTCACCTTTTGTTGAAAATGGTAATTTTTATTCGCTAATTATTGCACTTGTACCACGTATTCTAATCGGGATTATTCCTTATTTCGTTTACAAATTACTACACAACCGCTTTGGTTTGGCTATCTCAGGTGCTATAGGCTCTCTAACAAACACAGTATTTGTTTTATCTGGAATTTTTATCTTTTTTTCAAGTACTTATAATGGGAATATCAAGCTAATGCTCGCTGGGATTATTTCATCTAATTCATTAGCTGAGATGGTCATTGCAGCTATCATTGTATATCTAACTGTTCCTCGTATTCTCAATATTAAACATTAA

SEQ ID NO: 2004 - protein, 190 aa, Streptococcus agalactiae
MKKKNKSSNIAIIAIFFAIMLVIHFLSSFIFSFWLVPIKPTLMHIPVIIASIAYGPRIGATLGALMGGISVANSSIVLLPTSYLFSPFVENGNFYSLIIALVPRILIGIIPYFVYKLLHNRFGLAISGAIGSLTNTVFVLSGIFIFFSSTYNGNIKLMLAGIISSNSLAEMVIAAIIVYLTVPRILNIKH

SEQ ID NO: 2005 - protein, 1719 aa, Streptococcus agalactiae
ATGACTTACACAGAAAATTTTCAAAAATGGTTAGATTTTGAGCAGCTTCCTGACTATCTTCGTCAAGAATTACTATCAATGGATGAAAAAACAAAAGAAGATGCTTTTTACACAAACTTAGAATTTGGTACTGCTGGTATGCGTGGTTATATTGGTGCTGGTACAAATCGTATTAATATTTATGTTGTCCGTCAAGCAACCGAAGGATTGGCAAAATTAATCGAAACTAAGGGAGAGGAAGCTAAAAAACGTGGTGTAGCTATCGCTTATGATTCGCGCCACTTCTCTCCAGAATTTGCTTTTGAGTCTGCACAGGTCTTGGCACAGCATGGAATTAAATCTTACGTATTTGAAGCTCTTCGTCCAACACCAGAACTCTCTTTTGCTGTTCGCCATTTAAATGCCTATGCTGGTATTATGGTTACTGCAAGCCACAATCCAGCACCTTTCAATGGTTATAAAGTCTACGGACAAGACGGAGGTCAACTACCACCAGCTGATGCTGATGCACTAACAGACTTTATCCGTGCTATTGAAAATCCATTTGCAGTTGAACTTGCTGATTTAGATGAAAGCAAATCAGCGGGTCTTATTCAAGTTATCGGTGAAGATGTTGATATTGAATATCTTAGAGAGGTTAAAGATGTTAATATCAATCAAGATTTAATCAATAACTTTGGAAAAGACATGAAAATTGTCTATACTCCTCTCCACGGAACTGGTGAGATGTTGACACGCCGTGCCCTTGCTCAAGCCGGTTTTGAATCTGTTGTTGTAGTAGAATCACAAGCTAAGGCAGATCCAGACTTTTCTACTGTCAAATCTCCTAACCCTGAAAGCCAAGCTGCCTTTGCTCTTGCTGAAGAACTCGGACGAGAAGTTGATGCAGATGTCTTAGTAGCTACTGATCCTGATGCAGACCGCCTAGGCGTTGAAATTCGCCAACCAGATGGTTCTTATAAAAACCTTTCTGGAAATCAAATTGGAGCGATTATTGCGAAATACATCCTGGAAGCTCATAAAACAGCAGGAACACTTCCAGAAAATGCTGCTCTCGCTAAATCAATCGTATCAACAGAATTAGTAACAAAAATTGCCGAAAGTTATGGCGCTACAATGTTTAACGTTTTAACTGGATTTAAATTCATCGCTGAGAAAATTCAAGAGTTTGAAGAAAAACATAACCACACCTATATGTTTGGTTTTGAAGAAAGCTTCGGATATCTTATTAAACCATTTGTCCGTGATAAAGACGCTATTCAAGCAGTTCTTTTGGTTGCTGAGATTGCAGCTTATTACCGTTCGCGTGGTTTAACACTTGCAGATGGTATTGATGAAATTTACAAAGAATATGGTTATTTTGCTGAAAAAACGATTTCAGTAACACTTTCAGGAGTGGATGGAGCTGCTGAAATTAAGAAGATTATGGACAAATTCCGTGAAAATGGTCCAAAACAATTTAACAATACTGATATTGTATTATTAGAAGATTTCCAAAAACAAACCGCTACTAAAAATGATGGAATAATATCTAACTTAACAACTCCTCCAAGTAATGTTTTGAAGTACACGTTAGCTGATGATTCATGGATTGCAGTTCGCCCTTCAGGAACTGAACCAAAAATCAAGTTCTATATTGCTACGGTCGGTAATGATTTAGCAGATGCAGAAACAAAAATCGCCAATATTGAAAAAGAGATTACAACATTTGTAAATTAA

SEQ ID NO: 2006 - protein, 572 aa, Streptococcus agalactiae
MTYTENFQKWLDFEQLPDYLRQELLSMDEKTKEDAFYTNLEFGTAGMRGYIGAGTNRINIYVVRQATEGLAKLIETKGEEAKKRGVAIAYDSRHFSPEFAFESAQVLAQHGIKSYVFEALRPTPELSFAVRHLNAYAGIMVTASHNPAPFNGYKVYGQDGGQLPPADADALTDFIRAIENPFAVELADLDESKSAGLIQVIGEDVDIEYLREVKDVNINQDLINNFGKDMKIVYTPLHGTGEMLTRRALAQAGFESVVVVESQAKADPDFSTVKSPNPESQAAFALAEELGREVDADVLVATDPDADRLGVEIRQPDGSYKNLSGNQIGAIIAKYILEAHKTAGTLPENAALAKSIVSTELVTKIAESYGATMFNVLTGFKFIAEKIQEFEEKHNHTYMFGFEESFGYLIKPFVRDKDAIQAVLLVAEIAAYYRSRGLTLADGIDEIYKEYGYFAEKTISVTLSGVDGAAEIKKIMDKFRENGPKQFNNTDIVLLEDFQKQTATKNDGIISNLTTPPSNVLKYTLADDSWIAVRPSGTEPKIKFYIATVGNDLADAETKIANIEKEITTFVN

SEQ ID NO: 2007 - protein, 1734 aa, Streptococcus agalactiae
ATGAAAGCAAGTCATCCTAAAAAGATACAAAAAAAGCTTGTTCAAGATCTTCTTTCTAAAAAAAGCTTAGTAGGAATGGCATTATTAGGGACGGTTGTACAAGTTTGCCTCACTGTTTATTTGCCTGTTCTAATTGGACAAGCGGTAGACGTTGTATTATCGCCTCATTCTATGATATTATTGTTACCTATAATGTGGAAGATGATTGCAGTCATTTTAGCAAATGCTATTATTCAATGGATTAATCCTCTGCTCTATAACCGCTTAATTTTTCATTATGTTGCTTCTTTAAGAAAGGCTGTAATGGAAAAGTTGAATCTATTGCCTATAGCTTACCTTGATAAACGTGGCATAGGTGACTTGATTAGTCGTGTGACTACCGATACGGAGCAATTATCAAATGGTTTATTAATGGTTTTTAACCAGTTCTTTGTTGGTTTATTAACTATTCTAGTTACTATTTTTAGTATGGCAAAGATTGATTTATTAATGCTTTTTTTGGTATTATTTCTGACGCCTTTATCACTCTTTCTAGCCCGCTTTATTGCTAAAAAGAGTTATCACTTATATCAAAATCAAACGGCATCACGAGGACGACAAACTCAATTCATTGAAGAGATGGTGAGTCAAGAAAGCCTTATTCAAGCATTCAGTGCGCAAGAAGAAAGTAGTAATCATTTTAGGACTATTAATCAAGAGTATGCTAACTTTTCTCAATCAGCAATTTTTTATTCTTCAACTGTCAATCCATCAACCCGATTTATCAATAGTTTGATTTATGGCTTCTTAGCTGGGATTGGTGCCCTTCGTATTATGTCAGGGGCTTTTAGTGTTGGTCAATTAATCACTTTCTTAAATTATGTCAATCAATATACTAAGCCATTTAATGACATCTCTTCCGTCCTGTCTGAGATGCAAAGTGCTCTGGCTTGTGCAGAACGCCTTTACTCTATTTTAGAAGAATCGTCACCAAATATAACAGGGACAGAAAAACTTGATTCATCAACGGTCAAGGGTCAAATCGATTTTAAAAATGTTGTTTTTGGTTATAATAAATCAAAACCACTATTGAATGGTATTAATTTACACATTCCAGCAGGAGCTAAGGTCGCTATTGTAGGACCAACAGGTGCTGGGAAGTCTACTTTAATCAATTTATTAATGCGTTTCTATGAAGTTGACGGGGGAAATATCCTTTTAGATGGTAAGCCTATTACTGATTATGAGCCATCACAATTAAGGCAAGAAATTGGAATGGTATTACAAGAAACGTGGTTAAAAAGTGCTACGATTCACGATAACATTGCATATGCCAATCCTAAAGCTAGCCGTGACGAAGTGATAGAGGCTGCAAAAGCAGCTAATGCAGATTTCTTTATCAAACAATTACCGAATGGATATGATACGTATTTAGAAGATGCTGGAGACTCGTTATCACAGGGGCAATGTCAGCTATTGACAATTGCTCGTATTTTTCTTAAATTACCTAGAATATTGATATTAGATGAGGCAACATCGTCTATAGATACTCGTACTGAAGTTCTTGTTCAAGAAGCATTCCAAATGTTGATGAAGGGGAGAACAAGCTTTATTATTGCACATCGCTTATCTACCATTCAAACAGCAGATATTATTTTAGTTATGGTATCTGGTGAAATTGTAGAAGTGGGTAACCACTCTGAATTAATAGCTCAAAAAGGTATTTATTATCAAATGCAAAATGCACAAAAGTAG

SEQ ID NO: 2008 - protein, 577 aa, Streptococcus agalactiae
MKASHPKKIQKKLVQDLLSKKSLVGMALLGTVVQVCLTVYLPVLIGQAVDVVLSPHSMILLLPIMWKMIAVILANAIIQWINPLLYNRLIFHYVASLRKAVMEKLNLLPIAYLDKRGIGDLISRVTTDTEQLSNGLLMVFNQFFVGLLTILVTIFSMAKIDLLMLFLVLFLTPLSLFLARFIAKKSYHLYQNQTASRGRQTQFIEEMVSQESLIQAFSAQEESSNHFRTINQEYANFSQSAIFYSSTVNPSTRFINSLIYGFLAGIGALRIMSGAFSVGQLITFLNYVNQYTKPFNDISSVLSEMQSALACAERLYSILEESSPNITGTEKLDSSTVKGQIDFKNVVFGYNKSKPLLNGINLHIPAGAKVAIVGPTGAGKSTLINLLMRFYEVDGGNILLDGKPITDYEPSQLRQEIGMVLQETWLKSATIHDNIAYANPKASRDEVIEAAKAANADFFIKQLPNGYDTYLEDAGDSLSQGQCQLLTIARIFLKLPRILILDEATSSIDTRTEVLVQEAFQMLMKGRTSFIIAHRLSTIQTADIILVMVSGEIVEVGNHSELIAQKGIYYQMQNAQK

SEQ ID NO: 2009 - protein, 720 aa, Streptococcus agalactiae
ATGGCATTTTCTTATCCAAATTCTTCTGAAAAAGCTTTATCTGATATTACTTTTTCTATGAATGTAGGAGAAACTTTAGGGATAATTGGTGGAACTGGCTCTGGGAAATCAACCTTGGTTAATTTACTGCTTCATATTTATAAAGTGCAAGAAGGGGATATTGATATATATCATCAGGGAAAAAGTCCAGATACAATTTCAAATTGGCGTACCCTGGTAAGAGTTGTTCCTCAAAATGCTCAGTTGTTTAAAGGAACTATTCGTTCTAACCTTTCTTTGGGACTTGGTAAAGTTAGTGAGGAAAAACTTTGGACTGCTTTAGAAATAGCACAAGCTAGTGATTTTGTAAAAGAAAAAGATGGTCAACTTGATGCCCCTGTAGAGAGTTTTGGTAGAAATTTCTCTGGTGGTCAAAGGCAAAGGTTGACGATTGCAAGAGCTTTAGTTCAAGATAAGATACCATTTTTGATTTTAGACGATGCAACATCTGCATTGGATTATTTAACAGAAGCTCGTTTATTTAAAGCCATAACTAAACATTTCAACCAAACTAATCTTATTATTGTATCACAGAGAATTAATAGTATACAAAATGCAGATAGAATCTTACTCCTTGATAAGGGGAAACAAGTTGGTTTTGATAATCATCAATCTTTATTAGCTCATAACAAAGTTTATAAGTCCATTTACCATTCACAAAATTTTAAGGAGGAGGAGTAA

SEQ ID NO: 2010 - protein, 239 aa, Streptococcus agalactiae
MAFSYPNSSEKALSDITFSMNVGETLGIIGGTGSGKSTLVNLLLHIYKVQEGDIDIYHQGKSPDTISNWRTLVRVVPQNAQLFKGTIRSNLSLGLGKVSEEKLWTALEIAQASDFVKEKDGQLDAPVESFGRNFSGGQRQRLTIARALVQDKIPFLILDDATSALDYLTEARLFKAITKHFNQTNLIIVSQRINSIQNADRILLLDKGKQVGFDNHQSLLAHNKVYKSIYHSQNFKEEE

SEQ ID NO: 2011 - protein, 762 aa, Streptococcus agalactiae
ATGAAAAGACTAACTTATTATTTTAAGGGGTATATCAAAGAAACTATCTTTGGACCCCTTTTCAAATTATTAGAAGCCTCTTTTGAACTTTTGGTACCAATCGTTATTGCAAAAATGATTGACGAGACCATTCCACGAGGGGATAGAAGTAGTTTACTGTTGCAAATTGGATTGATTTTCTTTTTGGCTGCGGTGGGTGTTGTAGTAGCGATAACTGCTCAATATTATTCTTCAAAAGCCGCAGTTGGTTATACGAGACAATTGACAGAGGATCTCTACCAAAAAGTCATGTCACTGGGGAAAAAAGACAGAGATGAATTGGGAACTGCTAGTTTGATTACTCGTTTGACTGCTGATACATTTCAAATCCAAACTGGTTTAAATCAATTTTTACGTTTATTTTTGAGGGCTCCGATTATTGTTTTTGGTGCCATAATTATGGCTTTTTCCATTAGCCCCTCATTGACTATTTGGTTCTTGGTAATGGTTGTCACGTTATTTATCATTGTTTTTGTAATGTCTCGACTATTAAATCCTATTTACCTTAAAATCAGAACTTCAACCGATTATTTGGTAAAGTTGACTAGGCAACAACTTCAAGGTGTACGAGTTATCCGTGCCTTTAATCAAGTAGATAGAGAGAGTGAAGCATTTAATGATATCAATTATCATTATACGAATTTACAATTAAAAGCAGGTAGGCTTTCTAGTTTAGTAACGCCTCTAACATTTCTANNNNNCATTCATTCATTAATTAATTAA

SEQ ID NO: 2012 - protein, 253 aa, Streptococcus agalactiae
  VARIANT 246, 247: Xaa = Any Amino Acid
MKRLTYYFKGYIKETIFGPLFKLLEASFELLVPIVIAKMIDETIPRGDRSSLLLQIGLIFFLAAVGVVVAITAQYYSSKAAVGYTRQLTEDLYQKVMSLGKKDRDELGTASLITRLTADTFQIQTGLNQFLRLFLRAPIIVFGAIIMAFSISPSLTIWFLVMVVTLFIIVFVMSRLLNPIYLKIRTSTDYLVKLTRQQLQGVRVIRAFNQVDRESEAFNDINYHYTNLQLKAGRLSSLVTPLTFLXXIHSLIN

SEQ ID NO: 2013 - protein, 603 aa, Streptococcus agalactiae
ATGTTTAAATTTTTAAAACGTTTGATAGCATTAATTATTATTATTTTCATTGGGTACCGTCTGGTTATCATCCATGAAAATGTTAAAAAAGTGCTTCAATATCATGATTTAGTGCAGAATACTCTTGCAGAGAATGGTTCAGAGGCTAATGTGCACTTAGTATTATCTATGATTTATACTGAAACTAAGGGAGATGCTATAGATGTGATGCAATCAAGTGAAAGTATCAGTGGAACTACGAACAGTATTACGGATAGCCACACCAGTATTAAACATGGCGTCACTCTGTTGTCACAAAATATAAGTCAAGCTAAAAAAGCTAAGGTTGATGTATGGACTGCTGTCCAAGCATACAATTTTGGTTCTTCTTATATTGATTATGTAGCGGATCATGGGGGTGAAAATTCCATTGAGTTGGCCAAAAATTACTCTAAAAATGTTGTAGCTCCCAGCCTAGGAAATTATAACGGGGACACTTACTTTTACTATCATCCTCTCGCCTTAATTTCAGGAGGGAAGCTCTATAAAAATGGTGGTAATATTTACTACTCACGTGAAGTTCAATTCAACCTTTATTTGATAAAAATAATGGAGTTGTTTTAA

SEQ ID NO: 2014 - protein, 200 aa, Streptococcus agalactiae
MFKFLKRLIALIIIIFIGYRLVIIHENVKKVLQYHDLVQNTLAENGSEANVHLVLSMIYTETKGDAIDVMQSSESISGTTNSITDSHTSIKHGVTLLSQNISQAKKAKVDVWTAVQAYNFGSSYIDYVADHGGENSIELAKNYSKNVVAPSLGNYNGDTYFYYHPLALISGGKLYKNGGNIYYSREVQFNLYLIKIMELF

SEQ ID NO: 2015 - protein, 978 aa, Streptococcus agalactiae
ATGATGGATTTTTATATCAAACAGATTATTATACATCAGTTTTCTCCTAACGACACAGAGTTAGTGCTATCAGATACTCCGTTAACCCTAACTCCAAGGATTGATGACTACTTTCGTAAAAAATTAAGTAAAGTTTTTTCTGATGAAGCTAAGCGTGGCTATTTTGGAGAGGATAATGTATTTATGAGTCATTTACAAGATGATTTATATGTTTCTTCCTGTCAAATTGCGCAACTTTGGAAAGAAGAGTTTGTCATATCGGAAGATCAAAAAACGAATGACTTAGTTTTTATTCAATTTGACAAGGATGGAATGGAACATTTTGCTTTTCTTCGAATCTCATTAAAGGAACAATTTGCTCATGTTTCTGAAAATCAAGAGCAGCCAATTACAATAACACAGAATAACCTTCCAAGTGCTGCTCAAACTCCAGATGAAGCTTTGGTTGTTAACAAGTCATCAAAGCAATACTATTTAATTGAAAAGCGTATCAAACACAATGGTTCATTTGCTAATTATTTTTCTGAAAATTTATTACAAGTACAACCAGAACAGTCGGTTAAAAAATCTATCAAAATGGTTGAACAGACTGCTCAAAAAATTGCTGAAAATTTCAACAAAGATGATTTTTCTTTCCAATCAAAAATGAAATCGGCTATTTATAAGAATTTAGAAGAAGAGCAAGAATTGTCTCCAGAAAAATTAGCAGATCAATTATTTGATGATAATTTAACAGCCAGGCTGACTTTTGTTGATGAATTGAAAGATGCAATACCTGGACCTGTTCAAGTAAGTGATATTGATCATTCCCGTCAAATTAAGAAGTTAGAGAATCAGAAGCTATCTCTTTCAAATGGTATTGAATTGATTGTACCCAACAATGTCTACCAAGATGCCGAATCAGTTGAATTTATCCAAAACCCTGATGGTACATACTCAATACTAATCAAAAACATACAGGATATTCAAAATAAATAA

SEQ ID NO: 2016 - protein, 325 aa, Streptococcus agalactiae
MMDFYIKQIIIHQFSPNDTELVLSDTPLTLTPRIDDYFRKKLSKVFSDEAKRGYFGEDNVFMSHLQDDLYVSSCQIAQLWKEEFVISEDQKTNDLVFIQFDKDGMEHFAFLRISLKEQFAHVSENQEQPITITQNNLPSAAQTPDEALVVNKSSKQYYLIEKRIKHNGSFANYFSENLLQVQPEQSVKKSIKMVEQTAQKIAENFNKDDFSFQSKMKSAIYKNLEEEQELSPEKLADQLFDDNLTARLTFVDELKDAIPGPVQVSDIDHSRQIKKLENQKLSLSNGIELIVPNNVYQDAESVEFIQNPDGTYSILIKNIQDIQNK

SEQ ID NO: 2017 - protein, 1257 aa, Streptococcus agalactiae
ATGATTTTTGATAAAGACAATTTTAAAGAATTTGACCAAGAACTTTGGCAGGCTATTCATGATGAGGAAATTCGCCAACAAAATAATATTGAATTAATTGCATCAGAAAACGTTGTTTCAAAAGCTGTTATGGCAGCACAAGGTTCTGTTTTGACAAATAAATATGCCGAAGGGTATCCTAGTCATCGTTATTATGGAGGAACAGATTGTGTTGATGTAGTTGAAAGTTTAGCTATAGAACGAGCTAAGACGTTATTTAATGCTGAGTTTGCTAATGTTCAACCACATTCTGGTAGTCAGGCTAATGCAGCAGCTTACATGGCTTTAATCGAGCCGGGAGATACTGTCTTAGGGATGGACTTAGCAGCAGGTGGGCACTTAACACATGGCGCTTCAGTTAGCTTCTCAGGAAAAACTTATCATTTTGTTTCTTATTCTGTTGATCCTAAGACGGAGATGCTAGACTATGATAACATTTTGAAAATAGCACAGGAAACGCAGCCTAAATTAATTGTTGCAGGGGCATCGGCTTATTCTCGCATTATTGATTTTGAAAAATTTCGTCAAATAGCAGACGCAGTAGATGCTTACTTAATGGTTGATATGGCTCACATTGCAGGTTTAGTTGCTTCTGGTCATCACCCTAGTCCTATTCCTTATGCTCATGTAACGACAACGACAACACATAAGACTCTACGTGGACCTAGAGGTGGTTTGATTTTAACCAATGATGAAGCAATTGCTAAAAAAATTAATTCTGCAGTCTTTCCAGGACTCCAAGGTGGACCATTAGAACATGTAATTGCTGCAAAAGCTGTAGCTTTGAAAGAAGCCCTAGATCCTTCCTTTAAAATATACGGTGAGGATATTATTAAAAATGCTCAAGCCATGGCTAAAGTTTTTAAGGAAGATGATGACTTTCATTTGATTTCTGATGGTACTGATAATCATTTGTTCTTAGTAGACGTCACAAAAGTTATTGAGAATGGCAAAAAGGCACAAAATGTTCTTGAAGAAGTCAATATCACTCTTAACAAGAACTCTATACCGTTTGAGCGACTATCACCATTTAAAACATCAGGTATTCGAATTGGTACTCCAGCAATTACTAGTCGAGGAATGGGAGTTGAAGAATCTCGAAGAATCGCTGAATTAATGATTAAGGCACTCAAAAATCATGAAAATCAAGATATCCTCACAGAAGTTCGTCAAGAAATTAAATCATTAACGGACGCTTTCCCCTTGTATGAGAATTAA

SEQ ID NO: 2018 - protein, 418 aa, Streptococcus agalactiae
MIFDKDNFKEFDQELWQAIHDEEIRQQNNIELIASENVVSKAVMAAQGSVLTNKYAEGYPSHRYYGGTDCVDVVESLAIERAKTLFNAEFANVQPHSGSQANAAAYMALIEPGDTVLGMDLAAGGHLTHGASVSFSGKTYHFVSYSVDPKTEMLDYDNILKIAQETQPKLIVAGASAYSRIIDFEKFRQIADAVDAYLMVDMAHIAGLVASGHHPSPIPYAHVTTTTTHKTLRGPRGGLILTNDEAIAKKINSAVFPGLQGGPLEHVIAAKAVALKEALDPSFKIYGEDIIKNAQAMAKVFKEDDDFHLISDGTDNHLFLVDVTKVIENGKKAQNVLEEVNITLNKNSIPFERLSPFKTSGIRIGTPAITSRGMGVEESRRIAELMIKALKNHENQDILTEVRQEIKSLTDAFPLYEN

SEQ ID NO: 2019 - protein, 597 aa, Streptococcus agalactiae
ATGAATGATTTGGGACAGATTTTAGAGGATCATGGCGCAGTTATTATGCCAACAGAAACAGTCTACGGAATTTTTGCCAAAGCTTTGAGTGAAGAAGCTGTGAACCACGTCTATGAGCTTAAAAAAAGGCCTCGTGATAAGGCTATGAACTTAAATATATGTGATTTTGAGACTATTTTAAAATATTCTAAAAATCAACCGACCTATTTAAAGCAATTGTACGATGCTTTTTTACCAGGACCGCTAACCATTATTTTGGAAGCTTCACAAGAAGTTCCGCATTGGATCAATTCTGGGTTATTAAGCGTAGGATTTCGGATGCCTAAGCACCCTGTAACCCTTGATATGATTGCTAACCATGGTCCACTGATTGGTCCTTCTGCTAATATTTCTGGATGTGATAGTGGTCGTGTGTTCTCAGAAATTCAAAAACAGTTTAATCATCAAGTTTTAGGTATTGAAGATGATAAAGCATTGACAGGTGTGGATTCTACTATTATTGATTTGTCTGGTGATAGAGTTAAGATTTTAAGGCAAGGTGCAATCACGCAAGAGGTACTAACGGCTACGATACCTGAATTAATTTTTGAAAATTAA

SEQ ID NO: 2020 - protein, 198 aa, Streptococcus agalactiae
MNDLGQILEDHGAVIMPTETVYGIFAKALSEEAVNHVYELKKRPRDKAMNLNICDFETILKYSKNQPTYLKQLYDAFLPGPLTIILEASQEVPHWINSGLLSVGFRMPKHPVTLDMIANHGPLIGPSANISGCDSGRVFSEIQKQFNHQVLGIEDDKALTGVDSTIIDLSGDRVKILRQGAITQEVLTATIPELIFEN

SEQ ID NO: 2021 - protein, 831 aa, Streptococcus agalactiae
ATGAATTATGCGCAGTTAATCAAGCATTACGGACAGTTATTAGAAGCTTGTGGTGAAGAAGTCGAAAATTTTATTTATGTATTAAAAGACCTAAAACAATGGTCAACAACTGATTACCTTTTAAATCAAAATAGTAGTGTGAGTGATACTGATCAGCAATTAATGGAAAATATTTTTCAACAGCTTAAAAAACATAGATCACCGCAGTATATTACAGGTAAAGCTTACTTTAGAGACCTTATTTTCTTTGTTGATGAACGAGTTTTAATTCCGAGGCCTGAAACAGAGGAGTTGGTTGATCTAATCTTATCAGAGAATAAAGTAGAAGATTGTTCTGTTTTAGATATTGGTACAGGTAGTGGAGCAATTGCCATTTCTCTAAAAAAAGAACGCCCCTCTTGGGATGTTCTAGCTAGTGACATTTCTGTATCTGCATTAGACTTGGCAAAGGAAAATGCTAATAATTGTGATGCGGAAGTGACTTTTATAGAATCAGATGTCTTTAGTAACATTTCAGGTAAATTTGATATTATTGTGTCTAATCCTCCCTATATTTCTTACAATGACAAAGACGAGGTGGGGAAGAATGTGCTAGCTTCAGAGCCTCATAGTGCCCTTTTTGCAGACGAAGAAGGATTAGCTATTTATCGTAAAATCATTGAAAACTCAAGAGAATATTTGCAACCTAGAGGTAAATTATATTTTGAAATAGGTTACAAACAAGGTGATGATTTACGAAGTTTATTGAAAAGATATTTTCCAAACAATCGTTGCAGAGTTTTGAAAGATATATTTGGTAAAGATAGAATGGTGGTATTAGATAATGAATGA

SEQ ID NO: 2022 - protein, 276 aa, Streptococcus agalactiae
MNYAQLIKHYGQLLEACGEEVENFIYVLKDLKQWSTTDYLLNQNSSVSDTDQQLMENIFQQLKKHRSPQYITGKAYFRDLIFFVDERVLIPRPETEELVDLILSENKVEDCSVLDIGTGSGAIAISLKKERPSWDVLASDISVSALDLAKENANNCDAEVTFIESDVFSNISGKFDIIVSNPPYISYNDKDEVGKNVLASEPHSALFADEEGLAIYRKIIENSREYLQPRGKLYFEIGYKQGDDLRSLLKRYFPNNRCRVLKDIFGKDRMVVLDNE

SEQ ID NO: 2023 - protein, 1080 aa, Streptococcus agalactiae
ATGAATATTTATGATCAATTGCAGGCAGTTGAAGATCGTTATGAAGAGTTAGGTGAGTTACTTAGTGATCCAGATGTTGTTTCAGATACAAAGCGATTTATGGAATTATCACGTGAAGAAGCTAATACTCGAGAAACTGTCACAGCTTATAGAGAATATAAGCAAGTCATTCAAAATATTTCAGATGCTGAAGAAATGATCAAGGATGCTTCTGGTGATGCTGAATTGGAAGAAATGGCTAAAGAAGAACTTAAAGAATCAAAAGCAGCTAAAGAAGAGTATGAAGAAAGATTAAAAATCCTTCTATTACCTAAAGATCCTAACGATGATAAAAACATTATTTTAGAAATTCGTGGTGCTGCTGGTGGCGATGAAGCAGCGCTTTTTGCTGGTGATCTTTTAACAATGTATCAAAAATATGCTGAAACTCAAGGATGGCGTTTTGAAGTTATGGAATCATCCGTTAATGGTGTTGGTGGTATTAAAGAAGTGGTTGCTATGGTTTCTGGTCAGTCAGTTTATTCTAAGCTTAAATATGAATCAGGAGCTCATCGTGTTCAACGTGTCCCGGTGACAGAGAGTCAGGGTCGTGTTCATACTTCAACTGCAACTGTTTTGGTAATGCCAGAAGTTGAAGAAGTAGAATACGAAATTGATCAAAAAGACCTTCGCGTCGATATTTACCACGCGTCTGGTGCTGGTGGTCAGAACGTCAATAAAGTTGCTACTGCAGTTCGTATGGTACACATTCCTACAGGAATCAAAGTTGAAATGCAAGAAGAACGTACTCAGCAAAAAAACCGTGATAAAGCGATGAAAATCATTCGTGCTCGTGTTGCTGACCATTTTGCGCAAATTGCTCAAGATGAACAAGATGCTGAACGTAAATCAACAGTTGGTACTGGTGATCGTTCAGAACGTATTCGCACTTATAATTTCCCACAAAATCGTGTAACAGATCATCGTATTGGTTTGACACTTCAAAAATTAGATACTATTTTATCTGGAAAAATGGATGAAGTTATTGATGCACTTGTTATGTATGATCAGACTCAAAAGTTAGAAGCCTTAAATAAATAA

SEQ ID NO: 2024 - protein, 359 aa, Streptococcus agalactiae
MNIYDQLQAVEDRYEELGELLSDPDVVSDTKRFMELSREEANTRETVTAYREYKQVIQNISDAEEMIKDASGDAELEEMAKEELKESKAAKEEYEERLKILLLPKDPNDDKNIILEIRGAAGGDEAALFAGDLLTMYQKYAETQGWRFEVMESSVNGVGGIKEVVAMVSGQSVYSKLKYESGAHRVQRVPVTESQGRVHTSTATVLVMPEVEEVEYEIDQKDLRVDIYHASGAGGQNVNKVATAVRMVHIPTGIKVEMQEERTQQKNRDKAMKIIRARVADHFAQIAQDEQDAERKSTVGTGDRSERIRTYNFPQNRVTDHRIGLTLQKLDTILSGKMDEVIDALVMYDQTQKLEALNK

SEQ ID NO: 2025 - protein, 570 aa, Streptococcus agalactiae
TTGGCTCAACTCTATTATAAATATGGGACAATGAATTCTGGTAAAACCATTGAAATTTTAAAAGTTGCTCATAACTATGAAGAACAAGGAAAACCTGTGGTTATTATGACAAGCTCCTTGGATACTCGAGATGAATTTGGAGTCGTTTCAAGTCGTATTGGAATGCGTCGTGAAGCAGTTCCAATTTCAGATGATATGGACATTTTCTCCTATATTCAGAATTTACCACAAAAGCCTTATTGTATTTTAATTGATGAATGTCAATTTTTGAGTAAGAAAAACGTCTACGATTTAGCTAGAGTAGTAGATGACTTAGATGTACCAGTCATGGCTTTTGGTTTGAAAAATGATTTCCAAAACAATCTTTTTGAAGGTTCAAAACATTTGCTATTATTGGCCGATAAGATTGATGAAATCAAAACAATTTGCCAATACTGTAGTAAGAAAGCAACCATGGTTTTAAGGACAGAAAACGGAAAACCTGTCTATGAAGGTGATCAGATACAAATTGGTGGTAATGAAACATATATCCCAGTTTGTCGAAAACATTATTTTAATCCAGATATTTAA

SEQ ID NO: 2026 - protein, 189 aa, Streptococcus agalactiae
MAQLYYKYGTMNSGKTIEILKVAHNYEEQGKPVVIMTSSLDTRDEFGVVSSRIGMRREAVPISDDMDIFSYIQNLPQKPYCILIDECQFLSKKNVYDLARVVDDLDVPVMAFGLKNDFQNNLFEGSKHLLLLADKIDEIKTICQYCSKKATMVLRTENGKPVYEGDQIQIGGNETYIPVCRKHYFNPDI

SEQ ID NO: 2027 - protein, 183 aa, Streptococcus agalactiae
ATGCCATTTGTAAAAATTGACTTGTTTGAGGGACGCTCACAAGAACAAAAAAATGAATTAGCTCGCGAGGTTACTGAAGTAGTATCACGCATTGCAAAAGCACCTAAAGAAAATATCCATGTTTTTATCAACGATATGCCTGAAGGAACCTACTATCCTCAAGGTGAACTTAAGAAAAAATAA

SEQ ID NO: 2028 - protein, 60 aa, Streptococcus agalactiae
MPFVKIDLFEGRSQEQKNELAREVTEVVSRIAKAPKENIHVFINDMPEGTYYPQGELKKK

SEQ ID NO: 2029 - protein, 939 aa, Streptococcus agalactiae
TTGCAACTTTCTCATAGTTTAAGACTCATGGGAACGACTATCGATATTCAAATTAATTCTAAAAATGCTCAAAAACAAATCCAAGAGGTCATAGAACTCTTGGAGCTCTACAAAAATCGCTTTAGTGCAAATGACTTTAATTCAGAGTTAATGGCTATAAATAATAACGCTGGTATCAAGCCTATTCAAGTACATCCAGACCTCTTTGAATTAATCACAATTGGGAAAGAGCACAGCTTAGCTAGGCCTGGTAACCTAAATATTGCTATTGGTCCTTTAGTGCAAACTTGGAGAATTGGATTTTCAGATGCTAAACTACCTAGCCCTAGTGAAATATCAGAAGCTATGATTTTATCTGACCCAACTCATATACTTCTAGATTCAAAAAATCAATCTGTTTTTTTAAATCAGATAGGAATGAAAATTGATTTGGGTGCACTTGCAAAAGGATATATCGCTGACAAAATTATAATCTATCTCAAAAATGAGATGATTGATTCTGCTATCATTAACTTAGGCGGAAACGTTTTAGTTCACGGAGATAATCCTAATCGTTCAGAAGGGTATTGGGTTATCGGTATTCAACATCCGAAAAAGAAACGGGGACAAAATATTGGAGCTGTCAAAATTAAAAACCAATCTGTTGTAACCTCAGGTACTTATGAACGCCGTCTAATTATTGACGATAAGGAATACCATCATATTTTTGATCGACAGACTGGTTATCCGATACAAACAGAGATGGCTAGCATTTCTATTGTTTCTAAACAATCCGTCGACTGTGAAATCTGGACCACAAGGTTGTTTGGCTTATCCATTAAAGAGGCTCTTGATATTTTAAACGCTGTTTCCTACATTGAAGGCATTATCATCACTAAAGATGATCGTATCTATTTATCTGATGGCTTAAAACATCATTTTCAACTATTTTATCATTAA

SEQ ID NO: 2030 - protein, 312 aa, Streptococcus agalactiae
MQLSHSLRLMGTTIDIQINSKNAQKQIQEVIELLELYKNRFSANDFNSELMAINNNAGIKPIQVHPDLFELITIGKEHSLARPGNLNIAIGPLVQTWRIGFSDAKLPSPSEISEAMILSDPTHILLDSKNQSVFLNQIGMKIDLGALAKGYIADKIIIYLKNEMIDSAIINLGGNVLVHGDNPNRSEGYWVIGIQHPKKKRGQNIGAVKIKNQSVVTSGTYERRLIIDDKEYHHIFDRQTGYPIQTEMASISIVSKQSVDCEIWTTRLFGLSIKEALDILNAVSYIEGIIITKDDRIYLSDGLKHHFQLFYH

SEQ ID NO: 2031 - protein, 603 aa, Streptococcus agalactiae
ATGAAACTTATTGGCATCGTTGGAACTAACTCAAATAAATCAACAAATCGTCAATTATTACAATACATGCAACAACACTTTGCTGACAAAGCAGAAATTGAACTCATCGAAGTTAAAGACCTTCCGTTATTTAATAAACCTGCTGATAAAAATGTTCCCCAAGTAATTTTAGATATTGCTGCTAAAATTGAAGAAGCTGATGGTGTTATTATTGGTACGCCAGAATATGATCATTCTATACCTTCGGCCTTAATGAGTGTTTTAGCTTGGCTATCATATGGTATTTACCCACTTCTCAACAAACCCGTTATGATTACTGGTGCTTCATATGGAACACTTGGATCATCACGTGCACAATTACAATTACGTCAAATACTTAACGCTCCTGAACTAAAAGCAAGTGTTTTACCTGACGAATTCTTGTTATCACACTCTCTCCAAGCCTTTGATAAAGATGGCAACCTACACGATATCGAAACAAGTCAGAAGCTAGATGCTATCTTTGATGATTTTCGTCTTTTTGTTAAGATTACTGGTAAATTATCAAATGCTCGTGATTTACTTCAAAAAGAAGCAGAAAATTTTGACTGGGAAAGTTTATAA

SEQ ID NO: 2032 - protein, 200 aa, Streptococcus agalactiae
MKLIGIVGTNSNKSTNRQLLQYMQQHFADKAEIELIEVKDLPLFNKPADKNVPQVILDIAAKIEEADGVIIGTPEYDHSIPSALMSVLAWLSYGIYPLLNKPVMITGASYGTLGSSRAQLQLRQILNAPELKASVLPDEFLLSHSLQAFDKDGNLHDIETSQKLDAIFDDFRLFVKITGKLSNARDLLQKEAENFDWESL

SEQ ID NO: 2033 - protein, 1236 aa, Streptococcus agalactiae
ATGAAATTTGTAGGTATTGTTGGCTCAAATGCAGAGCAATCATATAATCGTATGTTGCTTGAATTTATTCGCAAGAATTTTAAAACCAAATTTGAATTGGAAGTCCTTGAAATCGATGATATTCCAATGTTTAATCAAGTCCAAAATTGGGAAGAAAGTTTCCAACTTCGTCTTCTTAATAATAAGATCACACGAGCTGATGGCGTTATTATTGCCACTCCTGAACATAATCATACTATTACGGCCGCTCTTAAAAGTGTGCTTGAGTGGCTCTCATTTGCTGTGCATCCACTCGAAAATAAACCTGTTATGATTGTCGGTGCTTCATATTATGATCAAGGCACATCACGTGCTCAAATACACCTTCGTAAAATCCTTGATGCTCCTGGCGTTAATGCTTACACACTTCCAGGAAATGAATTCTTATTAGGAAAAGCTAAAGAAGCCTTTGATGATAATGGAAACATTATCAATCCTGGGACTGTTCAATTTTTAGAAACTTGTCTTGATAATTTTATCAAATATGTAGGAGTTGTATCATCATTGAGAAAACCTAAAGCTATTGAATCTGAAGACCTCTACTGTCAGGGACAAATCGATACAACCATTACTGGTATCGATCCAGATGATCCTGATTGGTTAGACAAGGCAGCCGAGAAAGTTAACGCCGTTGAAGGGGATGCTTACGTTAAACTAGACAATGGTTTACTTACTGTTAACCAACTTAATATGTTTTTAAATGCTATGCCATTTGAGCTAACATATGCAGATGATAATAATCAATTTCTATATTACAATAATAATCATCCAGATCCAGATACAATGTTAGGAAAACGTGTTCGTGAACAAGTAGGAAACCGTATGGCCACAGTTCATGGTAGTTTACCACCGGCACGAATGAAAAATGTTGAATGGGTTATCGGTACTCTTCGTAATGGAAATCAAGAATATGTACGTACAGTCGTTCCTGGTACACCTCCAGAAGTTATCAATACTCACAACTATCAAGCTATGTACTACCCAGACGGATCTTATGCTGGTATTAATGAAATTATCTTTAACTTTAAACCGTGGTTAGATTGGTACCTCCAAACTACTGGACAACGTTTGGTCGGTGGAACTACTGCTGCTCCTGGAGCTTCAGCAGTTGACGCTACTTCTAGCGCTTCAACTAGCACAGAGGATGCTCCCGTTGATCAAGCCACAGATGCCACTTCTGGTGCCTCTGAACATTAA

SEQ ID NO: 2034 - protein, 411 aa, Streptococcus agalactiae
MKFVGIVGSNAEQSYNRMLLEFIRKNFKTKFELEVLEIDDIPMFNQVQNWEESFQLRLLNNKITRADGVIIATPEHNHTITAALKSVLEWLSFAVHPLENKPVMIVGASYYDQGTSRAQIHLRKILDAPGVNAYTLPGNEFLLGKAKEAFDDNGNIINPGTVQFLETCLDNFIKYVGVVSSLRKPKAIESEDLYCQGQIDTTITGIDPDDPDWLDKAAEKVNAVEGDAYVKLDNGLLTVNQLNMFLNAMPFELTYADDNNQFLYYNNNHPDPDTMLGKRVREQVGNRMATVHGSLPPARMKNVEWVIGTLRNGNQEYVRTVVPGTPPEVINTHNYQAMYYPDGSYAGINEIIFNFKPWLDWYLQTTGQRLVGGTTAAPGASAVDATSSASTSTEDAPVDQATDATSGASEH

SEQ ID NO: 2035 - protein, 789 aa, Streptococcus agalactiae
ATGTCACTTTTTCAAGAAAAAATTGCTTACAATTGCGCTAAAAAGGAAGCGCTTTATAAAGAGAGTTTAGGACGCTACGCCTTGAGATCAATGCTAGCAGGGGCTTATTTGACAATGAGTACTGCTGCCGGTATCGTCGCAGCTGATACTATTGGTAAAATTTCTCCTGCTCTATCAGGTTTTGTATTTGCTTTCATCTTTAGTTTTGGACTTATTTATGTTTTAATATTTAATGGTGAATTGGCGACATCTAATATGCTTTATCTCACTGCAGGAGCCTATAATAAAAATATCTCTTGGAAAAAAGCCATAACAATTTTAATTTATTGTACTTTTTTCAACCTCGTTGGTGCTTGTATATTAGCTTGGTTGTTTAATCAATCGTACTCATTCCAGCATTTAACAAATGATAGCTTTTTAGGGCATGTCGTTGCTAAAAAGTTAGGAAAACCTAGTTCAGGAGCTTTCCTAGAAGGTATTATTGCTAATATGTTTGTGAATTTAGCTATCCTTGCTTACATGTTATTAAAAGAAGAATCGGCAAAAATGACGGTTATTTTATCTGCTATTTTTATGTTTGTTTTTCTATCAAACGAACACTTAATTGCTAATTTTGCATCCTTTATGTTAGCTGCTTTTAGCCATATCGAACATATTAAAGGTTTTACTCTTCTAAACGTTATCCGCCAATGGACACTTGTATTTTTTGGTAACTGGATAGGAGGGGGCGTTTTCATCGGCCTAGCCTATGCTTGGTTAAATAAAACAAAAACTTCTCACCATGAATAA

SEQ ID NO: 2036 - protein, 262 aa, Streptococcus agalactiae
MSLFQEKIAYNCAKKEALYKESLGRYALRSMLAGAYLTMSTAAGIVAADTIGKISPALSGFVFAFIFSFGLIYVLIFNGELATSNMLYLTAGAYNKNISWKKAITILIYCTFFNLVGACILAWLFNQSYSFQHLTNDSFLGHVVAKKLGKPSSGAFLEGIIANMFVNLAILAYMLLKEESAKMTVILSAIFMFVFLSNEHLIANFASFMLAAFSHIEHIKGFTLLNVIRQWTLVFFGNWIGGGVFIGLAYAWLNKTKTSHHE

SEQ ID NO: 2037 - protein, 1275 aa, Streptococcus agalactiae
ATGAAATTTAATGAGCAAAGTAACTCGCAAGCAGCACTTCTAGGCTTGCAACACCTGTTAGCTATGTATGCAGGATCCATTCTTGTACCTATCATGATTGCTAGTGCTCTTGGTTATAATGCTGAGCAACTAACTTATCTTATTGCGACAGATATTTTTATGTGTGGGATTGCCACCTTATTACAATTACAATTAAGTAAGCACTTTGGAGTGGGTCTTCCAGTTGTATTAGGGTGTGCCTTTCAGTCTGTAGCTCCTTTATCAATTATTGGTGCACAACAAGGTTCCGGCTATATGTTTGGAGCTTTAATTGCTTCAGGAATATATGTCGTTTTAGTTGCTGGCATTTTTTCTAAAGTTGCAAATTTCTTTCCTCCAATTGTAACAGGATCAGTTATTACTACAATTGGTTTGACATTAATACCAGTTGCGATGGGAAATATGGGTGATAATGCAAAAGAACCGAGCTTACAATCTTTAACTTTATCACTGGTAACGATTGGTGTTGTTTTATTAATTAATATTTTCGCAAAAGGCTTTTTGAAGTCAATTTCAATCCTTATTGGACTCATATCAGGTACAATTCTTGCAGCATTTATGGGCTTAGTTGATGCTTCTGTGGTAGCAGAAGCACCACTTGTACATATTCCGAAGCCATTTTATTTTGGAGCTCCTAGATTTGAATTTACTTCTATTTTAATGATGTGTATTATTGCAACAGTTTCTATGGTAGAATCAACAGGTGTTTACCTTGCGCTTTCAGATATTACAAACGATAAATTAGACAGTAAGAGACTTCGTAATGGTTACCGTTCAGAAGGATTGGCAGTATTACTTGGCGGCTTATTTAATACCTTTCCATATACCGGTTTTTCTCAAAATGTGGGACTGGTACAGATATCTGGGATACGTACGCGTAAGCCGATATATTTTACAGCTCTCTTCTTAGTTATACTTGGCTTGTTACCTAAATTTGGCGCAATGGCTCAAATGATTCCAAGTCCAGTTCTTGGTGGTGCTATGTTAGTTTTATTTGGTATGGTAGCACTTCAAGGGATGAAAATGCTTAATCAGGTTGATTTTGAGCATAATGAGCATAACTTTATCATTGCAGCCGTATCAATTGCAGCAGGAGTAGGTTTTAATGGGACAAATCTCTTCATTAGTCTTCCTAATACTTTACAAATGTTTTTGACAAATGGTATTGTTATCTCAACCCTGACAGCTGTTGTTTTAAATATCATTTTGAATGGATTGCCTAAAAAATTAATATGA

SEQ ID NO: 2038 - protein, 424 aa, Streptococcus agalactiae
MKFNEQSNSQAALLGLQHLLAMYAGSILVPIMIASALGYNAEQLTYLIATDIFMCGIATLLQLQLSKHFGVGLPVVLGCAFQSVAPLSIIGAQQGSGYMFGALIASGIYVVLVAGIFSKVANFFPPIVTGSVITTIGLTLIPVAMGNMGDNAKEPSLQSLTLSLVTIGVVLLINIFAKGFLKSISILIGLISGTILAAFMGLVDASVVAEAPLVHIPKPFYFGAPRFEFTSILMMCIIATVSMVESTGVYLALSDITNDKLDSKRLRNGYRSEGLAVLLGGLFNTFPYTGFSQNVGLVQISGIRTRKPIYFTALFLVILGLLPKFGAMAQMIPSPVLGGAMLVLFGMVALQGMKMLNQVDFEHNEHNFIIAAVSIAAGVGFNGTNLFISLPNTLQMFLTNGIVISTLTAVVLNIILNGLPKKLI

SEQ ID NO: 2039 - protein, 582 aa, Streptococcus agalactiae
ATGAAGTTATTGGAAGAACGTATTCTTAAAGATGGTGATGTTTTAGGTGAGAACATTTTAAAGGTTGATTCTTTTTTGACTCATCAGGTAGATTTTGAGTTAATGCAGGAAATAGGTAAAGTTTTTGCTGATAAATATAAAGAAGCCGGCATTACGAAGGTTGTTACGATTGAAGCATCTGGAATTGCACCAGCAGTGTACGCAGCTCAAGCATTGGGCGTACCAATGATATTTGCTAAAAAAGCTAAGAACATTACTATGACTGAAGGTATCTTAACTGCTGAAGTGTATTCTTTTACAAAGCAAGTTACGAGTCAAGTTTCTATTGTGAGTCGCTTTTTATCTAACGATGATACTGTACTCATCATTGATGACTTTTTAGCAAACGGTCAAGCGGCTAAAGGATTACTTGAAATTATTGGTCAAGCTGGAGCTAAGGTTGCTGGTATCGGAATCGTTATTGAAAAATCTTTCCAAGATGGGCGTGATTTGTTAGAAAAAACAGGTGTTCCAGTTACTTCTCTTGCTCGTATTAAAGCGTTTGAAAATGGTCGAGTTGTTTTTGCGGAGGCTGATGCTTAA

SEQ ID NO: 2040 - protein, 193 aa, Streptococcus agalactiae
MKLLEERILKDGDVLGENILKVDSFLTHQVDFELMQEIGKVFADKYKEAGITKVVTIEASGIAPAVYAAQALGVPMIFAKKAKNITMTEGILTAEVYSFTKQVTSQVSIVSRFLSNDDTVLIIDDFLANGQAAKGLLEIIGQAGAKVAGIGIVIEKSFQDGRDLLEKTGVPVTSLARIKAFENGRVVFAEADA

SEQ ID NO: 2041 - protein, 984 aa, Streptococcus agalactiae
ATGTTTAACGATATTCCTGTTTTTGATTATGAAGATATTCAATTAATACCAAACAAGTGTATTATATCTAGCCGCTCACAAGCTGACACAAGTGTCAAACTTGGAAACTATACCTTTAAACTTCCAGTAATCCCTGCTAATATGCAGACTATTATTGATGAAGAGGTAGCTGAAACATTAGCGTGTGAAGGTTATTTTTATATTATGCACCGTTTTAATGAAGAAGAAAGAAAACCTTTTATCAAGCGTATGCATGATAAAGGTTTAATTGCATCGATTTCGGTTGGGGTCAAAGACTATGAATATGACTTCGTGACAAGTCTGAAAGAAGATGCTCCTGAGTTTATCACTATTGATATTGCACATGGCCATTCTAACAGTGTTATAGAGATGATCCAACACATTAAACAAGAGCTTCCAGAAACTTTCGTTATTGCTGGAAATGTAGGAACGCCTGAAGCTGTTAGAGAATTGGAAAATGCAGGTGCAGATGCAACTAAAGTTGGTATTGGACCTGGTAAAGTTTGTATTACTAAAGTCAAGACAGGTTTTGGTACTGGAGGTTGGCAATTAGCTGCCTTACGTTGGTGTTCTAAAGCTGCTCGCAAGCCAATTATTGCTGATGGTGGTATTCGAACACATGGGGATATTGCAAAATCTATCCGCTTTGGTGCTAGTATGGTAATGATTGGTTCGCTGTTTGCTGGTCACCTTGAAAGTCCTGGAAAACTTGTGGAAGTAGATGGACAGCAATTTAAAGAATACTATGGCTCAGCTTCTGAATATCAAAAGGGAGAACATAAAAATGTTGAAGGTAAGAAAATTCTATTACCTGTTAAAGGGCGACTAGAGGATACTTTGACAGAAATGCAACAAGATTTGCAAAGTTCTATTTCTTACGCAGGAGGAAAAGAATTGGATAGCTTGAGACACGTTGATTACGTTATTGTTAAAAATTCTATTTGGAATGGTGATTCCATTTAA

SEQ ID NO: 2042 - protein, 327 aa, Streptococcus agalactiae
MFNDIPVFDYEDIQLIPNKCIISSRSQADTSVKLGNYTFKLPVIPANMQTIIDEEVAETLACEGYFYIMHRFNEEERKPFIKRMHDKGLIASISVGVKDYEYDFVTSLKEDAPEFITIDIAHGHSNSVIEMIQHIKQELPETFVIAGNVGTPEAVRELENAGADATKVGIGPGKVCITKVKTGFGTGGWQLAALRWCSKAARKPIIADGGIRTHGDIAKSIRFGASMVMIGSLFAGHLESPGKLVEVDGQQFKEYYGSASEYQKGEHKNVEGKKILLPVKGRLEDTLTEMQQDLQSSISYAGGKELDSLRHVDYVIVKNSIWNGDSI

SEQ ID NO: 2043 - protein, 278 aa, Streptococcus agalactiae
TTGGTATGGGGATTGGAGCAAGTAATATGGTTACGACAGCTTTAACAAAACTAAAGCCAGCACAGTCAGCGGATGGTAATAGTATCTTAAATACACTACAACAATTTGCGGGAGCTTTTGCAACCGCAGTAGCCTCACAAATTTTTACCATCGGACAAGTAGCTATTCCGAAAAATGGAGCTATAATCGGTAGTCAATTTGCAGTTCTATTCGTTATCATTGTTGTTATCTTAGCTATTGTAGGATTAACTTATCTTCGAAAAAGAAAAGCAATATAA

SEQ ID NO: 2044 - protein, 92 aa, Streptococcus agalactiae
MVWGIGASNMVTTALTKLKPAQSADGNSILNTLQQFAGAFATAVASQIFTIGQVAIPKNGAIIGSQFAVLFVIIVVILAIVGLTYLRKRKAI

SEQ ID NO: 2045 - protein, 1087 aa, Streptococcus agalactiae
ATGACTAAAAAGGGATGGCGTATTATGCCTGCCATAATTACAACGGCTATATTAGGTTTTTCAGGGATTCTTATTGAACATCTATGAATGTCACTTTTCCGCTTTTGATGAAAGAATTTGGGGTTAACCCCGCTGTTATTCAATGGGTGACAACAGGAAATTTGTTAGCTGTTGCTGTGACTGTGCCTTTGTCAGCATTTATGATTAAAAATTTATCAGAGAGACAAATTTTTACATTGGCAAATGTGCTTTTTTTATCTGGTGTTTTAATTGATAGCTTTGCCCCTAATTTAGCTATATTGTTAGTAGGGAGAGTCTTGCAAGGTGTTGGGACAGGATTAGCCCTCCCTTTATTGTTTCATATCATTCTTACACAAATCCCGATGGAGCGTAGAGGACTAATGATGGGAGTAGCTGCTATGGTCACACTTTTAGCACCGGCAGTTGGACCTACTTATGGTGGTGTCATTTCAGGAATGTTAGGATGGAAGATGATTTTTATGCTTCTGGCACCAATACTTATCATATCTACCTTTATAGGTTTGGCTTCTATTCCCAAACGTCAAGTAAGAATTAATGATAAACTCAATTTTCCTGCCTTTGTCAGTTTAGGTATTGGCTTGGCAACCCTTCTTTTAGCTATTGAAAAGATGTCTATTTTTTACTTATTAGTAGCTATTGTTAGTTTTGTTATTTTTTACTATTTAAATAAACAGCTAGAATTTTTGAATTTGAATGTTTTTAAAGATAAAGATTTCTCAATCTTATTGTATGGCGTCCTGGCTTTTCAAATGATTCCTCTAGCACTTTCGTTCTTATTACCTAACCTCTTGCAACTTGTTTTACATCAAACTTCAACCAAAGCTGGTTTGTTTATGTTTCCAGGTGCAATAGCAGTAGTTTTTTTATCCCCTTTTGCAGGTTATCTCCTGGATAAAATTGGTGCATTTAAGCCAATTATGATAGGTATCTCCCTTTCTTTGATAGGTTTAATTGGTACAGCTATATTCATTCCTGCGAAGTTTGTTGTAGTACTTTTAGCCTTTGATATTCTTACTAAAATTGGTATGGGGATTGGAGCAAGTAA

SEQ ID NO: 2046 - protein, 362 aa, Streptococcus agalactiae
MTKKGWRIMPAIITTAILGFSGILIETSMNVTFPLLMKEFGVNPAVIQWVTTGNLLAVAVTVPLSAFMIKNLSERQIFTLANVLFLSGVLIDSFAPNLAILLVGRVLQGVGTGLALPLLFHIILTQIPMERRGLMMGVAAMVTLLAPAVGPTYGGVISGMLGWKMIFMLLAPILIISTFIGLASIPKRQVRINDKLNFPAFVSLGIGLATLLLAIEKMSIFYLLVAIVSFVIFYYLNKQLEFLNLNVFKDKDFSILLYGVLAFQMIPLALSFLLPNLLQLVLHQTSTKAGLFMFPGAIAVVFLSPFAGYLLDKIGAFKPIMIGISLSLIGLIGTAIFIPAKFVVVLLAFDILTKIGMGDWSK

SEQ ID NO: 2047 - protein, 414 aa, Streptococcus agalactiae
ATGACCGAGTTTCACTATATGCTAAATTTTGACTTATTTAACCATCTCCCATATCGTTTTAGATTGCATAATAAGGACGGTCAAACAATTTATTCGAACCATAAACCTGAAGATCCTTTTGATATTTATCCTGAAGAAGAATATCCTATAGACAAATGGGTTCAAAACAGTCTAATAGAGAAAAAAGCGAAAGAGCTACATTTACTCTTACCTGGCGCATCACAAGATTATATTCTAGTACAATCTTATAAACGCTTAGAAAATGATAGTGGGCAACTAGTTGGTTATATTGAACATGTCCATAATATTAAACCACTATTAGAGGGGTATTTAAAAGAATCCGGTCAAGCTATCGTTGGATGGTCTGATGTCACGTCTGGTGCTTCTATCTCTAACGATGATTTTGAACTATAA

SEQ ID NO: 2048 - protein, 137 aa, Streptococcus agalactiae
MTEFHYMLNFDLFNHLPYRFRLHNKDGQTIYSNHKPEDPFDIYPEEEYPIDKWVQNSLIEKKAKELHLLLPGASQDYILVQSYKRLENDSGQLVGYIEHVHNIKPLLEGYLKESGQAIVGWSDVTSGASISNDDFEL

SEQ ID NO: 2049 - protein, 948 aa, Streptococcus agalactiae
ATGTTGGGGGWRAGAAATATACATGTTTCATGGCCGTTCGTTAAGGTTGCCATTATACTTTCTTATTGTGGGCAAGGGGCATGGATTTTAGCTAATAAGAACGCAGGAAATGAATTGAATCCCTTTTTTGCTAGTATTCCTTCGCAATTTACAATGCATGTCGTTATTTTAGCTACTTTGGCAGCTATCATCGCTTCACAGGCACTGATTTCTGGATCATTTACCTTAGTTTCTGAAGCTATGCGACTAAAAATATTCCCACAATTTCGTTCAACTTATCCTGGTGACAATATTGGTCAAACCTACATACCTGTTATTAATTGGTTCTTATTTGCCATTACAACCTCTATTGTTTTGCTTTTTAAGACTTCAGCGCACATGGAAGCAGCATATGGATTAGCGATAACAATTACGATGCTAATGACAACTATTTTACTGTCTTTCTTTTTAATTCAAAAAGGAGTAAAAAGAGGTTTAGTCTTATTGATGATGATTTTCTTTGGTATTTTAGAGGGAATCTTCTTCCTTGCTTCAGCTGTTAAATTTATGCATGGAGGCTATGTTGTTGTTATTATAGCAGTAGCAATTATATTCATCATGACTATCTGGTATAAAGGTAGTAAAATTGTTTCGCGTTATGTTAAGTTGTTGGATTTAAAAGATTACATCGGACAATTAGATAAACTTAGACATGATCATCGTTATCCGATTTATCATACTAACGTTGTTTATTTGACAAATCGTATGGAGGGAGACATGATTGATAAGTCTATCATGTATTCTATCCTTGATAAGCGCCCTAAAAAAGCACAAGTTTATTGGTTTGTAAACATTAAGGTCACTGATGAACCTTATACAGCTGACTATAAAGTTGACATGATGGGAACCGACTTCATTGTGAAGGTAGAACTTTACCTTGGATTTAAGATNNNNNCATTCATTCATTAA

SEQ ID NO: 2050 - protein, 315 aa, Streptococcus agalactiae
  VARIANT 4, 310, 311, 312: Xaa = Any Amino Acid
MLGXRNIHVSWPFVKVAIILSYCGQGAWILANKNAGNELNPFFASIPSQFTMHVVILATLAAIIASQALISGSFTLVSEAMRLKIFPQFRSTYPGDNIGQTYIPVINWFLFAITTSIVLLFKTSAHMEAAYGLAITITMLMTTILLSFFLIQKGVKRGLVLLMMIFFGILEGIFFLASAVKFMHGGYVVVIIAVAIIFIMTIWYKGSKIVSRYVKLLDLKDYIGQLDKLRHDHRYPIYHTNVVYLTNRMEGDMIDKSIMYSILDKRPKKAQVYWFVNIKVTDEPYTADYKVDMMGTDFIVKVELYLGFKXXXFIH

SEQ ID NO: 2051 - protein, 357 aa, Streptococcus agalactiae
ATGCAACATGTCAATCATTCTTCTTTTGATAAAGCATCAAAAGCAGGATTTATTATTGCTTTAGGCATTGTTTATGGAGATATTGGTACAAGCCCACTCTATACGATGCAATCATTGGTTGAAAACCAAGGTGGTATTTCTAGTGTCACAGAATCGTTTATCTTAGGTTCTATATCTTTAATCATATGGACCTTGACACTTATTACAACTATCAAGTATGTGCTTGTAGCTTTAAAGGCGGATAATCACCACGAAGGTGGTATTTTTTCTTTATATACCCTTGTTAGAAAAATGACACCTTGGTTAATTGTTCCGGCTGTTATTGGAGGTGCAACCTTNNNNNCATTCATTCATTAA

SEQ ID NO: 2052 - protein, 118 aa, Streptococcus agalactiae
  VARIANT 113, 114, 115: Xaa = Any Amino Acid
MQHVNHSSFDKASKAGFIIALGIVYGDIGTSPLYTMQSLVENQGGISSVTESFILGSISLIIWTLTLITTIKYVLVALKADNHHEGGIFSLYTLVRKMTPWLIVPAVIGGATXXXFIH

SEQ ID NO: 2053 - protein, 486 aa, Streptococcus agalactiae
TTGGATAAATCATATGAAGCTGATTTTGAAGATTGGATGACTATGATTAATACTAACGTTGTAGGATTAATTTACTTGACACGATGCATTTTACCGAAAATGGTAGAAGTTAATAGAGGGTTAATTATCAATTTGGGATCAACCGCAGGAACAATTCCTTATCCAGGAGCTAATGTCTATGGCGCATCAAAAGCTTTTGTAAAACAATTTTCTCTCAACTTGCGTGCCGATTTAGCTGGAACTAAAATCAGAGTTACTAACCTAGAACCCGGTTTATGTGAAGGGACAGAATTTTCAACTGTACGTTTCAAAGGAGATCATAAAAGAGTTGAAAAACTTTATGAAGGTGCGCATGCAATTCAAGCAGAGGATATTGCTAATACCGTGTCATGGGTTGCTAGCCAACCAGAACACATTAATATTAATCGCATAGAAATAATGCCAGTCAGTCAAACTTATGGACCTCAACCTGTTTATCGTTATTAA

SEQ ID NO: 2054 - protein, 161 aa, Streptococcus agalactiae
MDKSYEADFEDWMTMINTNVVGLIYLTRCILPKMVEVNRGLIINLGSTAGTIPYPGANVYGASKAFVKQFSLNLRADLAGTKIRVTNLEPGLCEGTEFSTVRFKGDHKRVEKLYEGAHAIQAEDIANTVSWVASQPEHININRIEIMPVSQTYGPQPVYRY

SEQ ID NO: 2055 - protein, 159 aa, Streptococcus agalactiae
ATGGAATGNNNNNTAAAATGCCTTGGAGAAAAGTTTTCAGAGGGGTACTTTTATCCACTTCAAATGGATATTACAAGTAGAGAATCGGTTGACAAAGCTTTAGAAAGTCTGCCTAAAAATTTGCAATCAATTGATTTGTTGTTAATAATGCAGGTTTAG

SEQ ID NO: 2056 - protein, 52 aa, Streptococcus agalactiae
  VARIANT 3, 4, 5: Xaa = Any Amino Acid
MEXXXKCLGEKFSEGYFYPLQMDITSRESVDKALESLPKNLQSIDLLLIMQV

SEQ ID NO: 2057 - protein, 903 aa, Streptococcus agalactiae
ATGGAATGNNNNNAATTTGAAGGTCTTGTGGATCCTGTTATTTTAGGTAAGGCTGACGAAGTTCACGATTCTTTGGCAAGACTTGGTTTTGTTGATCAAGATTATAGCGTTATTGACCCTGAACAATACGAAAAATTTGAAGAGATGAAAGAAGCTTTTGTTGAGATTCGTAAAGGCAAAGCTACTATGGAAGATGCAGATCGTCTTTTGAAGGATGTTAACTATTTTGGGGTTATGTTAGTAAAACTTGGTTTGGCAGATGGTATGGTATCAGGGGCCATTCATTCAACAGCTGATACTGTACGTCCTGCTCTTCAAATTATTAAAACAAAACCAGGAATTTCACGCACTTCAGGTGTATTCTTGATGAACCGTGAAAGTACACAAGAACGTTATATTTTTGCTGACTGTGCTATTAACATTGATCCTAATGCACAAGAGCTAGCAGAAATTGCAGTAAATACTGCGGATACAGCCAAAATATTTGATATTAATCCCAAGATTGCTATGCTTAGTTTTTCAACAAAAGGAAGTGCAAAAGCGCCTCAAGCTGAAAAAGTTCAAGAAGCAGCTAAAATTGCCAAAGATTTATCTCCCGAATTAGCTGTTGATGGAGAATTACAATTTGATGCAGCTTTTGTTCCGGAAACTGCAGAAATTAAAGCTCCTAATAGTGATGTTGCTGGAAAAGCAAATGTTTTTATTTTCCCAGACCTTCAATCAGGAAATATTGGCTATAAAATTGCACAACGTTTGGGTATGTTTGAAGCAATCGGACCGATCTTACAAGGATTGAATGCTCCAGTAAATGATTTATCACGTGGATCAAGTGCTGAAGATATTTACAACTTGCTATCATTACAGCTGCTCCAGCTATTGATGAGAAATCAAAATAAGTTATAA

SEQ ID NO: 2058 - protein, 300 aa, Streptococcus agalactiae
  VARIANT 3, 4, 5: Xaa = Any Amino Acid
MEXXXFEGLVDPVILGKADEVHDSLARLGFVDQDYSVIDPEQYEKFEEMKEAFVEIRKGKATMEDADRLLKDVNYFGVMLVKLGLADGMVSGAIHSTADTVRPALQIIKTKPGISRTSGVFLMNRESTQERYIFADCAINIDPNAQELAEIAVNTADTAKIFDINPKIAMLSFSTKGSAKAPQAEKVQEAAKIAKDLSPELAVDGELQFDAAFVPETAEIKAPNSDVAGKANVFIFPDLQSGNIGYKIAQRLGMFEAIGPILQGLNAPVNDLSRGSSAEDIYNLLSLQLLQLLMRNQNKL

SEQ ID NO: 2059 - protein, 816 aa, Streptococcus agalactiae
ATGGAATGNNNNNAAGAAGGTGCAAAGTTAAACACTTTTGAAAAGCATGATGTTTCAAGGGGGTTATTAGCAAAGATTAAGTACAGAGGTGGTAAGATTTTTGTCAATGGTGAAGAGCAGAACGCTATTTTCTTATTAGAGATTGGCGATGTTGTTACGATAGATATTCCTGACGAGCCTTCTCACGAAACTTTGGAACCAGTACCTCACGATTTAGATATTGTTTATGAGGATGATCATTTTTTGATTTTAAATAAACCTTTTGGTTTCGCTAGTATTCCTAGCTCTATTCATTCAAATACAATTGCTAATTTTATAAAACACTATTATGTGTCTAATAACTATGCCAATCAGCAGGTCCATATTGTGACCCGGTTGGATCGAGATACAAGTGGATTAATGTTATTCGCCAAGCATGGTTATGCCCATGCTCGTCTAGATAAACAACTTCAGGCTAAAGCAATTGAAAAAAGGTATTATGCATTAGTATCAGGGAGTGGTGATTTAGCAGATAGTGGTGATATTATAGCTCCTATTGCACGAGATGTTGATAGTATTATTACGAGGCGAGTCCATGAATCAGGCAAATATGCACATACTAGTTATCAAGTAGTTGCTCGTTATGGTGATGTTAGATTAGTGGATATCAAATTACATACAGGGCGTACTCATCAAATTAGAGTTCACTTTGCTCATATCGGCTTTCCTCTTTTGGGAGATGATTTGTACGGAGGACGTATGGATCTAGGAATAAACAGGCAAGCATTGCATTGYCATCTTTGTCTTTTACGACCCTTTTATGGGAAAAATAAATAA

SEQ ID NO: 2060 - protein, 272 aa, Streptococcus agalactiae
  VARIANT 3, 4, 5, 259: Xaa = Any Amino Acid
MEXXXEGAKLNTFEKHDVSRGLLAKIKYRGGKIFVNGEEQNAIFLLEIGDVVTIDIPDEPSHETLEPVPHDLDIVYEDDHFLILNKPFGFASIPSSIHSNTIANFIKHYYVSNNYANQQVHIVTRLDRDTSGLMLFAKHGYAHARLDKQLQAKAIEKRYYALVSGSGDLADSGDIIAPIARDVDSIITRRVHESGKYAHTSYQVVARYGDVRLVDIKLHTGRTHQIRVHFAHIGFPLLGDDLYGGRMDLGINRQALHWXFFVFLRPFYGKNK

SEQ ID NO: 2061 - protein, 468 aa, Streptococcus agalactiae
ATGACACAGATGAATTTTACAGATAGAGCAACACGTGTTGCTATAATTGCTAACGGAAAATATCAAAGCAAGCGTGTAGCCTCAAAGCTCTTTGCTGCTTTTAAACATGATCCTGATTTTTATTTATCAAAAAAGGATCCTGATATTGTCATTTCTATTGGTGGAGATGGTATGCTTTTGTCAGCCTTCCATATGTACGAAAAACAACTGGATAAAGTAAGGTTTGTCGGTGTTCATACAGGACATTTAGGGTTTTATACAGACTATCGAGATTTTGAAGTTGACACATTAATTAATAATTTGAAAAATGATGAAGGTGAACAAATCTCCTATCCCATTTTGAAAGTAACTATTACCCTTGAAGATGGTCGAGTTATTCGTGCGCGTGCTTTAAATGAGTCTACTATTAAGCGTATTGAAAAAACAATGGTAGCGGATGTTNNNNNCATTCATTCATTAATTAATTAA

SEQ ID NO: 2062 - protein, 155 aa, Streptococcus agalactiae
  VARIANT 148, 149: Xaa = Any Amino Acid
MTQMNFTDRATRVAIIANGKYQSKRVASKLFAAFKHDPDFYLSKKDPDIVISIGGDGMLLSAFHMYEKQLDKVRFVGVHTGHLGFYTDYRDFEVDTLINNLKNDEGEQISYPILKVTITLEDGRVIRARALNESTIKRIEKTMVADVXXIHSLIN

SEQ ID NO: 2063 - protein, 672 aa, Streptococcus agalactiae
ATGTCAATGGATTGGGAAACATTTCTAGACCCTTATATTCAAACGGTTGGTGAATTAAAAATAAAGCTTCGTGGTATTCGTAAACAATTTAGAAAGCAAAATCGTCACTCTCCAATAGAATTTGTTACTGGACGCGTAAAGTCGGTTGAAAGTATTCAAGAAAAGATGGTTTTACGTGGTATTTCAGAAGAAAATCTTGCTCAGGACTTGCAAGATATTGCAGGTCTTCGTATCATGGTACAATTTGTAGATGACGTTGATGAAGTCCTTGCCTTATTGAGAAAACGTCATGACATGACAGTGGTTCAGGAGCGAGACTATATTACCCATATGAAATCTAGTGGATATCGTTCATATCATGTCGTTGTAGAGTATCCTGTAGACACAATAGATGGACAAAAGAAAGTTTTAGCAGAAATACAAATTAGAACTCTGGCTATGAATTTTTGGGCAACCATCGAACATTCATTAAATTACAAGTATCAGGGGGACTTCCCTGAAGAAATTAAACAAAGACTGGAGAAAACAGCAAAAATCGCTTTAGAATTGGATGAAGAAATGCGTAAGATTCGCGAAGATATTCGTGAAGCACAGCTTTTATTTGATCCTTTAAATCGAAAATTGAGCGATGGTGTAGGAAATAGTGATGACACAGATGAATTTTACAGATAG

SEQ ID NO: 2064 - protein, 223 aa, Streptococcus agalactiae
MSMDWETFLDPYIQTVGELKIKLRGIRKQFRKQNRHSPIEFVTGRVKSVESIQEKMVLRGISEENLAQDLQDIAGLRIMVQFVDDVDEVLALLRKRHDMTVVQERDYITHMKSSGYRSYHVVVEYPVDTIDGQKKVLAEIQIRTLAMNFWATIEHSLNYKYQGDFPEEIKQRLEKTAKIALELDEEMRKIREDIREAQLLFDPLNRKLSDGVGNSDDTDEFYR

SEQ ID NO: 2065 - protein, 573 aa, Streptococcus agalactiae
ATGACACACCTAGAAATTGAATACAAAACTCTATTGAATAAAGACGAATTTAATCGTCTAACAAGCTTATTTTCTCATGTTCAACCTATTACTCAAACCAATTACTATTTTGACACAGAAACATTTGAAATGAAAGCACACCGAATGTCACTTCGCATTAGAACGTTACCTAACCGTGCCGAACTAACACTAAAAATCCCTAGAGAAGTAGGAAATTTAGAGCACAATCATGACCTTACTTTAGAAGAAGCTAAATATATCGTTAAAAATGGCCAGTTCCCTGAAGATACTGAGATTGCTTCTTTAATCCTTGAAAAGGGAGTTGATCCAACCAAATTAGCTGTCTTTGGACAACTTACAACAACAAGACGAGAGATGGAAACTTCAATCGGCTTAATGGCTCTAGACAGCAATATATATGCTGATATTAAAGATTATGAACTTGAGTTAGAAGTCAAACAACCTAAACAAGGGAAAAGAGATTTCGACCAGTTTTTAAAAGAAAATAATATTAATTTTAAATACGCCAAAAGTAAGGTGGCTAGATTCTCTGCTACTTTAAAAAATAACTAA

SEQ ID NO: 2066 - protein, 190 aa, Streptococcus agalactiae
MTHLEIEYKTLLNKDEFNRLTSLFSHVQPITQTNYYFDTETFEMKAHRMSLRIRTLPNRAELTLKIPREVGNLEHNHDLTLEEAKYIVKNGQFPEDTEIASLILEKGVDPTKLAVFGQLTTTRREMETSIGLMALDSNIYADIKDYELELEVKQPKQGKRDFDQFLKENNINFKYAKSKVARFSATLKNN

SEQ ID NO: 2067 - protein, 975 aa, Streptococcus agalactiae
ATGGCAGAACAATACGCCGATAAACAAATCAAACTTTTCTCATTAACCGCTAATAGAGAAATTGCTGAAAAAATTTCCCAAGCTTCAGGAATTCCTTTGGGTAAGATGTCATCACGTCAATTCTCTGATGGCGAAATTATGATTAATATTGAGGAAACGGTGCGCGGTGACGATATCTATATCATCCAATCTACAAGCTTCCCAGTCAATGATAATCTCTGGGAATTACTCATTATGATTGACGCTTGCAAACGTGCAAGTGCTAATACTGTTAACATCGTAGTCCCTTATTTTGGATACTCTCGTCAGGACCGCATCGCTGCATCTCGTGAACCTATTACTGCAAAATTGGTCGCTAATATGTTAGTTAAAGCTGGAGTTGATCGAGTTCTTACCCTCGACTTACATGCAGTGCAAGTACAAGGGTTCTTCGATATCCCAGTTGACAATCTTTTTACTGTCCCACTATTTGCTGAACACTATAATCAACTCGGTCTCTCTGGTGAAGATGTCGTCGTTGTTAGTCCTAAAAATTCTGGAATCAAGCGTGCTCGTAGTTTGGCAGAATACCTTGACTCTCCAATTGCTATCATTGATTATGCACAAGATGATTCTGAACGTGAAGAAGGCTATATTATTGGTGAGGTAGAAGGTAAGAAAGCTATTATTATTGATGATATTTTAAATACAGGAAAAACCTTTGCCGAAGCTGCAAAAATTTTAGAACGTGGTGGAGCAACTGAGATTTATGCTGTTGCTAGTCATGGGCTTTTTGCTGGCGGCGCAGCTGATATTTTAGAGTCTGCACCAATTAGAGAAATTATCGTAACAGACTCTGTTTTATCTAAAGAGCGTATTCCTAGCAATATTAAATATCTGACCGCTAGCCATCTCATTGCAGACGCTATTATCCGTATCCATGAAAGAAAACCTTTAAGTCCATTATTTTCATATCGTTCAGATAAGAAGGATTAA

SEQ ID NO: 2068 - protein, 324 aa, Streptococcus agalactiae
MAEQYADKQIKLFSLTANREIAEKISQASGIPLGKMSSRQFSDGEIMINIEETVRGDDIYIIQSTSFPVNDNLWELLIMIDACKRASANTVNIVVPYFGYSRQDRIAASREPITAKLVANMLVKAGVDRVLTLDLHAVQVQGFFDIPVDNLFTVPLFAEHYNQLGLSGEDVVVVSPKNSGIKRARSLAEYLDSPIAIIDYAQDDSEREEGYIIGEVEGKKAIIIDDILNTGKTFAEAAKILERGGATEIYAVASHGLFAGGAADILESAPIREIIVTDSVLSKERIPSNIKYLTASHLIADAIIRIHERKPLSPLFSYRSDKKD

SEQ ID NO: 2069 - protein, 1116 aa, Streptococcus agalactiae
ATGATTTATTTAGACAATGCTGCTACTACCGCTCTAACCCCATCTGTTATTGAGAAAATGACCAATGTCATGACAAGTAACTATGGTAATCCATCTAGTATACATACCTTTGGGCGTCAAGCAAATCAACTTTTACGTGAATGTCGACAAATTATTGCTGAATATCTAAATGTTAATTCACGTGAAATTATTTTCACTTCTGGGGGAACTGAGAGCAACAATACAGCTATCAAAGGGTATGCTCTTGCAAATCAGCTAAAAGGTAAACATATTATTACCTCTGAAATTGAACATCATTCAGTCCTACATACTATGACTTACTTATCAGAGCGATTTGGTTTTGATATTACTTACTTAAAACCAAACCATGGACAAATTACTGCAAAAGACGTTCAAGAAGCTTTACGAGATGATACTATTATGGTATCTCTCATGTTTGCTAATAATGAAACCGGGGACTTTTTACCAATTCAAGAGATTGGTCAGCTTCTCAGGAACCACCAAGCTGTTTTTCACGTTGATGCCGTTCAAGTCTTTAGCAAAATGGAACTTGATCCTCATTCTTTAGGAATTGACTTTTTAGCTGCTTCTGCCCATAAATTTCACGGTCCAAAAGGTGTTGGGATACTTTACTGTGCTCCCCATCACTTTGATAGTCTACTTCATGGTGGAGACCAAGAGGAAAAAAGGCGTGCTTCAACTGAAAATATAATTGGTATTGCTGGAATGTCTCAAGCTCTTACTGATGCTACGACTAACACCCTTAAAAATTGGACTCACATTAGTCAGCTGAGAACGACCTTTTTAGATGCTATTTCAGACCTTGACTTCTATCTTAATAACGGTCAAGACTGCTTACCTCATGTACTTAATATAGGTTTTCCTAGACAGAATAATGGCTTGTTATTGACACAGTTAGATTTAGCTGGATTCGCAGTTTCAACAGGTTCTGCATGTACTGCAGGAACAGTCGAACCTAGTCATGTCTTAACAAGCTTGTATGGAGCCAACTCACCACGTCTAAATGAATCAATACGTATTAGTTTTTCAGAACTAAATACCCAAGAAGAAATTCTTGAATTAGCTAAAACCTTAAGAAAAATTATAGGAGATTAA

SEQ ID NO: 2070 - protein, 371 aa, Streptococcus agalactiae
MIYLDNAATTALTPSVIEKMTNVMTSNYGNPSSIHTFGRQANQLLRECRQIIAEYLNVNSREIIFTSGGTESNNTAIKGYALANQLKGKHIITSEIEHHSVLHTMTYLSERFGFDITYLKPNHGQITAKDVQEALRDDTIMVSLMFANNETGDFLPIQEIGQLLRNHQAVFHVDAVQVFSKMELDPHSLGIDFLAASAHKFHGPKGVGILYCAPHHFDSLLHGGDQEEKRRASTENIIGIAGMSQALTDATTNTLKNWTHISQLRTTFLDAISDLDFYLNNGQDCLPHVLNIGFPRQNNGLLLTQLDLAGFAVSTGSACTAGTVEPSHVLTSLYGANSPRLNESIRISFSELNTQEEILELAKTLRKIIGD

SEQ ID NO: 2071 - protein, 348 aa, Streptococcus agalactiae
ATGGCATTTGAAAAAGAAATAAATCTTCCAGACTGCAATTACATTTACACTATCAGCCCGAACATTAAAAAATATACCTTACGCGATACTACATTCACTCAAAATCGCTTAGGTAATTATGAATTAGAGCGTCTCCTAGAAACAGTACCTAATTCTGGCGATGGCTTTCCTCTAAAGATTACAATCAATAAAGAACTTTCTGGTTTTAAGCTCTTAATTACTGATAAATCTGGCCTTAGAATAGTAAATATCTTTAAATCTACCGATCATAAAATTCTTCAAGACAAATTTTATTTCTTAATGGACAGCCTCGTTGAGCGTAATATCTTTACGAAAACTGCAAAATAA

SEQ ID NO: 2072 - protein, 115 aa, Streptococcus agalactiae
MAFEKEINLPDCNYIYTISPNIKKYTLRDTTFTQNRLGNYELERLLETVPNSGDGFPLKITINKELSGFKLLITDKSGLRIVNIFKSTDHKILQDKFYFLMDSLVERNIFTKTAK

SEQ ID NO: 2073 - protein, 633 aa, Streptococcus agalactiae
ATGGATAAGTCTATTCCTAAAGCAACTGCTAAACGTTTATCACTGTACTACCGTATTTTTAAACGTTTTAATACTGATGGCATCGAAAAAGCTAGTTCCAAACAAATTGCAGATGCCCTAGGTATCGATTCTGCTACTGTTCGACGTGATTTTTCTTATTTTGGTGAACTAGGACGCCGTGGTTTTGGTTATGATGTCAAAAAACTTATGAACTTCTTTGCAGAAATATTGAACGATCATTCTACAACAAATGTTATGCTGGTGGGGTGTGGAAATATCGGTAGAGCTCTCTTGCATTATCGTTTCCACGATCGCAATAAAATGCAAATTTCAATGGCTTTTGATTTAGATAGCAATGATTTAGTTGGTAAAACAACCGAGGATGGCATTCCTGTCTACGGTATTTCGACTATCAATGACCATTTAATAGATAGTGATATTGAAACTGCTATCCTAACAGTACCTAGTACAGAAGCCCAAGAAGTTGCTGACATCTTAGTCAAAGCAGGTATAAAAGGCATCTTGAGTTTTTCTCCAGTTCATTTAACATTACCAAAAGATATCATTGTTCAGTATGTAGATTTAACAAGCGAATTACAAACTTTACTTTATTTCATGAACCAGCAGCGATAA

SEQ ID NO: 2074 - protein, 210 aa, Streptococcus agalactiae
MDKSIPKATAKRLSLYYRIFKRFNTDGIEKASSKQIADALGIDSATVRRDFSYFGELGRRGFGYDVKKLMNFFAEILNDHSTTNVMLVGCGNIGRALLHYRFHDRNKMQISMAFDLDSNDLVGKTTEDGIPVYGISTINDHLIDSDIETAILTVPSTEAQEVADILVKAGIKGILSFSPVHLTLPKDIIVQYVDLTSELQTLLYFMNQQR

SEQ ID NO: 2075 - protein, 681 aa, Streptococcus agalactiae
ATGTACCATATTGAATTAAAAAAGGAAGCTTTACTACCAAGAGAACGCCTAGTTGATTTAGGCGCAGATAGATTGAGTAATCAGGAGTTATTAGCCATTCTCTTACGTACAGGTATTAAAGAAAAACCTGTTCTTGAAATTTCAACGCAAATTTTAGAAAACATAAGCAGTTTAGCAGATTTTGGTCAATTATCCTTACAGGAGTTGCAATCCATTAAAGGAATCGGTCAGGTTAAATCCGTCGAAATAAAAGCTATGCTAGAACTAGCAAAACGGATTCACAAAGCTGAATATGATCGTAAAGAGCAAATTTTAAGTAGTGAACAATTAGCGAGGAAAATGATGCTCGAATTAGGGGATAAAAAACAAGAACATTTAGTAGCTATTTATATGGATACACAAAATCGTATTATCGAACAGAGAACTATTTTTATTGGTACTGTACGTCGTTCAGTAGCAGAGCCAAGAGAAATTCTACATTATGCTTGTAAAAACATGGCAACTTCTTTGATTATTATACATAATCATCCCTCAGGTTCTCCAAATCCCAGTGAAAGTGATTTAAGTTTCACTAAAAAAATAAAACGATCATGTGATCATCTGGGAATTGTCTGCCTAGATCACATCATCGTTGGAAAAAATAAATATTATAGTTTTCGAGAAGAAGCAGATATTTTATAA

SEQ ID NO: 2076 - protein, 226 aa, Streptococcus agalactiae
MYHIELKKEALLPRERLVDLGADRLSNQELLAILLRTGIKEKPVLEISTQILENISSLADFGQLSLQELQSIKGIGQVKSVEIKAMLELAKRIHKAEYDRKEQILSSEQLARKMMLELGDKKQEHLVAIYMDTQNRIIEQRTIFIGTVRRSVAEPREILHYACKNMATSLIIIHNHPSGSPNPSESDLSFTKKIKRSCDHLGIVCLDHIIVGKNKYYSFREEADIL

SEQ ID NO: 2077 - protein, 1134 aa, Streptococcus agalactiae
ATGAAATTTGAAAAACGGCAGGTCTATTATGTTGTCATAACATTTGCTATTTGCTATGCTATACAGGCTTATTGGGGAGCTGTTTCTAATATTTTAACTACGCTTCATAAGGCAATATTTCCTTTTTTGATGGGAGCTGGAATTGCCTATATTATTAATATTGTAATGTCAGTCTATGAGCGATTATATATAAAGCTTTTTAAAGGATCTAGACTATTAATGGCAATCAAGCGTAGTGTTTCTATGATTTTATCCTATGCAACTTTTATTGGTTTAATTGTCTGGCTATTTTCAATTGTCATTCCAGATTTGATTTCTAGTTTGAGTTCTTTATTGGTTATTGATACCGGAGCACTTGCTAAATTGGTTAATAATCTCAATGAAAATAAACAAATTTCTGAGGCTTTAAATTATATGGGAACAGATAAAGACTTAGTTTCTACTTTAAGTGGTTATAGCCAGCAGATTTTGAAGCAAGTTTTATCTGTTTTAACAAATTTACTAACCTCAGTTTCCTCTATTGCGGCAACACTTCTGAATGTTTTTGTTAGTTTTATTTTTTCAATTTACGTTTTGGCAAACAAGGAGCAGTTGGGACGTCAATTTAATTTGTTAATTGATACCTATTTAGGTTCAACAGGCAAAACATTCCATTACGTTCGTCATATCCTTCATCAACGTTTCCATGGTTTTTTTGTAAGCCAAACTTTAGAAGCTATGATTTTAGGAAGTTTGACGGTTATTGGTATGTTGATTTTCCAATTTCCTTATGCTTTAACAGTTGGGGTTTTAGTTGCTTTTACAGCTCTAATACCGGTTGTGGGAGCCTACATTGGTGTTACAATCGGTTTCATCTTAATTGCTACTGAATCGCTTACTGAAGCATTCTTGTTTGTTCTTTTCTTGATCCTTTTACAACAATTTGAGGGAAATGTCATTTATCCGAAAGTTGTCGGTGGATCGATTGGACTGCCTTCTATGTGGGTTTTAACGGCTATTACTATCGGAGGTGCTTTATGGGGGATCTTAGGCATGTTACTTGCTGTTCCTGTTGCAGCTACTATCTATCAGATTGTAAAAGATCATATTATCAAGCGACAAACGCTTAGAAATCGTGCACGAACCTATCGTTAA

SEQ ID NO: 2078 - protein, 377 aa, Streptococcus agalactiae
MKFEKRQVYYVVITFAICYAIQAYWGAVSNILTTLHKAIFPFLMGAGIAYIINIVMSVYERLYIKLFKGSRLLMAIKRSVSMILSYATFIGLIVWLFSIVIPDLISSLSSLLVIDTGALAKLVNNLNENKQISEALNYMGTDKDLVSTLSGYSQQILKQVLSVLTNLLTSVSSIAATLLNVFVSFIFSIYVLANKEQLGRQFNLLIDTYLGSTGKTFHYVRHILHQRFHGFFVSQTLEAMILGSLTVIGMLIFQFPYALTVGVLVAFTALIPVVGAYIGVTIGFILIATESLTEAFLFVLFLILLQQFEGNVIYPKVVGGSIGLPSMWVLTAITIGGALWGILGMLLAVPVAATIYQIVKDHIIKRQTLRNRARTYR

SEQ ID NO: 2079 - protein, 1437 aa, Streptococcus agalactiae
ATGGTAAAACAAGTATTTCCAAAAGGTTTTTTATGGGGCGGGGCAACTGCTGCCAATCAATGTGAAGGAGCTTACAATGTTGATGGACGTGGCCTAGCAAATGTAGATGTTGTTCCTACTGGAGAAGATCGATTTGCAATTATTTCAGGACAAAAGAAAATGTTTGATTTTGAGGAAGGATACTTTTATCCAGCAAAAGAATCAATAGATTTTTATCATCATTATAAAGAAGACCTTGCATTACTTGCAGAAATGGGTTTCAAAACCTATCGTATGTCAATAGCATGGACGCGTATTTTTCCAAAGGGTGATGAGCTATATCCAAATGAAGCTGGTCTTCGGTTTTATGAAAATATTTTTAAAGAGTGTCGTAAGTATGGTATTGAACCTTTGGTAACCATCACACATTTTGACTGTCCTATCTACCTTATTAAACATTACGGTGGGTGGCGGAGCCGTAAAATGATTGGTTTTTATGAGCGCCTTGTACGAGCTTTATTTACTCGTTTTAAGGGGTTAGTTAAATATTGGTTGACCTTTAACGAAATCAATATGATTTTACACGCTCCTTTTATGGGCGCTGGCTTATATTTTGAAGATGGTGAAAATCAAGAGCAAATTAAATATCAAGCAGCTCACCATGAGTTAGTGGCTTCGGCTATTGCAGTAAAAATTGCTCATGAAGTTGATCCAAATAATCAAATCGGATGTATGTTAGCTGCAGGTCAATACTATCCAAATACGTGTCATCCACAAGATTATTGGGCTTCGATGCAAAAAAATAGAGAAAATTATTTTTTTATTGATGTGCAAACGCGTGGCAAATACCCTAATTATGCTAAAAAATATTTTGAGCATTTAGGTATTTCAATTCAAATGACAGCAGAAGATCTTGCTTTGTTAAGAGACTATACGGTTGATTTTATTTCATTTTCTTACTATTCAAGCCGAGTAGCTTCAGGTAATCCAACTGTCAGTGAACAGGTTCAAGAAAATATTTTCGCATCTCTTAAGAATCCTTACTTGAAATCTTCTGAATGGGGATGGCAAATTGATCCGCTTGGATTACGCATTACCTTAAATGCTATCTGGGATCGTTATCAAAAACCGATGTTTATTGTTGAAAATGGACTTGGAGCAGTAGATATTCCTGATGAGAATGGTTACGTAGAAGATGATTATCGTATTGATTACCTCCGTCAGCACATTGCTGCAATGAGAGATGCTATATATGTAGATGGTGTTAATCTAATTGGCTATACTACATGGGGATGTATTGATTTAGTATCTGCAGGAACTGGTGAAATGGAAAAACGCTATGGTTTCATTTATGTTGATCGCAATAATAAAGGAGAGGGAACACTCAAGCGTTACAAGAAAAAATCGTTTTATTGGTACAAGAAGGTTATTGCAAGTAATGGCAGTCAAATAGAATAA

SEQ ID NO: 2080 - protein, 478 aa, Streptococcus agalactiae
MVKQVFPKGFLWGGATAANQCEGAYNVDGRGLANVDVVPTGEDRFAIISGQKKMFDFEEGYFYPAKESIDFYHHYKEDLALLAEMGFKTYRMSIAWTRIFPKGDELYPNEAGLRFYENIFKECRKYGIEPLVTITHFDCPIYLIKHYGGWRSRKMIGFYERLVRALFTRFKGLVKYWLTFNEINMILHAPFMGAGLYFEDGENQEQIKYQAAHHELVASAIAVKIAHEVDPNNQIGCMLAAGQYYPNTCHPQDYWASMQKNRENYFFIDVQTRGKYPNYAKKYFEHLGISIQMTAEDLALLRDYTVDFISFSYYSSRVASGNPTVSEQVQENIFASLKNPYLKSSEWGWQIDPLGLRITLNAIWDRYQKPMFIVENGLGAVDIPDENGYVEDDYRIDYLRQHIAAMRDAIYVDGVNLIGYTTWGCIDLVSAGTGEMEKRYGFIYVDRNNKGEGTLKRYKKKSFYWYKKVIASNGSQIE

SEQ ID NO: 2081 - protein, 615 aa, Streptococcus agalactiae
ATGTTAGAAGTTATTGACAAAGCTTTAAGAGATTATCAAATGAAACGAGAACAGTTTTTTGAGATTAACAATCAGACAGTACAAGAAGGTGCCATTGTTTTCACAGGAGATTCTATCGTTGAGTTTTTTCCTTTAAAAAAACATTTAGGACGTGACTATCCTTTAGTTAATAGAGGAGTAGCAGGATCAGATACTTATTGGCTTTTAGAAAACTTGAGAACCCAAGTATGGGAACTATTACCATCCAAAGTATTTATTTTAATTGGAACAAATGATATTGGTTTAGGGCATTCACAGTCAGAAATCATAGCTAATATCACGGATATAATTGCAGAAATTCGTGCGGAATCTTATATGACAGAGATTAATATACTGAGTGTTTTACCTGTTAGTGAAGAAGATGACTATATAGAGCGTGTCAAGGTAAGAAATAATCAAGCAATAAAAGCTTTAAACAAAACCTTATCAGTAATTTCTGGCATTAATTATATTGAATTGTATGATTTATTAGTTGACGAAAAAGGTCAGCTTGCTAGCAGTTTTACAAAAGATGGTTTGCACCTAACAGATCAAGCCTATGCTAAAATTTCTGAAACGATAAAACCCCACCTTTAA

SEQ ID NO: 2082 - protein, 204 aa, Streptococcus agalactiae
MLEVIDKALRDYQMKREQFFEINNQTVQEGAIVFTGDSIVEFFPLKKHLGRDYPLVNRGVAGSDTYWLLENLRTQVWELLPSKVFILIGTNDIGLGHSQSEIIANITDIIAEIRAESYMTEINILSVLPVSEEDDYIERVKVRNNQAIKALNKTLSVISGINYIELYDLLVDEKGQLASSFTKDGLHLTDQAYAKISETIKPHL

SEQ ID NO: 2083 - protein, 822 aa, Streptococcus agalactiae
ATGATTAAAGTAATAGCAACAGATATGGATGGAACTTTTCTACGCTCAGATAAAACTTATGATAAAGCACGGTTTTCTTCTTTATTAACGTTGATGGAGAAGTATGATATTAAATTTGTAGCTGCTAGTGGTAATTTATACGATCAATTGTTGTTAAACTTTTTGGAATACCCTAATCGTATCGCCTACGTCGCTGAAAATGGTGGTCGTGTCATTGACCAAGATGGCACATTACTAAAAGAAACTTATTTATCTAATGATACAGTTGCAGCTGTTTTATCCTATTTATATCAGAACTATCCTGAGACACTCATCAGCTTATCTGGTGAAAAACGTTCATACCTTGAGCGAAGAACTCCTATTAATAGGCGGACTGAATTAGAATACTATATGCCTAATTTTATCTATAAAGACCATTTGCTGCCCTTAGATGATGACCGATATTTTCAAATGACACTTTGGGTAAATGAAAATCTTGTTTCTGAGATGTTGTTAGATATTAGTGAACACTTTAAAAATCATCATATCAGATTGACCTCTAGTGGTTTTGGTTGTATCGATGTCTTACCAGCTGATGTCAATAAAGCGGATGGTATCGCTATTCTCCTTGAAAAGTGGGGATTGAAACAGGATCAAGTGATGGTTTTTGGTGATGGGGGCAATGATGTGGAAATGTTGAGAGCAGCAAATATTTCTTACGCTATGTCAAATGCGCCAGAAGAAATTAAAGCTATTGCTAAATATCAAACAGTTAGTAACGATCAAGATGGTGTGTTAGAAACGATAGAGAACTTTCTTCACAAGATGAGTGATAATGAATAG

SEQ ID NO: 2084 - protein, 273 aa, Streptococcus agalactiae
MIKVIATDMDGTFLRSDKTYDKARFSSLLTLMEKYDIKFVAASGNLYDQLLLNFLEYPNRIAYVAENGGRVIDQDGTLLKETYLSNDTVAAVLSYLYQNYPETLISLSGEKRSYLERRTPINRRTELEYYMPNFIYKDHLLPLDDDRYFQMTLWVNENLVSEMLLDISEHFKNHHIRLTSSGFGCIDVLPADVNKADGIAILLEKWGLKQDQVMVFGDGGNDVEMLRAANISYAMSNAPEEIKAIAKYQTVSNDQDGVLETIENFLHKMSDNE

SEQ ID NO: 2085 - protein, 930 aa, Streptococcus agalactiae
ATGAACTCACTTGATAATTTACTATCACATAATTTAGAAGATAACCGGCATTTATTACCCTATGAACACATGCATACTGAGGTTAGAAATGGTTACCCTGACATTTTATTTCACTGGCATCCGGAACTTGAAATTTCATATGTCCACGAGGGGACCGCACGTTATCACATCGATTATGATTTTTTTAATAGCCAATCTGGTGATATTATCTTGATCCGTCCAAATGGTATGCATTCTATTCATCCGATTGAAAATAAAGAGCATATCACAGATAGCATTAAATTTCACTTAGATTTAATAGGATATTCTATTGTAGACCAAGTTAGCCTTCGTTATTTACAACCGTTGCAGACTAGCTCTTTTAAGTTTATTCAATGTATCAAACCTAGTATGACAGGATATAATGATATCAAAAATTGTTTGTTTGATATTTTTAATATTTCAAAAGAAGAAAATCGACATTTTGAGCTACTCCTAAAAGCTAAATTAAACGAACTCTTGTATTTACTCTATTATCATCAATATGTCATTAAAAAACATACTGATGATACCTACAGAAAAAACGAGAGAATTCGTGATCTGATTGATTATATTAATAATAATTACCAGCAAAATCTTACCATTGAATTTTTAGCTGATTATATGGGGTATAGTAAGACACATTTTATGACCGTATTTAAACAGCATACTGGAACATCCTGTACAGAATTTATCATACAAGTTCGTCTTAATAAAGCTAGTGAGCATCTTATTAACTCCACTACGGCCATTATTGATATTGCCAACAGCGTTGGTTTTAATAATCTATCAAATTTTAATCGCCAATTTAAACGCTATTATCATACAACTCCTCGCCAGTACCGCAAACAATTTACCAACAAAAAAGACGGTAGTACGCTTGTCTATAGAAATATAAATACAAAAAAATAG

SEQ ID NO: 2086 - protein, 309 aa, Streptococcus agalactiae
MNSLDNLLSHNLEDNRHLLPYEHMHTEVRNGYPDILFHWHPELEISYVHEGTARYHIDYDFFNSQSGDIILIRPNGMHSIHPIENKEHITDSIKFHLDLIGYSIVDQVSLRYLQPLQTSSFKFIQCIKPSMTGYNDIKNCLFDIFNISKEENRHFELLLKAKLNELLYLLYYHQYVIKKHTDDTYRKNERIRDLIDYINNNYQQNLTIEFLADYMGYSKTHFMTVFKQHTGTSCTEFIIQVRLNKASEHLINSTTAIIDIANSVGFNNLSNFNRQFKRYYHTTPRQYRKQFTNKKDGSTLVYRNINTKK

SEQ ID NO: 2087 - protein, 1533 aa, Streptococcus agalactiae
ATGGAAAATCATAAAAATGAATTTCAGTTTTCACTTGAATCAATTCTGGGATTTGTTTGGAGAGGAATAGTAGTAGGCTTAATATCAGGATTTGTTGTCAGCATATTTCGATTAGCGATTGAAAAAATTTTTTTAGTTGTTATGGAACTTTATAAAAGTGCCCATTATCAACCAATTATTTTATTGAGCATTACGGTTACTAGTATTATCGCTGCAGTGATAATAGGTTTTTTTATCAAATCTGATCCTGATATTAAAGGTTCAGGTATCCCGCATGTTGAAGGTGAACTTAAAGGAATGCTATCGCCAGACTGGTTTAGTATTGTATGGAAGAAATTCATTGCGGGTATTTTAGCTATTTCTTCGGGACTTATGCTTGGTCGCGAAGGTCCCAGTATTCAGTTAGGAGCTATGACAGGTAAGGGAATTGCACAGTATCTCAATGCTAGTCGAATGGAAAAACGTGTTTTAATTGCTAGTGGTGCAGCAGCAGGTCTTTCAGCAGCCTTCAATGCTCCTATTGCAGGCCTTTTATTTGTAGTTGAAGAAATTTACCATCATTTTTCTCGCTTAGTTTGGATAACAGCTTTGGTAGCAAGTTTAGTGGCAAACTTTGTCTCACTTAATATCTTTGGTTTAACCCCAGTTTTAGCTTTACCATCAGAATTACCATCTTTAAATCTCAACTTTTATTGGATTTTTTTACTCATGGGTCTCTTTTTGGGTATCTTAGGCTTTATCTATGAGTGGGTAATTTTGAGATTTCATGTGATCTATGATTATTTAGGTAAACTATTTCATCTACCATCTCACCTATATGGTATATTAGCGGTAATTTTTATTCTTCCTATTGGTTACTATTTCCCACAATTATTGGGGGGTGGAAATGGCTTAATTGTATCACTGCCTAGGAGTAATCTTAGTCTGATGATGTTAGGATTATTTTTCCTCATTCGTTTTTTATGGAGTATGTTGAGTTACAGTAGTGGCTTGCCAGGAGGAATTTTTTTACCAATTCTAGCTTTAGGATCTTTAGCAGGTGCTTTTTTTGCAGTAGGTATGCAGTACTTTGGTATAATATCTCATCAGCAGATATCTTTATTTGTTGTTCTAGGAATGGCGGGCTATTTTGGTGCAATCTCAAAAGCACCACTAACAGCTATGATTTTGGTTACAGAAATGGTTGGCGATTTAAAACAATTAATGGCTATTGGAATTGTAACAATGGTATCTTATATTGTCATGGATTTATTAAAGGGAGAACCTATTTATGAAGCGATGTTGGCTAAAATGACCTTCAATCCAAAAGATAAAGTAATGACACCTACATTGATTGAATTAACTGTTTCAGATAAAATATCAGGAAAGTATGTCCGAGATTTAGAATTACCAGAAAATGTGCTAATAACGACTCAAATTCATCATAAGACATCGGCTGTAGTATCAGGAAATACTATCTTGAATGCTGGTGACACCATTTTTTTAGTTGTGAATGAATCGGAAATTAAAGAAGTACGTGAGCAGCTGATGTAA

SEQ ID NO: 2088 - protein, 510 aa, Streptococcus agalactiae
MENHKNEFQFSLESILGFVWRGIVVGLISGFVVSIFRLAIEKIFLVVMELYKSAHYQPIILLSITVTSIIAAVIIGFFIKSDPDIKGSGIPHVEGELKGMLSPDWFSIVWKKFIAGILAISSGLMLGREGPSIQLGAMTGKGIAQYLNASRMEKRVLIASGAAAGLSAAFNAPIAGLLFVVEEIYHHFSRLVWITALVASLVANFVSLNIFGLTPVLALPSELPSLNLNFYWIFLLMGLFLGILGFIYEWVILRFHVIYDYLGKLFHLPSHLYGILAVIFILPIGYYFPQLLGGGNGLIVSLPRSNLSLMMLGLFFLIRFLWSMLSYSSGLPGGIFLPILALGSLAGAFFAVGMQYFGIISHQQISLFVVLGMAGYFGAISKAPLTAMILVTEMVGDLKQLMAIGIVTMVSYIVMDLLKGEPIYEAMLAKMTFNPKDKVMTPTLIELTVSDKISGKYVRDLELPENVLITTQIHHKTSAVVSGNTILNAGDTIFLVVNESEIKEVREQLM

SEQ ID NO: 2089 - protein, 96 aa, Streptococcus agalactiae
TTGATTCAAGTGAAAACTGAAATTCATTTTTATGATTTTCCATATTTTCCTCCTTTTCTTACAATTATTTTAACAAAAATATCACAAACTTTCTAG

SEQ ID NO: 2090 - protein, 31 aa, Streptococcus agalactiae
MIQVKTEIHFYDFPYFPPFLTIILTKISQTF

SEQ ID NO: 2091 - protein, 1074 aa, Streptococcus agalactiae
ATGCGTAGAGTTTATTCCTTTTTAGGCGGTATTATTCTTGTTATCCTGATCCTCTTTGGTTTAACCACTTACTTAGAAAAGAAGAGTAGTTCAACACCTAACTCAGATAAGTTAGTTATTTATAACTGGGGAGACTATATTGATCCAGCCTTATTAAAAAAATTTACAAAAGAAACTGGAATTGAAGTACAATACGAAACGTTTGACTCTAATGAGGCTATGCACACCAAAATTAAGCAGGGTGGGACGACATATGATATTGCTGTACCTAGTGATTATATGATTGACAAAATGATAAAAGAAAACCTTCTGGTTAAACTTGATCATTCAAAGATAGCTAATTGGGATGCTATTGGAGCTAGGTTTAAAAATTTGAGTTTCGATCCTAAAAATAAATATTCGATTCCTTATTTTTGGGGAACTGTTGGGATTGTTTATAATGATCAATTAGTTAAAACTCCTCCTAAACATTGGGATGATTTATGGCGTCCAGAGTTTCGAAATAAAATCATGCTAGTTGATAGTGCACGTGAGGTTATTGGAGTTGGTTTAAATTCCTTGGGATATGGATTGAATACAAAGAACATATCAGAATTAAAAGCCGCTTCTAAAAAGTTAGATGCTCTAACACCAAACGTTAAGGCTATTGTTGCTGATGAGATGAAAGGCTATATGATTCAGGGAGATGCAGCGATTGGTGTTACATTCTCTGGAGAAGCACGAGAAATGCTTGATGGGAACAAGCATTTGCATTACGTTGTTCCTAGTGAAGGATCGAACCTTTGGTTTGATAATATTGTAATCCCCAAAACAGTAAAGCATCGCAAAGAAGCTTATGCCTTTATTAATTTCATGATGGAACCTAAAAATGCGGCACAAAATGCAGAATATATTGGTTATGCGACCCCTAATCTCAAAGCAAAAGCGCTGTTACCAGCAGATATCAAAAATGATAAAGCATTTTATCCTCCTGATAAAACAATTGATCATTTAGAAGTTTATAATAACTTGGGTCAAAAATGGCTTGGTATTTATAATGATTTGTACTTACAATTTAAAATGTATCGTAAGTAA

SEQ ID NO: 2092 - protein, 357 aa, Streptococcus agalactiae
MRRVYSFLGGIILVILILFGLTTYLEKKSSSTPNSDKLVIYNWGDYIDPALLKKFTKETGIEVQYETFDSNEAMHTKIKQGGTTYDIAVPSDYMIDKMIKENLLVKLDHSKIANWDAIGARFKNLSFDPKNKYSIPYFWGTVGIVYNDQLVKTPPKHWDDLWRPEFRNKIMLVDSAREVIGVGLNSLGYGLNTKNISELKAASKKLDALTPNVKAIVADEMKGYMIQGDAAIGVTFSGEAREMLDGNKHLHYVVPSEGSNLWFDNIVIPKTVKHRKEAYAFINFMMEPKNAAQNAEYIGYATPNLKAKALLPADIKNDKAFYPPDKTIDHLEVYNNLGQKWLGIYNDLYLQFKMYRK

SEQ ID NO: 2093 - protein, 777 aa, Streptococcus agalactiae
ATGAAAAAATTCGCAAATATCTATTTAGCACTTGTTTTTATTATCCTTTATATTCCTATTATTTATTTGATTTTTTATTCTTTCAATAAAGGTGGGGATATGAATTCTTTTACTGGATTCACCTTTAGTCACTATGGAGAACTGTTTCAGGATAGCCGCTTAATGCTAATTTTAGTGCAAACATTCTTTTTGGCTTTTCTTAGCGCCTTATTAGCTACAATTATTGGTACCTTTGGAGCTATTTGGATTTATCAGGTAAGACGTAGACATCAAACCTCTATTTTATCGCTTAATAATATCCTTTTAGTAGCACCAGATGTTATGATTGGTGCAAGTTTTCTCTTAGTATTTACTGTTATTGGTTTACAGTTAGGTTTCACTTCTGTATTATTGAGCCATGTTGCATTCTCTATTCCTATTGTTGTTTTAATGGTCTTACCTCGTTTAAAAGAAATGAATGATGATATGATTAATGCTTCCTATGATTTAGGAGCTTCAACTTGGCAAATGCTTAAAGAAGTTATGTTACCCTATTTGTCGTCGGGTATTATTTCAGGTTTCTTTATGGCTTTCACTTACTCGCTAGATGATTTTGCGGTTACTTTCTTTGTTACAGGTAATGGCTTTTCAACGCTTTCAGTAGAAATCTATTCACGCGCACGTCGCGGTATATCATTGGAAATTAATGCCTTGTCAACTATTGTCTTTTTATTTAGTATTTTATTGGTAATTGGTTATTACTATATTTCGAAAGAGAAGGGAGAAAAGAATGCGTAG

SEQ ID NO: 2094 - protein, 258 aa, Streptococcus agalactiae
MKKFANIYLALVFIILYIPIIYLIFYSFNKGGDMNSFTGFTFSHYGELFQDSRLMLILVQTFFLAFLSALLATIIGTFGAIWIYQVRRRHQTSILSLNNILLVAPDVMIGASFLLVFTVIGLQLGFTSVLLSHVAFSIPIVVLMVLPRLKEMNDDMINASYDLGASTWQMLKEVMLPYLSSGIISGFFMAFTYSLDDFAVTFFVTGNGFSTLSVEIYSRARRGISLEINALSTIVFLFSILLVIGYYYISKEKGEKNA

SEQ ID NO: 2095 - protein, 795 aa, Streptococcus agalactiae
ATGAAGAAAACCTCTAGTCTATTTTCAATTCCTTATATGGCTTGGTTATTCTTATTTGTATTAGCACCTGTTGCTTTGATTGCTTGGAACTCGTTCTTTGATATTAATGGGCACTTTACTTTAGCTAATTACCAGACGTTTTTTAGCTCAGGAACCTATCTTAAAATGAGCTTTAACTCGGTCCTATATGCAGGCATCGTTAGTTTCATAACGCTTTTGATTAGCTATCCAGCTGCTTATTTGCTTACAAAATTAAAACACAAGCAATTATGGCTAATGCTAGTTATTTTGCCAACATGGATTAATCTTTTGTTAAAAGCCTATGCTTTTATGGGGATATTTGGTCAACAAGGGGGAATTAACGCCTTCTTAACCTTTATAGGTATCGGCCCAAAACAGATTCTATTTACAGATTTTTCATTTCTTTTTGTAGCAGCTTACATTGAATTACCGTTTATGTTATTACCCATTTTTAATGCCTTGGATGATATTGATCAAAATCTCATTTATGCAAGTGATGACTTGGGTGCAAATGCATGGCAAACTTTTCAGAAGGTTATATTTCCTCTATCTCTGAATGGTGTAAGAGCAGGTGTACAATCTGTCTTTATTCCTAGTTTAAGTCTCTTTATGCTTACGCGTCTTATTGGTGGTAATCGAGTTATTACTTTAGGGACAGCCATAGAACAACATTTTTTAATCACACAAAATAAAGGTATGGGCTCAACCATAGGGGTTATTTTAATTTTAGTGATGGTTGCTATTATGTGGTTAACAAAGGAGAGGAAAGCATGA

SEQ ID NO: 2096 - protein, 264 aa, Streptococcus agalactiae
MKKTSSLFSIPYMAWLFLFVLAPVALIAWNSFFDINGHFTLANYQTFFSSGTYLKMSFNSVLYAGIVSFITLLISYPAAYLLTKLKHKQLWLMLVILPTWINLLLKAYAFMGIFGQQGGINAFLTFIGIGPKQILFTDFSFLFVAAYIELPFMLLPIFNALDDIDQNLIYASDDLGANAWQTFQKVIFPLSLNGVRAGVQSVFIPSLSLFMLTRLIGGNRVITLGTAIEQHFLITQNKGMGSTIGVILILVMVAIMWLTKERKA

SEQ ID NO: 2097 - protein, 1155 aa, Streptococcus agalactiae
TTGACTAACCCAATCATTGCATTTAAAAATGTATCAAAGGTATTCGAAGACAGCAACACGGTTGTCTTAAAAGATATTAATTTTGAACTTGAAGAAGGTAAATTTTACACCTTATTAGGGGCCTCAGGAAGTGGTAAATCAACTATCTTAAATATTATTGCAGGTTTGCTAGAGGCGAGTACAGGCGATATTTACTTAGATGGGAAACGCATCAATGATGTTCCCACTAATAAACGGGATGTTCATACCGTTTTCCAAAACTATGCTTTGTTTCCACATATGACGGTTTTTGAAAACGTTGCTTTTCCATTAAAGTTGAAAAAAATGGATAAGAAAGAAATTCAAAAACGTGTTCAAGAAACTCTAAAAATGGTTCGTTTAGAAGGGTTTGAAAAGCGAGCTATTCAAAAATTATCAGGAGGACAACGCCAGCGTGTTGCGATAGCGCGTGCTATCATCAATCAACCTAAAGTAGTCTTACTAGATGAACCCTTATCAGCATTGGATTTGAAATTGCGTACAGAGATGCAATATGAATTGCGCGAACTGCAACAACGTTTAGGAATTACCTTTGTTTTTGTCACACATGATCAAGAAGAAGCGTTGGCAATGAGTGATTGGATTTTCGTCATGAATGAAGGTGAAATTGTTCAATCAGGAACACCAGTAGATATCTACGATGAACCTATCAATCATTTTGTAGCAACTTTTATAGGTGAATCAAATATCTTATCTGGCAAGATGATTGAGGATTATTTGGTTGAATTTAACGGTAAGCGCTTTGAGGCTGTTGATGGCGGTATGCGCCCTAATGAATCAGTCCAAGTAGTTATTCGTCCAGAAGATCTTCAAATTACCCTACCCGATGAAGGAAAACTTCAAGTTAAAGTGGACACACAACTTTTTCGAGGTGTCCACTATGAAATTATTGCTTATGATGATTTAGGTAATGAATGGATGATTCATTCAACTCGTAAAGCTATTGAGGGTGAAGTTATTGGGTTAGATTTCACTCCAGAAGATATACATATTATGCGTCTTAATGAAACAGAAGAAGAATTTGATGCGCGCATTGAAGAATATGTAGACACTGACGATCATGAAGATGGTTTAATCAATGCTATCGAGGAGGAGAGAAATGAAGAAAACCTCTAG

SEQ ID NO: 2098 - protein, 384 aa, Streptococcus agalactiae
MTNPIIAFKNVSKVFEDSNTVVLKDINFELEEGKFYTLLGASGSGKSTILNIIAGLLEASTGDIYLDGKRINDVPTNKRDVHTVFQNYALFPHMTVFENVAFPLKLKKMDKKEIQKRVQETLKMVRLEGFEKRAIQKLSGGQRQRVAIARAIINQPKVVLLDEPLSALDLKLRTEMQYELRELQQRLGITFVFVTHDQEEALAMSDWIFVMNEGEIVQSGTPVDIYDEPINHFVATFIGESNILSGKMIEDYLVEFNGKRFEAVDGGMRPNESVQVVIRPEDLQITLPDEGKLQVKVDTQLFRGVHYEIIAYDDLGNEWMIHSTRKAIEGEVIGLDFTPEDIHIMRLNETEEEFDARIEEYVDTDDHEDGLINAIEEERNEENL

SEQ ID NO: 2099 - protein, 903 aa, Streptococcus agalactiae
ATGATTAAAACAATACAAAAAGAATTAGAAGGTCTCGATATTCGCTTTGATGAGCCTTTAAAGAAATATACTTATACTAAAGTAGGAGGACCTGCTGATTATCTTGCATTCCCAAGGAATCGCCTTGAACTATCGCGTATTGTTAAGTTTGCTAACAGTCAAAATATTCCTTGGATGGTTTTAGGAAATGCGAGTAATATTATCGTTAGAGATGGTGGTATCCGTGGTTTTGTTATCATGTTTGATAAACTGTCAACTGTTACAGTCAACGGTTATGTTATTGAAGCAGAAGCAGGAGCTAATCTCATTGAAACAACTCGTATTGCACGTTATCATAGTTTAACTGGCTTTGAGTTTGCTTGCGGAATTCCTGGAAGTGTAGGTGGAGCAGTCTTTATGAATGCTGGCGCTTACGGTGGTGAAATTGCTCATATTTTATTGTCTGCACAAGTTTTGACACCACAGGGTGAACTCAAAACGATTGAAGCTAGGAATATGCAATTTGGTTATCGTCATTCTGTCATTCAAGAGAGTGGAGATATTGTTATATCAGCTAAGTTTGCCTTAAAACCAGGAGATCATCTCATGATTACTCAGGAAATGGATCGTTTAACCTATCTCCGTGAGCTGAAACAACCTTTAGAATACCCTTCTTGTGGTTCTGTGTTCAAACGTCCTCCAGGACATTTTGCAGGGCAACTCATTAGCGAAGCACATCTTAAAGGTCAACGTATTGGTGGAGTAGAGGTTAGTCAAAAACATGCTGGTTTTATGGTTAACATTGCAGAAGGTTCAGCTCAAGATTATGAAAATCTTATTGAACATGTTATTAACACCGTTGAATCAACTTCAGGTGTCCATTTGGAACCAGAAGTTCGTATTATCGGTGAGTCGCTATTATAA

SEQ ID NO: 2100 - protein, 300 aa, Streptococcus agalactiae
MIKTIQKELEGLDIRFDEPLKKYTYTKVGGPADYLAFPRNRLELSRIVKFANSQNIPWMVLGNASNIIVRDGGIRGFVIMFDKLSTVTVNGYVIEAEAGANLIETTRIARYHSLTGFEFACGIPGSVGGAVFMNAGAYGGEIAHILLSAQVLTPQGELKTIEARNMQFGYRHSVIQESGDIVISAKFALKPGDHLMITQEMDRLTYLRELKQPLEYPSCGSVFKRPPGHFAGQLISEAHLKGQRIGGVEVSQKHAGFMVNIAEGSAQDYENLIEHVINTVESTSGVHLEPEVRIIGESLL

SEQ ID NO: 2101 - protein, 489 aa, Streptococcus agalactiae
ATGACAACCGTTTACTTGAGTTTAGGTAGTAATATTGGTGATAGAGAAACTTTTCTGAAGCAGGCTCTCTTTTCAATTGATCATTTGCAAAAGACAAAAGTCGCGCAAATTTCCGCTATTTATGAAACAGCTGCTTGGGGGAATACTAACCAAGAAGATTTTTTTAATATATGTTGTCAGGTAGAGACAGACTTAGCACCTTTTGAATTATTGGATTATTGTCAAGAAATTGAAAAACGCTTAAAGCGCGTGAGACATGAGCACTGGGGTCCAAGGACAATAGATATTGATATCTTACTTTTTGGTAATCAAGTGATTAACCAAGAAGATTTAGTAGTACCCCATCCGTATATGACGAAGCGAGCATTTGTTCTAGTTCCGTTACTCGAAATAGCACCTCAACTAAGTTTACCTAATGGTTCTAAGCTAGAAGACTATCTCGAAAAATTGAATTTAGGAGAAGTTCATTATTTAAAACCAGTCGAATAG

SEQ ID NO: 2102 - protein, 162 aa, Streptococcus agalactiae
MTTVYLSLGSNIGDRETFLKQALFSIDHLQKTKVAQISAIYETAAWGNTNQEDFFNICCQVETDLAPFELLDYCQEIEKRLKRVRHEHWGPRTIDIDILLFGNQVINQEDLVVPHPYMTKRAFVLVPLLEIAPQLSLPNGSKLEDYLEKLNLGEVHYLKPVE

SEQ ID NO: 2103 - protein, 363 aa, Streptococcus agalactiae
ATGGATAAGATTTATTTAAATAAATGTCGGTTTTATGGTTATCATGGTGCTTTTTCGGAAGAACAAACATTGGGGCAAGTTTTTCAAGTTGATGCTGTTCTATCACTTGATTTAGCAAAAGCATCACAAACTGATGATTTAATTGATACGGTTCATTATGGTGAAGTTTTTGACTGTATTAAAAATCATGTTGAAAACGAACAGTATCAATTAATAGAGAAATTAGCAGGTGTTATTGTTGAAGATATTTTCTTACAGTTTCATCCAGTACAAGCTATTACATTAAAGATTACAAAAGACAATCCACCAATTAATGGGCACTATGAATCAGTTGGAATTGAATTGGAGCGCAAGCGAGTATGA

SEQ ID NO: 2104 - protein, 120 aa, Streptococcus agalactiae
MDKIYLNKCRFYGYHGAFSEEQTLGQVFQVDAVLSLDLAKASQTDDLIDTVHYGEVFDCIKNHVENEQYQLIEKLAGVIVEDIFLQFHPVQAITLKITKDNPPINGHYESVGIELERKRV

SEQ ID NO: 2105 - protein, 803 aa, Streptococcus agalactiae
ATGAAAATAGGACAATATGATATTACAGGTAAAGCTTGTATCATGGGGATTTTAAATGTAACGCCTGATTCCTTCTCAGATGGTGGTTCTTATACCACAATTGATTCAGCTTTAAATCAAGTTGGTGAGATGCTTGAACAAGGGGTGGCAATTGTAGATATTGGGGGAGAATCAACGCGGCCAGGTGCAGTATTTGTGACTGCTGAAGAAGAAATTAAACGTGTAGTTCCAATGATTAAAGCTATTAGAGAGGTCTACCCTGATCTTTTGTTATCAATAGATACTTATAAAACAGAGGTAGCTCAAGCAGCCCTTGATGCAGGTGTACATATTTTAAATGACGTTTGGTCAGGTTTATATGATGGTAAAATGCTATCTTTAGCAGCAGAACGAAATGTTCCAATTATTTTGATGCATAACCAGGAAGAAGCTGTTTATCAAGATATCAAAAAAGAAGTTTGTGAATTCTTACTTGAAAGAGCAGAGCGTGCTTTAGAAGCAGGTGTTTCAAAGGATAATATTTGGATAGATCCTGGCTTTGGTTTTGCTAAAACAGAGGAGCAAAATTTAGAGCTATTAAAGGTTTGGAACAAGTGTGTGATTTAGGTTATCCTGTGTTATTTGGGATCTCTCGAAAACGTACTGTTAATTATCTTCTAGGTGGTAATAGGGAAGTAACTGAACGTGATATGGGGACTGCTGCTTTATCGGCATGGGCAATAGCAAAGGGGTGTCAGATTGTACGTGTTCACAATGTTGAAGTAAATAAGGACATTGTGACAGTAATTAGTCAGTTGGTGTAA

SEQ ID NO: 2106 - protein, 267 aa, Streptococcus agalactiae
MKIGQYDITGKACIMGILNVTPDSFSDGGSYTTIDSALNQVGEMLEQGVAIVDIGGESTRPGAVFVTAEEEIKRVVPMIKAIREVYPDLLLSIDTYKTEVAQAALDAGVHILNDVWSGLYDGKMLSLAAERNVPIILMHNQEEAVYQDIKKEVCEFLLERAERALEAGVSKDNIWIDPGFGFAKTEEQNLELLKGLEQVCDLGYPVLFGISRKRTVNYLLGGNREVTERDMGTAALSAWAIAKGCQIVRVHNVEVNKDIVTVISQLV

SEQ ID NO: 2107 - protein, 564 aa, Streptococcus agalactiae
ATGCCCAATCAAGAAAAAATGGAAAAAGCTATTTATCAATTTTTAGAGGCTTTAGGAGAAAATCCTGATCGAGAAGGATTGAAAGATACACCGAAGCGTGTGGCAAAAATGTATATAGAAATGTTCTCAGGACTTAATCAAGATCCAAAGGAGCAATTCACTGCAGTCTTTTCTGAAAATCATGAAGAGGTTGTGATTGTCAAGGATATTCCATTCTATTCCATGTGTGAACATCATTTGGTTCCTTTTTATGGTAAAGCTCATATTGCTTATTTACCAAACGATGGACGTGTTACTGGACTTAGTAAGCTTGCACGTGCATTTGAAGTGGCGAGTAAGCGTCCTCAACTTCAGGAACGTTTAACAGCACAAGTTGCACAAGCTTTAGAGGATGCTTTAGCGCCTAAAGGTATTTTTGTTATGATAGAAGCAGAGCATATGTGCATGACAATGCGTGGCATTAAAAAACCAGGAAGTAAGACGATTACAACGGTAGCTCGTGGTTTATACAAGGACGATCGATATGAAAGACAAGAAATTCTATCGCTAATACAAAAAGGATAA

SEQ ID NO: 2108 - protein, 187 aa, Streptococcus agalactiae
MPNQEKMEKAIYQFLEALGENPDREGLKDTPKRVAKMYIEMFSGLNQDPKEQFTAVFSENHEEVVIVKDIPFYSMCEHHLVPFYGKAHIAYLPNDGRVTGLSKLARAFEVASKRPQLQERLTAQVAQALEDALAPKGIFVMIEAEHMCMTMRGIKKPGSKTITTVARGLYKDDRYERQEILSLIQKG

SEQ ID NO: 2109 - protein, 1182 aa, Streptococcus agalactiae
ATGCTAGAGCAGTTAGGAAACCCTCAAAACAACCTATCTGCCATTCATGTTGTTGGAACGAATGGTAAAGGATCAACAACTAGTTATTTACAACATATTTTTACAAATTCTGGTTATCAAGTTGGAACATTTACATCACCATATATTGTTGACTTTAGAGAGCGTATTAGCATTGATGGTCAAATGATTCCAGAGTCTGATTTTATCAAACTTGTTGAAACTGTTCGTCCAGTTGTTGAACGGTTGCACCTTGAGACCAACCTAGAACCAGCTACAGAATTTGAAGTTATAACAGTTTTGATGTTCTATTATTTTGGCAATAGCTGTCCAGTTGATATCGTCATTATTGAGGCTGGAATGGGCGGTTATTATGATTCTACCAACATGTTCAAGGCTTTAGCGGTTACTTGTCCGTCAATTGGATTAGATCATCAGGAGGTTTTAGGACGAACTTATGTAGATATAGCTGAACAAAAAGTAGGTGTTTTAAAAAAAGGAGTTCCATTCGTATATGCTAATGATCGTCAGGATGTTGAAGAAGTCTTTCAAATAAAAGCCAAGGAAACCCACAGCCAGACTTATCGTTTACACAATGACTTTTATATAAAAGAAGAGGAAAATTATTTTAACTATATAGGTCCTCAAGCAAATATTGATCATATTCAGTTGCAAATGCCGGGACATCACCAAGTTTCCAATGCTAGCATAGCTATAACTACCAGTTTATTATTAAGAGACAAATATCCAAAGTTAACCCTACAGACCATTAAAGATGGGCTTGAAATGACAAAATGGGTAGGCCGTACAGAATTAATCTTTCCAAATGTAATGATTGATGGCGCTCATAATAATGAAAGTGTCGATGCTCTCGTTCAAGTTATAAAAAAATATCAGCAGAAAAACGTGCATATTCTATTTGCTGCAATTAATACTAAACCGATAGAGAGTATGTTAGAATCATTGTCTAGTATCGCTCCGGTTTCGGTTACTAGCTTTGATTACCCTAAATCAATAAACTTAGACAAATATCCTAAAGCGTACACTAGAGTTAGTGATTGGAAGAAATGGCTACATGATATAAATCTGACATCAGATAAAGATTTCTATGTGATTACTGGCTCCCTTTATTTTATTTCTCAAGTTCGTCAGGAACTACTATTAATCAAAACTACAACAACTTAA

SEQ ID NO: 2110 - protein, 393 aa, Streptococcus agalactiae
MLEQLGNPQNNLSAIHVVGTNGKGSTTSYLQHIFTNSGYQVGTFTSPYIVDFRERISIDGQMIPESDFIKLVETVRPVVERLHLETNLEPATEFEVITVLMFYYFGNSCPVDIVIIEAGMGGYYDSTNMFKALAVTCPSIGLDHQEVLGRTYVDIAEQKVGVLKKGVPFVYANDRQDVEEVFQIKAKETHSQTYRLHNDFYIKEEENYFNYIGPQANIDHIQLQMPGHHQVSNASIAITTSLLLRDKYPKLTLQTIKDGLEMTKWVGRTELIFPNVMIDGAHNNESVDALVQVIKKYQQKNVHILFAAINTKPIESMLESLSSIAPVSVTSFDYPKSINLDKYPKAYTRVSDWKKWLHDINLTSDKDFYVITGSLYFISQVRQELLLIKTTTT

SEQ ID NO: 2111 - protein, 888 aa, Streptococcus agalactiae
TTGAGAAAAGATAATTTAGGAATTATCCTTGGCTTGTCAGCCTATGTTTTATGGGGGCTTTTATCTCTTTATTGGAAATTATTATCTGGAATTGAAGCATATAGTACGTTTGCTTATAGGATTATATTCACTGTTTTAACTATGCTTATTTATATGCTCGTTTCGGGTAGAAAAACAGTCTATTTAAAAGACTTAAAAGGCTTAGTTAATAATAAAAAGTCATTTTGGACAATGTTTGTAGCCAGTATTTTAATTTCAATTAATTGGTTGGTCTATATTTTTGCAGTCACGCATGGTCACGCTACTGAGGCAAGTCTTGGTTATTATATGATGCCGATTATTTCAATTTTGTTGTCGGTCCTTGTTTTACGTGAACACCTGGCAAGAGTAGTTAGCCTTGCAATTTTGATTGCAATCATGGGAGTTGGAATTTTAGTTTATCAAACTGGTCATTTTCCTTTAATTTCACTAACTCTAGCGCTTTCTTTTGGTTTTTATGGGTTATTAAAAAAATCAATTTCTTTATCTAGCGATTTTTCGATGCTGGTAGAAAGTAGTTTTATTGCTCCGTTTGCACTCATTTATATAGTGTTTTTCGCCAAAGATTTTTTAACTGATTATAATATATTACAATTAGTTTTACTCTCACTTTCAGGAATCATTACAGCAGTTCCTCTTTTATTATTTGCAGAAGCCATTAAGAGGGCTCCTCTAAATATTATCGGTTTTATCCAATACATCAATCCAACCATCCAATTATTGCTAGCATTGTTTATTTTTAAAGAAACTATCGTTAGTGGGGAGGTAATAGGTTTTATTTTTATCTGGCTTGCTATTTTAGTTTTTAGTATTGGACAAGTACATACGATGTTAAAGAAAGGTAAATAA

SEQ ID NO: 2112 - protein, 295 aa, Streptococcus agalactiae
MRKDNLGIILGLSAYVLWGLLSLYWKLLSGIEAYSTFAYRIIFTVLTMLIYMLVSGRKTVYLKDLKGLVNNKKSFWTMFVASILISINWLVYIFAVTHGHATEASLGYYMMPIISILLSVLVLREHLARVVSLAILIAIMGVGILVYQTGHFPLISLTLALSFGFYGLLKKSISLSSDFSMLVESSFIAPFALIYIVFFAKDFLTDYNILQLVLLSLSGIITAVPLLLFAEAIKRAPLNIIGFIQYINPTIQLLLALFIFKETIVSGEVIGFIFIWLAILVFSIGQVHTMLKKGK

SEQ ID NO: 2113 - protein, 866 aa, Streptococcus agalactiae
ATGAGGATAATTGTACCTGCAACTAGTGCGAATATTGGTCCAGGCTTTGATTCAATAGGAGTTGCGTTATCAAAGTATTTAAGCATTGAAGTATTAGAAGAAAGTACAGAGTGGTTAGTTGAACACAATTTAGTAAATATTCCAAAAGATCATACTAACCTCCTTATTCAAACAGCTTTGCATGTTAAGTCGGATTTGGCACCACACCGCTTAAAAATGTTTTCAGATATTCCTTTGGCCAGAGGTTTAGGTTCTTCTTCCTCTGTAATTGTTGCAGGAATAGAATTAGCCAATCAATTAGGAAATTTGGCTCTTTCTCAAAAAGAAAAATTAGAGATAGCTACCCGATTAGAAGGACATCCTGATAATGTAGCACCGGCCATTTTTGGTGATTTAGTTATTTCATCAATAGTGAAAAATGATATTAAAAGTTTGGAAGTGATGTTTCCAGATAGTTCCTTTATCGCTTTTATTCCAATTATGAATTAAAAACAAGTGATAGTCGAAATGTACTACCTCAAAAATTGAGTTATGAGGATGCAGTTGCTTCAAGCAGCGTCGCTAATGTGATGGTTGCGTCGTTGTTGAAAGGTGATTTGGTAACTGCTGGATGGGCTATAGAAAGGGACCTCTTTCATGAAAGATATCGTCAACCTTTGGTGAAGGAATTTGGAGTTATAAAACAAATCAGCACTCAAAACGGTGCGTATGCTACTTATTTGTCTGGAGCAGGACCGACGGTAATGGTTCTGTGTTCGAAAGAAAAAGAACAACCAATTGTCACAGAGTTAAGTAAATTATGTTTAGATGGACAGATTCAAGTACTTAATATTGAGCGAAAAGGAGTGAGAGTTGAGAAAAGATAA

SEQ ID NO: 2114 - protein, 288 aa, Streptococcus agalactiae
MRIIVPATSANIGPGFDSIGVALSKYLSIEVLEESTEWLVEHNLVNIPKDHTNLLIQTALHVKSDLAPHRLKMFSDIPLARGLGSSSSVIVAGIELANQLGNLALSQKEKLEIATRLEGHPDNVAPAIFGDLVISSIVKNDIKSLEVMFPDSSFIAFIPNYELKTSDSRNVLPQKLSYEDAVASSSVANVMVASLLKGDLVTAGWAIERDLFHERYRQPLVKEFGVIKQISTQNGAYATYLSGAGPTVMVLCSKEKEQPIVTELSKLCLDGQIQVLNIERKGVRVEKR

SEQ ID NO: 2115 - protein, 1284 aa, Streptococcus agalactiae
ATGACTATTAAAATAGCTTTATTAGGTTTTGGAACGGTTGCTAAGGGTATTCCATATTTGCTAAAAGAAAATCAACATAAGCTACTTTCTTTAGAAGGCGAAGATATTGTGATTGATAAAGTATTAGTAAGAGATAATGAAAGCCGCCAGCGTTTCATCAATCAGGGATTTACTTATAACTTTGTGACAGAGATAAATACTATTCTTCAAGATCCACAAATTGATATTGTAGTGGAATTAATGGGGGGGATTGAGCCAGCTAAAACTTATTTGAGTCAAGCATTAGGATTTGGTAAACATATTGTGACAGCCAATAAAGATCTCATTGCTTTACACGGAAAAGAGTTGATGGATTTAGCAGACGCTAGAGGTCTAGCTTTATTCTATGAGGGAGCAGTTGCTGGAGGCATTCCTATTTTAAGGACCCTATCGCATTCGTTTGCCTCAGATAAAATGACACGTTTATTAGGAATTCTCAACGGTACCTCCAACTTCATGTTAACAAAAATGTTTGAAGAGGGATGGTCTTATGAACAAGCTCTAAAAAAGGCACAAGAGTTAGGTTATGCCGAAAGTGATCCTACAAATGATGTTGAAGGTATTGATACTGCCTACAAAGCCACTATCTTAAGTCAATTTGGATTTGGTATGCCTATTGATTTTGATGATGTTAATTATAAGGGGATTTCTAGTATTCGCTCAGAGGACGTTGAAGTAGCTCAGGAGATGGGCTTTGCCATTAAGTTGGTAGCTGATCTTCGTGAAACTCCAACTGGTATAAGTGTAGACGTTTCTCCGACACTAATTTCTCAAGAGCATCCCTTAGCTGCAGTTAATCATGTGATGAATGCAGTATTCATTGAATCAATAGGGATTGGTCAGTCTCTTTTTTATGGACCAGGTGCGGGACAAAATCCAACAGCAACCTCTGTTTTAGCCGATATCATCGATATTAGTCGTAGTATTCGATCACAGATAAAAATTAAGCCTATGAATACTTATCATTGTCCGTGTAGGTTGTCAATGCAGTCTGATATCTTCAATGAGTACTATCTAGCTATTTCTTTGAGAAATGCTGAAGATAGTGATACACTTGGAAGGTACTTTGAGCAAGAAAATATAGGTTTGAAAAATGTTATTGAAAAAGCATTGGATGATAAACAACAAGAAATCTATGTATTAACAGATGAAGTTAGCCAAGAGAAAATAACTCAATTTATTGAGGAGTTTCCTGAGAGTGGTGTCATTCAGTTAATCAATGTTTTCAAAGTAATAGGAGGGTGA

SEQ ID NO: 2116 - protein, 427 aa, Streptococcus agalactiae
MTIKIALLGFGTVAKGIPYLLKENQHKLLSLEGEDIVIDKVLVRDNESRQRFINQGFTYNFVTEINTILQDPQIDIVVELMGGIEPAKTYLSQALGFGKHIVTANKDLIALHGKELMDLADARGLALFYEGAVAGGIPILRTLSHSFASDKMTRLLGILNGTSNFMLTKMFEEGWSYEQALKKAQELGYAESDPTNDVEGIDTAYKATILSQFGFGMPIDFDDVNYKGISSIRSEDVEVAQEMGFAIKLVADLRETPTGISVDVSPTLISQEHPLAAVNHVMNAVFIESIGIGQSLFYGPGAGQNPTATSVLADIIDISRSIRSQIKIKPMNTYHCPCRLSMQSDIFNEYYLAISLRNAEDSDTLGRYFEQENIGLKNVIEKALDDKQQEIYVLTDEVSQEKITQFIEEFPESGVIQLINVFKVIGG

SEQ ID NO: 2117 - protein, 888 aa, Streptococcus agalactiae
ATGGCACACACACCTACTAGTCATCGTAAACCACGAAAACGTTCCCCATGGTTAGCTATTGCTTTTGTCTTTTTTTTGTTAATAGCTTTAATCGGCATATTTCTATTCTTCAACAATCGTTCAAAGCAAGAAATAAAAACAAAAACGAACGCCTCTAGTCATCGAAAAATTGTCACATCTATCAAAAAAAAGAAATGGGTTAAGCAAAAGACTCCTGTTAAAATACCCATTTTAATGTACCATGCTGTTCATGTTATGGACCCTTCTGAAGCCGCCAGTGCTAACTTAATTGTGGCACCTGACATTTTTGAAAGTCATATAAAACGTCTCAAAAAGGAAGGATATTACTTCTTAGCCCCTAACGAGGCATATCGTGCACTAAACGAAAATGCTTTACCTGAAAAAAAAGTCATTTGGATTACTTTTGATGATGGAAATGCCGATTTCTACACTAAGGCATACCCTATACTCAAAAAGTACAAGGTTAAAGCCACTAATAATATCATCACTGGCTTTGTTCAAGAAGGACGAGAATCTAACCTCAACGTTCAACAAATGCTAGAAATGAAGCAAAACGGCATGTCATTCCAAGGACATACGGTTACTCACCCCAATCTTTCTCTCTTAACTCCAGAACTACAAACCCAAGAAATGACACTATCAAAACTGTTTTTAGATCAAAAACTCTCTCAAGATACTCTTGCGATTGCTTATCCATCAGGACGCTACAATCCTACAACTTTGGATATTGCTAGTCAATATTATAAACTAGGGCTTACAACAAACGAAGGAGTTGCAACAAAAGATAACGGTTTGCTTTCTCTTAATCGAGTTCGTATCTTACCAACTACTAGCGATGATGATTTGATCAAAACGATTAACCAATAA

SEQ ID NO: 2118 - protein, 295 aa, Streptococcus agalactiae
MAHTPTSHRKPRKRSPWLAIAFVFFLLIALIGIFLFFNNRSKQEIKTKTNASSHRKIVTSIKKKKWVKQKTPVKIPILMYHAVHVMDPSEAASANLIVAPDIFESHIKRLKKEGYYFLAPNEAYRALNENALPEKKVIWITFDDGNADFYTKAYPILKKYKVKATNNIITGFVQEGRESNLNVQQMLEMKQNGMSFQGHTVTHPNLSLLTPELQTQEMTLSKLFLDQKLSQDTLAIAYPSGRYNPTTLDIASQYYKLGLTTNEGVATKDNGLLSLNRVRILPTTSDDDLIKTINQ

SEQ ID NO: 2119 - protein, 897 aa, Streptococcus agalactiae
TTGGGTGTTCCCAATAATGCATTTGTTCAAATTGTTATTATCCTTATTACAACAGCTTTATTTGTTATGTCAGCTTTATCAGGTTTAGGAAAAGGTGTTAAAATTTTATCGAACTTAAATTTGATTTTAGCGGTAGCCCTCTTAGCTTTAGTTATTGTATTGGGACCAACGGTTCGTATTTTTGATACCCTAACAGAGTCTTTAGGCTCTTATTTACAAAATTTCTTTGGAATGAGCTTTCGTGCAGCTGCTTTTGACAATACTAAACGTTCTTGGATTGATAATTGGACGATTTTTTATTGGGCGTGGTGGATTTCCTGGTCTCCTTTTGTTGGAGTTTTCATCGCTCGTATTTCTAAAGGGCGTAGCATTCGGGAGTTTTTAACGGTAGTTCTTTTAATACCGACATTATTGAGTTTTGTATGGTTTGCAGCATTTGGCACATTATCAACTCAGGTACAACAACTGGGTATTAATTTGACAAAGTTTGCAACAGAGGAAGTATTGTTTGCTACTTTTAATCACTACACTTTAGGTTGGCTTTTATCCACTATTGCTATCATTTTAATTTTTTCATTTTTTATTACATCAGCAGATTCTGCAACGTACGTTTTGGCTATGTTGACAGAAGATGGTAATTTAAATCCAAAAAATCGAACTAAAGTAATTTGGGGGCTAGTGTTGGCAGTGATTGCTATTGTCTTACTCTTGTCTGGTGGTCTGTTAGCGCTGCAGAACGTTTTAATTATTGTCGCTCTGCCATTTTCATTCGTAATGATTTTGATGATGCTAGCGCTATTAGTGGAGCTTTTCCATGAGAAAAAAGAAATGGGCTTATCGATTTCTCCAGATCGTTATCCACGTAAAAATGAACCATTTAAATCTTATGAAGAATAA

SEQ ID NO: 2120 - protein, 298 aa, Streptococcus agalactiae
MGVPNNAFVQIVIILITTALFVMSALSGLGKGVKILSNLNLILAVALLALVIVLGPTVRIFDTLTESLGSYLQNFFGMSFRAAAFDNTKRSWIDNWTIFYWAWWISWSPFVGVFIARISKGRSIREFLTVVLLIPTLLSFVWFAAFGTLSTQVQQLGINLTKFATEEVLFATFNHYTLGWLLSTIAIILIFSFFITSADSATYVLAMLTEDGNLNPKNRTKVIWGLVLAVIAIVLLLSGGLLALQNVLIIVALPFSFVMILMMLALLVELFHEKKEMGLSISPDRYPRKNEPFKSYEE

SEQ ID NO: 2121 - protein, 546 aa, Streptococcus agalactiae
TTGAGTAAAAAACATATTACGCCTTTGTTTACAGGTTCACTAATTGTATCGCTTATTTTAGTCTTATTAGGAATTATTGTTCCTCGTGGTTTTCAATCTTGGACACAAATCTTGCGTGAACAGGTATCTACCAATTTCGGTTGGTTGTACTTGTTGTTAGTTACTTCAATTCTTGCTTTGTGTGTCTTTTTTATTATGAGTCCTCTTGGACAAATACGTTTAGGGCGACCTCATTCACGTCCTGAATATTCAACTGTATCATGGATAGCAATGATGTTTTCAGCAGGTATGGGGATTGGTTTGGTCTTCTACGGAGCAGCTGAACCCTCATCGCATTTTGCTATTTCGACACCTGGCGCACCTAAGGAATCGCAAACAGCATTAGCTGATGCATTTCGTTTTACATTTTTTCACTGGGGGATACATGCTTGGGCAGTATATGCATTGGTTGCTTTGGCTCTAGCTTATTTTGGATTTCGAAAGCAAGAGAAATACCTCTTGTCTGTCACTTTAAAGCCTCTTTTCGGTGATAAGACAGATGGTTGA

SEQ ID NO: 2122 - protein, 181 aa, Streptococcus agalactiae
MSKKHITPLFTGSLIVSLILVLLGIIVPRGFQSWTQILREQVSTNFGWLYLLLVTSILALCVFFIMSPLGQIRLGRPHSRPEYSTVSWIAMMFSAGMGIGLVFYGAAEPSSHFAISTPGAPKESQTALADAFRFTFFHWGIHAWAVYALVALALAYFGFRKQEKYLLSVTLKPLFGDKTDG

SEQ ID NO: 2123 - protein, 1377 aa, Streptococcus agalactiae
ATGGCATATAAAACAATTTATCCGTACACTAACGAAGTATTGCATGAATTCGATAATATCAGTGACAGTGATCTCGAACAGTCATTAGACATAGCGCATGCCCTCTACAAGACATGGCGCAAAGAAGATAATGTTGAAGAACGCCAAAATCAATTGCATAAAGTAGCAGATTTATTACGTAAGGACCGTGATAAGTACGCTGAAGTTATGACTAAAGATATGGGAAAACTTTTCACTGAAGCACAAGGAGAAGTGGACTTGTGTGCAGACATAGCTGACTATTATGCTGATAATGGGCAAAAGTTTTTAAAACCTGTTCCGTTAGAAAGTCCAAATGGAGAGGCTTACTATTTGAAACAAGCTGTCGGTGTTTTACTTGCTGTCGAGCCATGGAATTTCCCATTTTATCAGATTATGCGTGTATTTGCCCCTAACTTTATAGTGGGTAATACTATGCTTTTAAAACATGCTTCTATTTGTCCTGCATCAGCTCAAGCATTTGAGGATTTAGTCCGAGAAGCAGGAGCTCCAGAAGGAGCGTTTAAAAATATTTTTGCTTCGCATGATCAAGTTTCAAACCTTATATCAGATCCTCGTGTTGCAGGTGTGTGTTTAACTGGTTCTGAGCGTGGTGGGGCATCAATAGCAGCTGAGGCTGGTAAAAATTTGAAAAAATCGTCTATGGAATTAGGTGGGAACGATGCTTTTCTTATTTTAGATGATGCTGATTTTGATTTACTTAGTAAAACAATATTCTTTGCGCGTTTATATAATGCAGGTCAAGTATGTACATCTTCAAAACGTTTCATTGTTATGGCTGATAAGTATGACGAATTTGTAAATATGGTAGTTGAGACCTTTAAGTCTGCTAAATGGGGTGACCCAATGGATTCGGAAACAACCTTGGCTCCACTGTCATCTGCAGGTGCAAAGGATGATGTTTTAAAACAAATTAAATTGGCGGTAGACCACGGTGCTGAGGTAGTTTTTGGAAATGACACTATAGATCATCCAGGAAACTTCGTCATGCCAACTGTTTTAACGAATATCACTAAAGCAAATCCAATCTATAATCAAGAAATTTTCGGCCCCGTAGCCTCTATCTATAAAGTGGATACTGAAGAAGAAGCTATTGCTTTAGCTAATGATTCTAGTTATGGTTTAGGAAGTACTGTTTTCTCTTCTGATCCAGAACATGCTAAAAAAGTGGCGGCTCAGATTGAAACAGGGATGACATTTATTAATTCAGGGTGGACATCATTACCGGAATTACCGTTTGGAGGTATTAAAAATTCAGGATATGGTCGTGAATTGAGCCAACTTGGATTTGATGCCTTTGTCAACGAACATTTGGTATTTACACCAAATAGTGATTAA

SEQ ID NO: 2124 - protein, 458 aa, Streptococcus agalactiae
MAYKTIYPYTNEVLHEFDNISDSDLEQSLDIAHALYKTWRKEDNVEERQNQLHKVADLLRKDRDKYAEVMTKDMGKLFTEAQGEVDLCADIADYYADNGQKFLKPVPLESPNGEAYYLKQAVGVLLAVEPWNFPFYQIMRVFAPNFIVGNTMLLKHASICPASAQAFEDLVREAGAPEGAFKNIFASHDQVSNLISDPRVAGVCLTGSERGGASIAAEAGKNLKKSSMELGGNDAFLILDDADFDLLSKTIFFARLYNAGQVCTSSKRFIVMADKYDEFVNMVVETFKSAKWGDPMDSETTLAPLSSAGAKDDVLKQIKLAVDHGAEVVFGNDTIDHPGNFVMPTVLTNITKANPIYNQEIFGPVASIYKVDTEEEAIALANDSSYGLGSTVFSSDPEHAKKVAAQIETGMTFINSGWTSLPELPFGGIKNSGYGRELSQLGFDAFVNEHLVFTPNSD

SEQ ID NO: 2125 - protein, 882 aa, Streptococcus agalactiae
ATGNNNNNCTTTTATCAAAATCGACAATTGTTTAATAAGGGTATTGCTTTTACGTCTAAATATATTTTACAAACAGCAGTTGTCTTATTGGGTTTTGGACTAAACCTCATGCAAGTGATGAAAGTTGGTATATCATCGTTACCCATCATTATTATGACGATTTCCATTTCATTGATTATTGCTTATGTTTTGCAAAAGTTATTTAAGTTAGATAAAACGATTGCTACTTTAATAGGTGTTGGTTCATCTATTTGTGGTGGATCCGCAATTGCAGCGACTGCACCAGTTATTAATGCTAAAGATGATGAAGTAGCACAAGCTATTTCGGTTATTTTTTTATTCAATATCTTAGCGGCTTTAATTTTTCCAACGCTGGGGAATTTTATTGGTCTCTCTGATCACGGTTTTGCATTATTTGCAGGGACTGCTGTCAATGATACCTCGTCAGTTACAGCAACTGCTACTGCATGGGATGCTATCAATCACAGCAATACTTTGGGCGGAGCTACTATTGTTAAATTGACACGAACATTAGCCATCATTCCAATTACGATTGTATTATCTATTTATCATATGAAACAAACGCAGAAAGAACAATCTGTAAGTGTTACTAAGATATTTCCGAAGTTTGTGCTTTATTTTATCTTAGCTTCTTTGCTAACAACGATAGTTGCTTCATTAGGTTTTTCGTTACGTATCTTTGAGCCACTTAAGGTTTTATCTAAATTTTTTATTGTTATGGCAATGGGGGCAATTGGTATAAATACTAATGTCAGCAAACTAATTAAAACTGGAGGAAAATCAATTCTTTTAGGTGCAGCGTGTTGGTTAGGCATTATTATAGTTAGTTTAACAATGCAAGCTATCCTTGGAACTTGGTGA

SEQ ID NO: 2126 - protein, 293 aa, Streptococcus agalactiae
  VARIANT 2, 3: Xaa = Any Amino Acid
MXXFYQNRQLFNKGIAFTSKYILQTAVVLLGFGLNLMQVMKVGISSLPIIIMTISISLIIAYVLQKLFKLDKTIATLIGVGSSICGGSAIAATAPVINAKDDEVAQAISVIFLFNILAALIFPTLGNFIGLSDHGFALFAGTAVNDTSSVTATATAWDAINHSNTLGGATIVKLTRTLAIIPITIVLSIYHMKQTQKEQSVSVTKIFPKFVLYFILASLLTTIVASLGFSLRIFEPLKVLSKFFIVMAMGAIGINTNVSKLIKTGGKSILLGAACWLGIIIVSLTMQAILGTW

SEQ ID NO: 2127 - protein, 1955 aa, Streptococcus agalactiae
ATGAATCCTTTAATAATTGGAATGAATGATAAACAAGCAGAAGCGGTACAAACGACAGACGGACCGCTTTTGATTATGGCAGGAGCTGGCTCTGGAAAAACACGTGTTCTGACTCATCGTATTGCTTATTTAATAGATGAAAAATATGTTAATCCTTGGAATATTTTAGCGATTACTTTTACTAATAAAGCAGCGCGTGAAATGCGTGAACGTGCTATCGCCTTGAATCCAGCTACCCAAGATACTTTGATTGCAACTTTTCATAGTATGTGTGTTCGTATTTTACGTCGTGAAGCTGATTATATTGGATATAATCGTAACTTTACAATCGTTGATCCAGGTGAGCAGCGTACTTTAATGAAGCGAATCATTAAGCAATTAAATTTGGACACAAAAAAGTGGAATGAACGTTCAATTTTAGGTACAATCTCTAATGCTAAAAATGACCTTCTTGATGAAATTGCATATGAGAAGCAAGCCGGAGATATGTATACACAGGTAATTGCTAAATGCTATAAAGCTTATCAAGAGGAATTACGTAGAAGTGAGGCCATGGATTTCGATGACTTGATTATGATGACACTTCGATTATTTGATCAGAATAAAGATGTTTTGGCCTATTACCAACAGAGGTATCAATATATCCATGTAGACGAGTATCAAGATACTAACCACGCTCAATACCAATTAGTTAAGTTATTAGCTTCGCGTTTCAAAAATATTTGTGTTGTTGGTGATGCCGATCAATCCATTTACGGATGGCGTGGAGCTGATATGCAAAATATTCTTGATTTTGAAAAGGACTATCCGCAAGCCAAAGTTGTATTATTAGAAGAAAATTATCGATCGACTAAGAAAATACTTCAAGCTGCTAATAATGTGATTAATCATAATAAAAATCGCCGTCCCAAAAAATTATGGACTCAAAATGATGAAGGTGAGCAAATTGTATATCATAGAGCTAACAATGAGCAAGAAGAAGCCGTTTTTGTAGCATCAACTATTGATAACATCGTTCGAGAACAAGGAAAAAATTTCAAAGATTTTGCCGTTCTTTATCGTACGAATGCGCAATCTCGTACTATTGAGGAAGCACTTTTAAAATCCAATATTCCATATACAATGGTTGGTGGAACAAAATTCTATAGTCGTAAAGAAATTCGAGATGTTATTGCTTATCTCAATATCCTTGCAAATACTTCTGATAATATTTCTTTTGAGCGGATTGTAAATGAACCTAAAAGAGGGGTTGGGCCAGGCACTTTAGAAAAAATACGGTCATTTGCCTATGAACAGAACATGTCTCTTCTTGATGCCTCTTCAAATGTCATGATGTCGCCCTTAAAAGGGAAGGCTGCTCAAGCTGTTTGGGATTTAGCTAATCTGATTTTGACTCTACGTAGTAAGCTAGATAGTTTAACTGTAACGGAGATTACAGAAAACCTACTGGATAAGACAGGATATCTAGAAGCACTTCAAGTTCAAAATACATTAGAAAGTCAAGCGCGTATTGAAAATATTGAAGAATTCTTGTCAGTGACTAAAAATTTTGACGATAACCCTGAGATTACAGTAGAGGGTGAAACTGGTTTAGATCGTCTATCGCGTTTTTTAAATGATTTAGCTTTAATAGCAGATACTGATGATAGCGCCACTGAAACGGCTGAGGTCACTTTAATGACATTACATGCTGCCAAGGGTCTAGAATTTCCAGTTGTTTTCTTAATCGGTATGGAAGAAGGAGTATTTCCTTTATCGCGTGCAATAGAGGATGCTGATGAATTAGAAGAAGAGCGTCGTTTAGCTTATGTCGGGATTACGAGAGCAGAACAAATACTTTCCTTACCAATGTTAATACCCGTGCTTTATTTGGTAAAACTAGTTATAATAGACCAACCCGTTTTATACGTGAGATTGATGATGAGCTGATACNNNNNCATTCATTCATTAATTAA

SEQ ID NO: 2128 - protein, 651 aa, Streptococcus agalactiae
  VARIANT 645, 646: Xaa = Any Amino Acid
MNPLIIGMNDKQAEAVQTTDGPLLIMAGAGSGKTRVLTHRIAYLIDEKYVNPWNILAITFTNKAAREMRERAIALNPATQDTLIATFHSMCVRILRREADYIGYNRNFTIVDPGEQRTLMKRIIKQLNLDTKKWNERSILGTISNAKNDLLDEIAYEKQAGDMYTQVIAKCYKAYQEELRRSEAMDFDDLIMMTLRLFDQNKDVLAYYQQRYQYIHVDEYQDTNHAQYQLVKLLASRFKNICVVGDADQSIYGWRGADMQNILDFEKDYPQAKVVLLEENYRSTKKILQAANNVINHNKNRRPKKLWTQNDEGEQIVYHRANNEQEEAVFVASTIDNIVREQGKNFKDFAVLYRTNAQSRTIEEALLKSNIPYTMVGGTKFYSRKEIRDVIAYLNILANTSDNISFERIVNEPKRGVGPGTLEKIRSFAYEQNMSLLDASSNVMMSPLKGKAAQAVWDLANLILTLRSKLDSLTVTEITENLLDKTGYLEALQVQNTLESQARIENIEEFLSVTKNFDDNPEITVEGETGLDRLSRFLNDLALIADTDDSATETAEVTLMTLHAAKGLEFPVVFLIGMEEGVFPLSRAIEDADELEEERRLAYVGITRAEQILFLTNVNTRALFGKTSYNRPTRFIREIDDELIXXHSFIN

SEQ ID NO: 2129 - protein, 385 aa, Streptococcus agalactiae
ATGAAATTCAATTTAGAACAAGTAAAAGTATTTGAGAATTACGAAATTGAGAACTGGGAAGAAGGTCAAGTTACCTTAACAACGAAGGTCGTTGACTCTTCGCTCAACTATTATGGTAATGCTCATGGTGGTTATTTGTTTACACTGTGTGATCAAGTCAGTGGTTTAGTTGCTATTTCAACAGGATATGAAGCGGTAACTCTACAATCAAATATCAACTATTTGAGGGCAGGCCGATTAGATGATCTGCTTACTGTCATCGGTACTTGTGTTCATAATGGTCGTACTACAAAAGTCGTTGATGTTCACATTAAAAATCAGAAAGGCGAAATGGTTACAACTGCTATTTTTACAATGTTTGTAACTGGAGAGAGAAAGAGAAGTA

SEQ ID NO: 2130 - protein, 128 aa, Streptococcus agalactiae
MKFNLEQVKVFENYEIENWEEGQVTLTTKVVDSSLNYYGNAHGGYLFTLCDQVSGLVAISTGYEAVTLQSNINYLRAGRLDDLLTVIGTCVHNGRTTKVVDVHIKNQKGEMVTTAIFTMFVTGERKEK

SEQ ID NO: 2131 - protein, 1326 aa, Streptococcus agalactiae
ATGACTTTAAATGCTAAAGGTGAAAGTAATCAAATTCTAGTAGATAAGGAAGTACATTCTACTAACTTATTACTAGATATCGATGAAAAACCAGAATTATTTCAAGGTTTGTTGTTAAGTTTTCAACATGTTTTTGCCATGTTTGGAGCTACGATATTAGTTCCGCTTATTTTAGGGATGCCTGTATCAGTGGCTTTATTTGCTTCTGGTTGCGGAACGCTCATTTATCAAGTTGCGACAAAATTTAAAGTCCCTGTTTACCTAGGCTCATCATTTGCTTATATTACAGCTATGGCATTAGCCATGAAACAAATGCATGGCGATATTTCGGCTGCTCAAACAGGTATTCTTTTTGTAGGTCTAATCTATGTCGTTGTGGCGACGGTTATTAAGTTCGTAGGAAATTCATGGGTTGATAAGATTTTGCCACCAATAATCATTGGACCTATGATTATTGTTATTGGTTTAGGTTTGGCAAACTCTGCTGTAACTAATGCAGGTTTTGTCGCTAAAGGTGATTGGCGTAAAATGCTAGTTGCTGTTGTTACATTCTTGATTGCAGCTTTTATCAATACTAAAGGGAAAGGTTTTATCAAGATTATTCCATTTTTATTTGCAATTATTGGAGGTTATATTTTATCAATCATTCTTGGCTTGGTAGATTTATCTCCAGTTGAAAAAGCTGCCTGGTTTGAATTGCCAAAATTCTATTTACCGTTTAAGACAGGYTTMYTTCACAGTTATAAACTTTACTTTGGACCAGAAATGCTTGCAATTCTTCCAATCTCAATTGTAACGATTGCTGAAAATATCGGTGATCATACAGTTTTAGGTCAGATTTGTGGGCGTAACTTTCTAAAAAAACCAGGTTTAAATCGTCTTTTAATTGGAGATGGTTTAGCAACCGCATTTTCTGCTCTTATAGGAGGGCCAGCTGAAACTACTTATGGTGAAAATACAGGTGTTATTGGCATGACGCGTATAGCTTCTGTAACGGTTATTCGTAATGCAGCTTTTATTGCAATCGCTTTTTCATTCTTTGGTAAATTTACAGCTTTGATCTCTACAATTCCTAGTGCAGTACTTGGTGGAATGGCTATATTACTTTATGGTGTTATTGCAAGTAATGGATTAAAAGTGTTGATTGAAAATCGTGTCAATTTTGCTGAGGTTCGTAATCTGATTATTGCTAGTTCCATGTTAGTTTTAGGCCTCGGTGGAGCAGTCCTTGATCTAGGTGCTCTAACTTTATCAGGAACAGCATTAAGTGCTATAGTGGGTATTATATTAAATTTAATATTGCCAAAAGAAAGCATGAAATCATAA

SEQ ID NO: 2132 - protein, 441 aa, Streptococcus agalactiae
  VARIANT 244, 245: Xaa = Any Amino Acid
MTLNAKGESNQILVDKEVHSTNLLLDIDEKPELFQGLLLSFQHVFAMFGATILVPLILGMPVSVALFASGCGTLIYQVATKFKVPVYLGSSFAYITAMALAMKQMHGDISAAQTGILFVGLIYVVVATVIKFVGNSWVDKILPPIIIGPMIIVIGLGLANSAVTNAGFVAKGDWRKMLVAVVTFLIAAFINTKGKGFIKIIPFLFAIIGGYILSIILGLVDLSPVEKAAWFELPKFYLPFKTGXXHSYKLYFGPEMLAILPISIVTIAENIGDHTVLGQICGRNFLKKPGLNRLLIGDGLATAFSALIGGPAETTYGENTGVIGMTRIASVTVIRNAAFIAIAFSFFGKFTALISTIPSAVLGGMAILLYGVIASNGLKVLIENRVNFAEVRNLIIASSMLVLGLGGAVLDLGALTLSGTALSAIVGIILNLILPKESMKS

SEQ ID NO: 2133 - protein, 1347 aa, Streptococcus agalactiae
ATGCTAACACTTTTTACTCATATCAATAGCTTCGTTTGGGGTCCACCTTTACTTGCTTTATTAGTCGGAACAGGTATTTACCTATCATTTCGCTTAGGTTTTATTCAATTGAGACAACTTTCTAGAGCTTTCAAATTGATTTTCCGAGAGGATAACGGGCAAGGAGATATTTCAAGTTATGCTGCCCTTGCAACTGCTCTTGCTGCAACGGTAGGGACAGGTAATATCGTTGGTGTGGCTACGGCTATTAAATCTGGAGGACCAGGAGCTTTGTTTTGGATGTGGGTAGCTGCCTTTTTTGGAATGGCAACAAAATACGCAGAAGGATTATTAGCTATCAAATATCGCACAAAAGATACTAATGGAGAAATTTCTGGAGGACCAATGTACTACATTGTCAATGGAATGGGACAAAAATGGAAACCATTAGCAGTCTTTTTTTCTGCAGCAGGTATCTTAGTAGCTCTTTTAGGAATAGGGACATTCACTCAAGTCAATGCAATTGCTTCTTCTCTTGAGCATACTTTCAAAATATCAACTAGATTTACCAGCCTCATTCTTGCTGTTATAGWATTATTTATTATATTTGGAGGTATAAAATCTATTTCAAAAGTTTCAGAAAAAATAGTGCCTTTTATGGCTATAAGCTATATTTTAGCAACTCTGATTATTATTGCAGTTAATTACAATAAGATTCCACATACTTTCCAACTCATCTTTAGCGGTGCTTTTTCTGGGACAGCAGCCATTGGTGGTTTTTCTGGAGCTATCGTTAAAGAAGCAATTCAAAAGGGAATTGCTAGAGGAGTTTTCTCAAATGAATCTGGATTGGGTTCTGCTCCAATAGCTGCAGCAGCAGCTAAAACAAAAGAACCTGTTGAACAAGGGCTTATTTCAATGACAGGAACCTTCATTGACACTATTGTTATTTGTACTTTGACAGGGATTGCAATTTTAGTTACAGGAAAATGGCTAGAATTTGATTTACAGGGTGCTCCATTAACACAAGCATCTTTTAATACCGTATTTGGCTCACTAGGTAGTTTTGCTCTAACCTTCTGCCTTGTCTTATTTGCTTTTACTACTATTTTAGGATGGAGCTATTACGGAGAGCGTTGCTTTGAATATCTATTTGGCACTAAATTTATTAACGCTTATCGTATTATTTTTGTCATTATGGTTGGCTTAGGTGGTTTCTTACAGCTCGATCTTATTTGGGTTATCGCTGATATCGTTAATGGTTTAATGGCTTTACCAAATCTAATAGCTCTCCTAGTTTTGTCACCAATTATTGTTAAAGAAACACAGAAATATTTTTCAGAGACTAAAAATATCACTAAGCCTTGA

SEQ ID NO: 2134 - protein, 448 aa, Streptococcus agalactiae
  VARIANT 191: Xaa = Any Amino Acid
MLTLFTHINSFVWGPPLLALLVGTGIYLSFRLGFIQLRQLSRAFKLIFREDNGQGDISSYAALATALAATVGTGNIVGVATAIKSGGPGALFWMWVAAFFGMATKYAEGLLAIKYRTKDTNGEISGGPMYYIVNGMGQKWKPLAVFFSAAGILVALLGIGTFTQVNAIASSLEHTFKISTRFTSLILAVIXLFIIFGGIKSISKVSEKIVPFMAISYILATLIIIAVNYNKIPHTFQLIFSGAFSGTAAIGGFSGAIVKEAIQKGIARGVFSNESGLGSAPIAAAAAKTKEPVEQGLISMTGTFIDTIVICTLTGIAILVTGKWLEFDLQGAPLTQASFNTVFGSLGSFALTFCLVLFAFTTILGWSYYGERCFEYLFGTKFINAYRIIFVIMVGLGGFLQLDLIWVIADIVNGLMALPNLIALLVLSPIIVKETQKYFSETKNITKP

SEQ ID NO: 2135 - protein, 1236 aa, Streptococcus agalactiae
ATGGCAACTTCTACTGAAAACTTACAACTTGCAAAAAGAGGGCCTATTATTAGTATCATTGCCTATATAACACTGGCAGTCGCTAAATTAGCTGCAGGTTATTGGTTTGATGCTACTTCACTTGTAGCAGATGGATTTAATAACTTATCTGATATCTTAGGAAATGTAGCACTCTTAATTGGTTTACACTTGGCTAGTCAACCAGCCGACTCAAACCATCGTTTTGGTCACTGGAAAATTGAAGATTTAGCAAGCCTGATCACCTCTTTTATTATGTTTGTCGTAGGTATTCAAGTTTTTATTCAAACTGTCACTAAGATTATTAATAATACTGATACTAACATTGATCCTCTAGGTGCTATAGTAGGTGCTATATCTGCTCTTGTTATGCTTGGCGTTTATTTCTATAATAAACAATTATCTCAAAGAGTAAAGTCTAGCGCTCTGGTTGCAGCTTCTAAAGATAACCTTTCTGATGCTGTGACATCTATCGGCACATCTATTGCTATCATTGCGGCTTCTCTAAATTTTCCTATTATTGATCGTTTAGCTGCTATCATTATTACTTATTTTATTCTTAAAACAGCTTATGATATTTTTATAGAATCTGCTTTCAGCCTATCGGATGGTTTCGATGATTATCAATTAAAACAATACGAAAAAGCTATATTAACAATTCCTAAAATATCCGCTGTAAAATCTCAACGTGGACGTACTTACGGTAGTAATATTTACCTTGATATTGTTCTCGAAATGAACCCTGATCTCTCAGTCTTTGAAAGTCATGCCATTACCGAAAGAGTGGAAAAACTACTCAGTGATAAATTTTCTGTATATGACATAGATATTCATGTAGAACCCGCTTCTATCCCAGAAGACGAAATTTTCGATAATGTTTACCAAAAATTATACAAAAACGAAAAAATCATCCTAGCAAAAATTCCCGGTTATGAGACCTTTATTAGCCCTGACTTTTATATGATTAATGAAAAGGGAAACATTATCACTTCTGACATGCTCACTAATGCTACAAATCATTCATTGGCAAGCAACTTTAAATATTTCAATGTAAAATCAATTAGTCAAAAAACAAAACTTGTGTCTTATGAATTGGAAGGTAAACGACATACTAGTATTTGGCGCCGTAATGAAAAATGGTTCTTAATCTACCATCAAATAACTGCCAAGTCAAGTCCGTATAAAACGAGACGATATCAAATCACTTCCCTTGATTAA

SEQ ID NO: 2136 - protein, 411 aa, Streptococcus agalactiae
MATSTENLQLAKRGPIISIIAYITLAVAKLAAGYWFDATSLVADGFNNLSDILGNVALLIGLHLASQPADSNHRFGHWKIEDLASLITSFIMFVVGIQVFIQTVTKIINNTDTNIDPLGAIVGAISALVMLGVYFYNKQLSQRVKSSALVAASKDNLSDAVTSIGTSIAIIAASLNFPIIDRLAAIIITYFILKTAYDIFIESAFSLSDGFDDYQLKQYEKAILTIPKISAVKSQRGRTYGSNIYLDIVLEMNPDLSVFESHAITERVEKLLSDKFSVYDIDIHVEPASIPEDEIFDNVYQKLYKNEKIILAKIPGYETFISPDFYMINEKGNIITSDMLTNATNHSLASNFKYFNVKSISQKTKLVSYELEGKRHTSIWRRNEKWFLIYHQITAKSSPYKTRRYQITSLD

SEQ ID NO: 2137 - protein, 393 aa, Streptococcus agalactiae
ATGAAATTATACGTTCAATTAATGGTTATTTTAACCTTTTCATTCGCTGGTGAGGTTCTATCTACTATATTCAACTTACCTGTACCAGGTAGTATTATTGGATTAATATTACTATTCCTAGCGTTAAAATACAAAATCATCAGGCTCAGGCATATTGATGCCGTGGGGAATTTTCTATTAGCAAATATGACCATTTTATTTTTACCACCAGCAGTTGGACTGATGGAGCACTTTCAAGACATAAAACCCTATCTTTTTGGGATAGCTATCATTATCTTAGGAGCGCTATTTCTCAATATTCTAACTATTGGACTGGTATCCCAATGGATCAAAAAGAGATATGAAGGAGATTATCCAGAAATTGGAGGTAAAAATGGCAACTTTAACGAATAA

SEQ ID NO: 2138 - protein, 130 aa, Streptococcus agalactiae
MKLYVQLMVILTFSFAGEVLSTIFNLPVPGSIIGLILLFLALKYKIIRLRHIDAVGNFLLANMTILFLPPAVGLMEHFQDIKPYLFGIAIIILGALFLNILTIGLVSQWIKKRYEGDYPEIGGKNGNFNE

SEQ ID NO: 2139 - protein, 696 aa, Streptococcus agalactiae
ATGGCAACTTTAACGAATAACCCTATCTTTGGTATTATGTTAACCGTATGGGCGTATTACATTGGCATAAGGATTTTTAGAAAATATCCTTCCCCTGCAACAACTCCACTTCTTTTGGCGACTATTTTATTAATTGCTTTTTTAAAATTAACACATATCTCCTATAAAGATTACTACAATGGCGGTTCATTTCTAACGATGTTAATTACGCCTTCAACGGTTGTATTGGCTATTCCTCTCTATAGAACCTTTCATTTAATGAAGCATCACATTAAAAGTATTAGCATTAGCATCATCTTAGCTTCTGTTATCAACACAGTTTTTACCGCAATAGTTGCTAAGTTTTTTGGTATGAAATATTTCTTAGCAATCTCACTTTTCCCAAAGTCCGTAACTACAGCTATGGCCGTTGGAATTACAAGTAAAGCAGGTGGATTAGCTACTATCACTCTGGTCGTAGTTGTTATTACAGGCATCTTAACAAGCGTTTTGGGTCCTATTTTTCTAAAATTATTAAGGATAGAAGATCCTGTTGCTATAGGGCTCGCGCTAGGAGGAACTGGCCATGCTATAGGAACTGGACAAGCCTTAAAATATGGCCAAGTTCAAGGCGCCATGGCTGGACTAGCAATTGGTATCACAGGAATTTGCTATGTTATTGTCAGTCCTTTAGTTGCAGGCTTAATATTGAAATGA

SEQ ID NO: 2140 - protein, 231 aa, Streptococcus agalactiae
MATLTNNPIFGIMLTVWAYYIGIRIFRKYPSPATTPLLLATILLIAFLKLTHISYKDYYNGGSFLTMLITPSTVVLAIPLYRTFHLMKHHIKSISISIILASVINTVFTAIVAKFFGMKYFLAISLFPKSVTTAMAVGITSKAGGLATITLVVVVITGILTSVLGPIFLKLLRIEDPVAIGLALGGTGHAIGTGQALKYGQVQGAMAGLAIGITGICYVIVSPLVAGLILK

SEQ ID NO: 2141 - protein, 624 aa, Streptococcus agalactiae
ATGATACCGTTAAAAAAAATAACTGTTGGAACGATTGTCTGTCTCTCATTTTTGGGTTTAACAGCATGCTCTTCTTCAAATACTCAGCAAACCTCTACTTCAAAATCAAATGTATCACAACATAAAAATATCAAAGCTGACCATGAAGAATTACGTTTGAAATTTAATAAAGTAAAGTTAGGAGTTAAAGCAAATAACTTTAAAGGAGGCACTAGTCTCGCTGAATTAAAACAATTATTTGGTGGCGAACCAAATGAAAAATTTGATACACCAGCGGGAAATGTCACTCTTAAAGGCTATCGTTGGAATGTCGATGATATCTCCATTACTATACAATTATTAAACGATAGTAGCATTGTTCGTTCAATTAGTAATTTTAAGTTTATTCGTGATGCCAACATCACAACAAAAGATTATAATAGTTTAAAAAATGGCATGTCATACAATAAAGTAAAAGAACTTCTAGGAGAACCTGATGATATTTCTCAAGCAGTTTCTTCAGATAAGGAGGAACTACAGGCTGCATGGATTAGTGGCATCCAGTCGTCAGACAGTGATCCGGGAATTAACCTTACATTTGAAAATGATAAACTCACTAACAAACAACAGCATGGTTTAAAATAA

SEQ ID NO: 2142 - protein, 207 aa, Streptococcus agalactiae
MIPLKKITVGTIVCLSFLGLTACSSSNTQQTSTSKSNVSQHKNIKADHEELRLKFNKVKLGVKANNFKGGTSLAELKQLFGGEPNEKFDTPAGNVTLKGYRWNVDDISITIQLLNDSSIVRSISNFKFIRDANITTKDYNSLKNGMSYNKVKELLGEPDDISQAVSSDKEELQAAWISGIQSSDSDPGINLTFENDKLTNKQQHGLK

SEQ ID NO: 2143 - protein, 156 aa, Streptococcus agalactiae
ATGGCATTCGTGAAGAAATACATTGCAATTGAGATTGAAAACACAAAGGAGTTTGAAGAACTTTATGACGATTATTTAAAAAAAGCTTCTGAACTACGAGAAGCAGTTCAAAAGCTTGAACAATTCCAATTTACTGGAATTTTAAACAACAATTAA

SEQ ID NO: 2144 - protein, 51 aa, Streptococcus agalactiae
MAFVKKYIAIEIENTKEFEELYDDYLKKASELREAVQKLEQFQFTGILNNN

SEQ ID NO: 2145 - protein, 432 aa, Streptococcus agalactiae
ATGTATAAAAAGTTAATAAAAATATTAAATATAATTCAATTGTTATTAGTAATTATTCTTACTGGGGTAATTATTTTTTGGATGACAAAATTGATACTTCTTGTAGATTTCGACTGGATTACAGACAGTTATTTCATTCAATCTAGTAAATTCAATTGGATTAAATTTTTTAGTCAGTTTATAACTATTGACTTGATATTTGTTTTACCCCTTATCATGTTTAATTTCGTTTACTATTTACTAAATGAAAAAACAAAAGGAAACTTTGGCAAATTAGTAGAAACAGTTAATGTTGTATATCCTTCAATTGTGTCTGTGATAACACTTTCTCTAACTGCAAATGAATTAGTATTCACTTTCATTACCTCCGTTATTGCATTTATTGTCCTTACAATCCAGATCTCTAAGTTTATTTTTAAACAGCGAAAATAA

SEQ ID NO: 2146 - protein, 143 aa, Streptococcus agalactiae
MYKKLIKILNIIQLLLVIILTGVIIFWMTKLILLVDFDWITDSYFIQSSKFNWIKFFSQFITIDLIFVLPLIMFNFVYYLLNEKTKGNFGKLVETVNVVYPSIVSVITLSLTANELVFTFITSVIAFIVLTIQISKFIFKQRK

SEQ ID NO: 2147 - protein, 147 aa, Streptococcus agalactiae
ATGAACATCAAAAAAATGTTGTTTGGGTCTTATGATTATCATAAGATATCGGAAGATGGTAAAGAAAAACTATCAATCAAAATTGATAGTGGTTGGGTAATCGGTCTAAGTATTTTAGGGTTGATTGGTTGGTTAGTTTTAAAATAA

SEQ ID NO: 2148 - protein, 48 aa, Streptococcus agalactiae
MNIKKMLFGSYDYHKISEDGKEKLSIKIDSGWVIGLSILGLIGWLVLK

SEQ ID NO: 2149 - protein, 141 aa, Streptococcus agalactiae
GTGGTTACTTTCTTTCAAGAAAGAGAGGAGATTGTTATTAAAGAGTTTKTGGTTTATTTATTTTTGATTTTTATTGTCTTTTTGATTGATTTTCCTGTTATTTACTATTTTCTCAAAAAGTTTAGGAAAGATAAGAAATAA

SEQ ID NO: 2150 - protein, 46 aa, Streptococcus agalactiae
  VARIANT 17: Xaa = Any Amino Acid
MVTFFQEREEIVIKEFXVYLFLIFIVFLIDFPVIYYFLKKFRKDKK

SEQ ID NO: 2151 - protein, 435 aa, Streptococcus agalactiae
ATGAAAAAATTAATTAAATATATTCTTAGCTTCGAAAATATAATTGCCATATTTTTTATTGTTCTTTTTGGACTATTGCTCATTCGTATTGAACCTGTTAATAATTCTGTTTATTCTATAATCTCTGGTATTGCTATCGACAAAGTTATCATTGTGATAATTTCATCTTTTGTTATTGCTATTTTCTCAGCATTTTTCATTATCGATATACTGGAAATTATTTTTCATCTCAAAATTGATTCTTTATTTTTAATTGCTTATTTATTTTTTGCAATTTCACTAGGTTTTGGACTTCTTAAAGTTTTGACAGAATCACAATTTAGCTTGTTATCTGCCTTTATTGCTTTCCCTTTATTTCTTATCTTTCCTAAACTTTTTGAGAAAATAGTAAATAACAGGAAAATCAATCAAAAAGACAATAAAAATCAAAAATAA

SEQ ID NO: 2152 - protein, 144 aa, Streptococcus agalactiae
MKKLIKYILSFENIIAIFFIVLFGLLLIRIEPVNNSVYSIISGIAIDKVIIVIISSFVIAIFSAFFIIDILEIIFHLKIDSLFLIAYLFFAISLGFGLLKVLTESQFSLLSAFIAFPLFLIFPKLFEKIVNNRKINQKDNKNQK

SEQ ID NO: 2153 - protein, 2460 aa, Streptococcus agalactiae
ATGTCTAATATTCAAAATATGTCCCTTGAGGACATTATGGGAGAGCGTTTTGGGCGCTATTCTAAGTATATCATTCAAGAACGGGCGTTGCCGGATATTCGTGATGGCTTAAAACCTGTTCAACGTCGAATCCTTTATTCAATGAATAAAGATGGTAATACTTTTGAAAAGGGATTTCGCAAATCTGCAAAATCAGTCGGTAATGTTATGGGGAATTTCCATCCTCATGGGGATTCCTCTATCTATGACGCGATGGTTCGTATGTCTCAAGATTGGAAAAATCGTGAGACATTGATTGAAATGCACGGAAATAATGGTTCTATGGATGGAGATCCTGCGGCGGCTATGCGTTATACGGAAGCCCGTCTATCAGAAATTGCTGGTTATCTTCTTCAAGATATTGATAAGAATACCGTACCCTTTGCCTGGAATTTCGATGATACAGAGAAAGAACCAACTGTTTTACCAGCTGCCTTTCCCAATCTTTTAGTCAACGGAGCAACAGGAATATCTGCAGGCTATGCAACAGATATTCCACCACATAATTTAGCAGAAGTCATTGATGCTGTCGTGTACATGATTGATCACCCTAAAGCTAAATTAGATAAATTAATGGAATTTCTACCTGGTCCAGATTTTCCAACTGGCGCTATCATTCAAGGAAAAGATGAAATTCGTAAGGCATATGAGACTGGTAAGGGGAGAGTAGCGGTTCGCTCGCGAACTGCTATTGAAACCTTAAAAGGTGGTAAGAAACAAATTATTGTTACTGAAATTCCTTATGAAGTTAATAAGTCAGTTTTAGTAAAACGAATCGATGATGTTCGTGTTAATAATAAAGTTCCAGGAATAGCAGAGGTGCGTGATGAGTCTGATAGAGATGGTCTTCGTATCGCTATTGAGCTCAAAAAAGAAGCCGATGAAACAATTGTCTTAAATTATCTTTTTAAATATACAGACCTACAAGTGAATTATAATTTCAATATGGTTGCTATTGATGACTACACCCCTAAGCAGGTGGGTCTATCAAGAATATTAACTAGCTATATCGCTCACCGAAGAGAAATTATTATTGCTCGTTCAAAATTTGATAAAGAAAAAGCCGAAAAACGTCTCCATATTGTTGAGGGACTGATTAGGGTTCTTTCTATTTTGGATGAAGTGATTGCATTAATTCGTGCTTCTGAGAATAAAGCTGATGCGAAAGAGAATTTGAAGGTCAGCTATGAGTTTTCAGAAGCCCAAGCAGAGGCTATCGTCACATTGCAATTATATCGTCTCACAAATACTGATATTGTGACGTTGAGAGAAGAAGAAGAAGAACTTCGTCAACAAATCACAATGCTTAAGGCAATTATTAGTGATGAACGTACGATGTATAACGTAATGAAACGTGAGTTACGTGAGGTCAAAAAGAAATTTGCCAATACTAGACGTTCTGAACTTCAAGAATTAGCTGAAACTATTGAAATCGATACTGCAAGTTTAATTATCGAAGAGGACACATACGTCAGTGTTACTAGAGGCGGATATGTAAAACGCACCAGTCCTCGCTCTTTCAATGCATCAACTGTTGATGAACTTGGTAAGCGAGAAGATGACGAATTGATATTTGTGAGCAATGCAAAGACTACCCAACATTTATTGATGTTTACTAACCTTGGTAATCTTGCTTATCGTCCAGTTCATGAATTAGCTGATATTCGATGGAAAGACGTTGGTGAACATTTATCACAAAATCTTGTTAACTTTGCTTCAAATGAAGAAATTATTTATGCTGAATTAGTAGATGATTTTACTAAAGAAACTTATTTTGCTGTCACTAGATTAGGGCAAATAAAGCGTTTTGAACGTCAAGAAATCAGTCCATGGCGGACATATAAGTCAAAAACAGCTAAATATGCTAAGTTAAAAAATGTAGATGATTACGTTGTGACTGTTGCTCCTATCCAATTAGAGGATGTTATACTTGTCACTTATAATGGTTATGCGTTGAGATTTAGTATAAATGATGTACCAGTCGTTGGTAGTAAAGCCGCAGGTGTAAAAGCGATGAATTTAAAAGATAGTGATCACATCGTATCTGCATTTATAGCTAACACCACAAGTTTATATTTATTAACTCATAGAGGAAGTCTTAAACGAATGGCCATTGATGTTATCCCCACAACTAGTCGTGCTAATCGAGGACTTCAAGTTCTTCGTGAATTGAAATCCAAACCGCATCGCGTTTTTAAAGCAGGACCTGTATATTTAGAGGATTCATCTTTTGAATTTGATTTATTTAGTTCAGTATCGAATCATGAAGGAGATACTTTCGTACTTGAGATTATGTCTAAAACAGGAAAAGTTTACGATGTTGATTTAAGTCAATGGAGTTTTTCTGAACGTACAAGTAATGGCTCTTTTGTATCTGATAAGATTTCTGACGAAGAAGTATTCTCAGTTAAAATTAAGTAA

SEQ ID NO: 2154 - protein, 819 aa, Streptococcus agalactiae
MSNIQNMSLEDIMGERFGRYSKYIIQERALPDIRDGLKPVQRRILYSMNKDGNTFEKGFRKSAKSVGNVMGNFHPHGDSSIYDAMVRMSQDWKNRETLIEMHGNNGSMDGDPAAAMRYTEARLSEIAGYLLQDIDKNTVPFAWNFDDTEKEPTVLPAAFPNLLVNGATGISAGYATDIPPHNLAEVIDAVVYMIDHPKAKLDKLMEFLPGPDFPTGAIIQGKDEIRKAYETGKGRVAVRSRTAIETLKGGKKQIIVTEIPYEVNKSVLVKRIDDVRVNNKVPGIAEVRDESDRDGLRIAIELKKEADETIVLNYLFKYTDLQVNYNFNMVAIDDYTPKQVGLSRILTSYIAHRREIIIARSKFDKEKAEKRLHIVEGLIRVLSILDEVIALIRASENKADAKENLKVSYEFSEAQAEAIVTLQLYRLTNTDIVTLREEEEELRQQITMLKAIISDERTMYNVMKRELREVKKKFANTRRSELQELAETIEIDTASLIIEEDTYVSVTRGGYVKRTSPRSFNASTVDELGKREDDELIFVSNAKTTQHLLMFTNLGNLAYRPVHELADIRWKDVGEHLSQNLVNFASNEEIIYAELVDDFTKETYFAVTRLGQIKRFERQEISPWRTYKSKTAKYAKLKNVDDYVVTVAPIQLEDVILVTYNGYALRFSINDVPVVGSKAAGVKAMNLKDSDHIVSAFIANTTSLYLLTHRGSLKRMAIDVIPTTSRANRGLQVLRELKSKPHRVFKAGPVYLEDSSFEFDLFSSVSNHEGDTFVLEIMSKTGKVYDVDLSQWSFSERTSNGSFVSDKISDEEVFSVKIK

SEQ ID NO: 2155 - protein, 1929 aa, Streptococcus agalactiae
GTGACGAATTATGGCGACGATGCTATTCAAGTCTTAGAAGGATTAGATGCTGTTCGTAAGCGTCCAGGGATGTATATAGGTTCCACAGATGGAACTGGTTTACATCATTTAGTGTGGGAAATTGTAGATAATGCAGTTGATGAAGCTCTATCAGGTTTTGGAAATCGCATTGATGTTATTATTAACAAAGATGGGAGTATAACTGTTACAGACCATGGACGCGGTATGCCAACTGGAATGCATGCTATGGGAAAACCTACTGTTGAAGTCATCTTCACGGTGCTTCATGCAGGTGGAAAATTTGGACAAGGTGGTTATAAAACATCAGGTGGTCTCCATGGTGTTGGATCATCTGTAGTTAATGCTTTGTCTTCTTGGTTAGAAGTTGAAATCATTCGCGACGGAGCTATTTACAGACAACGTTTTGAAAATGGTGGTAAGCCCGTTACAACCCTGAAAAAAATCGGCACGGCACCAAAATCAAAATCTGGGACATCTGTCAGCTTTATGCCAGATCAGTCAGTATTTTCAACGATAGATTTTAAGTTTAATACAATTGCAGAGCGCTTAAAGGAATCTGCCTTTCTCTTAAAAAATGTTACTTTAACCTTAACAGATAATCGTTCAGAAGAAGCAGAGCATCTAGAATTTCATTATGAAAACGGTGTTCAAGATTTTGTAGAGTATTTAAATGAAGATAAAGAAACGTTGACACCAATCATGTTTTTCGAAGGTGAAGAACAAGAATTTCATATCGAAGTTGCTTTGCAGTATAATGATGGTTTTTCAGATAATATTCTTTCTTTTGTCAATAATGTTCGTACTAAAGATGGTGGAACACATGAAACTGGCTTGAAATCAGCTATTACAAAGTCTATGAATGACTATGCACGTAAAACAGGACTTCTTAAAGAAAAAGATAAAAACCTTGAAGGTTCTGATTATCGTGAGGGGCTATCAGCCATTTTATCTATTCTTGTACCTGAGGAGCACTTGCAATTTGAAGGCCAAACTAAAGATAAACTAGGAAGTCCCTTAGCACGACCAATTGTTGATGGTATTGTTTCTGAAAAGTTAACTTACTTTCTTATGGAAAATGGAGATTTAGCATCTAATTTAATCCGTAAGGCAATAAAAGCACGTGATGCGCGTGAAGCTGCACGTAAAGCTCGTGATGAAAGTAGAAATGGGAAAAAGTCGAAAAAAGATAAAGGTCTACTTTCTGGAAAATTAACCCCTGCACAATCAAAAAATGCTAAGAAAAATGAACTCTATTTAGTCGAAGGAGACTCTGCAGGTGGCTCTGCTAAGCAAGGTCGTGATAGAAAGTTTCAAGCTATTTTACCGTTGCGAGGAAAAGTATTGAATACAGCTAAGGCAAAGATGGCTGATATTATAAAAAACGAAGAAATTAATACAATGATCCATACCATTGGTGCAGGTGTTGGTCCTGATTTTAATATTGACGATATTAATTATGATAAAGTTATCATTATGACCGATGCTGATACTGACGGAGCTCATATTCAGACACTATTATTAACTTTCTTTTATCGCTATATGAGACCTCTTGTTGAAGAGGGACATGTCTATATTGCTTTGCCACCTTTGTATAAAATGTCAAAAGGAAAAGGTAAGAAAGAAATTGTTGAGTATGCTTGGACGGATATAGAGTTAGAAGAATTACGACAAAAATTTGGTAAAGGCTCACTATTACAACGATATAAAGGGCTTGGGGAAATGAATGCCGATCAATTGTGGGAAACCACTATGAACCCTGAGACAAGGACATTAATTCGTGTAACAATTGAAGATTTAGCAAGAGCAGAACGTCGAGTTAATGTCTTGATGGGTGATAAAGTTCCTCCAAGACGCCAATGGATTGAAGATAATGTCAAGTTTACTTTAGAAGAGAATACAGTATTTTAA

SEQ ID NO: 2156 - protein, 642 aa, Streptococcus agalactiae
MTNYGDDAIQVLEGLDAVRKRPGMYIGSTDGTGLHHLVWEIVDNAVDEALSGFGNRIDVIINKDGSITVTDHGRGMPTGMHAMGKPTVEVIFTVLHAGGKFGQGGYKTSGGLHGVGSSVVNALSSWLEVEIIRDGAIYRQRFENGGKPVTTLKKIGTAPKSKSGTSVSFMPDQSVFSTIDFKFNTIAERLKESAFLLKNVTLTLTDNRSEEAEHLEFHYENGVQDFVEYLNEDKETLTPIMFFEGEEQEFHIEVALQYNDGFSDNILSFVNNVRTKDGGTHETGLKSAITKSMNDYARKTGLLKEKDKNLEGSDYREGLSAILSILVPEEHLQFEGQTKDKLGSPLARPIVDGIVSEKLTYFLMENGDLASNLIRKAIKARDAREAARKARDESRNGKKSKKDKGLLSGKLTPAQSKNAKKNELYLVEGDSAGGSAKQGRDRKFQAILPLRGKVLNTAKAKMADIIKNEEINTMIHTIGAGVGPDFNIDDINYDKVIIMTDADTDGAHIQTLLLTFFYRYMRPLVEEGHVYIALPPLYKMSKGKGKKEIVEYAWTDIELEELRQKFGKGSLLQRYKGLGEMNADQLWETTMNPETRTLIRVTIEDLARAERRVNVLMGDKVPPRRQWIEDNVKFTLEENTVF

SEQ ID NO: 2157 - protein, 359 aa, Streptococcus agalactiae
ATGATTATCATTGCCTATCTGTTAGGCTCTATCCAAACTGGACTTTGGATTGGTAAATATTTTTACCAAGTCAATCTTCGTCAACACGGTAGTGGTAATACTGGCACCACGAATACCTTCCGTATTTTAGGTGTAAAAGCTGGCATTGTCACTTTGACTATTGACATTTTAAAAGGGACTCTAGCAACACTTATTCCTATCATGTTAGGTGTAACGACAGTACTCCATTTTTTATCGGTTTTTTTGCTATTATAGGTCACACTTTCCCTATTTTTGCACAATTCAAAGGTGGGAAAGCCGTTGCTACAAGCGCTGGGGTTTTGCTAGGATTTGCACCTTNNNNNCATTCCATTCATTAA

SEQ ID NO: 2158 - protein, 119 aa, Streptococcus agalactiae
  VARIANT 114, 115: Xaa = Any Amino Acid
MIIIAYLLGSIQTGLWIGKYFYQVNLRQHGSGNTGTTNTFRILGVKAGIVTLTIDILKGTLATLIPIMLGVTTVSPFFIGFFAIIGHTFPIFAQFKGGKAVATSAGVLLGFAPXXHSIH

SEQ ID NO: 2159 - protein, 654 aa, Streptococcus agalactiae
ATGAAACATTCTAGTTGGCATGATTTAATAAAAAGAGAACTACCCAATCATTACTACAATAAAATTAATACATTTATGGATGCAGTTTACGAAAGCGGAATCGTTTATCCTCCAAGAGGTAAGGTGTTCAATGCCATACAGATAACACCACTAGAAAACGTAAAAGTAGTTATTATTGGCCAAGATCCTTATCATGGCCCTCAACAAGCTCAAGGACTCTCATTTTCTGTTCCAGACAATTTACCAGCTCCTCCTTCACTTCAAAATATTCTAAAAGAATTAGCAGAAGATATCGGGTCACGTTCACATCATGACTTAACATCATGGGCGCAACAAGGAGTGCTGCTATTGAATGCTTGTTTAACAGTTCCAGAACACCAAGCTAATGGTCATGCTGGGCTTATATGGGAACCTTTTACTGATGCTGTCATCAAAGTGGTTAACCAAAAGGAAACACCAGTAGTCTTTATTCTGTGGGGTGGCTATGCTCGAAAGAAAAAGTCGCTAATTGATAATCCTATTCATCATATTATTGAGAGTCCTCATCCGAGTCCCCTATCTGCTTATCGTGGCTTCTTTGGTAGCAGACCTTTTTCTAGAACAAATCATTTCTTAGAAGAAGAAGGAATAAATGAGATTGATTGGTTAAATTAG

SEQ ID NO: 2160 - protein, 217 aa, Streptococcus agalactiae
MKHSSWHDLIKRELPNHYYNKINTFMDAVYESGIVYPPRGKVFNAIQITPLENVKVVIIGQDPYHGPQQAQGLSFSVPDNLPAPPSLQNILKELAEDIGSRSHHDLTSWAQQGVLLLNACLTVPEHQANGHAGLIWEPFTDAVIKVVNQKETPVVFILWGGYARKKKSLIDNPIHHIIESPHPSPLSAYRGFFGSRPFSRTNHFLEEEGINEIDWLN

SEQ ID NO: 2161 - protein, 420 aa, Streptococcus agalactiae
ATGAGAGAAACTGAAACACACGATCACCAAGCGCTAATTCAAAAATTGTTAGTCAGCATTCATTATTTAACCTTGTTTCGTGATGAAATTATATTAGTAGAAAAAACCCCATCTTTACTGGGGAAACATTTTTCTATTGCTATTGTACAGAATGAACTAGGTGAGATACTTTCTAAAATAGAAGCTTTGAGTAAGCAAAAAAAACTGATTCGTTCTATTTATTGGTATGATGAATCATCATTTAAAGTCATGAATAAGGCTCTGGCTATTGTAGAAGAATGGATTAAGGGCTTAGATAATCTTTTAGAATTCTGTCAATCACAGACGGTTTTTCAAGCAATTTTAGGTGATGAACGTGCACATGTATTTGGAATCCTTATTGATGTTTATACTTCTTTAAACATTATAAATACTTCTTGA

SEQ ID NO: 2162 - protein, 139 aa, Streptococcus agalactiae
MRETETHDHQALIQKLLVSIHYLTLFRDEIILVEKTPSLLGKHFSIAIVQNELGEILSKIEALSKQKKLIRSIYWYDESSFKVMNKALAIVEEWIKGLDNLLEFCQSQTVFQAILGDERAHVFGILIDVYTSLNIINTS

SEQ ID NO: 2163 - protein, 809 aa, Streptococcus agalactiae
TTGTCTGATAAAGGCTATGCTATAGATATGGTGGGAGCAGATAAAGGTTATCGTCGCCAAGATTTACAACCTTTATACTATCCGAACGGTGCTATTTTTATTTCTAATAAAGAAACTTACTTAAGGGAAAAAAGCTTTTTCACCTCTAGGACATATGCTTATCAAATGGCAAAGGAATTTTCATTAGATGTTGATACGAGAGATGATTTATCCACGTCATCGGTCACYTCTTTTTCGATTATGCCATTAGGGAAAAAGAGAATAAAGTTTTTTATAAAGAAGGCTATAGTCGTTTGTTCAATAGAGAAGCTTCAAAGATAATTTTAGGTGATTCAAAAACGATATCTATCTCACTAGAAAATTACCATAATTATTCCCAAGGTGGTGTAACATTAGCAACGATGTTGGAAAACTTACCTAACTTTTTGACAGCTAATGTAACAGAGGCTTTTGTTTCTATAGGGGTAAATGATCTCATTACAGGTTATAGTGTGGAAGAAATATTCAGCAATTTCCAAAAACTCTACTCATTATTAGCTGAGAATAAAATAAAGATGAGATTGACAACTATTGCTTACACCCTTTTTAGAGAAACTGTCAATAATGCAGATATTGAGAAAATCAATCAATGGCTAACAGAATTTTGTTATCAAAATCAGATTCCACTGTTAGATATTAATAGATTTTTATCAAAGGATGGTAATCTAAATTATCATTTAACTAGTGATGGATTGCATTTTACTCAAGAGGCTAATGATTTGTTACAAAGTCAATATCAATTATTTGTAGACGAAGTTAAAACCTTATAA

SEQ ID NO: 2164 - protein, 269 aa, Streptococcus agalactiae
  VARIANT 77: Xaa = Any Amino Acid
MSDKGYAIDMVGADKGYRRQDLQPLYYPNGAIFISNKETYLREKSFFTSRTYAYQMAKEFSLDVDTRDDFIHVIGHXFFDYAIREKENKVFYKEGYSRLFNREASKIILGDSKTISISLENYHNYSQGGVTLATMLENLPNFLTANVTEAFVSIGVNDLITGYSVEEIFSNFQKLYSLLAENKIKMRLTTIAYTLFRETVNNADIEKINQWLTEFCYQNQIPLLDINRFLSKDGNLNYHLTSDGLHFTQEANDLLQSQYQLFVDEVKTL

SEQ ID NO: 2165 - protein, 270 aa, Streptococcus agalactiae
ATGAAGCCAATTTGTATTATTCCTGCGCGATCAGGGTCAAAAGGATTACCAGATAAGAATATGTTATTCCTAGCAGGTAAACCCATGATTTTCCATACTATAGATGCTGCAATTGAATCTGGAATGTTTGATAAGAAAGATATTTTTGTTAGTACAGATTCAGAATTGTACAGAGAGATTTGTTTAGAACGCGGTATTTCAGTGGTGATGAGAAAACCGGAACTTTCAACTGATCAGGCAACTNNNNNCATTCATTCATTAATTAATTAA

SEQ ID NO: 2166 - protein, 89 aa, Streptococcus agalactiae
  VARIANT 82, 83: Xaa = Any Amino Acid
MKPICIIPARSGSKGLPDKNMLFLAGKPMIFHTIDAAIESGMFDKKDIFVSTDSELYREICLERGISVVMRKPELSTDQATXXIHSLIN

SEQ ID NO: 2167 - protein, 630 aa, Streptococcus agalactiae
ATGAAAAAAAAGTTGGCATTTTTAGGCGCAGGAAGTCATGCTGATGCGATTGCTCCGGTTATTGATCCTCTTGTGTATGATTTCGTAGGTTTTTTTGATGATAAAGATATTACGGAGCATGATGGTTATCCTGTTCTTGGAAAACTTTATGATGTGCTACCTTACCTTGAAGATGGCTCAATAGATGCAGTATTTATTACAATAGGTGATAATGCTAAAAGGAAAGAACTATTTGAATATGTAGCAAAGGATTATTATGACTTTATTATTAACATCATTAGTCCCAATGCTTTAGTATTGACACCAGATAGTATTTGTGGGCGTGGTATCTTTATTGGTTTTGGGGCTTTTATAGGTTCTAAAGTGAAGCTGTTTGATAACAACGTTGTTAATACAGGAGCGCTCATTGAACATCATACTGTTGTAGAATCACACTGTAATATAGCACCTAATGCTACCATAAATGGTCTTTGTTATATTAGAGAAGAAGTTTATGTAGGTAGTGCCAGTGTTATTATTCAAACCTTGGATATTTCATCGTGTACGACAATTGGCGCAGGAGCTGTTGTTGTAAAAGATATTATAGAACCTGGAACCTATGTAGGGGTTCCAGCCAAAAAAATAAAATAA

SEQ ID NO: 2168 - protein, 209 aa, Streptococcus agalactiae
MKKKLAFLGAGSHADAIAPVIDPLVYDFVGFFDDKDITEHDGYPVLGKLYDVLPYLEDGSIDAVFITIGDNAKRKELFEYVAKDYYDFIINIISPNALVLTPDSICGRGIFIGFGAFIGSKVKLFDNNVVNTGALIEHHTVVESHCNIAPNATINGLCYIREEVYVGSASVIIQTLDISSCTTIGAGAVVVKDIIEPGTYVGVPAKKIK

SEQ ID NO: 2169 - protein, 783 aa, Streptococcus agalactiae
ATGNNNNNTTTAGGGGATCGTTACGAAATGTTACCAGTTGTGAATGTAGCGTTGATTTATAATGTCCCAGTATGCCACCTTCATGGAGGGGAGACCTCATTAGGCAATTTTGATGAGTATATTCGCCATGCAATTACTAAGATGAGTCACCTACACTTAGTCTCTACAGAGGACTTTCGTCAACGTGTGATTCAGATGGGAGAACAACCTCAATTTGTAATTAACACAGGAGCTCTCGGAGTGGAAAATGCTCTATCAATCCCTTCTCTAACCAAAGAAGCAATAGAAAAGCAATTAGGTATTGTACTAGAGGAATCCTATTTTGTTGTTCTCTATCATCCTGTTACTTTTGAACAAGGAAAAAGTGCTGGAGAACAGATGAAAGCGGTACTATCAGCCCTTTCTAAATTTGGTGTCCAGTGTCTATTTATAGGATCCAATTCAGATACTGGTTCTGATGATATTGCAAAGGCTATCAATACTTATTTGATAAATCATGAAAATAGTTATTGCTTTGCTTCTTTATCAACCCAACTTTATCATTCCTTAATTCGTCATTCACTAGGACTGATTGGTAATTCGTCTTCTGGTTTAATAGAAGTTCCTTCTTTGATGAAACCTACTCTTAATATTGGTGATCGCCAAAAAGGTAGGCTACATGGAGAAAGTGTAGTAAGTGTACCAGTCGAAACCTCCTCTGTATTGGAGGGATTATCAAAATTGAATGAAGTGACCAACTTTGACAATCCCTACTACAAAGGGAANNNNNCATTCATTCATTAA

SEQ ID NO: 2170 - protein, 260 aa, Streptococcus agalactiae
  VARIANT 2, 3, 255, 256, 257: Xaa = Any Amino Acid
MXXLGDRYEMLPVVNVALIYNVPVCHLHGGETSLGNFDEYIRHAITKMSHLHLVSTEDFRQRVIQMGEQPQFVINTGALGVENALSIPSLTKEAIEKQLGIVLEESYFVVLYHPVTFEQGKSAGEQMKAVLSALSKFGVQCLFIGSNSDTGSDDIAKAINTYLINHENSYCFASLSTQLYHSLIRHSLGLIGNSSSGLIEVPSLMKPTLNIGDRQKGRLHGESVVSVPVETSSVLEGLSKLNEVTNFDNPYYKGXXXFIH

SEQ ID NO: 2171 - protein, 1026 aa, Streptococcus agalactiae
ATGGTTTATATTATTGCAGAGATTGGTTGCAATCATAATGGAGATATTAATCTTGCGAAAAAAATGGTAGATGTTGCCGTGTCTTGTGGTGTTGATGCTGTTAAATTTCAGACTTTTAAAGCTGAGAAACTTATTTCTAAATTTGCTCCCAAAGCTGAATATCAAAAAGCAACTACAGGAACAGCAGACAGTCAACTTGAGATGACGAAACGTTTAGAGTTAAGCTTTGAAGAATACTTAGAAATGCGTGATTATGCAATTTCAAAAGGTGTGGAGACCTTTTCAACACCTTTTGATGAAGAGTCATTAGAGTTCTTAATTTCTACAGATATGCCAATTTACAAAATTCCATCAGGAGAAATCACTAATTTACCTTACTTAGAAAAGATTGGCAAGCAACAAAAGAAAGTTATTCTTTCGACGGGTATGGCGGTAATGGAAGAGATCCATCAAGCGGTGAATATTTTACGTCAGAATGGTACAACCGACATTTCTATTTTACATTGTACAACAGAGTACCCAACACCTTACCCCTCTCTAAATTTAAACGTTATTCATACTTTGAAAGATGAATTTAAAGATTTAACGATAGGTTATTCGGATCATTCAATTGGATCAGAAGTACCTATCGCAGCAGCAGCAATGGGTGCAGAAGTTATTGAAAAACACTTTACTTTAGATACTAATATGGAAGGTCCGGATCATAAAGCCAGTGCAACACCTGATATTTTAGCTGCTTTAGTTAAAGGGGTTCGCATTGTTGAACAAGCCTTAGGTAGATTTGAAAAAATCCCAGATCCAGTAGAAGAGAAAAATAAGATTGTTGCTCGTAAATCAGTCGTTGCTTTAAAACCAATTAAAAAAGGCGATATTTATTCAATAGAAAATATTACGGTGAAGCGCCCAGGTAATGGTATTTCTCCTATGAACTGGTATGACATCTTGGGACAAGAAGCGCAAGATGATTTCGAAGAGGATGAAGTTATTCGTGATTCACGCTTTGAAAATCAATTGCCCGAGTTATAA

SEQ ID NO: 2172 - protein, 341 aa, Streptococcus agalactiae
MVYIIAEIGCNHNGDINLAKKMVDVAVSCGVDAVKFQTFKAEKLISKFAPKAEYQKATTGTADSQLEMTKRLELSFEEYLEMRDYAISKGVETFSTPFDEESLEFLISTDMPIYKIPSGEITNLPYLEKIGKQQKKVILSTGMAVMEEIHQAVNILRQNGTTDISILHCTTEYPTPYPSLNLNVIHTLKDEFKDLTIGYSDHSIGSEVPIAAAAMGAEVIEKHFTLDTNMEGPDHKASATPDILAALVKGVRIVEQALGRFEKIPDPVEEKNKIVARKSVVALKPIKKGDIYSIENITVKRPGNGISPMNWYDILGQEAQDDFEEDEVIRDSRFENQLPEL

SEQ ID NO: 2173 - protein, 1134 aa, Streptococcus agalactiae
TTGAAAGAAAAAGAAAATATACAAAAGATTATTATAGCGATGATTCAAACAGTTGTGGTTTATTTTTCTGCAAGTTTGACATTAACATTAATTACTCCCAATTTTAAAAGCAATAAAGATTTATTGTTTGTTCTATTGATACATTATATTGTCTTTTATCTTTCTGATTTTTACAGAGACTTTTGGAGTCGTGGCTATCTTGAAGAGTTTAAAATGGTATTGAAATACAGCTTTTACTATATTTTCATATCAAGTTCATTATTTTTTATTTTTAAAAACTCATTTACAACGACACGACTTTCCTTTTTTCCTTTTATTGCTATGAATTCGATTTTATTATATCTATTGAATTCATTTTTAAAATATTATCGAAAATATTCTTACGCTAAGTTTTCACGAGATACCAAAGTTGTTTTGATAACGAATAAGGATTCTTTATCAAAAATGACCTTTAAGAATAAATACGACCATAATTATATCGCTGTCTGTATCTTGGACTCCTCTGAAAAGGATTGTTATGATTTGAAACATAACTCGTTAAGGATAATAAACAAAGATGCTCTTACTTCAGAGTTAACCTGCTTAACTGTTGATCAAGCTTTTATTAACATACCCATTGAATTATTTGGTAAATACCAAATACAAGATATTATTAATGACATTGAAGCAATGGGAGTGATTGTCAATGTTAATGTAGAGGCACTTAGCTTTGATAATATAGGAGAAAAGCGAATCCAAACTTTTGAAGGATATAGTGTTATTACATATTCTATGAAATTCTATAAATATAGTCACCTTATAGCAAAACGATTTTTGGATATCATGGGTGCTATTATAGGTTTGCTCATATGTGGCATTGTGGCAATTTTTCTAGTTCCGCAAATCAGAAAAGATGGTGGACCGGCTATCTTTTCTCAAAATAGAGTAGGTCGTAATGGTAGGATTTTTAGATTCTATAAATTCAGATCAATGCGAGTAGATGCAGAACAAATTAAGAAAGATTTATTAGTTCACAATCAAATGACAGGGCTAATGTTTAAGTTAGACGATGATCCTAGAATTACTAAAATAGGAAAATTTATTCGAAAAACAAGCATAGATGAGTTGNNNNNCATTCATTCATTAATTAATTAA

SEQ ID NO: 2174 - protein, 377 aa, Streptococcus agalactiae
  VARIANT 370, 371: Xaa = Any Amino Acid
MKEKENIQKIIIAMIQTVVVYFSASLTLTLITPNFKSNKDLLFVLLIHYIVFYLSDFYRDFWSRGYLEEFKMVLKYSFYYIFISSSLFFIFKNSFTTTRLSFFPFIAMNSILLYLLNSFLKYYRKYSYAKFSRDTKVVLITNKDSLSKMTFKNKYDHNYIAVCILDSSEKDCYDLKHNSLRIINKDALTSELTCLTVDQAFINIPIELFGKYQIQDIINDIEAMGVIVNVNVEALSFDNIGEKRIQTFEGYSVITYSMKFYKYSHLIAKRFLDIMGAIIGLLICGIVAIFLVPQIRKDGGPAIFSQNRVGRNGRIFRFYKFRSMRVDAEQIKKDLLVHNQMTGLMFKLDDDPRITKIGKFIRKTSIDELXXIHSLIN

SEQ ID NO: 2175 - protein, 699 aa, Streptococcus agalactiae
ATGACTCGTTTAGAAATAGTTGATAGCAAGTTAAGACAAGCAAAAAAAACAGAAGAATACTTCAATGCGATCCGTACAAACATACAGTTTAGTGGAAAGGAAAATAAAATTCTTGCAATTACCTCTGTTAGGGAAGGGGAAGGAAAATCCACTACTTCAACAAGTTTAGCTTTATCTTTAGCTCAAGCAGGATTTAAAACATTATTAATTGATGCGGATACTAGGAACCCTGTTATGTCTGGAACCTTTAAAGCAACTGGAACTATTAAAGGCTTGACGAATTATTTATCAGGTAATGCAGATCTTGGAGATATTATCTGTGAAACCAATGTTCCTAGACTGATGGTCGTTCCTTCAGGGAAAGTACCACCAAATCCAACAGCATTACTTCAGAACGCTTATTTTAATAAGATGATTGAAGCTATTAAAAATATATTTGATTATATTATCATCGATACTCCACCTATTGGTTTAGTTGTTGATGCCGCAATAATCGCTAATGCTTGCGATGGTTTTATTTTAGTAACCCAAGCAGGTAGAATAAAACGTAATTATGTTGAAAAAGCAAAAGAACAGATGGAACAAAGTGGTTCAAAGTTCTTAGGTATTATTCTTAATAAAGTTAGTGAATCTGTTGCTACTTACGGCGATTACGGCGATTATGGAAATTACGGAAAAAGGGATAGAAAAAGGAAGTAA

SEQ ID NO: 2176 - protein, 232 aa, Streptococcus agalactiae
MTRLEIVDSKLRQAKKTEEYFNAIRTNIQFSGKENKILAITSVREGEGKSTTSTSLALSLAQAGFKTLLIDADTRNPVMSGTFKATGTIKGLTNYLSGNADLGDIICETNVPRLMVVPSGKVPPNPTALLQNAYFNKMIEAIKNIFDYIIIDTPPIGLVVDAAIIANACDGFILVTQAGRIKRNYVEKAKEQMEQSGSKFLGIILNKVSESVATYGDYGDYGNYGKRDRKRK

SEQ ID NO: 2177 - protein, 693 aa, Streptococcus agalactiae
ATGAATAAAATAGCTAATACAGAAGTTGAAATAAATATATTCAACCTTTTAAAAAAATTGTGGAAAAAGAAATTTTTAATCACATTTGTTGCCATTGCATTTGCAACAGCTGGACTTTTCTATAGTCTTTTTATTGTTACGCCACAATATACTTCTTCAACAAGGATATATGTCATTAACCCTAATACCCCTAATAATAGTATTACTGCACAAGATCTACAAGCGGGGAGTTTTCTTGCAAATGACTATAAGGAGATTATTACGTCTACTGACGTTCTAGAAAAAGTTATTTCTTCTGAAAAATTGAATTATCCTTCGTCTCAGTTGTTGCAAAAAATAACAGTTTCTATTTTAAAAGATACACGTGTTATTTCAATATCGGTCGAAGATGCTAATCCAAAAATGTCTCAAAAATTAGCAAATTCAGTTAGAGAAGCAGCAGTTTCAAAAATCAAGGCAGTTACTCAAGTAGAGGATATCACTACTCTTGAGAAGGGAAATTTACCTAAAGCACCATCTTCTCCTAATATTAAAAAGAATGTACTAATCGGGTTTATTGTTGGTGCAGGATTATCAACTATTGTTTTAGTTATTATGGGTATTTTGGATGATCGTGTTAATACTGAAGAAGATATTGAAAAGGCCCTAGGACTTACTTCTTTAGGTATAGTACCAGATTTGAATAAACTTTAA

SEQ ID NO: 2178 - protein, 230 aa, Streptococcus agalactiae
MNKIANTEVEINIFNLLKKLWKKKFLITFVAIAFATAGLFYSLFIVTPQYTSSTRIYVINPNTPNNSITAQDLQAGSFLANDYKEIITSTDVLEKVISSEKLNYPSSQLLQKITVSILKDTRVISISVEDANPKMSQKLANSVREAAVSKIKAVTQVEDITTLEKGNLPKAPSSPNIKKNVLIGFIVGAGLSTIVLVIMGILDDRVNTEEDIEKALGLTSLGIVPDLNKL

SEQ ID NO: 2179 - protein, 732 aa, Streptococcus agalactiae
ATGATTGATATTCATTCTCATATCGTTTTTGATGTAGATGATGGGCCTAAAACGCTTGAAGAGAGTTTATCTTTAATAGAAGAAAGTTATCGACAAGGTGTTAGAATAATTGTTTCGACATCACATAGAAGAAAAGGTATGTTTGAAACACCTGAAGATATTATCTTCAAAAACTTTTCTATAGTTAAACACGAAGCGGAAAAAAGATTTGAACATCTTCAAATCTTATATGGTGGAGAATTGTACTATACAAGTGATATGTTAGAAAAACTGAAGTTAAAGCAAATTCCAACTTTAAACAATACGAAATTTGCTTTAATTGAATTTTCTATGCAAACTTCTTGGAAAGATATTCATACAGCTTTGTCAAATGTTTTAATGCTTGGTATTACACCAGTCGTTGCGCATATAGAGAGGTATAACGCTTTAGAGAATCAAAAAGAACGGGTGAAGGAAATTATTAATATGGGGTGTTACACACAAATAAATAGTTCCCATATTTTGAAACAAAAACTTTTTAATGATAAGCATAAACGCTTTAAGAAAAGAGCCCGTTATTTTTTAGAGGAAAATTTAGTGCATTTTGTAGCGAGTGATATGCATAACCTTGATGTTAGACCGCCATTTTTAGCAGAAGCTTATAAGATTATCTGTAGAGATTTCGGTAAAGAACGTGCTAACCAACTTTTTATTGAAAATGCTCAATCTATATTAAAAAACCATTACATTTAG

SEQ ID NO: 2180 - protein, 243 aa, Streptococcus agalactiae
MIDIHSHIVFDVDDGPKTLEESLSLIEESYRQGVRIIVSTSHRRKGMFETPEDIIFKNFSIVKHEAEKRFEHLQILYGGELYYTSDMLEKLKLKQIPTLNNTKFALIEFSMQTSWKDIHTALSNVLMLGITPVVAHIERYNALENQKERVKEIINMGCYTQINSSHILKQKLFNDKHKRFKKRARYFLEENLVHFVASDMHNLDVRPPFLAEAYKIICRDFGKERANQLFIENAQSILKNHYI

SEQ ID NO: 2181 - protein, 1458 aa, Streptococcus agalactiae
ATGTCTAATCATTCGCGCCGTCAACAAAAGAAACACTCACATACACCTCTACGGGTGATTAATTTATTTCTTTTGGTGATTTTTATTTTGTTAAGTGTAGTCTCATTATTTCTTATGTATCGTCACCATTTTTTGGCATTTAGACACCTGAACGTCATTTATGGAGTTGTAATTGTTTTAATCATTTTAGCAAGTTTATTTCTTTGTATTAAGAATAAAGCTAGAATTTTTACAACTATAATTTTAGTATTAGCTTCTATTTTCGTTGCTACTACTTTATATGGATTTAAGTCAACCATTGATTTGACAAATAATCTAAATAAAACTGCTTCATACTCTGAAATTGAGATGAGTGTAATTGTACCAAAAGATTCTAAAATAACCAATATAGAAGCTGTCAGCAAATTAGCCGCACCAGTTAAAAACGATACTTCAAATATTACTGATTTGATAGAACATATAAAATCAGAAAAAGGAATCTCTATTACACCACAAAAAACAGATTCTTACCAGGATGCATACAATAGAATTAAAAATGGTGATAGTCAGGCTATGGTTTTAAATAATGCTTATGTTAGCTTAATTGAACTTAGCACCCCTGATTTTAAATCGCAGATAAAAACGATTTATACTTACAAAATTAAGAAAAAAATTAATCGTAAAAATACTAATCATAAAGAAGGGGTATTTAATATCTATATTAGCGGTATTGATACTTTTGGCTCTATATCAACAGTATCAAGATCTGATGTAAATATTATTATGACGGTTAATACCAATACCCACAAAGTATTGTTAACGACAACACCACGAGATGCCTATGTAAAAATTCCAGATGGTGGGGGCAATCAATATGATAAATTAACCCATGCAGGTTTGTATGGCGTTGAGACATCAATGAAAACACTTGAAAACCTTTACGACATCAACCTTGATTATTATGCTAGAATTAATTTTTCATCATTTTTAAAATTAATAGACCTCTTGGGAGGAGTGACAGTTTATAACGATCAAGCTTTTACAAGTAAACATGGTAATTTTGACTTCCCTGTTGGTCAAGTAACATTGAATTCTGAGCAGGCTTTGGGCTTTGTTAGAGAACGTTATTCTCTACAAGGAGGCGATAACGATAGAGGTAGAAATCAAGAAAAAGTGATTGCAGCTATTATAAATAAGTTAGCTTCTAGTCAGTCAGTAACAAAATTAAATAGCATTACCTCACAGCTCCAAACGTCCGTTCAAACTAATATGACTATTGATAATATTAATGATTTGATTAACAATCAATTGTCAACTGGACAACGCTTCACTGTCGAGTCACAAGCATTAACTGGTCATGGTTCAACGGGTGAACTCCCTTCATATGCAATGCCAGGAGCTCAACTTTATATGATGTCAATTGATCAATCTAGCTTATCTAATGCAAAATCAAAAATTAAGAACACAATGGAGGAATAA

SEQ ID NO: 2182 - protein, 485 aa, Streptococcus agalactiae
MSNHSRRQQKKHSHTPLRVINLFLLVIFILLSVVSLFLMYRHHFLAFRHLNVIYGVVIVLIILASLFLCIKNKARIFTTIILVLASIFVATTLYGFKSTIDLTNNLNKTASYSEIEMSVIVPKDSKITNIEAVSKLAAPVKNDTSNITDLIEHIKSEKGISITPQKTDSYQDAYNRIKNGDSQAMVLNNAYVSLIELSTPDFKSQIKTIYTYKIKKKINRKNTNHKEGVFNIYISGIDTFGSISTVSRSDVNIIMTVNTNTHKVLLTTTPRDAYVKIPDGGGNQYDKLTHAGLYGVETSMKTLENLYDINLDYYARINFSSFLKLIDLLGGVTVYNDQAFTSKHGNFDFPVGQVTLNSEQALGFVRERYSLQGGDNDRGRNQEKVIAAIINKLASSQSVTKLNSITSQLQTSVQTNMTIDNINDLINNQLSTGQRFTVESQALTGHGSTGELPSYAMPGAQLYMMSIDQSSLSNAKSKIKNTMEE

SEQ ID NO: 2183 - protein, 924 aa, Streptococcus agalactiae
ATGAGAATTCAACAATTACAATATGTTATTAAGATTGTAGAAACTGGTAGCATGAATGAAGCCGCTAAACAACTCTACATTACCCAACCTTCACTTTCAAACGCTGTTAGGAACCTTGAGACTGAGATGGGGATCCAAATTTTTATTCGAAATCCAAAAGGAATAACGTTAACAAAAGATGGTATGGAATTTCTGTCATATGCGCGACAAATTCTAGAACAAACAGCACTTCTTGAAGAGCGTTATAAGGGTGATAATACAAGTCGTGAGCTGTTCAGCGTTTCTTCACAACACTATGCATTTGTGGTTAACGCTTTTGTAGCTCTCTTTAATGGCACAGACATGACCCAATACGAACTTTTTTTACGTGAAACTAGGACTTGGGAAATTATTGATGATGTTAAAAATTTCCGTTCAGAGATTGGTGTTCTGTTTCTTAATAGCTATAATAGAGATGTATTAACCAAATTATTCGACGATAATTCCTTAATTGCCACAACTCTTTTTACTACTACACCTCATATTTTCGTGAGCAAATCCAATCCCTTAGCTAATAGAAAAAAATTAAGTATGAAAGATTTAGAAGATTATCCTTATCTGAGTTATGATCAAGGCCTGCATAATTCTTTCTACTTTTCTGAGGAAATGATGTCTCAAATTCCTCACCCAAAATCCATTGTTGTCAGTGATAGAGCAACTCTGTTTAATTTAATGATTGGATTAGATGGTTATACAGTGGCAACTGGTATCCTCAACTCAAAATTGAACGGTGACGAAATTGTCGCAATCCCTCTTGACGTGGATGATGTTATTGATATTGTCTATATCCGACACGACAAAGCAAACCTTTCAAAAATGGGACAAAAATTTATTGACTATTTATTAGAGGAAGTTTCGTTTAATCATAAAAATAAACAGTCCTGA

SEQ ID NO: 2184 - protein, 307 aa, Streptococcus agalactiae
MRIQQLQYVIKIVETGSMNEAAKQLYITQPSLSNAVRNLETEMGIQIFIRNPKGITLTKDGMEFLSYARQILEQTALLEERYKGDNTSRELFSVSSQHYAFVVNAFVALFNGTDMTQYELFLRETRTWEIIDDVKNFRSEIGVLFLNSYNRDVLTKLFDDNSLIATTLFTTTPHIFVSKSNPLANRKKLSMKDLEDYPYLSYDQGLHNSFYFSEEMMSQIPHPKSIVVSDRATLFNLMIGLDGYTVATGILNSKLNGDEIVAIPLDVDDVIDIVYIRHDKANLSKMGQKFIDYLLEEVSFNHKNKQS

SEQ ID NO: 2185 - protein, 768 aa, Streptococcus agalactiae
ATGACAGATTTTTCAACTGCTCTTAAAGTATTAGTGGATCAGTATTCTTATCATAATGCTTTCTTATTATTACAAAAACATGGTCCTTTAAACTCAGATTTATTATTTTTATTGGAAATGATGAAAGAGCGTCGAGAGTTAAACATTGATTTTCTTTTTGCTCATCAAGAACAAGTTGTTATATTACAAGAAAAATACAATATAAAGCTTTTGCATAACTCGTATGATTTAGAGTTGCTGGCAAATTACATCATGGATTTAGAAGCAAAAGTAAAAAATGGATTAATCATAGATTTTGTCCGTAGTGTTAGTCCTATTTTATATCGTCTATTTATGATTTTACTTGCACAAGAAGTACCTCACTTGCATGATTACATCCATAATGCAAGAGATGATCACTACGATACTTGGAAGTTTAAAGAATTAAAGGAGTCAAACCATCCAGTCCTTTTGGCATTCTCTGAAAGGTGGCACGATAGTCGCTTGACTTCTAAAAGCCTTGCAGAATGTTTACAATTAACCGACCTTGATGAAGAAGTGAAATCGACCATCATTCAATTAAGACAGTTCGAAAAATCAGTCAGAAATCCTTTGGCTCACCTGATTAAACCTTTTGATGAGCAAGAACTATATCGCACAACTCAATTTTCTTCTCAAGCATTTTTAGACCAGATTATCTTCTTGGCAAAGGTAATTGGTGTTGAGTATGATACTGTTAATTTTCACTACGATACGGTTAACAAGCTTATTATAAAGATACTTGAGTAA

SEQ ID NO: 2186 - protein, 255 aa, Streptococcus agalactiae
MTDFSTALKVLVDQYSYHNAFLLLQKHGPLNSDLLFLLEMMKERRELNIDFLFAHQEQVVILQEKYNIKLLHNSYDLELLANYIMDLEAKVKNGLIIDFVRSVSPILYRLFMILLAQEVPHLHDYIHNARDDHYDTWKFKELKESNHPVLLAFSERWHDSRLTSKSLAECLQLTDLDEEVKSTIIQLRQFEKSVRNPLAHLIKPFDEQELYRTTQFSSQAFLDQIIFLAKVIGVEYDTVNFHYDTVNKLIIKILE

SEQ ID NO: 2187 - protein, 711 aa, Streptococcus agalactiae
ATGTCAATCCATATTGAAGCAAAACAAGGTGAAATTGCAGATAAAATTTTACTTCCAGGAGATCCACTCCGTGCGAAATTTATTGCCGAGAATTTTTTAGAAGATGCGGTGTGTTTTAATACAGTTCGCAATATGTTTGGTTATACAGGTACCTATAAAGGACATCGTGTTTCTGTTATGGGAACTGGTATGGGTATGCCTTCAATTTCAATTTATGCTCGCGAACTAATTGTTGATTATGGGGTTAAAACATTGATTCGCGTAGGAACAGCAGGTGCTATTAATCCTGATATCCATGTTCGTGAACTTGTTTTAGCACAAGCAGCAGCAACAAATTCTAATATTATCCGTAATGATTGGCCTGAATTTGATTTTCCGCAAATTGCTGATTTTAAACTTTTGGATAAAGCTTATCACATCGCAAAGGAAATGGATATTACAACTCATGTAGGCAGTGTATTATCTTCAGACGTGTTTTATTCAAACCAACCAGATCGTAATATGGCCTTGGGTAAACTAGGTGTTCATGCTATTGAGATGGAAGCAGCAGCTCTCTACTATCTTGCAGCTCAACACAATGTTAATGCTCTTGCTATGATGACGATTTCAGATAACTTGAATAATCCAGAAGAAGATACAAGTGCAGAAGAGCGTCAAACAACATTTACTGATATGATGAAAGTTGGGCTCGAAACACTTATTTCTGAATGA

SEQ ID NO: 2188 - protein, 236 aa, Streptococcus agalactiae
MSIHIEAKQGEIADKILLPGDPLRAKFIAENFLEDAVCFNTVRNMFGYTGTYKGHRVSVMGTGMGMPSISIYARELIVDYGVKTLIRVGTAGAINPDIHVRELVLAQAAATNSNIIRNDWPEFDFPQIADFKLLDKAYHIAKEMDITTHVGSVLSSDVFYSNQPDRNMALGKLGVHAIEMEAAALYYLAAQHNVNALAMMTISDNLNNPEEDTSAEERQTTFTDMMKVGLETLISE

SEQ ID NO: 2189 - protein, 1173 aa, Streptococcus agalactiae
ATGCACTATGTATTAATGTTTACAGAGTGGTTAGCATTTGGTGATAGTAGAGAAAATACTCTGTCTTTGTTAAATAGTGTCACACCAATTAAAAGAGTGTTATCACTTACTTTAGCCTCCTTTTTAGCATCCCTTAGTTGGTATTACTTACAAATCAAACCAAAGCAAATAACTAGTATTAAACAACAGGTTGTTTTTAAGGATTCTTCTCTAAAAAAATCACCTTACTGGCTACATATAGGTCACGCATTTTTGCAATTGATTTATGTAGGAGCTGGTGGTCCTATTGGAAAAGAAGGAGCGCCACGAGAGTTTGGAGCCATAAATGCTGGGAAAATATCGGATTTATTAGCGCTTAAAGTGCTGGATAAACGTTTATTAATCATTAGTGGTGCAGCTGCAGGTTTGTCAGCAGTTTATCAAGTACCCTTAGCTAGTGTATTCTTTGCTTTTGAAACTTTAGCTTTAGGAATCTCACTGAAAAATATTGTGACATTGTTAGCCTCTACTTTTGGTGCAGCTAGTATTGCTCAATTAGTTATTTCGACAGCCCCTCTTTATCGTATTTCAAAGATGAGTCTGAATTCACAGTCATTAGCTTTTATGTTCTTGATCGTTTTATGTGTAACTCCGATTGCGATTAGCTTTAGATATTTAAATCAAAAAGTGACAGAGAGACGTATTAAAAATATAAAAATATTGTTAAGTTTGCCAGTAGTGTCATTGATAGTATCTGTTTTATCAATAGTCTATCCCCAGATTTTAGGAAATGGTAATGCCCTAGTTCAAGAGGTCTTTAAAGGGACCACAGTTAGCTTAATCACTATTTTAGTTGTTCTCAAGATGATAGCAACATTATCCACTCTTTACGCTGGTGCTTATGGCGGTATACTGACACCATCTTTTTCCATTGGTGCTTGTTTAGGTTTTTTGTTAGCTAGTATTTCTATTCCTTTACTTCCCCACATATCGATAGTAACCAGTATGTTGGTTGGTGCAGCTATTTTTTTAGCTATTACAATGAGAGCGCCACTGACAGCTGTCGGTTTAGTCATATCTTTTACTGGTCAATCCGTTATAACTATTGTTCCCTTAACTATAGCAGTACTTTTTGCTACTGCCTATGATTATTTTATAAGAAAAATGAGGAGTTTATATGTCAATCCATATTGA

SEQ ID NO: 2190 - protein, 390 aa, Streptococcus agalactiae
MHYVLMFTEWLAFGDSRENTLSLLNSVTPIKRVLSLTLASFLASLSWYYLQIKPKQITSIKQQVVFKDSSLKKSPYWLHIGHAFLQLIYVGAGGPIGKEGAPREFGAINAGKISDLLALKVLDKRLLIISGAAAGLSAVYQVPLASVFFAFETLALGISLKNIVTLLASTFGAASIAQLVISTAPLYRISKMSLNSQSLAFMFLIVLCVTPIAISFRYLNQKVTERRIKNIKILLSLPVVSLIVSVLSIVYPQILGNGNALVQEVFKGTTVSLITILVVLKMIATLSTLYAGAYGGILTPSFSIGACLGFLLASISIPLLPHISIVTSMLVGAAIFLAITMRAPLTAVGLVISFTGQSVITIVPLTIAVLFATAYDYFIRKMRSLYVNPY

SEQ ID NO: 2191 - protein, 810 aa, Streptococcus agalactiae
ATGACATTATTAGAAAAAATTAATGAGACTAGAGACTTTTTGCAAGCAAAAGGCGTCACAGCACCAGAATTTGGCCTTATTTTAGGCTCTGGTTTAGGAGAATTGGCTGAAGAAATCGAAAATCCCATTGTTGTGGATTATGCAGACATCCCAAATTGGGGACAGTCAACAGTAGTTGGTCATGCTGGAAAATTAGTGTATGGGGATTTATCAGGCCGTAAGGTATTAGCGCTTCAAGGTCGTTTTCACTTTTATGAAGGAAATACAATGGAAGTCGTTACTTTCCCAGTACGTATCATGAGAGCATTGGCTTGCCACAGTGTGCTTGTGACTAATGCAGCGGGTGGGATTGGATACGGACCAGGAACTTTAATGCTGATCAAAGACCACATCAATATGATTGGGACTAACCCTCTCATAGGTGAGAACCTTGAAGAATTTGGACCACGTTTCCCAGACATGTCGGATGCTTATACAGCAACATATCGACAAAAAGCTCACCAAATTGCTGAAAAACAGAATATCAAACTCGAAGAAGGTGTGTACTTGGGTGTATCAGGACCCACTTATGAAACACCTGCAGAAATTCGTGCATTCCAAACAATGGGCGCACAGGCGGTAGGTATGTCCACGGTTCCAGAGGTGATCGTTGCAGCTCACTCAGGGCTTAAAGTGTTAGGAATTTCAGCAATTACTAACTTTGCCGCTGGCTTCCAATCTGAGCTCAATCATGAGGAGGTCGTTGAAGTTACTCAGCGTATTAAAGAAGATTTCAAGGGATTAGTTAAATCATTAGTTGCTGAACTTTAA

SEQ ID NO: 2192 - protein, 269 aa, Streptococcus agalactiae
MTLLEKINETRDFLQAKGVTAPEFGLILGSGLGELAEEIENPIVVDYADIPNWGQSTVVGHAGKLVYGDLSGRKVLALQGRFHFYEGNTMEVVTFPVRIMRALACHSVLVTNAAGGIGYGPGTLMLIKDHINMIGTNPLIGENLEEFGPRFPDMSDAYTATYRQKAHQIAEKQNIKLEEGVYLGVSGPTYETPAEIRAFQTMGAQAVGMSTVPEVIVAAHSGLKVLGISAITNFAAGFQSELNHEEVVEVTQRIKEDFKGLVKSLVAEL

SEQ ID NO: 2193 - protein, 408 aa, Streptococcus agalactiae
ATGGAAAAAGTTAGGATTTACCATAACCCAAATTGTGGGACATCGAGGAACGTACTTGCCATTATTCGTCATTGTGGTATTGAACCAGAAATTATTTATTATCTGAAAACACCACCTAGCAGGATGGAACTGGTTGAACTGTTGTTAGAAATGAAACTTTCTGCGAGGGAACTTCTAAGAACAGATGTTCCTGCTTATGAGAAATTCAATTTGGAATCTTCTAGCGTTACAGATGAAGAAATGATTGATGCGATGATACAAGATCCTATTCTTATCAATCGTCCCATAGTTGTTACGAGTAAAGGTGCAAAACTCTGCCGACCCTGTGAAGAAATTTTAACCATTTTACCTGTAAAGATGGAAAAAGATTTTGTTAAAGAAGATGGACAGATTATTCAAAGTTTATAG

SEQ ID NO: 2194 - protein, 135 aa, Streptococcus agalactiae
MEKVRIYHNPNCGTSRNVLAIIRHCGIEPEIIYYLKTPPSRMELVELLLEMKLSARELLRTDVPAYEKFNLESSSVTDEEMIDAMIQDPILINRPIVVTSKGAKLCRPCEEILTILPVKMEKDFVKEDGQIIQSL

SEQ ID NO: 2195 - protein, 426 aa, Streptococcus agalactiae
ATGGGACATAACAAATCAAATAGTCATGGTATTGATACTTTGATAAAAACAATGGGGTTATCAGAGTTTGAAAAAGGCTTCTCCTTTACTAATTTGGTTGACTTTGATGCTCTCTATGGTCACCGTCGTGATCCTCATGGTTATCGTGATTGTCTTCATGAGTTTGATGAGCGTCTTCCAGAGATCATTTCAGCAATGCGTGACAAAGACTTACTTTTGATCACTGCCGATCATGGTAATGACCCAACTTATGCAGGCACAGACCATACAAGAGAATACATTCCTCTCTTAGCCTATAGCCCATCCTTCACAGGAAACGGACTTATCCCAGTAGGGCATTTCGCAGATATTTCAGCAACAGTTGCGGATAACTTTGGTGTTGATACTGCGATGATTGGAGAGAGCTTCTTGCAGGACTTGGTATAA

SEQ ID NO: 2196 - protein, 141 aa, Streptococcus agalactiae
MGHNKSNSHGIDTLIKTMGLSEFEKGFSFTNLVDFDALYGHRRDPHGYRDCLHEFDERLPEIISAMRDKDLLLITADHGNDPTYAGTDHTREYIPLLAYSPSFTGNGLIPVGHFADISATVADNFGVDTAMIGESFLQDLV

SEQ ID NO: 2197 - protein, 704 aa, Streptococcus agalactiae
ATGTCACAATTTGATCGCATTCACTTAGTTGTCTTAGATTCAGTGGGTATTGGAGCGGCACCAGATGCCAATGATTTTGTCAATGCAGGAGTTCCTGATGGTGCTTCAGACACGCTTGGCCACATTTCAAAAACAGTTGGACTTGCGGTGCCAAACATGGCTAAAATTGGACTTGGTAATATTCCTCGTCCCCAAGCGCTTAAAACCGTTCCTGCAGAAGAAAATCCAAGTGGCTACGCGACGAAGTTACAAGAAGTATCACTTGGTAAAGATACAATGACAGGGCATTGGGAGATTATGGGCTTAAATATTACAGAGCCATTTGATACTTTCTGGAATGGTTTTCCAGAAGATATTATCACAAAGATTGAGGATTTTTCAGGACGTAAAGTTATTCGTGAAGCGAATAAACCTTATTCAGGAACAGCTGTTATTGATGACTTCGGACCACGCCAAATGGAAACTGGTGAGCTCATCATCTATACCTCAGCTGATCCAGTCCTACAAATTGCAGCTCATGAGGATATCATTCCTCTAGAAGAACTCTACCGTATTTGTGAATATGCTCGTAGTATCACAATGGAGCGTCCAGCTCYCCTTGGTCGTATTATCGCTCGTCCATATGTAGGTGRAMCMRGSMAMCTTTACGCGTACAGCCAACCGTCACGACTATGCAGTGTCACCATTTGAAGATACCGTATTAA

SEQ ID NO: 2198 - protein, 234 aa, Streptococcus agalactiae
  VARIANT 199, 211, 212, 213, 214, 215: Xaa = Any Amino Acid
MSQFDRIHLVVLDSVGIGAAPDANDFVNAGVPDGASDTLGHISKTVGLAVPNMAKIGLGNIPRPQALKTVPAEENPSGYATKLQEVSLGKDTMTGHWEIMGLNITEPFDTFWNGFPEDIITKIEDFSGRKVIREANKPYSGTAVIDDFGPRQMETGELIIYTSADPVLQIAAHEDIIPLEELYRICEYARSITMERPAXPWSYYRSSICRXXXXXLRVQPTVTTMQCHHLKIPY

SEQ ID NO: 2199 - protein, 432 aa, Streptococcus agalactiae
GTGGATGGAGCAGATGAAGTAGACCCTGATTTTAATGGTATCAAGGGTGGCGGTGGTGCGCTGCTCATGGAAAAAATAGTAGCTACTCCAACTAAAGAATATATCTGGGTTGTCGATGAGAGCAAACTTGTTGAAACGTTAGGTGCATTTAAATTGCCTGTTGAGGTTGTTAGATATGGTTCTGAGCGTCTTTTTCGGGTTTTTAAATCAAAAGGTTATTGTCCTTCTTTCCGTGAAACAGAAGGTGACCGCTTTATCACTGATATGGGGAACTACATTATCGACCTAGATTTGAAAAAAATAGAGGATCCAAAGCAGTTAGCGAATGAACTTGACCATACAGTTGGTGTTGTTGAACATGGTTTATTTAATAGTATGGTTAATAAAGTTATAGTAGCAGGCAAAAACGGTCTTGACATACTTGAAAAATAA

SEQ ID NO: 2200 - protein, 143 aa, Streptococcus agalactiae
MDGADEVDPDFNGIKGGGGALLMEKIVATPTKEYIWVVDESKLVETLGAFKLPVEVVRYGSERLFRVFKSKGYCPSFRETEGDRFITDMGNYIIDLDLKKIEDPKQLANELDHTVGVVEHGLFNSMVNKVIVAGKNGLDILEK

SEQ ID NO: 2201 - protein, 718 aa, Streptococcus agalactiae
ATGAGAACACTATTTAGAATGATATTTGCTATTCCAAAGTTTATCTTTAGATTGATTTGGAATATCATTTGGGGAATATTCAAGACAGTTCTTGTTATTGCGATTATTTTATTTGGCTTGTATTACTATGCGAATCACAGTCAATCAGAATTTGCTAATCAACTTAGTGACATTATTCAGACAGGAAAAACATTTTTAAATTTTGCTGACACTAATCAGCTCAAAAATTCCTTTACTAATCTAGCTACGGATAGTGTTCATCATTCAGAAAATACCAGATGGGATAAAAATCAGGCAACTATCTATATAGCAACTAGAGATTCTGAGTTGGTCTCTGCTTACAAGCAAGCAATCTCCAATTGGAATGCAACAGGTGCTTTTGTGTTACAAACAACAGACAATCCTAATGCTGATATTATTGCTAAGGATTACTCAGATGCTAAAACACAAGCTGCGGGTGTAGCTGAAACCGAGAAAAATGCTTTAACTAATCGTATTTCAAAGGTAACAGTTAAATTAAACACATTTTACCTTAAGAATAAACAGTTTGGTTATGACCATACTAGGATTGTTAATACAGCCGAACATGAATTAGGACACGCTTTAGGTCTAGGACATAATGATCAACAACATTCCGTTATGCAGTCAAAAGGTTCGCATTATGGCATTCAARAAGTTGATATTCAAACGCTAAAAACTTATATGCATAAAAAGATGA

SEQ ID NO: 2202 - protein, 240 aa, Streptococcus agalactiae
MRTLFRMIFAIPKFIFRLIWNIIWGIFKTVLVIAIILFGLYYYANHSQSEFANQLSDIIQTGKTFLNFADTNQLKNSFTNLATDSVHHSENTRWDKNQATIYIATRDSELVSAYKQAISNWNATGAFVLQTTDNPNADIIAKDYSDAKTQAAGVAETEKNALTNRISKVTVKLNTFYLKNKQFGYDHTRIVNTAEHELGHALGLGHNDQQHSVMQSKGSHYGISRKVDIQTLKKLICIKR

SEQ ID NO: 2203 - protein, 789 aa, Streptococcus agalactiae
ATGGCATTTTTTAATATTGAATATCACTCTAAGGTACTAGGAACGGAACGTCAAGTCAATGTTATTTACCCAGATGCTTTTGAGATATCTGATGATAAAATTGATGATTGTGACATTCCTGTTTTGTATCTTCTCCATGGAATGGGGGGAAATGAGAATTCTTGGCAAAAACGCACAAATATAGAGCGTCTTTTACGTCATACTAATCTTATCGTCGTGATGCCATCAACAGACTTAGCATGGTATACCAACACAAAGTATGGGTTGGATTATTTTGATGCAATAGCTATCGAGTTACCAAAAGTTTTGAAACGTTTCTTTCCTAATATGTCTGATAAGAGAGAGAAAAATTTCATTGCTGGATTATCTATGGGGGGATATGGAGCATATAAAATAGCTCTACTGACTAATCGTTTTTCTCATGCTGCCTCTTTGTCAGGTGCACTTTCTTTTGACTTTGATTTATTATTCAATAATGGCAACGATAACATTAACTATTGGTCGGGAATTTTTGGTGATTTGAATAACACTGATAACATAGAGCGTCATTCACTAAGGCGTTACGTTGAGTCTTTTGATATGAAAACTAAATTTTATGCATGGTGTGGTTATGAAGATTTTCTTTTTGAAGCTAATGAAGTCGCAATTGATGAACTTCGTCAATTAGGTTTAACTATTGACTATTTCAATGATCATGGTAAACATGAATGGTATTACTGGAATCAGCAATTAGAAAAAGTCTTAGAATGGCTCCCTATTGATTATGTCAAAGAAGAGCGCCTTTCGTAG

SEQ ID NO: 2204 - protein, 262 aa, Streptococcus agalactiae
MAFFNIEYHSKVLGTERQVNVIYPDAFEISDDKIDDCDIPVLYLLHGMGGNENSWQKRTNIERLLRHTNLIVVMPSTDLAWYTNTKYGLDYFDAIAIELPKVLKRFFPNMSDKREKNFIAGLSMGGYGAYKIALLTNRFSHAASLSGALSFDFDLLFNNGNDNINYWSGIFGDLNNTDNIERHSLRRYVESFDMKTKFYAWCGYEDFLFEANEVAIDELRQLGLTIDYFNDHGKHEWYYWNQQLEKVLEWLPIDYVKEERLS

SEQ ID NO: 2205 - protein, 816 aa, Streptococcus agalactiae
ATGACACGTTACGAAGATAACGAATTATTAATCCTTGAAACTGGACGTATGGGAGAGCCGATAAATGGTCTCCAAAAAATGGCAATCGGACGTCATCGTTATGTTCAAATTAAAGATGGTGATTTAGTATTTATCGTAACAACACCAAGTATTGCAAAAGAGGCAGTTGTAGCGCGTGTTGAAAATCTGATTTATAAAGCTGGTGGCTCAGTTAAATTGATAACACAGAATTTGCGCGTATCAGGTCATGCAAATGGTCGCGAATTACAATTATTAATGAATCTATTGAAACCTAAATACCTTTTCCCAATTCAAGGAGAGTATAGGGATTTGTCAGCACATGCGGGCTTAGCTCAAGAGGTAGGAATGTCAGCAGATGATATTTATATTGTGAAGCGTGGTGACATCATGGTTCTTGAAAAAGATGGCTTCTTCCATAGTGGATTTGTTCCTGCTGGAGATGTTATGATTGATGGAAATGCTATTGGTGACGTTGGTAATATTGTACTTCGTGACCGCAAGGTATTATCTGAAGATGGAATTTTTATTGTTGTTATAACTGTCAGCAAAAAAGAAAAGAAAATCATTTCTAAAGCTCGTGTTAATACGCGTGGTTTTGTGTATGTGAAAAAAAGCAGAGATATTTTGCGTGAGAGCGCAGAATTAGTTAATACAACGGTAGAAGATTACTTAAGCAAAGATACATTTGACTGGGGTGAACTTAAAGGGAAAGTGCGTGATGAGGTCAGCAAGTTCTTATTTGACCAAACGAAACGTCGCCCAGCAATCCTTCCTGTGGTTATGGAAGTTCGTTGA

SEQ ID NO: 2206 - protein, 271 aa, Streptococcus agalactiae
MTRYEDNELLILETGRMGEPINGLQKMAIGRHRYVQIKDGDLVFIVTTPSIAKEAVVARVENLIYKAGGSVKLITQNLRVSGHANGRELQLLMNLLKPKYLFPIQGEYRDLSAHAGLAQEVGMSADDIYIVKRGDIMVLEKDGFFHSGFVPAGDVMIDGNAIGDVGNIVLRDRKVLSEDGIFIVVITVSKKEKKIISKARVNTRGFVYVKKSRDILRESAELVNTTVEDYLSKDTFDWGELKGKVRDEVSKFLFDQTKRRPAILPVVMEVR

SEQ ID NO: 2207 - protein, 753 aa, Streptococcus agalactiae
ATGAGCGACATAAAAATCATGGCTCTTGGAGGTGTTCGTGAAAACGGAAAAAACCTATATGTAGTAGAAGTCAATGATTCTATCTTTGTTTTGGATGCTGGACTCAAATATCCTGAAAATGAACAACTGGGTGTTGATGTTGTTATTCCAAATCTTGATTACTTAATTGAAAATAAAAAACGTGTTCAGGGGATTTTCTTAACCCATGGACATGCGGATGCTATTGGTGCATTGCCTTATATTATCGCCGAAGTCAAAGCACCTGTGTTTGGTTCACCTCTCACAATTGAATTAGCTAAGTTATTCGTTAAAAATAGTACAGCAGTCAAGAAATTCAATAATTTCCATGTGATTGATAGTGAAACGGAAATTGAATTTCAAGATGCGGTGATTTCGTTCTTTAAAACGACTCATTCAATTCCAGAGTCAATGGGAATCGTTATTGGGACAAAAGAGGGAAATATCGTTTACACAGGTGACTTTAAATTTGATCAAGCTGCAAGGAAATATTACCAAACAGATCTGGCACGTTTAGCTGAAATTGGTCGTGATGGTGTTTTAGCACTTTTATCAGATTCTGCAAATGCTACAAGCAATGACCAAGTTGCTAGCGAATATGAGGTCGGTGATGAAATTAAGAGCGTTATTGAAGACGCAGAAGGTAGAGTCATCGTAGCAGCAGTTGCAAGTAATCTCATTCGTATTCAACAAGTCTTTGATGCAGCGGCAGAAAANNNNNCATTCATTCATTAA

SEQ ID NO: 2208 - protein, 250 aa, Streptococcus agalactiae
  VARIANT 245, 246, 247: Xaa = Any Amino Acid
MSDIKIMALGGVRENGKNLYVVEVNDSIFVLDAGLKYPENEQLGVDVVIPNLDYLIENKKRVQGIFLTHGHADAIGALPYIIAEVKAPVFGSPLTIELAKLFVKNSTAVKKFNNFHVIDSETEIEFQDAVISFFKTTHSIPESMGIVIGTKEGNIVYTGDFKFDQAARKYYQTDLARLAEIGRDGVLALLSDSANATSNDQVASEYEVGDEIKSVIEDAEGRVIVAAVASNLIRIQQVFDAAAEXXXFIH

SEQ ID NO: 2209 - protein, 246 aa, Streptococcus agalactiae
ATGGTGATGAAAATCATAGAGTTAAAAGAAGCAACCGTACAAGTCAGTAATGGTTTAGCAGAAATGAAAACGATATTAGACCATGTTAATTTGAGTATTTATGAACATGACTTCATTACCATATTGGGTGGAAATGGAGCTGGGAAAATCACGCTTTTTTATGTAATTGCAGGTACCTTGATGTTAAGCGGTGGAAATATTTACATCATGGGACAAGATNNNNNCATTCATTCATTAATTAATTAA

SEQ ID NO: 2210 - protein, 81 aa, Streptococcus agalactiae
  VARIANT 74, 75: Xaa = Any Amino Acid
MVMKIIELKEATVQVSNGLAEMKTILDHVNLSIYEHDFITILGGNGAGKITLFYVIAGTLMLSGGNIYIMGQDXXIHSLIN

SEQ ID NO: 2211 - protein, 864 aa, Streptococcus agalactiae
ATGATTATTTCATCAGTTTCACAAGGTTTATTATGGGGAATATTAGGATTAGGGATATACTTAACCTTTAGAATCTTAAAATTTCCAGACATGACAACAGAGGGCTCCTTCCCTCTAGGGGGAGCGGTTTGTGTTACCTTAATGAATCAGGGGGTTAATCCTATTTTGGCGACGATTCTAGGCATGCTATCAGGGATGTTAGCGGGATTTGTTACTGGTTTACTTTATACTAAAGGAAAGATACCGACGATTTTAGCAGGAATTTTAGTAATGACCTCATGCCACTCCATTATGCTAATGGTTATGAAAAGAGCAAATCTAGGTTTAAATGAGATTCAAACATTGAAAGATTTTCTTCCGTTTTCAAATGATTTAAATCTTCTCGTATTAGGTTTGATAGCTATTCTCTTGGTGATTTCTGCCTTAATTTATTTTCTCTATACACGCTTGGGGCAAGCTTATATTGCAACAGGAGACAACCCTGATATGGCAAAGAGCTTCGGCATTGATACCGACAAAATGGAAATGCTTGGCTTAATTGTATCAAATGGCTTAATTGCTTTATCAGGAGCTTTAGTAAGTCAACAAGATGGATATGCTGATGTATCAAAAGGTATAGGTGTTATTGTTATTGGGTTAGCTAGTATTATTATTGGAGAGGTACTTTACTCTACTGGTTTAACTCTCTTTGAACGTTTAATTGCTATAGTGGTGGGTTCTATTCTTTATCAATTTTTAATAACGGCAGTAATCGCCTTAGGATTTAATACGAATTACCTAAAATTATTTAGTGCAATAGTGCTTGGAATTTGTTTAATGGTTCCTGTCCTAAAAACGAAGATTTTGAAAGGAGTACGCTTATAA

SEQ ID NO: 2212 - protein, 287 aa, Streptococcus agalactiae
MIISSVSQGLLWGILGLGIYLTFRILKFPDMTTEGSFPLGGAVCVTLMNQGVNPILATILGMLSGMLAGFVTGLLYTKGKIPTILAGILVMTSCHSIMLMVMKRANLGLNEIQTLKDFLPFSNDLNLLVLGLIAILLVISALIYFLYTRLGQAYIATGDNPDMAKSFGIDTDKMEMLGLIVSNGLIALSGALVSQQDGYADVSKGIGVIVIGLASIIIGEVLYSTGLTLFERLIAIVVGSILYQFLITAVIALGFNTNYLKLFSAIVLGICLMVPVLKTKILKGVRL

SEQ ID NO: 2213 - protein, 654 aa, Streptococcus agalactiae
ATGGAATGNNNNNCCGAAGCTGATCAAAGTAAAATTCAAGCGATGAGTAAACAATTAGTTAATCATCACAATGATATTTTGATTGGAATTGCGACACCATCAGCACAAGGTTTAGCAGCTTCGACTAAGGATACTCCTATAATCATGGGAGCTGTTTCTGATCCTTTAGGGGCCAAGTTAGTAACGAATATGAAGAAACCAACAACTAATGTTACAGGATTATCAAACGTTGTTCCGACCAAGCAAACTGTGCAATTAATCAAGGATATAACTCCCAATGTTAAACGTATAGGAATTCTTTATGCTAGTAGCGAAGATAATTCTGTGTCACAAGTAACTGAGTTTACAAAATATGCTCAAAAAGCAGGACTAGAAGTTCTTAAATATTCTGTACCATCTACAAATGAAATTAAGACAAGTATGTCAGTCATGACCAAAAAAGTAGACGCTGTCTTTGTTCCACAAGATAATACTATTGCGAGTGCTTTTAGAACAGTTATCGTAGCAGCAAACCAAGCTAATATACCTGTGTATTCCAGTGTTGATACTATGGTTGAACAAGGAAGTATAGCATCAGTAGCGCAGAGTCAATATGGCTTAGGGTTAGAAACTGCAAAACAGGCCATTNNNNNCATTCATTCATTAATTAATTAA

SEQ ID NO: 2214 - protein, 217 aa, Streptococcus agalactiae
  VARIANT 3, 4, 5, 210, 211: Xaa = Any Amino Acid
MEXXXEADQSKIQAMSKQLVNHHNDILIGIATPSAQGLAASTKDTPIIMGAVSDPLGAKLVTNMKKPTTNVTGLSNVVPTKQTVQLIKDITPNVKRIGILYASSEDNSVSQVTEFTKYAQKAGLEVLKYSVPSTNEIKTSMSVMTKKVDAVFVPQDNTIASAFRTVIVAANQANIPVYSSVDTMVEQGSIASVAQSQYGLGLETAKQAIXXIHSLIN

SEQ ID NO: 2215 - protein, 1422 aa, Streptococcus agalactiae
ATGAGAAAGTATTTGCAAGGTGCAGTGATTGAAACCATTCAACAAATTGAAAATGACCGTATATTAGAAATCATCGTGTCTAATAAAAACGAAATCGGTGATCACATTAAAGCAACACTTGTTGTTGAAATCATGGGAAAACACAGTAACATTATCTTGATTGATAAAAATGAACATAAAATTATTGAATCAATTAAGCATGTTGGTTTCTCACAAAACTCCTATCGTACTATCCTTCCTGGTTCGACTTACATTGCCCCACCCAAAACAAAAGCAATCAATCCTTTTGATATTTCTGATCAAACTCTATTTGAGCTGCTTCAAACCAATGATCTAAGCCCTAAAAACCTCCAACAGCTCTTCCAAGGTTTAGGACGCGATACTGCGCTAGAATTATCTCACTGTTTGAAAGACAATAAACTTAACGATTTTCGTCAATTCTTTTCGAGAGAATATTATCCCAGCCTAACAGAAAAATCCTTTTCCGCTGTCCAATTCTCAAGCAGTCACGAAACATTTCAGTCTCTTGGACAATTGTTAGATTATTACTACCAAGAGAAGGCTGAAAAAGATCGCATAGCACAGCAAGCTAGTGACCTCATCCACCGTGTTCAAAGTGAGTTAGAGAAAAATATCAAAAAACTAGCTAAGCAACAAGACGAACTTCTAGCTACTGAAAATGCAGAGGAGTTTCGCCAAAAAGGAGAGCTTCTAACTACCTATCTCTCTATGGTACCAAATAATCAAGATGTCGTTGTGCTTGATAATTATTACACCAACCAAACCATTGAGATTTCACTTGATCGAGCTTTAACACCCAACCAAAATGCCCAACGCTACTTTAAAAAATATCAAAAATTAAAAGAAGCTGTAAAACATTTAAAAGGAATTATTTCAGATACGGAAAATACAATCACCTACCTTGAATCTGTTGAAACATCGCTAAATCATGCTTCTATGGAAGATATCAATGATATTCGTGAAGAACTTGTTGAAACTGGATTTATTAAGCGACGCGCACATGATAAACAACATAAGCGCAAAAAACCTGAACAATATTTAGCATCCGATGGCAAGACTATTATTATGGTGGGACGTAATAATCTCCAAAATGACGAGTTAACATTTAAAATGGCTCGTAAAGGGGAGTTGTGGTTTCATGCCAAGGATATCCCCGGAAGTCATGTGTTAATTCGGGATAACCTCAATCCAAGTGACGAGGTTAAGACAGATGCCGCCGAGTTAGCTGCTTATTACTCTAAAGCTCGTCTCTCCAATCTTGTTCAAGTAGACATGATTGAAGCAAAAAAACTCAATAAACCAAGTGGTACTAAGCCAGGTTTTGTAACTTACACTGGTCAAAAAACCTTACGAGTCACTCCCACACAAGGAAAAATAGATAGCCTTAAACTAAAAAAATAG

SEQ ID NO: 2216 - protein, 473 aa, Streptococcus agalactiae
MRKYLQGAVIETIQQIENDRILEIIVSNKNEIGDHIKATLVVEIMGKHSNIILIDKNEHKIIESIKHVGFSQNSYRTILPGSTYIAPPKTKAINPFDISDQTLFELLQTNDLSPKNLQQLFQGLGRDTALELSHCLKDNKLNDFRQFFSREYYPSLTEKSFSAVQFSSSHETFQSLGQLLDYYYQEKAEKDRIAQQASDLIHRVQSELEKNIKKLAKQQDELLATENAEEFRQKGELLTTYLSMVPNNQDVVVLDNYYTNQTIEISLDRALTPNQNAQRYFKKYQKLKEAVKHLKGIISDTENTITYLESVETSLNHASMEDINDIREELVETGFIKRRAHDKQHKRKKPEQYLASDGKTIIMVGRNNLQNDELTFKMARKGELWFHAKDIPGSHVLIRDNLNPSDEVKTDAAELAAYYSKARLSNLVQVDMIEAKKLNKPSGTKPGFVTYTGQKTLRVTPTQGKIDSLKLKK

SEQ ID NO: 2217 - protein, 720 aa, Streptococcus agalactiae
ATGTCAGAAACAGTTAAATTATTTCAATACAGCACCTTGAGTTCACTGATGGCAGGATTGTACAAAGGCAGTCTAACTATCGGAGAATTATTAACTCACGGTGACTTAGGAATCGGTACTGTTCATATGATTGATGGTGAATTGATTGTATTGGATGGGAAAGCTTATCAAGCTATTGGTACAGATGGTAAAGCAGAGATTATCCAATTATCAGATGATGTGACAGTACCCTATGCAGCGGTTTTACCACACTATATCCAAAAACAATTTGATATCAATGCTGAGACAGATAATAAGGATTTGGAAGAGATGATTCTAAAAAACTTTGAAGGTCAAAATCTCTTTAAGTCTTTAAAAATCAAAGGAACGTTTTCAAGAATGCACGTTCGTATGATTCCAAAATCTCTACAACATAAACGTTTTGCAGATATTGCATCTAATCAGCCAGAATTTACCAGAGAGAATGTATCTGGTACGTTGGTTGGGATTTGGACGCCGGAATTATTTCATGGTGTGGGGGTAAAAGGGTTCCATGTCCACTTTATTTCAGACGATTTAACTTTCGGTGGGCATGTTATGGATTACTCGCTCACACAAGGAAAAGTTGAAATTGGGAAGGTTGACCAACTTGACCAATGTTTCCCAACTCAAGATCAAGAATTTTTGGAAGCTAACTTTGACCTACAAAAGCTTAGAGAAGATATTGATTTAAGTGAATAA

SEQ ID NO: 2218 - protein, 239 aa, Streptococcus agalactiae
MSETVKLFQYSTLSSLMAGLYKGSLTIGELLTHGDLGIGTVHMIDGELIVLDGKAYQAIGTDGKAEIIQLSDDVTVPYAAVLPHYIQKQFDINAETDNKDLEEMILKNFEGQNLFKSLKIKGTFSRMHVRMIPKSLQHKRFADIASNQPEFTRENVSGTLVGIWTPELFHGVGVKGFHVHFISDDLTFGGHVMDYSLTQGKVEIGKVDQLDQCFPTQDQEFLEANFDLQKLREDIDLSE

SEQ ID NO: 2219 - protein, 1683 aa, Streptococcus agalactiae
ATGACAGAATCACATAATCAATATGGGGCTGACTTAATTGTCGATAGCCTCATTAATCATGATGTCAAATATGTTTTTGGTATCCCAGGAGCTAAGATTGACCGCGTATTTGACACTCTAGAAGATAAAGGTCCAGAGTTAATTGTTGCTCGTCATGAGCAGAACGCGACTTTTATGGCTCAGGCTGTCGGGCGTATTACGGGAGAACCAGGAGTTGTTATTGCAACTAGTGGACCTGGGATCTCGAACTTGGCAACAGGGTTAGTTACTGCGACAGATGAAGGTGATGCTGTTCTTGCAATTGGTGGACAGGTTAAGCGAGGAGATTTATTGAAACGTGCTCATCAATCAATGAATAACGTTGCTATGCTAGAACCTATTACAAAATATTCTGCTGAGGTTCATGACCCTAATACTTTGTCAGAAACTGTTGCAAACGCCTATCGTCTTGCTAAATCTGGTAAACCAGGAGCAAGTTTTATCTCTATTCCTCAAGACGTTACAGACAGTCCAGTCTCAGTAAAAGCAATCAAACCTCTTAGTGCACCTAAATTGGGTTCGGCATCTGTTTTAGATATTAATTATTTAGCGCAAGCTATTAACAATGCTGTTTTACCGGTACTGTTATTAGGAAATGGCGCATCTTCAGAGGGAGTAACTGCTGCCGTACGTCGACTTCTTGATGCTGTTAAACTACCAGTAGTAGAAACTTTCCAAGGTGCGGGTATTGTGTCACGTGAGCTCGAGGATGAAACATTCTTTGGTCGTGTAGGCCTCTTCCGTAATCAACCTGGAGATATGCTTTTGAAGCGTGCAGACCTAGTTATTGCTATCGGGTATGACCCTATTGAATATGAAGCGCGTAACTGGAATGCTGAAATTTCTGCTCGTATTATTGTTATTGACGTTGAACAAGCAGAAATTGATACGTATTTCCAACCCGAGCGAGAACTGATTGGAGACATGGCACATACACTTTATTTACTTTTACCAGCTATTAAAGGATATGAATTGCCTGAAGGTTCAAAAGAGTATTTGAAAGGGCTTCGTAATAACATTGAAAATGTTAGCGATGTTAAATTTGATCGTGACTCAGCTCATGGACTTGTTCATCCTCTTGATCTCATTGATGTACTCCAAGAAAATACCACCGATGATATGACTGTTACAGTTGATGTGGGGAGTCATTATATTTGGATGGCTCGCTACTTTAAATCATATGAAGCGCGTCACTTGCTCTTCTCAAACGGAATGCAAACATTAGGAGTTGCTCTACCTTGGGCAATTTCTGCGGCTCTTTTGCGTCCCAACACAAAAGTTATTTCAGTTTCTGGTGATGGTGGCTTCTTATTCTCAGCTCAAGAGTTAGAAACTGCAGTTCGTCTTCATCTACCAATTGTTCACATTATTTGGAACGATGGAAAATATAACATGGTTGAATTCCAGGAAGAAATGAAGTATGGGCGTTCTTCAGGTGTTGACTTTGGACCAGTTGATTTTGTAAAATACGCTGAAAGTTTCGGTGCTAAAGGTTACCGTGTAGACAGCAAAGACAGTTTTGAAGAAACACTCAAACAAGCTCTAATCGATGCTGAAAATGGACCAGTGTTGATTGATGTGCCTATCGACTATAAAGATAACGTGACACTAGGTGAAACAATCTTACCTGACGAGTTCTACTAA

SEQ ID NO: 2220 - protein, 560 aa, Streptococcus agalactiae
MTESHNQYGADLIVDSLINHDVKYVFGIPGAKIDRVFDTLEDKGPELIVARHEQNATFMAQAVGRITGEPGVVIATSGPGISNLATGLVTATDEGDAVLAIGGQVKRGDLLKRAHQSMNNVAMLEPITKYSAEVHDPNTLSETVANAYRLAKSGKPGASFISIPQDVTDSPVSVKAIKPLSAPKLGSASVLDINYLAQAINNAVLPVLLLGNGASSEGVTAAVRRLLDAVKLPVVETFQGAGIVSRELEDETFFGRVGLFRNQPGDMLLKRADLVIAIGYDPIEYEARNWNAEISARIIVIDVEQAEIDTYFQPERELIGDMAHTLYLLLPAIKGYELPEGSKEYLKGLRNNIENVSDVKFDRDSAHGLVHPLDLIDVLQENTTDDMTVTVDVGSHYIWMARYFKSYEARHLLFSNGMQTLGVALPWAISAALLRPNTKVISVSGDGGFLFSAQELETAVRLHLPIVHIIWNDGKYNMVEFQEEMKYGRSSGVDFGPVDFVKYAESFGAKGYRVDSKDSFEETLKQALIDAENGPVLIDVPIDYKDNVTLGETILPDEFY

SEQ ID NO: 2221 - protein, 1227 aa, Streptococcus agalactiae
ATGTTGAATAGTGAAAAAATGATTGTTTCTATCCAAAATCAGGATTTAGAACATGCTAACAAGTATTTCGAAAAAGCGTTGAAAAATGATCCTGAGGAAGTCTTATTGGAACTAGGAGCTTATTTGGAGAGTATTGGTTTTTTACCCCAAGCAAAACGTCTCTATGATCAAATCCGACCAAATTATCCAGAAGTTGCTATCAATTTAGCTCAAATTGTTGCCGAAGATGGAGATATTGAACAAGCATTCTTATACTTAGATTATATCTCAGAAGACAGTCAAGAGTATGTTTCAGCCCTCCTTGTTATGGCTGACTTATATGATATGGAAGGCTTGACTGATGTTGCGCGTGAAAAGCTTTTGCTAGCCAGCAAACTTAGCGATGACCCATTGGTTACATTTGGTTTAGCTGAAATGAACCTTAGTTTGGAACATTATCAAGAAGCGATAGAAGGATATGCTTCACTTGACAATCGAGAAATCTTAGAAACGACTGGGGTTTCAACTTATCAGCGTATTGGTAAATCCTACGCTATTATGGGGAAATTTGATGCAGCTATCGAATTTTTAGAAAAAGCCGTTGACATTGAGTATGATGATTTAACAGTTTTTGAGTTAGCAACAATCCTTTATGATCAAGAAGAATATCAAAAAGCTAACCTTTATTTTAAACAGTTGGATACTATTAATCCAGACTTTGATGGCTATGAATATATCTATGGTTTATCTCTTCGTGAGGAGCATAAATCTGAAGAAGCTTTACGTCTAGTTCAGCAAGGTCTTCGTAAAAATAGTTTTGATGGTCAACTTCTCTTACTAGCCTCACAATTATCGTATGAATTACATGATGTTTCTTCGTCGGAGTCTTATTTGAAACAAGCTGAAAAAGTTTCTGAAAACCAAGATGAAATTGTTATGAGATTGTCAAATTTGTATCTTGAAGAAGAGCGGTTTGAGGAAGTCTTGGAATTAGACAATGATGATTTAGAAAATATCCTTGCAAAATGGAATATCGCTAAAGCACACAAGGCTTTAGAAATGGATGATAGTGTAGACTATTATCAATCTTTGTATAATGATTTAAAAGATAATCCAGAATTTTTACAAGATTATGCTTACATTTTGAGAGAATTTGGTTACCTTGATAAGGCACAAGAAGTAGGAAAGGCTTATTTAAAATTAGTTCCAGATGATATAGAGATGTCAGAATGGGTGAATAACATTTAA

SEQ ID NO: 2222 - protein, 408 aa, Streptococcus agalactiae
MLNSEKMIVSIQNQDLEHANKYFEKALKNDPEEVLLELGAYLESIGFLPQAKRLYDQIRPNYPEVAINLAQIVAEDGDIEQAFLYLDYISEDSQEYVSALLVMADLYDMEGLTDVAREKLLLASKLSDDPLVTFGLAEMNLSLEHYQEAIEGYASLDNREILETTGVSTYQRIGKSYAIMGKFDAAIEFLEKAVDIEYDDLTVFELATILYDQEEYQKANLYFKQLDTINPDFDGYEYIYGLSLREEHKSEEALRLVQQGLRKNSFDGQLLLLASQLSYELHDVSSSESYLKQAEKVSENQDEIVMRLSNLYLEEERFEEVLELDNDDLENILAKWNIAKAHKALEMDDSVDYYQSLYNDLKDNPEFLQDYAYILREFGYLDKAQEVGKAYLKLVPDDIEMSEWVNNI

SEQ ID NO: 2223 - protein, 1191 aa, Streptococcus agalactiae
ATGAATCGACCATCAGAAAAAGAATTTAAAAATAGTTTGTTTTTTAAATGGATCTTAAATAATCAAGCAGTTATTGCTCTCATGATTACCTTTTTGGTATTTTTAACGATTTTTATTTTTACCAAAATCTCTTTTATGTTTAAACCTGTGTTTGATTTTCTTGCTGTGCTGATATTGCCGCTTGTAATTTCTGGATTGCTTTATTACCTATTAAAACCTATGGTTACATTTTTAGAGAAGCGGGGAATTAAGCGTGTAACAGCGATATTATCAGTTTTTACTATTATAATCCTTCTGTTAATTTGGGCAATGTCTAGTTTTATTCCCATGATGAGTAATCAATTACGCCATTTTATGGAAGATCTCCCTTCATATGTGAATAAAGTGCAAATGGAAACAAGTTCGTTTATAGATCACAACCCTTGGTTAAAATCTTATAAAGGGGAAATATCGAGCATGTTATCTAATATCAGTAGCCAAGCGGTCTCTTATGCTGAAAAATTTTCAAAGAATGTTTTAGAGTGGGCAGGAAATTTAGCTAGTACAGTTGCACGTGTGACAGTAGCAACAATCATGGCTCCCTTTATTTTGTTTTATCTTTTAAGAGATAGTCGCAACATGAAGAATGGTTTCTTAATGGTTTTACCAACCAAACTACGCCAACCAACTGATCGTATTTTGCGAGAAATGAATAGTCAAATGTCAGGATATGTGCAAGGACAAATCATTGTTGCTATTACTGTTGGTATTATTTTTTCAATAATGTATAGTATTATAGGCCTTAGATATGGCGTGACATTAGGGATTATTGCCGGTGTGTTAAATATGGTTCCCTATTTGGGAAGTTTTGTCGCCCAAATTCCAGTGTTTATCTTAGCGCTTGTCGCAGGACCTGTTATGGTTGTTAAAGTTGCGATTGTTTTTGTTATTGAGCAAACTCTAGAGGGACGCTTTGTCTCACCCTTGGTTTTAGGTAATAAACTTAGCATTCATCCAATTACAATTATGTTTATTTTATTAACCTCTGGAGCGATGTTTGGTGTTTGGGGAGTATTCCTCAGTATTCCGATTTATGCATCTATCAAAGTTGTTGTTAAAGAATTGTTTGATTGGTACAAAGCTGTCAGTGGGCTATATACAGTAGATGTTGTTACTGAAGAAAGAAGTGAAGAAGTTAAAAATGTTGAATAG

SEQ ID NO: 2224 - protein, 396 aa, Streptococcus agalactiae
MNRPSEKEFKNSLFFKWILNNQAVIALMITFLVFLTIFIFTKISFMFKPVFDFLAVLILPLVISGLLYYLLKPMVTFLEKRGIKRVTAILSVFTIIILLLIWAMSSFIPMMSNQLRHFMEDLPSYVNKVQMETSSFIDHNPWLKSYKGEISSMLSNISSQAVSYAEKFSKNVLEWAGNLASTVARVTVATIMAPFILFYLLRDSRNMKNGFLMVLPTKLRQPTDRILREMNSQMSGYVQGQIIVAITVGIIFSIMYSIIGLRYGVTLGIIAGVLNMVPYLGSFVAQIPVFILALVAGPVMVVKVAIVFVIEQTLEGRFVSPLVLGNKLSIHPITIMFILLTSGAMFGVWGVFLSIPIYASIKVVVKELFDWYKAVSGLYTVDVVTEERSEEVKNVE

SEQ ID NO: 2225 - protein, 483 aa, Streptococcus agalactiae
TTGAAAAGACGGTTAATTTTTATGAAAAATAGAGATTTTAGGGTTAGAGACCAGCTCGAAACATTCGGAGTCAGAGTTTCTGCTTTAATCATAGAAAATCAAAAACTGCTATTAATATATGCTCCTCATCTCGATAAATACTATTTGCCAGGTGGGGCGCTTCAAGTTGGAGAAGATAGCAATAAGGCTGTTGCGAGAGAAGTACTTGAGGAAATAGGTCTTCACAGCCAAGTTGGTGATTTAGCCTATATTGTTGAGAATCAGTTTAATATTAAGAGACATCATTATCACTCAGTTGAATTTTTATATTTTGTTAATCTCTTGGGTCAGGCGCCAGAATCTATCAAAGAAGGAACGCATAAGCGACATTTTGTATGGCTTCCAATAAAAGAATTAACAAAAATTGATTGTAATCCTAATTTTTTAGCACAGGATTTGATAGAATGGCCAGGTCATGTTGTGCATAAAATCGTTCAAAATTAA

SEQ ID NO: 2226 - protein, 160 aa, Streptococcus agalactiae
MKRRLIFMKNRDFRVRDQLETFGVRVSALIIENQKLLLIYAPHLDKYYLPGGALQVGEDSNKAVAREVLEEIGLHSQVGDLAYIVENQFNIKRHHYHSVEFLYFVNLLGQAPESIKEGTHKRHFVWLPIKELTKIDCNPNFLAQDLIEWPGHVVHKIVQN

SEQ ID NO: 2227 - protein, 483 aa, Streptococcus agalactiae
ATGACTAAATTAGCAACAATTTGTTACATTGACAATGGCAAGGAATTACTTCTATTGCACCGCAACAAAAAAGAGAATGATGTTCATGAGGGAAAGTGGATCTCGGTAGGCGGTAAACTGGAGGCAGGTGAAACTCCGGATGAATGTGCTAAGCGTGAAATTCTAGAAGAAACCCATTTAACAGTAAAAAAAATGGATTTTAAAGGAGTCATCACTTTTCCTGAATTTACGCCAGGTCATGATTGGTATACCTATGTCTTTAAAGTAACAGATTATGAAGGAGAGTTAATTTCAGATGATGAATCACGAGAAGGAACCTTAGAATGGGTACCATATGATCAAGTTCTCTCTAAGCCAACGTGGCAAGGAGATTACGAAATTTTTAAATGGATTTTAGAAGATGTTCCTTTCTTTTCTGCTAAGTTTGTTTATGATGAACACCAAAATTTAATTGAAAAGACGGTTAATTTTTATGAAAAATAG

SEQ ID NO: 2228 - protein, 160 aa, Streptococcus agalactiae
MTKLATICYIDNGKELLLLHRNKKENDVHEGKWISVGGKLEAGETPDECAKREILEETHLTVKKMDFKGVITFPEFTPGHDWYTYVFKVTDYEGELISDDESREGTLEWVPYDQVLSKPTWQGDYEIFKWILEDVPFFSAKFVYDEHQNLIEKTVNFYEK

SEQ ID NO: 2229 - protein, 3219 aa, Streptococcus agalactiae
ATGGAAATCAAAAAGAAACATCGTATTATGCTTTATTCAGCCCTTATTTTAGGAACAATATTGGTTAACAATAGTTACCAAGCTAAAGCTGAAGAGCTTACCAAAACTACCTCAACGTCCCAAATAAGAGATACTCAAACTAATAATATTGAAGTTCTCCAGACTGAAAGTACCACTGTCAAAGAGACTAGCACCACAACCACACAACAAGATCTGTCTAACCCCACAGCTTCAACCGCAACTGCAACAGCCACTCATAGCACAATGAAACAAGTAGTAGATAATCAAACTCAAAATAAGGAGCTGGTGAAAAACGGAGATTTTAATCAAACTAACCCTGTATCTGGAAGCTGGTCACATACAAGCGCTAGGGAATGGTCTGCTTGGATTGATAAAGAAAATACTGCTGATAAATCACCTATTATCCAACGTACCGAACAAGGCCAAGTAAGCCTATCCAGCGACAAAGGCTTTAGAGGTGCTGTAACACAAAAAGTGAACATTGATCCCACTAAAAAATATGAGGTCAAGTTTGATATTGAAACAAGTAACAAGGCTGGACAAGCTTTCCTTCGTATTATGGAGAAAAAAGACAACAATACGCGACTTTGGCTTTCTGAGATGACCAGCGGTACTACTAACAAACATACCTTAACAAAGATATATAACCCAAAGTTAAATGTCTCCGAGGTGACACTTGAACTTTATTATGAAAAAGGAACTGGTTCTGCTACTTTTGATAATATATCAATGAAAGCAAAAGGCCCTAAAGACTCAGAGCATCCACAACCCGTCACAACACAAATTGAAGAAAGCGTTAATACGGCTTTAAACAAAAATTACGTTTTTAATAAAGCTGACTACCAATACACTCTAACCAATCCGTCTCTCGGGAAAATTGTTGGTGGAATATTGTATCCAAACGCTACTGGTTCAACAACTGTTAAAATATCTGATAAATCTGGTAAAATAATTAAAGAAGTACCGTTATCAGTTACAGCTTCAACAGAAGATAAGTTTACAAAACTCCTCGACAAATGGAACGACGTGACTATTGGTAATCATGTTTACGATACTAATGATTCGAACATGCAAAAGATTAATCAGAAATTAGATGAAACTAACGCCAAAAACATCAAAACTATCAAACTGGATTCTAATCACACTTTCCTTTGGAAAGATTTAGATAATCTCAATAATTCAGCACAGTTAACCGCTACTTATCGTCGTTTGGAAGATTTAGCTAAACAAATCACCAATCCCCACTCTACTATTTACAAAAATGAAAAAGCTATTCGTACTGTAAAAGAGAGTCTGGCTTGGCTTCATCAAAACTTCTACAATGTTAATAAAGATATAGAAGGCTCTGCCAATTGGTGGGATTTTGAAATCGGTGTCCCTCGCTCAATTACAGCTACCCTAGCTCTCATGAATAACTACTTCACTGACGCTGAAATAAAAACTTATACCGACCCAATTGAACACTTTGTTCCTGATGCAGGATATTTCCGTAAAACGCTTGACAATCCATTTAAAGCCCTTGGTGGTAATCTAGTCGATATGGGGCGCGTTAAAATCATTGAAGGTTTACTTCGTAAAGACAATACTATTATCGAAAAAACTTCTCATTCTCTAAAAAATCTTTTTACTACTGCTACTAAAGCTGAAGGTTTCTATGCTGACGGTTCTTACATCGACCATACAAATGTTGCTTATACTGGCGCCTATGGTAATGTTCTGATAGATGGTTTGACACAATTGCTGCCTATCATTCAAGAAACTGACTATAAAATCTCTAATCAAGAACTTGATATGGTTTATAAATGGATTAATCAATCATTTTTACCTTTAATTGTAAAAGGTGAGTTAATGGATATGAGTCGTGGACGCTCAATTAGTAGAGAGGCAGCTTCTTCGCATGCGGCTGCAGTTGAAGTTCTCAGAGGTTTCCTCAGATTGGCTAACATGTCTAATGAAGAGCGAAACTTAGACCTCATATCAACTATTAAAACGATTATCACTTCAAATAAATTCTACAATGTCTTCAATAACCTCAAATCGTATTCCGATATTGCCAACATGAATAAGATGCTTAATGACAGTACAGTCGCTACTAAACCTTTAAAAAGTAATTTATCAACCTTTAATAGCATGGACCGCTTAGCTTATTATAATGCCGAGAAAGACTTTGGTTTCGCGCTTTCATTACATTCTAAACGTACCCTCAACTATGAAGGAATGAATGATGAAAATACACGTGGTTGGTATACCGGAGATGGTATGTTCTATCTTTATAATAGTGATCAATCTCATTATAGTAATCATTTTTGGCCAACCGTCAATCCTTATAAAATGGCTGGAACAACTGAAAAAGATGCTAAGCGTGAAGATACCACTAAGGAATTCATGAGCAAACATAGCAAAGACGCTAAAGAAAAAACCGGTCAAGTTACAGGAACATCTGACTTTGTTGGTTCCGTCAAACTTAATGATCACTTTGCTCTTGCCGCTATGGATTTTACTAACTGGGATCGCACCTTAACAGCACAAAAAGGTTGGGTTATCTTAAATGATAAGATTGTCTTTTTAGGTAGCAACATCAAGAATACTAACGGCATTGGAAATGTTTCTACAACAATTGATCAACGAAAAGACGATTCTAAAACACCTTATACTACATACGTCAATGGAAAAACTATTGATTTAAAACAAGCAAGTTCTCAACAATTTACAGATACAAAAAGTGTCTTTTTAGAATCAAAAGAACCTGGTCGCAATATTGGTTATATCTTCTTTAAAAATAGCACTATTGATATTGAACGCAAAGAGCAAACAGGTACTTGGAACAGCATTAATCGTACTTCTAAAAATACCTCAATCGTTAGCAATCCTTTTATCACTATAAGCCAAAAGCATGACAACAAAGGTGATAGCTATGGTTACATGATGGTTCCAAACATTGATCGCACAAGTTTTGATAAATTAGCCAACAGCAAAGAAGTAGAATTACTAGAAAATAGTTCAAAACAACAAGTTATCTATGATAAAAACAGTCAAACTTGGGCTGTTATCAAACACGATAATCAAGAGAGTCTCATTAACAATCAATTCAAAATGAATAAAGCGGGACTTTACCTAGTACAAAAAGTTGGTAATGACTATCAAAATGTCTATTACCAACCTCAAACCATGACAAAAACAGACCAATTAGCTATCTAA

SEQ ID NO: 2230 - protein, 1072 aa, Streptococcus agalactiae
MEIKKKHRIMLYSALILGTILVNNSYQAKAEELTKTTSTSQIRDTQTNNIEVLQTESTTVKETSTTTTQQDLSNPTASTATATATHSTMKQVVDNQTQNKELVKNGDFNQTNPVSGSWSHTSAREWSAWIDKENTADKSPIIQRTEQGQVSLSSDKGFRGAVTQKVNIDPTKKYEVKFDIETSNKAGQAFLRIMEKKDNNTRLWLSEMTSGTTNKHTLTKIYNPKLNVSEVTLELYYEKGTGSATFDNISMKAKGPKDSEHPQPVTTQIEESVNTALNKNYVFNKADYQYTLTNPSLGKIVGGILYPNATGSTTVKISDKSGKIIKEVPLSVTASTEDKFTKLLDKWNDVTIGNHVYDTNDSNMQKINQKLDETNAKNIKTIKLDSNHTFLWKDLDNLNNSAQLTATYRRLEDLAKQITNPHSTIYKNEKAIRTVKESLAWLHQNFYNVNKDIEGSANWWDFEIGVPRSITATLALMNNYFTDAEIKTYTDPIEHFVPDAGYFRKTLDNPFKALGGNLVDMGRVKIIEGLLRKDNTIIEKTSHSLKNLFTTATKAEGFYADGSYIDHTNVAYTGAYGNVLIDGLTQLLPIIQETDYKISNQELDMVYKWINQSFLPLIVKGELMDMSRGRSISREAASSHAAAVEVLRGFLRLANMSNEERNLDLISTIKTIITSNKFYNVFNNLKSYSDIANMNKMLNDSTVATKPLKSNLSTFNSMDRLAYYNAEKDFGFALSLHSKRTLNYEGMNDENTRGWYTGDGMFYLYNSDQSHYSNHFWPTVNPYKMAGTTEKDAKREDTTKEFMSKHSKDAKEKTGQVTGTSDFVGSVKLNDHFALAAMDFTNWDRTLTAQKGWVILNDKIVFLGSNIKNTNGIGNVSTTIDQRKDDSKTPYTTYVNGKTIDLKQASSQQFTDTKSVFLESKEPGRNIGYIFFKNSTIDIERKEQTGTWNSINRTSKNTSIVSNPFITISQKHDNKGDSYGYMMVPNIDRTSFDKLANSKEVELLENSSKQQVIYDKNSQTWAVIKHDNQESLINNQFKMNKAGLYLVQKVGNDYQNVYYQPQTMTKTDQLAI

SEQ ID NO: 2231 - protein, 1047 aa, Streptococcus agalactiae
ATGACTGAATTTAAAAACATTATCGTAACTGGTGGAGCTGGTTTCATCGGATCAAACTTTGTACACTATGTTTACAATAACCACCCATATGTTCATGTAACTGTCCTTGATAAATTGACATATGCAGGTAACCGTGCTAACATTGAAGCCATTCTTGGTGATCGTGTTGAGTTAGTTGTTGGTGACATCGCTGACGCTGAATTGGTAGACAAATTGGCTGCCAAAGCGGATGCTATTGTTCACTATGCGGCTGAGAGTCACAACGATAACTCATTGGAAGATCCAAGTCCATTTATCCATACAAACTTTATCGGAACTTACACTTTGCTTGAAGCAGCTCGTAAATACGATATCCGTTTCCACCACGTGTCAACTGATGAAGTTTATGGAGATCTTCCACTTCGTGAAGACCTTCCAGGAAATGGTGAAGGACCAGGTGAAAAATTCACTGCTGAAACAAAATACAATCCATCATCACCTTACTCATCAACTAAGGCAGCTTCTGACCTTATCGTTAAGGCATGGGTACGTTCCTTCGGCGTAAAAGCGACCATTTCGAACTGTTCAAATAACTATGGACCATACCAACACATCGAAAAATTCATTCCACGTCAAATTACAAATATCTTGGCAGGAATCAAACCAAAACTTTATGGTGAAGGTAAAAACGTCCGTGACTGGATCCACACAAATGACCATTCAACAGGTGTCTGGGCTATTTTGACTAAGGGTCGTATTGGTGAAACATACCTTATTGGTGCCGACGGTGAGAAAAACAACAAGGAGGTTCTTGAACTTATCCTTGAGAAAATGGGTCAACCAAAAGACGCTTACGATCACGTAACTGACCGTGCTGGTCATGATCTTCGTTACGCTATCGATTCTACAAAATTGCGTGAAGAACTCGGCTGGGAACCACAATTTACAAACTTTTCAGAAGGTTTGGAAGAAACTATTAAATGGTATACAGAAAATGAGACATGGTGGAAAGCAGAAAAAGATGCTGTAGAAGCCAAGTATGCTAAAACTCAAGAAGTCATTAAGTAA

SEQ ID NO: 2232 - protein, 348 aa, Streptococcus agalactiae
MTEFKNIIVTGGAGFIGSNFVHYVYNNHPYVHVTVLDKLTYAGNRANIEAILGDRVELVVGDIADAELVDKLAAKADAIVHYAAESHNDNSLEDPSPFIHTNFIGTYTLLEAARKYDIRFHHVSTDEVYGDLPLREDLPGNGEGPGEKFTAETKYNPSSPYSSTKAASDLIVKAWVRSFGVKATISNCSNNYGPYQHIEKFIPRQITNILAGIKPKLYGEGKNVRDWIHTNDHSTGVWAILTKGRIGETYLIGADGEKNNKEVLELILEKMGQPKDAYDHVTDRAGHDLRYAIDSTKLREELGWEPQFTNFSEGLEETIKWYTENETWWKAEKDAVEAKYAKTQEVIK

SEQ ID NO: 2233 - protein, 594 aa, Streptococcus agalactiae
ATGACTGAACAATTTTTTGATAAAGAATTAACTTGTCGCCCAATTGAAGCCATTCCTGGATTGTTGGAATTCGATATTACCGTTCGTGGAGACAACCGTGGATGGTTCAAAGAGAACTTTCAAAAAGAAAAAATGATACCGCTTGGTTTCCCAGAAAGCTTCTTTGAGGCAGACAAACTACAAAATAATATTTCGTTTAACAAAAAAAATACATTGCGAGGTCTCCATGCAGAGCCTTGGGATAAATATGTTTCGATCGCTGATGAAGGACGTGTGATCGGTACTTGGGTTGACCTCCGTGAAGGTGACAGTTTTGGTAACGTTTACCAAACGATTATCGATGCCTCAAAAGGTATCTTTGTTCCACGCGGCGTTGCTAATGGTTTCCAAGTTCTTTCAGATAAAGCAGCTTATACTTATCTCGTTAACGATTATTGGGCACTTGAACTCAAACCAAAATATGCTTTCGTTAACTATGCAGATCCAAATCTAGGCATTCAGTGGGAAAACCTTGAAGAAGCAGAAGTCTCAGAAGCAGATAAGAATCACCCACTTCTCAAAGATGTAAAACCTTTGAATAAGGAAGATTTGTAA

SEQ ID NO: 2234 - protein, 197 aa, Streptococcus agalactiae
MTEQFFDKELTCRPIEAIPGLLEFDITVRGDNRGWFKENFQKEKMIPLGFPESFFEADKLQNNISFNKKNTLRGLHAEPWDKYVSIADEGRVIGTWVDLREGDSFGNVYQTIIDASKGIFVPRGVANGFQVLSDKAAYTYLVNDYWALELKPKYAFVNYADPNLGIQWENLEEAEVSEADKNHPLLKDVKPLNKEDL

SEQ ID NO: 2235 - protein, 870 aa, Streptococcus agalactiae
ATGAAAGGTATTATTTTAGCGGGAGGTTCAGGTACTCGCTTGTACCCATTAACTCGTGCTGCATCAAAACAATTGATGCCAATTTATGATAAACCAATGATTTATTATCCATTGTCAGTTTTGATGTTGGCAGGAATAAAAGAAATACTGATTATTTCTACTCCACAAGATTTGCCTCGCTTTGAAGATATGCTTGGAGATGGTTCAGAACTAGGAATCTCTCTTTCTTATGCTGAACAACCAAGCCCAGATGGGTTAGCACAGGCCTTCATTATCGGTGAAGAATTTATTGGCGATGATCACGTTGCCTTAGTATTAGGTGATAATATTTACCATGGACCAGGTTTATCTGCAATGCTACAACGTGCAGCTAGTAAAGAAAGTGGAGCAACCGTCTTTGGCTATCAAGTAAAAGATCCAGAACGTTTTGGTGTTGTCGAGTTTGATACTGATATGAATGCCATTTCTATTGAAGAAAAACCAGCGCAACCTAAGTCTAATTATGCTGTCACAGGTCTTTATTTCTATGATAACGATGTGGTTGAAATAGCTAAAAATATTAAGCCAAGTCCTCGTGGAGAACTTGAAATTACTGATGTTAACAAAGCCTACCTTGATAGAGGTGATTTATCAGTTGAGTTAATGGGACGTGGATTTGCGTGGTTAGACACTGGAACTCACGAAAGTCTTCTTGAAGCAGCACAATATATTGAAACAGTACAACGCATGCAAAACGTTCAAGTTGCTAACCTTGAGGAAATTGCTTACCGCATGGGCTACATCACTCGTGAACAAGTCCTTGAGTTGGCACAACCACTTAAGAAAAATGAGTATGGTCAATACCTACTTCGTTTGATTGGAGAAGCCTAA

SEQ ID NO: 2236 - protein, 289 aa, Streptococcus agalactiae
MKGIILAGGSGTRLYPLTRAASKQLMPIYDKPMIYYPLSVLMLAGIKEILIISTPQDLPRFEDMLGDGSELGISLSYAEQPSPDGLAQAFIIGEEFIGDDHVALVLGDNIYHGPGLSAMLQRAASKESGATVFGYQVKDPERFGVVEFDTDMNAISIEEKPAQPKSNYAVTGLYFYDNDVVEIAKNIKPSPRGELEITDVNKAYLDRGDLSVELMGRGFAWLDTGTHESLLEAAQYIETVQRMQNVQVANLEEIAYRMGYITREQVLELAQPLKKNEYGQYLLRLIGEA

SEQ ID NO: 2237 - protein, 1104 aa, Streptococcus agalactiae
ATGAAAAAGATAGCAATTATTGGTGCAGGAGCAGTCGGAGCGACACTAGCCTATTACTTATCAAAAGAAAAGGATATTCAGGTTACTGTTTTTGATTATGGAGTTGGACAAGCAACTAAGGCTGCTGCGGGGATTATTAGCCCATGGTTTTCAAAACGTCGTAATAAAGCCTGGTATCGCATGGCGAGGTTGGGGGCTGATTTTTATTCAAAGCTAGTCACGGATTTACAAAAAGATGGTTTTGAAACAAAATTTTATCAGCAAACTGGTGTTTTCTTATTAAAAAAGGACGAGAGTCAGTTAGAGTCATTGTTTGCACTAGCAGATAAACGTCGACTAGAATCTCCTCTAATAGGTGATTTACAAATACTAAATAAAAGTGAAGCAAATACTCACTTTCCTGAGTTAGATGGCTATGAACAGTTACTTTATGCGAGTGGAGGAGCGCGAGTAGAAGGGGCGGACTTAACACGAATATTGTTAGAAGCAAGTGGTGTTAATGTCATCAAGGATGAAGTTCACTTTACGATAACTGATAATGGCTTTCGTGTTCAAGGAATTGATTTTGATAAACTTGTTTTAGCGAGTGGAGCCTGGCTAGCTAAGATATTAGATGAGCACAACTATCAGGTAGATATTCGCCCTCAAAAAGGGCAATTGCGAGACTATTATTTTAGCAATATTAATACAGGAAAATATCCTGTTGTAATGCCAGAAGGCGAGCTAGATATTATCCCATTTGATAATGGTAAAGTCTCTGTAGGTGCAAGTCACGAAAATGATATGGCTTTTGATTTAAACATTGATTTTAAAGTCTTAGACAAGTTTGAAGAGCAAGCTATTGGCTATTTTCCGCAATTAAAAAAAGCAGATACGACTTCTGAACGTGTTGGAATTCGTGCCTATACAAGTGATTTTTCTCCATTTTTTGGCCCTGTACCTTGTATGGAGGGTGCATATGCTGCAAGTGGATTAGGATCAACTGGCTTAACAGTGGGCCCATTAATTGGTTATGAATTATGTCAATTAATCTTAAATAAAGAAAATCAGCTAAATTTAGAGGATTACGATATTACGAAATACGTGAAAAAGATTAGTAGATGA

SEQ ID NO: 2238 - protein, 367 aa, Streptococcus agalactiae
MKKIAIIGAGAVGATLAYYLSKEKDIQVTVFDYGVGQATKAAAGIISPWFSKRRNKAWYRMARLGADFYSKLVTDLQKDGFETKFYQQTGVFLLKKDESQLESLFALADKRRLESPLIGDLQILNKSEANTHFPELDGYEQLLYASGGARVEGADLTRILLEASGVNVIKDEVHFTITDNGFRVQGIDFDKLVLASGAWLAKILDEHNYQVDIRPQKGQLRDYYFSNINTGKYPVVMPEGELDIIPFDNGKVSVGASHENDMAFDLNIDFKVLDKFEEQAIGYFPQLKKADTTSERVGIRAYTSDFSPFFGPVPCMEGAYAASGLGSTGLTVGPLIGYELCQLILNKENQLNLEDYDITKYVKKISR

SEQ ID NO: 2239 - protein, 789 aa, Streptococcus agalactiae
ATGAAAGCTAGAGAACTTATTGATGTATATGAAACTTATTGTCCACAGGAATTATCTATGGAAGGAGATATTTCAGGTCTTCAAATTGGATCTTTAGATAAAGAAATAAAGACAGTCATGGTAGCTTTAGATGTTCGAGAGACTACAGTAGCTGAAGCAATTGAACGTCAAGTAGATCTTCTTATTGTAAAGCATGCTCCTATTTTTCGTCCATTAAAGGATTTGGTAGCAACACCGCAAAATAAGATTTATATAGACCTTCTTAAATCAGACATTGCTGTTTATGTGAGCCATACTAATATAGATATCGTTCCTAATGGACTTAACGACTGGTTTTGTGAATTATTAGATATTCAATATCCCGATATATTATCTGAGACAAGTAATGGTTATGGTATTGGTCGCATTGGTGATGTTAGACCCCAGAGTTTTGAATTTTTTGCATGGAAAATTAAAGATGTGTTTGGTTTAGATAGCGTTCGTTTAGTTTCATATGATAAATCTAATCCTGAAATTCAACGAGTTGCTATTTGTGGGGGTAGTGGGCAAAGTTTCTACAAAGAAGCTATTGCAAAAGGAGCAGATGTTTTTGTAACGGGAGATATTTATTATCATACTGCACAAGAAATGATCACAAATGGTTTGCTTGCGATTGACCCAGGCCATCATATTGAGGTTTTATTTGTTTCTAAAATAGCTACTATGATTGAGCAGTGGAAACTTGAAAAAGGCTGGGATATTTCAGTTTTAGAGAGTAAAGCTCCAACAAATCCCTTTTACCATATGTAG

SEQ ID NO: 2240 - protein, 262 aa, Streptococcus agalactiae
MKARELIDVYETYCPQELSMEGDISGLQIGSLDKEIKTVMVALDVRETTVAEAIERQVDLLIVKHAPIFRPLKDLVATPQNKIYIDLLKSDIAVYVSHTNIDIVPNGLNDWFCELLDIQYPDILSETSNGYGIGRIGDVRPQSFEFFAWKIKDVFGLDSVRLVSYDKSNPEIQRVAICGGSGQSFYKEAIAKGADVFVTGDIYYHTAQEMITNGLLAIDPGHHIEVLFVSKIATMIEQWKLEKGWDISVLESKAPTNPFYHM

SEQ ID NO: 2241 - protein, 684 aa, Streptococcus agalactiae
ATGGATTTACAATTATCAAAACGATTACAAAAAGTTGCAAACTATGTTCCAAAAGGAGCTCGGTTATTAGATGTAGGAAGTGATCATGCTTACTTACCTATTTTTTTGTTGCAGATGGGATACTGTGATTTTGCCATTGCTGGTGAAGTGGTGAATGGACCGTATCAGTCTGCGTTGAAAAACGTTTCAGAACATGGTCTCACTTCAAAGATAGATGTTCGCTTAGCAAATGGTTTGTCAGCTTTTGAAGAAGCAGATAATATTGATACGATAGCTATCTGTGGAATGGGTGGTCGTTTGATTGCTGATATTTTGAATAACGATATAGACAAACTTCAGCACGTTAAAACACTAGTCTTACAACCTAATAATCGGGAAGATGATTTAAGAAAATGGTTAGCTGCAAATGATTTTGAAATAGTAGCAGAAGATATCTTGACTGAAAATGACAAATGCTATGAAATTTTAGTTGTTAAGCATGGTCATATGAATTTAACTGCTAAAGAATTGCGATTTGGTCCATTTTTATTATCCAATAACACAACAGTTTTTAAAGAAAAATGGCAAAATGAGCTTAATAAATTAACTTTTGCTTTAAACTCTATTCCCAATAGTAAAATGGAAGAACGTGCTATTTTGGAAGATAAAATACAGGATATAAAGGAGGTTCTTGATGAAAGCTAG

SEQ ID NO: 2242 - protein, 227 aa, Streptococcus agalactiae
MDLQLSKRLQKVANYVPKGARLLDVGSDHAYLPIFLLQMGYCDFAIAGEVVNGPYQSALKNVSEHGLTSKIDVRLANGLSAFEEADNIDTIAICGMGGRLIADILNNDIDKLQHVKTLVLQPNNREDDLRKWLAANDFEIVAEDILTENDKCYEILVVKHGHMNLTAKELRFGPFLLSNNTTVFKEKWQNELNKLTFALNSIPNSKMEERAILEDKIQDIKEVLDES

SEQ ID NO: 2243 - protein, 681 aa, Streptococcus agalactiae
ATGACTTATTTGGAACAATATCAGTCAGGGCAATTGACTCTACCAAGTGCTTTATTTTTTCACTTTAAATCTATTTTTAAGACAGCAGACGATTTTTTAGTTTGGCAATTTTTCTATTTACAAAATACAACTAATTTATCCGATCTAACACCGAGCCGTATTGCGACATCACTTGATAAAACAGTGGCAGATATCAATCGTTCTATATCGAATTTAACAAGTCAAGGTTTACTAGATGTCAAAACAATTGAGTTGAATCACGAAATCGAGATTATCTTTGATACAAGCCCTGTGTTTGCTAAATTAGATAAACTTTTCGAAGAGGATAATCAAGTAATAATAGACAATAAAACCGCTGATTCGAATCGTCTGAAAGATTTAGTAGGAGACTTCGAACGTGAATTAGGTCGCTTATTAAGTCCTTTTGAATTAGAAGATTTACAAAAGACACTGCAAGAAGATCAGACAGATCCTGATATTGTTAGGGCAGCTCTTAGAGAAGCGGTTTTCAATGGGAAAACAAGTTGGAATTATATCAATGCTATCCTTCGCAACTGGCGGCGTGAAGGATTGACGACACTTCGACAAATTGAAGAGAGAAAACAAGCACGTGAAGATAACCAAATGAAAGATTTAGCGATTTCGGATGATTTTAAAAATGCAATGAATTTATGGGAATAA

SEQ ID NO: 2244 - protein, 226 aa, Streptococcus agalactiae
MTYLEQYQSGQLTLPSALFFHFKSIFKTADDFLVWQFFYLQNTTNLSDLTPSRIATSLDKTVADINRSISNLTSQGLLDVKTIELNHEIEIIFDTSPVFAKLDKLFEEDNQVIIDNKTADSNRLKDLVGDFERELGRLLSPFELEDLQKTLQEDQTDPDIVRAALREAVFNGKTSWNYINAILRNWRREGLTTLRQIEERKQAREDNQMKDLAISDDFKNAMNLWE

SEQ ID NO: 2245 - protein, 519 aa, Streptococcus agalactiae
ATGGATTTAAATAATTACATCGCTTCAATTGAAAACTATCCTCAAGAAGGAATTACTTTCCGTGATATCTCCCCATTAATGGCTGATGGTAAAGCATACAGCTATGCTGTTCGTGAAATTGTACAATATGCTGCTGATAAAGATATTGATATGATTGTTGGACCAGAAGCTCGTGGCTTTATTGTTGGTTGCCCAGTTGCTTATGCTCTTGGTATTGGTTTTGCTCCAGTCCGTAAACCAGGTAAATTACCACGCGAAGTTATTTCAGCTGACTATGAAAAAGAATATGGTCTTGATACATTGACAATGCACGCAGATGCTATTAAACCAGGTCAACGTGTTTTAATTGTTGATGACCTTTTAGCTACTGGTGGAACAGTAAAAGCGACAATTGAAATGATTGAAAAACTTGGTGGCGTTGTCGCAGGCTGTGCTTTCCTAGTTGAACTTGATGGATTAAATGGTCGTAAAGCTATTGAAGGTTATGATACTAAGGTATTGATGAACTTTCCAGGATAA

SEQ ID NO: 2246 - protein, 172 aa, Streptococcus agalactiae
MDLNNYIASIENYPQEGITFRDISPLMADGKAYSYAVREIVQYAADKDIDMIVGPEARGFIVGCPVAYALGIGFAPVRKPGKLPREVISADYEKEYGLDTLTMHADAIKPGQRVLIVDDLLATGGTVKATIEMIEKLGGVVAGCAFLVELDGLNGRKAIEGYDTKVLMNFPG

SEQ ID NO: 2247 - protein, 201 aa, Streptococcus agalactiae
ATGNNNNNTGTTTTTGTTCTTCATGGAAGTCATGAAATCGTTCTCAAAGGATATAATAACGGACTGACACATGTCTCTGACCCTTACACACCGTCCTTGTCTGGTTGGTATCCAATTTCACAACTTTGGAAAGAACAGAGCTATTATAGTGAGGATAGAATTGATATTGGAGAACCTTTTGTCAAGGTAACAGATGCCTAA

SEQ ID NO: 2248 - protein, 66 aa, Streptococcus agalactiae
  VARIANT 2, 3: Xaa = Any Amino Acid
MXXVFVLHGSHEIVLKGYNNGLTHVSDPYTPSLSGWYPISQLWKEQSYYSEDRIDIGEPFVKVTDA

SEQ ID NO: 2249 - protein, 1931 aa, Streptococcus agalactiae
GTGACTTACTCTGCTCATGTTCAAGATATTGGATGGCAAAAGTCGGTTGATAATGCAACAGTTTCAGGAACAGTAGGACAGGAAAAGCAGGTTGAGGCAATAAAATTGTCTATTAAAGCCCCTGAAGGAATAACAGGAAAACTTAGCTATAAAACTTATGTTAAAGGACAAGGTTGGCAACCTTCAGTAGAGAGTGGTCAAGTTAGTGGTACTGTTGGTCAGAGTAGACCTATTGAAGCACTAAGCATTAACCTTACTGATAATTTACAAAAATTATATGATGTCTATTATCGTGTTCATGTTCAAGATATCGGGTGGATGGCTTGGGCTAAAAATGGAGCTTACGCTGGGACTTTGGGAATGTCAAAGCGCCTTGAAGCTTACGAAGTAAAGTTTACCCTTAAAGGACAATCTGTTTTAACACCAACTATACTTAAGGAAGAGAGACCTGTCTTAAATTATCAGGTTAAGGTAGGCCAAAATGGTTGGCAATCTAATAAACTTGAAGGACAAATGGCGGGAACTTTAGGAGAATCCAAAGCCCTAGATGGAGTAAAATTCACTCTTAGCACCTTGAAGTATGGGGACATTCTCTATCGTACTCATGTACAAGATAAAGGTTGGGGAGAAATTTTAGGTAGTCAAACAAGTAAGGATTATCAAGGAAAAAGACTAGAAGCTATTCAATTGGACTTAAGTGGGAATTTAAAACAAAATTATGATATTTATTATCGCGCTCACGTCCAAGATAAAGGTTGGATGGCTTGGCAAAAAAATAATAGTGTAGCAGGTACAGTCGGAGAATCGAAACGTTTAGAGGCTTTGGAAGTAAAACTAGTAGCTAAAGCTTCAGATTTTAGTTCCCAAACAAATCATTCATTCTTAGAAATGAAGCATCCTGGATTAAGTTATCAAACTTATCTTCAAAAAGATGGTTGGAAACCAACGGTTTTGGAAGGCCAATTAGGAGGTAGTATTGGACTTTCAAAATCTATAAAAGCCATCAAACTTAACTTAGGTAGTACAGCTCTAGGAAATATAGAATATAGAACTTTTCTTAATGGTTCAGGTTGGCAAACTGTTGTTAATTCAGGGAGAGAAAGTAATGTACCAAATGAATCTCAACAAGTAGAAGCTATTCAGATGCGATTGACAGGTCTGCTATCGAAAACCTATAGTGTGATGTATCGAGTTCACATGCAAGATTATGGTTGGCAGGATTGGACTTATAACAATGACATCGCTGGTAGTACTAACCAAGGAAAACGAATTGAAGCAATCGAAATTAAATTAGTTGAGACTGCTAAAATACCTATAACTGTCCAAACGACCTATAAGGGAACTGGAAACTATAATGTACGAGTGACAAATGTTATTAGTCCTGGGAATTTAAAAATTGCTATTTGGTCAGATAAAAACAATCAGGATGACCTTAAGTGGTATACCGTCACACCCAAAAATCATGAAGCTAGATTGACATTTAATGTTACAAATCATAGAGACAATGGTAAATACTTTATCCATGTTTATCAGGAAAATGCTTCTAATCAAAAACAATTATTGGTAAAAACTTCTCTACAAGTCGCACATTCAAATTATAATACTCCTTACTTTAGCCAACGTGATGGAAGGTGGGCAAGTCGAAGATATGGTATGGCAACTTTAGGAGAAACTGGTTGTGTACCAACTTCTCTAGCTATGATTTTGTCTTCTTTGAAAGGAGAAACTGTTTTACCAACGCAAATTGCAGATTACCTTTACCATAAGACAGTTGAATTTAATCGTGGTGTTCAAGGAACAACTTCTAGAGGAATCTTAAAAGCAGCCAAAGAATGGGGTGTAACAGCAACTGCATTAGGAACTCAAGCTAACCTTGTACAAGCGTGAAGGATGGTTATCATGTCNNNNNCATTCATTCATTAATTAATTAA

SEQ ID NO: 2250 - protein, 643 aa, Streptococcus agalactiae
  VARIANT 636, 637: Xaa = Any Amino Acid
MTYSAHVQDIGWQKSVDNATVSGTVGQEKQVEAIKLSIKAPEGITGKLSYKTYVKGQGWQPSVESGQVSGTVGQSRPIEALSINLTDNLQKLYDVYYRVHVQDIGWMAWAKNGAYAGTLGMSKRLEAYEVKFTLKGQSVLTPTILKEERPVLNYQVKVGQNGWQSNKLEGQMAGTLGESKALDGVKFTLSTLKYGDILYRTHVQDKGWGEILGSQTSKDYQGKRLEAIQLDLSGNLKQNYDIYYRAHVQDKGWMAWQKNNSVAGTVGESKRLEALEVKLVAKASDFSSQTNHSFLEMKHPGLSYQTYLQKDGWKPTVLEGQLGGSIGLSKSIKAIKLNLGSTALGNIEYRTFLNGSGWQTVVNSGRESNVPNESQQVEAIQMRLTGLLSKTYSVMYRVHMQDYGWQDWTYNNDIAGSTNQGKRIEAIEIKLVETAKIPITVQTTYKGTGNYNVRVTNVISPGNLKIAIWSDKNNQDDLKWYTVTPKNHEARLTFNVTNHRDNGKYFIHVYQENASNQKQLLVKTSLQVAHSNYNTPYFSQRDGRWASRRYGMATLGETGCVPTSLAMILSSLKGETVLPTQIADYLYHKTVEFNRGVQGTTSRGILKAAKEWGVTATALGTQANLVQALKDGYHVXXIHSLIN

SEQ ID NO: 2251 - protein, 183 aa, Streptococcus agalactiae
TTGACTGGGGTAGCTGCTATCTCTCTAGGATTAGATGAAACAGATGTAGCAAAGCCTGTTTTTATTAAAGGCTCTGCACTATTTTTCATAGCCTCCGAGGAATTAACAGGTAACGTTAACTTGGAAGTATCCGAAAATAGTCTGACTGCTATCAGTTTCNNNNNCATTCCATTCATTAATTAA

SEQ ID NO: 2252 - protein, 60 aa, Streptococcus agalactiae
  VARIANT 54, 55: Xaa = Any Amino Acid
MTGVAAISLGLDETDVAKPVFIKGSALFFIASEELTGNVNLEVSENSLTAISFXXIPFIN

SEQ ID NO: 2253 - protein, 1368 aa, Streptococcus agalactiae
ATGNNNNNAATTGCTCCACAATTAAACGCTTTAGGAAGACTTGATGACCCTAATCCAGCTATTGAATTACTAACAGGGTTTGATGATGAAGAATCTCAAGCAATAGCCCAAATGATTGATCAAAAAAATGAAGAGCGCAAAGAAATCGTTCAAACTATCTTTGACCAAGCTATGCAAATGCTTGATCAAACAAAGCCTGTACAAGTTTTAGCAAAAGAAAATTGGCATCCAGGGGTTTTAGGTATTGTGGCGGGTCGTATTTTAGAGAGAACTGGACAACCTGTTATTGTTTTGAATATTGAAGATGGTATTGCTAAAGGAAGTGCCAGAAGTGTAGAAGCACTTGATATTTTTCAAGCTTTTGACCAGCATCGAGAATTATTCATTGCTTTTGGAGGTCACAGCGGAGCAGCAGGCATGACTTTAGAGGAAAGTAAAGTAGGTGATCTTTCTCAAGTTTTATGTGACTATATCTCTAAAAAACAATTGGACATGAGTCAGAAAAAAACTCTGACAATTGATAGTGAGCTACGTTTTGACGAACTTAGTTTAGACACTGTTAGAGATTTTGAAAAGTTAGCGCCATTTGGAATGGATAATAAAAAACCAGTCTTTTTGTTAAAAGATTTTAAAGTGAGTCAAGCCAGAGTCATGGGGCAAAACGGTGCTCATCTGAAATTAAAACTAGAACAAGATGGACAAGCACTTGATTTGGTAGCATTTAATATGGGGAGTCAACTACAAGAGTTTCAACAAGCACAACATTTGGAGTTAGCTGTCACTTTATCTGTTAATCAATGGAATGGTGCCACAACCCTACAATTAATGTTGGAGGATGCGCGTGTAGATGGTATACAATTATTTGATATTAGAAGCAAAGCAAGTAGCTTACCTCATGGAGTGCCAATCCTGTCTCAAGAAGAGCAGAGCAAAGAAGTTATTCTTTTGACTGTTCCCGATCATCCACAAGAATTAAAACAAATGACTCAAGGTAAACAGTTTGATGCTATCTATTTTAAAAATGAGATACCAAAAAATTATTTTATATCTGGTTATGGTACACGTGATCAATTTGCTAGTTTATATAAAACAATATATCAATTCCCAGAATTTGACGTTCGTTATAAGTTAAAAGAGCTCAGTTCCTACCTTCATATTCCTGATATTTTATTAATTAAAATGATTCAAATTTTTGAAGAACTACATTTTGTTACGATTACAGAGGGGATTATGACAGTCAATAAAGAAGCAGAAAAGCGAGATATCTCTGAGAGTCAAATTTATCAAGAATTAAAAGAGACAGTTAAGTTTCAAGAATTAATGGCTTTAGGGACACCTAAAGAAATATATGATTTTATGATGAGTTGA

SEQ ID NO: 2254 - protein, 455 aa, Streptococcus agalactiae
  VARIANT 2, 3: Xaa = Any Amino Acid
MXXIAPQLNALGRLDDPNPAIELLTGFDDEESQAIAQMIDQKNEERKEIVQTIFDQAMQMLDQTKPVQVLAKENWHPGVLGIVAGRILERTGQPVIVLNIEDGIAKGSARSVEALDIFQAFDQHRELFIAFGGHSGAAGMTLEESKVGDLSQVLCDYISKKQLDMSQKKTLTIDSELRFDELSLDTVRDFEKLAPFGMDNKKPVFLLKDFKVSQARVMGQNGAHLKLKLEQDGQALDLVAFNMGSQLQEFQQAQHLELAVTLSVNQWNGATTLQLMLEDARVDGIQLFDIRSKASSLPHGVPILSQEEQSKEVILLTVPDHPQELKQMTQGKQFDAIYFKNEIPKNYFISGYGTRDQFASLYKTIYQFPEFDVRYKLKELSSYLHIPDILLIKMIQIFEELHFVTITEGIMTVNKEAEKRDISESQIYQELKETVKFQELMALGTPKEIYDFMMS

SEQ ID NO: 2255 - protein, 783 aa, Streptococcus agalactiae
ATGATATCTGCTAAGTATAGTTGGGTCCTCAATAACCAAAAGCCAGACGCTGGCTTTTTTGAGGCTTCAAAAAAAGAAAAGATAAGTGAAGCGGTGGCTTCCTTAATTTATTCGCGAGGTATTAAGACATCAGCGGAATTACATCATTTTTTACAAACTAATTTGGAAAATCTCCATGATCCTTATTTGTTAAATGATATGGATAAAGCTGTTAATCGTATTAGACGAGCTATTGAAAATAATGAAACTATTTTAGTTTATGGAGACTATGATGCTGATGGAATGACATCAGCATCAATCATGAAAGAAGCATTAGATATGATGGGAGCTGAAGTCCAGGTTTATCTCCCAAATCGCTTTACAGATGGTTACGGTCCAAATCAAAGTGTTTATAAATATTTTATTGAACAACAAGATGTTTCATTAATCATTACGGTTGATAATGGTGTGGCAGGGCATGAAGCAATTACATATGCTCAAAATCAAGGTGTGGACGTGGTAGTTACTGATCATCACAGTATGCCAGCAGATTTACCTTGTGCTTATGCTATTATTCACCCAGAACATCCTGATGCTAATTATCCATTTCCTTATTTAGCAGGGTGTGGTGTTGCTTTCAAAGTAGCTTGTGCTCTCTTAGAAACAATCCCGACAGAAATGTTGGATTTGGTTGCTATTGGGACGATTGCAGATATGGTTAGCCTAACTGATGAAAATCGTATCATGGTAAAAGCTGGACTTGAAGTTATGAAAGATNNNNNCATTCATTCATTAATTAATTAA

SEQ ID NO: 2256 - protein, 260 aa, Streptococcus agalactiae
  VARIANT 253, 254: Xaa = Any Amino Acid
MISAKYSWVLNNQKPDAGFFEASKKEKISEAVASLIYSRGIKTSAELHHFLQTNLENLHDPYLLNDMDKAVNRIRRAIENNETILVYGDYDADGMTSASIMKEALDMMGAEVQVYLPNRFTDGYGPNQSVYKYFIEQQDVSLIITVDNGVAGHEAITYAQNQGVDVVVTDHHSMPADLPCAYAIIHPEHPDANYPFPYLAGCGVAFKVACALLETIPTEMLDLVAIGTIADMVSLTDENRIMVKAGLEVMKDXXIHSLIN

SEQ ID NO: 2257 - protein, 405 aa, Streptococcus agalactiae
ATGTCTCTTGTAAAATCTGGTCATATCGTTAATATTGCAAGCATGGCTGGCCTCATAGCAACAAGTAAAGCTAGCGTTTATGGGGCTAGTAAGTTTGCTGTCGTTGGATTTTCGAATGCTCTTCGTTTAGAATTAGCAGAAAAAAATGTTTATGTGACAAGTGTAAACCCTGGACCAATCAAAACAGGATTTTTTGCTCAGGCTGATCCAAGTGGTGATTATTTAGCAAGTATAGGTCGTTTTGCTCTAACACCAGAAAAAGTATCTAAAAAAGTAGTTTCTATTCTTGGAAAAAATAAGAGAGAATTAAATCTTCCTTTTATATTAGCTTTTGCGCATAAATATTATAGTTTATTTCCAAAAACAGCTGATTATTTTGCCAGAAAGGTATTCAATTATAAATGA

SEQ ID NO: 2258 - protein, 134 aa, Streptococcus agalactiae
MSLVKSGHIVNIASMAGLIATSKASVYGASKFAVVGFSNALRLELAEKNVYVTSVNPGPIKTGFFAQADPSGDYLASIGRFALTPEKVSKKVVSILGKNKRELNLPFILAFAHKYYSLFPKTADYFARKVFNYK

SEQ ID NO: 2259 - protein, 356 aa, Streptococcus agalactiae
ATGGCAAGAACGATACTGATTACAGGAGCTTCTGGTGGTTTAGCACAGGCAATTATTAACCAATTACCCCAAGACGACCATTTAATTGTCACAGGGAGATCAAGAGAAAAACTTGAAAAGCTTTATGGAAAGAGACCAAACACCTTATGTTTATCACTAGACATAACTAATGACAATGCTGTAACGAATATGATTGAAAAAATTTATGGTGAATTTGGTCAAATTGATATTTTAATTAATAATGCTGGATTTGGTTCTTTTAAAGAATTTTGGGATTATAGTGATGAAGAAGTCAAAGACATGTTTGCTGTGAATACATTTGCAACGATGTCTATAGCTCGTCAGATAGGACATAA

SEQ ID NO: 2260 - protein, 118 aa, Streptococcus agalactiae
MARTILITGASGGLAQAIINQLPQDDHLIVTGRSREKLEKLYGKRPNTLCLSLDITNDNAVTNMIEKIYGEFGQIDILINNAGFGSFKEFWDYSDEEVKDMFCCEYICNDVYSSSDRT

SEQ ID NO: 2261 - protein, 930 aa, Streptococcus agalactiae
ATGGAAATTCAATTTTTAGGAACTGGAGCTGGTCAACCAGCGAAAGCTCGTAATGTTTCAAGTTTAGTCTTGAAATTATTAGATGAAATTAACGAGGTTTGGATGTTTGATTGTGGAGAGGGTACACAGCGTCAAATTTTAGAAACCACGATTAAACCTCGTAAAGTCAAAAAAATTTTTATCACGCACATGCACGGAGACCATGTTTTTGGTCTTCCAGGTTTTTTATCCAGTCGGGCTTTTCAAGCCAATGAAGAACAGACAGATTTAGATATTTATGGACCGGTTGGTATAAAAAGTTTTGTTATGACTGGCTTAAGGACATCAGGTTCACGTTTACCTTATCGAATCCATTTTCACGAGTTTGATGAATCATCACTCGGAAAAATTATGGAAACAGATAAATTTACCGTTTATGCAGAAAAGCTAGATCATACTATCTTTTGTATGGGATATCGTGTTGTGCAAAAAGACCTTGAGGGCACTTTAGATGCTGAAGCATTGAAACTAGCAGGTGTTCCATTTGGTCCCCTTTTTGGGAAAGTCAAAAATGGTGAGAATGTTACCTTAGAAGATGGTAGAGAAATTATTGCTAAAGATTATATTTCTGAACCGAAAAAGGGTAAAGTAATCACTATTTTGGGAGATACTAGAAAAACAGATGCAAGTATTAGGTTAGCTTTGGGCGCTGACGTTTTAGTGCACGAATCTACTTATGGTAAGGGTGATGAGCGAATTGCTAAATCGCATGGGCATTCAACCAATATGCAAGCAGCTGATATCGCTAAACAAGCAAATGCTAAACGACTATTATTAAATCATGTTAGTGCTCGTTTTATGGGGCGAGATTGTTGGCAAATGGAAGAAGATGCAAAGACGATTTTTTCAAATACCCATCTTGTTAGAGATTTGGAAGAAGTAGGTATATAA

SEQ ID NO: 2262 - protein, 309 aa, Streptococcus agalactiae
MEIQFLGTGAGQPAKARNVSSLVLKLLDEINEVWMFDCGEGTQRQILETTIKPRKVKKIFITHMHGDHVFGLPGFLSSRAFQANEEQTDLDIYGPVGIKSFVMTGLRTSGSRLPYRIHFHEFDESSLGKIMETDKFTVYAEKLDHTIFCMGYRVVQKDLEGTLDAEALKLAGVPFGPLFGKVKNGENVTLEDGREIIAKDYISEPKKGKVITILGDTRKTDASIRLALGADVLVHESTYGKGDERIAKSHGHSTNMQAADIAKQANAKRLLLNHVSARFMGRDCWQMEEDAKTIFSNTHLVRDLEEVGI

SEQ ID NO: 2263 - protein, 648 aa, Streptococcus agalactiae
ATGATTGATTATATTGATTTGGCTTTGACTTATGGTGGTTTTACGAGCTTAGATAAAGTTTATCTAGAGAAAAAACTAGATGGCCTCTCTAAGCAACAACGACTTGATTTTATCACTCCACCTCCTAGTGTGATTAATGCTTATTTTGCTGAAATATATCAAAAGCAAGGGCCAGAAGCGGCAACTGATTACTATTTTGATCTTTCCAAAGCCTTGGGCTTGTTTCCAAAACATTTATCGTTTGATGAAGAAAAACCTTTTATTCGTTTGAATTTATCAGGAAAATCATTTGGTTTTGCTTACCTAAATGATCAAGAAGAAGCGAGTGTTTTTTCTGAAGTTAAAGAAGTCATTACACCGCAGTTACTCTTAGAAATTGCACAGATTTTTCCTCAATATAAAGTCTATCAAGATCGGTCTGGTATCAGAATGGCAAAAATAGATTTTGACGAAACAGAATCTCAAAATATTACACCAGAAACAAGTTTACTAGGGAATGTCTTACAACTTAAAAAAGATATTATTAAAATAACTAGTTTCAATCAAGAAGAGCTATTAGAGTTGGTTAAAACAAAGTCAGGTAAATACTATTATTCTAGTCAAGGACGTGAGTCAGTTATTTATATTGATACTAAATCTACTAATTAA

SEQ ID NO: 2264 - protein, 215 aa, Streptococcus agalactiae
MIDYIDLALTYGGFTSLDKVYLEKKLDGLSKQQRLDFITPPPSVINAYFAEIYQKQGPEAATDYYFDLSKALGLFPKHLSFDEEKPFIRLNLSGKSFGFAYLNDQEEASVFSEVKEVITPQLLLEIAQIFPQYKVYQDRSGIRMAKIDFDETESQNITPETSLLGNVLQLKKDIIKITSFNQEELLELVKTKSGKYYYSSQGRESVIYIDTKSTN

SEQ ID NO: 2265 - protein, 705 aa, Streptococcus agalactiae
TTGAAGATTGTAGAAAAAAATCGCGAGACAGTTCGAGAAAGACGTGTTGATTCGACAACCTTTAAAATTGGATTAATTGGATATACAAATGCTGGCAAGTCAACTATTATGAATGTTTTGACCGATGATAAGCAATATGAAGCCAGTGAATTATTTGCAACGTTAGACGCTACAACCAAGCAGATCTATTTACAAAATCAATTTCAAGTCACTTTAACAGATACTGTTGGTTTTATTCAAGATTTACCTACAGAGTTAGTTGCGGCTTTCAAGTCTACCTTAGAAGAAAGTCGACATGTCGATTTATTACTTCATGTTATTGATGCTAGTGACCCTAATCATGAAGAACACGAAAAAGTTGTTATGGAGATTCTTAAAGACTTAGATATGATAGATATTCCTCGTTTAGCGATATACAACAAGATGGATGTCACTGAGCAGCTGAATGCAACAACTTTTCCTAATGTGAGAATTGCAGCCAAAAAACAAGGGAGTAGGGATTTATTACGCCGTCTTATTGTGGATGAAATACGACATATCTTTGACGAATTTTCGATTAGAGTGCATCAAAATCAAGCATATAAGCTCTATGATCTCAATAAAATAGCATTGCTTGACACCTACACCTTTGAAGAAGAATACGAGAATATTACAGGCTATATTTCTCCTAAACAAAAATGGAAGCTGGAAGAATTTTATGATTGA

SEQ ID NO: 2266 - protein, 234 aa, Streptococcus agalactiae
MKIVEKNRETVRERRVDSTTFKIGLIGYTNAGKSTIMNVLTDDKQYEASELFATLDATTKQIYLQNQFQVTLTDTVGFIQDLPTELVAAFKSTLEESRHVDLLLHVIDASDPNHEEHEKVVMEILKDLDMIDIPRLAIYNKMDVTEQLNATTFPNVRIAAKKQGSRDLLRRLIVDEIRHIFDEFSIRVHQNQAYKLYDLNKIALLDTYTFEEEYENITGYISPKQKWKLEEFYD

SEQ ID NO: 2267 - protein, 891 aa, Streptococcus agalactiae
ATGAGAAAAATCAAGCTTATAGCAGTTGTTGGTCCAACTGCGGTTGGGAAGACAGCATTAGGAATTGAATTAGCTAAAACTTTCAATGGCGAAATCATTAGTGGCGATAGTCAGCAAGTTTATCAGAAGTTAGATATCGGAACGGCTAAAGCTAGTAAAGAAGAGCAAGAACAAGCTTATCATCACTTGATTGATGTTCGTGAAGTAAATGAGAATTATTCGGTTTATGATTTTGTCAAAGAGGCAAAAGTAGCTATTGATACGATTATTTCTAAGGGGAAAATCCCTATTATTGTTGGAGGTACTGGCCTATATTTACAGAGTTTGTTTGAGGGCTATCATTTAGGAGGCGAAGTCAATCAAGAAACTCTTAAGGCCTATCGTGAAAAATTAGAGTCTCTAAGTGATGAAGATTTATTTGAAAAGTTGACAGAACAATCCATTGTTATACCGCAAGTTAATCGTCGACGTGCCATCCGTGCATTAGAATTGGCGAAGTTTGGGAATGATTTGCAAAATAGTGAAAGTCCGTATGATGTTTTATTAATTGGATTGAATGATGATCGTCAGGTGCTCTATGATCGTATCAATAGACGAGTTGATTTGATGATAGACAATGGTCTCTTAGATGAAGCTAAATGGCTATACGATAACTACCCTAGTGTTCAAGCAAGTAGAGGAATTGGCTATAAAGAATTATTTCCTTACTTTTCAAAGCAAATACCATTAGAAGAAGCTGTTGATAAACTAAAACAAAATACCAGACGTTTTGCAAAACGCCAATTAACATGGTTTAGAAACCGTATGAATGTCGAATTTATTATGGTTGGTGAGGAAAATTATCAACAAAAAATCAAGCGAAAAGTCAGTGATTTTTTATCATCAAAGTAA

SEQ ID NO: 2268 - protein, 296 aa, Streptococcus agalactiae
MRKIKLIAVVGPTAVGKTALGIELAKTFNGEIISGDSQQVYQKLDIGTAKASKEEQEQAYHHLIDVREVNENYSVYDFVKEAKVAIDTIISKGKIPIIVGGTGLYLQSLFEGYHLGGEVNQETLKAYREKLESLSDEDLFEKLTEQSIVIPQVNRRRAIRALELAKFGNDLQNSESPYDVLLIGLNDDRQVLYDRINRRVDLMIDNGLLDEAKWLYDNYPSVQASRGIGYKELFPYFSKQIPLEEAVDKLKQNTRRFAKRQLTWFRNRMNVEFIMVGEENYQQKIKRKVSDFLSSK

SEQ ID NO: 2269 - protein, 177 aa, Streptococcus agalactiae
ATGGTTAAAAAATTCGCATTTGCTAAAGGAATAGCAACAGGAGTCGTTGCAACAGCTGCTACTCTTGCAGGTGCTGCATTTGCTATCAAAAAAACAATTATTGAACCTGAGGAAGAAAAAATAGCTTTTATCGAAGAAAATCGTAAAAAAGCTGCACGTAAACGTGTCTCTCATTAA

SEQ ID NO: 2270 - protein, 58 aa, Streptococcus agalactiae
MVKKFAFAKGIATGVVATAATLAGAAFAIKKTIIEPEEEKIAFIEENRKKAARKRVSH

SEQ ID NO: 2271 - protein, 918 aa, Streptococcus agalactiae
ATGAAAAATTGGGAAAAACCACCATTAGTGATGGCGGGATTAGTATTGGGGCTATTAGCTTTGGGGAACCTTCTAGAGGGATATGGCACCTATTTTCGCTATTGTTTAGGGCTAGTAGCACTTGTTTTTTGGATTTTTTTAATCAAAGGAATATTAAAAAATAAAAAAGAAAGCAGGAAGGAGTTAAGCAATCCTTTGATTGCTTCTGTCTTTACTACTTTTTTTATGGCAGGTATGATTTTATCGACCTATATCTTATTATTTAGAAGTTTAGGAATATGGGTAGCAGTTCTGTCAAAAGGTGTATGGTGGTTGTCATTTATTGCGTTAATCATTCATATGGCTATTTTTTCATGGAAATATTTGAGACACTTTTCGATGGCTAATCTTTTTCCTTCTTGGTCTGTCCTCTATGTTGGTATAGGGGTAGCTAGCCTGACAGCACCAATTAGTGGACAATTCACTATTGGGAAAATAGTTTTTTGGTATGGTTTTATTGCAACTTTAGTATTATTACCATTTCTATTCATTAAAGCATATAAAATCGGGCTACCTTCGGCAGTTAAGCCTAATATAACTACTATTTGCGCTCCAATGTCGCTAATCACAGCGAGATATGTCAATAGTTTTGTGTCACCAAATAGAGGTTTATTATTGCTATTAATCGTAATGGCACAATTTCTTTATTTTTTCATTCTTTTTCAGGTGCCTAAATTACTGATTGGTGATTTTACACCAGGTTTCTCAGCCTTTACTTTCCCCCTTGTTATCTCAGCTACCTCACTTAAATTAAGTATTCAGCATCTATCATTACCAGTTGATATACAGGGGCTAGTCCACTTTGAAATTGGGACAACAACTCTTATTGTTATGATAGTAATGGTACGTTATATTTTCTTTTTAAGGCGAACAATTTAA

SEQ ID NO: 2272 - protein, 305 aa, Streptococcus agalactiae
MKNWEKPPLVMAGLVLGLLALGNLLEGYGTYFRYCLGLVALVFWIFLIKGILKNKKESRKELSNPLIASVFTTFFMAGMILSTYILLFRSLGIWVAVLSKGVWWLSFIALIIHMAIFSWKYLRHFSMANLFPSWSVLYVGIGVASLTAPISGQFTIGKIVFWYGFIATLVLLPFLFIKAYKIGLPSAVKPNITTICAPMSLITARYVNSFVSPNRGLLLLLIVMAQFLYFFILFQVPKLLIGDFTPGFSAFTFPLVISATSLKLSIQHLSLPVDIQGLVHFEIGTTTLIVMIVMVRYIFFLRRTI

SEQ ID NO: 2273 - protein, 856 aa, Streptococcus agalactiae
ATGGTCGTACGAAGCGTTWCTTAACCCTGATTACATGACAAAAGTTTCAGATGACAAATTGCCTAATAAAGCAACACTTATTGAAGCTGTTAAAGAATATCCATATTTTATTCATGATTCATATGATTCTTCAGATGCCATTAATCATTTTGATTGGGCAGCAGCCACAGATAATAACAAACACCCAATTTCAACGAAAACACAGGCCTATACAGCAGGTTTAATCACATTAAGGCGTTCAACAGATGCTTTCCGGAAATTGAGCAAAGCAGAAATTGATCGTGAGGTTAGCTTGATTACAGAGGTAGGTCAAGGTGATATTAAAGAAAAAGATTTGGTTATTGCTTACCAAACAATAGATTCTAAAGGCGATATTTACGCAGTATTTGTTAATGCTGATAGTAAAGCTAGAAACGTTTTACTAGGTGAAAAATATAAACACCTTTTAAAAGGGCAAGTAATTGTTGATGCTGATCAAGCGGGGATTAAACCAATCTCAACTCCTAGAGGTGTTCATTTTGAAAAAGATAGTTTGCTGATTGATCCATTAACAGCAATTGTGATTAAAGTTGGCAAAGTTGCTCCTAGCCCTAAGGAGGAATTGCAAGCAGATTATCCCAAAACACAATCTTTCAAGGGATCTAAAACGGTAGAAAAAGTAAATAGAATAGCTAATAAGACCTCAATAACTCCTGTAGTTTCTAATAAGACCGATTCATATCTGACAAATGAAGCTAATTTGCCAAAAACTGGAGATAAGTCATCAAAAATACTAAGTGTAGTAGGAATAAGCATTCTAGCAAGTCTACTTGCTCTACTAGGTCTCTCTTTAAAGAGGAATCGTCACTTAAAATAA

SEQ ID NO: 2274 - protein, 285 aa, Streptococcus agalactiae
  VARIANT 7: Xaa = Any Amino Acid
MVVRSVXFNPDYMTKVSDDKLPNKATLIEAVKEYPYFIHDSYDSSDAINHFDWAAATDNNKHPISTKTQAYTAGLITLRRSTDAFRKLSKAEIDREVSLITEVGQGDIKEKDLVIAYQTIDSKGDIYAVFVNADSKARNVLLGEKYKHLLKGQVIVDADQAGIKPISTPRGVHFEKDSLLIDPLTAIVIKVGKVAPSPKEELQADYPKTQSFKGSKTVEKVNRIANKTSITPVVSNKTDSYLTNEANLPKTGDKSSKILSVVGISILASLLALLGLSLKRNRHLK

SEQ ID NO: 2275 - protein, 316 aa, Streptococcus agalactiae
TTGAAATCTGGTTTTCCAAATGAAGGTACTCCAGCTTTCATCACAGGTGGCCCACAATCTTTACAAGGTATTTTTAAAAATATCAAAGCACAACCTGGGAATTTTGAAGCAGATTCGCCAGGAGATGTGGTGCAGTATATTGCTGCACATGATAACCTTACCTTGCATGATGTGATTGCAAAATCAATTAATAAAGACCCTAAGGTAGCTGAGAAGAGATTCATAGACGTCTGCGTTTAGGAAATGTAATGATTTTAACATCTCAAGGGACAGCATTCATTCATTCTGGTCAAGAGTATGGTCGTACGAAGCGTTW

SEQ ID NO: 2276 - protein, 106 aa, Streptococcus agalactiae
  VARIANT 106: Xaa = Any Amino Acid
MKSGFPNEGTPAFITGGPQSLQGIFKNIKAQPGNFEADSPGDVVQYIAAHDNLTLHDVIAKSINKDPKVAEEEIHRRLRLGNVMILTSQGTAFIHSGQEYGRTKRX

SEQ ID NO: 2277 - protein, 168 aa, Streptococcus agalactiae
ATGCGGCTGCGATGAATTAGCTTATAAAGAAGCTAAAGCTATTAATCCTAATATGATTATGATTGGGGAGGGCTGGAGAACATTCAAGGCGATCAAGGTAAGCCGGTTAAACCAGCTGACCAAAGATTGGATGAAGTCAACCGATACAGTTGGCGTCTTTTCAGATGA

SEQ ID NO: 2278 - protein, 56 aa, Streptococcus agalactiae
MRLRLKLAYKEAKAINPNMIMIGEGWRTFQGDQGKPVKPADQRLDEVNRYSWRLFR

SEQ ID NO: 2279 - protein, 1595 aa, Streptococcus agalactiae
ATGAACCAAGTTTGGATTGATGAAAAGTACGGTATACATACTTATCAGCCCCTCAAAGAAGGGTATGTCCGTATTAACTATCTGAGTTCATCTGGTAACTATGACCACTTATCAGCATGGCTCTTTAAAGATGTTGCAACCCCCTCAACAACTTGGCCAGATGGTAGTAATTTTGTGAATCAAGGACTATATGGAAGGTATATTGATGTACCACTGAAAACTAATGCCAAAGAGATTGGTTTTCTAATCTTAGATGAAAGTAAGACAGGAGATGCAGTGAAAGTTCAACCCAACGACTATGTTTTTAGAGATTTAGCTAACCATAACCAAATTTTTGTAAAAGATAAGGATCCAAAGGTTTATAATAATCCTTATTACATTGATCAAGTGCAGCTAAAGGATGCTCAACAAACTGATTTAACAAGTATTCAAGCAAGTTTTACAACTCTAGATGGGGTAGATAAAACTGAAATTTTAAAAGAATTGAAAGTGACAGATAAAAATCAAAATGCTATACAAATTTCTGATATCACTCTCGATACTAGTAAATCTCTTTTAATAATCAAAGGCGACTTTAATCCTAAACAAGGTCATTTCAATATATCTTATAATGGTAACAATGTCACGACAAGGCAATCTTGGGAATTTAAAGACCAACTTTATGCTTATAGTGGAAATTTAGGTGCAGTTCTCAATCAAGATGGTTCAAAAGTTGAAGCCAGCCTCTGGTCACCGAGTGCTGATAGTGTCACTATGATTATTTATGACAAAGATAATCAAAACAGGGTTGTAGCGACTACCCCCCTTGTGAAAAATAATAAAGGTGTTTGGCAGACGATACTTGATACTAAATTAGGTATTAAAAACTATACTGGTTACTATTATCTTTACGAAATAAAAAGAGGTAAGGATAAGGTTAAGATTTTAGATCCTTATGCAAAGTCATTAGCAGAGTGGGATAGTAATACTGTTAATGACGATATAAAAACGGCTAAAGCAGCTTTTGTAAATCCAAGTCAACTTGGACCTCAAAATTTAAGTTTTGCTAAAATTGCTAATTTTAAAGGAAGACAAGATGCTGTTATATACGAAGCACATGTAAGAGACTTCACTTCTGATCAATCTTTGGACGGAAAATTAAAAAATCAATTTGTTACCTTTGCAGCCTTTTCAGAGAAACTAGATTATTTACAGAAATTAGGAGTTACACACATTCAGCTTTTACCGGTATTGAGTTATTTTTATGTTAATGAAATGGATAAGTCACGCTCAACAGCTTACACTTCCTCAGACAATAATTACAATTGGGGCTATGACCCACAGAGCTATTTTGCTCTTTCTGGAATGTATTCAGAGAAACCAAAAGATCCATCAGCACGTATCGCCGAATTAAAACAATTAATACATGATATTCATAAACGTGGCATGGGGGTTATACTTGATGTCGTCTATAATCACACTGCAAAAACTTATCTCTTTGAGGATATAGAACCTAATTATTATCACTTTATGAATGAAGATGGKTCACCAAGAGAAAGTTTTGGAGGGGGACGTTTAGGAACCACTCATGCAATGAGTCGTCGTGTTTTGGTTGA

SEQ ID NO: 2280 - protein, 531 aa, Streptococcus agalactiae
MNQVWIDEKYGIHTYQPLKEGYVRINYLSSSGNYDHLSAWLFKDVATPSTTWPDGSNFVNQGLYGRYIDVPLKTNAKEIGFLILDESKTGDAVKVQPNDYVFRDLANHNQIFVKDKDPKVYNNPYYIDQVQLKDAQQTDLTSIQASFTTLDGVDKTEILKELKVTDKNQNAIQISDITLDTSKSLLIIKGDFNPKQGHFNISYNGNNVTTRQSWEFKDQLYAYSGNLGAVLNQDGSKVEASLWSPSADSVTMIIYDKDNQNRVVATTPLVKNNKGVWQTILDTKLGIKNYTGYYYLYEIKRGKDKVKILDPYAKSLAEWDSNTVNDDIKTAKAAFVNPSQLGPQNLSFAKIANFKGRQDAVIYEAHVRDFTSDQSLDGKLKNQFVTFAAFSEKLDYLQKLGVTHIQLLPVLSYFYVNEMDKSRSTAYTSSDNNYNWGYDPQSYFALSGMYSEKPKDPSARIAELKQLIHDIHKRGMGVILDVVYNHTAKTYLFEDIEPNYYHFMNEDGSPREKFWRGTFRNHSCNESSCFG

SEQ ID NO: 2281 - protein, 738 aa, Streptococcus agalactiae
ATGAAAAGAAAAGACTTATTTGGTGATAAACAAACTCAATACACGATTAGAAAGTTAAGTGTTGGAGTAGCTTCAGTTGCAACAGGGGTATGTATTTTTCTTCATAGTCCACAGGTATTTGCTGAAGAAGTAAGTGTTTCTCCTGCAACTACAGCGATTGCAAAGTCGAATATTAATCAGGTTGACAACCGACAATCTACTAATTTAAAAGATGACATAAACTCAAACTCTGAGACGGTTGTGACACCCTCAGATATGCCGGATACCAAGCAATTAGTATCAGATGAAACTGACACTCAAAAAGGAGTGACAGAGCCGGATAAGGCGACAAGCCTGCTTGAAGAAAATAAAGGTCCTGTTTCAGATAAAAATACCTTAGATTTAAAAGTGGCACCATCTACATTGCAAAATACTCCCGACAAAACTTCTCAAGCTATAGGTGCTCCAAGTCCGACCTTGAAAGTTGCTAATCAAGCTCCACAGATTGAAAATGGTTACTTTAGGTTACATCTTAAAGAATTGCCTCAAGGTCATCCTGTAGAAAGCACTGGGCTTTGGATATGGGGAGATGTTGATCAACCGTCTAGTAATTGGCCAAATGGTGCTATCCCTATGACTAATGCTAAGAAAGATGATTACGGTTATTATGTTGATTTTAAATTATCTGAAAAACAACGAAAACAAATATCTTTTTTAATTAATAACAAAGCANNNNNCATTCATTCATTAATTAATTAA

SEQ ID NO: 2282 - protein, 245 aa, Streptococcus agalactiae
  VARIANT 238, 239: Xaa = Any Amino Acid
MKRKDLFGDKQTQYTIRKLSVGVASVATGVCIFLHSPQVFAEEVSVSPATTAIAKSNINQVDNRQSTNLKDDINSNSETVVTPSDMPDTKQLVSDETDTQKGVTEPDKATSLLEENKGPVSDKNTLDLKVAPSTLQNTPDKTSQAIGAPSPTLKVANQAPQIENGYFRLHLKELPQGHPVESTGLWIWGDVDQPSSNWPNGAIPMTNAKKDDYGYYVDFKLSEKQRKQISFLINNKAXXIHSLIN

SEQ ID NO: 2283 - protein, 735 aa, Streptococcus agalactiae
ATGAGAGATAATCATCTACACACGCATTTTTCCTATGATTGTCAAACGGCATTTGAGGACTATATTAATGGTTTTACAGGTGAATTTATCACAACAGAACATTTTGATTTATCAAATCCTTACACCGGTCAAGACGATGTTCCTGATTATAGTGCTTATTGTCAAAAAATAGATTATCTTAATCAGAAATATGGAAATCGATTTAAAAAAGGAATTGAAATCGGTTATTTTAAAGATAGGGAATCAGATATTTTAGATTATTTAAAAAATAAAGAATTTGATTTAAAACTATTGTCAATCCATCATAATGGTAGGTATGATTATCTGCAAGAAGAAGCTCTGAAAGTACCAACAAAGGAGCTTTTAGCAGATTACTTTAATCGTATGGAATTTGCCATAGGCCGTGTGGAAGCGCACGTTTTAGATCACTTTGATTATGGTTTTCGTAAGTTAAACTTAGATGTAGAAGATTTAAAACCGTTTGAAACGCAATTGAAGCGCATTTTCAGAAAGATGTTATCTAAGGGGTTAGCTTTTGAACTAAATACCAAATCCCTTTATCTATATGGGAATGAAAAACTTTATCGCTATGCTTTAGAGATACTAAAACAGCTTGGTTGTAAACAATACTCTATAGGCTCTGACGGTCATATTCCTGAACATTTTTGTTATGAATTTGATAGACTTCAATGTCTGCTAAAGGACTATCAAATTGATGAAAATCATTTGATATGA

SEQ ID NO: 2284 - protein, 244 aa, Streptococcus agalactiae
MRDNHLHTHFSYDCQTAFEDYINGFTGEFITTEHFDLSNPYTGQDDVPDYSAYCQKIDYLNQKYGNRFKKGIEIGYFKDRESDILDYLKNKEFDLKLLSIHHNGRYDYLQEEALKVPTKELLADYFNRMEFAIGRVEAHVLDHFDYGFRKLNLDVEDLKPFETQLKRIFRKMLSKGLAFELNTKSLYLYGNEKLYRYALEILKQLGCKQYSIGSDGHIPEHFCYEFDRLQCLLKDYQIDENHLI

SEQ ID NO: 2285 - protein, 132 aa, Streptococcus agalactiae
TTGCCTAGCTTTTTTATCAAAAATTTCCTCATATCAAATGATTTTCATCAATTTGATAGTCCTTTAGCAGACATTGAAGTCTATCAAATTCATAACAAAAATGTTCAGGAATATGACCGTCAGAGCCTATAG

SEQ ID NO: 2286 - protein, 43 aa, Streptococcus agalactiae
MPSFFIKNFLISNDFHQFDSPLADIEVYQIHNKNVQEYDRQSL

SEQ ID NO: 2287 - protein, 585 aa, Streptococcus agalactiae
ATGACTGACTTGGAAAAAATTATTAAAGCAATAAAAAGTGATTCACAGAATCAAAATTATACAGAAAATGGTATTGATCCTTTGTTTGCTGCTCCTAAAACAGCTAGGATCAATATTGTTGGCCAAGCACCTGGTTTAAAAACTCAAGAAGCAAGACTCTATTGGAAAGATAAATCTGGAGATCGTCTACGCCAGTGGCTTGGAGTTGATGAAGAGACATTTTACCATTCTGGAAAATTTGCTGTTTTGCCTTTAGATTTTTATTACCCAGGCAAAGGAAAATCAGGAGATTTACCCCCTAGAAAAGGTTTTGCGGAGAAATGGCACCCTCTTATTTTAAAAGAAATGCCTAATGTTCAATTGACCTTGCTAGTTGGTCAATATGCTCAGAAATATTATCTTGGAAGCTCTGCACATAAAAATCTAACAGAAACAGTTAAATCTTACAAAGACTATCTACCCGATTATTTACCCCTGGTTCACCCATCACCGCGAAATCAAATTTGGCTAAAGAAGAATCCATGGTTTGAAAAAGATCTAATCGTTGATTTACAAAAGATAGTAGCAGATATTTTAAAAGATTAA

SEQ ID NO: 2288 - protein, 194 aa, Streptococcus agalactiae
MTDLEKIIKAIKSDSQNQNYTENGIDPLFAAPKTARINIVGQAPGLKTQEARLYWKDKSGDRLRQWLGVDEETFYHSGKFAVLPLDFYYPGKGKSGDLPPRKGFAEKWHPLILKEMPNVQLTLLVGQYAQKYYLGSSAHKNLTETVKSYKDYLPDYLPLVHPSPRNQIWLKKNPWFEKDLIVDLQKIVADILKD

SEQ ID NO: 2289 - protein, 1407 aa, Streptococcus agalactiae
ATGACAATTGATTTTAGAGCAGAAGTAGACAAACGCAAAGACGCTTTGATGGACGATTTAATAAATCTTCTTCGTATTAACTCGGAGCGTGATGATTCACAAGCTGATGCAGAGCATCCATTTGGTCCTGGACCTGTAAAAGCCTTGGAATTTTTCCTTGAGATGGCTGAGCGAGATGGCTACGAAACAAAAAACGTAGATAATTATGCGGGACACTTTACATTTGGTCAAGGCGAAGAAGAACTAGGTATTTTTGGGCATTTAGATGTTGTTCCTGCAGGCAGCGGTTGGGATACAGACCCTTATGAACCAGTTATCAAGGATAACCGTTTATATGCTCGAGGGTCATCAGACGATAAGGGACCAACAATGGCATGTTATTATGCTCTAAAAATTATTAAAGAGCTTGGGCTACCAACATCTAAGAAAGTTCGTTTTGTTGTAGGAACTGATGAAGAATCTGGATGGGGAGATATGGATTACTACTTCGAACATGTTGGTCTTCCAAAACCTGATTTTGGTTTCTCTCCAGATGCAGAATTTCCAATTATAAATGGTGAAAAAGGTAATATCACTGAATATTTACATTTTTCAGGAGAAAATAAGGGAGCTGTTAGACTGCATAGCTTTTCTGGCGGACTTCGCGAAAACATGGTTCCAGAATCAGCCACAGCACGTTTCACAAGTCATTTAGATCAGACAACACTTGGAGCTAGTCTAGCTGATTTTGCAGGTAAACATAATTTGAAAACAGAATTATCTGTAGAAGATGGGCAGTATATAGCTACAGTTTATGGTAAATCTGCTCATGGTTCAATACCACAAGAAGGTGTTAATGGGGCGACTTATTTAGCTCTTTATCTAAGTCAATTTGATTTTGAAGGTCCTGCTCGTGCTTTCTTAGATGTCACAGCCAACATTATTCACGAAGACTTCTCAGGTGAAAAACTTGGAGTAGCTTATGAAGATGACTGTATGGGATCGTTGAGCATGAATGCAGGTGTCTTCCAGTTTGATGAAACTAATGATGATAATACTATCGCTCTTAATTTCCGTTACCCACAAGGGACAGATGCTAAAACTATCCAAACTAAGCTTGAGAAACTTAACGGAGTTGAAAAAGTGACTCTTTCTGACCATGAACACACACCACACTATGTACCTATGGACGATGAATTAGTATCAACCTTACTAGCTGTCTATGAAAAGCAAACTGGTCTTAAAGGACATGAACAGGTTATTGGTGGTGGGACATTTGGTCGCTTACTTGAACGGGGTGTTGCATACGGTGCCATGTTCCCAGGAGATGAAAACACTATGCATCAAGCTAATGAGTACATGCCTTTAGAAAATATTTTCCGTTCGGCTGCTATCTACGCAGAAGCTATCTATGAATTAATCAAATAA

SEQ ID NO: 2290 - protein, 468 aa, Streptococcus agalactiae
MTIDFRAEVDKRKDALMDDLINLLRINSERDDSQADAEHPFGPGPVKALEFFLEMAERDGYETKNVDNYAGHFTFGQGEEELGIFGHLDVVPAGSGWDTDPYEPVIKDNRLYARGSSDDKGPTMACYYALKIIKELGLPTSKKVRFVVGTDEESGWGDMDYYFEHVGLPKPDFGFSPDAEFPIINGEKGNITEYLHFSGENKGAVRLHSFSGGLRENMVPESATARFTSHLDQTTLGASLADFAGKHNLKTELSVEDGQYIATVYGKSAHGSIPQEGVNGATYLALYLSQFDFEGPARAFLDVTANIIHEDFSGEKLGVAYEDDCMGSLSMNAGVFQFDETNDDNTIALNFRYPQGTDAKTIQTKLEKLNGVEKVTLSDHEHTPHYVPMDDELVSTLLAVYEKQTGLKGHEQVIGGGTFGRLLERGVAYGAMFPGDENTMHQANEYMPLENIFRSAAIYAEAIYELIK

SEQ ID NO: 2291 - protein, 603 aa, Streptococcus agalactiae
ATGAAATTTCTAGAATTAAATAAGAAGCGCCATGCTGTGAAACATTTTAATGATAAGCCAGTCGACTTTAAAGATGTTAGAACTGCTATTGAAATTGCGACATTAGCGCCATCTGCTAATAATATTCAGCCTTGGAAGTTTGTTGTTGTCCAAGAAAAAAAATCTGCTCTAGCAGAAGGTTTACCGGAAAGTAATTGTAACCAAATTAATCAAGCGCAGTATGTTATTGCTTTATTTACAGATACAGATTTAGGACAGAGATCACGGAAAATAGCTCGTATTGGTCGTAGATCTCTTCCTGATGATTTAATTGGTTATTATATGGAAACTCTACCACCACGCTATGCTTTATATAGTGAAAAACAAACTGGAGAGTATCTCTCTTTAAATGCAGGTATCGTTGCTATGAATTTAGTACTTGCCTTGACAGATCAAGGTATTAGTTCTAATATGATTTTAGGGTTCGATAAAGCGATTACCAATGATGTCTTAGAGATAGATAAACGTTTTAGACCAGAAATATTAATTACTGTTGGTTATAGTGATGAAAAGGTTGAGCCTAGTTATCGTTTGCCAGTTGATCATATTATTGAAAAACGTTAA

SEQ ID NO: 2292 - protein, 200 aa, Streptococcus agalactiae
MKFLELNKKRHAVKHFNDKPVDFKDVRTAIEIATLAPSANNIQPWKFVVVQEKKSALAEGLPESNCNQINQAQYVIALFTDTDLGQRSRKIARIGRRSLPDDLIGYYMETLPPRYALYSEKQTGEYLSLNAGIVAMNLVLALTDQGISSNMILGFDKAITNDVLEIDKRFRPEILITVGYSDEKVEPSYRLPVDHIIEKR

SEQ ID NO: 2293 - protein, 420 aa, Streptococcus agalactiae
ATGCTACGAGCATTAAAAGAAGATTTTTTTCTAACCTTAACCTCTTTAAAAAATCAATTTTGGGTTTACATTGGAACTGGTATCTTAATCCAAACTTTAGTTGCTTATTTAGTAAAAGGAATTCTGAGTTTTATCTTTCGTCGGATATTGATATTATCAAATACTCCCGCAGTGACTAAAGACAATTGGACTTTGCTTTTTAATCATCCCTTAGCTTTATTACTCTTTATACTTTATATCGTAATCCTAATTGGGTTCATCTATACTGAGTTCACTATCTATACTATTGCCATACTGAAAACTGAATTTTCTCTCAGTATCAAAAAATGGCTAACAATCTTTCCTAAAAAAATAAAATCACTTTTAGGACCACAGCTAATTTGGGTATCAATCTACNNNNNCATTCCATTCATTAATTAA

SEQ ID NO: 2294 - protein, 139 aa, Streptococcus agalactiae
  VARIANT 133, 134: Xaa = Any Amino Acid
MLRALKEDFFLTLTSLKNQFWVYIGTGILIQTLVAYLVKGILSFIFRRILILSNTPAVTKDNWTLLFNHPLALLLFILYIVILIGFIYTEFTIYTIAILKTEFSLSIKKWLTIFPKKIKSLLGPQLIWVSIYXXIPFIN

SEQ ID NO: 2295 - protein, 540 aa, Streptococcus agalactiae
ATGAATGNNNNNACTTCTATTTTTAATCATAACAACGTTTATGCTGCCACCAAGAAAGCAAAAATTAAATTTAATAAAACTCAAAAAAAAATTGTCAAAAAAGCAAGAGAATATGCTAAGTCTGGCCATATGTCTAAAGATAGTATCATTGAAAAATTAAAAAAGGATTCTAAGAAATATCGTCAAGAAGACATCAACTTTGTGATTAATAACCTCAAGGTTGATTACAAAAAAAATGCCTTGATTTCTGCCAAAATTTATTCAAAGACCATGAATTTATCTAAACAATCTATCTTTGAACAGCTCTATTCGGAGTCTCCAGATAAGGCAACCCACTCTGATAAATTTACAAAAGAAGAATCCCAATATGCTATAGACCATCTCAAAGTAGATTTCAAAGAAAATGCTCTTGAGACTGCTAAAAGTTATCAAAGTAGTTCTTCTTTATCCAAAGAAGAAATCTATAAACAATTGACATCTACGCTGGGCGATAAATTCACAAATGATGAAGCCCAATATGCTGTAGATCATTTGAAATGA

SEQ ID NO: 2296 - protein, 179 aa, Streptococcus agalactiae
  VARIANT 3, 4: Xaa = Any Amino Acid
MNXXTSIFNHNNVYAATKKAKIKFNKTQKKIVKKAREYAKSGHMSKDSIIEKLKKDSKKYRQEDINFVINNLKVDYKKNALISAKIYSKTMNLSKQSIFEQLYSESPDKATHSDKFTKEESQYAIDHLKVDFKENALETAKSYQSSSSLSKEEIYKQLTSTLGDKFTNDEAQYAVDHLK

SEQ ID NO: 2297 - protein, 291 aa, Streptococcus agalactiae
ATGTCTAGAAAAGTACGTCGTCACTTAACCGATGATTTTAAGCAACAAATTGTTGACCTTTACAATGTTGGTAGAAAGCGTAGCAGTCTCATCAAGGTATATGAGCTAACCCCTTCCACCTTCGATAAGTGGGTTAGACAAGCCAAAACAACTGGTTCATTCAAGTCTGTTGATAATCTGACAGATGAACAGCGGGAGCTAATTGAACTCAGAAAACACAATAAAGAACTCGAAATGCAATTAGATATCCTAAAGCAAGCAGCGGTGATTATGGCACAAAAAGGGAAATAA

SEQ ID NO: 2298 - protein, 96 aa, Streptococcus agalactiae
MSRKVRRHLTDDFKQQIVDLYNVGRKRSSLIKVYELTPSTFDKWVRQAKTTGSFKSVDNLTDEQRELIELRKHNKELEMQLDILKQAAVIMAQKGK

SEQ ID NO: 2299 - protein, 107 aa, Streptococcus agalactiae
TTGGTTTCTGTTTATCAGAAAGCCACCTTCAACCACATTCTAGAGGCAAGAATGAAGCCCCTATTTCCCACCACTTAGANNNNNCATTCCATTCATTAATTAATTAA

SEQ ID NO: 2300 - protein, 35 aa, Streptococcus agalactiae
  VARIANT 27, 28, 29: Xaa = Any Amino Acid
MVSVYQKATFKPHSRGKNEAPISHHLXXXFHSLIN

SEQ ID NO: 2301 - protein, 570 aa, Streptococcus agalactiae
ATGAATGAATGNNNNNAGAAGCCACCTTCAACCTATTCTAGAGGCAAGAATGAAGCCCCTATTCCCAACCACTTAGACAGGCAATTTAAGCAAGAAAGACCACTACAGGCCTTAGTCACTGACTTAACCTATGTTCGTGTAGGCAATCGTTGGGCTTATGTTTGCCTCATCATTGACCTATACAACCGTGAAATCATCGGCCTGTCTCTTGGTTGGCACAAGACCGCTGAACTCGTTAAGCAAGCCATACAAAGCATCCCTTACGCCCTGACCAAAGTCAAGATGTTCCATTCAGATCGTGGCAAAGAGTTTGATAATCAGTTAATTGATGAAATATTGGAAGCCTTTGGAATCACACGTTCGCTTAGTCAGACTGGTTGTCCTTATGACAATGCCGTAGCTGAAAGTACGTATCGTGCTTTCAAAATTGAATTTGTTTATCAAGAAACCTTTCAATTGCTGGAAGAACTAGCTCTTAAGACTAAAGACTATGTTCATTGGTGGAATTACCACCGCATTCATGGTAGTCTCAACTACCAAACACCAATGACTAAAAGATTAATTGCCTAG

SEQ ID NO: 2302 - protein, 189 aa, Streptococcus agalactiae
  VARIANT 4, 5, 6: Xaa = Any Amino Acid
MNEXXXKPPSTYSRGKNEAPIPNHLDRQFKQERPLQALVTDLTYVRVGNRWAYVCLIIDLYNREIIGLSLGWHKTAELVKQAIQSIPYALTKVKMFHSDRGKEFDNQLIDEILEAFGITRSLSQTGCPYDNAVAESTYRAFKIEFVYQETFQLLEELALKTKDYVHWWNYHRIHGSLNYQTPMTKRLIA

SEQ ID NO: 2303 - protein, 291 aa, Streptococcus agalactiae
ATGGTTAAAAAAGCATATTCATGGGAAACTAAGCTGGCTTGCATCGATATGAAGAAAGCAGGCAAGTCTAACAGAGTTATTATGGAGACTTTAGGCATCAAAAATAATAGTCAAATCTATACTTGGATGAAATGGTACGAAAACGAGGAGCTTTATCGTTTTCATCAAGGTGTTGGCAAGCAATATACCTACGGTAAAGGCTTGGAACATCTGTCTGAAGTGGAACAATTACAATTACAGGTTGACCTCTTAAAAAAGTATCGAGGCTTGATAAGGAAATCGATAAAGTAA

SEQ ID NO: 2304 - protein, 96 aa, Streptococcus agalactiae
MVKKAYSWETKLACIDMKKAGKSNRVIMETLGIKNNSQIYTWMKWYENEELYRFHQGVGKQYTYGKGLEHLSEVEQLQLQVDLLKKYRGLIRKSIK

SEQ ID NO: 2305 - protein, 2469 aa, Streptococcus agalactiae
GTGAAGAAAACATATGGTTATATCGGCTCAGTTGCTGCTATTTTACTAGCTACTCATATTGGAAGTTACCAGCTTGGTAAGCATCATATGGGTCTAGCAACAAAGGACAATCAGATTGCCTATATTGATGATAGCAAAGGTAAGGTAAAAGCCCCTAAAACAAACAAAACGATGGATCAAATCAGTGCTGAAGAAGGCATCTCTGCTGAACAGATCGTAGTCAAAATTACTGACCAAGGTTATGTTACCTCACACGGTGACCATTATCATTTTTACAATGGGAAAGTTCCTTATGATGCGATTATTAGTGAAGAGTTGTTGATGACGGATCCTAATTACCATTTTAAACAATCAGACGTTATCAATGAAATCTTAGACGGTTACGTTATTAAAGTCAATGGCAACTATTATGTTTACCTCAAGCCAGGTAGTAAGCGCAAAAACATTCGAACCAAACAACAAATTGCTGAGCAAGTAGCCAAAGGAACTAAAGAAGCTAAAGAAAAAGGTTTAGCTCAAGTGGCCCATCTCAGTAAAGAAGAAGTTGCGGCAGTCAATGAAGCAAAAAGACAAGGACGCTATACTACAGACGATGGCTATATTTTTAGTCCGACAGATATCATTGATGATTTAGGAGATGCTTATTTAGTACCTCATGGTAATCACTATCATTATATTCCTAAAAAAGATTTGTCTCCAAGTGAGCTAGCTGCTGCACAAGCCTACTGGAGTCAAAAACAAGGTCGAGGTGCTAGACCGTCTGATTACCGCCCGACACCAGCCCCAGGTCGTAGGAAAGCCCCAATTCCTGATGTGACGCCTAACCCTGGACAAGGTCATCAGCCAGATAACGGTGGTTATCATCCAGCGCCTCCTAGGCCAAATGATGCGTCACAAAACAAACACCAAAGAGATGAGTTTAAAGGAAAAACCTTTAAGGAACTTTTAGATCAACTACACCGTCTTGATTTGAAATACCGTCATGTGGAAGAAGATGGGTTGATTTTTGAACCGACTCAAGTGATCAAATCAAACGCTTTTGGGTATGTGGTGCCTCATGGAGATCATTATCATATTATCCCAAGAAGTCAGTTATCACCTCTTGAAATGGAATTAGCAGATCGATACTTAGCCGGCCAAACTGATGACAACGACTCAGGTTCAGATCACTCAAAACCATCAGATAAAGAAGTGACACATACCTTTCTTGGTCATCGCATCAAAGCTTACGGAAAAGGCTTAGATGGTAAACCATATGATACGAGTGATGCTTATGTTTTTAGTAAAGAATCCATTCATTCAGTGGATAAATCAGGAGTTACAGCTAAACACGGAGATCATTTCCACTATATAGGATTTGGAGAACTTGAACAATATGAGTTGGATGAGGTCGCTAACTGGGTGAAAGCAAAAGGTCAAGCTGATGAGCTTGTTGCTGCTTTGGATCAGGAACAAGGCAAAGAAAAACCACTCTTTGACACTAAAAAAGTGAGTCGCAAAGTAACAAAAGATGGTAAAGTGGGCTATATTATGCCAAAAGATGGCAAGGACTATTTCTATGCTCGTTATCAACTTGATTTGACTCAGATTGCCTTTGCCGAACAAGAACTAATGCTTAAAGATAAGAAGCATTACCGTTATGACATTGTTGATACAGGCATTGAGCCACGATTTGCTGTAGATGTGTCAAGTCTGCCGATGCATGCTGGTAATGCTACTTACGATACTGGAAGTTCGTTTGTTATCCCACATATTGATCATATCCATGTCGTTCCGTATTCATGGTTGACGCGCAATCAGATTGCAACAATCAAGTATGTGATGCAACACCCCGAAGTTCGTCCGGATGTATGGTCTAAGCCAGGGCATGAAGAGTCAGGTTCGGTCATTCCAAATGTTACGCCTCTTGATAAACGTGCTGGTATGCCAAACTGGCAAATTATCCATTCTGCTGAAGAAGTTCAAAAAGCCCTAGCAGAAGGTCGTTTTGCAGCACCAGACGGCTATATTTTCGATCCACGAGATGTTTTGGCAAAAGAAACTTTTGTATGGAAAGATGGCTCCTTTAGCATCCCAAGAGCAGATGGCAGTTCATTGAGAACCATTAATAAATCTGATCTATCCCAAGCTGAGTGGCAACAAGCTCAAGAGTTATTGGCAAAGAAAAATGCTGGTGATGCTACTGATACGGATAAACCTGAAGAAAAGCAACAGGCAGATAAGAGCAATGAAAACCAACAGCCAAGTGAAGCCAGTAAAGAAGAAAAAGAATCAGATGACTTTATAGACAGTTTACCAGACTATGGTCTAGATAGAGCAACCCTAGAAGATCATATCAATCAATTAGCACAAAAAGCTAATATCGATCCTAAGTATCTCATTTTCCAACCAGAAGGTGTCCAATTTTATAATAAAAATGGTGAATTGGTAACTTATGATATCAAGACACTTCAACAAATAAACCCTTAA

SEQ ID NO: 2306 - protein, 822 aa, Streptococcus agalactiae
MKKTYGYIGSVAAILLATHIGSYQLGKHHMGLATKDNQIAYIDDSKGKVKAPKTNKTMDQISAEEGISAEQIVVKITDQGYVTSHGDHYHFYNGKVPYDAIISEELLMTDPNYHFKQSDVINEILDGYVIKVNGNYYVYLKPGSKRKNIRTKQQIAEQVAKGTKEAKEKGLAQVAHLSKEEVAAVNEAKRQGRYTTDDGYIFSPTDIIDDLGDAYLVPHGNHYHYIPKKDLSPSELAAAQAYWSQKQGRGARPSDYRPTPAPGRRKAPIPDVTPNPGQGHQPDNGGYHPAPPRPNDASQNKHQRDEFKGKTFKELLDQLHRLDLKYRHVEEDGLIFEPTQVIKSNAFGYVVPHGDHYHIIPRSQLSPLEMELADRYLAGQTDDNDSGSDHSKPSDKEVTHTFLGHRIKAYGKGLDGKPYDTSDAYVFSKESIHSVDKSGVTAKHGDHFHYIGFGELEQYELDEVANWVKAKGQADELVAALDQEQGKEKPLFDTKKVSRKVTKDGKVGYIMPKDGKDYFYARYQLDLTQIAFAEQELMLKDKKHYRYDIVDTGIEPRFAVDVSSLPMHAGNATYDTGSSFVIPHIDHIHVVPYSWLTRNQIATIKYVMQHPEVRPDVWSKPGHEESGSVIPNVTPLDKRAGMPNWQIIHSAEEVQKALAEGRFAAPDGYIFDPRDVLAKETFVWKDGSFSIPRADGSSLRTINKSDLSQAEWQQAQELLAKKNAGDATDTDKPEEKQQADKSNENQQPSEASKEEKESDDFIDSLPDYGLDRATLEDHINQLAQKANIDPKYLIFQPEGVQFYNKNGELVTYDIKTLQQINP

SEQ ID NO: 2307 - protein, 876 aa, Streptococcus agalactiae
ATGATAGCAGGGTGTGATAAGTCAGCAAACCCCAAACAGCCTACGCAAGGCATGTCAGTTGTAACCAGCTTTTACCCAATGTATGCGATGACAAAAGAAGTATCTGGAGACCTAAATGATGTGAGGATGATCCAATCAGGTGCAGGCATTCATTCCTTTGAACCGTCTGTAAATGATGTGGCAGCTATTTATGACGCGGATTTGTTTGTTTACCATTCACATACCTTAGAAGCTTGGGCAAGGGATCTAGACCCTAATTTAAAAAAATCAAAGGTTAATGTGTTTGAAGCGTCAAAACCTCTGACACTAGATAGAGTCAAAGGGCTAGAAGATATGGAAGTCACACAAGGCATTGACCCTGCGACACTTTATGACCCACATACCTGGACGGATCCCGTTTTAGCTGGTGAGGAAGCTGTTAATATCGCTAAAGAGCTAGGACATTTGGATCCTAAACACAAAGACAGTTACACTAAAAAGGCTAAGGCTTTCAAAAAAGAAGCAGAGCAACTAACTGAAGAATACACTCAAAAATTTAAAAAGGTGCGCTCAAAAACATTTGTGACGCAACACACGGCATTTTCTTATCTGGCTAAACGATTCGGCTTGAAACAACTTGGTATCTCGGGTATTTCTCCAGAGCAAGAGCCCTCTCCTCGCCAATTGAAAGAAATTCAAGACTTTGTTAAAGAATACAACGTCAAGACTATTTTTGCAGAAGACAACGTCAACCCCAAAATTGCTCATGCTATTGCGAAATCAACAGGAGCTAAAGTAAAGACATTAAGTCCACTTGAAGCTGCTCCAAGCGGAAACAAGACATATCTAGAAAATCTTAGAGCAAATTTGGAAGTGCTCTATCAACAGTTGAAGTAA

SEQ ID NO: 2308 - protein, 291 aa, Streptococcus agalactiae
MIAGCDKSANPKQPTQGMSVVTSFYPMYAMTKEVSGDLNDVRMIQSGAGIHSFEPSVNDVAAIYDADLFVYHSHTLEAWARDLDPNLKKSKVNVFEASKPLTLDRVKGLEDMEVTQGIDPATLYDPHTWTDPVLAGEEAVNIAKELGHLDPKHKDSYTKKAKAFKKEAEQLTEEYTQKFKKVRSKTFVTQHTAFSYLAKRFGLKQLGISGISPEQEPSPRQLKEIQDFVKEYNVKTIFAEDNVNPKIAHAIAKSTGAKVKTLSPLEAAPSGNKTYLENLRANLEVLYQQLK

SEQ ID NO: 2309 - protein, 105 aa, Streptococcus agalactiae
TTGGGGTTTGCTGACTTATCACACCCTGCTATCATTACTAAACTCACAACCATAGCCATGAGAAAAAAAACTTTTTTNNNNNCATTCCATTCATTAATTAATTAA

SEQ ID NO: 2310 - protein, 34 aa, Streptococcus agalactiae
  VARIANT 26, 27, 28: Xaa = Any Amino Acid
MGFADLSHPAIITKLTTIAMRKKTFXXXFHSLIN

SEQ ID NO: 2311 - protein, 1278 aa, Streptococcus agalactiae
ATGTCAGAATTGCTAGATAAGATATTATCTCGGAACAATATGCTTGAAGCTTACAAGCAAGTGAAATCAAACAAAGGTTCTGCTGGTATCGATGGGGTCACTATCGAGCAGATGGATGACTATCTTCACCAAAATTGGCGAGAAACCAAGCAACTCATCAAAGAGAGGAGCTATAAACCTCAACCGGTTCTCAGGGTTGAAATCCCAAAACCAAACGGAGGAGTTCGTAACCTAGGTATCCCGACGGCTATGGATAGAATGATTCAGCAGGCCATCGTTCAAGTTTTGAGTCCACTCTGCGAAAAACATTTTTCAGAGTATAGCTATGGGTTCAGACCCAATCGCTCCTGCGAAACAGCCATTGTTCAGCTACTTGAGTATTTAAACGATGGCTACGAGTGGATTGTGGACATTGACTTGGAAAAGTTCTTCGATACTGTTCCGCAAGACAGATTGATGTCCCTGGTTCATAATATCATTCAAGATGGCGATACGGAGTCACTGATTCGTAAGTACTTCCATTCGGGAGTTGTTATTAACGGACAGCGACATAAGACTTTAGTCGGGACACCTCAAGGCGGGAATCTATCACCCCTCCTATCTAATATTATGCTTAATGAGTTAGACAAAGAGTTGGAAAAGCGAGGTCTTCGCTTTGTCCGTTACGCCGATGACTGTGTCATCACTGTCGGAAGCGAAGCAGCTGCTAAGCGGGTCATGCATTCGGTCAGTAGCTATATTGAGAAGCGATTAGGGTTGAAAGTCAACATGACTAAGACCAAGATTGTCAGACCGAACAAACTCAAATACCTCGGATTTGGTTTTTGGAAATCTCCAAAAGGTTGGAAGTGTCGTCCTCACCAAGACAGCGTTCAGAGCTTTAAGCGAAAACTGAAGCAACTGACGATGAGGAAATGGAGCATTGACCTGATAACTCGCATTGAACGATTGAACTGGGTCATTCGAGGATGGATAAACTATTTCTCGCTTGGCAATATGAAGAGTATCATGACACAAATAGATGAGCGTCTGCGAACCCGTATTCGAGTGATTATCTGGAAGCAATGGAAGAAGAAAGCAAAGCGCCTATGGGGACTCTTAAAACTAGGAGTTGCTAGATGGATAGCCGATAAAGTTTCTGGATGGGGTGACCACTATCAGTTGGTAGCTCAGAAGTCGGTACTCAAACGTGCTATATCAAAACCAGCCCTCGCAAAGCGAGGACTGGTCAGTTGCTTAGATTACTATCTTGAACGACATGCGTTAAAAGTTAGTTGA

SEQ ID NO: 2312 - protein, 425 aa, Streptococcus agalactiae
MSELLDKILSRNNMLEAYKQVKSNKGSAGIDGVTIEQMDDYLHQNWRETKQLIKERSYKPQPVLRVEIPKPNGGVRNLGIPTAMDRMIQQAIVQVLSPLCEKHFSEYSYGFRPNRSCETAIVQLLEYLNDGYEWIVDIDLEKFFDTVPQDRLMSLVHNIIQDGDTESLIRKYFHSGVVINGQRHKTLVGTPQGGNLSPLLSNIMLNELDKELEKRGLRFVRYADDCVITVGSEAAAKRVMHSVSSYIEKRLGLKVNMTKTKIVRPNKLKYLGFGFWKSPKGWKCRPHQDSVQSFKRKLKQLTMRKWSIDLITRIERLNWVIRGWINYFSLGNMKSIMTQIDERLRTRIRVIIWKQWKKKAKRLWGLLKLGVARWIADKVSGWGDHYQLVAQKSVLKRAISKPALAKRGLVSCLDYYLERHALKVS

SEQ ID NO: 2313 - protein, 3453 aa, Streptococcus agalactiae
TTGCGTAAAAAACAAAAACTACCATTTGATAAACTTGCCATTGCGCTTATATCTACGAGCATCTTGCTCAATGCACAATCAGACATTAAAGCAAATACTGTGACAGAAGACACTCCTGCTACCGAACAAGCCGTAGAACCCCCACAACCAATAGCAGTTTCTGAGGAATCACGATCATCAAAGGAAACTAAAACCTCACAAACTCCTAGTGATGTAGGAGAAACAGTAGCAGATGACGCTAATGATCTAGCCCCTCAAGCTCCTGCTAAAACTGCTGATACACCAGCAACCTCAAAAGCGACTATTAGGGATTTGAACGACCCTTCTCATGTCAAAACCCTGCAGGAAAAAGCAGGCAAGGGAGCTGGGACCGTTGTTGCAGTGATTGATGCTGGTTTTGATAAAAATCATGAAGCGTGGCGCTTAACAGACAAAACTAAAGCACGTTACCAATCAAAAGAAAATCTTGAAAAAGCTAAAAAAGAGCACGGTATTACCTATGGCGAGTGGGTCAATGATAAGGTTGCTTATTACCACGACTATAGTAAAGATGGTAAAAACGCTGTTGATCAAGAACACGGCACACACGTGTCAGGGATCTTGTCAGGAAATGCTCCATCTGAAATGAAAGAACCTTACCGCCTAGAAGGTGCGATGCCTGAGGCTCAATTGCTTTTGATGCGTGTCGAAATTGTAAATGGACTAGCAGACTATGCTCGTAACTACGCTCAAGCTATCAGAGATGCTGTCAACTTGGGAGCTAAGGTGATTAATATGAGCTTTGGTAATGCTGCACTAGCTTACGCCAACCTTCCAGACGAAACCAAAAAAGCCTTTGACTATGCCAAATCAAAAGGTGTTAGCATTGTGACCTCAGCTGGTAATGATAGTAGCTTTGGGGGCAAGCCCCGTCTACCTCTAGCAGATCATCCTGATTATGGGGTGGTTGGGACACCTGCAGCGGCAGATTCAACATTGACAGTTGCTTCTTACAGCCCAGATAAACAGCTCACTGAAACTGCTACGGTCAAAACAGACGATCATCAAGATAAAGAAATGCCTGTTATTTCAACAAACCGTTTTGAGCCAAACAAGGCTTACGACTATGCTTATGCTAATCGTGGTACGAAAGAGGATGATTTTAAGGATGTCGAAGGTAAGATTGCCCTTATTGAACGTGGCGATATTGATTTCAAAGATAAGATTGCAAACGCTAAAAAAGCTGGTGCTGTAGGGGTCTTGATCTATGACAATCAAGACAAGGGCTTCCCGATTGAATTGCCAAATGTTGACCAGATGCCTGCGGCCTTTATCAGTCGAAGAGATGGTCTCTTATTAAAAGACAATCCCCCAAAAACCATTACCTTCAATGCGACACCTAAGGTATTGCCAACAGCAAGTGGCACCAAACTAAGCCGCTTCTCAAGCTGGGGTCTGACAGCTGACGGCAATATTAAGCCGGATATTGCAGCACCCGGCCAAGATATTTTGTCATCAGTGGCTAACAACAAGTATGCCAAACTTTCTGGAACTAGTATGTCTGCACCATTGGTAGCGGGTATCATGGGACTGTTGCAAAAGCAATATGAGACACAGTATCCTGATATGACACCATCAGAGCGTCTTGATTTAGCTAAGAAAGTATTGATGAGCTCAGCAACTGCCCTATATGATGAAGATGAAAAAGCTTATTTTTCTCCTCGCCAACAGGGAGCAGGAGCAGTCGATGCTAAAAAAGCTTCAGCAGCAACGATGTATGTAACAGATAAGGACAATACCTCAAGCAAGGTTCACCTGAACAATGTTTCTGATAAATTTGAAGTAACAGTAACAGTTCACAACAAATCTGATAAACCTCAAGAGTTGTATTACCAAGTAACTGTTCAAACAGATAAAGTAGATGGAAAACACTTTGCCTTGGCTCCTAAAGCATTGTATGAGACATCATGGCAAAAAATCACAATTCCAGCCAATAGCAGCAAACAAGTCACCGTTCCAATCGATGCTAGTCGATTTAGCAAGGACTTGCTTGCCCAAATGAAAAATGGCTATTTCTTAGAAGGTTTTGTTCGTTTCAAACAAGATCCTACAAAAGAAGAGCTTATGAGCATTCCATATATTGGTTTCCGAGGTGATTTTGGCAATCTGTCAGCTTTAGAAAAACCAATCTATGATAGCAAAGACGGTAGCAGCTACTATCATGAAGCAAATAGTGATGCCAAAGACCAATTAGATGGTGATGGATTACAGTTTTACGCTCTGAAAAATAACTTTACAGCACTTACCACAGAGTCTAACCCATGGACGATTATTAAAGCTGTCAAAGAAGGGGTTGAAAACATAGAGGATATCGAATCTTCAGAGATCACAGAAACCATTTTTGCAGGTACTTTTGCAAAACAAGACGATGATAGCCACTACTATATCCACCGTCACGCTAATGGCAAACCATATGCTGCGATCTCTCCAAATGGGGACGGTAACAGAGATTATGTCCAATTCCAAGGTACTTTCTTGCGTAATGCTAAAAACCTTGTGGCTGAAGTCTTGGACAAAGAAGGAAATGTTGTTTGGACAAGTGAGGTAACCGAGCAAGTTGTTAAAAACTACAACAATGACTTGGCAAGCACACTTGGTTCAACCCGTTTTGAAAAAACGCGTTGGGACGGTAAAGATAAAGACGGCAAAGTTGTTGCTAACGGAACCTACACCTATCGTGTTCGCTACACGCCGATTAGCTCAGGTGCAAAAGAACAACACACTGATTTTGATGTGATTGTAGACAATACGACACCTGAAGTCGCAACATCGGCAACATTCTCAACAGAAGATAGTCGTTTGACACTTGCATCTAAACCAAAAACCAGCCAACCGGTTTACCGTGAGCGTATTGCTTACACTTATATGGATGAGGATCTGCCAACAACAGAGTATATTTCTCCAAATGAAGATGGTACCTTTACTCTTCCTGAAGAGGCTGAAACAATGGAAGGCGCTACTGTTCCATTGAAAATGTCAGACTTTACTTATGTTGTTGAAGATATGACTGGTAACATCACTTATACACCAGTGACTAAGCTATTGGAGGGCCACTCTAATAAGCCAGAACAAGACGGTTCAGATCAAGCACCAGACAAAAAACCAGAAGCTAAACCAGAACAAGACGGTTCAGGTCAAACACCAGATAAAAAAAAAGAAACTAAACCAGAAAAAGATAGTTCAGGTCAAACACCAGGTAAAACTCCTCAAAAAGGTCAATCTTCTCGTACTCTAGAGAAACGATCTTCTAAGCGTGCTTTAGCTACAAAAGCATCAACAAGAGATCAGTTACCAACGACTAATGACAAGGATACAAATCGTTTACATCTCCTTAAGTTAGTTATGACCACTTTCTTCTTGGGATTAGCAGCTCATATATTTAAAACAAAACGCCAAAAAGAAACTAAAAAATAG

SEQ ID NO: 2314 - protein, 1150 aa, Streptococcus agalactiae
MRKKQKLPFDKLAIALISTSILLNAQSDIKANTVTEDTPATEQAVEPPQPIAVSEESRSSKETKTSQTPSDVGETVADDANDLAPQAPAKTADTPATSKATIRDLNDPSHVKTLQEKAGKGAGTVVAVIDAGFDKNHEAWRLTDKTKARYQSKENLEKAKKEHGITYGEWVNDKVAYYHDYSKDGKNAVDQEHGTHVSGILSGNAPSEMKEPYRLEGAMPEAQLLLMRVEIVNGLADYARNYAQAIRDAVNLGAKVINMSFGNAALAYANLPDETKKAFDYAKSKGVSIVTSAGNDSSFGGKPRLPLADHPDYGVVGTPAAADSTLTVASYSPDKQLTETATVKTDDHQDKEMPVISTNRFEPNKAYDYAYANRGTKEDDFKDVEGKIALIERGDIDFKDKIANAKKAGAVGVLIYDNQDKGFPIELPNVDQMPAAFISRRDGLLLKDNPPKTITFNATPKVLPTASGTKLSRFSSWGLTADGNIKPDIAAPGQDILSSVANNKYAKLSGTSMSAPLVAGIMGLLQKQYETQYPDMTPSERLDLAKKVLMSSATALYDEDEKAYFSPRQQGAGAVDAKKASAATMYVTDKDNTSSKVHLNNVSDKFEVTVTVHNKSDKPQELYYQVTVQTDKVDGKHFALAPKALYETSWQKITIPANSSKQVTVPIDASRFSKDLLAQMKNGYFLEGFVRFKQDPTKEELMSIPYIGFRGDFGNLSALEKPIYDSKDGSSYYHEANSDAKDQLDGDGLQFYALKNNFTALTTESNPWTIIKAVKEGVENIEDIESSEITETIFAGTFAKQDDDSHYYIHRHANGKPYAAISPNGDGNRDYVQFQGTFLRNAKNLVAEVLDKEGNVVWTSEVTEQVVKNYNNDLASTLGSTRFEKTRWDGKDKDGKVVANGTYTYRVRYTPISSGAKEQHTDFDVIVDNTTPEVATSATFSTEDSRLTLASKPKTSQPVYRERIAYTYMDEDLPTTEYISPNEDGTFTLPEEAETMEGATVPLKMSDFTYVVEDMTGNITYTPVTKLLEGHSNKPEQDGSDQAPDKKPEAKPEQDGSGQTPDKKKETKPEKDSSGQTPGKTPQKGQSSRTLEKRSSKRALATKASTRDQLPTTNDKDTNRLHLLKLVMTTFFLGLAAHIFKTKRQKETKK

SEQ ID NO: 2315 - protein, 783 aa, Streptococcus agalactiae
ATGGAAGTTAAAAAATTCTCGGAAAAAGATTTTGTAAATGAAATAAATAAAATAAAACAGAAACAATTTTTAAGTCAAATTGAACAGTATGAAAGCTATATCGCTCCTCAAATGAGAACGAAAGGCTATAAGAGGATCAATCAGTCTGAACGTACGGTTGTTTTCTCTTTTGGAGAAATAACATTTAGTAGGAGTCGCTGGACAAATGGCTTTGAAACTAGAATACCAGTAGATGAGTGGTTAGGTCTTGAAAAATATAAGAGATATTCAATAGAATTCTTATATCATGTTGCAAAATTGGCTACAATGATGCCTTATCGTCAAGTTTGCAAAGTAATAGATAGCACTTTGCAAACAATCATAACAAAAGACTGTGTTTTAAAAGCAGTAAAATTTGTAGAAAAATTGTTAAAAGAAAAAGAACGCTATCGTTTTTATTTGGAAGAGCCACCCGAACGTAAAAAAGTGAAAAAACTGTATGTTGAGGGTGATGGAGTCATGATTAAAAGCACAGATTCTAGAGAGGAAAGAAGGTATTTAGATTTAACACATTTTGTTATTCATACAGGCTCAAAAAAAGTTTCTACTAAAAGATATGAATTGCGGGACAAGCACGAAATATTACAGCTTAATTATGATAAAGCTAAATATAATCTTTTAGATTATATTTATAATAACTATGAAGTAGATGACTATACTATTTTATCACTAACTCTGATATGGGTAAGGCTATACTAGTAGAGTTTTTAAGGAATARGAAAAGCACTTAGGGTAAGAAACTGA

SEQ ID NO: 2316 - protein, 261 aa, Streptococcus agalactiae
  VARIANT 254: Xaa = Any Amino Acid
MEVKKFSEKDFVNEINKIKQKQFLSQIEQYESYIAPQMRTKGYKRINQSERTVVFSFGEITFSRSRWTNGFETRIPVDEWLGLEKYKRYSIEFLYHVAKLATMMPYRQVCKVIDSTLQTIITKDCVLKAVKFVEKLLKEKERYRFYLEEPPERKKVKKLYVEGDGVMIKSTDSREERRYLDLTHFVIHTGSKKVSTKRYELRDKHEILQLNYDKAKYNLLDYIYNNYEVDDYTILITNSDMGKGYTSRVFKELXKALRVRN

SEQ ID NO: 2317 - protein, 609 aa, Streptococcus agalactiae
ATGGTTAAGAAAAAAGTAAAGAAAAAAAGTGGTTGTGGTGGATGTTTAAGTTTAATAATAGTGATAATTATTGTTAGTAGTGTTATAAATTTATTTACAGGTTCTGAAAGCAGTAATACTTCTAAAAAGAATAAGACAAATCCTAGTGGTGCGACAAGTGCAAAAGTCGTTAAACACAAAAAAACTGATGAAGAACGAGCAGAAGATTATATAAAAACGTTAGGATTAAACCCGAGTGATTATATAAAAGAAATGGATTATTCAAAGGTTGATTTTAAGGGGGATTTATCATCAGTATCAGGTAATTATAATAATTTTACTGTTGAAAACATCAATCAAACTTTTGAAAAAGGTGATAAATCTTTAAAAGATATTATTGAAATTTTTGGAAAGCCTGATACAATTTGGGTTAATTACGTTGACAATCAGTACAATACTGATTTGTACTGGAAAAAAGATGACACAGATGATTCTAATTATATTCATGCAGAATGGTCTGAGCCAAAAGATGAATATGATGTTCAAAGTTTAAGTGGCACGGCTTCAAATTCAGGTACTGGCAAGTTTCAGTCATTCATTGGATTAGATGGATTTGAGCCTGCACAGTAG

SEQ ID NO: 2318 - protein, 202 aa, Streptococcus agalactiae
MVKKKVKKKSGCGGCLSLIIVIIIVSSVINLFTGSESSNTSKKNKTNPSGATSAKVVKHKKTDEERAEDYIKTLGLNPSDYIKEMDYSKVDFKGDLSSVSGNYNNFTVENINQTFEKGDKSLKDIIEIFGKPDTIWVNYVDNQYNTDLYWKKDDTDDSNYIHAEWSEPKDEYDVQSLSGTASNSGTGKFQSFIGLDGFEPAQ

SEQ ID NO: 2319 - protein, 261 aa, Streptococcus agalactiae
ATGACTATGTTTATAAGAAAGAGGATGAATATGGCATTTGAACCAAAAAATTCGGAACTAACAAAAGTTCTAAAAGAAAGTTTAGATGAAGAAAAGAAAGAAATTTTCTCATCTGAAATGAATATTAGGGACTTTGAACGTACAAAACAATATCAATTTACACTTCAACCTTCAGTCCGAAAAAAAATTGATAGGCTATCAAAAGAAAAAGGCTATCGTTCAGCATCATCTTTTATAAATGACTTTTTTAAAAATTTGTAA

SEQ ID NO: 2320 - protein, 86 aa, Streptococcus agalactiae
MTMFIRKRMNMAFEPKNSELTKVLKESLDEEKKEIFSSEMNIRDFERTKQYQFTLQPSVRKKIDRLSKEKGYRSASSFINDFFKNL

SEQ ID NO: 2321 - protein, 378 aa, Streptococcus agalactiae
TTGTGTCTTTTAAAACAGATTGTAACACACAAAGTTTTGTCTACTTTTATAGTATACATCCATCTTTCTGAAAGACTTGAAGAATTTAAAACAGAGGCATTTGACTTTAAAACTCGAGCAAGTTATGTCACAGCAAAATTATTCTTTTTAGGTAATATGATAAAGCATAATACCAACTCTTCAAAAGAATTAATAAGATCACTAAAGAATGATAAATCAGTTCTTGCAATGATTCCTCATAAAGAGTTATTTAACCGCTCAACATTGGACAAAAAGTCTCTATCTTATATGATGTCTGATAAAGAATTATATTCAAGAGATAGTAAATTCTTCAAAGAAATTGATTTTACATTTAGGAAAATTACTGATAAACTATAA

SEQ ID NO: 2322 - protein, 125 aa, Streptococcus agalactiae
MCLLKQIVTHKVLSTFIVYIHLSERLEEFKTEAFDFKTRASYVTAKLFFLGNMIKHNTNSSKELIRSLKNDKSVLAMIPHKELFNRSTLDKKSLSYMMSDKELYSRDSKFFKEIDFTFRKITDKL

SEQ ID NO: 2323 - protein, 321 aa, Streptococcus agalactiae
GTGTTACAATCTGTTTTAAAAGACACAAAAACGAAAGGACAACCTATGTCAACATTTAAACGCTATGATGAAGAATTCAAACAATCTCTTGTTAACCTTTATCAAACTGGAAAAACTCAGTCTGAACTCTGTAAAGACTATGGGGTATCCACTTCTACGCTTGCAAAATGGATCAAACAGTATTCCCAAGTCAAACTCGAAGATAATTCTGTACTTACTGCCAAGCAAATACAAGAGTTACAAAAACGTAATGCGCAGCTTGAAGAGGAGAACCTTATCCTAAAAAAAGCAAGTGCCATATTCATGCAAAACTTAAAGTAA

SEQ ID NO: 2324 - protein, 106 aa, Streptococcus agalactiae
MLQSVLKDTKTKGQPMSTFKRYDEEFKQSLVNLYQTGKTQSELCKDYGVSTSTLAKWIKQYSQVKLEDNSVLTAKQIQELQKRNAQLEEENLILKKASAIFMQNLK

SEQ ID NO: 2325 - protein, 261 aa, Streptococcus agalactiae
ATGAATGAATGNNNNNTCAAACAATCTCTTGTTAACCTTTATCAAACTGGAAAAACTCAGTCTGAACTCTGTAAAGACTATGGGGTATCCACTTCTACGCTTGCAAAATGGATCAAACAGTATTCCCAAGTCAAACTCGAAGATAATTCTGTACTTACTGCCAAGCAAATACAAGAGTTACAAAAACGTAATGCGCAGCTTGAAGAGGAGAACCTTATCCTAAAAAAAGCAAGTGCCATATTCATGCAAAACTTAAAGTAA

SEQ ID NO: 2326 - protein, 86 aa, Streptococcus agalactiae
  VARIANT 4, 5, 6: Xaa = Any Amino Acid
MNEXXXKQSLVNLYQTGKTQSELCKDYGVSTSTLAKWIKQYSQVKLEDNSVLTAKQIQELQKRNAQLEEENLILKKASAIFMQNLK

SEQ ID NO: 2327 - protein, 291 aa, Streptococcus agalactiae; identical to SEQ ID NO: 2297

SEQ ID NO: 2328 - protein, 96 aa, Streptococcus agalactiae; identical to SEQ ID NO: 2298

SEQ ID NO: 2329 - protein, 527 aa, Streptococcus agalactiae
ATGTGTCGCTGGCTGAATATGCCACACTCAAGTTATTACTATCAAGCCGTGGAGTCAGTATCTGAAACGGAGTTTGAAGAAACTATTAAAAGAATTTTCCTCGATAGCGAGTCCAGATACGGATCCAGAAAAATCAAAATATGCTTGAATAACGAAGGTATCACACTTTCACGTCGTCGGATTCGACGCATTATGAAGCGACTCAATTTGGTTTCTGTTTATCAGAAAGCCACCTTCAAACCACATTCTAGAGGCAAGAATGAAGCCCCTATTCCCAACCACTTAGACAGGCAATTTAAGCAAGAAAGACCACTACAGGCCTTAGTCACTGACTTAACCTATGTTCGTGTAGGCAATCGTTGGGCTTATGTTTGCCTCATCATTGACCTATACAACCGTGAAATCATCGGCCTGTCTCTTGGKTGGSACAAGACCGCTGAACTCGTTAAGCAAGCCATACAAAGSMWYCCYTWYRSCCTKRMCAAAGKYMAGRWKKTCCAWTCMRRWYSKGGCMAAGRRKTTGRWAA

SEQ ID NO: 2330 - protein, 177 aa, Streptococcus agalactiae
  VARIANT 143, 156, 157, 158, 159, 160, 162, 164, 165, 166, 167, 169,170, 171, 172, 174, 175, 176, 177: Xaa = Any Amino Acid
MCRWLNMPHSSYYYQAVESVSETEFEETIKRIFLDSESRYGSRKIKICLNNEGITLSRRRIRRIMKRLNLVSVYQKATFKPHSRGKNEAPIPNHLDRQFKQERPLQALVTDLTYVRVGNRWAYVCLIIDLYNREIIGLSLGWXPRPLNSLSKPYKXXXXXLXQXXXXSXXXXGXXXX

SEQ ID NO: 2331 - protein, 384 aa, Streptococcus agalactiae; identical to SEQ ID NO: 879

SEQ ID NO: 2332 - protein, 127 aa, Streptococcus agalactiae; identical to SEQ ID NO: 880

SEQ ID NO: 2333 - protein, 390 aa, Streptococcus agalactiae; identical to SEQ ID NO: 881

SEQ ID NO: 2334 - protein, 129 aa, Streptococcus agalactiae; identical to SEQ ID NO: 882

SEQ ID NO: 2335 - protein, 1236 aa, Streptococcus agalactiae
ATGGTAAACCAATTAATAATTTTAGGAAATGGATTTGATAGAGCTTCGGATTTAAAGTCAGGATATATGGATTTTTTCAATTTTAGATTTAAAGATTCAGACAGTACTAGTAGTTTTTGGTATTATATTTTGAGATCATGTTATAATAAAAAATTGTCTAGCGATTTATGGAGTGATATTGAGAAATTAATTTCAGTACATCTAAAAAACATTATAACACTATATAATAACGAAACAATTTTAAGTGGCAAAGATATTGAGAGTATATATATCGAAACATTAAGCACTGATTACTCAAGAAATGATTACTCTACCAGTGAGGAGCTAACGCAAAAAGCACTCCATAATTTTTTGTGGAATCATAATGGTATACCTATTGTTCCAGAACTAGATAATTTATTATTACTAATTCAAAAAGATTTAAAAATAGTCGAAGATGAGTTTTGTTCTTATTTAACTAATCAAATAGAGATCCAGGAACAATCAAAAGATGATTATTTTAAAGATATAACTAAATTGGGAAATAATTACTTATTAAAATCTCGAATTATTTTTGAACTCTTGTATAAAAGTAATATTTCTAGTGCATTCACATGTAATTCTTTTGTTGCACTACATGATTTTCATAACGAAAATTGTTTCAATTCCTATGAAGGATTTCTTAGCTACATTTATGACTTAGAAAGTAATAATGAATTTAATGTTGAAACATCAATATTGAATTTTAATTATACATTACCTAGAATAGATAAATTACAACGTAATATTCATGGAACCCTGAATGATAAAAATATTATTTTTGGAATAGATTATGATTCTTTAATTGATATACAAAAAGATAAAAATGTTACCCTGCCTGTTGAATTTACCAAATCATACAGGATATTACAGAACGGAAATATATTTCAATATCCAATTCCCTCTGAACTAACTTTTATAAAATTTTATGGTCATGGTCTGGGTGAAGCAGACTATTCTTATTTTCAATCAATTTTTGACTCAATTAATCTTTATTCCAGTGACACTGTACTAATTTTCTATTGGAGTTGTTATAACGAGAATATTAGGGAACAAATTAAATCTCAACAAGTTCATGCAGTACATAAATTAATTGAAAAATATGGAGATACTTTTAATAATAAGAATCATGGCAGAAATTTATTCACAAAACTTCAATTAGAAAATCGTTTAATTATTCAAGAAATACTTTATAATGATATTCTAAATCCATATTAA

SEQ ID NO: 2336 - protein, 411 aa, Streptococcus agalactiae
MVNQLIILGNGFDRASDLKSGYMDFFNFRFKDSDSTSSFWYYILRSCYNKKLSSDLWSDIEKLISVHLKNIITLYNNETILSGKDIESIYIETLSTDYSRNDYSTSEELTQKALHNFLWNHNGIPIVPELDNLLLLIQKDLKIVEDEFCSYLTNQIEIQEQSKDDYFKDITKLGNNYLLKSRIIFELLYKSNISSAFTCNSFVALHDFHNENCFNSYEGFLSYIYDLESNNEFNVETSILNFNYTLPRIDKLQRNIHGTLNDKNIIFGIDYDSLIDIQKDKNVTLPVEFTKSYRILQNGNIFQYPIPSELTFIKFYGHGLGEADYSYFQSIFDSINLYSSDTVLIFYWSCYNENIREQIKSQQVHAVHKLIEKYGDTFNNKNHGRNLFTKLQLENRLIIQEILYNDILNPY

SEQ ID NO: 2337 - protein, 1200 aa, Streptococcus agalactiae
ATGGCAACAAAAAGTAGTAAAAAATACAAAGGTGTTTATTGTGATAATAAGGGAAAGATATTTTATCAGATTGATCTTGGAATCGACCCAGTAACTGGCAAAAGGGTACAAAAGAAAGCTAGAAAAAATCAATATGGTAAAACCTTTGAAACAATGAAAGAAGCATATGACGAATTAGTTCGTATAAAATATGAATTTGCCAACAAAGTCAGTTTAGAAAATTACAATATGACTTTTGAAAACTATATGAACAAAATTTATTTAAGAGCATATAAGCAAAAGGTTCAGTCTGTGACATATAAGACGGCTCTTCCTCATCATAAACTTTTTATTCAATATTTTGGTTTAAAGCCATTAAAAGCAATAACTCCTAGAGATTGCGAAGCTTTTAGATTGCATATCATAGAGAATTATTCTGAAAACTATGCGAAAAATTTATGGTCAAGGTTTAAAGCTTGTATGGGTTATGCAGAAAGACTTGGCTATATTTCAAATATGCCTTGTAAAGCATTAGATAATCCTAGAGGTAAACATCCAGAAACTCCATTTTGGACCTATGCGGAGTTTCAGACATTTATCAAATCATTTGACTTACATGATTATGAAGAATTGCAACGATTTACTGCCATCTGGTTATATTATATGACAGGTGTACGAGTGAGCGAAGGTTTATCTTTATGTTGGGAGGATATTGATTTTGATAAAAAATTTCTAAAGGTACATACAACCTTAGAGAAAGATGAAAATGGTAATTGGTATCGTAAAGACCAAACAAAGACTCCAGCAGGTGAACGACTTATTGAATTGGATGATATTACTATTGAAGTACTTCAAGTTTGGCGAAAAAATCAGTTTGCAAATCAAGATACAGATTTTATCATTTCAAGATTTGGAGATCCTTTTTGCAAATCAACCATTTGTCGCATCATCAAACGGAAAGCTCAACAGGTAGGAGTTCCAGTAATTACAGGAAAAGGTCTCAGACATAGCCATGCATCCTATCTAATCAATGTCTTGAAAAAAGATATTTTATATGTAGCCAGACGTATGGGACATGCCGATAAATCAACAACTTTGAATACTTACAGTCACTGGTTTAATGCTTTAGATAAAACAGTTTCTGAAGAAATCACACAAAATATCAAAAGTGCAGGATTGGATTCAATTTTATGCCAAAATTCCTGCCAAACTTCAAATTAA

SEQ ID NO: 2338 - protein, 399 aa, Streptococcus agalactiae
MATKSSKKYKGVYCDNKGKIFYQIDLGIDPVTGKRVQKKARKNQYGKTFETMKEAYDELVRIKYEFANKVSLENYNMTFENYMNKIYLRAYKQKVQSVTYKTALPHHKLFIQYFGLKPLKAITPRDCEAFRLHIIENYSENYAKNLWSRFKACMGYAERLGYISNMPCKALDNPRGKHPETPFWTYAEFQTFIKSFDLHDYEELQRFTAIWLYYMTGVRVSEGLSLCWEDIDFDKKFLKVHTTLEKDENGNWYRKDQTKTPAGERLIELDDITIEVLQVWRKNQFANQDTDFIISRFGDPFCKSTICRIIKRKAQQVGVPVITGKGLRHSHASYLINVLKKDILYVARRMGHADKSTTLNTYSHWFNALDKTVSEEITQNIKSAGLDSILCQNSCQTSN

SEQ ID NO: 2339 - protein, 228 aa, Streptococcus agalactiae
ATGAGAACTGCTACATATAAAGATTTAATGAACTTAGGATTTCCTGAACATACCTCTAGAGACATTATTCGTGAAGCTAAAAAAATTGCTGTAAAAAAGTTTGAAGAAGCTCGCAAAGTTGACCATAATGCGGTACAATTAAGTAAATCGCCCTTTGACAATCGAAGACTAGGTATCGCACCAGCAGAAATTGTGGAACAATTAATAGGGATTCCACTATCTAAATAA

SEQ ID NO: 2340 - protein, 75 aa, Streptococcus agalactiae
MRTATYKDLMNLGFPEHTSRDIIREAKKIAVKKFEEARKVDHNAVQLSKSPFDNRRLGIAPAEIVEQLIGIPLSK

SEQ ID NO: 2341 - protein, 213 aa, Streptococcus agalactiae
TTAAGGGATTTGAGAGAAGACAATGATTTCACTCAAAAATACGTTGCCGAAAAGCTTTCGTTTACCCACTCTGCTTATTCAAAAATTGAGAGAGGAGAACGTATTTTATCGGCAGATGTAATAATAAAACTTTCAAATCTATATAACGTTAGTACAGATTATTTGTTGGGGCAAACTGACTTTCCCCACCGAATAAAGAATAATTTAAAATAG

SEQ ID NO: 2342 - protein, 70 aa, Streptococcus agalactiae
LRDLREDNDFTQKYVAEKLSFTHSAYSKIERGERILSADVIIKLSNLYNVSTDYLLGQTDFPHRIKNNLK

SEQ ID NO: 2343 - protein, 1866 aa, Streptococcus agalactiae
ATGGTCATCACTAAGCATTATGCTGTTCATGGGAAAAAATACCGCCGTCAATTGATTAAGTATATTCTTGATCCTAAGAAAACCAGGAATTTATCATTGATTTCAGATTTTGGGATGAGTAATTATCTTGATTTTCCTGACTATGTGGAACTGGTGAAGATGTATCAAAATAATTTTCTTTCAAATGACCAACTCTACGACTCACGGTTTGATAGACAAGAGAAAAAGCAACAGAAAATACATGCTCATCATATTATTCAGTCTTTCTCACCTGAAGATAAATTAAGCCCAGAGGAAATCAATCGTATTGGCTATGAAACGATAAAAGAGTTGATAGGTGGTCAATATAAATTCATTGTTGCCACTCATGTTGATCAGGACCATTGTCATAATCACATTATTATCAACTCAATCAATAGCCAATCTCAAAAAAAGTTGAAGTGGGACTACGCTCTTGAAAGAAATTTACAAATGATTTCGGATAGAATTTCTAAAGTAGCGGGTGCTAAAATCATTCCACCTAAACGTTATTCTCATAGAGATTATGAGGTCTATCGACGTTCTAATCACAAATACGAATTGAAGCAGCGGTTATTTTTTCTCATGGAACATTCAATTGATTTCAATGATTTTATGCAAAAAGCTGAGCAACTAAATGTCAAAATAGATTTCTCAAGGAAACATAGCCGATTTTTTATGACAGATAGAAATATGAAGCAAGTCATCCAAGGAGATAAGCTGAATAAGAGAGAACCCTATTCAAAAGAATATTTTCAACGTTACTTTGCCAAGAAAAAGATTGAACTGATTTTAGAATTTTTATTGCTAAGATCCAACTCATTTGATGATTTAGTTGAGAAAGCTCGGTTACTGGGATTAGAATTGAAGAGCAAGAAAAAAACGATAGATTTTGTTCTTTCTGATGGAAAAAGCTGCATTTCCATACCAAATAAGTCATTAAGAAAGAAAAATCTTTATGATACTACGTATTTTGATAGTTATTTCAAGGAACATGATGTGTTTGAAGTGCTTCATAATAATGAAGTAAAAATAGAATTTGAAAAGTTTGAGACACAACAGCTTTCAGAAATATTGACTGTAGAAGAAATAACCGAAGCTTATGAAACGTATAAAACTAAGAGAGATGCTGTACATGAGTTTGAAGTTGAGATCACGGAGGAGCAAATTGAAAAAATTGTGCTAGATGGTCTATTTGTTAAAGTTTGGATGGGTATTGGACAAGAAGGACTAATCTTCATTCCAAATCATCAACTTAATATCTTAGAACAAGAAAATAAGAAGCAGTATCAGGTGTTTATTCGAGAAACATCTTCTTATTTCATTTATCATAAAGAGGACTCAGAAATGAATCGATTTATGAAAGGAAGGGACTTGATTCGCCAACTAACGTTTGACAATAAGTCTTTACCTTATAAGAGACGAATAAGTCTGGTCAGTCTTCAACAAAAAATTGAAGAAATCAATTTATTGATGACATTAAACATTCAAAATAAATCCTTTCTAGAATTAAAAGATGAATTGGTTGGAGACATCGCACAGCTAGATATTGAATTGACAAATCTTCAAGACAAAAACACCACCTTAAACAAGATGGCAGAAGTAGTTGTTAACCTACAAAGTGATAATCAAGATACCAAGCAATTAGCTAAGTATGAATGTTCCAAGATGAATTTATCGCAGAATGTAACAATTGGACAGATTGAATCTGAGATTGAAATGATACAGAATCAGCTAGACAATAAAATCGAAGAATACGAAAATGCGGTTAGAAAGTTGGATGAATATGTAAGAGTTTTAAATATGGATAAATACAAGACAGACGATTTTTCCATTCATATTGAATAA

SEQ ID NO: 2344 - protein, 621 aa, Streptococcus agalactiae
MVITKHYAVHGKKYRRQLIKYILDPKKTRNLSLISDFGMSNYLDFPDYVELVKMYQNNFLSNDQLYDSRFDRQEKKQQKIHAHHIIQSFSPEDKLSPEEINRIGYETIKELIGGQYKFIVATHVDQDHCHNHIIINSINSQSQKKLKWDYALERNLQMISDRISKVAGAKIIPPKRYSHRDYEVYRRSNHKYELKQRLFFLMEHSIDFNDFMQKAEQLNVKIDFSRKHSRFFMTDRNMKQVIQGDKLNKREPYSKEYFQRYFAKKKIELILEFLLLRSNSFDDLVEKARLLGLELKSKKKTIDFVLSDGKSCISIPNKSLRKKNLYDTTYFDSYFKEHDVFEVLHNNEVKIEFEKFETQQLSEILTVEEITEAYETYKTKRDAVHEFEVEITEEQIEKIVLDGLFVKVWMGIGQEGLIFIPNHQLNILEQENKKQYQVFIRETSSYFIYHKEDSEMNRFMKGRDLIRQLTFDNKSLPYKRRISLVSLQQKIEEINLLMTLNIQNKSFLELKDELVGDIAQLDIELTNLQDKNTTLNKMAEVVVNLQSDNQDTKQLAKYECSKMNLSQNVTIGQIESEIEMIQNQLDNKIEEYENAVRKLDEYVRVLNMDKYKTDDFSIHIE

SEQ ID NO: 2345 - protein, 228 aa, Streptococcus agalactiae
ATGAATTTTATCACAATCGATACAAGAGGTTTTCAAGACCTGATTTTTGAAATTCGTAGGATTGGAAATAATATAAACCAGATTGCACGTTCGGTAAATCAAAGCCACCTACTTAGTCTTCAACAAGTCAAAGAATTGCAGCTCGGTATAGCAGAGTTAGAAACACAGTTACAACAAGATTTTGACATAAAGTGTCAGCGATTGAGAGAATTTTATGGTCATCACTAA

SEQ ID NO: 2346 - protein, 75 aa, Streptococcus agalactiae
MNFITIDTRGFQDLIFEIRRIGNNINQIARSVNQSHLLSLQQVKELQLGIAELETQLQQDFDIKCQRLREFYGHH

SEQ ID NO: 2347 - protein, 162 aa, Streptococcus agalactiae
ATGGGAAATCTAGTTAGAGAGATACGTAAGGAAGTCAATTTCTCAATAGAAGAGTATCAACAGATACAAAATTTTATGGAACAGGAGGGATATGAACAATTTTCCCCTTTTGCTAGAGGTAAATTATTGAAAATAGACCACCMAMCMATCTCAGCAGCTTGA

SEQ ID NO: 2348 - protein, 53 aa, Streptococcus agalactiae
  VARIANT 48, 49: Xaa = Any Amino Acid
MGNLVREIRKEVNFSIEEYQQIQNFMEQEGYEQFSPFARGKLLKIDHXXISAA

SEQ ID NO: 2349 - protein, 108 aa, Streptococcus agalactiae
ATGTCCAAATCATCTAAACAAATTGAAGAAGATGCTGTCGATTATTTAAAAATGGCGTTAAAAAAATCAAAACATATTAACAGAGAAATTTCTGAGGGAGATAAATAA

SEQ ID NO: 2350 - protein, 35 aa, Streptococcus agalactiae
MSKSSKQIEEDAVDYLKMALKKSKHINREISEGDK

SEQ ID NO: 2351 - protein, 483 aa, Streptococcus agalactiae
TTGGAGCGAATTCCTGTTCAGTTTAAAGGTTGTGATGATTATTATAACGAAAATGTTGGACACCCTCTAAGCAGGATTAATTTGGAGCATTATCTAACTGAAGGTGGTGTGCTCTACTTTGTAGTGTACTCGAAAGACGTTAGTCCTACTGTCACTTATGCTTCACTAACACCAAAAGTCATTAAGAACGTATTGCCAGCTAGTGACAAGAAAAAAAGAATTAAGAAAAAAGAAGATATCTTTCTCCTGTTCTGGATGGCTATAATAGCGAAATTATTGATTTTACCTTATCCCGCTCTCCAAACCTCATACAAGTCAAGACCATGCTTGAGAAGGTCTTCCCTGAGGAAACTTACCCAAATACCATTCTCCATAGTGACCAAGGTTGGCAATACCAACATGAAGTCTATCACCGCTTTCTTGCAAGTAAAGGCATACATCCTTCCATGTCTCGCAAAGGGACCAGCACGGATAATGGTATGA

SEQ ID NO: 2352 - protein, 160 aa, Streptococcus agalactiae
MERIPVQFKGCDDYYNENVGHPLSRINLEHYLTEGGVLYFVVYSKDVSPTVTYASLTPKVIKNVLPASDKKKRIKKKEDIFLLFWMAIIAKLLILPYPALQTSYKSRPCLRRSSLRKLTQIPFSIVTKVGNTNMKSITAFLQVKAYILPCLAKGPARIMV

SEQ ID NO: 2353 - protein, 1068 aa, Streptococcus agalactiae
GTGGTTGGTTGTCCTTGTGCCTTAGTAGTCTCAACTCCAGTTGCTGTGGTTACAGCAATAGGAAATGCAGCGAAAAATGGTGTATTAATTAAAGGTGGTATCCATTTAGAAGCAGCAGGACACTTAAAAGCGATAGCATTTGATAAAACAGGAACATTAACCAAAGGGATTCCAGCTGTAACAGACATTGTGACATATGGTAGAAATGAAAATGAATTAATAACCATAACATCAGCCATTGAAAAAGGATCGCAGCACCCTCTTGCTTCAGCGATTATGCGAAAAGCAGAAGAAAATGGATTAAAATTCAATGAAGTAACAGTAGAGGATTTTCAATCCATTACAGGTAAAGGCGTTAAAGCCAAAATAAATAATGAAATGTATTATGTGGGAAGTCAAAATCTTTTTGAGGAATTACACGGAAGCATTTCAAGCGATAAAAAAGAAAAAATTGCCGATATGCAAACTCAAGGTAAAACGGTGATGGTGTTAGGAACAGAAAAAGAAATTCTTTCGTTTATTGCCGTAGCCGATGAAATGAGGGAATCGTCTAAAGAAGTTATCGGCAAGTTGAACAATATGGGAATCGAAACAGTGATGCTAACAGGCGATAACCAAAGAACGGCAACAGCCATCGGAAAACAAGTTGGTGTTTCGGATATTAAAGCTGACTTACTTCCAGAAGATAAGCTTAATTTTATTAAAGAACTTCGAGAAAAACATCAAAGTGTGGGGATGGTCGGAGATGGCGTGAATGATGCTCCAGCCCTTGCGGCATCTACCGTTGGTGTAGCAATGGGTGGTGCTGGAACTGATACAGCTTTAGAAACGGCTGACATCGCCTTAATGTCTGATGATTTGAGTAAATTGCCATATACAATAAAATTAAGCCGTAAGGCTTTAGCAATCATCAAGCAAAACATTACCTTCTCTTTGGCGATTAAATTAGTGGCATTACTTTTGGTCATGCCCGGTTGGTTAACACTTTGGATAGCGATATTTGCTGATATGGGAGCAACTTTACTTGTAACATTAAACAGTTTACGCTTATTGAAAATCAAAGAATAG

SEQ ID NO: 2354 - protein, 355 aa, Streptococcus agalactiae
MVGCPCALVVSTPVAVVTAIGNAAKNGVLIKGGIHLEAAGHLKAIAFDKTGTLTKGIPAVTDIVTYGRNENELITITSAIEKGSQHPLASAIMRKAEENGLKFNEVTVEDFQSITGKGVKAKINNEMYYVGSQNLFEELHGSISSDKKEKIADMQTQGKTVMVLGTEKEILSFIAVADEMRESSKEVIGKLNNMGIETVMLTGDNQRTATAIGKQVGVSDIKADLLPEDKLNFIKELREKHQSVGMVGDGVNDAPALAASTVGVAMGGAGTDTALETADIALMSDDLSKLPYTIKLSRKALAIIKQNITFSLAIKLVALLLVMPGWLTLWIAIFADMGATLLVTLNSLRLLKIKE

SEQ ID NO: 2355 - protein, 1152 aa, Streptococcus agalactiae
ATGTCTAGAGGGAAAGCAAAACAGTCTGAAAAAGAAATGAAAGCCTATCGTGTTCAAGGATTTACTTGTACTAACTGTGCAGCCATTTTTGAAAATAATGTTAAAGAACTTCCCGGTGTTCAGGATGCGAAAGTAAATTTCGGAGCATCTAAAGTTTATGTTAAAGGGACGACAACCATTGAAGAATTAGAAAAAGCAGGAGCATTTGAAAATTTAAAAATTCGAGATGAAAAAGAACAAAGGGTAGGAGGAGAACCTTTTTGGAAGCAGAAAGAAAACATTAAGGTATATATATCAGCTCTTTTACTTGTAGTTAGCTGGTTCTTAGGAGAGCAGTATGGTGAAGAGCATGTTCTACCGACAATTGGTTATGCAGCGTCCATTTTAATCGGTGGATATTCGTTATTTATTAAAGGTCTCAAAAATTTCAGAAGATTAAATTTCGATATGAATACGCTTATGACTATTGCCATTATAGGAGCTGCAATTATTGGTGAATGGGGTGAAGGGGCAACCGTTGTTATCCTATTTGCGATTAGTGAAGCATTAGAGCGTTATTCAATGGATAAAGCACGTCAATCTATTGAATCTTTAATGGATATTGCCCCAAAAGAAGCGTTAATTCGACGAGGCAATGAAGAAATGATGATTCATGTTGATGAGATTCAAGTTGGAGACATCATGATAGTTAAGCCCGGTCAAAAGTTAGCAATGGATGGAATAGTGGTTAAAGGTACATCGACATTAAATCAGGCTGCGATTACAGGTGAAAGTGTTCCAGTAACGAAAATCACAAATGATGAAGTATTTGCAGGAACCTTGAATGAAGAAGGGTTACTTGAGGTTAAAGTAACAAAACGAGTTGAAGATACTACTCTTTCAAAAATCATTCACTTGGTAGAAGAAGCCCAAGCAGAACGGGCCCCCTCTCAAGCGTTTGTCGATAAATTTCAAAATACTATACACCAGCTATTGTCATACTAGCTCTTTAATTGCAGTAGTTCCACCATTATTTGGCGGAGACTGGAGCCAATGGATTTATCAAGGATTAGCTGTATTAGTGGTTGGTTGTCCTTGTGCCTTAGTAGTCTCAACTCCAGTTGCTGTGGTTACAGCAATAGGAAATGCAGCGAAAAATGGTGTATTAATTAA

SEQ ID NO: 2356 - protein, 385 aa, Streptococcus agalactiae
MSRGKAKQSEKEMKAYRVQGFTCTNCAAIFENNVKELPGVQDAKVNFGASKVYVKGTTTIEELEKAGAFENLKIRDEKEQRVGGEPFWKQKENIKVYISALLLVVSWFLGEQYGEEHVLPTIGYAASILIGGYSLFIKGLKNFRRLNFDMNTLMTIAIIGAAIIGEWGEGATVVILFAISEALERYSMDKARQSIESLMDIAPKEALIRRGNEEMMIHVDEIQVGDIMIVKPGQKLAMDGIVVKGTSTLNQAAITGESVPVTKITNDEVFAGTLNEEGLLEVKVTKRVEDTTLSKIIHLVRRSPSRTGPLLKRLSINLAKYYTPAIVILALFNCSSSTIIWRRLEPMDLSRISCISGWLSLCLSSLNSSCCGYSNRKCSEKWCIN

SEQ ID NO: 2357 - protein, 369 aa, Streptococcus agalactiae
ATGATTAAAAAAAATACTTGTGAAATTTATTGTTATGACGAAGAAAAGGTCAATCGAATACAAGGTAATTTACAGACAGTAGATATTTCTAGTGTTGCCCAAATGTTAAAAGCTATTGCAGATAAAAATAGAGCAAAAATTACCTATGCATTGTGTCAAGCTGACGAACTGTGTGTGTGTGATATTGCAAATATTATAGGTGTTACGGTTGCAAATACCTCTCATCACCTGCGAACGCTCCATAAGCAAGGGATTGTTAAGTTTCGAAAAGAGGGAAAACTTGCATTTTATTCCTTAGATGATGAGCATATCAGACAAATTATGATGATTGCATTGGCACATAAGAAAGAGGTGAAGATCAATGTCTAG

SEQ ID NO: 2358 - protein, 122 aa, Streptococcus agalactiae
MIKKNTCEIYCYDEEKVNRIQGNLQTVDISSVAQMLKAIADKNRAKITYALCQADELCVCDIANIIGVTVANTSHHLRTLHKQGIVKFRKEGKLAFYSLDDEHIRQIMMIALAHKKEVKINV

SEQ ID NO: 2359 - protein, 789 aa, Streptococcus agalactiae
ATGGGGTATTTTAAATCTATTGAACAATTTCTATTTTCCTATATCTCTTTACATACCATAGAAAAGGATTCTGTAAACCGTAAAATATTTGCAGGAGCTAAACCGTTAGATACACTCTCTGACAAACTCCTTAATGATAGTTCAAAAGTTAAAAATATAAATCTTAAATCTATTACAAGTTTTTTTGGAGATTTTAACAGTCAGAAATTCTATCCACGTAATATGGATTTACTTGCTGATGGTATTGATGACGAAACGTATTATTATATTGTTGAGTCATTGTCAACTTTTGTAGGATTAAGAAATGGCTATTTTCATAAGCATAATTTAAATGATTGGACAACAATTGAAGAAACTAGAAACCATGCATTGTTAATTTTTTATCTAGTACTAGGAGGGTATAGAATATCGGAGCAAGATAAACTAGATCTCGGTTTGATTAAAACTGTAGAAAGTGGCTACTTAAATCTATGTGAGTATATTCATAATAGAAAAATTGATAATATGCTTGAGATACCAATCTTTTATTTTGGGAGAGATCGTAACGAGTTTGATTTTTACATTTCGAATAAAGACCCTTTTATCACAAATGACAGTAATCAGGAGCCAATTTATTCTGGAGCATATTTTAAACGACTTGGAAACTCAAAAAGTTTGTTTAAGCTAACAGATAGTAATATCCCTGAGGAAATCTGGGAAGGAAAATTAATAATTGGTCGGCAGGGACCTAGTTTTAAACCATCTGGTCCTTTGGAAAAATATTCGAAGATGGTAAATTTTTCAAAATAG

SEQ ID NO: 2360 - protein, 262 aa, Streptococcus agalactiae
MGYFKSIEQFLFSYISLHTIEKDSVNRKIFAGAKPLDTLSDKLLNDSSKVKNINLKSITSFFGDFNSQKFYPRNMDLLADGIDDETYYYIVESLSTFVGLRNGYFHKHNLNDWTTIEETRNHALLIFYLVLGGYRISEQDKLDLGLIKTVESGYLNLCEYIHNRKIDNMLEIPIFYFGRDRNEFDFYISNKDPFITNDSNQEPIYSGAYFKRLGNSKSLFKLTDSNIPEEIWEGKLIIGRQGPSFKPSGPLEKYSKMVNFSK

SEQ ID NO: 2361 - protein, 597 aa, Streptococcus agalactiae
ATGTTAAATCAATATTTTCTGCATTTTGAAGAGAGTAAAATAGTTACTCCCTTATATGCTTTCGACATTGATTATCTGAATATTCCTAAATATGTCGGTCTATCAAAGGAGCAGATTCTGGAAAACTACCGCATCCTCCTGACCTATTTGAATATCCCATGGTTTCTCGCATTGGATATGCCGGATTTCCCTAGTTCGGCTAGTGGGCTTTTCCACTTTTTCGAGGTCAAGAAGCTTTTTATGCTGGACTACCTGATCTTGATCTTTTCTGGAATGGGCACGCTATGGTTTGTACGACATCTAAATAGGAGACGAGAATCTTGGCGGCTCCTACCCTACTTCCGCCAGGGAACCCTTATTCCCCTTGCTATCCTTTTGGCTCTCCTGGTTAGCTTCGACACGCTGTTTGTGCTTTTCCATAAAGTTTTCTTTAACAATGACGCCTGGCTCTTCAATGCCACTACTGATCCTATTATCTTAGCTTTACCTGCCGAGTTCTTTATGCACAGTTTCCTCTTGGCCTTTGGATTAATCGAAGTCTTCCTAATCCTGGGGTACTTCACTACTAAATATCGAATCTCTGCCCCAAGCCGTTGA

SEQ ID NO: 2362 - protein, 198 aa, Streptococcus agalactiae
MLNQYFLHFEESKIVTPLYAFDIDYLNIPKYVGLSKEQILENYRILLTYLNIPWFLALDMPDFPSSASGLFHFFEVKKLFMLDYLILIFSGMGTLWFVRHLNRRRESWRLLPYFRQGTLIPLAILLALLVSFDTLFVLFHKVFFNNDAWLFNATTDPIILALPAEFFMHSFLLAFGLIEVFLILGYFTTKYRISAPSR

SEQ ID NO: 2363 - protein, 1506 aa, Streptococcus agalactiae
GTSCSRAAAGATGCTCATGTTGTTTTAGAAGRCGATTCGATTGAGACTCGCCCTGKKTCTGAACTTCAGATTGGAGATGTTATCCGTGTTCAAGCAGGAGAAAATGTTCCAGCTGATGGTATCATTATCCGCGGAGAATCTCGTGTAAACGAAGCGCTTGTGACTGGGGAATCGAAACCAATTGAAAAAAAAACCGGAGATGAGGTCATCGGTGGATCAACCAATGGTGGCGGAGTCCTCTATGTGGAAATAAAGCAGACGGGCGATAAGTCCTTCATTTCTCAGGTTCAGACATTAATCAGCCAAGCGCAAAGCCAACCTTCTCGAGCAGAGAATGTGGCTCAAAAAGTAGCTAGCTGGTTGTTCTACATTGCGGTTGTAGTAGCTTTAATCGCCCTACTAATCTGGACGATCATTGCGGATCTGCCTACAGCCGTTATCTTTACTGTGACTGCGTTAGTTATTGCCTGCCCACATGCTTTGGGTCTTGCTATTCCCTTGGTAGTATCACGTAGTACTAGTTTGGGTGCAAGCCGAGGATTACTGGTTAAAAATAGAGAAGCTTTGGAATTAACTACTAAAGCGGATGTTATGGTATTGGATAAAACAGGTACTTTAACAACTGGTGAATTTAAAGTGTTGGACGTCACTGTTTTGAGTGATAAATATTCTGAAGAAGAAATTACAGGCTTGTTGGCGGGTATAGAGGCGGGCTCCAGTCACCCGATTGCCCAATCGATTGTGAACCACGCTGAAGCGAAAGGCATTAAGTCAGTTTCCTTTGACTCCATTGAAATCGTTTCGGGAGCAGGAATAGAAGGGGAGGCGAACGGCCACCACTATCAATTAATCAGCCAAAAGGCATACGGAAAAGCATTGCGTATGGATATTCCGAAAGGCGCTACTTTAAGTATCCTTGTAGAAAATAATGAAGCAATCGGCGCTGTCGCATTGGGAGATGAACTGAAAGAAACCAGCAGAAACTTGATCGAGGTGCTGAAAAAATACGGAATTGAACCACTCATGGCTACTGGTGATAACGAGGAAGCTGCACAAGGAGTTGCAGAAGTTCTAGGTATTCAATACCAAGCCAATCAATCTCCGGAAGATAAGTACAAGCTGGTCGAGTCCATGAAAAACCAAAACAAGACGGTTATCATGGTAGGAGACGGGGTCAATGACGCACCTTCCCTTGCCTTGGCAGACGTAGGTATTGCAATCGGAGCTGGAACGCAAGTAGCTTTGGATTCTGCGGATATTATCCTTACTCAGTCTGATCCAGGGGATATTGAATCCTTTATCGAGTTAGCAAACAAGACGACACGTAAAATGAAACAAAACTTGGTATGGGGAGCAGGCTACAATTTTATCGCGATTCCAATTGCTGCTGGCCTCCTTGCTCCTATCGGCATTACCTTGGGTCCGGCCTTCGGCGCCGTCCTCATGTCCTTATCGACCGTTATTGTTGCCATCAATGCTATGACATTGAAATTAGAGCCGAAATAA

SEQ ID NO: 2364 - protein, 502 aa, Streptococcus agalactiae
  VARIANT 2, 3, 20: Xaa = Any Amino Acid
VXXRCSCCFRRPIRLRLALXSELQIGDVIRVQAGENVPADGIIIRGESRVNEALVTGESKPIEKKTGDEVIGGSTNGGGVLYVEIKQTGDKSFISQVQTLISQAQSQPSRAENVAQKVASWLFYIAVVVALIALLIWTIIADLPTAVIFTVTALVIACPHALGLAIPLVVSRSTSLGASRGLLVKNREALELTTKADVMVLDKTGTLTTGEFKVLDVTVLSDKYSEEEITGLLAGIEAGSSHPIAQSIVNHAEAKGIKSVSFDSIEIVSGAGIEGEANGHHYQLISQKAYGKALRMDIPKGATLSILVENNEAIGAVALGDELKETSRNLIEVLKKYGIEPLMATGDNEEAAQGVAEVLGIQYQANQSPEDKYKLVESMKNQNKTVIMVGDGVNDAPSLALADVGIAIGAGTQVALDSADIILTQSDPGDIESFIELANKTTRKMKQNLVWGAGYNFIAIPIAAGLLAPIGITLGPAFGAVLMSLSTVIVAINAMTLKLEPK

SEQ ID NO: 2365 - protein, 535 aa, Streptococcus agalactiae
ATGAGAAATAACAAAAAACATTCGTCACATAGTCATCATAATCACGGCGACATTGATCACTCAAAACACGACCATAATGAAATGGAACATAGTCAGATGGATCACAGCAATATGGATCACAGTGAAATGGATCATGGCGCAATGGGAGGGCATGCCCACCACCATCACGGTAGCTTTAAGGAGATTTTCTTGAAGTCACTCCCATTAGGAATTGCAATCTTACTCATTACGCCTATGATGGATATTCAGTTGCCTTTCCAAATTATCTTTCCTTATGCAGACGTTGTAGCAGCTGTATTGGCAACAATTCTATACATTTTTGGCGGAAAACCATTCTACATGGGTGCGAAAGATGAGTTTAATTCAAAAGCTCCAGGCATGATGTCCTTGATTACTTTGGGAATAACGGTTTCTTATGCCTATAGTGTTTACGCAGTGGCCGCTCGTTATGTGACCGGAGAGCATGTCATGGACTTCTTCTTTGAGTTTACAACCTTAATTTTAATYMWKKTATTAGGACMCYKGATTGAAATGA

SEQ ID NO: 2366 - protein, 178 aa, Streptococcus agalactiae
  VARIANT 170, 171, 175: Xaa = Any Amino Acid
MRNNKKHSSHSHHNHGDIDHSKHDHNEMEHSQMDHSNMDHSEMDHGAMGGHAHHHHGSFKEIFLKSLPLGIAILLITPMMDIQLPFQIIFPYADVVAAVLATILYIFGGKPFYMGAKDEFNSKAPGMMSLITLGITVSYAYSVYAVAARYVTGEHVMDFFFEFTTLILIXXIRTXELK

SEQ ID NO: 2367 - protein, 207 aa, Streptococcus agalactiae
ATGAAACAAGAAATCTTATTAGATGGCGTAAAATGTGCAGGTTGTGCGAACACGGTACAAGAAAGATTTTCAGCTATTGAAGGGGTTGAATCTGTAGAGGTTGATTTAGCGACTAAAAAAGCAGTACTTGAAAGTCAAACAGAGATTGATACCGAAACGCTCAATGCTGCTTTAGCAGAAACTAACTATTCAGTATTAAGTGCATAA

SEQ ID NO: 2368 - protein, 68 aa, Streptococcus agalactiae
MKQEILLDGVKCAGCANTVQERFSAIEGVESVEVDLATKKAVLESQTEIDTETLNAALAETNYSVLSA

SEQ ID NO: 2369 - protein, 384 aa, Streptococcus agalactiae
GTGGGTATAGACAGTGTATTAAGTGAAGTATTACCTGAAGATAAAGCAGAGGAAGTCAAAAAACTACAAGAGGCAGGCAAGAAGGTAGCGATGGTTGGAGACGGCATTAACGATGCACCCGCATTAGCTCAAGCAAATGTCGGAATTGCAGTTGGATCAGGTACAGACGTGGCGATTGAATCGGCTGATATTGTCCTTATGCGTAATGATTTAACCGCTGTATTGACTACGATTGATTTAAGTCATGCAACGCTACGAAACATTAAACAAAACTTGTTCTGGGCTTTTGCTTACAACCTTGTAGGTATTCCAGTTGCGATGGGTCTTTTGTATATTTTTGGCGGACTATTGATGAGTCCAATGTTGGCGGGGCAGTCGCCGTGA

SEQ ID NO: 2370 - protein, 127 aa, Streptococcus agalactiae
MGIDSVLSEVLPEDKAEEVKKLQEAGKKVAMVGDGINDAPALAQANVGIAVGSGTDVAIESADIVLMRNDLTAVLTTIDLSHATLRNIKQNLFWAFAYNLVGIPVAMGLLYIFGGLLMSPMLAGQSP

SEQ ID NO: 2371 - protein, 317 aa, Streptococcus agalactiae
ATGAGCACAATAGAACTTAATACTTCTATCACAGATGCTGAATGGGAAGTAATGCGTGTAGTTTGGGCAAATGATTTAGTAACTAGTAAAACAGTCATCTCTGTATTGAAAGAAAAAATGGACTGGACAGAATCCACTATCAAAACGATCTTAGGTCGATTAGTTGAAAAAGGCGTACTAAATACAGAGCAAGAAGGTAGAAAGTTTATTTACACTGCCAATATTGTAGAGAAAGAAGCCGTAAGGGATTTTGCAGAAGATATTTTTAACCGTATTTGCAAAAAGAAAGTCGGAAATGTAATAGGAAGCATCATTGA

SEQ ID NO: 2372 - protein, 105 aa, Streptococcus agalactiae
MSTIELNTSITDAEWEVMRVVWANDLVTSKTVISVLKEKMDWTESTIKTILGRLVEKGVLNTEQEGRKFIYTANIVEKEAVRDFAEDIFKPYLQKESRKCNRKHH

SEQ ID NO: 2373 - protein, 374 aa, Streptococcus agalactiae
ATGGGACAGACAATCATATCTGCTATTGGTGTTTATATTTCCACCAGTATCGATTATTTAATTGTTTTAATTATTTTATTTGCACAGCTATCACAGAATAAACAGAAATGGCATATTTATGCGGGGCAGTATCTAGGCACTGGCTTACTTGTAGGGGCGAGTTTAGTTGCTGCTTATGTCGTCAATTTCGTGCCTGAAGCATGGATGGTTGGATTGCTTGGTTTAATCCCTATCTATTTAGGGATTCGCTTTGCAATTGTTGGAGAAGGTGAGGAAGAAGAAGAGGAAGAAATTATTGAAAGATTAGAACAAAGCAAGGCAAATCAACTGTTTTGGACAGTAACATTGCTGACAATTGCATCTGGCGGRGATAA

SEQ ID NO: 2374 - protein, 124 aa, Streptococcus agalactiae
MGQTIISAIGVYISTSIDYLIVLIILFAQLSQNKQKWHIYAGQYLGTGLLVGASLVAAYVVNFVPEAWMVGLLGLIPIYLGIRFAIVGEGEEEEEEEIIERLEQSKANQLFWTVTLLTIASGGR

SEQ ID NO: 2375 - protein, 459 aa, Streptococcus agalactiae
GTGAACCACTTACTTAACCTCAGTAAAGAAAATATAGCTAAAATAGATTTTGACTTTCTTAATGAGGCACTTAATGCAAATATTCGTTTGAAAGAATTAGTAGATGAACTAAAAATTTCAAAAGAACTGGACAGTAAAGGTTGGTCCAAAAAAGACTCTCGAACGATAAAAATCTTGTACGATGGCCTTATCAATAAACATATAGTTTCCCTAGATCGTGCAGATTATAACATTATCCAAGTCATTCCATTTGCTAATGTACATGTACTACTGTTTTTAATACCAGAAAGGGAGAATTCTAAAAATTATAGAATATACAACTACAGTGATTATGAAATGGAGTTAATCAATGAGGATAGGCAACAATTTTCAAAATATGAAACAGTTGATTTAGACCAATTGATACTTGTTGATATTTTTAATATTGATGACTACATTTCATCATATTTAACAATATAG

SEQ ID NO: 2376 - protein, 152 aa, Streptococcus agalactiae
MNHLLNLSKENIAKIDFDFLNEALNANIRLKELVDELKISKELDSKGWSKKDSRTIKILYDGLINKHIVSLDRADYNIIQVIPFANVHVLLFLIPERENSKNYRIYNYSDYEMELINEDRQQFSKYETVDLDQLILVDIFNIDDYISSYLTI

SEQ ID NO: 2377 - protein, 693 aa, Streptococcus agalactiae
ATGTTTTCTGGTAAACGATTAAAGAAAAGACGAATAACACTTGGCTATTCTCAATCTGAACTAGCAGATAAACTTCATATAAACCGCTCTTCTTATTTCAATTGGGAAAATGAAAAGACTAAACCAAACCAAAGCAATCTCAAACAACTAGCTATCCTATTAGATGTTCCTGAAACATATTTCGAGTCAGAATATAAAATAGTCAATACTTATCTTCAGCTTTCTTTACAGAATCAGGAAAAGGTAGAGAAATATGCTGAGGAATTACTTCAAACTCAAAAGGTTCATGAAAAGATTGTTCCACTGTTTGCTGTGGAAGTTCTATCAGAAATTCAACTATCTGCTGGTCCAGGTGAAGGTCTGTACGATGAATTTGAAACTGAGACTGTCTATTCAGAAGATGAATACACAGGATTCGATATAGCAACATGGATTTCTGGTAATTCTATGGAACCTGTTTATAAAGACGGTGAAGTCGCTTTAATTAGATCGACTGGTTTTGATTACGATGGAGCTGTCTATGCCTTGAATTGGAATGGATCGCTCTATATCAAGAAACTCTATCGTGAAGAAGATGGATTCCGAATGGTGTCAATTAACCCAGATGTTGCTGAAAGGTTTATCCCATTTGAAGATGAAATCAGAATTGTTGGTAAAATTGTAGGCCACTTCATGCCTGTGATTGGAGGTTAG

SEQ ID NO: 2378 - protein, 230 aa, Streptococcus agalactiae
MFSGKRLKKRRITLGYSQSELADKLHINRSSYFNWENEKTKPNQSNLKQLAILLDVPETYFESEYKIVNTYLQLSLQNQEKVEKYAEELLQTQKVHEKIVPLFAVEVLSEIQLSAGPGEGLYDEFETETVYSEDEYTGFDIATWISGNSMEPVYKDGEVALIRSTGFDYDGAVYALNWNGSLYIKKLYREEDGFRMVSINPDVAERFIPFEDEIRIVGKIVGHFMPVIGG

SEQ ID NO: 2379 - protein, 135 aa, Streptococcus agalactiae
ATGTCAAGACAGTTTGACGACATTATATTTATTAAAGCAAATAGAATTATTTTATTACTCGACCAAAAAGAATATGATGTAACTAACCATTTAACTGAATTGGTTGATGAATTAGCAAAATTGAAATCTAGGTGA

SEQ ID NO: 2380 - protein, 44 aa, Streptococcus agalactiae
MSRQFDDIIFIKANRIILLLDQKEYDVTNHLTELVDELAKLKSR

SEQ ID NO: 2381 - protein, 1416 aa, Streptococcus agalactiae
ATGGGCTATGTCGACTACTCAAAAGAACCTCGTAGCGATATTGCTTTTGTCGATATGAAATCCTTCTATGCATCTATCGAATGTGTAGAGAGAGGACTTCACCCGCTTCATACTTCACTTTGTGTGATGAGTAGGGCAGATAATTCAGCTGGTCTAATTCTAGCTTCTTCTCCAATGTTCAAAAAAGTCTTTGGTAAAGGAAATGTTGGCAGAGCCTACGACCTCCCCTTTGATGTTCATACCAGAAAATTTAACTACTACCGTGCTAAAATTTCAGGATTGCCAACGGATGCAAAATTTGTTTCCTTCATAGAAAATTGGGCCAAGCGTACATTTATTGTGCCACCGAGAATGGACTTGTACATTCAAAAAAATCTTGAAATACAAAAAGTATTTCAAAATTATGCAGATCCGACAGATATTCTGCCCTATTCTATTGATGAAGGATTTATTGACTTAACTTCATCGCTAAATTATTTTGTTGAAGACAAATCTCTGAGTCGCAAAGATAAGTTAGATGTGGTTTCAGCAAAAATTCAACACGATATTTGGGAAAAAACGGGTGTCTATTCAACTGTTGGAATGAGTAATGCCAATCCACTTCTAGCTAAGTTAGCACTTGATAACGAAGCTAAAACCACTGCTACCATGCGTGCCAATTGGTCTTATGAAGATGTTGAAACGAAGGTCTGGAATATTCCCAAAATGACTGACTTTTGGGGAATAGGTTCACGAACAGAAAAACGACTAAACAAATTGGGAATCTACAGCATTAAAGAATTGGCCAACTGTGACCCTACTATCTTGAAAAAAGAATTTGGTGTTATTGGAGTACAACATTGGTTTCATGCTAATGGCATCGATGAAAGTAATGTCCATGAACCTTATCGCCCTAAAGCAGTCGGGATTGGGAATTCGCAAGTGCTCCATAAAGATTACACTCGTCAAAGTGATATAGAGCTTGTCCTGCGTGAGATGGCAGAGCAAGTTGCGATTCGGCTACGCAGAAGACATAAAAAAGCAACTGTAGTCGCCATAAATGTAGGCTATTCAAATTTCGAAAACAAGAAATCAATCAATGTTCAGAGAAAAATTAACCCAAATAATCGTACGCTTGTTTTTCAAGATGAAGTTGTTTCTCTCTTTCGTTCTAAATACGATGGAGGGGCAGTTAGAAGCATTGCTGTAAGGTACGATGGATTGGTGGATGAAAACTTTGCTGTGATTTCTCTTTTTGATGACTTTGAAGAAAGCGAAAAAGAGGAAAAATTGGAGACAACCATTGATTCCATTCGTGATCGTTTTGGATTTCTTGCTGTACAGAAAGCTAGTTCTTTATTAGAAAATTCAAGGGCAATTGCTCGCAGTAGATTAGTCGGCGGACATTCCGCTGGAGGATTGGAGGGTTTAAAATGA

SEQ ID NO: 2382 - protein, 471 aa, Streptococcus agalactiae
MGYVDYSKEPRSDIAFVDMKSFYASIECVERGLHPLHTSLCVMSRADNSAGLILASSPMFKKVFGKGNVGRAYDLPFDVHTRKFNYYRAKISGLPTDAKFVSFIENWAKRTFIVPPRMDLYIQKNLEIQKVFQNYADPTDILPYSIDEGFIDLTSSLNYFVEDKSLSRKDKLDVVSAKIQHDIWEKTGVYSTVGMSNANPLLAKLALDNEAKTTATMRANWSYEDVETKVWNIPKMTDFWGIGSRTEKRLNKLGIYSIKELANCDPTILKKEFGVIGVQHWFHANGIDESNVHEPYRPKAVGIGNSQVLHKDYTRQSDIELVLREMAEQVAIRLRRRHKKATVVAINVGYSNFENKKSINVQRKINPNNRTLVFQDEVVSLFRSKYDGGAVRSIAVRYDGLVDENFAVISLFDDFEESEKEEKLETTIDSIRDRFGFLAVQKASSLLENSRAIARSRLVGGHSAGGLEGLK

SEQ ID NO: 2383 - protein, 351 aa, Streptococcus agalactiae
ATGATTGATAGAAGTTATCTCCCATTTAAGGTTGCTAGAGAATACCAAGACCGAAAGATGGCCAAATGGATGGGCTTCTTCTTATCAGAACATACGGCAGGACTTGATAGTGAGCTTAATAAAGTTGACTATACTTCTGAGTTATCAATTTCAGATAAACTACTGCTGCTCAATCAATTATACAGTAATCAGTTGAATGGTATCATTGCAGTTCCTGGACAATATTACACTGGAAAAGTTGACAATCTGACTTTTAACCATGTTTCATTGAAGACAAAAACGGGCTTTGTCAGCATTCCAATCAAGGATATTCTTTCAATTGATTTGGAGGTGGAATATGAATCAGCTTGA

SEQ ID NO: 2384 - protein, 116 aa, Streptococcus agalactiae
MIDRSYLPFKVAREYQDRKMAKWMGFFLSEHTAGLDSELNKVDYTSELSISDKLLLLNQLYSNQLNGIIAVPGQYYTGKVDNLTFNHVSLKTKTGFVSIPIKDILSIDLEVEYESA

SEQ ID NO: 2385 - protein, 390 aa, Streptococcus agalactiae
ATGAGTAAAACATGGAATTTTGATCAGCCACTAGACGATGTGAAACCAACATCGTCCCATGAAGAACGAGCTAAAATCGCAGCACTTTTTCATAAACAGGATGAAAAACCAATTGAAGAAGTAGATTATGTGGCTGCTTTTGAACAGCAACAAAAGGAGTCAGAATCAAAAGATGTACAAACGCTCGCATCAACCGTTAAACAAAATCAGCCGAAGAAGGTAAATATCACAAGTGACTATAAACAACACTTGGCTGATACCATTGCACAAAACAACAAGGATATTTCCGCCTGTCAGAAGCAAATTGAAGAACTTCATCAATTGATTGATGAAAAGAAAATCCAAAATAAAAAGTTGCAGGCTATTTCAGTAGCCATTGATGATTTATAA

SEQ ID NO: 2386 - protein, 129 aa, Streptococcus agalactiae
MSKTWNFDQPLDDVKPTSSHEERAKIAALFHKQDEKPIEEVDYVAAFEQQQKESESKDVQTLASTVKQNQPKKVNITSDYKQHLADTIAQNNKDISACQKQIEELHQLIDEKKIQNKKLQAISVAIDDL

SEQ ID NO: 2387 - protein, 228 aa, Streptococcus agalactiae
ATGAGTGTGATTGAACGTCTGGCTGAAAAAGTAGCTAGGCAAGAAGAAAAGGTCTCACGTGAGACTGAGAAATTGGAACACTATCGAGACCAACTACAAACTGCAATGTATAGCACCTTTATCAAACGACAACAATCAAGTCAGTTGTCATTTCATGAAGCACTAGAGCAAGCCTTTGGTAAAGAAACCACACTACACCCAAATTACAGAAATGAGGATACAGAATGA

SEQ ID NO: 2388 - protein, 75 aa, Streptococcus agalactiae
MSVIERLAEKVARQEEKVSRETEKLEHYRDQLQTAMYSTFIKRQQSSQLSFHEALEQAFGKETTLHPNYRNEDTE

SEQ ID NO: 2389 - protein, 642 aa, Streptococcus agalactiae
ATGGAATGNNNNNATAATGGGACCTTACAGGCCGCAAGCCTTCAAGGTCTCGTCAAAAATGAAGAAAAATACGATCGAGGTTATCTCAAAAAAATCATGAAAGGATCTCATGGCCATGTCGGTATTAGTTTCGATATTGGGAATCCTAAGCGACTCATTTTTTGTGAATCAGTTATCGATATGATGAGTTATTATCAACTTCACCAAAAGCAGCTATCAGATGTTCGCCTGATTTCAATGGAAGGCCTAAAACTTTCAGTGATTGCTTATCAGACTTTGCGTCTAGCAGCAGAGGAACAGGGGAAATTGGCATTTCTAGATACAGTAAAACCAATTAGACTTAGCCATTATCTTCAGGCAATACAAGAGACGACAACCTTTTTTCAAACTCATTCAAACGTCATAACTATGGCTGTTGATAACGATGAAGCAGGAAGAGAATTTTATCAGAAACTGTCAGATAAAGGATTTCCGATTTTTCAAGATTTACCACCATTGCAAAGACTTGAAACAAAGTCAGATTGGAATGATATTGTGAAACGACAAAAGGAATTATCTTTAAGAGATCTTATCCAGTCAGCCCAAGCACAAGTCAATAAGAATCATCCTCCACCTAAACGAGAGCACGCTTTGGAATTGTGA

SEQ ID NO: 2390 - protein, 213 aa, Streptococcus agalactiae
  VARIANT 3, 4, 5: Xaa = Any Amino Acid
MEXXXNGTLQAASLQGLVKNEEKYDRGYLKKIMKGSHGHVGISFDIGNPKRLIFCESVIDMMSYYQLHQKQLSDVRLISMEGLKLSVIAYQTLRLAAEEQGKLAFLDTVKPIRLSHYLQAIQETTTFFQTHSNVITMAVDNDEAGREFYQKLSDKGFPIFQDLPPLQRLETKSDWNDIVKRQKELSLRDLIQSAQAQVNKNHPPPKREHALEL

SEQ ID NO: 2391 - protein, 6837 aa, Streptococcus agalactiae
ATGAATCAAGAAGTCTTACTACAAATGATGAGAGCCACTATTCCTCGTGATAGAGCCTTGCTTGAGGCATTTTTATATTACCAAGCAGAGCATTTTGATGAGGAGTGGGATAGTCTTATTCATCAGTTTATGACCAATAGGCAAGAAATAAATAAGTCTGTTCAAGTACTTCACTTTGAGACAGATGTTTCAGCTTTTGTCCAGGCTAGTCCTTATGATACTGCTCATGATCTATTGACCTATACACAAGTTTTCGGCCAAAGTGGTCTTCAAAAACTAGATAAACTATCGCCGTCTGAAAAAAACTTGGTGATAGAAGTGGCCTTGTTCAATCTGGCCACTCGTTTTCAATTATTGGATTCCAATGGACACTACCAAACCATATCGCCGGATTCACTCTTACAAAAGAGTAGGGGAGCTAATTTGGTCAATGTGTATCGTGTGGCTAATAATTTAGCGGATCGTATTAGTCGAGATATTGAACAGTTTCTCTTAACTTACGAGCCTGAGCTTGAAACTAGAGCTGATGAAACTGTTCTAGAAAATGAAGAAACTGTTGATGAGCACAAAACAAGTGTTCATCAAGCAATATCTTTTCGAGAAGAGGGCTCTCTGGTTATTGCTAGTTTGGATGTAGATTTGTCTCAACTAGATGTTCAAATAGGAAAAACCAGTCATCTGCCAGCTTATGAAGAGTTATCCTTACGACGTAAATTTGAGATTCTAACATATTTTGACCAAATTCGAAATGAACGTTCCAAAGTCCCAAGTTTTAGACGAGGTGATTTTGACACAGAGATGGAAATGACACCAGTCTTTGATGGCGAGGAATTACTTACTTATCTCGAAGCTGATGGCAGTCCCTATGAGCTGAAACGAACGCTGACTACAGTCGAAGAAAAGGAATTAGAAAAAATTGGACAAGCCATTAGGATAGAAAATCAAGAAAAATTGACTCAGCTAGGGATTGATTTATCTCAGTTTGACCCAGACCGAGTCGGTATTTTATTGGATGCAGCAGGTCGTTTTCGTTTAAAAAATGCAGACCTTGCTTTACTAGGTGGTTATCCCAAAGCCTCGGTAACTCAACTAGCCCTTGCGACAGAACTACTCCAAATGGGACTAAGTCATGAAAAGGTTGAATTTTTCTTTGGTAGCCAGCTTTCCATTGAAGAGCTGCGACAAGTTGCCTACGCCTTTTTACACCAAGAACTCAGCAGAGAAGATGCGGAGCAATTTGAAAAAGATAAAGGTAATCAGCCAGATTTAACTCTCAGAGATTGGAAAAGCAAGCTAGAGAAAGCTGAGGGAAAAGAAGTAGTTGATGAAGAATTCGCGGAAAATCCACTGGTTCAGAGAGTATTGGACACTTATCCTCTGGGGTCATTGGTTTCCTATAAGGGACAGGACTTTGAGGTCATGTCGGTCAGCGATGCTCGATTGAACGGTTTGATTCGGATTGAGTTAGTCAATGACTTTTCGGATATCATTGAACAAAATCCAGTTCTTTATGTGAGGACCTGGGAAGAAGTCAGTCAGGCACTTCATCAGCCAAAGGCAGAACCACAAACAGAGTTAGAAGAAGCGGACCAAGAATTAAACCTATTCTCATTTCTGGAAGAGGAGCCAGTTCAGAGTATTGGACTATTGGAACCAGATGATTCAGAAAATGGTCATAACGATACTGATCTTGAAGAAACAGATAATCAAATTCCTGAAGAGGAAGTCGTCGAAACAATTCCAGAGATTCCAGTAACGGACTTTTATTTTCCAGAAGATTTGACGGACTTTTATCCTAAGACTGCTAGAGATAAGGTTGAGACAAACATTGTGGCCATTCGTTTGGTAAAAAATCTAGAAGTAGAGCACCGCAATGCTTCACCAAGTGAACAAGAACTCCTTGCCAAGTATGTAGGCTGGGGTGGACTAGCCAATGAATTTTTTGATGACTATAATCCAAAATTTTCTAAGGAACGAGAAGAACTGAAGAGCCTAGTCACAGATAAAGAGTATTCGGATATGAAACAGTCCTCCCTGACAGCCTATTACACAGACCCATCCCTGATCCGTCAGATGTGGGATAAGTTGGAAAGAGATGGCTTTACAGGTGGCAAAATCCTAGATCCTTCCATGGGAACAGGGAATTTCTTTGCGGCTATGCCAAAACACTTAAGAGAAAAGAGTGAGTTGTATGGCGTAGAGTTAGATACTATTACAGGAGCTATTGCCAAACACCTTCATCCCAATAGTCATATTGAAATTAAGGGATTTGAGACGGTGGCTTTTAACGACAATAGTTTTGATTTGGTGATTTCAAATGTGCCCTTTGCCAATATACGAATTGCGGATAATAGGTACGATAGGCCTTACATGATTCATGACTACTTTGTCAAAAAGTCACTTGATTTGCTTCATGATGGTGGACAAGTAGCGATTATCTCTTCCACAGGAACTATGGATAAGCGAACAGAAAACATCTTACAAGATATTCGTGAGACAACTGAATTTCTTGGTGGGGTTCGACTGCCTGACTCTGCCTTTAAGGCCATTGCAGGAACGAGTGTCACAACGGATATGTTATTCTTCCAGAAACACTTAGACAAGGGATATGTGGCAGACGATTTAGCCTTTTCAGGTTCCATTCGCTATGACAAGGATAGTCGCATTTGGCTCAATCCTTATTTTGATGGAGAATACAATAGCCAGGTGCTAGGAACCTACGAGGTCAGGAATTTTAACGGAGGAACACTTTCTGTTAAGGGGACTAGTGATGACTTGATTGCAAGTGTTGAAACAGCTCTAAATCACGTTAAGGCCCCAAGAGAGATTGATAGAAATGAGGTCATCATTAACCCAGATGTGTTGACCAAACAAGTCAATGATACCTCCATTCCAGCTGAAATGAGGGAAAATCTAGGTCAGTACAGTTTTGGTTATCAGGGGTCTACAGTTTACTATCGAGATAACAAAGGCATTCGAGTCGGAACCAAGACGGAAGAAATCAGTTACTATGTCGATGAAGAGGGCAACTTCAAAGCATGGGACACCAAACATTCTCAAAAGCAGATTGATCGCTTTAATGCCTTAGAAGTGACTGATAACACTGCTCTGGATGTCTATGTGACCGATGATGCAGCCAAACGTGGTCAGTTTAAGGGGTATTATAAAAAGACAGTTTTCTATGAAGCTCCATTGTCTTATAAAGAAGTGGCACGTATCAAAGGAATGGTCGATATTCGCAATGCCTACCAAGAAGTTATTGCCATTCAACGCTATTATGACTATGATAAGGAGACCTTTAACCACTTGTTAGGCAAACTTAATCGTACCTATGATAGCTTTGTCAAACACTATGGGTATTTGAATAGTGCTGTGAACCGCAATCTTTTTGATAGTGATGATAAGTATTCGCTTCTTGCTAGTTTGGAAGATGAAAGTCTGGATCCAAGTGGAAAGTCTGTTATCTATACTAAATCCCTTGCCTTTGAGAAGGCTCTAGTGCGTCCTGAAAAAGAGGTTAAAAAGGTGCATACTGCCCTTGATGCCTTAAATTCGAGCTTGGCTGACGGACGAGGTGTTGATTTCGCTTATATGATGTCTATCTATCAGGTTGAATCGCAGATGACCTTGATTGAGGAGTTAGGCGACCTCATTATGCCTGATCCTGAGAAGTATTTGAATGGAGAATTGACCTATGTTTCTCGCCAAGACTTTCTTTCAGGGGATGTCGTCACTAAGTTAGAAGTGGTAGATCTATTCGTCAAACAAGACAATCAGGACTTTAACTGGTCACATTATGCGGGACTTCTAGAAGCTATCAAACCAGCCCGTATTACTTTGGCAGACATTGATTATCGAATCGGTTCACGCTGGATTCCTCTGGCTGTTTATGGAAAATTTGCCCAAGAAACCTTTATGGGGAAAGCCTATGAACTGTCAGACCAAGAAGTAGCGACAGTCCTAGAAGTCAGTCCCATTGACGGGGTTATCACTTACCAATCTAAGTTTGCCTACACCTATTCCAACGCAACGGATAGGAGTTTAGGTGTCCCTGCTTCACGCTATGATAGTGGTCGAAAAATCTTTGAAAATCTCCTGAATTCCAATCAACCAACCATCACAAAACAAGTTGTCGAAGGGGATAAGAAAAAGAATGTGACGGATGTAGAGAAAACAACGGTCCTGCGTGCCAAGGAAACACACCTACAAGAACTCTTTCAAGGTTTTGTAGCAAAGTATCCAGAAGTCCAACAAATGATTGAAGACACCTATAATAGGCTCTACAATCGTACGGTATCAAAGTCCTATGATGGTAGTCATTTAACCATTGATGGACTTGCTCAGAATATCTCCTTACGTCCTCACCAAAAGAATGCCATTCAACGAATTGTCGAGGAAAAACGTGCTCTACTAGCTCATGAAGTTGGTTCAGGTAAAACACTTACCATGCTTGGGGCAGGATTCAAACTGAAAGAACTCGGAATGGTACATAAACCACTTTATGTGGTGCCGTCTAGTCTGACTGCTCAGTTTGGTCAAGAAATCATGAAATTTTTCCCTACCAAGAAAGTCTATGTGACTACTAAGAAAGACTTTGCCAAAGCCAAACGCAAGCAGTTTGTGTCCCGTATTATTACAGGGGACTATGATGCCATTGTCATTGGGGATTCACAATTTGAGAAGATACCGATGAGTCGTGAAAAACAGGTCACCTATATCAATGACAAACTTGAGCAACTCCGAGAAATCAAGCTAGGAAGTGACAGTGATTACACGGTGAAAGAAGCGGAACGTTCGATTAAGGGATTAGAACACCAGTTGGAAGAACTCCAAAAACTAGAGCGAGATACCTTTATTGAGTTTGAAAACCTTGGAATTGATTTTCTTTTTGTGGATGAGGCTCATCACTTCAAGAATATCCGTCCAATCACTGGACTTGGGAATGTAGCTGGAATCACCAACACAACTTCTAAAAAGAACGTGGATATGGAGATGAAGGTGAGACAAGTACAGGCAGAGCATGGAGATAGAAATGTCGTTTTTGCGACAGGAACACCAGTTTCTAACTCTATTAGTGAACTTTTCACCATGATGGATTACATTCAACCTGATGTCTTGGAACGATACCTGGTATCAAATTTTGACTCCTGGGTTGGGGCTTTTGGGAATATCGAAAACTCCATGGAACTAGCCCCGACAGGAGATAAGTACCAACCCAAGAAACGGTTCAAGAAATTTGTCAACCTTCCTGAACTCATGCGAATCTACAAGGAAACTGCCGATATTCAGACCTCAGACATGCTTGATTTACCAGTACCGGAAGCTAAGATTATTGCGGTGGAAAGCGAGTTAACGCAAGCTCAGAAATACTATTTGGAAGAGCTGGTAAAGCGTTCAGACGCTATCAAGTCAGGTAGTGTTGATCCAAGTAGAGATAACATGCTTAAAATCACAGGAGAAGCCAGAAAACTAGCTATTGATATGCGGTTGATTGACCCTACTTACTCCTTATCGGATAATCAGAAAATCCTTCAAGTAGTCGATAATGTCGAGCGGATTTACCGTGATGGAGCTGGAGACAAAGCCACTCAGATGATTTTCTCAGATATTGGAACCCCTAAAAGTAAGGAAGAAGGGTTTGATGTCTACAATGAACTTAAGGACTTGTTTGTCGATCGAGGGATACCAAAAGAAGAAATTGCCTTTGTCCATGATGCCAATACTGATGAGAAGAAAAACTCTCTGTCACGCAAGGTCAATAGTGGAGAAGTACGGATTCTCATGGCTTCTACGGAAAAAGGGGGAACAGGATTAAACGTCCAATCTCGCATGAAAGCTGTCCACCATTTAGACGTTCCCTGGAGGCCCTCAGACATTGTCCAGCGAAATGGACGACTAATTCGACAAGGAAACATGCACCAGGAGGTAGATATTTATCACTATATTACTAAAGGGAGCTTTGACAATTACCTCTGGCAGACGCAGGAGAATAAGCTAAAGTATATCACCCAGATAATGACCTCAAAAGATCCTGTGAGATCAGCTGAAGACATTGATGAACAAACCATGACCGCCTCAGACTTTAAGGCATTGGCAACTGGGAACCCTTATCTCAAACTCAAAATGGAGTTGGAAAATGAACTGACAGTTTTAGAGAATCAAAAACGAGCCTTTAATCGCTCCAAAGACGAGTATCGCCATACCATTTCCTATAGCGAGAAGCACCTCCCTATTATGGAAAAACGGTTGAGTCAATATGATAAAGATATTGCCCAATCTTTGGCAACCAAGTCGCAAGATTTTGTCATGCGATTTGACAATCAAGCAATGGATAATCGTGCTGAAGCTGGGGACTATCTGCGAAAACTCATTACCTATAACCGCTCAGAGACCAAGGAAGTCAGGACACTTGCCAGCTTTAGAGGATTTGATTTAAAAATGACTACACGAGGTGCTAGTGAGCCCTTACCAGAAACCATTTCTTTAATGATTGTAGGTGATAACCAGTATACTGTCGCCCTTGATTTGAAATCAGACGTGGGAACCATTCAACGGATTAGTAATGCCATTGACCATATTATAGATGACCAAGAAAAGACGCAAGAGCTGGTAAAGGATTTAAAAGATAAGCTACGAGTAGCCAAAGTAGAAGTTGATAAAGTCTTTCCAAAGGAAGAGGACTATCAGCTTGTAAAGGCTAAGTATGATGTTTTAGCTCCCTTGGTTGAAAAAGAAGCAGAGATTGAAGAGATAGATGCAGCTTTGGCCAAGTTTAGTGAAGATACAACACCCCAAAAGAAGCAACAAATAGCACNNNNNCATTCATTCATTAATTAA

SEQ ID NO: 2392 - protein, 2278 aa, Streptococcus agalactiae
  VARIANT 2272, 2273: Xaa = Any Amino Acid
MNQEVLLQMMRATIPRDRALLEAFLYYQAEHFDEEWDSLIHQFMTNRQEINKSVQVLHFETDVSAFVQASPYDTAHDLLTYTQVFGQSGLQKLDKLSPSEKNLVIEVALFNLATRFQLLDSNGHYQTISPDSLLQKSRGANLVNVYRVANNLADRISRDIEQFLLTYEPELETRADETVLENEETVDEHKTSVHQAISFREEGSLVIASLDVDLSQLDVQIGKTSHLPAYEELSLRRKFEILTYFDQIRNERSKVPSFRRGDFDTEMEMTPVFDGEELLTYLEADGSPYELKRTLTTVEEKELEKIGQAIRIENQEKLTQLGIDLSQFDPDRVGILLDAAGRFRLKNADLALLGGYPKASVTQLALATELLQMGLSHEKVEFFFGSQLSIEELRQVAYAFLHQELSREDAEQFEKDKGNQPDLTLRDWKSKLEKAEGKEVVDEEFAENPLVQRVLDTYPLGSLVSYKGQDFEVMSVSDARLNGLIRIELVNDFSDIIEQNPVLYVRTWEEVSQALHQPKAEPQTELEEADQELNLFSFLEEEPVQSIGLLEPDDSENGHNDTDLEETDNQIPEEEVVETIPEIPVTDFYFPEDLTDFYPKTARDKVETNIVAIRLVKNLEVEHRNASPSEQELLAKYVGWGGLANEFFDDYNPKFSKEREELKSLVTDKEYSDMKQSSLTAYYTDPSLIRQMWDKLERDGFTGGKILDPSMGTGNFFAAMPKHLREKSELYGVELDTITGAIAKHLHPNSHIEIKGFETVAFNDNSFDLVISNVPFANIRIADNRYDRPYMIHDYFVKKSLDLLHDGGQVAIISSTGTMDKRTENILQDIRETTEFLGGVRLPDSAFKAIAGTSVTTDMLFFQKHLDKGYVADDLAFSGSIRYDKDSRIWLNPYFDGEYNSQVLGTYEVRNFNGGTLSVKGTSDDLIASVETALNHVKAPREIDRNEVIINPDVLTKQVNDTSIPAEMRENLGQYSFGYQGSTVYYRDNKGIRVGTKTEEISYYVDEEGNFKAWDTKHSQKQIDRFNALEVTDNTALDVYVTDDAAKRGQFKGYYKKTVFYEAPLSYKEVARIKGMVDIRNAYQEVIAIQRYYDYDKETFNHLLGKLNRTYDSFVKHYGYLNSAVNRNLFDSDDKYSLLASLEDESLDPSGKSVIYTKSLAFEKALVRPEKEVKKVHTALDALNSSLADGRGVDFAYMMSIYQVESQMTLIEELGDLIMPDPEKYLNGELTYVSRQDFLSGDVVTKLEVVDLFVKQDNQDFNWSHYAGLLEAIKPARITLADIDYRIGSRWIPLAVYGKFAQETFMGKAYELSDQEVATVLEVSPIDGVITYQSKFAYTYSNATDRSLGVPASRYDSGRKIFENLLNSNQPTITKQVVEGDKKKNVTDVEKTTVLRAKETHLQELFQGFVAKYPEVQQMIEDTYNRLYNRTVSKSYDGSHLTIDGLAQNISLRPHQKNAIQRIVEEKRALLAHEVGSGKTLTMLGAGFKLKELGMVHKPLYVVPSSLTAQFGQEIMKFFPTKKVYVTTKKDFAKAKRKQFVSRIITGDYDAIVIGDSQFEKIPMSREKQVTYINDKLEQLREIKLGSDSDYTVKEAERSIKGLEHQLEELQKLERDTFIEFENLGIDFLFVDEAHHFKNIRPITGLGNVAGITNTTSKKNVDMEMKVRQVQAEHGDRNVVFATGTPVSNSISELFTMMDYIQPDVLERYLVSNFDSWVGAFGNIENSMELAPTGDKYQPKKRFKKFVNLPELMRIYKETADIQTSDMLDLPVPEAKIIAVESELTQAQKYYLEELVKRSDAIKSGSVDPSRDNMLKITGEARKLAIDMRLIDPTYSLSDNQKILQVVDNVERIYRDGAGDKATQMIFSDIGTPKSKEEGFDVYNELKDLFVDRGIPKEEIAFVHDANTDEKKNSLSRKVNSGEVRILMASTEKGGTGLNVQSRMKAVHHLDVPWRPSDIVQRNGRLIRQGNMHQEVDIYHYITKGSFDNYLWQTQENKLKYITQIMTSKDPVRSAEDIDEQTMTASDFKALATGNPYLKLKMELENELTVLENQKRAFNRSKDEYRHTISYSEKHLPIMEKRLSQYDKDIAQSLATKSQDFVMRFDNQAMDNRAEAGDYLRKLITYNRSETKEVRTLASFRGFDLKMTTRGASEPLPETISLMIVGDNQYTVALDLKSDVGTIQRISNAIDHIIDDQEKTQELVKDLKDKLRVAKVEVDKVFPKEEDYQLVKAKYDVLAPLVEKEAEIEEIDAALAKFSEDTTPQKKQQIAXXHSFIN

SEQ ID NO: 2393 - protein, 552 aa, Streptococcus agalactiae
ATGACTTGGAACTTTGACACCATGAAAGAGGCTTTGTCTGAAATGGAGAAGGTCGATTACCAAGAGTTTATCAAGGCTTTTCTCTCTTTGGAATTAAGTATTTCTAATAGAACAATCCTCAATCAGGTTTATCAAGATTATATGGATGAGGATGACCTATCCTTGATAAGTGATGAGCTACGAGTTAAAGTTGATAGTTATCAGGATGAAGTACAGGCAGATATGACTGACATTCTGGAAAAGCTGTACCGAACAGGTGAAGGCTCTAATTTTATTATGGATTTAATGTCCTCAAATAGTCTCTCAGAAACCTTGGAACAGTATGAGGTTTTGGATAGTGACGATTATTCACCACTTAGCCTTGAAACCTTACAGGCCATGATCCAACAGGACTTGGCTATTTCCAGTCAGGATTATTTTGGAGATTTGGTTCACCTTGCCTTGCAAAAAGATTTACTAGACCAGAAAAGTCATTTCTTACAACACTATGTGGCAATTGTAATGGAAGGTATTCCACAAGAAAGAGACCAACGAACCTTGGTCCTAGATTAA

SEQ ID NO: 2394 - protein, 183 aa, Streptococcus agalactiae
MTWNFDTMKEALSEMEKVDYQEFIKAFLSLELSISNRTILNQVYQDYMDEDDLSLISDELRVKVDSYQDEVQADMTDILEKLYRTGEGSNFIMDLMSSNSLSETLEQYEVLDSDDYSPLSLETLQAMIQQDLAISSQDYFGDLVHLALQKDLLDQKSHFLQHYVAIVMEGIPQERDQRTLVLD

SEQ ID NO: 2395 - protein, 192 aa, Streptococcus agalactiae
ATGAATCCAAAAACTATTTATGAAAAGGATTCAGACCAGGATGGTCTGACAGATGCTCAGGAACTAGCTTTGGGAACCGATCCGCAGTCTGTTGACACAGATGGTGATGGTCAAGCTGATTTAGAGGAGCTACAATCTGGACATTCACCATTAGTCCCACAAAAGGAGTTGTACAATGACTTGGAACTTTGA

SEQ ID NO: 2396 - protein, 63 aa, Streptococcus agalactiae
MNPKTIYEKDSDQDGLTDAQELALGTDPQSVDTDGDGQADLEELQSGHSPLVPQKELYNDLEL

SEQ ID NO: 2397 - protein, 4896 aa, Streptococcus agalactiae
ATGACCAAAACATGTAATCATCACTTTCTTGTCAATCAGGAAAAAGGCGAGAAACACGTCTTTCGCAAGAGTAAAAAATATCGCACTCTATGTTCCGTTGCCCTTGGAACCATGGTGACGGCTGTTGTTGCTTGGGGAGGAACGGTTGCACATGCCGATGAAGTTACAACTTCAGTTGACACCACCATTCAACGAACGGAGAATCCAGCCACAAATTTACCAGAAGCACAACCAAACCCTGTATCTGAACAAACTGAAAGTATGGCATCAACTGGACAATCTAACGGTGCGATTGCTGTTACCGTACCACATGATACGGTAACACAAGCAGTTGAAGAAGCAAAGGCTGAAGGTGTTTCTACGGTTGAAGATAGTCCAATGGATTTAGGAAATACAAGATCTGCGGTAGAAACCAACCAACAAATTTCAAAAGCAGATGCAGATACCCAAAAACAGGTTGAGACTATTAATGAAGTCACTAAAACCTACAAAGCTGATAAAGCGACATACGAATCGAATAAAGCTCGCATCGAACAGGAAAATAAGGAGCTGTCACAGGCCTACGAGGGGGCCAACCAAACTGGTAAAGAGACAAATGCTTGGGTTGATACTAAAGTCAATGACCTAAAAACTCGGTATGCAGATGCTGATGTGACAGTAAAAGAACAAGTAGTTTCATCAGGAAATGGGACATCTGTCCTTGACTATACAAACTATGGCAAGGCTGTTGAAACCATTCAATCAACTAACGAACAAGCTGTAGCGGATTATCTAACAAAGAAAACAAAGGCAGATGATATTGTTGCGAAAAATCAGGCCATTCAAAAAGAAAATGAAGCTGGACTTGCTAAGGCAAAGGCAGATAATGAAGCCATTGAAAGGCGTAATCAGGCTGGTCAAGCAGCTGTTGATGCTGAAAACCGTGCAGGTCAAGCCGCAGTAGATCAAGCTAATCAGGAGAAACAACAATTAGTTTCAGATCGTGCAGCCGAGATTGAAGCTATTACAAAACGTAATAAAGAAAAAGAAGCCGCAGCCAGAAAAGAGAATGAAGCGATTGATGCCTATAATACCAAAGAAATGGAACGCTATCAACGTGACTTGGCCGAGATTTCAAAAGGTGAAGAAGGTTATATTTCTGAAGCCCTTGCTCAAGCCCTCAATCTCAACAACGGTGAACCCCAAGCACAACATGGGGCCATTACCCGAAATCCTGATCAGATCATTTCAACTGGCGATGCTTTGCTGGGAGGCTACTCAAGAATATTGGATTCAACAGGATTCTTTGTCTATGACATGTTCAAAACAGGTGAGACTCTTAGTTTTAACTATCAAAATCTTCAACATGCACGATTTGATGGTAAAAAGATTAGTCGTGTGACTTACGATATTACCAACCTTGTATCACCAGCTGGAACCAATGCCGTGAAATTGGTTGTGCCAAATGATCCAACCGAGGGTTTTATTGCCTATCGAAATGACGGAAACGGTGACTGGCGAACAGACAAGATGGAGTTTCGTGTAGTTGCCAAGTATTACTTGGAAGACGGTTCACAAGTTACCTTCTCCAAAGAAAAGCCAGGAGTCTTCACACACTCTTCCCTCAATCATAATGACATTGGTTTAGAATATGTCAAAGATTCATCTGGGAAATTTGTGCCGATTAATGGTTCAACTGTTCAAGTGACTAATGAAGGTCTAGCACGTTCTTTGGGTTCCAACCGTGCAAGTGATTTGAATTTACCTGAGGAATGGGATACCACATCAAGTCGTTATGCTTATAAAGGAGCTATTGTCTCAACAGTTACATCAGGTAATACCTACACAGTAACCTTTGGCCAAGGCGATATGCCACAGAATGTTGGCTTGTCATACTGGTTCGCCTTAAATACCCTACCAGTGGCACGTACAGTAACACCATATAGTCCCAAACCTCATGTAACGGTGGAACTTGAACCCATTCCAGAACCTATTACGGTAACACCAGATATCTATACACCAAAAACATTTACACCAGAAAAGCCTGTAACTTTCACACCAAAGCCTTTGGATGAAGTAGTGCAGCCTAGTCTAACTTTGACCAAGGTAACCTTGCCTGTCAAACCTATTCCAAAAGAACTTCCAACGCCACCACAAGTACCAACTGTCCATTATCATGCGTACCGTTTGACGACAACTTCAGAGATTATGAAAGAAGTGGTCAATAGTGACCAAGCTAATCTTCATGAGAAAACTGTCGCAAAAGATTCAACGGTGATTTATCCCTTAACAGTTGATGCCTTATCGCCCAATCGTGCCCAAACGACTAGTCTCATTTTTGAGGACTACTTGCCTGCTGGTTACCTATTTGATAAGGAAACAACACAAAAAGAGAATGGAAACTATGTCCTTAGCTTTGATGAGACTAAGAATTTTGTGACCTTAACCGCAAAGGAAAACTTGTTGCAGGAGGTAAATAAAGATTTAACTCAGGTTTATCAATTGACCGCCCCAAAACTCTATGGTTCTGTTCAAAATGATGGGGCAACCTATTCCAATAGTTACAAACTCCTTTTGAACAAGGGTACAACCAATGCTTACACAGTCACTTCAAATGTTGTAACGGTTCGTACACCAGGTGATGGGGAGACAACCACGCTCATTACACCAGATAAAAACAATGAAAATGCGGATGGTGTCCTCATTAATGACACGGTCGTAGCCCTTGGTACAACCAACCACTATCGTTTGACTTGGGATTTGGACCAGTATAAGGGAGATCGTTCTGCTAAAGAGACAATTGCACGAGGCTTCTTCTTTGTGGACGATTACCCAGAGGAAGTGCTTGATGTGGTGGAAAATGGCACGGCTATCACAACCCTTGACGGTCAGAAGGTATCAGGAATTACAGTTAAAAACTATGCTTCCCTAAATGAAGCCCCTAAAGACCTTCAAGATAAATTGGCTCGTGCTAAGATTACACCGACAGGTGCCTTTCAAGTCTTTATGCCGGATGACAACCAAGCCTTTTATGACCAGTATGTTCAAACAGGAACTTCTTTAGCTCTTTTGACCAAAATGACGGTTAAAGATAGTCTCTATGGTCAGACAAAGACCTATACAAACAAGGCTTATCAAGTTGATTTCGGCAATGGCTATGAAACCAAGGAAGTGACCAACACCCTTGTTTCACCAGAACCCAAGAAACAAAACCTAAACAAGGATAAAGTGGATATCAACGGGAAGCCCATGCTAGTGGGAACTCAAAATCACTATACTCTTTCATGGGACTTGGACCAATACCGAGGGATTAAAGCAGACAACTCTCAGATTGTACAAGGTTTTTACTTTGTGGATGATTATCCAGAAGAAGCTTTATTGCCAGATGAAGCAGCTATTCAGTTTGTCACATCTGATGGCAAAACAGTTTCAGGAATCACGGTGAAGTCTTATTCTCAATTATTAGAAGCTCCTAAAACGCTACAAGCAGCCTTTTCCAAACAAAAAATTCAGCCTAAAGGAGCTTTTCAAGTTTTCATGCCTGAGGACCCACAAGCCTTTTTTGAATCTTATGTGACCAAGGGGGAGAATATTACCATTGTCACTCCAATGACGGTTTTGGAAACCATGCTTAATTCAGGGAAGTCTTATGAAAACGTGGCTTATCAGGTGGACTTTGGGCAAGCCTATGAAACCAATACGGTGACCAATTTTGTCCCTAAAGTAACTCCACATAAGTCTAATACCAATCAAGAAGGTATTTCAATTGATGGAAAGACTGTTCTTCCGAATACGGTCAATTATTACAAAATTGTCTTGGATTACAGTCAATACAAGGATATGGTCGTGACGGATGATGTTCTTGCCAAGGGATTTTACATGGTAGACGATTACCCAGAAGAAGCCCTTACCCTAAATCCTGATGGCATTCAAGTTTTGGATAAGGATGGCAATCGTGTATCTGGTATCTCTGTCAGCACCTACGCTAGTTTGTCAGAAGCTCCGAAAGTTGTTCAAGATGCCATGGCTAAACGTCAGTTTACACCTAAAGGAGCCATTCAAGTTCTTAGTAGCGATGATCCAAAAGTCTTTTATGATACCTATGTGAAGACTGGTCAAACCTTAGTTGTCACGCTTCCGATGACGGTAAAAAATGAGTTGACCAAAACAGGTGGTCAGTATGAAAATACAGCCTATCAAATTGATTTTGGCTTGGCCTATGTCACGGAAACAGTGGTTAATAATGTTCCAAAATTAGACCCACAAAAAGATGTGGTGATCGACTTGTCTCATAAAGATGCCAGCCTTGACGGGAAAGAAGTGGCCTTGCATCAAACCTTTAACTATCGCTTGGTTGGAGCGATGATTCCAAGCAATCGTGCGACTGATTTATTTGAATATGGTTTTGAAGATAACTATGATGAAAAGCATGATGAGTATAATGGTGTTTATCGCAGCTATCTGATGACGGATGTCATCCTCAAAGACGGTTCTGTCTTAAAAGAGGGGACAGAAGTCACGAAATACACCTTGCAACAGGTAGATACAGAAAATGGCCTCGTGTCAATTTCATTTGATAAATCCTTCTTAGAGACTGTCTCTGATGATTCAGCCTTTCAGGCAGATGTTTACCTTCAAATGAAACGGATTGCGGCTGGTCAGGTGGAGAATACCTATCTCCATACAGTGAATGGCTATGTCATTAGCTCAAATACAGTTGTAACACATACACCTCAACCTGAAGAACCAAGTCCAAATCAACCCACTCCACCTCAACCACCAATTGAGACTATTGAACCGCCTGTTCCAGCAAGTATTTTGCCAAATACAGGGGAACAGGAATCCCTTTTGGGCTTGATTGGAGCTGGTATTCTACTTGGTACGGCTTATGGACTGAAGAAAAAGGAGGAGAAGTAG

SEQ ID NO: 2398 - protein, 1631 aa, Streptococcus agalactiae
MTKTCNHHFLVNQEKGEKHVFRKSKKYRTLCSVALGTMVTAVVAWGGTVAHADEVTTSVDTTIQRTENPATNLPEAQPNPVSEQTESMASTGQSNGAIAVTVPHDTVTQAVEEAKAEGVSTVEDSPMDLGNTRSAVETNQQISKADADTQKQVETINEVTKTYKADKATYESNKARIEQENKELSQAYEGANQTGKETNAWVDTKVNDLKTRYADADVTVKEQVVSSGNGTSVLDYTNYGKAVETIQSTNEQAVADYLTKKTKADDIVAKNQAIQKENEAGLAKAKADNEAIERRNQAGQAAVDAENRAGQAAVDQANQEKQQLVSDRAAEIEAITKRNKEKEAAARKENEAIDAYNTKEMERYQRDLAEISKGEEGYISEALAQALNLNNGEPQAQHGAITRNPDQIISTGDALLGGYSRILDSTGFFVYDMFKTGETLSFNYQNLQHARFDGKKISRVTYDITNLVSPAGTNAVKLVVPNDPTEGFIAYRNDGNGDWRTDKMEFRVVAKYYLEDGSQVTFSKEKPGVFTHSSLNHNDIGLEYVKDSSGKFVPINGSTVQVTNEGLARSLGSNRASDLNLPEEWDTTSSRYAYKGAIVSTVTSGNTYTVTFGQGDMPQNVGLSYWFALNTLPVARTVTPYSPKPHVTVELEPIPEPITVTPDIYTPKTFTPEKPVTFTPKPLDEVVQPSLTLTKVTLPVKPIPKELPTPPQVPTVHYHAYRLTTTSEIMKEVVNSDQANLHEKTVAKDSTVIYPLTVDALSPNRAQTTSLIFEDYLPAGYLFDKETTQKENGNYVLSFDETKNFVTLTAKENLLQEVNKDLTQVYQLTAPKLYGSVQNDGATYSNSYKLLLNKGTTNAYTVTSNVVTVRTPGDGETTTLITPDKNNENADGVLINDTVVALGTTNHYRLTWDLDQYKGDRSAKETIARGFFFVDDYPEEVLDVVENGTAITTLDGQKVSGITVKNYASLNEAPKDLQDKLARAKITPTGAFQVFMPDDNQAFYDQYVQTGTSLALLTKMTVKDSLYGQTKTYTNKAYQVDFGNGYETKEVTNTLVSPEPKKQNLNKDKVDINGKPMLVGTQNHYTLSWDLDQYRGIKADNSQIVQGFYFVDDYPEEALLPDEAAIQFVTSDGKTVSGITVKSYSQLLEAPKTLQAAFSKQKIQPKGAFQVFMPEDPQAFFESYVTKGENITIVTPMTVLETMLNSGKSYENVAYQVDFGQAYETNTVTNFVPKVTPHKSNTNQEGISIDGKTVLPNTVNYYKIVLDYSQYKDMVVTDDVLAKGFYMVDDYPEEALTLNPDGIQVLDKDGNRVSGISVSTYASLSEAPKVVQDAMAKRQFTPKGAIQVLSSDDPKVFYDTYVKTGQTLVVTLPMTVKNELTKTGGQYENTAYQIDFGLAYVTETVVNNVPKLDPQKDVVIDLSHKDASLDGKEVALHQTFNYRLVGAMIPSNRATDLFEYGFEDNYDEKHDEYNGVYRSYLMTDVILKDGSVLKEGTEVTKYTLQQVDTENGLVSISFDKSFLETVSDDSAFQADVYLQMKRIAAGQVENTYLHTVNGYVISSNTVVTHTPQPEEPSPNQPTPPQPPIETIEPPVPASILPNTGEQESLLGLIGAGILLGTAYGLKKKEEK

SEQ ID NO: 2399 - protein, 591 aa, Streptococcus agalactiae
ATGTCAAAAAAAGAGATTCTACTCGATTTTATAGAAAAGAACAATGGCATTGTCACAAACAAAGATTGTAAAGCACTAGGTATTCCAACAATATATCTGACAAGACTAGAGAAAGAAGGCATTATCTTCCGAGTTGAAAAAGGTATTTTCCTAACCCAAAACGGAGACTATGATGAATACTACTTCTTTCAATATCGTTTTCCTAAGGCTATTTTCTCTTATATTTCGGCACTGTATCTACAACAGTTTACAGATGAAATTCCACAATATTTTGATGTGACAGTTCCTAGAGGCTACCGCTTTAATACTCCTCCAGCTAATCTAAACATTCACTTTGTCTCTAAAGAATACAGCGAGCTGGGAATGACTACTGTACCTACTCCTATGGGAAACAACGTAAGGGTATATGATTTTGAACGTATTATTTGTGATTTTGTAATACATCGAGAAAAGATTGATTCCGAACTCTTTGTCAAGACACTTCAATCTTATGGGAACTATCCTAAAAAAAATCTAGCAAAACTCTATGAATATGCGACAAAAATGAATACTTTAGAAAAAGTTAAACAAACTCTGGAGGTTCTAATATGA

SEQ ID NO: 2400 - protein, 196 aa, Streptococcus agalactiae
MSKKEILLDFIEKNNGIVTNKDCKALGIPTIYLTRLEKEGIIFRVEKGIFLTQNGDYDEYYFFQYRFPKAIFSYISALYLQQFTDEIPQYFDVTVPRGYRFNTPPANLNIHFVSKEYSELGMTTVPTPMGNNVRVYDFERIICDFVIHREKIDSELFVKTLQSYGNYPKKNLAKLYEYATKMNTLEKVKQTLEVLI

SEQ ID NO: 2401 - protein, 846 aa, Streptococcus agalactiae
ATGAACAAAGCTAAATTAACAGCACTCTGTCATAAAATATCAAAGAATACTGGTTTAACCTTTAATTCCGTGATGACCTATTACTTCCTAGAAGTCATTTTGAAAAAATTAAGTCAAAGTTCTTATTCAAATCACTATATCTTCAAAGGAGGATTCCTACTGTCGAATGTCATCGGAGTTGAATCTCGTAGCACTGTTGATATTGACTTTTTATTCCATCAAATAACACTCTCAGAAGAAACTGTTAAACAGCAACTCAAGGAAATTTTAGCAGATTCCGAAGAAGGTATATCTTTTGTGATTCAATCAATCACAACTATTAAAGAAAGTGATGACTATGGTGGCTATCGAGCAACAATTTCGTGCCAACTTGAGAATATTAAACAAGTTATCCATTTGGATATTGCGACAGGTGATGTTGTAACTCCTCAGCCGATAACATACGACTATAAAGCTATTTTTGATGAAGACAATTTTCCAATCATTGCTTATACAATTGAAACAATTCTAGCTGAAAAACTCCAAACCATCTATTCACGAAACTTCTTGAACAGCAGAAGCAAAGACTTTTACGATGTTTATATTCTTTCAAAATTGAAGAAAAAAGATATTGATTTCAATCAGTTAAAAAATGCTTGCCAAAGAACTTTTTCCTATCGCGAAACTGAGCTCGATTTCGAAAAAATTATTGAACTACTCGAGAGATTCAAATCTGATCCTACTCAGAATCAACAATGGCAAAATTATTCAAAAAAATATAGTTATACAAAAGGAATTTCACTTGCAAATGTGCTTGATGAGATGATTAGTCTTATTACAATTATTATTTCTACTGACTCTGATTAA

SEQ ID NO: 2402 - protein, 281 aa, Streptococcus agalactiae
MNKAKLTALCHKISKNTGLTFNSVMTYYFLEVILKKLSQSSYSNHYIFKGGFLLSNVIGVESRSTVDIDFLFHQITLSEETVKQQLKEILADSEEGISFVIQSITTIKESDDYGGYRATISCQLENIKQVIHLDIATGDVVTPQPITYDYKAIFDEDNFPIIAYTIETILAEKLQTIYSRNFLNSRSKDFYDVYILSKLKKKDIDFNQLKNACQRTFSYRETELDFEKIIELLERFKSDPTQNQQWQNYSKKYSYTKGISLANVLDEMISLITIIISTDSD

SEQ ID NO: 2403 - protein, 2802 aa, Streptococcus agalactiae
ATGAAAGAGGATAAAAAGCTAGTCAAACAGGCTAGGCAAAACTTTCGAAGCAACTTAAAATCAGCTCGTATGCATTATCGGAAAGAAGTTAGGACCTTAAAACAGACTGTTCCTAAAAAAGGAAGATTTCGAAAATCAGCCAAAAATTCTCTGTTTCAGGAAAAGAAAACAGAGTTAAAAGGAAATCTACTCAGTAGCCAAAAGGAAGCAGAAGAGAAGTTCATAAAGGAAATTACCTATGTTTCTCCTAGACTGTTGAAGGCAAAGGAAATCAAGAACTATCGACTTCCGCAAGCTCAAGAACGTTTGCGGACGGCAAGAAAACATCTGTCAGAAGTGAAACTAAGTGAGAAACAGCAGGTAGTTAATCCCAAGTTTACTTTCCAAAAAGAAAATCCTTCCCTGAAGTCTCGCTTTCAGTTTCACCAAGAAAAATCATTTGATCGGCTAAGTGCAGAAAAAGACGTAAGTTCTGCCAAGCGTGAGGTTAAACAACTCAAGAAAGTCCAAAAGACTAAGAAAAACTCTACCAAAGTCAAAGCTGGATTAGGCTTGGCTGCATCTGAATCCCTTGACCTGATAGCACAGGAGGATGATTTAGATGGTCTAAGAACCATGAAGGATACTAGTTTGAAAGCCAGACGCTATGGCAGGTTTACTTATCAAGCAGGTAAGGTGGCAGTAAAAAGTGGACAGACTGGTGTGCGGTTTACCAAAACAAAATTTTCTCATGGAAAGGAACGATTCCAGAACTTCAAAAAGGGAAAAGGATTCACACGCCAGAAACCTCTTAAACCAAGAAGACGCTACCAAACCTTTTTAAATCATGTCAGAAAACAAAGTGTCGCAGGTTTTAAAGGAATCGTCCAAGCCATTAAGGGAAGTATGACTTTCTTTTCTGTCCTTGCGGGAAATCCTTTGACTTGGATTGTCTCAGGCATTCTCTTGATACTCCTTTTGATGATGAGCTTTTTCATGAGTGTTTCAGGTAGTAGTGTCATACAACAAGATGAAATAGAATTGAGTAAGAGTTATACCCACATGACGTGGGAAGATGCGGAACATACAAGAACCAACGATAAGGGAATTACCTTTTACACTAAGATTGATGAGGTCATGGTTTACATGAATCATCAATACCAAGACTACAAGTTAGATGATTTCATAGAGACAAGCGGAACAACCTACAAAGAATTTCTCAGTCAACTGTGGTCGGACTTAAACGGTGGAGATTCTATTAAATCCATGTCTGACTTATATAAAGAACCTGCTTACAAGCTGTCTGATGAGGACCAAGAAGAACTAAACGAATTGACCGAAGAAGGCAACTATTTAGCCCTTCAAGAATTGGACAATCCCTTTCAGGGACAGACCGATGAGGATAGTTTAAGCATGACCTACCGATATGGTTATGAGGTCATTGATGAGAAACCAACGCTTCATCATCATATCATCTTAGAAGCAAAAGAAGGTCAAGTCATTGTAGCTCCGATGGATGGCAAGGTATCTCTTGATGGAGAGAACGTTGTTTTGACATCTGGTAAGGGAGTGAATAAGACTAAACTAACCTTGTTTGGCATTCATTCAGGCCGAGTGAGTGAAAATCAACAAGTCTTGGCAGGAGATATTATTGGTCAGACCAAAGACGGAACGGGTCTAAAAGTCACCTATCAAAAGGTTGATGATGACACGGATAAGTTGGTCTATGTCAATCCAGCATTCTACTTTCCAAAAGTGATTCAGGTTCAGACCACCATTCTTCCAACTATCGGTCAGTTTGGCGGCGATGAGTTCGAGAGAGCCAAGGCAATTTATGACTATCTTAAAAGCAAAGGTGCGACCAATCAAGCTATCGCAGCCATTCTAGGTAACTGGTCGGTAGAATCCTCCATTAATCCAAAACGAGCTGAAGGCGACTATTTATCTCCACCTGTTGGTGCGACAGATAGTTCGTGGGATGATGAGGGCTGGCTCACACTTAATGGTCCAACTATATACAATGGACGTTACCCAAATATTCTCAAACGTGGTTTAGGCTTAGGCCAATGGACAGATACCGCGGATGGTTCACGCAGACATACTTTATTGTTGGAATATGCCAAAGGAAAACATCAAAAATGGTATGACTTAGGCTTACAACTGGATTTCATGTTGTATGGGGATAGTCCTTATTACACCAACTGGTTAAAGGACTTCTTCAAAAATTCAGGCAGTCCAGCTAGTCTTGCCCAGCTCTTTCTCATTTACTGGGAAGGAAATAGTGGTGATAAGCTACTTGAACGTCAAACACGAGCCAGTGAGTGGTATTACCAAATTGAAAAAGGCTTTAGTCAACCTAACGGTGGGACAGCACAAAGCGATCCAAAAGCACTTGAAGCTGTACGAGAAGACCTTTTTGAAAACTCTATTCCAGGAGGTGGTGACGGTATGGGTTACGCTTACGGCCAATGTACTTGGGGAGTCGCAGCCCGTATCAATCAACTGGGTCTAAAACTCAAAGGTAAAAACGGTGAGAAGATTCCAATTATCAGTACCATGGGCAATGGCCAAGATTGGGTACGAACAGCCGCAAGTCTCGGTGGAGAGACAGGGACAAGTCCACAAGAAGGAGCTATCCTTTCCTTTGCGGGAGGAGGACATGGCACCCCAACAGAATACGGACATGTGGCTTTTGTGGAGAAAGTCTACCCAGACGGTTCATTCCTTATCTCAGAAACCAACTACAATGGCAATCCAAACTATACCTTCCGTAAATTATCTGGAGTGGATAGTAGCTTGAGTTTTGCTTATACGACGAAATAA

SEQ ID NO: 2404 - protein, 933 aa, Streptococcus agalactiae
MKEDKKLVKQARQNFRSNLKSARMHYRKEVRTLKQTVPKKGRFRKSAKNSLFQEKKTELKGNLLSSQKEAEEKFIKEITYVSPRLLKAKEIKNYRLPQAQERLRTARKHLSEVKLSEKQQVVNPKFTFQKENPSLKSRFQFHQEKSFDRLSAEKDVSSAKREVKQLKKVQKTKKNSTKVKAGLGLAASESLDLIAQEDDLDGLRTMKDTSLKARRYGRFTYQAGKVAVKSGQTGVRFTKTKFSHGKERFQNFKKGKGFTRQKPLKPRRRYQTFLNHVRKQSVAGFKGIVQAIKGSMTFFSVLAGNPLTWIVSGILLILLLMMSFFMSVSGSSVIQQDEIELSKSYTHMTWEDAEHTRTNDKGITFYTKIDEVMVYMNHQYQDYKLDDFIETSGTTYKEFLSQLWSDLNGGDSIKSMSDLYKEPAYKLSDEDQEELNELTEEGNYLALQELDNPFQGQTDEDSLSMTYRYGYEVIDEKPTLHHHIILEAKEGQVIVAPMDGKVSLDGENVVLTSGKGVNKTKLTLFGIHSGRVSENQQVLAGDIIGQTKDGTGLKVTYQKVDDDTDKLVYVNPAFYFPKVIQVQTTILPTIGQFGGDEFERAKAIYDYLKSKGATNQAIAAILGNWSVESSINPKRAEGDYLSPPVGATDSSWDDEGWLTLNGPTIYNGRYPNILKRGLGLGQWTDTADGSRRHTLLLEYAKGKHQKWYDLGLQLDFMLYGDSPYYTNWLKDFFKNSGSPASLAQLFLIYWEGNSGDKLLERQTRASEWYYQIEKGFSQPNGGTAQSDPKALEAVREDLFENSIPGGGDGMGYAYGQCTWGVAARINQLGLKLKGKNGEKIPIISTMGNGQDWVRTAASLGGETGTSPQEGAILSFAGGGHGTPTEYGHVAFVEKVYPDGSFLISETNYNGNPNYTFRKLSGVDSSLSFAYTTK

SEQ ID NO: 2405 - protein, 2331 aa, Streptococcus agalactiae
ATGAAATCAAAGACCTCTTCTAATGACAAAAAGCAAAAGACGAAAACACAGAAACAGGAAATCAGCCCTTCTACCGTAAATACGTTAGCCTATCAAGGACTTTTTCAGAATGGCCTTATGCAGGTCAGTCCAAGCTATTTCTCACAAACCTATCTCTTAGGAGATGTTAATTACCAAACAGTTGGCTTAGATGATAAGGGAGCTATCGTGGAGAAATATTCCGATTTAATCAATTCACTGGATGATAAGACCAATTTCCAACTGACTATTTTCAATCAAAAAGTTAATTTGGAAAAATTTCGTAAGAGTATTCTCTATCCCTTGCAGGAAGATGGGTTTGATACTTATCGTGATGAATTGAATCGCATGATGGATGCCAACTTAGAGGCGGGTGAGAACAACTTTTCAGCTGTCAAGTTTCTTTCATTTGGCAAGAGCGACCAAACACCAAAACTAGCTTTTCGTTCTCTGTCACAGATTGGGGAATATTTCAAGAGTGGCTTTTCAGAGATTGATGTATCTCTTGGTTTACTTGGTGGAGAGGAGCGAGTGAATGTCCTTGCGGATATGTTACGAGGTGAAAATCATTTACCGTTTTCTTATAAGGATTTGACTCTCTCAGGTCAATCCACCAAACACTTTATTGCCCCAACCTACCTTTCCTTTAAACACAAGAATCATATTGAATTGGACGATCGATTATTACAGATTGTTTATGTTCGCGACTATGGCATGGAGTTAGGGGATAAATTTATTCGAGACCTCATGCAGTCAGATTTGGAAGTGATGATTAGCCTACATGCCAAAGGCTCTACTAAGTCTGAAACCATGACCAAGCTACGAACCAAGAAGACCTTGATGGAATCACAAAAGATTGGTGAACAACAAAAAATGGCTCGGACTGGAATCTATTTGGAGAAGGTCGGCCATGTTCTTGAGAACAACATCGATGAAGCTGAAGCTCTTCTTCAAACCATGACCCAAACAGGAGATAAACTGTTTGACACCGTATTTCTAATTGGCGTGCTAGCGGATACTGAAGACCAACTCAAACAATCTCTTGATATTATCAAGCAAGTGGCAGGGTCTAATGATATGATTATTGATAACTTGACCTATATGCAAGAAGCTGCCTTTAATAGTCTCTTGCCATTTGGGAAGAACTATCTCGAAGGTGTTTCTCGGTCTCTATTGACTTCAAATATTGCCGTGAATGCACCTTGGACTTCCGTAGATATTCATGACAAGGGTGGGAAATTTTATGGCATCAATCAAATCTCAAGTAATATCATCAGTATTGACCGTGGCAAGTTAAATACTCCATCAGGTTTGATTTTAGGGACTTCTGGAGCTGGCAAAGGGATGGCGACAAAACACGAAATCATCTCAACTAAGCTCAAGGAAGCAGATAGTGATACTGAAATTATTATTGTTGACCCAGAAAATGAGTACAGTATTATCGGTCAAGCCTTTGGTGGGGAGAGTATTGATATTGCCCCAGACTCTACCACCTTCTTAAATGTCTTAGAACTATCTGATGAGAATATGGATGAGGACCCAGTTAAGGTCAAATCCGAATTTCTCTTGTCTTGGATTGGAAAGCTCTTGGACCGCAAAATGGATGGTCGTGAAAAATCCTTGATAGATCGTGTGACACGCTTGACATATAAGCATTTTGACACACCGTCCTTGGTCGAATGGGTCTTTGTCTTATCTCAACAACCTGAACAGGAAGCTAAGGACTTGGCACTGGATATGGAACTCTATGTGGAAGGGTCGCTGGACATATTTTCACATCGGACCAATATTAAAACAGACAGTCATTTCCTGATTTACAATGTCAAAAAGCTAGGCGATGAGTTAAAACAAATTGCCCTCATGGTTATCTTTGACCAAATTTGGAATCGGGTGGTCAAAAACCAAAAGCTAGGGAAGAAGACCTGGATTTACTTTGATGAAATGCAGCTACTCTTATTGGACAAGTATGCCTCTGATTTCTTTTTCAAACTTTGGAGTCGTGTCCGTAAGTATGGGGCGATACCGACAGGTATTACTCAGAATGTAGAAACGCTTCTTTTGGATGCCAATGGCAGACGCATTATTGCCAATAGCGAGTTCATGATTCTTTTAAAACAGGCTAAGAGCGATCGCGAAGAATTGGTGCATATGCTTGGGCTTTCTAAAGAGCTGGAGAAGTACTTGGTCAATCCTGAAAAAGGGGCAGGCTTAATTAAGGCCGGTTCCACCGTTGTTCCGTTCAAGAATAAGATTCCGCAACACACCAAGCTCTTTGACATCATGAGTACGGACCCTGAAAAAATGAGGACATGA

SEQ ID NO: 2406 - protein, 776 aa, Streptococcus agalactiae
MKSKTSSNDKKQKTKTQKQEISPSTVNTLAYQGLFQNGLMQVSPSYFSQTYLLGDVNYQTVGLDDKGAIVEKYSDLINSLDDKTNFQLTIFNQKVNLEKFRKSILYPLQEDGFDTYRDELNRMMDANLEAGENNFSAVKFLSFGKSDQTPKLAFRSLSQIGEYFKSGFSEIDVSLGLLGGEERVNVLADMLRGENHLPFSYKDLTLSGQSTKHFIAPTYLSFKHKNHIELDDRLLQIVYVRDYGMELGDKFIRDLMQSDLEVMISLHAKGSTKSETMTKLRTKKTLMESQKIGEQQKMARTGIYLEKVGHVLENNIDEAEALLQTMTQTGDKLFDTVFLIGVLADTEDQLKQSLDIIKQVAGSNDMIIDNLTYMQEAAFNSLLPFGKNYLEGVSRSLLTSNIAVNAPWTSVDIHDKGGKFYGINQISSNIISIDRGKLNTPSGLILGTSGAGKGMATKHEIISTKLKEADSDTEIIIVDPENEYSIIGQAFGGESIDIAPDSTTFLNVLELSDENMDEDPVKVKSEFLLSWIGKLLDRKMDGREKSLIDRVTRLTYKHFDTPSLVEWVFVLSQQPEQEAKDLALDMELYVEGSLDIFSHRTNIKTDSHFLIYNVKKLGDELKQIALMVIFDQIWNRVVKNQKLGKKTWIYFDEMQLLLLDKYASDFFFKLWSRVRKYGAIPTGITQNVETLLLDANGRRIIANSEFMILLKQAKSDREELVHMLGLSKELEKYLVNPEKGAGLIKAGSTVVPFKNKIPQHTKLFDIMSTDPEKMRT

SEQ ID NO: 2407 - protein, 855 aa, Streptococcus agalactiae
ATGATGATGAATTTTACGTCACCTTTTGTATTTCTAGCCTCTGAAAAAGTGTCAAGCGATAGCCTTTTTGAAGGGTTTCAGGTCGATTTAGAATCAACTGCTAACTTGGTTAAGTCACTGGCGGACTTTAATCCGACGGTTTGGTCTTACATGACAGCCATTACCAAGGGTATTATGCAGCCCTTGGGAGTAGCTATTCTTGCGGTAGTTCTTGTACTCGAATTTTCAAAAATGGCCAAGAAAATCGCAAACTCAGGCGGTGCAATGACCTTTGAAGCCATAGCACCTATGATTGTCAGCTACATCATGGTCGCGGTCGTGATTACCAATACGACGGTTATTGTGGAAGCCATTATTGCCATTGCCTCATATGTTATTGAACAAGTGGCAAGTCTTGTCACGAATGGTGGTGCTAATTATGATACCATCTCAGGCATTAAGGGATCTGGAATTGTAGGAAAAATGATTATTGGCTTTTTTGCGATTCTCATTTGGTTGGTACGAATGGCCAGTATTATGGTTGTCAATATCTTGATTACCATTCGCTTTATCCAACTCTATCTGATGATTCCTTTTGCCCCTGTTACCATTCCGACCTTCCTTAGTGATGACTGGAGAAGTGTTGGGATTGGTTACCTTAAAAACATCATGGTCTATGCCGTTCAAGGTATTTTGATTTTTCTAATTGTATCTCTTGTTCCCTTGTTTGAATCGGCTGGAAAGATTGCCGTATCAAATGGAGCTGGAGTGATGGAATCACTCGCCATTATGTTTGGTGGCTTGGTACAGGCCATATTGTTAATCATTGCCTTGGTTGGCAGTCAACGAACCGCCCGAAGTATTTTGGGGATGTAG

SEQ ID NO: 2408 - protein, 284 aa, Streptococcus agalactiae
MMMNFTSPFVFLASEKVSSDSLFEGFQVDLESTANLVKSLADFNPTVWSYMTAITKGIMQPLGVAILAVVLVLEFSKMAKKIANSGGAMTFEAIAPMIVSYIMVAVVITNTTVIVEAIIAIASYVIEQVASLVTNGGANYDTISGIKGSGIVGKMIIGFFAILIWLVRMASIMVVNILITIRFIQLYLMIPFAPVTIPTFLSDDWRSVGIGYLKNIMVYAVQGILIFLIVSLVPLFESAGKIAVSNGAGVMESLAIMFGGLVQAILLIIALVGSQRTARSILGM

SEQ ID NO: 2409 - protein, 243 aa, Streptococcus agalactiae
ATGAATCAAAAACTAACAGGCTTTGTTTACGGAGTGGACGCCAGCTCCATGTTCTCCCAGGCCATGTCTCTATTACAAAAAGGCTTGATTGCAGTAGGAGCCTTTCTTGTAGTCATGGGCATTATCAACCTTTCAACCAACATTAAAGATGGTGGGCCAGGCGTCCGAAATGCCATTTTAGAAATTGTTGGTGGTGTCATGGTGGGAGCCGCAGGTGCTTTTGTGACACAGATTACCATTTAG

SEQ ID NO: 2410 - protein, 80 aa, Streptococcus agalactiae
MNQKLTGFVYGVDASSMFSQAMSLLQKGLIAVGAFLVVMGIINLSTNIKDGGPGVRNAILEIVGGVMVGAAGAFVTQITI

SEQ ID NO: 2411 - protein, 1818 aa, Streptococcus agalactiae
ATGTATTCCAGGCAAAAAGCATTTGTCTTTGGACTCTTGGGTCTCGCCTTTGGCTATTTCTGCCATCGTCTAACCCTACTCTATGATAGTTTAACTAATGCCCCACCTATGGAACGTATTGCCTACCTCTTAGGAGAGGGGTTAAATCAGGTTTTCAATCCTTTATGGCTATTTTCCTTTACTCAAAAATCTTTTCTTGCCTTTATCCTTGGGGTTCTAATGATGACGCTAGTCTATCTTTATGTATCGACAGGACAGAAAGTCTATCGGGAAGGGGAAGAATATGGTTCTGCACGATTTGGAACCAGTAAGGAAAAGCGGAACTTTTACAGTAAGAATCCTTTCAATGACACGATTTTGGCTCGTGATGTTCGTCTAACCTTGTTGGAAAAGAAGAAACCCCAGTTTGACCGAAATAAAAATTTGATTGTCATTGGGGGTTCTGGGGCAGGTAAGACCTTTCGCTTTGTGAAACCCAACCTTATCCAACTTAACTGTTCCAATATTGTCGTAGATCCGAAAGACCATTTGGCTGAGAAGACAGGTAAACTCTTTTTAGAAAACGGTTATCAGGTTAAGGTTTTAGACTTGGTTAATATGACCAATTCAGACGGTTTTAATCCCTTTCGTTATGTAGAAACAGAGAATGATTTGAACCGTATGTTAACGGTCTATTTTAATAATACCAAAGGAAATGGTTCTCGCAGTGATCCGTTTTGGGATGAGGCTTCCATGACATTGGTGAGAGCTATTGCCTCTTACTTGGTGGATTTTTACAATCCTCCAGGAAGTTCTAAGCAAGAGCAGGAAGCAAGACGTAAGCGTGGCCGTTATCCAGCCTTTTCTGAGATTGGGAAACTCATCAAACTCTTATCAAAGGGAGACAATCAGGACAAAAGTATACTTGAAGTCCTGTTTGAAGACTATGCTAAGAAATATGGTCATGAGAACTTTACCATGAGAAACTGGGCAGATTTTCAAAACTATAAGGATAAGACCTTGGATTCGGTGATTGCGGTCACAACAGCTAAATTTGCCCTCTTTAATATTCAATCGGTGATTGATTTGACGCAAAGAGACACTATGGATTTGAAAACGTGGGGCACTCAAAAGACCATGGTCTATCTTGTTATTCCAGACAATGATACGACCTTTCGTTTCCTATCTGCTTTATTTTTCTCTACGGTTTTCTCCACTTTGACCAGACAGGCTGATGTTGACTTTAAAGGGCAACTGCCTATTCATGTTAGAAGCTATCTGGATGAGTTTGCGAATGTCGGAGAAATCCCAGACTTCGCTGAACAAACCTCAACAGTCCGCTCTAGGAATATGAGTCTTGTGCCTATTCTCCAAAATATCGCTCAACTCCAAGGACTTTATAAGGAAAAAGAAGCTTGGAAAACTATACTGGGGAACTGTGACAGTCTCCTCTATTTGGGTGGGAATGACGAGGAAACTTTCAAATTCATGAGTGGACTTTTAGGCAAACAAACCGTTGATGTCAGAAGCACCAGTCGTTCTTTTGGGCAGACGGGTTCAAGTTCTACCTCTCATCAGAAAATTGCTCGTGACTTGATGACGGCTGATGAAGTTGGAACTATGAAACGAGATGAGTGCCTCGTACGCATTGCAGGGGTTCCTGTTTTTCGAACCAAGAAATATTTTCCTCTCAAACATAAACATTGGAAGTTGCTCGCTGATAAGGAAACCGATGACCGTTGGTGGAACTATCACATCAATCCCTTGGCTAAAGAGGAAGAATTGGACTTGTCAGACTATCAAATAAGGGATTTAAGCACAGAAACGTCACTACATTAA

SEQ ID NO: 2412 - protein, 605 aa, Streptococcus agalactiae
MYSRQKAFVFGLLGLAFGYFCHRLTLLYDSLTNAPPMERIAYLLGEGLNQVFNPLWLFSFTQKSFLAFILGVLMMTLVYLYVSTGQKVYREGEEYGSARFGTSKEKRNFYSKNPFNDTILARDVRLTLLEKKKPQFDRNKNLIVIGGSGAGKTFRFVKPNLIQLNCSNIVVDPKDHLAEKTGKLFLENGYQVKVLDLVNMTNSDGFNPFRYVETENDLNRMLTVYFNNTKGNGSRSDPFWDEASMTLVRAIASYLVDFYNPPGSSKQEQEARRKRGRYPAFSEIGKLIKLLSKGDNQDKSILEVLFEDYAKKYGHENFTMRNWADFQNYKDKTLDSVIAVTTAKFALFNIQSVIDLTQRDTMDLKTWGTQKTMVYLVIPDNDTTFRFLSALFFSTVFSTLTRQADVDFKGQLPIHVRSYLDEFANVGEIPDFAEQTSTVRSRNMSLVPILQNIAQLQGLYKEKEAWKTILGNCDSLLYLGGNDEETFKFMSGLLGKQTVDVRSTSRSFGQTGSSSTSHQKIARDLMTADEVGTMKRDECLVRIAGVPVFRTKKYFPLKHKHWKLLADKETDDRWWNYHINPLAKEEELDLSDYQIRDLSTETSLH

SEQ ID NO: 2413 - protein, 489 aa, Streptococcus agalactiae
ATGTCATCTGAACAACAAGAACGTCAAGCGATGCAATACGTAGAAAGAAGTAGTTTATTGACAGTCAGAACCCTCTTAAAACTCTTAGAATGGTCGGCTAGGCAAGCCTTAGCTCAAGATTCAGCTTATAAGATTGGGGTTCAAAAAATGGAAGAACTCCTTCAAAGTCCTTACGCCATTGAAGCGATTGATGTTAGTAAAGACATACTGGATAAGCCAATCGATGTGGAGAAATTTAAGGAGTTGATGGAGTCAGAAAAACTGCCAATCGCAATTAGTTGGCAAAAAGACTATCTCTACTTTTATGCCAAGGATAAGACCTTGCTCGATCATCACTTGGATGAATTGTTGAAGAAACTGATGTCTAATCCAGAGAAGCTAGAAGGTTTAACCTTTGATAAAACCTTGGACCAAGAGATAGAACTGGCCAAAGAGAAAATTAGAGTGACAGAACTTTCGGCAGTAAAAACCAAGGAGGTGACCTTGTAA

SEQ ID NO: 2414 - protein, 162 aa, Streptococcus agalactiae
MSSEQQERQAMQYVERSSLLTVRTLLKLLEWSARQALAQDSAYKIGVQKMEELLQSPYAIEAIDVSKDILDKPIDVEKFKELMESEKLPIAISWQKDYLYFYAKDKTLLDHHLDELLKKLMSNPEKLEGLTFDKTLDQEIELAKEKIRVTELSAVKTKEVTL

SEQ ID NO: 2415 - protein, 585 aa, Streptococcus agalactiae
ATGATAAGGATAGTGTTGTTTTATCTAGCCATACAGCTTAACGGTCTTCTGGTGAGTTTATTCCTGAAAGAGTATCTGACAATAGAGGGTATAGTCTTGCTACAATTGGTCCTATTAAGTGTGACTTGCTTAGAGATTGCCCGTCATAAAACTGTTCCATTAAAAATTGTGGGCGTACAAAATCGCCTAAGTTGGTTGCTTCTTGGCTTTGTGGCTATGGTTGCTTTTGCAGTCTTCATCAGTTTCCTATTTCCAGTTCAGACTAGGAATCAAGCAGTATTGGTACAAGTAGGAAAACAGGTTCCTCCTATTATCTTTTTATTGTTTCTGGTCAATGCAAGTATTCTTGAAGAGATTGTTTACAGGCAATTGCTGTGGGAAAAATTGACATTCCCTTTTGAACAAATAGGCGTGACCAGTTTTCTCTTTGTTCTATCCCATGGACCTAATCAGTTAGGGAGTTGGCTCATCTATAGCTGTCTTGGCTTGACCTTGGCTGTTGTTCGATTGAAAACTGATTGTATGACGGCAATCGCCTTACATTTACTTTGGAATAGTTTGGCTTATGTCGTAACTTTCTTGTGA

SEQ ID NO: 2416 - protein, 194 aa, Streptococcus agalactiae
MIRIVLFYLAIQLNGLLVSLFLKEYLTIEGIVLLQLVLLSVTCLEIARHKTVPLKIVGVQNRLSWLLLGFVAMVAFAVFISFLFPVQTRNQAVLVQVGKQVPPIIFLLFLVNASILEEIVYRQLLWEKLTFPFEQIGVTSFLFVLSHGPNQLGSWLIYSCLGLTLAVVRLKTDCMTAIALHLLWNSLAYVVTFL

SEQ ID NO: 2417 - protein, 234 aa, Streptococcus agalactiae
ATGAATGAACGATTTTGGGACAATTTAGAAATCATTCTGGCTGAAAAAGACCTCACTTGGGCAGAACTAGCTCGCAAAGTATTCAACGGTCAATATGTTTATCCAAGTGAATTTAATCGCCTCTATCAAAAATTACGGCATTACAAATCTAATCGTCTGATGCCACAAATAAGATGGGTTGAGCGTATTGTTCTAGTCTTAGATATTGATTATGAAGATTTATTTAAGAGGTGA

SEQ ID NO: 2418 - protein, 77 aa, Streptococcus agalactiae
MNERFWDNLEIILAEKDLTWAELARKVFNGQYVYPSEFNRLYQKLRHYKSNRLMPQIRWVERIVLVLDIDYEDLFKR

SEQ ID NO: 2419 - protein, 1356 aa, Streptococcus agalactiae
ATGAAATTTTTAGATTTATTTGCTGGGATAGGCGGTTTTAGGCTAGGGATGGAATCACAGGGTCATAAATGCCTGGGCTTTTGTGAAATTGATAAATTCGCTAGAACATCTTATAAAGCCATGTTTAACACAGAAGGGGAAATAGAATACCATGACATTAAAGAGGTCACAGACCATGACTTTAGACAATTTAGAGGGCAAGTGGACATCATCTGCGGGGGATTTCCTTGCCAAGCATTTTCACTCGCAGGCAGACGATTGGGATTTGAAGATACTCGAGGGACTCTCTTTTTTGAGATTGCTCGAGCGGCCAAACAAATCCAACCACGTTTTCTATTTTTGGAAAACGTCAAAGGCCTACTCAATCACGACGAGGGACGGACGTTCGCCACAATCCTCTCCACGCTGGATGAATTGGGGTATGATGTCGAATGGCAGGTGCTTAACAGCAAGGACTTCCAAGTCCCGCAAAACAGAGAACGGGTCTTTATTATCGGACATTCTAGAAGATACCGTTCCAGATTCATATTTCCTCTCAGAAGAGAAGACAGCCCAGCTCATCTTGAAAGGCTAGGAAATATCAATCCCTCTAAACATGGTTTGAATGGTGAAGTCTATCTGACGAGTGGACTTGCTCCTACACTAACAAGAGGTAAAGGAGAGGGTGCAAAAATCGCCATTCCAGTCTTAACACCAGATAGACTAGAAAAACGCCAACATGGTCGTCGATTTAAGGACAATCAAGACCCTATGTTTACTTTGACCAGTCAAGACAAACACGGAGTTGTTGTCGCAGGAAATCTGCCGACTAGCTTTGACCAGACCGGTAGAGTATTTGACATTTCTGGCTTGTCACCGACCTTGACCACCATGCAAGGTGGAGACAAGGTGCCAAAGATTTTGCTGAGGGAGGAGCTGCCATTTCTGAAAATCAAGGAAGCCACTAAAACAGGGTACGCAAAGGCAACTCTTGGAGACTCTGTCAATCTGGCTTATCCAGACTCAACCAAACGTAGGGGACGTGTGGGAAAGGGAATATCCAATACTCTGACGACTTCAGACAATATGGGAGTAGTAGTTGCTGCTCTGGAATATCGACAGGATAAGTGGTATGAAGTCACAGGCATTGTCTTAGAGGGGAAACTTTATCGCCTGAGAATAAGACGACTGACACCAAGAGAGTGCTTCAGACTTCAAGGCTTTCCTGATTGGGCTTATGAAAGAGCAGAGAGTGTTTCTAGTAAGAGCCAACTATACAAACAGGCCGGCAATAGCGTGACTGTCACAGTTATTGAAGCCATTGCCAGAGAATTTAGAAGAACGGAAGAGGAAGAAAAACATGAACTTACTACATAA

SEQ ID NO: 2420 - protein, 451 aa, Streptococcus agalactiae
MKFLDLFAGIGGFRLGMESQGHKCLGFCEIDKFARTSYKAMFNTEGEIEYHDIKEVTDHDFRQFRGQVDIICGGFPCQAFSLAGRRLGFEDTRGTLFFEIARAAKQIQPRFLFLENVKGLLNHDEGRTFATILSTLDELGYDVEWQVLNSKDFQVPQNRERVFIIGHSRRYRSRFIFPLRREDSPAHLERLGNINPSKHGLNGEVYLTSGLAPTLTRGKGEGAKIAIPVLTPDRLEKRQHGRRFKDNQDPMFTLTSQDKHGVVVAGNLPTSFDQTGRVFDISGLSPTLTTMQGGDKVPKILLREELPFLKIKEATKTGYAKATLGDSVNLAYPDSTKRRGRVGKGISNTLTTSDNMGVVVAALEYRQDKWYEVTGIVLEGKLYRLRIRRLTPRECFRLQGFPDWAYERAESVSSKSQLYKQAGNSVTVTVIEAIAREFRRTEEEEKHELTT

SEQ ID NO: 2421 - protein, 96 aa, Streptococcus agalactiae
ATGATTTGGTGGATACTAGGTGGAATCTATCTGATTTCTATCATCATTTTGATTGTTGAAATCATCCGTGCACCAGAAATGGATGATCATATATAA

SEQ ID NO: 2422 - protein, 31 aa, Streptococcus agalactiae
MIWWILGGIYLISIIILIVEIIRAPEMDDHI

SEQ ID NO: 2423 - protein, 819 aa, Streptococcus agalactiae
ATGAAACGTATTACCGCTAATCAATATCAGACATCAGAGCGTTATTATAAACTCCCTAAAATTTTGTTTGAGAGTGAACGTTATAAGGATATGAAGCTGGAAGTTAAGGTAGCCTACGCGGTTTTAAAAGATCGGTTGGAGTTGTCTTTGAGTAAAGGCTGGATTGATGAGGATGGGGCTATTTATTTGATTTATTCCAATTCAAATCTGATGGCACTATTAGGCTGTTCAAAGTCAAAACTACTCTCTATCAAGAAAACCTTACGTGAATATGGCTTAATTGATGAAGTCCAACAGTCCTCTAGTGAAAGAGGTCGAATGGCAAATAAAATTTACTTGGGGGAATTAGAACATGAACCTACCCCAGTCTTACATACAGACGGGGCTAGTGTTAAAAAAACACTAGGGGAGTCTCAAAGAAAGACGGGGCCGGTCTTATATTCAGCCCCTAGTGAGACTGAAGGAAGTGAGACTAAATATAGTGAAACTGAAGGGAGTGACTTAGTTATGAAGGACGAGGAGGAGAGGCAGCTAGTAGATGAGAAAAAAGAAGAAAACTTTACTTCAAAAGTCGATGGCGTGACCAAGTACGATCGAGACTATATTTGGGGTTTGGTTCATGACCAGTTAAGACAGACAGGTCTATCTCAGTCTGCTAGTGACTATGCCATGATTTATTTTAGTGACCGGTATCAGTATGCATTGGAACAAATGCGATTTGCTCGGTCAGCCGAAGTAATAGCTGAATACGTATTTAATGGTGTGCTGTCGGAGTGGACCAAGCAACTGAGACGACAAGAAGTAAAAGGAGGTGAATAA

SEQ ID NO: 2424 - protein, 272 aa, Streptococcus agalactiae
MKRITANQYQTSERYYKLPKILFESERYKDMKLEVKVAYAVLKDRLELSLSKGWIDEDGAIYLIYSNSNLMALLGCSKSKLLSIKKTLREYGLIDEVQQSSSERGRMANKIYLGELEHEPTPVLHTDGASVKKTLGESQRKTGPVLYSAPSETEGSETKYSETEGSDLVMKDEEERQLVDEKKEENFTSKVDGVTKYDRDYIWGLVHDQLRQTGLSQSASDYAMIYFSDRYQYALEQMRFARSAEVIAEYVFNGVLSEWTKQLRRQEVKGGE

SEQ ID NO: 2425 - protein, 174 aa, Streptococcus agalactiae
ATGCAAAAGGAAGAACAGTCATCACGTCATATCGTGAAGAGCCATATCATGACCATCATGGGAGTTGATAATCTAAAAGCAACTCAACTGGTAAATGAAATGGAACAAACAGGTTTAATCCGATTTGATGAATTCGGGAATTTTGGACTTTTAGTCTTGGAGGGACAATCATGA

SEQ ID NO: 2426 - protein, 57 aa, Streptococcus agalactiae
MQKEEQSSRHIVKSHIMTIMGVDNLKATQLVNEMEQTGLIRFDEFGNFGLLVLEGQS

SEQ ID NO: 2427 - protein, 366 aa, Streptococcus agalactiae
ATGGCATTAAACATTGAAAATATTATTGCTGAAATTAAAGAAGCTACAATTCTTGAACTTAACGATCTTGTAAAAGCTATCGAAGAAGAATTTGGTGTAACTGCTGCTGCTCCTGTAGCTGCTGCCGCTGCTGGTGGTGAAGCTGCTGCTGCTAAAGACTCATTTGACGTTGAATTAACAGCTGCTGGAGACAAAAAAGTTGGCGTTATCAAAGTTGTTCGTGAAATCACAGGCGAAGGTCTTAAAGAAGCTAAAGCTATCGTTGATAACGCACCATCAGTTATCAAAGAAGGTGCTTCAGAAGCAGAAGCTAACGAAATCAAAGAAAAACTTGAAGCTGCAGGTGCTTCAGTTACTCTTAAATAA

SEQ ID NO: 2428 - protein, 121 aa, Streptococcus agalactiae
MALNIENIIAEIKEATILELNDLVKAIEEEFGVTAAAPVAAAAAGGEAAAAKDSFDVELTAAGDKKVGVIKVVREITGEGLKEAKAIVDNAPSVIKEGASEAEANEIKEKLEAAGASVTLK

SEQ ID NO: 2429 - protein, 96 aa, Streptococcus agalactiae
ATGCTTTCAATGCTCCTTTCAGTACTTCAAGCGCCAGTACGCAACGTTGCATATGCTGTCAAAGCAGTTGCAGAAAAAGACGAAGAAGTGGCATAA

SEQ ID NO: 2430 - protein, 31 aa, Streptococcus agalactiae
MLSMLLSVLQAPVRNVAYAVKAVAEKDEEVA

SEQ ID NO: 2431 - protein, 181 aa, Streptococcus agalactiae
TTGTGCCTATCCCAAAAAATAAAAACGGAGGTAAAACTAATGAGTGAAGCAATTATTGCAAAAAAAGCTGAACAAGTTGAACTTATTGCTGAGAAAATGAAAGCAGCAGCAAGTATCGTTGTTGTTGATTCACGTGGTCTTACTGTTGAGCAAGATACTAACTTACGTCGTTCAKWCGTGA

SEQ ID NO: 2432 - protein, 60 aa, Streptococcus agalactiae
  VARIANT 59: Xaa = Any Amino Acid
MCLSQKIKTEVKLMSEAIIAKKAEQVELIAEKMKAAASIVVVDSRGLTVEQDTNLRRSXR

SEQ ID NO: 2433 - protein, 2109 aa, Streptococcus agalactiae
ATGGCAAATAATAATTTTTATAATCGTGACCCTTTTGGAAATATGGATGATATTTTTAATTCTCTAATGGGAAATATGGGGGGCTATAACAGTGAGAATAAGCGATACTTAATCAATGGACGGGAAGTTACTCCTGAAGAATTCAGTCAATATCGTCAAACTGGAAAACTCCCCGGTCAAGAGCTAAATAACCAAAACACTCCTACAAACCAAGTCTCTGCAGATAGTGTTTTGACTAAATTAGGAACTAATTTAACCGATCAAGCACGTCAGCATTTGCTAGATCCAGTTATTGGACGAAACAAAGAAATTCAGGAAACTGCAGAAATTCTAGCTCGTCGTACTAAAAATAATCCTGTTCTGGTTGGTGATGCAGGTGTTGGTAAAACAGCTGTTATTGAAGGTTTGGCACAAGCAATTATAAATGGTGATGTCCCTGCTGCTATCAAAAATAAAGAAATCATTTCGATAGATATTTCTAGCCTTGAAGCTGGCACCCAATATAGGGGTAGTTTTGAAGAAAATATTCAAAATATCATAAAAGAAGTTAAGGAAACAGGAAATATTATTCTCTTCTTTGATGAAATACACCAAATATTAGGAGCCGGTTCAACTGGTGGTGATAGTGGCTCTAAGGGGCTCGCAGATATACTTAAGCCTGCACTTTCACGTGGTGAGTTAACGGTTATAGGTGCAACTACTCAAGATGAATATCGTAACACCATTCTCAAGAATGCTGCCTTAGCACGTCGCTTTAACGAAGTTAAAGTCAATGCACCTTCTGCACAAGATACTTTCAATATCCTTATGGGGATAAGAAACCTCTATGAGCAACATCATAATGTTGTTTTACCTGACTCTGTTTTGAAAGCAGCTGTAGATTTATCTATTCAATACATCCCACAAAGAAGTCTCCCTGATAAAGCAATTGACCTTATTGATATGACTGCTGCACACCTAGCTGCGCAACATCCCGTAACTGACCTTAAATCCTTAGAAAAAGAAATCGCTGAGCAAAGAGACAAGCAAGAAAAAGCTGTCAATACTGAAGATTTTGAAGAAGCTCTTAAGGTCAAGACACGCATTGAAGAGTTACAAAACCAGATTGATAATCATACCGAAGGACAAAAAGTCACTGCAACTATCAACGATATCGCTATGTCAATTGAGCGTCTAACTGGAGTTCCTGTATCAAATATGGGTGCTAGTGATATTGAACGCTTAAAAGAACTTGGCAATCGTCTAAAAGGTAAAGTCATTGGTCAAAATGATGCTGTTGAGGCAGTTGCGAGAGCTATTCGCCGAAATCGTGCTGGTTTCGATGATGGTAATCGTCCGATTGGTAGCTTTCTATTTGTTGGACCAACTGGAGTTGGTAAAACCGAGCTAGCAAAGCAATTAGCTTTTGATATGTTCGGATCAAAGGATGCTATCGTTAGACTTGATATGTCTGAATATAATGATCGTACAGCAGTTTCTAAGCTAATTGGAGCGACTGCTGGTTACGTTGGTTATGACGACAATAGTAATACACTAACAGAACGTATCCGTCGAAATCCTTATTCTATTGTTCTTCTTGATGAAATCGAAAAAGCTGACCCGCAAGTTATCACGCTTCTCCTTCAAGTTCTAGATGATGGCCGTTTAACTGATGGTCAAGGAAACACTATTAACTTTAAAAATACTGTTATCATTGCAACCTCAAATGCAGGTTTTGGAAACGAAGCATTTACAGGTGACAGCGATAAAGACTTGAAAATTATGGAACGAATTTCTCCATATTTCCGTCCAGAATTTCTAAATCGTTTCAATGGTGTTATTGAATTCTCTCACCTAAGCAAAGATGACTTAAGCGAAATTGTAGATTTGATGCTTGATGAAGTTAACCAAACAATTAGCAAAAAAGGAATTGACCTTGTGGTAGATGAAAATGTTAAATCACACTTAATTGAACTGGGTTATGACGAAGCAATGGGAGTACGTCCATTGCGCCGTGTCATCGAGCAAGAAATTCGAGATCGCATCACAGACTACTATCTCGATCATACAGACGTTAAACACCTAAAAGCTAATTTGCAAGATGGCCAAATCGTCATTTCTGAAAGATAA

SEQ ID NO: 2434 - protein, 702 aa, Streptococcus agalactiae
MANNNFYNRDPFGNMDDIFNSLMGNMGGYNSENKRYLINGREVTPEEFSQYRQTGKLPGQELNNQNTPTNQVSADSVLTKLGTNLTDQARQHLLDPVIGRNKEIQETAEILARRTKNNPVLVGDAGVGKTAVIEGLAQAIINGDVPAAIKNKEIISIDISSLEAGTQYRGSFEENIQNIIKEVKETGNIILFFDEIHQILGAGSTGGDSGSKGLADILKPALSRGELTVIGATTQDEYRNTILKNAALARRFNEVKVNAPSAQDTFNILMGIRNLYEQHHNVVLPDSVLKAAVDLSIQYIPQRSLPDKAIDLIDMTAAHLAAQHPVTDLKSLEKEIAEQRDKQEKAVNTEDFEEALKVKTRIEELQNQIDNHTEGQKVTATINDIAMSIERLTGVPVSNMGASDIERLKELGNRLKGKVIGQNDAVEAVARAIRRNRAGFDDGNRPIGSFLFVGPTGVGKTELAKQLAFDMFGSKDAIVRLDMSEYNDRTAVSKLIGATAGYVGYDDNSNTLTERIRRNPYSIVLLDEIEKADPQVITLLLQVLDDGRLTDGQGNTINFKNTVIIATSNAGFGNEAFTGDSDKDLKIMERISPYFRPEFLNRFNGVIEFSHLSKDDLSEIVDLMLDEVNQTISKKGIDLVVDENVKSHLIELGYDEAMGVRPLRRVIEQEIRDRITDYYLDHTDVKHLKANLQDGQIVISER

SEQ ID NO: 2435 - protein, 1047 aa, Streptococcus agalactiae
TTGCTTGGGATAGCTCACAACGTGCTGGGCTTTACTTCGGTGTTCCATTTATTATTTTCTGCTATATTTATCACAAACTACGTTACAAGAAATGGTGATCTTATGGGAAGATTTAAAGAACTTTTAGAGAGTAAAAAAACTCTCATCCTACATGGTGCCTTGGGGACCGAGCTTGAGAGTAGAGGTTGTGATGTTTCTGGGAAACTTTGGTCAGCCAAATATCTGATTGAGGATCCAGCAGCTATTCAGACCATTCATGAAGATTATATTCGTGCTGGCGCTGATATTGTGACGACATCAACTTATCAGGCGACTTTACAAGGACTAGCTCAAGTTGGTGTCTCTGAAAGTCAGGCAGAAGATTTGATTCGCTTGACTGTTCAGTTGGCAAAAGCTGCGCGTGAGCAAGTTTGGAAAAGTTTGACAAAAGAAGAAAAATCAGAGAGAATCTATCCTTTGATTTCTGGGGATGTTGGTCCCTACGCTGCCTTTTTAGCGGATGGCTCTGAGTACACTGGACTCTACGATATTGATAAGCAAGGTCTTAAAAACTTCCATCGCCATCGTATTGAGCTTCTTTTAGATGAGGGTGTTGACATTCTGGCACTTGAAACCATTCCAAACGCTCAGGAGGCTGAGGCTCTTATTGAGCTACTTGCCGAGGATTTCCCTCAGGTTGAGGCTTATATGTCATTCACCTCTCAAGATGGTAAGACCATCTCAGATGGTAGTGCTGTTGCAGACTTGGCGAAAGCTATTGATGTTAGCCCACAGGTCGTGGCGCTGGGCATTAACTGTTCAAGTCCATCGTTAGTTGCTGATTTCTTGCAAGCAATAGCAGAGCAGACTAACAAGCCTCTTGTGACCTATCCAAACTCTGGAGAGGTTTATGATGGGGCAAGCCAATCTTGGCAATCTAGCCCTGATCATTCACACACCCTACTTGAAAATACAAGTGACTGGCAAAAACTTGGCGCCCAAGTTGTCGGAGGTTGTTGCCGAACTAGACCAGCTGATATTGCTGACCTCTCTGCACATTTAAAATAA

SEQ ID NO: 2436 - protein, 348 aa, Streptococcus agalactiae
MLGIAHNVLGFTSVFHLLFSAIFITNYVTRNGDLMGRFKELLESKKTLILHGALGTELESRGCDVSGKLWSAKYLIEDPAAIQTIHEDYIRAGADIVTTSTYQATLQGLAQVGVSESQAEDLIRLTVQLAKAAREQVWKSLTKEEKSERIYPLISGDVGPYAAFLADGSEYTGLYDIDKQGLKNFHRHRIELLLDEGVDILALETIPNAQEAEALIELLAEDFPQVEAYMSFTSQDGKTISDGSAVADLAKAIDVSPQVVALGINCSSPSLVADFLQAIAEQTNKPLVTYPNSGEVYDGASQSWQSSPDHSHTLLENTSDWQKLGAQVVGGCCRTRPADIADLSAHLK

SEQ ID NO: 2437 - protein, 1227 aa, Streptococcus agalactiae
GTGCTGTCTTATTTGATTGGTGCCGTTGTGGTTTATTTGGTCATGCTATCACTTGGGGAATTGGCGGTTGCCATGCCGGTGACGGGGTCATTCCACACTTATGCCACTAAGTTTATCAGTCCTGGAACAGGTTTTACTGTTGCTTGGCTATATTGGATTTGTTGGACGGTCGCCTTGGGGACTGAATTTTTAGGTGCTGCCATGCTGATGCAGCGCTGGTTCCCAAATGTGCCGGCTTGGGCATTTGCTTCCTTTTTTGCCCTTGTGATTTTTGGTTTAAATGCTCTTAGCGTACGCTTTTTTGCAGAAGCAGAGTCTTTCTTCTCAAGTATTAAGGTTATTGCTATCATTATCTTTATTATCTTGGGCTTAGGTGCTATGTTTGGTCTAGTTTCCTTTGAAGGTCAGCACAAGGCTATTCTCTTCACTCATCTGACTGCCAATGGTGCCTTTCCAAATGGTATCGTTGCAGTTGTCTCAGTCATGTTGGCTGTTAACTATGCCTTCTCTGGTACTGAGTTAATTGGTATTGCGGCTGGTGAAACGGATAATCCCAAAGAAGCTGTACCAAGGGCTATTAAAACGACAATCGGTCGCTTGGTTGTTTTCTTTGTACTGACAATTGTTGTCCTAGCTTCGCTATTGCCAATGAAAGAGGCAGGCGTATCCACAGCACCATTCGTTGATGTCTTTGACAAGATGGGAATCCCTTTTACGGCGGATATCATGAACTTCGTTATCTTGACAGCCATCCTGTCTGCTGGTAACTCAGGTCTCTACGCATCAAGCCGTATGCTCTGGTCCCTTGCCAATGAAGGTATGTTGTCAAAATCTGTTGTGAAAATCAATAAACACGGTGTCCCAATGCGTGCTCTTCTCTTGTCAATGGCAGGAGCAGTGCTGTCGCTCTTTTCAAGTATTTACGCTGCAGACACAGTTTATCTAGCCTTGGTTTCAATCGCGGGCTTTGCTGTTGTTGTCGTATGGCTAGCCATTCCAGTCGCACAAATCAATTTCCGCAAGGAATTCTTGAAAGAGAATCAACTAGAAGATTTGTCTTACAAAACACCTTTTACACCAGTTCTCCCTTATATCACAATCATTTTGCTCTTGATTTCGATTGTAGGGATTGCTTGGGATAGCTCACAACGTGCTGGGCTTTACTTCGGTGTTCCATTTATTATTTTCTGCTATATTTATCACAAACTACGTTACAAGAAATGGTGA

SEQ ID NO: 2438 - protein, 408 aa, Streptococcus agalactiae
MLSYLIGAVVVYLVMLSLGELAVAMPVTGSFHTYATKFISPGTGFTVAWLYWICWTVALGTEFLGAAMLMQRWFPNVPAWAFASFFALVIFGLNALSVRFFAEAESFFSSIKVIAIIIFIILGLGAMFGLVSFEGQHKAILFTHLTANGAFPNGIVAVVSVMLAVNYAFSGTELIGIAAGETDNPKEAVPRAIKTTIGRLVVFFVLTIVVLASLLPMKEAGVSTAPFVDVFDKMGIPFTADIMNFVILTAILSAGNSGLYASSRMLWSLANEGMLSKSVVKINKHGVPMRALLLSMAGAVLSLFSSIYAADTVYLALVSIAGFAVVVVWLAIPVAQINFRKEFLKENQLEDLSYKTPFTPVLPYITIILLLISIVGIAWDSSQRAGLYFGVPFIIFCYIYHKLRYKKW

SEQ ID NO: 2439 - protein, 147 aa, Streptococcus agalactiae
ATGGAAAATCATCGTTATGAAGATGAAGGTAAATTCCAGCGTAAGATGACCAGTCGTCATCTCTTTATGTTATCGCTAGGTGGTGTTATCGGGACTGGGCTTTTCTTGAGTTCAGGTTATACCATTGCACAGGCTGGTCCGCTTTGA

SEQ ID NO: 2440 - protein, 48 aa, Streptococcus agalactiae
MENHRYEDEGKFQRKMTSRHLFMLSLGGVIGTGLFLSSGYTIAQAGPL

SEQ ID NO: 2441 - protein, 651 aa, Streptococcus agalactiae
ATGTCATATTTTAGAAATTACTGGTATCGTTTTGGAGCAATTTTATTTATTATTTTAGCAGTAATATTGCTTGTTTTTAGACCTGACTGGTCAATGCTTCACTATCTATTGTATTTTAACTTTATGGCACTTCTAGCGCATCAATTTGAAGAATATCAGTTTCCCGGTGGGGCATCACCTATCATTAACTATGTTGTTTATGATGAAGAAGAGCTGATGGATTGTTTTCCAGGCAATACTCAGTCTATTATGTTGGTTAATACTATTGCTTGGTTGCTTTACATTGCTAGTATTGCTTTTCCTCAAGCTTATTGGCTTGGATTAGGAGTCATGTTCTTTAGTCTAACGCAGCTCTTGGGTCATGGTTTTCAGATGAATATTAAACTTAAAACTTGGTATAATCCTGGTCTAGCAACGACAGTATTTCTCCTAGTACCAATAGCTTGCGCATACATCTATCAAGCTAGTGCAGAAGGAATGCTCACTTGGGGAGATTGGCTAGGTGGTTTTATCATGTTGATTGTCTGTGTACTAACTAGCATTATTGCACCTGTACAGCTATTGAAGGATAAGGAGACCAATTATATTATTAGTCCTTGGCAAATGGACCGTTTTCATAAGGTCGTTAATTTTGTAAGGATAAAAAAATAA

SEQ ID NO: 2442 - protein, 216 aa, Streptococcus agalactiae
MSYFRNYWYRFGAILFIILAVILLVFRPDWSMLHYLLYFNFMALLAHQFEEYQFPGGASPIINYVVYDEEELMDCFPGNTQSIMLVNTIAWLLYIASIAFPQAYWLGLGVMFFSLTQLLGHGFQMNIKLKTWYNPGLATTVFLLVPIACAYIYQASAEGMLTWGDWLGGFIMLIVCVLTSIIAPVQLLKDKETNYIISPWQMDRFHKVVNFVRIKK

SEQ ID NO: 2443 - protein, 432 aa, Streptococcus agalactiae
ATGNNNNNTTGGGATTTACGAGTGCAGTCACTACTTATTTCGGGACTTTTTATTCGATTACACTTTTTCGAAGAATTTGGTTTCCCTGGAGGTTTTCCGCTTATCACTATGCTAGTTGAACTTAAATCGGTTGAAACTGATACTGGTAAGTGGGACTTAAACCATCTATCAGCCTTTTTCGGGAATCAGTGGTTTGCAGTGATTGTTTATCTTTTGCCGATTTTTTGTCCCAATATACCATTTTTAACACTTGCAGTCATGATTTTTGCATTTGCAGAACTTGCCATGCATCTTTTCTTTTTTAATCTTTCCTTGAAGAAGTGGTATAATCCAGGACTTCTTACGACCTTAGTAGGTCTTGTCCCTGTTTCTGTCTATTATTTAGCTCATGATTGGAAGTTGTATTCTGGACTTGATTGGTTTTTAGGCTGA

SEQ ID NO: 2444 - protein, 143 aa, Streptococcus agalactiae
  VARIANT 2, 3: Xaa = Any Amino Acid
MXXWDLRVQSLLISGLFIRLHFFEEFGFPGGFPLITMLVELKSVETDTGKWDLNHLSAFFGNQWFAVIVYLLPIFCPNIPFLTLAVMIFAFAELAMHLFFFNLSLKKWYNPGLLTTLVGLVPVSVYYLAHDWKLYSGLDWFLG

SEQ ID NO: 2445 - protein, 381 aa, Streptococcus agalactiae
ATGNNNNNCAGTCGAGATGACCTACTTACCCTTTTCATCGAAAGACTAACATTAAATCTCTTTAAGCAACTTGGTCAATTGGAGCAACCTACTTTTAGCCAAGTTTTCCAAAATTTTTTTAGTTATTGGTCTGATTATAAATCCCTTCTTCTCATTCTTAGAAAGAATGACCTACTCCCTCAATTTCAACAATCCTGGTTCCGACATATTGATTTGATAGAGTTAGGTCGTGGTGATTTATCTTCCAATACCTATGCTCAGCGATTTGCGATTGGTGGTATTTTCAGTGTTCTAATTGAGTGGATTCATCAGGACTGCCAAACAAGTATCGAAGAATTAACTCAAGTTTCCTTCGATATTATCAATCATTTAAAAAATTAA

SEQ ID NO: 2446 - protein, 126 aa, Streptococcus agalactiae
  VARIANT 2, 3: Xaa = Any Amino Acid
MXXSRDDLLTLFIERLTLNLFKQLGQLEQPTFSQVFQNFFSYWSDYKSLLLILRKNDLLPQFQQSWFRHIDLIELGRGDLSSNTYAQRFAIGGIFSVLIEWIHQDCQTSIEELTQVSFDIINHLKN

SEQ ID NO: 2447 - protein, 597 aa, Streptococcus agalactiae
ATGGCAGAAGAATTTTTAAATACTCATAATGCGTCTATTTTATTGAGTGCAGCTAACAAGTCACATTATCCTCAGGATGATCTCCCAGAAGTTGCTCTCGCTGGTCGTTCAAATGTTGGTAAATCAAGCTTTATCAACACGCTTCTTGGTCGTAAAAACCTAGCGCGTACGTCGAGTAAGCCAGGTAAGACACAACTGCTCAACTTTTATAACATTGATGACAAACTGCGTTTTGTCGATGTCCCTGGATATGGCTACGCTAAGGTGTCTAAAACTGAGCGTGCTAAGTGGGGCAAGATGATTGAAGAGTACCTTGTAACACGTGATAACCTTCGTGTTGTTGTTAGTTTAGTTGATTTTCGTCATGATCCAAGTGCGGACGATATTCAAATGTATGAATTTCTTAAGTACTATGAGATTCCAGTAATTATTGTAGCGACAAAGGCAGATAAAATACCTCGTGGCAAGTGGAATAAACATGAGTCGTCTATTAAGAAGAAATTAAACTTTGATAAAAAGGACCATTTCATCGTCTTTTCATCTGTTGACCGCACAGGTCTTGATGAATCATGGGATACTATTTTATCTGAGTTATAA

SEQ ID NO: 2448 - protein, 198 aa, Streptococcus agalactiae
MAEEFLNTHNASILLSAANKSHYPQDDLPEVALAGRSNVGKSSFINTLLGRKNLARTSSKPGKTQLLNFYNIDDKLRFVDVPGYGYAKVSKTERAKWGKMIEEYLVTRDNLRVVVSLVDFRHDPSADDIQMYEFLKYYEIPVIIVATKADKIPRGKWNKHESSIKKKLNFDKKDHFIVFSSVDRTGLDESWDTILSEL

SEQ ID NO: 2449 - protein, 1227 aa, Streptococcus agalactiae
ATGGCTGGGAATCGTAATAACGATATGAATGTCTATTGTTCATTTTGTGGCAAAAGCCAAGATGAAGTAAAAAAAATTATTGCAGGTAATGGTGTTTTCATTTGTAATGAATGTGTGGCCTTATCACAAGAAATTATTAAGGAAGAATTAGCTGAGGAAGTACTGGCTGATTTAGCAGAAGTACCAAAACCTAAGGAACTATTAGAAATATTAAATCAATATGTTGTAGGGCAAGATCGTGCTAAACGTGCTTTAGCAGTTGCTGTCTACAATCATTACAAGCGTGTTAGTTATACCGAGAGTAGTGACGATGATGTAGATTTGCAAAAATCCAACATTTTGATGATTGGTCCAACTGGCTCAGGAAAAACCTTCTTAGCACAAACACTGGCTAAAAGCCTTAATGTACCGTTTGCTATTGCAGATGCGACTTCATTGACCGAAGCAGGATACGTTGGAGAAGATGTTGAGAATATTCTTCTTAAATTGATTCAAGCTGCTGATTATAATGTCGAACGTGCTGAGCGTGGTATTATCTACGTTGATGAAATAGATAAAATTGCTAAGAAAGGCGAAAATGTTTCTATCACACGTGATGTGTCTGGTGAAGGTGTACAGCAAGCCCTTCTTAAAATTATTGAGGGTACGGTAGCAAGTGTTCCCCCACAGGGTGGGCGTAAACATCCTAACCAAGAAATGATTCAAATTAATACCAAGAACATCCTTTTTATTGTCGGTGGTGCTTTTGATGGTATTGAAGACCTTGTGAAGCAACGTTTAGGCGAAAAAGTTATTGGTTTTGGACAGACAAGCCGTAAAATTGATGACAACGCTTCTTATATGCAAGAGATAATTTCTGAGGATATTCAAAAGTTTGGACTGATTCCAGAGTTTATTGGCCGTTTACCAGTAGTTGCAGCGTTAGAACTTCTTACTGCAGAAGATCTGGTTCGTATTCTGACAGAACCACGCAATGCTTTGGTTAAACAATACCAAACCTTATTATCTTATGATGGTGTAGAATTGGAATTTGACCAGGATGCTCTATTGGCTATCGCTGATAAGGCTATCGAGCGCAAGACTGGTGCACGTGGTTTACGTTCTATTATTGAAGAAACGATGCTTGATATCATGTTTGAAATTCCAAGCCAAGAAGATGTAACAAAAGTTCGTATCACAAAGGCTGCTGTTGAGGGTACTGACAAGCCTGTTTTAGAGACGGCTTAG

SEQ ID NO: 2450 - protein, 408 aa, Streptococcus agalactiae
MAGNRNNDMNVYCSFCGKSQDEVKKIIAGNGVFICNECVALSQEIIKEELAEEVLADLAEVPKPKELLEILNQYVVGQDRAKRALAVAVYNHYKRVSYTESSDDDVDLQKSNILMIGPTGSGKTFLAQTLAKSLNVPFAIADATSLTEAGYVGEDVENILLKLIQAADYNVERAERGIIYVDEIDKIAKKGENVSITRDVSGEGVQQALLKIIEGTVASVPPQGGRKHPNQEMIQINTKNILFIVGGAFDGIEDLVKQRLGEKVIGFGQTSRKIDDNASYMQEIISEDIQKFGLIPEFIGRLPVVAALELLTAEDLVRILTEPRNALVKQYQTLLSYDGVELEFDQDALLAIADKAIERKTGARGLRSIIEETMLDIMFEIPSQEDVTKVRITKAAVEGTDKPVLETA

SEQ ID NO: 2451 - protein, 495 aa, Streptococcus agalactiae
ATGACAAAGCAAATAATTGCCATTTGGGCTGAAGATGAAGACCATTTGATTGGAGTTAATGGCGGTTTACCATGGAGGCTTCCTAAAGAGTTACATCACTTCAAAGAAACGACCATGGGGCAGGCTTTGCTTATGGGACGAAAGACCTTTGATGGAATGAACCGTCGTGTTTTACCTGGTAGAGAGACAATCATCTTAACAAAAGATGAACAATTCCAAGCAGATGGAGTGACAGTCCTAAATAGTGTTGAACAAGTTATAAAATGGTTTCAGGAACATAATAAGACCTTATTTATTGTAGGTGGTGCAAGTATTTATAAAGCATTTCTGCCTTATTGTGAAGCAATCATAAAAACTAAAGTTCATGGAAAATTTAAAGGTGATACCTATTTTCCTGATGTTAATCTATCTGAGTTTAAAGTTATCTCTAGAGATTATTTTGAAAAGGATGAGCAGAATGCTCATGCTTTTACTGTGACATATTTTGAAAAATAA

SEQ ID NO: 2452 - protein, 164 aa, Streptococcus agalactiae
MTKQIIAIWAEDEDHLIGVNGGLPWRLPKELHHFKETTMGQALLMGRKTFDGMNRRVLPGRETIILTKDEQFQADGVTVLNSVEQVIKWFQEHNKTLFIVGGASIYKAFLPYCEAIIKTKVHGKFKGDTYFPDVNLSEFKVISRDYFEKDEQNAHAFTVTYFEK

SEQ ID NO: 2453 - protein, 840 aa, Streptococcus agalactiae
ATGACAAAAGCCGATTTATTATTTAAAGACAATATCACGAAAATTATGTCTGAAGGTGTATTTAGCGAGCAAGCCAGACCTAGATATAAAAATGGGGAAATGGCTAATTCTAAGTATATTACAGGTGCCTTTGCAGAGTATGATTTATCAAAGGGTGAATTTCCTATTACAACTCTACGTCCAATTCCAATAAAATCTGCTATTAAAGAAATTTTCTGGATTTATCAAGATCAGACAAATGATTTAGCAGTTTTGAATGATAAATATGGTGTGACATACTGGAATGATTGGGAAGTTGGCCATACTGGCACGATAGGTCAGCGCTACGGTGCAGTTGTTAAAAAACATAATATTATATCAAAACTCTTAAAACAGCTTGAAGATAACCCTTGGAATCGTCGTAATGTTATTTCATTATGGGACTATGAAGCATTTGAAGAAACAGAAGGCCTATTACCTTGTGCTTTTCAAACGATGTTTGATGTGAGACGCGTTAATGGTGAGCTTTATTTGGATGCCACATTAACACAACGTTCTAATGACATGTTAGTTGCACATCATATTAATGCTATGCAGTATGTAGCACTTCAGATGATGATTGCAAAGCATTTTGGTTGGAGAGTTGGGAAGTTTTTCTATTTTATCAATAATCTTCATATTTATGATAACCAGTTTGAACAAGCTCAGGAACTCTTAAAACGCCAACCGTCTGAGTGTAACCCCAAACTAGTATTGAATGTTCCAGATGGAACAGACTTTTTTGATATTAAACCAGATGATTTTGCGTTAGTTGATTATGACCCAATTAAACCTCAATTACGTTTTGATTTAGCAATCTAA

SEQ ID NO: 2454 - protein, 279 aa, Streptococcus agalactiae
MTKADLLFKDNITKIMSEGVFSEQARPRYKNGEMANSKYITGAFAEYDLSKGEFPITTLRPIPIKSAIKEIFWIYQDQTNDLAVLNDKYGVTYWNDWEVGHTGTIGQRYGAVVKKHNIISKLLKQLEDNPWNRRNVISLWDYEAFEETEGLLPCAFQTMFDVRRVNGELYLDATLTQRSNDMLVAHHINAMQYVALQMMIAKHFGWRVGKFFYFINNLHIYDNQFEQAQELLKRQPSECNPKLVLNVPDGTDFFDIKPDDFALVDYDPIKPQLRFDLAI

SEQ ID NO: 2455 - protein, 1278 aa, Streptococcus agalactiae
GTGAGAAACAAGACTTTGAAGGTTAAAGCTTTTTTTCATATTTTTAGCTTCTTTATGGTAAAATGGAATTTAGCAAAAATGACTTTTATTCAGAAAGGTTTACCAATGAAAATAGGAATTGATAAGATTGGTTTTGCAACCAGTCAATATGTCCTTGAAATGACTGATTTGGCTATTGCTCGCCAAGTTGACCCTGAAAAATTCAGCAAGGGATTATTGTTAGATTCACTTAGTATTACGCCAGTTACAGAAGATATCGTTACACTTGCAGCTTCTGCAGCTAATGATATTTTATCTGATGAGGACAAAGAAACTATTGATATGGTGATTGTCGCTACAGAATCAAGTATCGATCAGAGTAAGGCGGCTTCTGTCTATGTACATCAACTTTTAGAGATTCAACCTTTCGCAAGGTCATTCGAGATGAAAGAAGCATGCTATAGCGCAACTGCTGCTCTTGATTACGCTAAATTACATGTAGAAAAACATCCAGATTCTAAAGTATTAGTGATAGCTTCAGATATTGCTAAATATGGCATTAAATCTACTGGAGAATCCACTCAAGGTGCAGGCAGTATCGCTATGCTTATTAGTCAAAATCCATCCATTCTAGAGCTAAAAGAGGACCATCTAGCGCAAACCCGTGATATTATGGACTTTTGGCGACCAAATTATTCTGATGTTCCTTATGTTAATGGCATGTTTTCAACAAAACAATATCTAGATATGCTAAAAACTACTTGGAAAGAATATCAAAAACGTTTTAATACTAGTCTAAGTGACTATGCTGCTTTTTGTTTCCATATTCCTTTTCCAAAATTAGCTTTAAAGGGCTTTAATAAAATTCTAGATAATAACTTAGATGAACAAAAGAAAGCTGAACTACAAGAAAATTTTGAGCACTCTATTACCTATAGTAAGAAAATTGGAAATTGCTATACTGGCTCATTGTATCTAGGACTTCTATCGTTACTAGAAAATAGTCAAAATTTAAAAGCAGGTGATCAAATTGCCTTCTTTTCATACGGTAGCGGAGCTGTTGCTGAAATTTTTACCGGTCAGTTAGTAGACGGCTACCAAAATAAACTTCAGAGCGATCGTATGGATCAACTCAATAAACGTCAAAAAATTACAGTAACTGAGTATGAGAAACTCTTCTTTGAAAAAACAATCCTAGACGAAAATGGAAATGCTAACTTCAACACCTACCGGACTGGCACTTTTTCTCTAGACTCTATTTGCGAACATCAACGTATCTACAAGAAAATTAATAATTAA

SEQ ID NO: 2456 - protein, 425 aa, Streptococcus agalactiae
MRNKTLKVKAFFHIFSFFMVKWNLAKMTFIQKGLPMKIGIDKIGFATSQYVLEMTDLAIARQVDPEKFSKGLLLDSLSITPVTEDIVTLAASAANDILSDEDKETIDMVIVATESSIDQSKAASVYVHQLLEIQPFARSFEMKEACYSATAALDYAKLHVEKHPDSKVLVIASDIAKYGIKSTGESTQGAGSIAMLISQNPSILELKEDHLAQTRDIMDFWRPNYSDVPYVNGMFSTKQYLDMLKTTWKEYQKRFNTSLSDYAAFCFHIPFPKLALKGFNKILDNNLDEQKKAELQENFEHSITYSKKIGNCYTGSLYLGLLSLLENSQNLKAGDQIAFFSYGSGAVAEIFTGQLVDGYQNKLQSDRMDQLNKRQKITVTEYEKLFFEKTILDENGNANFNTYRTGTFSLDSICEHQRIYKKINN

SEQ ID NO: 2457 - protein, 1284 aa, Streptococcus agalactiae
ATGACAAAAATTTCCTGGACAGGATTTTCAAAAAAATCCCCTGAAGAACGTATTCATTACCTTGAAGAACAAGATTTTTTAGCTGATTCTTCCCTAGAAATAGTGACGAATCAGGACTTACTCTCTTTATCACTAGCCAATCAAATGGCTGAAAATGTCATCGGTCGAATAGCCTTACCATTTTCACTTGTCCCAGATGTTTTGGTTAACGGTAAAGTCTATCAAGTCCCATATGTCACTGAAGAACCGTCAGTTGTTGCTGCTGCAAGTTTTGCTGCTAAAATTATAAAACGATCTGGTGGTTTTCTGACAACTGTCCATAATCGTAAAATGATTGGACAAGTAGCCATTTATGATGTACAAGATAGTCAACACACTAAAGAATCTATATTAAATCAAAAACAGCAATTATTAGAAATAGCCAACGCTGCTCATCCATCAATAGTCAAGCGTGGAGGCGGTGCTTGCGACCTAACTATTGAGATTAAAGAAGACTTTTTGATTGTTTACCTTATGGTTGATACAAAAGAAGCCATGGGTGCTAATATGGTTAACACCATGATGGAAGCATTATCTTCGCCATTAGAAGACATTTCAAAAGGCAAAAGCTTAATGTCAATTTTATCTAACTATGCTACCGAATCTTTAGTGACTGCTACATGCCGAGTTGATTTAAGATTTCTAAGTCGCCAAAAAGAGGAGGCCATCAAGTTAGCTCAAAAAATGACGATGGCAAGTCAATTAGCTCAAGTAGACCCTTATCGTGCTAGCACACATAATAAAGGTATTTTTAATGGCATTGATGCTATCGTCTTAGCTACTGGAAATGATTGGCGAGCTATTGAAGCTGGAGCGCATACCTATGCTGTCAAAGATGGGCAATATCGAGGATTATCTAGATGGTCTTATAAGGTTGATGATAATTGCCTAGAAGGTACTCTGACGCTACCGATGCCTGTTGCAACAAAAGGTGGATCCATTGGTATTAACCCTAGTGTCCACCTAGCTCACGATCTACTAGGTCGTCCTAATGCTAAAGAGTTGGCAAGTATTATTCTTTCGATTGGACTAGCTCAAAATTTTGCGGCTCTTAAGGCATTGGTTAGCACAGGAATTCAAGCTGGTCACATGAAACTTCAAGCAAAGTCGTTGGCACTACTTGCTGGAGCTAAAGAAGAACAAATTTCAGAAGTCGTTAAACAGCTTCTAGACTCTAAACACATGAATCTAGAGACAGCACAAAAAATTGTCAATAAACTTACTAAAAGTAAAAAAAGAATTTGA

SEQ ID NO: 2458 - protein, 427 aa, Streptococcus agalactiae
MTKISWTGFSKKSPEERIHYLEEQDFLADSSLEIVTNQDLLSLSLANQMAENVIGRIALPFSLVPDVLVNGKVYQVPYVTEEPSVVAAASFAAKIIKRSGGFLTTVHNRKMIGQVAIYDVQDSQHTKESILNQKQQLLEIANAAHPSIVKRGGGACDLTIEIKEDFLIVYLMVDTKEAMGANMVNTMMEALSSPLEDISKGKSLMSILSNYATESLVTATCRVDLRFLSRQKEEAIKLAQKMTMASQLAQVDPYRASTHNKGIFNGIDAIVLATGNDWRAIEAGAHTYAVKDGQYRGLSRWSYKVDDNCLEGTLTLPMPVATKGGSIGINPSVHLAHDLLGRPNAKELASIILSIGLAQNFAALKALVSTGIQAGHMKLQAKSLALLAGAKEEQISEVVKQLLDSKHMNLETAQKIVNKLTKSKKRI

SEQ ID NO: 2459 - protein, 450 aa, Streptococcus agalactiae
ATGAATAAAAATCAATACCCAAAATGGGAAGAATTACCTGAACTAGATTTGTATCTTGACCAAGTACTTCTCTATGTGAATCAATTAATTAATCCTAAAACAATAACTAACGATAAACTACTCACCGCTTCGATGATCAACAATTATGTCAAACATAATTATATATCCAAACCTATAAAAAAAAAATACAATCGCCGTCAAGTAGCACGATTGATTGTTATTACAGCTTTTAAACAAGTTTTTGCTATTCAAGAAATCAGTCAAACATTAGAACTTCTGACAGCTGACAATCATTCTGAAGAAGCATATAACGGATTTGCTGCTTGTATGAACAAAGAAGAGGTTCACGATTTACCACCAGTTGTCATTAGTGCCTGTCAGACGTTGAACCTTTATCAAGAAACACAAAAATTAGTTTTAGAACTAGGAGGAAAAAATAAAAATGCTTAA

SEQ ID NO: 2460 - protein, 149 aa, Streptococcus agalactiae
MNKNQYPKWEELPELDLYLDQVLLYVNQLINPKTITNDKLLTASMINNYVKHNYISKPIKKKYNRRQVARLIVITAFKQVFAIQEISQTLELLTADNHSEEAYNGFAACMNKEEVHDLPPVVISACQTLNLYQETQKLVLELGGKNKNA

SEQ ID NO: 2461 - protein, 564 aa, Streptococcus agalactiae
ATGCTAATCCTATTACCAATCACCGCTGTCTATAGTCACAACCACTTCGGATTACAAGCAGCACTTGGTACCTCAATATTCGTCACTTCTTTATTTTTGATGTTTTTATCATCAAGTATTTACCACTCCATGACTTATAACAGTCTTCAAAAATATGTTCTACGCATGATTGATCACTCTATGATTTATATTGCTATTGCAGGTAGTTATACTCCTGTCGCATTGTCACTTATTGGCGGCTGGTTAGGATATCTCATCATTTTTTTACAATGGGGGATTACATTATTTGGTATCCTTTATAAAATCTTCGCTCCCAAAATCAATGATAAATTTAGCCTTGTACTTTACCTCATTATGGGATGGCTGGTTATCTTTATTTTCCCTGCTATTATCACAAAAACTGGACCAGCTTTTTGGGGATTACTCTTGGCTGGTGGTATTTGCTATACTATCGGTGCACTCTTTTATGCTCGCAAACGTCCTTATGATCACATGATTTGGCACCTTTTTATTCTATTAGCTTCTATTTTACAATACATTGGAATTGTCTACTTCATGCTATAA

SEQ ID NO: 2462 - protein, 187 aa, Streptococcus agalactiae
MLILLPITAVYSHNHFGLQAALGTSIFVTSLFLMFLSSSIYHSMTYNSLQKYVLRMIDHSMIYIAIAGSYTPVALSLIGGWLGYLIIFLQWGITLFGILYKIFAPKINDKFSLVLYLIMGWLVIFIFPAIITKTGPAFWGLLLAGGICYTIGALFYARKRPYDHMIWHLFILLASILQYIGIVYFML

SEQ ID NO: 2463 - protein, 915 aa, Streptococcus agalactiae
ATGAAAAGTGCTTATATCTTTTTTAATCCAAAATCTGGTAAAGATGAACAAGCATTGGCACAAGAAGTAAAATCTTATTTAATAGAACATGATTTTCAAGACGATTATGTTCGTATTATTACACCTTCATCTGTTGAGGAAGCTGTCGCCTTAGCAAAAAAAGCATCTGAAGACCATATCGACTTGGTTATTCCTTTAGGGGGAGATGGCACTATTAATAAAATCTGTGGTGGTGTCTACGCTGGTGGTGCTTATCCTACTATCGGACTAGTACCTGCCGGGACCGTCAATAACTTTTCAAAAGCTTTGAACATCCCGCAAGAGAGGAATCTCGCTCTTGAAAACCTTCTAAACGGTCATGTAAAGTCCGTAGATATCTGTAAAGTTAATGACGATTACATGATTAGCAGTTTAACACTTGGTCTCCTTGCTGATATTGCTGCTAATGTCACTTCTGAAATGAAGCGTAAATTAGGCCCTTTTGCTTTCTTAGGTGATGCCTACCGTATATTAAAGCGTAATCGATCATATTCTATCACTCTTGCTTACGATAATAATGTACGGTCTTTACGCACGCGGTTACTCCTTATTACCATGACCAATTCGATTGCCGGTATGCCAGCCTTCTCTCCAGAAGCAACAATTGATGATGGACTTTTTAGAGTCTACACTATGGAACATATTCACTTCTTCAAATTATTGTTGCATCTAAGACAATTTCGTAAGGGAGATTTTAGTCAAGCAAAGGAGATAAAACATTTTCATACCAATAATCTGACTATTTCAACTTTTAAACGTAAAAAATCAGCTATCCCTAAAGTTCGTATTGATGGCGATCCAGGTGACCAATTACCTGTAAAAGTTGAAGTCATCCCTAAAGCCTTAAAGTTTATCATTCCTAACTCATTACCATAA

SEQ ID NO: 2464 - protein, 304 aa, Streptococcus agalactiae
MKSAYIFFNPKSGKDEQALAQEVKSYLIEHDFQDDYVRIITPSSVEEAVALAKKASEDHIDLVIPLGGDGTINKICGGVYAGGAYPTIGLVPAGTVNNFSKALNIPQERNLALENLLNGHVKSVDICKVNDDYMISSLTLGLLADIAANVTSEMKRKLGPFAFLGDAYRILKRNRSYSITLAYDNNVRSLRTRLLLITMTNSIAGMPAFSPEATIDDGLFRVYTMEHIHFFKLLLHLRQFRKGDFSQAKEIKHFHTNNLTISTFKRKKSAIPKVRIDGDPGDQLPVKVEVIPKALKFIIPNSLP

SEQ ID NO: 2465 - protein, 855 aa, Streptococcus agalactiae
ATGACAACATTTACTGCTAAATTTATTGACCAAGAGTGGGAAGTCCCAGTAGAATCAGGTCGCTACCATATGATTGTTGGGGAATTTTGTCCTTATGCACAACGTCCGCAGATTGCGCGCCAACTGCTTGGTTTGGATAAACATATTTCTATCAGTTTTGTGGATGATGTTCCAAGTGATATAGGACTTATTTTTAGTCAACCAGAACAGGTTACTGGTGCTAAGTCGCTTCGTGATATTTATCATTTGACTGACCCGACCTACCAAGGTCCTTATACTATCCCAATTTTAATTGACAAGACCGATAATCGTATTGTCTGTAAGGAATCTGCAGATTTGCTTCGACTTTTTACTACAGATTTCTCTGATTTGCATCAAGAGGATGCTCCTGTCCTTTTCAGCCAAGAAACTGCTTCACTTATTGATAATGACATTAAAGACATTAATAAGAACTTCCAAAGCTTAATGTATAAGTTAGCTTTTCTTGATAAACAAGCAGATTATGATACTTATAGTAAGGAATTCTTCACTTTTCTAGATCAAAAAGAACACTTACTAGGACAACGTCCTTTCTTGCTCGGAGATAATCTAAGTGAGGTTGATATTCATTTCTTTACACCATTAGTCCGATGGGATATTGCTGGGCGTGATCTTCTACTACTTAATCAGAAAGCGCTAGAAGACTACCCAAATATTTTTTCTTGGGCTAAAACTTTATACAATGACTTTAATTTAAAAACATTAACCAATCCACAATCCATAAAAAATAACTATTACTTAGGCAAATTTGGAAGAGCTGTTCGTCATCATACCATCGTCCCAACAGGTCCAAATATGGCAAAATGGGAAAAATAA

SEQ ID NO: 2466 - protein, 284 aa, Streptococcus agalactiae
MTTFTAKFIDQEWEVPVESGRYHMIVGEFCPYAQRPQIARQLLGLDKHISISFVDDVPSDIGLIFSQPEQVTGAKSLRDIYHLTDPTYQGPYTIPILIDKTDNRIVCKESADLLRLFTTDFSDLHQEDAPVLFSQETASLIDNDIKDINKNFQSLMYKLAFLDKQADYDTYSKEFFTFLDQKEHLLGQRPFLLGDNLSEVDIHFFTPLVRWDIAGRDLLLLNQKALEDYPNIFSWAKTLYNDFNLKTLTNPQSIKNNYYLGKFGRAVRHHTIVPTGPNMAKWEK

SEQ ID NO: 2467 - protein, 219 aa, Streptococcus agalactiae
ATGATTAAACTGTATTATAAAGATGCTTACGACACTGAACGATGCCAAGTTTTTGAAAATCCAAATGATTTTATTCGAGTTTTAATGGGATGTGTTACTGTTCCTGATAATTATCCTATTACGAAAATGACTTATAAAGATAAAGATATTGCTTACAGTGGTACTTATGGAGATCTCTTCAAGACTTTTATTGAATTTGATTGGTCCACTTTGGACTAG

SEQ ID NO: 2468 - protein, 72 aa, Streptococcus agalactiae
MIKLYYKDAYDTERCQVFENPNDFIRVLMGCVTVPDNYPITKMTYKDKDIAYSGTYGDLFKTFIEFDWSTLD

SEQ ID NO: 2469 - protein, 996 aa, Streptococcus agalactiae
ATGACAAATCGAAAAGATGATCACATAAAATATGCTCTTAAATATCAGTCGCCTTATAATAGTTTTGACGATATTGAGTTAATACATTCATCCTTACCAAAATATAATGTCAACGATATCGATTTATCAACACATTTTGCTGGTCAAAGCTTTGAATTTCCTTTTTATATCAATGCTATGACAGGCGGTAGTGAAAAAGGGAAAGCAGTCAATCATAAATTGGCACAGGTTGCTCAAGCTACAGGGATTGTTATGGTGACAGGTTCATATTCGGCAGCTCTCAAAAACGATGAAGATGATTCCTACCCAACAACAGACTTGTATCCTGATTTAAAACTGGCGACAAATATAGGGTTAGACAAGCCTGTACCAGCAGCAGAGTCAACCGTTAAGGCTATGAACCCCATTTTTTTACAAGTTCATGTTAATGTGATGCAAGAACTTTTGATGCCTGAAGGAGAGCGTGAATTTCACATGTGGCGTTCTCACTTAAAAGAATACGTCGACAATATCCAATGCCCACTTATTTTAAAAGAGGTTGGTTTTGGGATGGATTTACAATCAATAAAGGATGCTTACGATATAGGTATCACAACTGTAGATATTTCGGGGCGTGGGGGGACTAGTTTTGCTTACATCGAAAATCAACGTGGACGCGACCGTTCGTATCTCAATACCTGGGGGCAAACAACAGCTCAATCCTTAATAAACGCTCAATCTATGATGGACAAAATGGATATCCTAGCATCTGGTGGCATTCGTCATCCTTTAGATATGGTAAAATGTTTAGTGTTGGGTGCTAAAGCTGTTGGACTTTCTAGAACAGTTTTAGAATTAGTTGAGCGTTATCCTGTAGATGATGTTATTGCAATTCTCAATTCTTGGAAAGAAGATTTAAGAATGATAATGTGTGCACTGAATTGTAAAAAAATAACTGATTTACGACAAGTCAATTATATATTGTATGGTCAATTGAAGGAAGCCAATGCTAAATGA

SEQ ID NO: 2470 - protein, 331 aa, Streptococcus agalactiae
MTNRKDDHIKYALKYQSPYNSFDDIELIHSSLPKYNVNDIDLSTHFAGQSFEFPFYINAMTGGSEKGKAVNHKLAQVAQATGIVMVTGSYSAALKNDEDDSYPTTDLYPDLKLATNIGLDKPVPAAESTVKAMNPIFLQVHVNVMQELLMPEGEREFHMWRSHLKEYVDNIQCPLILKEVGFGMDLQSIKDAYDIGITTVDISGRGGTSFAYIENQRGRDRSYLNTWGQTTAQSLINAQSMMDKMDILASGGIRHPLDMVKCLVLGAKAVGLSRTVLELVERYPVDDVIAILNSWKEDLRMIMCALNCKKITDLRQVNYILYGQLKEANAK

SEQ ID NO: 2471 - protein, 993 aa, Streptococcus agalactiae
ATGGTTAAGGTGCAAACAGGTGGCAAATTATATATTGCAGGTGAATACGCGATACTGTATCCTGGGCAAGTAGCTATTTTAAAGAACGTTCCTATTTATATGACTGCATTAGCTACTTTTGCAGATAACTACAGCCTTTATTCTGATATGTTTAACTATACGGCAAGCTTACAGCCAGATAAGCAATATAGTCTCATTCAGGAAACGATATTGCTTATGGAAGAATGGTTGATTAATTTTGGCAAAAATATAAAACCGATTCACCTCGAAATTACGGGAAAATTAGAGCGCTATGGACTTAAATTTGGTATAGGCTCTAGCGGAAGTGTTGTCGTTTTGACTATTAAAGCTATGGCTGCGCTTTATGAGATAGAGATGCCAAGCGACTTGCTTTTTAAATTATCTGCCTATGTTCTCTTAAAAAGAGGTGATAATGGCTCAATGGGAGATATTGCTTGTATTGCTTATGAGCATTTAATTTCTTATTCAGCTTTTGATCGTAGGGCTGTTTCAAAAATGATTGAAACAAAACCTTTGGAACAAGTATTGGAAGCTGAATGGGGTTATCGTATTACCAAAATACAAGCTTCATTGGAGATGGATTTTTTAGTGGGATGGACAATGCAACCGTCCATTTCAAAAGAAATGATAAATATAGTTAAATCAACTATTACGCAGCGTTTTTTAGATGATACAAAGTATCAAGTTGTCCAGTTACTTTCAGCCTTTAAAGAAGGAGATAAAGAAGCGATTAAGAGATGTTTAGAAGAAATTAGCTTGCTATTATTTAATCTTCATCCATCTATTTACACCGATAAACTTCAAAAGCTTAAAGAGGCAAGCAAAGGCCTAGATATAGTCACAAAATCTTCAGGATCTGGAGGAGGCGATTGTGGTATAGCCATATCCTTTAATAAAAATGATAATCAAACTCTAATCAAGCGTTGGGAGAGTGCTGGTATTGAACTACTTAGTAAGGAGACACTGTCATGA

SEQ ID NO: 2472 - protein, 330 aa, Streptococcus agalactiae
MVKVQTGGKLYIAGEYAILYPGQVAILKNVPIYMTALATFADNYSLYSDMFNYTASLQPDKQYSLIQETILLMEEWLINFGKNIKPIHLEITGKLERYGLKFGIGSSGSVVVLTIKAMAALYEIEMPSDLLFKLSAYVLLKRGDNGSMGDIACIAYEHLISYSAFDRRAVSKMIETKPLEQVLEAEWGYRITKIQASLEMDFLVGWTMQPSISKEMINIVKSTITQRFLDDTKYQVVQLLSAFKEGDKEAIKRCLEEISLLLFNLHPSIYTDKLQKLKEASKGLDIVTKSSGSGGGDCGIAISFNKNDNQTLIKRWESAGIELLSKETLS

SEQ ID NO: 2473 - protein, 945 aa, Streptococcus agalactiae
ATGGACGGAAAAAGTATAAGTGTTAAGTCTTATGCTAACATTGCTATTATCAAATATTGGGGAAAAGCAGATGCTGAAAAAATGATTCCAGCTACCAGTAGTATTTCTCTAACACTTGAAAACATGTACACTGAAACACGTTTGACTGCCCTTGGGAAGGATGCTAAGAAAGATGAATTTTACATCTCTGGTGTTCTTCAAAATGATCATGAACATGACAAAATGTCAGCTATCTTGGATCGCTTTCGACAAAATAAGTCCGGCTTTGTAAAGATTGAAACAACTAATAATATGCCAACAGCTGCAGGCTTATCATCGTCATCAAGTGGTTTATCAGCCTTAGTAAAGGCCTGCAATGATTTTTTTGGTACTAACCTTAGCCAATCACAGCTAGCTCAAGAAGCCAAGTTTGCTTCAGGCTCCTCTTCACGCTCTTTTTTTGGACCTGTTGCTGCTTGGGATAAAGATAGTGGTGATATCTATAAAGTTCACACTAATTTAGATTTAGCTATGATTATGCTGGTCTTAAATGACAAAAGAAAGCCGATTTCAAGCCGTGAAGGTATGAAAATCTGCACCGAAACTTCAACTACTTTTAATGAATGGGTAAGGCAATCTGAACAAGATTATCAAGATATGTTAGTATACCTAAAAAATAATGATTTTCAAAAGGTAGGTCAACTGACAGAGCGTAATGCACTTGCAATGCACTCAACAACTAAAACAGCAACTCCAGCCTTTTCATATTTGACAGAAGAGACATATAAAGCTATGGATGTTGTGAAGAAACTTCGCGAAAAAGGTCATGAATGTTATTATACGATGGATGCGGGTCCAAATGTTAAAGTACTTTGCTTACGTCAAGACCTTGAGGCATTAGCTGCTATCTTGGAGAAAGATTATCGTATTATTGTTTCAACGACAAAGGAATTAGCAGATGGTTAA

SEQ ID NO: 2474 - protein, 314 aa, Streptococcus agalactiae
MDGKSISVKSYANIAIIKYWGKADAEKMIPATSSISLTLENMYTETRLTALGKDAKKDEFYISGVLQNDHEHDKMSAILDRFRQNKSGFVKIETTNNMPTAAGLSSSSSGLSALVKACNDFFGTNLSQSQLAQEAKFASGSSSRSFFGPVAAWDKDSGDIYKVHTNLDLAMIMLVLNDKRKPISSREGMKICTETSTTFNEWVRQSEQDYQDMLVYLKNNDFQKVGQLTERNALAMHSTTKTATPAFSYLTEETYKAMDVVKKLREKGHECYYTMDAGPNVKVLCLRQDLEALAAILEKDYRIIVSTTKELADG

SEQ ID NO: 2475 - protein, 687 aa, Streptococcus agalactiae
TTGGACTATTTAGGTAAAACTTCTTCTAAAATTGCATATCATATTGAGTCACAAGTCCCAGAAAGACGTGGTATGGGATCATCAGCTGCAGTTGCTATTGCAGCTATTCGTGCAGTTTTTGATTATTTTGATGAAGATTTGGAGGCAGATTTGTTAGAATGCCTTGTTAATCGAGCAGAAATGATAGCACATTCAAATCCGAGTGGATTAGATGCAAAAACTTGTCTTAGTGAAAATACTATTAAATTTATCCGCAATATTGGTTTTTCAACAGTACCCATGCATTTGAATGCTTATTTAGTTATTGCTGATACAGGAATTCATGGGCATACTAAAGAAGCAGTGGATAAGGTGAAATCATCTGGCGAGGCAGTACTACCCTTTTTAAAAGAATTAGGTTATTTAGCAGAGGCATCAGAGGATGCTATTCATAAAAGTGATTCCAAACAACTTGGTAGCTTGATGACTAAAGCACATCAAAGTTTAAAACAATTGGGTGTCTCAAGTTTAGAAGCTGATCATCTGGTAGAGGTAGCTATTAGTTGTGGTGCTCTAGGCGCTAAAATGAGTGGCGGCGGATTAGGTGGTTGTATTATCGCACTTGTAAAAGAAAAAAGAGAAGCTGAGCGCTTAAGTCAGCAATTAGAAAGAGAAGGAGCTGTCAACACATGGACGGAAAAAGTATAA

SEQ ID NO: 2476 - protein, 228 aa, Streptococcus agalactiae
MDYLGKTSSKIAYHIESQVPERRGMGSSAAVAIAAIRAVFDYFDEDLEADLLECLVNRAEMIAHSNPSGLDAKTCLSENTIKFIRNIGFSTVPMHLNAYLVIADTGIHGHTKEAVDKVKSSGEAVLPFLKELGYLAEASEDAIHKSDSKQLGSLMTKAHQSLKQLGVSSLEADHLVEVAISCGALGAKMSGGGLGGCIIALVKEKREAERLSQQLEREGAVNTWTEKV

SEQ ID NO: 2477 - protein, 1230 aa, Streptococcus agalactiae
ATGTTTAGAAATTTACGACTTCGTTTTATCGGAATAGCTGCGCTAGCTATTCTTGTTGTCTTATTTTCAGTAGTCGGTGTCCTCAACTCTGCTAATCACTATCAAACGAAGAATGAAATTTATCGTGTGTTAACTATCCTTGCAGACAACAATGGACGTATACCGAATAAACTTGAATTTAGTAAAGAATTAGGTGATGACCTATCAACGGACGCTATTTTCCAATTCCGTTATTTCAGTGCGCGAACAGATGCAAAAGGTAACGTGACTAGTTTTGATTCTAGAAATATCTTTGAAGTAAGCGATAGGCAAATAAAAAATTATGCCAAGCGTATCGTATCACAAAATAGTCATTCAGGTCATATCACCTATAATTTTAGTACTTATTCTTATCTACTAAAAAAGGTTGGTAAAAATGATTATTTAGTGGTATTTTTAGATACAACCAACCAATATCTTGATAATCAAAGATTATTGCAACTTTCAATATGGATGTCCTTGGTAAGTTTTATCGTCTTCATGGTAATTGTTTCAGTTTTATCAGGGAGAGTTATCTTACCATTTGTTGCTAACTATGAAAAGCAAAGGCGTTTTATTACCAATGCAGGACATGAACTAAAAACTCCACTTGCTATCATCTCCGCTAATAATGAATTGGTGGAAATGATGAGTGGTGAATCAGAGTGGACTAAATCTACAAATGATCAAATCCAACGTTTAACGGGTCTAATTAATGGCATGGTCAGTCTTGCCCGCTTTGAAGAACAGCCTGATATAAGTATGGTTGACTTAGACTTTTCACATATTACAAAAGATGCTGCAGAAGATTTTAAAGGTCCAATCATTAAAGATGGTAAAGACTTTATAATGAGTATCCAACCAGGTATTCATGTCAAAGCTGAAGAAAAATCATTATTTGAATTGGTTACATTATTGGTTGATAATGCTAATAAGTATTGTGATCCGATGGGGACTGTGACAGTTAAGTTATCACGTTCAAGTCGTTTGAGACGAGCTAAGCTTGAAGTTTCAAATACTTATAAGAATGGTAAAGACATAGACTATAGCAAGTTTTTTGAACGATTTTATCGAGAGGATGAGTCACATAATAACAAAAAATCGGGATATGGTATTGGTCTTTCTATCGTAACTAGTTTAGTGCATCTATTTAAAGGAAGTATCGATGTGAATTATAAACATGATACCATTACCTTTGTCATTTACATTTAA

SEQ ID NO: 2478 - protein, 409 aa, Streptococcus agalactiae
MFRNLRLRFIGIAALAILVVLFSVVGVLNSANHYQTKNEIYRVLTILADNNGRIPNKLEFSKELGDDLSTDAIFQFRYFSARTDAKGNVTSFDSRNIFEVSDRQIKNYAKRIVSQNSHSGHITYNFSTYSYLLKKVGKNDYLVVFLDTTNQYLDNQRLLQLSIWMSLVSFIVFMVIVSVLSGRVILPFVANYEKQRRFITNAGHELKTPLAIISANNELVEMMSGESEWTKSTNDQIQRLTGLINGMVSLARFEEQPDISMVDLDFSHITKDAAEDFKGPIIKDGKDFIMSIQPGIHVKAEEKSLFELVTLLVDNANKYCDPMGTVTVKLSRSSRLRRAKLEVSNTYKNGKDIDYSKFFERFYREDESHNNKKSGYGIGLSIVTSLVHLFKGSIDVNYKHDTITFVIYI

SEQ ID NO: 2479 - protein, 687 aa, Streptococcus agalactiae
ATGAGAGTATTAATTGCAGAAGATGAAGAACAGATGTCACGCGTCCTTAGTACGGCAATTAGTCATCAAGGTTATGTTGTTGATGTCGCCTACGATGGTCAGACTGCTATTGATTTAGCTAATCAAAATGCATATGATGTCATGGTTATGGATGTCATGATGCCTGTTAAAACAGGTGTTGAGGCTGTCAAAGAAATTAGACAATCAGGAAATAAATCTCACATTATTATGCTAACAGCCATGGCAGAAATTGATGATAGAGTAACAGGTCTAGATGCTGGTGCAGATGATTATTTAACAAAACCCTTCTCTCTAAAAGAATTATTAGCAAGGCTTCGCTCTATGTCCCGAAGATTGGAAGATTTCACACCTAATGTATTGTCATTGGGAAGAGTAACCTTATCAGTCGGTGAACAAGAGTTGCAATGTGAAAACACTATTCGTCTAGCGGGTAAAGAAGCTAAAATGTTAGCATTTTTCATGTTGAACCATGATAAAGAATTATCTACACAACAACTTTTCGAACATGTCTGGGGAGCAGATAAGGACCAAGAAGATGTAGATGAGGGATACGTCTTTATCTATGTTTCTTATTTGAGACAAAAATTGCAGGCAATTGGTGCTAACTTGGAGATTATTGGTCAAGAAGGTAGTAGCTATAAATTAAGTGAAATAAATGGTGGCTAA

SEQ ID NO: 2480 - protein, 228 aa, Streptococcus agalactiae
MRVLIAEDEEQMSRVLSTAISHQGYVVDVAYDGQTAIDLANQNAYDVMVMDVMMPVKTGVEAVKEIRQSGNKSHIIMLTAMAEIDDRVTGLDAGADDYLTKPFSLKELLARLRSMSRRLEDFTPNVLSLGRVTLSVGEQELQCENTIRLAGKEAKMLAFFMLNHDKELSTQQLFEHVWGADKDQEDVDEGYVFIYVSYLRQKLQAIGANLEIIGQEGSSYKLSEINGG

SEQ ID NO: 2481 - protein, 552 aa, Streptococcus agalactiae
ATGGAATGNNNNNAAGCTAAGGTTGAACAGGCTATAAATTGTACGAACATATCATTGGGTCGTATTAAGACATCAGATAGTATGATAGAGAAATGTCGTCGTAAACAGTTACCTGTAACAGTAGATTCTGCACTAAAAGTTATTAGAGATAGTATTGGAGTCCGTATTATTTGTGGTTTTGTTAACGACATTTATCAAATTGTAGAACGTATTAAGACATTTGATGATTGTCGTATTGTAGTTGAAAAAGACTATATCCAGCATGTTAAGCCAAATGGGTATCGCTCTTACCATGTGATTTTAGAAATTGATACTCCCTATCCGGACTGTTTGGGTAATTCAGAAGGTAAATATTACATGGAGATTCAGTTGCGTACAATTGCGCAAGATTCTTGGGCTAGTTTAGAACATCAGATGAAATACAAGCATGATATTGAAAATCCCGAACGAATTGTAAGAGAATTAAAACGTTGTGCTGATGAAATAGCATCTGTTGATTTAACGATGCAAACGATTCGTCAATTGATAGAGAGTGGAACAAAGAAGGAATAA

SEQ ID NO: 2482 - protein, 183 aa, Streptococcus agalactiae
  VARIANT 3, 4, 5: Xaa = Any Amino Acid
MEXXXAKVEQAINCTNISLGRIKTSDSMIEKCRRKQLPVTVDSALKVIRDSIGVRIICGFVNDIYQIVERIKTFDDCRIVVEKDYIQHVKPNGYRSYHVILEIDTPYPDCLGNSEGKYYMEIQLRTIAQDSWASLEHQMKYKHDIENPERIVRELKRCADEIASVDLTMQTIRQLIESGTKKE

SEQ ID NO: 2483 - protein, 143 aa, Streptococcus agalactiae
ATGAATGAATGNNNNNTTGGTTTAGTCGCTGGGACTTCTATTATGTTCTCAAGCGTATTCGCTGACCAAGTCGGCGTCCAAGTTATAGGCGTCAATGACTTTCATGGTGCACTTGACAATACTGGAACAGCAAATATGCCTGA

SEQ ID NO: 2484 - protein, 47 aa, Streptococcus agalactiae
  VARIANT 4, 5, 6: Xaa = Any Amino Acid
MNEXXXGLVAGTSIMFSSVFADQVGVQVIGVNDFHGALDNTGNSKYA

SEQ ID NO: 2485 - protein, 1920 aa, Streptococcus agalactiae
ATGCCTGACGGAAAAGTTACTAATGCTGGCACTGCTGCTCAATTAGATGCTTATATGGATGATGCTCAAAAAGATTTCAAACAAACTAACCCTAATGGTGAAAGCATTAGAGTTCAAGCTGGTGATATGGTTGGAGCAAGTCCAGCTAACTCAGGGCTTCTTCAAGATGAACCAACCGTTAAAACATTTAATGCAATGAATGTTGAGTATGGCACATTAGGTAACCATGAATTTGATGAAGGTTTGGCAGAATACAATCGTATCGTTACTGGAAAGGCCCCTGCTCCAGATTCTAATATAAATAATATTACGAAATCATACCCACACGAAGCTGCAAAACAAGAAATTGTAGTGGCAAACGTTATTGATAAAGTTAACAAACAAATCCCTTACAATTGGAAACCTTACACTATTAAAAATATTCCTGTAAATAACAAAAGTGTGAACGTTGGCTTTATCGGAATCGTTACCAAAGACATCCCAAACCTTGTCTTACGTAAAAATTATGAACAATATGAATTTTTAGATGAAGCTGAAACAATCGTTAAATACGCCAAAGAATTACAAGCTAAAAATGTCAAGGCTATTGTAGTCCTTGCTCATGTACCTGCAACAAGCAAGGATGATATTGCTGAAGGTGAAGCAGCAGAAATGATGAAAAAAGTCAATCAACTCTTCCCTGAAAATAGCGTAGATATTGTCTTTGCTGGACACAATCATCAATATACAAATGGTCTTGTTGGTAAAACTCGTATTGTACAAGCGCTCTCTCAAGGAAAAGCCTATGCTGATGTACGTGGTGTCCTAGATACTGATACACAAGATTTCATTGAAACCCCTTCAGCTAAAGTAATTGCAGTTGCTCCTGGTAAAAAAACAGGTAGTGCCGATATTCAAGCCATTGTTGACCAAGCTAATACTATCGTTAAACAAGTAACAGAAGCTAAAATTGGTACTGCCGAGGTAAGTGGCATGATTACGCGTTCTGTTGATCAAGATAATGTTAGTCCGGTAGGCAGCCTCATCACAGAGGCTCAACTAGCAATTGCTCGAAAAAGCTGGCCAGATATCGATTTTGCCATGACAAATAATGGTGGCATTCGTGCTGACTTACTCATCAAACCAGATGGAACAATCACCTGGGGAGCTGCACAAGCAGTTCAACCTTTTGGTAATATCTTACAAGTCGTCGAAATTACTGGTAGAGATCTTTATAAAGCACTCAACGAACAATACGACCAAAAACAAAATTTCTTCCTTCAAATAGCTGGTCTGCGATACACTTACACAGATAATAAAGAGGGCGGGGAAGAAACACCATTTAAAGTTGTAAAAGCTTATAAATCAAATGGTGAGGAAATCAATCCTGATGCAAAATACAAATTAGTTATCAATGACTTTTTATTCGGTGGTGGTGATGGCTTTGCAAGCTTCAGAAATGCCAAACTTCTAGGAGCCATTAATCCCGATACAGAGGTATTTATGGCCTATATCACTGATTTAGAAAAAGCTGGTAAAAAAGTGAGCGTTCCAAATAATAAACCTAAAATCTATGTCACTATGAAGATGGTTAATGAAACTATTACACAAAATGATGGTACATATAGCATTATTAAGAAACTTTATTTAGATCGACAAGGAAATATTGTAGCACAAGAGATTGTATCAGACACTTTAAACCAAACAAAATCAAAATCTACAAAAATCAACCCTGTAACTACAATTCACAAAAAACAATTACACCAATTTACAGCTATTAACCCTATGAGAAATTATGGCAAACCATCAAACTCCACTACTGTAAAATCAAAACAATTACCAAAAACAAACTCTGAATATGGACAATCATTCCTTATGTCTGTCTTTGGTGTTGGACTTATAGGAATTGCTTTAAATACAAAGAAAAAACATATGAAATAA

SEQ ID NO: 2486 - protein, 639 aa, Streptococcus agalactiae
MPDGKVTNAGTAAQLDAYMDDAQKDFKQTNPNGESIRVQAGDMVGASPANSGLLQDEPTVKTFNAMNVEYGTLGNHEFDEGLAEYNRIVTGKAPAPDSNINNITKSYPHEAAKQEIVVANVIDKVNKQIPYNWKPYTIKNIPVNNKSVNVGFIGIVTKDIPNLVLRKNYEQYEFLDEAETIVKYAKELQAKNVKAIVVLAHVPATSKDDIAEGEAAEMMKKVNQLFPENSVDIVFAGHNHQYTNGLVGKTRIVQALSQGKAYADVRGVLDTDTQDFIETPSAKVIAVAPGKKTGSADIQAIVDQANTIVKQVTEAKIGTAEVSGMITRSVDQDNVSPVGSLITEAQLAIARKSWPDIDFAMTNNGGIRADLLIKPDGTITWGAAQAVQPFGNILQVVEITGRDLYKALNEQYDQKQNFFLQIAGLRYTYTDNKEGGEETPFKVVKAYKSNGEEINPDAKYKLVINDFLFGGGDGFASFRNAKLLGAINPDTEVFMAYITDLEKAGKKVSVPNNKPKIYVTMKMVNETITQNDGTYSIIKKLYLDRQGNIVAQEIVSDTLNQTKSKSTKINPVTTIHKKQLHQFTAINPMRNYGKPSNSTTVKSKQLPKTNSEYGQSFLMSVFGVGLIGIALNTKKKHMK

SEQ ID NO: 2487 - protein, 411 aa, Streptococcus agalactiae
ATGATAAAACCAATTGTTAGAGATACTTTCTTTTTACAACAAAAATCACAAATGGCTAGTAGAGCAGATGTGAGCTTAGCAAAAGATTTACAGGATACTTTGCATGCTAATCAAAATTATTGTGTAGGTATGGCAGCCAATATGATTGGTAGTCTGAAGCGTGTCATTATCATCAATGTGGGTATTACAAATTTAGTAATGTTTAACCCTGTATTAGTTGCAAAATCGGATCCATATGAGACAGAAGAATCTTGCCTTTCTCTCGTAGGTTGCAGAAGTACACAACGATATCATCACATTACGATTTCTTATCGTGATATCAATTGGAAAGAACAGCAAATCAAGTTGACAGATTTTCCAGCTCAAATTTGTCAACACGAGTTAGATCATTTGGAAGGCATATTGATATAA

SEQ ID NO: 2488 - protein, 136 aa, Streptococcus agalactiae
MIKPIVRDTFFLQQKSQMASRADVSLAKDLQDTLHANQNYCVGMAANMIGSLKRVIIINVGITNLVMFNPVLVAKSDPYETEESCLSLVGCRSTQRYHHITISYRDINWKEQQIKLTDFPAQICQHELDHLEGILI

SEQ ID NO: 2489 - protein, 1350 aa, Streptococcus agalactiae
ATGACAAGCGGAAAGACATATGTAGCAAGTGTTTTAGAGAAAGTGAAGAAGCAAAATGAGCATGAGGAAGAATTTCTACAAGCGGTTGAAGAGGTTTTTGAGTCACTAGTACCAGTTTTTGATAAATACCCTCAGTACATTGAAGAAAATCTTTTAGAACGTTTGGTTGAGCCTGAGCGCGTGATTTCTTTTAGAGTTCCATGGGTAGATGATAAAGGCCAAGTTCAAGTTAACCGAGGATATCGTGTACAATTTTCATCAGCTATTGGTCCTTATAAAGGTGGTTTACGTTTTCACCCTACAGTAACACAATCTATTGTCAAATTTTTAGGATTTGAACAAATTTTTAAGAATTCACTGACAGGTCTACCAATTGGTGGTGGCAAAGGAGGGTCGAACTTTGATCCAAAAGGGAAATCAGATAATGAAGTGATGCGTTTCACACAAAGTTTTATGACCGAACTTCAAAAATACATTGGACCAGATTTAGATGTGCCAGCTGGCGATATTGGAGTAGGTGGACGTGAAATTGGTTATCTTTATGGTCAATATAAGCGTTTAAATGGTTATCAAAATGGGGTTTTAACCGGAAAAGGACTGACTTATGGTGGCTCTTTGGCTCGTACAGAAGCAACTGGTTATGGGGCAGTCTATTTTGCTAAAGAAATGCTGGCAGCGTGTGGTCAAGATTTAACTGGCAAAGTTGCACTGGTTTCGGGATCTGGTAACGTGGCTATTTATGCTACTGAAAAATTACAAGAGTTGGGTGCAACTGTTGTAGCTGTGTCAGATTCTTCAGGTTATGTTTATGATCCAGACGGTATTGACCTTGAAACATTGAAACAGATAAAAGAGGTTGAAAGAGCACGTATTGTTAAATATACGGAGAAACATCCAAAAGCTAATTTCACACCAGCAGATCAAGGTAGTATCTGGTCTATTAAAGCAGATTTAGCTTTCCCGTGTGCTACTCAAAACGAATTAGACGAAGAAGACGCTAAGTTATTAGTTGAAAATGGTGTCTTGGCAGTAACAGAAGGAGCAAATATGCCATCTACCTTGGGTGCTATTAAAGTTTTCCAAAAGGCAGGGGTTGCTTTTGGTCCTGCTAAAGCTGCCAATGCAGGAGGAGTAGCTGTTTCAGCGCTTGAAATGGCACAAAATTCTAGTCGTAGGGCATGGACTTTTGAAGAAGTTGATCAAGAATTGCAACGTATTATGAAAACTATTTTTGTGAATGCTTCCAAAGCGGCTGATGAATTTGGCGATAGTGGTAACCTGGTTCTAGGTGCTAACATTGCAGGCTTTTTAAAAGTTGCTCAAGCTATGTCTGCACAAGGTATTGTTTAA

SEQ ID NO: 2490 - protein, 449 aa, Streptococcus agalactiae
MTSGKTYVASVLEKVKKQNEHEEEFLQAVEEVFESLVPVFDKYPQYIEENLLERLVEPERVISFRVPWVDDKGQVQVNRGYRVQFSSAIGPYKGGLRFHPTVTQSIVKFLGFEQIFKNSLTGLPIGGGKGGSNFDPKGKSDNEVMRFTQSFMTELQKYIGPDLDVPAGDIGVGGREIGYLYGQYKRLNGYQNGVLTGKGLTYGGSLARTEATGYGAVYFAKEMLAACGQDLTGKVALVSGSGNVAIYATEKLQELGATVVAVSDSSGYVYDPDGIDLETLKQIKEVERARIVKYTEKHPKANFTPADQGSIWSIKADLAFPCATQNELDEEDAKLLVENGVLAVTEGANMPSTLGAIKVFQKAGVAFGPAKAANAGGVAVSALEMAQNSSRRAWTFEEVDQELQRIMKTIFVNASKAADEFGDSGNLVLGANIAGFLKVAQAMSAQGIV

SEQ ID NO: 2491 - protein, 567 aa, Streptococcus agalactiae
TTGACTTTTACTGACTTTCGTTCTATAATGAGACAAATATTTGATTGGAGTATCTATATGAAATGGTTCCCACTTGTTGGAGGTATAATTGCCTTATTAGCTGGCTTCTATCTCTTTATAAATCCTGTAACGGTTGTTGCAACTCTGGGTTGGTTCATTGCTTTATTTATCTTTATTTATGGCATTTCAAATTTAGTACGCTACTTGCAAGCTGATTCTTATCACCGTAGCCCTTGGTATCTGGTTCAGAGTATCCTTGCTATTATTTTTGGTATCATTTTACTATCCAGCTCAGCAATGTCACTTTCAAATACTGTCATGACTATTTTAGCATACTGGCTACTGGTATCTGGTATTTTACGACTTTTGGGTGGTTTCCAAATGCAAAAAATTAATTTCCCAGGTGCCAAATCCTATAAACGTTCGGCTTATATTGCACTCATTTTAGGTATTATTTTACTGGTTCAACCTACCTTATCAGCAGCCATCATTGGAAGATTTGTAGCCTTTATATTAATAGCAATTGGAGCTTCGGCTATTTACACTTTTACTCGTATTAATTATTAA

SEQ ID NO: 2492 - protein, 188 aa, Streptococcus agalactiae
MTFTDFRSIMRQIFDWSIYMKWFPLVGGIIALLAGFYLFINPVTVVATLGWFIALFIFIYGISNLVRYLQADSYHRSPWYLVQSILAIIFGIILLSSSAMSLSNTVMTILAYWLLVSGILRLLGGFQMQKINFPGAKSYKRSAYIALILGIILLVQPTLSAAIIGRFVAFILIAIGASAIYTFTRINY

SEQ ID NO: 2493 - protein, 1335 aa, Streptococcus agalactiae
ATGCTTACACGAGCTTTTACAGATATCAAGCTTTTTAAGTATATTTTAGTAGTCGTTATGGTACTTTATCTAAATGTACCATTAGCCATGATTATCATGCTGGGTATTCCTGTAACTTATTTTAGTGCACAAGCGATACTAAAAAGATCCCAACCTTACTTTAAAGAACAGGCAAAGATTCTGGGAGAACTGAATGGTTTTGTACAAGAGAAATTAACTGGTTTCAATATCATAAAATTATATGGTAGAGAAGAGGCGTCTAGTCAAGAATTTCGTGATATAACGGATAATCTACGTCATGTAGGTTTCAAAGCTAGCTTCATTTCAGGAATTATGATGCCAGTATTGAATGGTATCTCTGATTTTATTTACCTTATCATTGCATTTGTTGGCGGTTTACAAGTTATTGCTGGTACCTTAACAATTGGTAACATGCAGGCATTTGTGCAGTATGTTTGGCAAATTAGTCAACCCGTTCAAACCATTACACAATTATCAGGTGTTTTGCAAAGTGCAAAATCTTCCTTAGAACGTATTTTTGAAGTCTTAGATGAAGAAGAGGAAGCCAATCAAGTCACTGAAAAATTGAGCCATGACTTAACCGGTCAAGTCAGCTTTCATGGTGTCGATTTTCACTATTCTCCGGATAGGCCACTTATCCGCGACTTTAACTTAGACGTAGAACCAGGGCAAATGATTGCAATTGTAGGGCCAACAGGTGCAGGTAAGACAACACTTATAAACTTACTCATGAGATTCTACGATGTTAGTGAAGGTGCTATCACCGTAGATGGTCACGATATTAGACACCTATCACGCCAAGATTTCCGGCAACAATTTGGCATGGTGTTGCAAGATGCTTGGTTATATGAAGGTACAATAAAAGAAAATCTTAGATTCGGTAATCTTGAAGCCAGTGATGAGGATATAGTTGCTGCTGCCAAAGCTGCGAATGTTGACCACTTTATTCGAACGTTACCTGGTGGCTACAATATGGTGATGAATCAAGAATCAAGCAATATCTCCTTAGGACAAAAGCAACTGTTGACTATTGCACGTGCTTTATTAGCAGATCCTAAAATTTTAATTTTAGATGAAGCGACTTCATCTGTTGATACAAGGTTGGAATTGCTTATTCAAAAAGCTATGAAAAAATTGATGGAAGGAAGAACTAGTTTTGTCATTGCACACCGTCTATCAACGATTCAAGAGGCAGACAACATTTTAGTTCTAAAGGATGGTCAAATCATCGAACAAGGTAATCACCAGAAACTCCTAGCAGATAAAGGATTTTATTACGAATTATATAATAGCCAATTTTCAAATAGTAAATGA

SEQ ID NO: 2494 - protein, 444 aa, Streptococcus agalactiae
MLTRAFTDIKLFKYILVVVMVLYLNVPLAMIIMLGIPVTYFSAQAILKRSQPYFKEQAKILGELNGFVQEKLTGFNIIKLYGREEASSQEFRDITDNLRHVGFKASFISGIMMPVLNGISDFIYLIIAFVGGLQVIAGTLTIGNMQAFVQYVWQISQPVQTITQLSGVLQSAKSSLERIFEVLDEEEEANQVTEKLSHDLTGQVSFHGVDFHYSPDRPLIRDFNLDVEPGQMIAIVGPTGAGKTTLINLLMRFYDVSEGAITVDGHDIRHLSRQDFRQQFGMVLQDAWLYEGTIKENLRFGNLEASDEDIVAAAKAANVDHFIRTLPGGYNMVMNQESSNISLGQKQLLTIARALLADPKILILDEATSSVDTRLELLIQKAMKKLMEGRTSFVIAHRLSTIQEADNILVLKDGQIIEQGNHQKLLADKGFYYELYNSQFSNSK

SEQ ID NO: 2495 - protein, 984 aa, Streptococcus agalactiae
ATGAGAAAAAAATCTGTTTTTTTGAGATTATGGTCTTACCTAACTCGCTACAAAGCTACTCTTTTCTTAGCGATTTTTTTGAAAGTTTTATCTAGTTTTATGAGTGTTCTGGAGCCTTTTATTTTAGGGTTAGCGATAACAGAGTTGACTGCTAACCTTGTTGATATGGCTAAGGGAGTTTCTGGGGCAGAATTGAACGTTCCTTATATTGCTGGTATTTTGATTATTTATTTTTTCAGAGGTGTTTTCTATGAATTAGGTTCTTATGGCTCAAATTATTTTATGACTACTGTCGTTCAAAAAAGTATCCGTGATATCCGTCATGATTTGAATCATAAAATCAATAAAGTTCCTGTATCGTATTTTGATAAGCACCAATTTGGAGATATGTTGGGACGTTTTACAAGTGATGTTGAAACGGTCTCAAATGCTTTACAACAGAGCTTTTTACAGATTATCAATGCTTTTTTAAGTATTATTTTAGTAGTCGTTATGGTACTTTATCTAAATGTACCATTAGCCATGATTATCATTGCTTGTATTCCTGTAACTTATTTTAGTGCACAAGCGATACTAAAAAGATCCCAACCTTACTTTAAAGAACAGGCAAAGATTCTGGGAGAACTGAATGGTTTTGTACAAGAGAAATTAACTGGTTTCAATATCATAAAATTATATGGTAGAGAAGAGGCGTCTAGTCAAGAATTTCGTGATATAACGGATAATCTACGTCATGTAGGTTTCAAAGCTAGCTTCATTTCAGGAATTATGATGCCAGTATTGAATGGTATCTCTGATTTTATTTACCTTATCATTGCATTTGTTGGCGGTTTACAAGTTATTGCTGGTACCCTTAACATTGGTAACATGCAGGCATTTGTGCAGTATGTTTGGCAAATTAGTCAACCCCGTTCAACCCCATACACATTATCAGGTGTTTTGCAAGTGCAAATCTCCTTAGNNNNNCATTCATTCATTAATTAA

SEQ ID NO: 2496 - protein, 327 aa, Streptococcus agalactiae
  VARIANT 321, 322: Xaa = Any Amino Acid
MRKKSVFLRLWSYLTRYKATLFLAIFLKVLSSFMSVLEPFILGLAITELTANLVDMAKGVSGAELNVPYIAGILIIYFFRGVFYELGSYGSNYFMTTVVQKSIRDIRHDLNHKINKVPVSYFDKHQFGDMLGRFTSDVETVSNALQQSFLQIINAFLSIILVVVMVLYLNVPLAMIIIACIPVTYFSAQAILKRSQPYFKEQAKILGELNGFVQEKLTGFNIIKLYGREEASSQEFRDITDNLRHVGFKASFISGIMMPVLNGISDFIYLIIAFVGGLQVIAGTLNIGNMQAFVQYVWQISQPRSTPYTLSGVLQVQISLXXHSFIN

SEQ ID NO: 2497 - protein, 1740 aa, Streptococcus agalactiae
ATGGCATATATTTGGTCTTATTTGAAAAGGTACCCCAATTGGTTATGGCTTGATTTACTAGGAGCTATGCTTTTTGTGACGGTTATCCTAGGAATGCCCACAGCCTTAGCGGGTATGATTGATAATGGCGTTACAAAAGGTGATCGGACTGGAGTTTATCTGTGGACGTTCATCATGTTTATATTTGTTGTACTAGGTATTATTGGGCGTATTACGATGGCTTACGCATCTAGTCGCTTAACGACAACAATGATTAGAGATATGCGTAATGATATGTATGCTAAGCTTCAAGAATACTCCCATCATGAATATGAACAGATAGGTGTATCTTCACTAGTGACACGTATGACAAGCGATACTTTTGTTTTGATGCAATTTGCTGAAATGTCTTTACGTTTAGGCCTAGTAACTCCTATGGTAATGATTTTTAGCGTGGTTATGATACTAATTACGAGTCCATCTTTGGCTTGGCTTGTAGCGGTTGCGATGCCTCTTTTGGTAGGAGTCGTTTTATATGTAGCTATAAAAACAAAACCTTTATCTGAAAGACAACAGACTATGCTTGATAAAATCAATCAATATGTTCGTGAAAATTTAACAGGGTTACGCGTTGTTAGAGCCTTTGCAAGAGAGAATTTTCAATCACAAAAATTTCAAGTCGCTAACCAACGTTACACAGATACTTCAACTGGTCTTTTTAAATTAACAGGGCTAACAGAACCACTTTTCGTTCAAATTATTATTGCAATGATTGTGGCTATCGTTTGGTTTGCTTTGGATCCCTTACAAAGAGGTGCTATTAAAATAGGGGATTTAGTTGCTTTTATCGAATATAGCTTCCATGCTCTCTTTTCATTTTTGCTATTTGCCAATCTTTTTACTATGTATCCTCGTATGGTGGTATCAAGTCATCGTATTAGAGAGGTGATGGATATGCCAATCTCTATCAATCCTAATGCCGAAGGTGTTACGGATACGAAACTTAAAGGGCATTTAGAATTTGATAATGTAACATTCGCTTATCCAGGAGAAACAGAGAGTCCCGTTTTGCATGATATTTCTTTTAAAGCTAAGCCTGGAGAAACAATTGCTTTTATTGGTTCAACAGGTTCAGGAAAATCTTCTCTTGTTAATTTGATTCCACGTTTTTATGATGTGACACTTGRAAAAATCTTAGTAGATGGAGTTGATGTAAGAGATTATAACCTTAAATCACTTCGCCAAAAGATTGGATTTATCCCCCAAAAAGCTCTTTTATTTACAGGGACAATAGGAGAGAATTTAAAATATGGAAAAGCTGATGCTACTATTGATGATCTTAGACAAGCGGTTGATATTTCTCAAGCTAAAGAGTTTATTGAGAGTCACCAAGAAGCCTTTGAAACGCATTTAGCTGAAGGTGGGAGCAATCTTTCTGGGGGTCAAAAACAACGGTTATCTATTGCTAGGGCTGTTGTTAAAGATCCAGATTTATATATTTTTGATGATTCATTTTCTGCTCTCGATTATAAGACAGACGCTACTTTAAGAGCGCGTCTAAAAGAAGTAACCGGTGATTCTACAGTTTTGATAGTTGCTCAAAGGGTGGGTACGATTATGGATGCTGATCAGATTATTGTCCTTGATGAAGGCGAAATTGTCGGTCGTGGTACCCACGCTCAATTAATAGAAAATAATGCTATTTATCGTGAAATCGCTGAGTCACAACTGAAGAACCAAAACTTATCAGAAGGAGAGTGA

SEQ ID NO: 2498 - protein, 579 aa, Streptococcus agalactiae
  VARIANT 389: Xaa = Any Amino Acid
MAYIWSYLKRYPNWLWLDLLGAMLFVTVILGMPTALAGMIDNGVTKGDRTGVYLWTFIMFIFVVLGIIGRITMAYASSRLTTTMIRDMRNDMYAKLQEYSHHEYEQIGVSSLVTRMTSDTFVLMQFAEMSLRLGLVTPMVMIFSVVMILITSPSLAWLVAVAMPLLVGVVLYVAIKTKPLSERQQTMLDKINQYVRENLTGLRVVRAFARENFQSQKFQVANQRYTDTSTGLFKLTGLTEPLFVQIIIAMIVAIVWFALDPLQRGAIKIGDLVAFIEYSFHALFSFLLFANLFTMYPRMVVSSHRIREVMDMPISINPNAEGVTDTKLKGHLEFDNVTFAYPGETESPVLHDISFKAKPGETIAFIGSTGSGKSSLVNLIPRFYDVTLXKILVDGVDVRDYNLKSLRQKIGFIPQKALLFTGTIGENLKYGKADATIDDLRQAVDISQAKEFIESHQEAFETHLAEGGSNLSGGQKQRLSIARAVVKDPDLYIFDDSFSALDYKTDATLRARLKEVTGDSTVLIVAQRVGTIMDADQIIVLDEGEIVGRGTHAQLIENNAIYREIAESQLKNQNLSEGE

SEQ ID NO: 2499 - protein, 474 aa, Streptococcus agalactiae
ATGATTATCCGTCCGATTATTAAAAATGATGACCAAGCAGTTGCACAATTAATTCGACAAAGTTTACGCGCCTATGATTTAGATAAACCTGATACAGCATATTCAGACCCTCACTTAGATCATTTGACCTCATACTACGAAAAAATAGAGAAGTCAGGATTCTTTGTCATTGAGGAGAGAGATGAGATTATTGGCTGTGGCGGCTTTGGTCCGCTGAAAAATCTAATTGCAGAGATGCAGAAGGTGTACATTGCAGAACGTTTCCGTGGTAAGGGGCTTGCTACTGATTTAGTGAAAATGATTGAAGTAGAAGCTCGAAAAATTGGGTATAGACAACTTTATTTAGAGACAGCCAGTACTTTGAGTAGGGCAACTGCGGTTTATAAGCATATGGGATATTGTGCCTTATCGCAACCAATAGCAAATGATCAAGGTCATACAGCTATGGATATTTGGATGATTAAAGATTTATAA

SEQ ID NO: 2500 - protein, 157 aa, Streptococcus agalactiae
MIIRPIIKNDDQAVAQLIRQSLRAYDLDKPDTAYSDPHLDHLTSYYEKIEKSGFFVIEERDEIIGCGGFGPLKNLIAEMQKVYIAERFRGKGLATDLVKMIEVEARKIGYRQLYLETASTLSRATAVYKHMGYCALSQPIANDQGHTAMDIWMIKDL

SEQ ID NO: 2501 - protein, 1869 aa, Streptococcus agalactiae
ATGAGCGATTTTTTAGTAGATGGATTGACTAAGTCGGTTGGTGATAAGACGGTCTTTAGTAATGTTTCATTTATCATCCATAGTTTAGACCGTATTGGGATTATTGGTGTCAATGGAACTGGAAAGACAACACTATTAGATGTTATTTCGGGTGAATTAKGTTTTGATGGTGATCGTTCCCCTTTTTCATCAGCTAATGATTATAAGATTGCTTATTTAAAACAAGAACCAGACTTTGATGATTCTCAGACAATTTTGGACACCGTACTTTCTTCTGACTTAAGAGAGATGGCTTTAATTAAAGAATATGAATTATTGCTTAATCACTACGAAGAAAGTAAGCAATCACGTCTAGAGAAAGTAATGGCAGAAATGGATTCTTTAGATGCTTGGTCTATTGAGAGCGAAGTCAAAACAGTATTATCCAAATTAGGTATTACTGATTTGCAGTTGTCGGTTGGTGAATTATCAGGAGGATTACGAAGACGTGTTCAATTAGCGCAAGTATTATTAAATGATGCAGATTTATTGCTCTTAGACGAACCTACTAACCACTTAGATATTGACACTATTGCATGGTTAACGAATTTTTTGAAAAATAGTAAAAAGACAGTGCTTTTTATAACTCATGATCGTTATTTTCTAGACAATGTTGCAACACGTATTTTTGAATTAGATAAGGCACAGATTACAGAATATCAAGGCAATTATCAGGATTATGTCCGACTTCGTGCAGAACAAGACGAGCGTGATGCTGCTAGTTTACATAAAAAGAAACAGCTTTATAAACAGGAACTAGCTTGGATGCGTACTCAGCCACAAGCTCGTGCAACGAAACAACAGGCTCGTATTAATCGTTTTCAAAATCTAAAAAACGATTTACACCAAACAAGCGATACAAGCGATTTGGAAATGACATTTGAAACAAGTCGAATTGGGAAAAAGGTTATTAATTTTGAAAATGTCTCTTTTTCTTACCCAGATAAATCTATCTTGAAAGACTTTAATTTGTTAATTCAAAATAAAGACCGTATTGGCATCGTTGGAGATAATGGTGTTGGAAAGTCAACCTTACTTAATTTAATTGTTCAAGATTTACAGCCGGATTCGGGTAATGTCTCTATTGGTGAAACGATACGTGTAGGTTACTTTTCACAACAACTTCATAATATGGATGGCTCAAAACGTGTTATTAATTATTTGCAAGAGGTTGCAGATGAGGTTAAAACTAGTGTCGGTACAACAAGTGTGACAGAACTATTGGAACAATTTCTCTTTCCACGTTCGACACATGGAACACAAATTGCAAAATTATCAGGTGGTGAGAAAAAAAGACTTTACCTTTTAAAAATCCTGATTGAAAAGCCTAATGTGTTACTACTTGATGAGCCGACAAATGACTTAGATATTGCTACATTAACTGTTCTTGAAAATTTTTTACAAGGCTTTGGTGGTCCTGTGATTACAGTTAGTCACGATCGTTACTTTTTAGATAAAGTGGCTAATAAAATTATTGCGTTTGAAGATAACGATATCCGTGAATTTTTTGGTAATTATACTGATTATTTAGATGAAAAAGCATTTAATGAGCAAAATAATGAAGTTATCAGTAAAAAAGAGAGTACCAAGACAAGTCGTGAAAAGCAAAGTCGTAAAAGAATGTCTTACTTTGAAAAACAAGAATGGGCGACAATTGAAGACGATATTATGATATTGGAAAATACTATCACTCGTATAGAAAATGATATGCAAACATGTGGTAGTGATTTTACAAGGTTATCTGATTTACAAAAGGAATTAGATGCAAAAAATGAAGCACTTCTAGAAAAGTATGACCGTTATGAGTACCTTAGTGAGTTAGACACATGA

SEQ ID NO: 2502 - protein, 622 aa, Streptococcus agalactiae
  VARIANT 54: Xaa = Any Amino Acid
MSDFLVDGLTKSVGDKTVFSNVSFIIHSLDRIGIIGVNGTGKTTLLDVISGELXFDGDRSPFSSANDYKIAYLKQEPDFDDSQTILDTVLSSDLREMALIKEYELLLNHYEESKQSRLEKVMAEMDSLDAWSIESEVKTVLSKLGITDLQLSVGELSGGLRRRVQLAQVLLNDADLLLLDEPTNHLDIDTIAWLTNFLKNSKKTVLFITHDRYFLDNVATRIFELDKAQITEYQGNYQDYVRLRAEQDERDAASLHKKKQLYKQELAWMRTQPQARATKQQARINRFQNLKNDLHQTSDTSDLEMTFETSRIGKKVINFENVSFSYPDKSILKDFNLLIQNKDRIGIVGDNGVGKSTLLNLIVQDLQPDSGNVSIGETIRVGYFSQQLHNMDGSKRVINYLQEVADEVKTSVGTTSVTELLEQFLFPRSTHGTQIAKLSGGEKKRLYLLKILIEKPNVLLLDEPTNDLDIATLTVLENFLQGFGGPVITVSHDRYFLDKVANKIIAFEDNDIREFFGNYTDYLDEKAFNEQNNEVISKKESTKTSREKQSRKRMSYFEKQEWATIEDDIMILENTITRIENDMQTCGSDFTRLSDLQKELDAKNEALLEKYDRYEYLSELDT

SEQ ID NO: 2503 - protein, 1209 aa, Streptococcus agalactiae
ATGAGATTAAATTATTTGCCTTCTGAGTTTCAGAAGGCTTTACCAATATTAAAAAAGATAAAAAAAGCCGGTTATGAAGCATACTTTGTAGGTGGTAGTGTTCGGGATGTTTTACTTGACCGTCCAATTCATGATGTTGATATAGCAACGTCATCTTATCCAGAAGAAACAAAGCAGATTTTTAAAAGGACAGTTGATGTTGGTATTGAACATGGAACAGTCTTAGTATTGGAAAAAGGTGGTGAATATGAGATTACCACTTTTAGGACTGAGGAGGTTTATGTTGATTATAGGCGTCCGAGTCAGGTCAATTTTGTTAGGTCGCTAGAAGAAGATCTAAAACGTCGAGATTTCACAGTTAATGCCTTTGCTTTAAATGAAGATGGAGAAGTTATTGATCTCTTTCATGGATTGGATGATTTAGATAATCACCTTCTTAGAGCAGTAGGACTCGCCAGTGAGCGTTTTAATGAAGATGCTCTTCGAATTATGCGAGGTTTGCGTTTTTCTGCTAGTCTAAATTTTGATATCGAAACAACAACTTTTGAGGCAATGAAAAAGCACGCGTCATTATTGGAGAAAATATCTGTTGAGCGTTCTTTTATTGAATTTGATAAACTTCTATTAGCACCTTATTGGCGTAAAGGAATGCTGGCACTAATAGATAGTCATGCTTTTAATTATCTACCATGCTTAAAAAATAGGGAATTACAATTAAGCGCCTTTTTGTCCCAGTTAGATAAAGATTTTTTATTTGAGACATCAGAACAAGCTTGGGCATCACTCATCTTGAGTATGGAAGTTGAACACACAAAGACTTTTTTAAAAAAATGGAAGACATCAACTCACTTTCAAAAAGATGTTGAGCATATAGTGGATGTTTATCGTATTCGTGAACAAATGGGATTGACTAAAGAACATCTTTATCGTTATGGAAAAACTATAATAAAACAAGCGGAAGGTATTCGCAAAGCAAGAGGCTTGATGGTTGATTTCGAAAAAATAGAACAACTAGATAGTGAGTTAGCAATCCATGATAGGCATGAGATAGTTGTCAATGGTGGCACCTTAATCAAGAAATTAGGAATAAAACCTGGTCCACAGATGGGAGATATTATCTCTCAAATTGAATTAGCCATTGTTTTAGGACAACTGATTAATGAAGAAGAGGCTATTTTACATTTTATTAAGCAGTACTTGATGGATTAG

SEQ ID NO: 2504 - protein, 402 aa, Streptococcus agalactiae
MRLNYLPSEFQKALPILKKIKKAGYEAYFVGGSVRDVLLDRPIHDVDIATSSYPEETKQIFKRTVDVGIEHGTVLVLEKGGEYEITTFRTEEVYVDYRRPSQVNFVRSLEEDLKRRDFTVNAFALNEDGEVIDLFHGLDDLDNHLLRAVGLASERFNEDALRIMRGLRFSASLNFDIETTTFEAMKKHASLLEKISVERSFIEFDKLLLAPYWRKGMLALIDSHAFNYLPCLKNRELQLSAFLSQLDKDFLFETSEQAWASLILSMEVEHTKTFLKKWKTSTHFQKDVEHIVDVYRIREQMGLTKEHLYRYGKTIIKQAEGIRKARGLMVDFEKIEQLDSELAIHDRHEIVVNGGTLIKKLGIKPGPQMGDIISQIELAIVLGQLINEEEAILHFIKQYLMD

SEQ ID NO: 2505 - protein, 848 aa, Streptococcus agalactiae
ATGAAATTAGCACTTATTACGGATACCTCAGCTTACTTGCCTGAGGCTATCGAAAATCATGAAGATGTCTATGTTTTAGATATTCCAATTATCATTGATGGTAAAACTTATATTGAGGGACAAAATCTGACATTAGACCAATATTATGATAAGCTAGCGGCATCAAAAGAATTACCTAAAACAAGTCAGCCTAGCTTAGCTGAACTAGATGATCTCTTATGTCAATTGGAGAAAGAAGGGTATACACACGTCCTTGGTTTATTCATTGCAGCGGGGATATCAGGTTTCTGGCAGAATATTCAGTTTCTTATTGAAGAACATCCAAATTTGACAATTGCTTTTCCGGATACTAAAATAACTTCAGCACCACAGGGCAATTTAGTTAGAAATGCTTTGATGTGTTCACGTGAAGGGATGATTTTGATGTCATAGTTAACAAGATACAATCACAAATTGAAAAAATTGAAGGATTTATTGTTGTTAATGATTTGAATCATCTAGTAAAAGGTGGTAGATTGTCAAACGGTTCAGCTATCATTGGTAACCTTTTAAGTATCAAGCCGGTCTTACATTTTAATGAAGAAGGTAAAATCGTTGTCTATGAGAAAGTGCGTACAGAGAAAAAAGCCTTAAAACGCTTGGCTGAGATTGTCAAAGAAATGACAGCAGATGGTGAATATGATATTGCTATTATTCACTCTAGAGCACAAGATAAGGCAGAACAATTATATAATTTGTTAGCTAAAGCTGGTCTTAAAGACGATTTAGAAATTGTATCATTTGGTGGCGTTATTGCAACTCATCTTGGTGAAGGTGCGGTTGCCTTTGGTATTACCCCCAAAAATTGA

SEQ ID NO: 2506 - protein, 282 aa, Streptococcus agalactiae
MKLALITDTSAYLPEAIENHEDVYVLDIPIIIDGKTYIEGQNLTLDQYYDKLAASKELPKTSQPSLAELDDLLCQLEKEGYTHVLGLFIAAGISGFWQNIQFLIEEHPNLTIAFPDTKITSAPQGNLVRNALMCSREGMDFDVIVNKIQSQIEKIEGFIVVNDLNHLVKGGRLSNGSAIIGNLLSIKPVLHFNEEGKIVVYEKVRTEKKALKRLAEIVKEMTADGEYDIAIIHSRAQDKAEQLYNLLAKAGLKDDLEIVSFGGVIATHLGEGAVAFGITPKN

SEQ ID NO: 2507 - protein, 381 aa, Streptococcus agalactiae
ATGGAAGTCATTCGTGAACAAGAATTTGTCAATCAATACCACTATGATGCGCGCAATTTAGAATGGGAAGAGGAAAATGGTACCCCAAAAACAAATTTTGAAGTTACTTTCCAATTAGCTAATAGAGATGAAGCAGCAAAAGTAACGAGCATTGTAGCAGTGTTACAATTTGTTATTGTACGTGATGAGTTTGTTATTTCTGGTGTCATTTCACAAATGGCTCATATCCAAGGGCGCCTTATCAATGAGCCTAGTGAGTTTAGTCAAGATGAAGTTGAGAATCTAGCAGCTCCTCTTTTAGAAATCGTTAAACGTCTGACTTATGAAGTTACAGAAATTGCTTTAGATAGACCAGGAGTAACATTGGAGTTTAATAGTTAA

SEQ ID NO: 2508 - protein, 126 aa, Streptococcus agalactiae
MEVIREQEFVNQYHYDARNLEWEEENGTPKTNFEVTFQLANRDEAAKVTSIVAVLQFVIVRDEFVISGVISQMAHIQGRLINEPSEFSQDEVENLAAPLLEIVKRLTYEVTEIALDRPGVTLEFNS

SEQ ID NO: 2509 - protein, 534 aa, Streptococcus agalactiae
ATGACTATGAAAACTATTGAAGAAATTTACAAAAATTATCCTAATATCCCCTATATCTCACCTGAAAGAGACTTGGCTGAAATTAATTTTAGTAAAGTTGTTCCTAGGAAAAATATGGAAGAAACTAGTGAAGGACTCTTGCCTGGAGATATTATCTTATTATGGCGTATACAGTTTGGAACTTTCACAACTGAAACAAGTTTTTCAAAATATTTTGAATACATTTATGGTATAAATGGAAAAGAACACCTAGAATTTTTAATAAAAAATGGATTTGTAAGAATGGAGTCACCGCTTGATTCTTTAGATCACTTATCTGCTCCACTTTTAAAACTATTCTTAAAAGAAAAAAACGTAAAAGGCTTGTCAAAGATGAAACGCTCTGATTTAGATCAGGCAATAGCTATTGCTTTTACAGAAGAGGAATTAGGGAAGTTGTTTGTTGTCAGAGGGTTGGCACTTACAGAAAAAGGTTTAGCAGCCTTGAGTAACAATCAAGAAGTGATTGATAGACATCCTAAGAAGAAGTTCTAG

SEQ ID NO: 2510 - protein, 177 aa, Streptococcus agalactiae
MTMKTIEEIYKNYPNIPYISPERDLAEINFSKVVPRKNMEETSEGLLPGDIILLWRIQFGTFTTETSFSKYFEYIYGINGKEHLEFLIKNGFVRMESPLDSLDHLSAPLLKLFLKEKNVKGLSKMKRSDLDQAIAIAFTEEELGKLFVVRGLALTEKGLAALSNNQEVIDRHPKKKF

SEQ ID NO: 2511 - protein, 495 aa, Streptococcus agalactiae
ATGATTAAATGGAATGAAAAAGAAACAAAACTAGTTGATACAAGTTTTTCAATTATGTTGTATCTAAAAACGCTATTTGCAGTCGGACAAGTAGTAGCTGGCGTTTTATTATATTATTTTAAACCTACACAAATAAAACATCTCCTATTTCTTTTAACTGAAGGTGAAGTTCACGGTGGGATTCATGGTTTTATTTCTGCTCATTTCTTGAAAATAAGCAGTTATATTAATGATTCGGCTAGTCATTTAGCCGCTATCTATCTATTAATTCATGGCGGTATCAAATTAGTAGCACTTATTTTATTACATAAAGAGAAATTATTTGCTTACCCTTTATCAATTTTAGTTTTCGTTGGGTTTATCATTTTCCAACTAAGGGAATATTTTTCTAGTCATAGCATTTTAATGATTTTTCTATGTGTATTTGATGTTATCATGATAATTTTAACATGGTTAGAATATCAGAAAATGAAATTGAATTTTTCAAAAAGGTGA

SEQ ID NO: 2512 - protein, 164 aa, Streptococcus agalactiae
MIKWNEKETKLVDTSFSIMLYLKTLFAVGQVVAGVLLYYFKPTQIKHLLFLLTEGEVHGGIHGFISAHFLKISSYINDSASHLAAIYLLIHGGIKLVALILLHKEKLFAYPLSILVFVGFIIFQLREYFSSHSILMIFLCVFDVIMIILTWLEYQKMKLNFSKR

SEQ ID NO: 2513 - protein, 1926 aa, Streptococcus agalactiae
ATGGATTTAAAAGCAACCAGTAAAGAGGCTGCAATTGATGAAATGATTACAAAATTAGTTGACACAGGTGTTGTGACAAACTTTGCTATTTTTAAAGATGGTATCATGAAGCGTGAGGCACAAACATCAACTGGATTAGGTGATGGTATCGCTATGCCACATAGTAAAAATGCTGCCGTTAAAGAAGCTACTGTCCTTTTTGCAAAATCTGCATCAGGTGTTGATTACGAAGCACTTGATGGACAGCCAACTGATTTATTCTTTATGATTGCTGCGCCAGATGGTGCTAATGATACGCATTTAGCTGCCTTGGCAGAACTATCTAAATATCTTTTAAAAGAAGGGTTCGCTGATCAATTACGTCAAGCAAAAACGCCAGATGACATTATTGCTACTTTTGATAGTAATAGCATTTCTCAAGAAACAGTAGCTCCACAAACAGTACAATCAACAAGTAAAGGTTCAGATTATATTGTTGCAGTAACAGCTTGCACTACGGGAATTGCCCACACGTATATGGCAGAAGAAGCTTTAAAGAAAAAAGCAGCTGAAATGGGTGTAGGTATTAAAGTTGAAACAAATGGCGCTTCTGGTGTAGGAAATAAGTTGACTTCAAGTGATATTGCAAGGGCTAAGGGTGTTATTATTGCAGCAGATAAGGCTGTAGAGATGGATCGTTTTGATGGCAAACCTTTGGTATCACGTCCGGTAGCTGATGGTATTAAAAAAAGTGAAGACTTAATTAACATTATTCTCGATAATAAGGCACAAACCTATCATGCAAAAAATCAAAATGATAAACAATCAGGTGAATCTGATGGAAAATCAGGCTTAGGCTCTGCTTTTTATAAACACCTTATGGGTGGTGTATCACAAATGTTACCATTCGTTATTGGTGGTGGTATTATGATTGCGATTGCTTTCCTTTTTGATAACATACTTGGTGTACCAAAAGACCAATTAAGTAATTTAGGTTCATACCATGAAATTGCAGCCTTATTCAAAAATATCGGTGGCGCAGCATTTGCATTTATGTTACCAGTATTGGCAGGTTATATCGCTTATTCAATAGCTGAAAAACCAGGACTAGTAGCTGGCTTCGTAGCTGGTTCAATTGCATCAAGTGGACTGGCATTCGGTAAAGTACCTTTTGCAGAAGGTGGGAAAGCAACCTTAGCATTAGCAGGTGTGCCATCAGGTTTCTTAGAGGCTTTAGTAGGTGGTTTCTTAGCTGGTGGAGTTATCCTACTACTTAGAAAATTACTTTCAGGTCTCCCAAAATCGCTTGAAGGTATTAAATCAATTCTTCTATACCCATTGTTAGGTGTTTTGATTACAGGTTTCTTGATGTTGCTCGTAAACATTCCAATGGCAGCTATCAACACAGCTCTTAACACTTTCTTACAAGGTTTATCTGGTAGTTCAGCAGTCTTGATGGGCTTACTAGTTGGTGGTATGATGGCTGTAGATATGGGTGGGCCTGTTAATAAAGCAGCTTATGTTTTTGGTACAGGTACTCTTGCAGCAACTGTTGCAAATGGCGGCTCTGTTGTTATGGCAGCTGTAATGGCTGGAGGAATGGTTCCACCGTTAGCAGTATTTGTGGCAACTTTATTATTTAAAGATAAATTTAATAATGAAGAACGTCAATCTGGTCTAACAAATATCGTTATGGGGTTATCTTTTATCACTGAAGGTGCTATTCCGTTTGGTGCTGCTGACCCAGCTCGTGCAATCCCTAGCTTTATTGTAGGTTCAGCCTTAACTGGAGCACTTGTTGGTTTAGCTGGTATCAAGTTGATGGCTCCTCATGGAGGGATTTTTGTCATCGCATTAACAAGTAATCCTTTACTTTATATTCTATTTATTCTAATTGGAGCGGTAGTCTCAGGTGTACTCTTTGGCTTGTTCCGTAAAATAAAATAG

SEQ ID NO: 2514 - protein, 641 aa, Streptococcus agalactiae
MDLKATSKEAAIDEMITKLVDTGVVTNFAIFKDGIMKREAQTSTGLGDGIAMPHSKNAAVKEATVLFAKSASGVDYEALDGQPTDLFFMIAAPDGANDTHLAALAELSKYLLKEGFADQLRQAKTPDDIIATFDSNSISQETVAPQTVQSTSKGSDYIVAVTACTTGIAHTYMAEEALKKKAAEMGVGIKVETNGASGVGNKLTSSDIARAKGVIIAADKAVEMDRFDGKPLVSRPVADGIKKSEDLINIILDNKAQTYHAKNQNDKQSGESDGKSGLGSAFYKHLMGGVSQMLPFVIGGGIMIAIAFLFDNILGVPKDQLSNLGSYHEIAALFKNIGGAAFAFMLPVLAGYIAYSIAEKPGLVAGFVAGSIASSGLAFGKVPFAEGGKATLALAGVPSGFLEALVGGFLAGGVILLLRKLLSGLPKSLEGIKSILLYPLLGVLITGFLMLLVNIPMAAINTALNTFLQGLSGSSAVLMGLLVGGMMAVDMGGPVNKAAYVFGTGTLAATVANGGSVVMAAVMAGGMVPPLAVFVATLLFKDKFNNEERQSGLTNIVMGLSFITEGAIPFGAADPARAIPSFIVGSALTGALVGLAGIKLMAPHGGIFVIALTSNPLLYILFILIGAVVSGVLFGLFRKIK

SEQ ID NO: 2515 - protein, 831 aa, Streptococcus agalactiae
ATGACTAGCGATGATAAATATGTAGGTGGTAAAGGAATTAATGTTAGTCGCATATTAAAACGCTTAAAAATTGACAATACTGCTACAGGTTTTATCGGTGGATTTACAGGACATTTTGTTGAAGATGGACTTGTATCAGAAGGTATCAAAACTGACTTTGTTTCTGTTAATGAAGATACACGTATCAACGTTAAAGTAAAAGCAAAAATTGAAACTGAAATCAATGGCGGGGGTCCTAGGATAACAAATGAACAACTTCATCGTCTAGAGAAACTTCTTTCGAGACTAACACCTGAGGACACAGTAGTTTTCGCAGGTTCAGCACCAGCTAGCCTTGGAAATAAGGTCTATAATACATTGATTCCAATTGCTAAAAAGACAGGAGCGGAAGTTGTTTGCGATTTTGAAGGTCAGACACTTTTAGACGCTCTTGCTTATCAGCCTCTTTTAGTAAAACCGAATAACCATGAATTAGCAGATATTTTTGGCGTAGAGCTAGAAGGTCTGCCTGATATCGAAAAATATGCACATAAGATTCTAGATAAAGGAGCTAAGAATGTTATCGTTTCTATGGCAGGGGATGGTGCATTGTTAGTAACTCCAGAAGCTTCATATTTTGCAAAACCGATTAAGGGTGAAGTGAAAAATTCCGTTGGGGCTGGTGATTCAATGGTAGCTGGCTTTACAGGAGAATTTGTTAAGTCAAAAAATCCAGTAGAAGCACTAAAATGGGGCGTAGCTTGTGGTACAGCAACCACTTTCTCAGATGATTTAGCAACAGCTGAGTTTATCCAAGATATTTATAATAAAGTTGAGGTAGAAAAATTATGA

SEQ ID NO: 2516 - protein, 276 aa, Streptococcus agalactiae
MTSDDKYVGGKGINVSRILKRLKIDNTATGFIGGFTGHFVEDGLVSEGIKTDFVSVNEDTRINVKVKAKIETEINGGGPRITNEQLHRLEKLLSRLTPEDTVVFAGSAPASLGNKVYNTLIPIAKKTGAEVVCDFEGQTLLDALAYQPLLVKPNNHELADIFGVELEGLPDIEKYAHKILDKGAKNVIVSMAGDGALLVTPEASYFAKPIKGEVKNSVGAGDSMVAGFTGEFVKSKNPVEALKWGVACGTATTFSDDLATAEFIQDIYNKVEVEKL

SEQ ID NO: 2517 - protein, 1635 aa, Streptococcus agalactiae
ATGATGAAAAAAGGACAAGTAAATGATACTAAGCAATCTTACTCTCTACGTAAATATAAATTTGGTTTAGCATCAGTAATTTTAGGGTCATTCATAATGGTCACAAGTCCTGTTTTTGCGGATCAAACTACATCGGTTCAAGTTAATAATCAGACAGGCACTAGTGTGGATGCTAATAATTCTTCCAATGAGACAAGTGCGTCAAGTGTGATTACTTCCAATAATGATAGTGTTCAAGCGTCTGATAAAGTTGTAAATAGTCAAAATACGGCAACAAAGGACATTACTACTCCTTTAGTAGAGACAAAGCCAATGGTGGAAAAAACATTACCTGAACAAGGGAATTATGTTTATAGCAAAGAAACCGAGGTGAAAAATACACCTTCAAAATCAGCCCCAGTAGCTTTCTATGCAAAGAAAGGTGATAAAGTTTTCTATGACCAAGTATTTAATAAAGATAATGTGAAATGGATTTCATATAAGTCTTTTTGTGGCGTACGTCGATACGCAGCTATTGAGTCACTAGATCCATCAGGAGGTTCAGAGACTAAAGCACCTACTCCTGTAACAAATTCAGGAAGCAATAATCAAGAGAAAATAGCAACGCAAGGAAATTATACATTTTCACATAAAGTAGAAGTAAAAAATGAAGCTAAGGTAGCGAGTCCAACTCAATTTACATTGGACAAAGGAGACAGAATTTTTTACGACCAAATACTAACTATTGAAGGAAATCAGTGGTTATCTTATAAATCATTCAATGGTGTTCGTCGTTTTGTTTTGCTAGGTAAAGCATCTTCAGTAGAAAAAACTGAAGATAAAGAAAAAGTGTCTCCTCAACCACAAGCCCGTATTACTAAAACTGGTAGACTGACTATTTCTAACGAAACAACTACAGGTTTTGATATTTTAATTACGAATATTAAAGATGATAACGGTATCGCTGCTGTTAAGGTACCGGTTTGGACTGAACAAGGAGGGCAAGATGATATTAAATGGTATACAGCTGTAACTACTGGGGATGGCAACTACAAAGTAGCTGTATCATTTGCTGACCATAAGAATGAGAAGGGTCTTTATAATATTCATTTATACTACCAAGAAGCTAGTGGGACACTTGTAGGTGTAACAGGAACTAAAGTGACAGTAGCTGGAACTAATTCTTCTCAAGAACCTATTGAAAATGGTTTAGCAAAGACTGGTGTTTATAATATTATCGGAAGTACTGAAGTAAAAAATGAAGCTAAAATATCAAGTCAGACCCAATTTACTTTAGAAAAAGGTGACAAAATAAATTATGATCAAGTATTGACAGCAGATGGTTACCAGTGGATTTCTTACAAATCTTATAGTGGTGTTCGTCGCTATATTCCTGTGAAAAAGCTAACTACAAGTAGTGAAAAAGCGAAAGATGAGGCGACTAAACCGACTAGTTATCCCAACTTACCTAAAACAGGTACCTATACATTTACTAAAACTGTAGATGTGAAAAGTCAACCTAAAGTATCAAGTCCAGTGGAATTTAATTTTCAAAAGGGTGAAAAAATACATTATGATCAAGTGTTAGTAGTAGATGGTCATCAGTGGATTTCATACAAGAGTTATTCCGGTANNNNNCATTCATTCATTAATTAA

SEQ ID NO: 2518 - protein, 544 aa, Streptococcus agalactiae
  VARIANT 538, 539: Xaa = Any Amino Acid
MMKKGQVNDTKQSYSLRKYKFGLASVILGSFIMVTSPVFADQTTSVQVNNQTGTSVDANNSSNETSASSVITSNNDSVQASDKVVNSQNTATKDITTPLVETKPMVEKTLPEQGNYVYSKETEVKNTPSKSAPVAFYAKKGDKVFYDQVFNKDNVKWISYKSFCGVRRYAAIESLDPSGGSETKAPTPVTNSGSNNQEKIATQGNYTFSHKVEVKNEAKVASPTQFTLDKGDRIFYDQILTIEGNQWLSYKSFNGVRRFVLLGKASSVEKTEDKEKVSPQPQARITKTGRLTISNETTTGFDILITNIKDDNGIAAVKVPVWTEQGGQDDIKWYTAVTTGDGNYKVAVSFADHKNEKGLYNIHLYYQEASGTLVGVTGTKVTVAGTNSSQEPIENGLAKTGVYNIIGSTEVKNEAKISSQTQFTLEKGDKINYDQVLTADGYQWISYKSYSGVRRYIPVKKLTTSSEKAKDEATKPTSYPNLPKTGTYTFTKTVDVKSQPKVSSPVEFNFQKGEKIHYDQVLVVDGHQWISYKSYSGXXHSFIN

SEQ ID NO: 2519 - protein, 924 aa, Streptococcus agalactiae
ATGTTAGTTTATATTGCTGGTTCAGGCGCTATGGGATGTCGTTTTGGATATCAAATTTCTAAAACAAATCATGATGTTATTTTACTTGATAATTGGGCAGACCATATTATGGCTATTAAAGAAAATGGCTTGAAGGTAACAGGTGATACAGAGGACCTTGTTAAACTTCCTATCATGAAGCCAACTGATGCGACAGAAGAAGCAGATTTAATTATTTTGTTTACTAAAGCAATGCAGTTGCCAAATATGCTTCAAGATATTAAAAAAATTATTGGTAAGAAAACAAAGGTCTTATGTCTTTTAAATGGATTAGGACATGAAGATGTCATTCGTCAATATATCCCTGAACACAATATTTTGATGGGAGTAACAGTTTGGACTGCAGGGTTGAAAGGACCAGGGCATGCTCATCTGGAAGGAGTTGGTTCTGTAAATCTTCAAAGTATCGATCCTAACAATCAAGAAGCAGGTCATCGCGTTACTGAATTGCTTAATGAAGCAAAATTACAGGCTACTTATGACGAAAATGTTTTGCCAAATATTTGGAGAAAAGCTTGTGTTAACGGAACGATGAATTCAACTTGCGCCTTGCTAGATTGTACAATTGGTCAACTCTTTGCTAGTGAAGACGGCGTAAATATGGTACATGAAATTATCCATGAATTTGTTACTGTTGGAAAAGCAGAAGGTGTAGAGCTTGATGAAGAAGAAATAACAAAGTACGTTATGGATACATCTGTTAAAGCAGCCCATCATTACCCTTCAATGCATCAAGACTTAGTTCAAAATCAGCGCTTAACTGAAATTGATTTCTTAAATGGCGCAGTGAATAAAAAAGGTGAAAACCTAGGCATTGATACACCTTACTGTCGATTAATCACACAATTAATTCACACTAAAGAAAATGTACTTAGCATAAAATAA

SEQ ID NO: 2520 - protein, 307 aa, Streptococcus agalactiae
MLVYIAGSGAMGCRFGYQISKTNHDVILLDNWADHIMAIKENGLKVTGDTEDLVKLPIMKPTDATEEADLIILFTKAMQLPNMLQDIKKIIGKKTKVLCLLNGLGHEDVIRQYIPEHNILMGVTVWTAGLKGPGHAHLEGVGSVNLQSIDPNNQEAGHRVTELLNEAKLQATYDENVLPNIWRKACVNGTMNSTCALLDCTIGQLFASEDGVNMVHEIIHEFVTVGKAEGVELDEEEITKYVMDTSVKAAHHYPSMHQDLVQNQRLTEIDFLNGAVNKKGENLGIDTPYCRLITQLIHTKENVLSIK

SEQ ID NO: 2521 - protein, 1071 aa, Streptococcus agalactiae
ATGACAAATACGGTAACACCAAAAGAGACGGCTGGTTCTTTTATCAATAAAGTGTTAGGTGGGACAGCAACTGCAATCGTTGTAGCACTCATCCCAAATGCTATCCTAGCCACTTTTTTGAAACCATTTTTATCTTACGGACTTGCTGCAGAGTTCTTACACATCGTGCAGGTATTCCAATTTTTCACACCAATTATGGCAGGATTTTTGATTGGTCAACAGTTTAAATTCACCCCAATGCAACAGCTTGCTGTTGGAGGTGCTGCATATATTGGTTCTGGTGCGTGGGCTTACACAGAAGTTATTCAAAAAGGAGTTGCTACTGGTAGTTTCCAATTGCGTGGGATTGGTGATCTCATCAATATGATGCTAACAGCAGCTTTAGCAGTTTTAGCAGTTAAGTGGTTTGGTAATAAATTTGGTTCCCTAACCATTATCTTGTTACCTATTATCATAGGTACAGGCGTAGGCTATTTAGGATGGAAATTACTCCCTTACGTTTCATATGTGACAACACTTATTGGTCAAGGAATTAATTCTTTTACTACTTTACAACCAATTGCGATGTCAATTCTAATTGCGATGGCTTTTTCAATGCTTATTGTAAGTCCTATTTCAACAGTAGCGATTGGTCTAGCGATTGGTCTTAATGGTATGTCAGCAAGTGCAGCTTCAATGGGAGTTGCTTCAACAACAGCAGTGCTAGTTTGGGCAACGATGAAGGCTAATAAGTCTGGAGTTCCAATTGCTATTGCTTTAGGTGCAATGAAGATGATGATGCCAAATTTCCTAAAGCATCCAGTAATGGCGATTCCAATGCTTATGACTGCTACAGTAAGTTCTCTAACAGTCCCATTGTTTAAATTGGTGGGGACACCAGCTTCGTCTGGTTTTGGGCTTGTTGGTGCAGTAGGTCCGATTGCTTCATTTGAAGCAGGAGCAAGTATGTTGATTGTTATCTTATCTTGGCTCGTTATTCCTTTTGCAGTAGGTTTTGTATCACACAAAATTTGTAAAGACATTCTGAAACTTTATAAAGACGATATTTTCGTTTTTGAAGGTCAAAATTAA

SEQ ID NO: 2522 - protein, 356 aa, Streptococcus agalactiae
MTNTVTPKETAGSFINKVLGGTATAIVVALIPNAILATFLKPFLSYGLAAEFLHIVQVFQFFTPIMAGFLIGQQFKFTPMQQLAVGGAAYIGSGAWAYTEVIQKGVATGSFQLRGIGDLINMMLTAALAVLAVKWFGNKFGSLTIILLPIIIGTGVGYLGWKLLPYVSYVTTLIGQGINSFTTLQPIAMSILIAMAFSMLIVSPISTVAIGLAIGLNGMSASAASMGVASTTAVLVWATMKANKSGVPIAIALGAMKMMMPNFLKHPVMAIPMLMTATVSSLTVPLFKLVGTPASSGFGLVGAVGPIASFEAGASMLIVILSWLVIPFAVGFVSHKICKDILKLYKDDIFVFEGQN

SEQ ID NO: 2523 - protein, 993 aa, Streptococcus agalactiae
ATGAACAAAACAATTTATGATATCACTATTGTAGGAGGCGGACCAGTAGGTCTCTTTGCTGCTTTTTATGCTGGACTACGCGGAGTATCCGTTAAAATTATTGAAAGCCTTTCGGAATTAGGAGGCCAGCCAGCTATCCTTTATCCTGAGAAAAAAATCTATGATATTCCTGGTTATCCGGTGATTACTGGACGTGAATTAATTGATAAACATATTGAACAATTAGAGAGATTTAAAGATTCTATTGAAATCTGTTTAAAAGAAGAAGTTTTATCATTTGAAAAAGTAGATGATGTTTTCACAATTCAAACAGATAAAGATCAACATTTGTCACGTGCTATTGTTTTTGCTTGTGGCAACGGTGCTTTTGCTCCGCGTTTACTAGGTTTGGAAAATGAAGAAAATTATGCAGATAATAATTTATTCTATAACGTTACAAAGTTAGAACAGTTTGCAGGTAAACATGTTGTTATTTGTGGTGGAGGCGACTCAGCTGTTGATTGGGCCAATGAATTAGATAAGATTGCAGCTAGTGTAGCGATTGTTCATCGTAGAGATGCTTTTAGAGCGCATGAGCATAGTGTGGATATACTAAAGGCATCAGGTGTTAGAATTTTAACCCCTTATGTCCCAATTGGTTTAAATGGAGATAGTCAGAGAGTTAGCAGCTTGGTCGTTCAAAAAGTTAAAGGTGATGAAGTAATTGAATTACCTTTAGACAACTTGATTGTTAGTTTTGGCTTTTCTACTTCTAATAAAAATTTACGTTATTGGAATTTGGATTATAAACGGTCTAGTATCAATGTTTCTTCACTTTTTGAGACGACTCAAGAAGGCGTGTATGCTATTGGAGATGCTGCTAATTATCCAGGAAAGGTAGAATTGATTGCAACAGGATATGGGGAAGCACCAGTCGCTATAAACCAAGCTATCAATTATATTTATCCTGATCGAGATAACCGTGTAGTCCATTCAACATCATTGATAAAATAA

SEQ ID NO: 2524 - protein, 330 aa, Streptococcus agalactiae
MNKTIYDITIVGGGPVGLFAAFYAGLRGVSVKIIESLSELGGQPAILYPEKKIYDIPGYPVITGRELIDKHIEQLERFKDSIEICLKEEVLSFEKVDDVFTIQTDKDQHLSRAIVFACGNGAFAPRLLGLENEENYADNNLFYNVTKLEQFAGKHVVICGGGDSAVDWANELDKIAASVAIVHRRDAFRAHEHSVDILKASGVRILTPYVPIGLNGDSQRVSSLVVQKVKGDEVIELPLDNLIVSFGFSTSNKNLRYWNLDYKRSSINVSSLFETTQEGVYAIGDAANYPGKVELIATGYGEAPVAINQAINYIYPDRDNRVVHSTSLIK

SEQ ID NO: 2525 - protein, 756 aa, Streptococcus agalactiae
ATGATGAAGATTGATATTTTAACTTTATTTCCTGAAATGTTTGCCCCTCTGGAACATTCTATAGTTGGTAAGGCAAAAGAAAGAGGACTTCTTGAAATTAATTATCACAATTTCAGAGAAAATGCTGAGAAGTCTCGACATGTTGATGATGAGCCTTACGGTGGGGGGCAAGGGATGCTTTTACGTGCTCAACCTATTTTTGATACAATTGATAAAATAGATGCTCAAAAAGCACGTGTTATTTTGCTAGACCCAGCGGGCAGAACATTTGATCAGGATTTTGCAGAAGAACTATCCAAAGAAGATGAATTAATTTTTATTTGTGGTCACTATGAAGGTTATGATGAACGTATAAAATCATTAGTAACAGACGAAGTATCTTTGGGAGATTTTGTTCTTACGGGAGGAGAATTGGCGGCTATGACAATGGTCGATGCTACCGTTCGTCTGATTCCAGAAGTTATAGGTAAAGAAACAAGTCATCAGGATGATTCATTTTCATCGGGCCTATTAGAATATCCTCAGTATACGCGCCCATATGATTATTTAGGCATGACAGTTCCTGATGTTCTCATGAGTGGTCATCATGAAAATATCCGAAAATGGCGTTTAGAACAAAGTTTGCGAAAAACACTAGAACGTCGACCAGACTTGTTAGAAAATTATGCAATGACGGATGAAGAGAGACTTATCTTAGAGAAAATTAAAACAGAAATAGAAAGAACAGATACAGTAAATGAACAAAACAATTTATGA

SEQ ID NO: 2526 - protein, 251 aa, Streptococcus agalactiae
MMKIDILTLFPEMFAPLEHSIVGKAKERGLLEINYHNFRENAEKSRHVDDEPYGGGQGMLLRAQPIFDTIDKIDAQKARVILLDPAGRTFDQDFAEELSKEDELIFICGHYEGYDERIKSLVTDEVSLGDFVLTGGELAAMTMVDATVRLIPEVIGKETSHQDDSFSSGLLEYPQYTRPYDYLGMTVPDVLMSGHHENIRKWRLEQSLRKTLERRPDLLENYAMTDEERLILEKIKTEIERTDTVNEQNNL

SEQ ID NO: 2527 - protein, 690 aa, Streptococcus agalactiae
ATGCGTTGGTTCGAATCCAGCTACCCCAGTTTCACATGGTCCGTTGGTCAAGGGGTTAAGACACCGCCTTTTCACGGCGGTAACACGGGTTCGAATCCCGTACGGACTATCGTGGCCAGTTGCATTTTAGCGGCTGGTTTTTCTTTTATTTTCAAAAATATCGGAGTTACTATGGAATACTTTAACGTTGGAAAAATTGTCAATACACAAGGATTACAAGGCGAAATGCGTGTATTAAGCGTGACTGACTTTGTAGAAGAACGCTTTAAAAAAGGTCAAGTGTTAGCTTTATTCGATGAAAAGAATCAGTTTGTTATGGATATTGAAATTGCTAGTCATCGTAAGCAGAAGAATTTTGACATTATAAAATTCAAAGGAATGTATCATATTAATGATATTGAAAAATATAAAGGTTTCACACTGAAGGTGGCAGAGGATCAACTGAGCGACCTTAAAGATGGTGAATTTTATTATCATGAAATTATTGGCTTAGATGTCTATGAAGGGGAAGAGCTGATTGGAAAAATCAAAGAAATTTTACAACCAGGAGCAAATGACGTTTGGGTTGTGGAACGTCATGGAAAACGTGATCTTTTATTACCCTATATCCCGCCAGTAGTATTAGAAGTGGACCTTTCTAATCAGCGTGTTCAAGTTGAATTGATGGAAGGTTTAGATGATGAAGATTGA

SEQ ID NO: 2528 - protein, 229 aa, Streptococcus agalactiae
MRWFESSYPSFTWSVGQGVKTPPFHGGNTGSNPVRTIVASCILAAGFSFIFKNIGVTMEYFNVGKIVNTQGLQGEMRVLSVTDFVEERFKKGQVLALFDEKNQFVMDIEIASHRKQKNFDIIKFKGMYHINDIEKYKGFTLKVAEDQLSDLKDGEFYYHEIIGLDVYEGEELIGKIKEILQPGANDVWVVERHGKRDLLLPYIPPVVLEVDLSNQRVQVELMEGLDDED

SEQ ID NO: 2529 - protein, 1512 aa, Streptococcus agalactiae
TTGCTATTTGATTTTCTCGAAGAAAAAATAAAACTGAAAGCATACCTGATGACCGCCTTACTTGATGATGGAGAAATTAACCTTGATCACTTTAAAACAGAATATGCTTTGAGTGAAAAGATTTTACAAGGTCTTATTTCGGAACTACAAATACTTTATTCTGATTTCTACCTTGTTGTCAAAAGTAGAACAATGGTATTGTTCCATTACGAAACACTTTCTAAGCTAGAGACTTTGCATACCATTTATCGAGAGTCTAATACGTTACAGTTTTTGGCATATTTTATTGCTCCTCAAAATGTCAGTTTTTCTGAATTCACGGCTAAGAAATTCATATCCGTCGCAAGTGCCTACCGAATAAAGAAAAACTGTAAACTTTATTTGGAGAGTGTTAAGTTATCAATACAAAAAAATAAAGTGACAGGTCCAGAATATCAGATTAGGCTGCTGATTGCTTTGTTACAGTATCATTTTGGTTTTATTATTTATCCTTTTGATGCTACAAGTGAGGTAATGATAAGGGATTTTATTGAATACTCGAATTTTAAAGGGTGTGACTACGACCTTAAAGACTTATCTGAAGAATATTACTATTTTTATATTTTGGTGAATTTAGTTTGGAAAAGAAAAGAATATAAAGTAGAAATTCCTCAAACAGAATCCTTTAATCAACTAAAAAAATCTATTCTCTACATGGAGTTATCCAAAGCAGCTCAAAAGAGTATTGCTATACATCTTGGTATAGAGTTGAATGAAGGTTTACTTGATTATCTATATTTAGTGTTTTGTATTAGTGATGGTCCTCTATTTAGCAATCGAGATGATATCAATATCAACGAAGAATTTATTTTTGCTTCTTATAAGATATCAAAGTCTAAAGCCTTTAAGAATTTTTGTGGTCGATTATTGGGTAGAGAATTTATTGACTCGCAGCATTTTAAAGATATTAATGCCTATTTTTTGAGACATTTTATTTGTTATTGTTATTATTTTATTCCTGATTTTTATTTTTTAAATACATCAAGGCTGAGCTATTCTAAGGATTTATATCACCTATTAGATAAAGGTCTGGCTGATATTTTTAACCTTAAAGGAGGGAATTTAACTTTTTCAAAACATGAGACAGTGCTACTAACAATGCAATTATCTAACTTAATAGAGACTTTCTTAGCTCCTCTTTCTGTATATGTAATTTCATCTAGTAATATTAGATTACAAACCTATCAAGTAATGTTAAACCAATATTTTACATCTAAGATAGCGGAATTCTTTTTTGTAAACTATCAAACGACTCAGATAGATGAAAAATTACTAAAAAAAGCAGATATCATTATTGCTGAGAGACGCTATATATCTTCTTTAAAAAATGACTCAGGTGTGGCTATACAAGATATATTAGAAATTGGGATGAATAATAAGCAGTACCATGAACTACTTTTACAAGCTATTATCGAAAAAAGGGACCAAAAAGTTTTTGAATATATTTCAAAAATGAAACATAAAATACTTTGA

SEQ ID NO: 2530 - protein, 503 aa, Streptococcus agalactiae
MLFDFLEEKIKLKAYLMTALLDDGEINLDHFKTEYALSEKILQGLISELQILYSDFYLVVKSRTMVLFHYETLSKLETLHTIYRESNTLQFLAYFIAPQNVSFSEFTAKKFISVASAYRIKKNCKLYLESVKLSIQKNKVTGPEYQIRLLIALLQYHFGFIIYPFDATSEVMIRDFIEYSNFKGCDYDLKDLSEEYYYFYILVNLVWKRKEYKVEIPQTESFNQLKKSILYMELSKAAQKSIAIHLGIELNEGLLDYLYLVFCISDGPLFSNRDDININEEFIFASYKISKSKAFKNFCGRLLGREFIDSQHFKDINAYFLRHFICYCYYFIPDFYFLNTSRLSYSKDLYHLLDKGLADIFNLKGGNLTFSKHETVLLTMQLSNLIETFLAPLSVYVISSSNIRLQTYQVMLNQYFTSKIAEFFFVNYQTTQIDEKLLKKADIIIAERRYISSLKNDSGVAIQDILEIGMNNKQYHELLLQAIIEKRDQKVFEYISKMKHKIL

SEQ ID NO: 2531 - protein, 243 aa, Streptococcus agalactiae
ATGGATACCATTGAAAATCTCATTATTGCTATTGTGAAACCTTTGATTTCACAACCAGATCAGTTAACCATAAAAATTCAGGATGGCCCAGAATTTTTAGAGTACCATCTTGATTTAGATACCCAAGACATCGGTCGTGTTATCGGCAAAAAGGGTCGTACAATTACAGCGATAAGGTCGATTGTCTATTCGGTACCAACACAAGGGAAAAAAGTAAGACTCATCATTGATGAGAAAGAATAA

SEQ ID NO: 2532 - protein, 80 aa, Streptococcus agalactiae
MDTIENLIIAIVKPLISQPDQLTIKIQDGPEFLEYHLDLDTQDIGRVIGKKGRTITAIRSIVYSVPTQGKKVRLIIDEKE

SEQ ID NO: 2533 - protein, 273 aa, Streptococcus agalactiae
ATGGCAGTAAAAATCCGTTTAACTCGTATGGGTTCTAAGAAGAAACCTTTCTACCGTATCAATGTTGCAGATTCACGTGCACCACGTGACGGACGTTTTATTGAAACTGTTGGAACATACAACCCATTAGTTGCAGAAAACCAAGTTACAATCAAAGAAGAACGTGTTCTTGAATGGTTATCAAAAGGTGCACAACCTTCAGATACAGTTCGTAACCTTCTTTCAAAAGCTGGAGTTATGACTAAATTCCACGATCAAAAATTCTCAAAATAA

SEQ ID NO: 2534 - protein, 90 aa, Streptococcus agalactiae
MAVKIRLTRMGSKKKPFYRINVADSRAPRDGRFIETVGTYNPLVAENQVTIKEERVLEWLSKGAQPSDTVRNLLSKAGVMTKFHDQKFSK

SEQ ID NO: 2535 - protein, 1248 aa, Streptococcus agalactiae
ATGGAAAATTGGAAGTTTGCCCTATCATCGATTCTAGGGCACAAGATGCGTGCTTTTCTGACCATGTTAGGGATCATCATTGGGGTTGCATCAGTTGTGTTAATTATGGCCTTAGGTAAGGGCATGAAAGATTCGGTTACAAATGAGATTACAAAGTCTCAGAAGAACCTTCAGATTTATTATAAAACAAAAGAAGACCAAAAAAATGAGGATAACTTTGGAGCTCAAGGGGCTTTCATGCAAGGTAGTGATACCAACCGTAAGGAACCAATTATTCAAGAATCATGGTTAAAAAAGATTGCTAAGGAAGTAGATGGTGTTAGTGGCTACTATGTAACCAATCAAACAAATGCTCCAGTAGCTTACCTTGAAAAAAAGGCAAAGACGGTTAATATAACAGGAATTAACCGCACTTACCTTGGTATCAAAAAGTTCAAAATTAAAAGTGGTCGTCAATTCCAAGAGGAGGATTATAACCAATTCTCGAGAGTTATTTTACTAGAAGAAAAATTAGCTCAGAGATTATTCCAGACAAATGAAGCAGCGTTAAATAAGGTGGTGACTGTAAAAAATAAATCTTACTTAGTAGTGGGGGTTTATTCGGATCCAGAAGCTGGTTCAGGCTTATATGGAAGTAATTCTGATGGGAATGCTATTTTAACCAATACACAGTTAGCTTCGGAGTTTGGTGCTAAAGAAGCAGAAAACATATATTTTCATCTTAATGATGTATCGCAATCCAATCGCATTGGTAAAGAAATAGGCAAACGTTTAACAGACATTAGTCATGCTAAGGATGGGTACTATGATAATTTTGACATGACATCTATAGTTAAATCTATCAATACCCAAGTTGGTATTATGACAGGTGTTATTGGAGCGATTGCAGCAATTTCTCTCCTAGTTGGTGGTATCGGAGTGATGAATATTATGTTAGTCTCTGTAACTGAGCGCACGAGAGAAATTGGCCTTCGTAAAGCCCTTGGGGCAACTCGACGTAAAATTTTAGCTCAATTTTTAATTGAATCAATGGTCTTAACGATTTTGGGTGGATTAATTGGGTTATTACTAGCCTATGGAGGTACGATGTTAATTGCTAATGCGCAAGATAAGATTACTCCTTCTGTGTCACTTAACGTGGCTATAGGCAGTTTAATTTTCTCAGCATTTATTGGAATTATATTTGGTTTATTACCTGCTAATAAAGCCAGCAAATTAAACCCAATTGATGCTTTACGATATGAATAA

SEQ ID NO: 2536 - protein, 415 aa, Streptococcus agalactiae
MENWKFALSSILGHKMRAFLTMLGIIIGVASVVLIMALGKGMKDSVTNEITKSQKNLQIYYKTKEDQKNEDNFGAQGAFMQGSDTNRKEPIIQESWLKKIAKEVDGVSGYYVTNQTNAPVAYLEKKAKTVNITGINRTYLGIKKFKIKSGRQFQEEDYNQFSRVILLEEKLAQRLFQTNEAALNKVVTVKNKSYLVVGVYSDPEAGSGLYGSNSDGNAILTNTQLASEFGAKEAENIYFHLNDVSQSNRIGKEIGKRLTDISHAKDGYYDNFDMTSIVKSINTQVGIMTGVIGAIAAISLLVGGIGVMNIMLVSVTERTREIGLRKALGATRRKILAQFLIESMVLTILGGLIGLLLAYGGTMLIANAQDKITPSVSLNVAIGSLIFSAFIGIIFGLLPANKASKLNPIDALRYE

SEQ ID NO: 2537 - protein, 711 aa, Streptococcus agalactiae
GTGACAACTAATCGAAAAGAACTGATTAGATTGCATCAGATTGTTAAAAGTTATCAAAATGGGGATCAAAAACTTCAAGTCTTAAAGAACATTGATTTGACGGTTTATGAAGGTGAATTTCTTGCAATCATGGGGCCATCTGGTTCAGGGAAATCCACACTAATGAATATTATTGGCTTGTTGGATTCTCCAACTTCAGGAGATTATAGTTTAAATGGTAAACGTGTCGAAGAACTAAGTCAAACAAAATTAGCTCAAGTTCGAAATAAGGAAATTGGTTTTGTCTTTCAACAATTTTTCTTGTTATCTAAACTAACGGCTTTACAAAATGTTGAATTACCCTTAATTTATGCGGGTGTACCTCCTAAAAAGCGTAAAAATTTAGCAAAACAATTTTTAGATAAAGTTGAATTAAGAGAGCGTATGAACCATCTGCCAACAGAATTATCTGGGGGACAGAAGCAACGTGTAGCAATCGCGCGTGCTTTGGTGAATAGCCCATCTATTATTCTAGCAGATGAGCCGACTGGTGCCTTGGATACAAAGACGGGTGAGCAAATTATGCAGTTCCTAACGGAATTAAATCAAGAAGGTAAAACCATTATCATGGTAACTCATGAACCAGAAATCGCCGATTATGCGACTCGTAAAATTGTTATTCGTGATGGCGAAATTACAGCAGATACTACTGATAGTATTAGAATTGATTAA

SEQ ID NO: 2538 - protein, 236 aa, Streptococcus agalactiae
MTTNRKELIRLHQIVKSYQNGDQKLQVLKNIDLTVYEGEFLAIMGPSGSGKSTLMNIIGLLDSPTSGDYSLNGKRVEELSQTKLAQVRNKEIGFVFQQFFLLSKLTALQNVELPLIYAGVPPKKRKNLAKQFLDKVELRERMNHLPTELSGGQKQRVAIARALVNSPSIILADEPTGALDTKTGEQIMQFLTELNQEGKTIIMVTHEPEIADYATRKIVIRDGEITADTTDSIRID

SEQ ID NO: 2539 - protein, 1245 aa, Streptococcus agalactiae
ATGAGTAAACGACAAAATTTAGGAATTAGTAAAAAAGGAGCAATTATATCAGGGCTCTCAGTGGCACTAATTGTAGTAATAGGTGGCTTTTTATGGGTACAATCTCAACCTAATAAGAGTGCAGTAAAAACTAACTACAAAGTTTTTAATGTTAGAGAAGGAAGTGTTTCGTCCTCAACTCTTTTGACAGGAAAAGCTAAGGCTAATCAAGAACAGTATGTGTATTTTGATGCTAATAAAGGTAATCGAGCAACTGTCACAGTTAAAGTGGGTGATAAAATCACAGCTGGTCAGCAGTTAGTTCAATATGATACAACAACTGCACAAGCAGCCTACGACACTGCTAATCGTCAATTAAATAAAGTAGCGCGTCAGATTAATAATCTAAAGACAACAGGAAGTCTTCCAGCTATGGAATCAAGTGATCAATCTTCTTCATCATCACAAGGACAAGGGACTCAATCGACTAGTGGTGCGACGAATCGTCTACAGCAAAATTATCAAAGTCAAGCTAATGCTTCATACAACCAACAACTTCAAGATTTGAATGATGCTTATGCAGATGCACAGGCAGAAGTAAATAAAGCACAAAAAGCATTGAATGATACTGTTATTACAAGTGACGTATCAGGGACAGTTGTTGAAGTTAATAGTGATATTGATCCAGCTTCAAAAACTAGTCAAGTACTTGTCCATGTAGCAACTGAAGGTAAACTCCAAGTACAAGGAACGATGAGTGAGTATGATTTGGCTAATGTTAAAAAAGACCAGGCTGTTAAAATAAAATCTAAGGTCTATCCTGACAAGGAATGGGAAGGTAAAATTTCATATATCTCAAATTATCCAGAAGCAGAAGCAAACAACAATGACTCTAATAACGGCTCTAGTGCTGTAAATTATAAATATAAAGTAGATATTACTAGCCCTCTCGATGCATTAAAACAAGGTTTTACCGTATCAGTTGAAGTAGTTAATGGAGATAAGCACCTTATTGTCCCTACAAGTTCTGTGATAAACAAAGATAATAAACACTTTGTTTGGGTATACAATGATTCTAATCGTAAAATTTCCAAAGTTGAAGTCAAAATTGGTAAAGCTGATGCTAAGACACAAGAAATTTTATCAGGTTTGAAAGCAGGACAAATCGTGGTTACTAATCCAAGTAAAACCTTCAAGGATGGGCAAAAAATTGATAATATTGAATCAATCGATCTTAACTCTAATAAGAAATCAGAGGTGAAATAA

SEQ ID NO: 2540 - protein, 414 aa, Streptococcus agalactiae
MSKRQNLGISKKGAIISGLSVALIVVIGGFLWVQSQPNKSAVKTNYKVFNVREGSVSSSTLLTGKAKANQEQYVYFDANKGNRATVTVKVGDKITAGQQLVQYDTTTAQAAYDTANRQLNKVARQINNLKTTGSLPAMESSDQSSSSSQGQGTQSTSGATNRLQQNYQSQANASYNQQLQDLNDAYADAQAEVNKAQKALNDTVITSDVSGTVVEVNSDIDPASKTSQVLVHVATEGKLQVQGTMSEYDLANVKKDQAVKIKSKVYPDKEWEGKISYISNYPEAEANNNDSNNGSSAVNYKYKVDITSPLDALKQGFTVSVEVVNGDKHLIVPTSSVINKDNKHFVWVYNDSNRKISKVEVKIGKADAKTQEILSGLKAGQIVVTNPSKTFKDGQKIDNIESIDLNSNKKSEVK

SEQ ID NO: 2541 - protein, 1599 aa, Streptococcus agalactiae
ATGCTAAATACAAAGGATAAACAGCCTATTTTGCTTATTATTTTCGGACAGAAAATGAAAGAATATGACGATTTAATTAGATCAACTGTTGAGAGGTTATCTAAAAGGGATAGACCTGTTAGTATTCTTATCTCGAAGGAGCTAAACCATGTGATTCACCATTATGATGCACAATTTGAAAATCTTGAGACGCTTGTGGGGTATATAAATACACATGAAGATAGTTTGATTTACCCCCTTTGCTTAGATAAAAATCATGAGCTATTTCAAGAGTTTTTAGCGTGGCAGAGTCATTATTCAAGGCAGTATATCAGCGATAATTTATCAGAAAAAAGTGTTCAGGCAATAGACAATAATCAAGACTTTGTGCAAGTAGATTGTTTAGTAATGAGAGACTCTTTGAATAATTGTTTATATGTCTCTGATTTAGAATATATTGAATCTAATAAAACAACTGGTAAGTCTCTAGCGATTGTACCAAGTCAAACTTTATCCGATGCTGCTAGGCAAACAATTCGAGATGTTGCATTTGATGTGTGTCGAAAAGCAAACATTATTGGAGTATGTTACTTTAGTTTCTTAATAGATTTGAACAGTTTGGATTATCATATAATTAGTTTATCATCTGGTTTGTCTCATCAAAGCATTTTATTTGAGACTATTACGACCTATCCTGTTTTAGAGATAGCAACTAAATTGACAGTGGGATATACTTTTAGTCAACTGAAGCATTCTTATTACCCAAATACCTCTGCCTTTTTAGAGCCGCAATTAGACTATGTAGCTACCGTATCTTTTAGTTTTGAAAAAGTTGACTATATCTTTTTTGCTCGTAATATAGAGCAATTATTTTTAAATTTACTCGAGGCTAGCAGTCATGATCATTTTCCATTTCTGAGTGATATTAGCGAGGAAGATTTGATGTTTGCTTTGATTCAGAAAAAAGAAAATCGTCTAGCTTATCTTTTGGAGGCTTTTAGACGTGGCTTTGATTTGTATGATTTATCCTCAGTTACTAAAATCAACCCTTTTTACTTAGATAAATGTTTACATATTGTAGAGTTGTATGAAAACCTGAATAAAAGCCAATATAATGTAGATATTTATAAGGAAGCTAAAAGGTATGGTTTTTCGGATGACTATATTGCTAGTAGTTGGCAAATCTCTTTGATAGACATGTTAGAATATCGAAAAAAACATAGTGTCGCACCTGTTCTGAAGCAAGTCGAACAAAGTTCTGGTGTTCTAACTGGCCATCAAATTCAGTATTTTCGAAGCTATGATTGGCATTCAGACTACATTTCTAGCGGTTGTCAAAAGGCTTTGATAATGGTAGACAAGGGTTATTCCCTAGTAAAATTAAATGAGTTAATTAAGCAAATCAAACAAACTCATTTAGAATTATTAATTGTTACCAATCAACCTCTCCTCATAGAACAATTAAATGATACATCTATAATTTTTGACACTATAGGTATTGAGACCATATTAACAATTATGGGTATAGAAGAGGTGGAAGAAGTGTATTTATTGGGAGAAAGTCAAGCAGACATGTTTTCAAAAATGAAAAATTTTTCTATCTCTTGTCAGTCTATTTAG

SEQ ID NO: 2542 - protein, 532 aa, Streptococcus agalactiae
MLNTKDKQPILLIIFGQKMKEYDDLIRSTVERLSKRDRPVSILISKELNHVIHHYDAQFENLETLVGYINTHEDSLIYPLCLDKNHELFQEFLAWQSHYSRQYISDNLSEKSVQAIDNNQDFVQVDCLVMRDSLNNCLYVSDLEYIESNKTTGKSLAIVPSQTLSDAARQTIRDVAFDVCRKANIIGVCYFSFLIDLNSLDYHIISLSSGLSHQSILFETITTYPVLEIATKLTVGYTFSQLKHSYYPNTSAFLEPQLDYVATVSFSFEKVDYIFFARNIEQLFLNLLEASSHDHFPFLSDISEEDLMFALIQKKENRLAYLLEAFRRGFDLYDLSSVTKINPFYLDKCLHIVELYENLNKSQYNVDIYKEAKRYGFSDDYIASSWQISLIDMLEYRKKHSVAPVLKQVEQSSGVLTGHQIQYFRSYDWHSDYISSGCQKALIMVDKGYSLVKLNELIKQIKQTHLELLIVTNQPLLIEQLNDTSIIFDTIGIETILTIMGIEEVEEVYLLGESQADMFSKMKNFSISCQSI

SEQ ID NO: 2543 - protein, 1071 aa, Streptococcus agalactiae
ATGGCAAAAAAATTGTTAATTCTAGAGGATGGTACGGTTTTTGAAGGACTATCCTTTGGTTCATCTCTTGATGTAACTGGCGAATTAGTTTTTTGTACGGGGAATACCGGCTATCAGGAAATAATAACGAATCCTTCACATAATGGAAAAATTTTAGTTTTTACCTCACCGCTAATAGGAAATTATGGTATTCATCGCAGTTACTCTGAAGCCATTATTCCCACTTGTTTAGGAGTTGTTGTTGCAGAGTATTCCAGATGTGTAAGTAGCGATACTAGCAAGATGAATCTAGATGAATTTTTGAAAATGAAAAAGGTTCCTGCAATGTCGGGGGTCGATACAAGGTATTTGATGCAAGTTATTAAAGAAAAAGGATTTGTAAAAGCTACTTTAGCAGAAGCAGGTGATGTTTTATCACATTTACAGGATCAATTAATAGCGACAGTATTACCGACAAATAATGTGGAACAAGTTTCGACAAAAACAGCTTATCCGTCGCCTGCTAGCGGTCGAAATATTGTTGTACTTGATTTTGGTCTTAAACATTCTATTTTGAGAGAATTGTCTAAACGTCAGTGTGACGTGACTGTCATTCCCTACAATACGTCTTTAGAAGGTATTAAAAATCTATACCCAGAAGGTATCATATTATCTAATGGTCCGGGGAATCCAGAAAAGCTTCAGGAAATCTTAAACACTATTAAAGAATTACAAAAATCTGTTCCTATGTTAGGTATTGGTTTGGGGCACCAATTAATTGCCATGGCAAATGGTGCAGAAATTATGAGACTCCCAGTTGCTAAGAAGGGGCCAAATTATCCCATGAGAGATATTGCTACGGGTCGTTTAGAAACAGTTAGTCAGTTTAATCATTTTACCGTTAACCGGCTAAATCTTCCGCATGATTTACTGGTAACACACGAAGGTTTGAATGATCAAGAGATTGTTGCTCTAAGGCACCGCTCATTTCCAGTGATGTCCGTGCAATTTTACCCAGAGGCTGCTCCAGGCCCTCATGATGTGACCTATTTTTTTGATGAATTTTTAGAAATGATTGGATCACGCGCTTAA

SEQ ID NO: 2544 - protein, 356 aa, Streptococcus agalactiae
MAKKLLILEDGTVFEGLSFGSSLDVTGELVFCTGNTGYQEIITNPSHNGKILVFTSPLIGNYGIHRSYSEAIIPTCLGVVVAEYSRCVSSDTSKMNLDEFLKMKKVPAMSGVDTRYLMQVIKEKGFVKATLAEAGDVLSHLQDQLIATVLPTNNVEQVSTKTAYPSPASGRNIVVLDFGLKHSILRELSKRQCDVTVIPYNTSLEGIKNLYPEGIILSNGPGNPEKLQEILNTIKELQKSVPMLGIGLGHQLIAMANGAEIMRLPVAKKGPNYPMRDIATGRLETVSQFNHFTVNRLNLPHDLLVTHEGLNDQEIVALRHRSFPVMSVQFYPEAAPGPHDVTYFFDEFLEMIGSRA

SEQ ID NO: 2545 - protein, 522 aa, Streptococcus agalactiae
ATGAAAAGAAAAGAAATTATTGATGATGTGACCATGAAACGTGCTATTACACGTATTACCTACGAAATTATAGAACGTAACAAAAATTTAGATAATATTGTCTTAGCAGGCATTAAAACAAGAGGTGTTTTTTTAGCCAAACGCATTCAAGAACGCTTGAAGCAATTAGAAAATTTAGATATTCCCGTTGGAGAATTGGATACTAAACCTTTCCGTGATGATATGAAAGTTGAAGTTGACACCACAACTATGCCAGTTGACATCACTGATAAAGATATTATATTAATTGATGATGTTCTCTATACAGGTCGCACTATTCGAGCTGCTATTGATAATCTTGTTAGTTTAGGGCGTCCGAGTCGTGTCAGTTTAGCTGTATTAATTGACCGTGGGCATCGTGAACTACCTATTCGTGCAGATTATGTGGGGAAAAATATTCCAACAAGTCAATTTGAAGAAATTCTAGTTGAAGTGATGGAACATGATGGTTACGATCGTGTGAGTATTATTGATCCGAGTTAA

SEQ ID NO: 2546 - protein, 173 aa, Streptococcus agalactiae
MKRKEIIDDVTMKRAITRITYEIIERNKNLDNIVLAGIKTRGVFLAKRIQERLKQLENLDIPVGELDTKPFRDDMKVEVDTTTMPVDITDKDIILIDDVLYTGRTIRAAIDNLVSLGRPSRVSLAVLIDRGHRELPIRADYVGKNIPTSQFEEILVEVMEHDGYDRVSIIDPS

SEQ ID NO: 2547 - protein, 891 aa, Streptococcus agalactiae
ATGGAAATCACAATTAAAATAGCAGGAGTTAGGCTAGATAAAGCTTTAGCGGATAATTCTGAACTGTCGCGTAGTCAAGCTAATGAAGAAATTAAAAAAGGGATTGTGTTAGTAAATGGACAAGTAAAAAAAGCGAAATATACTGTTCAAGAAGGAGATCGGATTACTTTTGATATTCCTAAAGAGGAAGTACTAGATTATCAAGCTGAAAATATCCCTTTAGATATTATCTATCAAGATGATGACGTTGCTGTGGTTAATAAGCCGCAAGGGATGGTTGTTCACCCTTCTGCAGGCCACAGTTCGGGCACCTTAGTTAACGCCTTGATGTATCATATTAAGGATTTATCATCAATTAATGGCGTTGTTCGCCCAGGGATCGTTCATCGTATTGATAAAGATACTTCTGGTTTATTGATGGTTGCAAAAAATGATAGAGCTCACCAAGTGTTGGCTGAAGAGTTAAAAGATAAAAAATCGCTTCGTAAATATTTAGCAATTGTGCATGGTAATTTACCAAATGATCGAGGTGTGATTGAGGCTCCGATTGGTAGAAGCGATAAAGATCGTAAGAAGCAAGCCGTGACTGCTAAAGGTAAGCCAGCAATAACTCGTTTTCATGTTTTAGAACGTTTTGGTGATTATACCTTAGTTGAATTGTCATTGGAGACAGGTCGAACACACCAAATTCGGGTTCATATGGCTTATATTGGCCATCCTCTAGCCGGTGATCCTGTCTACGGTCCCCGTAAGACTTTAGGGGGTAAAGGACAGTTTTTGCATGCACAAACACTAGGTTTTACGCACCCTAGTAACGGAGAGAATTTGATTTTTTCAGTAGAGGTTCCGGAAATTTTTCAGACAACCTTAGAAAAGTTGAGAAAAAATTAA

SEQ ID NO: 2548 - protein, 296 aa, Streptococcus agalactiae
MEITIKIAGVRLDKALADNSELSRSQANEEIKKGIVLVNGQVKKAKYTVQEGDRITFDIPKEEVLDYQAENIPLDIIYQDDDVAVVNKPQGMVVHPSAGHSSGTLVNALMYHIKDLSSINGVVRPGIVHRIDKDTSGLLMVAKNDRAHQVLAEELKDKKSLRKYLAIVHGNLPNDRGVIEAPIGRSDKDRKKQAVTAKGKPAITRFHVLERFGDYTLVELSLETGRTHQIRVHMAYIGHPLAGDPVYGPRKTLGGKGQFLHAQTLGFTHPSNGENLIFSVEVPEIFQTTLEKLRKN

SEQ ID NO: 2549 - protein, 465 aa, Streptococcus agalactiae
ATGAGAAAGATTATTATACCAATAATAACTATTTTGTTGATTGCTTTAGATCAACTATCTAAGTTATGGATTGTTAAACATATTGAACTAAACCAAATTAAGGAATTCATTCCAAATATCGTTAGTCTAACTTATCTGAGAAATTATGGTGCTGCATTTTCTATTTTGCAAAATCAACAATGGCTTTTTACCTTAATTACAATCTTCGTTGTTGGTGTTGCTATTATTTATTTGATGAAACATATTAATGGAAGTTATTGGTTATTAATTTCTCTAACCTTAATCATCTCTGGTGGATTAGGAAACTTTATAGATCGCTTAAGATTAGGTTATGTCGTTGATATGGTGCATTTAGATTTTATTAATTTTGCTATCTTTAATGTAGCAGACTCATATCTGACAATCGGTATTATTTGCTTAATGATTGCACTTTGGAAAGAGGAAAGTAATGGAAATCACAATTAA

SEQ ID NO: 2550 - protein, 154 aa, Streptococcus agalactiae
MRKIIIPIITILLIALDQLSKLWIVKHIELNQIKEFIPNIVSLTYLRNYGAAFSILQNQQWLFTLITIFVVGVAIIYLMKHINGSYWLLISLTLIISGGLGNFIDRLRLGYVVDMVHLDFINFAIFNVADSYLTIGIICLMIALWKEESNGNHN

SEQ ID NO: 2551 - protein, 906 aa, Streptococcus agalactiae
ATGAATATTCAACAACTGCGTTATGTTGTTGCTATCGCAAATAGTGGTACTTTTCGTGAAGCAGCTGCAAAACTATTTGTTAGTCAGCCAAGTTTATCTGTTGCCGTTCGTGATTTGGAAACAGAATTAGGGTTTCAGATTTTTACGCGTACAACTACTGGTGCAGTGTTGACCAATCAAGGCATGACTTTTTATGAGAATGCTTTAGAAGTTGTGAAAAGCTTTGATTCATTCGAAAAACAGTTTTCGCAATCTGAAGCTACAGAGCAAGAATTCTCAATAGCAAGTCAACATTATGATTTTCTACCTCCTTTAATCACAGCGTTTTCAAAATGTAATGATAATTTTAGCTATTTCCGTATTTTCGAATCAACAACAATACGTATCTTAGATGAAGTTGCTCAAGGGAATAGCGAAATAGGTATCATTTATATCAATAGTCAAAATAAAAAAGGTCTACTTCAGCGGTTGGACAAATTGGGGTTAGAGTTTGTAGAGCTTATTCCTTTTAAAACTCATATTTATCTTGGGAAAGACCATCCCTTGGCTAGTAAAACATCTCTGATAATGACAGATTTAGAAGGATTACCAACCGTACGTTTTACACAGGATAGAGATGATTATCGGTATTACTCGGAGAATTTTGTGGAAGTACTTGATAGTTCTGTTACCTATAATGTTACTGATAGAGCAACATTAAATGGTATTTTAGAAAGAACCCAAGCTTATGCGACGGGCTCAGGATTCTTGGATAGCCGCAGTGTGAATGGTATCACTGTTATTCCATTAGAAGATCATCTAGATAACCAAATGATTTATATCAAACGAAAAGATCGTAATTTATCTCAGATGGCTTTAAAATTTGTTGCTGTTATGGAAGAGTATTTTAAGGGATTTAATTCATAG

SEQ ID NO: 2552 - protein, 301 aa, Streptococcus agalactiae
MNIQQLRYVVAIANSGTFREAAAKLFVSQPSLSVAVRDLETELGFQIFTRTTTGAVLTNQGMTFYENALEVVKSFDSFEKQFSQSEATEQEFSIASQHYDFLPPLITAFSKCNDNFSYFRIFESTTIRILDEVAQGNSEIGIIYINSQNKKGLLQRLDKLGLEFVELIPFKTHIYLGKDHPLASKTSLIMTDLEGLPTVRFTQDRDDYRYYSENFVEVLDSSVTYNVTDRATLNGILERTQAYATGSGFLDSRSVNGITVIPLEDHLDNQMIYIKRKDRNLSQMALKFVAVMEEYFKGFNS

SEQ ID NO: 2553 - protein, 294 aa, Streptococcus agalactiae
ATGTTAAAAATGAATCTTGCTAACTTGCAACTTTTCGCCCACAAAAAAGGTGGAGGTTCTACATCAAACGGACGTGATTCACAAGCAAAACGTCTTGGAGCTAAAGCAGCTGACGGACAAACAGTATCAGGTGGATCAATTCTTTACCGTCAACGCGGTACACACATCTATCCAGGTGCTAACGTTGGACGTGGTGGGGACGATACACTTTTTGCTAAAGTTGAAGGTGTTGTTCGTTTCGAACGTAAAGGACGCGATAAAAAACAAGTGTCTGTTTACCCAATCGCAAAATAA

SEQ ID NO: 2554 - protein, 97 aa, Streptococcus agalactiae
MLKMNLANLQLFAHKKGGGSTSNGRDSQAKRLGAKAADGQTVSGGSILYRQRGTHIYPGANVGRGGDDTLFAKVEGVVRFERKGRDKKQVSVYPIAK

SEQ ID NO: 2555 - protein, 339 aa, Streptococcus agalactiae
ATGATTAAAGCAACTTTTACTCGTAATCAATCAGGCTATCTTTATAGTGCTGAAATCAGCGGTCATGCTGGTAGTGGCGAGTACGGCTTTGATGTGATTTGTGCAGCTGTTAGTACTTTATCAATTAATTTTATTAATTCATTAGAGGCTTTAACAACCTGCCAAGCGCAATTGATTATCAATGACGTTGAAGGTGGTTATATGAAGATAGATTTATCTTCTATACCACAACATAAAGAGGATAAGGTTCAATTATTATTTGAGTCTTACCTTCTTGGAATGACTAATCTGTCTAAAGATTCTTCTGAATTTGTTAGTACAGTAGTCATGACACACTAA

SEQ ID NO: 2556 - protein, 112 aa, Streptococcus agalactiae
MIKATFTRNQSGYLYSAEISGHAGSGEYGFDVICAAVSTLSINFINSLEALTTCQAQLIINDVEGGYMKIDLSSIPQHKEDKVQLLFESYLLGMTNLSKDSSEFVSTVVMTH

SEQ ID NO: 2557 - protein, 315 aa, Streptococcus agalactiae
ATGAGCACATACGCAATCATCAAAACTGGTGGTAAACAAGTTAAAGTTGAAGTAGGACAAGCTATCTACGTTGAAAAACTTGACGTTGAAGCAGGAGCAGAAGTTACATTTAACGAAGTTGTTCTTGTTGGTGGTGAAACAACTAAAGTTGGTACTCCAGTTGTTGAAGGAGCTACTGTTGTTGGTACTGTTGAAAAACAAGGCAAACAAAAGAAAGTTGTTTCTTACAAATACAAACCTAAAAAAGGTAGCCACCGTAAACAAGGTCACCGTCAACCTTATACAAAAGTTGTTATCAACGCAATCAACGCTTAA

SEQ ID NO: 2558 - protein, 104 aa, Streptococcus agalactiae
MSTYAIIKTGGKQVKVEVGQAIYVEKLDVEAGAEVTFNEVVLVGGETTKVGTPVVEGATVVGTVEKQGKQKKVVSYKYKPKKGSHRKQGHRQPYTKVVINAINA

SEQ ID NO: 2559 - protein, 1179 aa, Streptococcus agalactiae
ATGGCAAGAATCCCTTATCAGAAAACACTTATTTTTTGTGTAGCCGTTATTATTGCTATTTTTATTTTGGGGTTATCTAAGGATTTAGCACAATCTAAAGGGCAAAAGGTTGCAAATAATAATACTGTAAAAACAGCACGTGTGGTTGCAAACGGAGATATTTTGCTGCACGATGTACTATATGCCAGTGCGCGCCAACCCGACGGCACTTATAATTTTACTCCTTATTTTAAAGAGGTAAAATCTTGGATTGAGTGCGCTGATTTAGCGATTGGTGATTATGAAGGGACGATTAGTTCAGAATATCCTTTAGCGGGCTATCCTTTATTTAATGCTCCTAATGAGATTGCAACTACTATGAAAGAAACTGGATATGATGTCGTTGACTTAGCACATAATCATATTCTGGATTCACAACTGGCAGGTGCTATCAATACTGTCAAGACTTTTAATCGTCTGGGATTGGATACTATTGGGGTTTATTTAAAGGATAGAAATAAAGAAGATATCTTAATTAAGCATGTAAATGGTATTAAAATTGCTATTTTAGGTTATTCGTATGGCTACAATGGTATGGAAGCTAATGTTTCAAAGAGTGACTATGAAAAACATATGTCTGATTTAGATACTAAAAAGATTAAGCAAGATATTAAAAAGGCTGAAAAAGAAGCAGATATCACCATTGTCATGCCACAGATGGGGATAGAATATCAAAAAAAACCTACTACAGAACAAGTAATGCTTTATCATAGTATGATTAAATGGGGGGCAGATATTATATTCGGAGGACACCCTCACGTTGTTGAACCGTCTGAAGTGATAAAAAAAGATGGCCAGAAAAAATTTATTATTTACTCTATGGGAAATTTTATTTCAAATCAGCGTTTAGAAACGGTTGATGATATCTGGACAGAAAGAGGATTATTAATGGATGTAACCATAGAGAAAAAAGGTCAAAAAACAGTAATTAAAAAAGTTAAGGCGCATCCAACACTAGTAGAAGCAAAACCAAATGGCCGTTATGTTGAAGAAGGCTTTCCAGCTTATGATTATAGGACGCTAGTTTTAGAGGATTATATTGAAGGTGGTAAGAAACGTTCTACGATTGATCAGACTATGAAAGATAAAGTTGATAAAGCATATAAGGAGATGAATGAGTTAGTTAATTTGAAGTGGTAA

SEQ ID NO: 2560 - protein, 392 aa, Streptococcus agalactiae
MARIPYQKTLIFCVAVIIAIFILGLSKDLAQSKGQKVANNNTVKTARVVANGDILLHDVLYASARQPDGTYNFTPYFKEVKSWIECADLAIGDYEGTISSEYPLAGYPLFNAPNEIATTMKETGYDVVDLAHNHILDSQLAGAINTVKTFNRLGLDTIGVYLKDRNKEDILIKHVNGIKIAILGYSYGYNGMEANVSKSDYEKHMSDLDTKKIKQDIKKAEKEADITIVMPQMGIEYQKKPTTEQVMLYHSMIKWGADIIFGGHPHVVEPSEVIKKDGQKKFIIYSMGNFISNQRLETVDDIWTERGLLMDVTIEKKGQKTVIKKVKAHPTLVEAKPNGRYVEEGFPAYDYRTLVLEDYIEGGKKRSTIDQTMKDKVDKAYKEMNELVNLKW

SEQ ID NO: 2561 - protein, 1155 aa, Streptococcus agalactiae
ATGCGCTTCATCAATAAGTTAAAAAATAATATGGAGCATGTACTCTCCATTTATCCAGATGTTTCAGTAAAAACAGATCGTGATAGAGGACATGTATATCTCAATGGTACAGATTATCATGAAGTTGCAGAGTCCTTAAAAGAGATTTTTGGTATCCAAGCTTTTTCTCCATCTTTTAAAGTAGAAAAAAATGTTGATACATTGGTAAAAGCTGTCCAGGAAATTATGACTTCCGTTTATAAAGATGGGATGACTTTTAAAATTACCGCAAAACGTAGTGACCACTCATTTGAATTGGATAGCCGTGCTCTAAATCATACTTTAGGAGATGCTGTTTTTTCAGTCTTGCCAAATATTAAGGCTCAGATGAAGCAACCAGATATCAATCTTAAAGTCGAGATACGAGATGAGGCTGCTTATATTTCATATGAGGATATTAGGGGTGCAGGAGGATTACCAGTAGGAACATCTGGAAAAGGGATGCTGATGTTGTCTGGTGGGATTGATTCTCCGGTAGCAGGTTACCTAGCGTTAAAACGTGGTGTAGATATAGAAGCAGTCCATTTTGCAAGTCCTCCTTATACTAGCCCAGGTGCATTGAAAAAAGCACATGATTTAACACGTAAATTGACAAAATTTGGTGGTAATATTCAATTTATTGAAGTTCCATTCACAGAAATTCAAGAGGAAATTAAGGCAAAAGCTCCCGAAGCCTACTTGATGACGTTAACACGTAGGTTTATGATGCGTATTACAGATCGTATTCGTGAGGACCGAAATGGTCTTGTTATTATTAACGGTGAAAGTTTAGGACAGGTGGCAAGCCAAACGTTAGAAAGTATGCAAGCTATTAATGCTGTCACTGCAACACCGATTATTCGTCCTGTGGTCACGATGGATAAGCTAGAAATTATTGATATTGCTCAAAAAATAGATACTTTTGATATTTCAATTCAACCATTTGAGGATTGCTGTACGATTTTTGCACCAGATCGCCCAAAAACTAACCCTAAAATTAAGAATACAGAACAGTATGAGAAACGTATGGATGTAGAAGGTCTTGTAGAGAGGGCAGTTGCAGGGATTATGGTAACTACTATTCAACCTCAAGCAGATAGTGATGATGTTGATGACTTGATTGACGATTTATTATAA

SEQ ID NO: 2562 - protein, 384 aa, Streptococcus agalactiae
MRFINKLKNNMEHVLSIYPDVSVKTDRDRGHVYLNGTDYHEVAESLKEIFGIQAFSPSFKVEKNVDTLVKAVQEIMTSVYKDGMTFKITAKRSDHSFELDSRALNHTLGDAVFSVLPNIKAQMKQPDINLKVEIRDEAAYISYEDIRGAGGLPVGTSGKGMLMLSGGIDSPVAGYLALKRGVDIEAVHFASPPYTSPGALKKAHDLTRKLTKFGGNIQFIEVPFTEIQEEIKAKAPEAYLMTLTRRFMMRITDRIREDRNGLVIINGESLGQVASQTLESMQAINAVTATPIIRPVVTMDKLEIIDIAQKIDTFDISIQPFEDCCTIFAPDRPKTNPKIKNTEQYEKRMDVEGLVERAVAGIMVTTIQPQADSDDVDDLIDDLL

SEQ ID NO: 2563 - protein, 1146 aa, Streptococcus agalactiae
ATGATTTATTTTGATAATTCGGCAACTACTATTCCCTATCCAGAAGTTTTAAGGACTTATCAAGAAGTAGCTAGTAAAATCTATGGAAACCCCTCAAGTTTACATGAGCTAGGAACAACATCTTCTCGGATTTTAGAGGCTAGCCGTAAACAAATTGCTAGTTTACTTGAGCTTAAAGCAAATGAAATTTTCTTTACCTCTGGTGGTACAGAGGCCGATAATTGGGTTATTAAGGGTCTTGCGTTTGAGAAACAACATTTTGGAAATCATATTATTGTTTCTGATATCGAACACCCAGCTGTTAAAGAGTCTGCTAAATGGCTTGGAGAGTATGGGTTTGAGATTGATTATGCGCCAGTAGATGATAAAGGATTTGTAGACGTAGAAGCACTGGTCAAATTAATTAAACCAGAAACGATTCTTATTTCAATTATGGCAATAAACAATGAAATTGGTTCTATTCAGCCAATAAAAGCTATTTCAGACTTGTTGTCAGATAAACCTACTATATCGTTTCATGTTGATGCTGTTCAAGCAATAGGTAAGATACCGACTAAAGATTATTTGACTGAGCGAGTTGATTTTGCATCTTTTTCTAGTCATAAATTTCACGGCGTTCGTGGGGTTGGCTTTCTATATATTAAAGAAGGAAAACGTATTTCACCATTACTAACAGGTGGTGGACAAGAAACTGATTTACGTTCAACTACTGAGAATGTCGCAGGGATTGCAGCTACTGCTAAAGCTTTACGAATGGTTATGGACAAGGAAGTAGTAGCTATTCCTAAAATAAGTAAAATGAAAACCATTATTCATGATGAATTAGCCAAATATGAGGATATTACGTTATTTTCGGGTAAGGAAGATTTTTCACCTAACATTATCACGTTTGGTATCAAGGGTGTCCGAGGAGAAGTTCTTGTCCATGCCTTTGAGGGACATGATATTTTTATCTCGACAACTAGCGCTTGCTCTTCTAAAGCAGGTAAACCAGCAGGAACTCTTATAGCAATGGGAATTTCAACTAAGTTAGCCCAAACTGCTGTACGTATCAGCTTAGATGATGATAATGATATGGGACAAGTAGAGCAATTTTTAACTATTTTTAAACAAGTTTATGAAAAAACTAAGAAAGTTAGAGGATAA

SEQ ID NO: 2564 - protein, 381 aa, Streptococcus agalactiae
MIYFDNSATTIPYPEVLRTYQEVASKIYGNPSSLHELGTTSSRILEASRKQIASLLELKANEIFFTSGGTEADNWVIKGLAFEKQHFGNHIIVSDIEHPAVKESAKWLGEYGFEIDYAPVDDKGFVDVEALVKLIKPETILISIMAINNEIGSIQPIKAISDLLSDKPTISFHVDAVQAIGKIPTKDYLTERVDFASFSSHKFHGVRGVGFLYIKEGKRISPLLTGGGQETDLRSTTENVAGIAATAKALRMVMDKEVVAIPKISKMKTIIHDELAKYEDITLFSGKEDFSPNIITFGIKGVRGEVLVHAFEGHDIFISTTSACSSKAGKPAGTLIAMGISTKLAQTAVRISLDDDNDMGQVEQFLTIFKQVYEKTKKVRG

SEQ ID NO: 2565 - protein, 183 aa, Streptococcus agalactiae
TTGGCAGCAGAATTTGAACTGCTACTCGGAGTACTACTAGCAGAGGAATTTTCTAGTGTTTGGCTGGATGATGCCCTTGTCTCATCTTTTTCAGTAGAAACTTGGTTACTAGAATTTTGTCCACTTTCTCTTATAATGACGGTTTTTGAAGTAGAAGAATCAGTCTTACTAGAGTCTTTGTGA

SEQ ID NO: 2566 - protein, 60 aa, Streptococcus agalactiae
MAAEFELLLGVLLAEEFSSVWLDDALVSSFSVETWLLEFCPLSLIMTVFEVEESVLLESL

SEQ ID NO: 2567 - protein, 453 aa, Streptococcus agalactiae
ATGTCAAAAGGATATTCAAGACAACAGAAAAAGTCTACTAAGACTAATACTGATTCAACTCAATCACCCGCTAAGCATATAAAAACAGGTTTTTCTGCACTTCAAAAAACAATTGCATTAGTCGGTAGTGTTTTAAGTATTATTGTTGCCTCTATTACTATTACTAATGCGATTAATAATCACAAAGACTCTAGTAAGACTGATTCTTCTACTTCAAAAACCGTCATTATAAGAGAAAGTGGACAAAATTCTAGTAACCAAGTTTCTACTGAAAAAGATGAGACAAGGGCATCATCCAGCCAAACACTAGAAAATTCCTCTGCTAGTAGTACTCCGAGTAGCAGTTCAAATTCTGCTGCCAATAACGATCAAACATCATCTAGTACTAACAATGATCAAACAAATAATACTACTACCGATACCTCAACTATTGAAAATACAACAACACCTTAA

SEQ ID NO: 2568 - protein, 150 aa, Streptococcus agalactiae
MSKGYSRQQKKSTKTNTDSTQSPAKHIKTGFSALQKTIALVGSVLSIIVASITITNAINNHKDSSKTDSSTSKTVIIRESGQNSSNQVSTEKDETRASSSQTLENSSASSTPSSSSNSAANNDQTSSSTNNDQTNNTTTDTSTIENTTTP

SEQ ID NO: 2569 - protein, 1349 aa, Streptococcus agalactiae
ATGTCAAAACAATATGATTATATCGTTATTGGTGGAGGTAGTGCAGGCAGTGGTACCGCTAATAGGGCAGCCATGTATGGAGCAAAAGTCCTGTTAATTGAAGGTGGACAAGTAGGTGGAACTTGTGTTAACTTAGGTTGTGTACCGAAGAAAATCATGTGGTATGGTGCACAAGTTTCTGAGACACTCCATAAGTATAGTTCAGGTTATGGTTTTGAAGTCAATAATCTTAATTTTGATTTTACTACTCTAAAAGCTAATCGCGATGCTTACGTGCAGCGGTCTAGACAGTCGTATGCCGCTAATTTTGAGCGTAATGGAGTCGAAAAGATTGATGGATTTGCTCGTTTTATTGATAACCATACTATTGAAGTGAATGGTCAGCAATATAAAGCTCCTCACATTACTATTGCAACAGGTGGACACCCTCTTTACCCTGATATTATTGGAAGTGAACTTGGTGAGACTTCTGATGATTTTTTTGGATGGGAGACCTTACCAGATTCTATATTGATTGTTGGGGCGGGCTATATCGCGGCGGAACTTGCTGGAGTGGTTAATGAATTAGGCGTTGAAACCCATCTTGCATTTAGAAAAGACCATATTCTACGCGGATTTGATGACATGGTAACAAGTGAGGTTATGGCTGAAATGGAGAAATCAGGTATCTCTTTACATGCTAACCATGTACCTAAATCTCTTAAACGCGATGAAGGTGGCAAGTTGATTTTTGAAGCTGAAAATGGGAAAACGCTTGTCGTTGATCGTGTAATATGGGCTATCGGCCGTGGACCAAATGTAGACATGGGACTTGAAAATACCGATATTGTTTTAAATGATAAAGGTTATATCAAAGCAGATGAATTTGAGAATACTTCTGTAGATGGCGTGTATGCTATTGGAGATGTTAATGGGAAAATTGCCTTGACACCGGTAGCAATTGCAGCAGGTCGTCGCTTATCAGAAAGACTTTTTWATCATAAAGATAACGAAAAATTAGATTACCATAATGTACCTTCAGTTATTTTTACTCACCCTGTAATTGGGACGGTAGGACTTTCAGAAGCAGCAGCTATCGAGCAATTTGGAGAAGATAATATCAAAGTCTATACATCAACTTTTACCTCTATGTATACGGCTGTTACCACTAATCGCCAAGCAGTTAAGATGAAGCTCATAACCCTAGGAAAAGAGGAAAAAGTTATTGGGCTTCATGGTGTTGGTTATGGTATTGATGAAATGATTCAAGGTTTTTCAGTTGCTATCAAAATGGGGGCTACTAAAGCAGACTTGATGATACTGTTGCTATTCACCCAACTGGATCTGAGGAATTTGTTACAATGCGCTAA

SEQ ID NO: 2570 - protein, 449 aa, Streptococcus agalactiae
  VARIANT 326: Xaa = Any Amino Acid
MSKQYDYIVIGGGSAGSGTANRAAMYGAKVLLIEGGQVGGTCVNLGCVPKKIMWYGAQVSETLHKYSSGYGFEVNNLNFDFTTLKANRDAYVQRSRQSYAANFERNGVEKIDGFARFIDNHTIEVNGQQYKAPHITIATGGHPLYPDIIGSELGETSDDFFGWETLPDSILIVGAGYIAAELAGVVNELGVETHLAFRKDHILRGFDDMVTSEVMAEMEKSGISLHANHVPKSLKRDEGGKLIFEAENGKTLVVDRVIWAIGRGPNVDMGLENTDIVLNDKGYIKADEFENTSVDGVYAIGDVNGKIALTPVAIAAGRRLSERLFXHKDNEKLDYHNVPSVIFTHPVIGTVGLSEAAAIEQFGEDNIKVYTSTFTSMYTAVTTNRQAVKMKLITLGKEEKVIGLHGVGYGIDEMIQGFSVAIKMGATKADFDDTVAIHPTGSEEFVTMR

SEQ ID NO: 2571 - protein, 336 aa, Streptococcus agalactiae
ATGGCTAATGTATATGATTTAGCAAATGAATTAGAACGTGCTGTTCGTGCTTTACCAGAATACCAAGCAGTTTTAACTGCAAAATCAGCTATTGAAAGTGATGCGGATGCACAAGTGCTTTGGCAAGACTTTTTGGCTACCCAATCAAAAGTTCAAGAAATGATGCAATCTGGCCAAATGCCAAGTCAAGAAGAACAAGATGAAATGTCTAAACTTGGGGAAAAAATTGAATCCAATGACCTTTTAAAAGTTTATTTTGACCAACAACAACGGTTGTCTGTCTATATGTCTGATATCGAAAAAATTGTCTTTGCACCCATGCAGGACTTGATGTAA

SEQ ID NO: 2572 - protein, 111 aa, Streptococcus agalactiae
MANVYDLANELERAVRALPEYQAVLTAKSAIESDADAQVLWQDFLATQSKVQEMMQSGQMPSQEEQDEMSKLGEKIESNDLLKVYFDQQQRLSVYMSDIEKIVFAPMQDLM

SEQ ID NO: 2573 - protein, 1167 aa, Streptococcus agalactiae
ATGAGATATTTAACTGCTGGTGAGTCACATGGACCTAGTTTAACAGCTATTATCGAAGGGATTCCTGCGGGACTGAAATTATCTGCTAAAGATATTAATGAAGATTTAAAACGCCGCCAAGGTGGTTATGGTCGTGGGAATCGAATGAAAATTGAAACTGATCAAGTGATCATTAGTTCTGGTGTGCGCCATGGAAAAACCTTGGGTTCACCTATTACACTGACAGTAACTAATAAGGATCATAGCAAATGGCTGGACATCATGTCAGTCGAAGACATTGAAGAGCGCCTAAAGCAAAAACGTCGTATTAAGCATCCTAGACCTGGGCACGCAGATTTAGTAGGTGGAATTAAATACCGTTTCGATGATTTGAGAAATGCTTTAGAGCGTTCTTCGGCTCGTGAGACCACAATGCGAGTAGCTATTGGTGCGATTGCTAAACGTATCTTGAAAGAAATTGGTATCGAAATTGCCAACCATATTGTAGTTTTTGGTGGCAAGGAGATTACTGTCCCTGATAAGCTAACAGTTCAACAAATCAAAGTGTTATCTAGTCAATCGCAAGTAGCTATCGTCAATCCATCCTTCGAACAAGAAATCAAGGATTATATTGACAGTGTGAAAAAGGCTGGAGATACTATCGGAGGAGTGGTTGAAACTATCGTTGGAGGAGTTCCCGTTGGTTTAGGCTCTTATGTACACTGGGATAGAAAGTTAGATGCTAAGATAGCGCAAGCAGTTGTATCTATCAATGCTTTTAAAGGTGTTGAATTTGGTCTAGGTTTTAAGTCAGGGTTTTTAAAAGGAAGTCAAGTAATGGACTCCATATCATGGACAAAGGACCAAGGTTATATACGTCAGTCAAATAATTTAGGCGGTTTTGAAGGCGGTATGACTAATGGAGAGCCTATTATCGTTAGGGGAGTAATGAAACCAATTCCTACGCTTTACAAGCCACTAATGTCAGTTGATATTGATACTCACGAGCCTTATAGAGCTACAGTGGAACGTTCTGATCCCACGGCACTTCCGGCTGCAGGTGTCGTTATGGAAGCTGTAGTAGCCACCGTCCTGGTGACAGAAGTGCTAGAAAAATTTTCTTCAGACAACATGTATGAACTAAAAGAAGCTGTAAAACTATATCGCAATTATGTTGATCATTTTTAA

SEQ ID NO: 2574 - protein, 388 aa, Streptococcus agalactiae
MRYLTAGESHGPSLTAIIEGIPAGLKLSAKDINEDLKRRQGGYGRGNRMKIETDQVIISSGVRHGKTLGSPITLTVTNKDHSKWLDIMSVEDIEERLKQKRRIKHPRPGHADLVGGIKYRFDDLRNALERSSARETTMRVAIGAIAKRILKEIGIEIANHIVVFGGKEITVPDKLTVQQIKVLSSQSQVAIVNPSFEQEIKDYIDSVKKAGDTIGGVVETIVGGVPVGLGSYVHWDRKLDAKIAQAVVSINAFKGVEFGLGFKSGFLKGSQVMDSISWTKDQGYIRQSNNLGGFEGGMTNGEPIIVRGVMKPIPTLYKPLMSVDIDTHEPYRATVERSDPTALPAAGVVMEAVVATVLVTEVLEKFSSDNMYELKEAVKLYRNYVDHF

SEQ ID NO: 2575 - protein, 1068 aa, Streptococcus agalactiae
ATGCAGGTTGAAGTTGACTTACCGAATCACCCTTATCATATTAAAATTGAAGAAGGATGTTTTTCTGAGGCTGGTGACTGGGTATCACATTTATGGCAGAAACAAATGATAACTATTATCACAGATAGTAACGTAGAAATATTATACGGGGAGTCGCTTGTCAACCAGTTAAAAAAACAAGGTTTTACAGTACATGTTTTTAGTTTTGCTGCGGGTGAAGCTAGTAAAACTTTGGAAGTTGCTAATCGTATTTATGCTTTTTTAGCAAAGCATCATATGACCAGAAGCGATGGGATCATTGCACTTGGTGGAGGCGTCGTCGGAGATTTAGCAGCGTTTGTTGCTTCTACTTATATGCGGGGAATCCATTTTCTTCAAATTCCAACTAGTTTAACAGCACAGGTTGATTCTTCCATTGGCGGAAAAACAGGAGTCAACACTTCATTCGCTAAAAATATGGTAGGTACTTTTGCACAACCTGATGGTGTACTGATAGATCCTGTTACTCTAAAAACATTGGGCAATCGTGAATTAGTTGAAGGTATGGGAGAAGTCATCAAATATGGCTTGATTGATGATATAAAACTCTGGCATATTTTAGAAGAGATGGATGGGACTATTGATAGTATCCTTGATAATGCATTAGCTATTATTTATCACTCTTGTCAAGTTAAACGAAAGCATGTTTTAGCTGATCAATATGATAAAGGGTTAAGGATGCATTTGAATTTTGGCCACACTATCGGTCATGCTATCGAAGTACATGCTGGCTATGGAGAAATAATGCATGGAGAAGCTGTTGCAATTGGAATGATCCAGCTTTCTCGTGTGGCTGAGCGTAAAAATCTTATGCCAAGAGGTATCAGTCAAGATATTTATAATATGTGTTTAAAATTTGGCCTTCCGGTCCACTATGCGGAATGGGATAAGGACGTCTTATTTGACATATTGAGTCATGATAAAAAAGCAAGTGGACAATTTATTAAAATTGTTATACTGCCTCAATTAGGTAGTGCAACAGTCCACCAAATACCTTTAGAAGAAATGAGAGATTATTTGGAGAAATAG

SEQ ID NO: 2576 - protein, 355 aa, Streptococcus agalactiae
MQVEVDLPNHPYHIKIEEGCFSEAGDWVSHLWQKQMITIITDSNVEILYGESLVNQLKKQGFTVHVFSFAAGEASKTLEVANRIYAFLAKHHMTRSDGIIALGGGVVGDLAAFVASTYMRGIHFLQIPTSLTAQVDSSIGGKTGVNTSFAKNMVGTFAQPDGVLIDPVTLKTLGNRELVEGMGEVIKYGLIDDIKLWHILEEMDGTIDSILDNALAIIYHSCQVKRKHVLADQYDKGLRMHLNFGHTIGHAIEVHAGYGEIMHGEAVAIGMIQLSRVAERKNLMPRGISQDIYNMCLKFGLPVHYAEWDKDVLFDILSHDKKASGQFIKIVILPQLGSATVHQIPLEEMRDYLEK

SEQ ID NO: 2577 - protein, 657 aa, Streptococcus agalactiae
ATGCCTCGCAGTCTTGAAGAGGCTCAAGAAATAGATTTATCAAAATTTGATAGTGTTGATATTATTGAATGGCGAGCTGATGCCTTACCAAAGGATGACATTATTAATGTAGCTCCAGCTATTTTTGAGAAATTCGCAGGTCATGAAATTATTTTTACTCTTCGTACAACGCGTGAAGGTGGTAATATTGTCTTATCTGATGCTGAGTATGTTGAGTTAATCCAGAAAATTAATTCTATCTACAATCCAGATTATATTGATTTTGAGTATTTTTCACATAAAGAAGTTTTTCAAGAAATGCTAGAATTTCCAAATTTAGTCCTGTCTTATCACAATTTTCAAGAGACACCGGAGAATATTATGGAGATATTTTCAGAATTAACAGCCCTAGCACCACGAGTTGTGAAAATCGCAGTAATGCCAAAGAATGAACAAGATGTCTTAGACGTTATGAATTACACTCGCGGTTTCAAGACTATTAATCCTGATCAAGTTTATGCGACGGTATCTATGAGTAAAATTGGACGTATTTCTCGTTTTGCTGGTGATGTAACTGGATCTAGTTGGACATTTGCATATTTAGATTCATCTATCGCACCCGGACAAATTACTATTTCAGAGATGAAGCGTGTCAAAGCATTGCTTGACGCTGACTGA

SEQ ID NO: 2578 - protein, 218 aa, Streptococcus agalactiae
MPRSLEEAQEIDLSKFDSVDIIEWRADALPKDDIINVAPAIFEKFAGHEIIFTLRTTREGGNIVLSDAEYVELIQKINSIYNPDYIDFEYFSHKEVFQEMLEFPNLVLSYHNFQETPENIMEIFSELTALAPRVVKIAVMPKNEQDVLDVMNYTRGFKTINPDQVYATVSMSKIGRISRFAGDVTGSSWTFAYLDSSIAPGQITISEMKRVKALLDAD

SEQ ID NO: 2579 - protein, 1158 aa, Streptococcus agalactiae
ATGAATAAACTTAAAGTGAATTCTGTCGTTGAAAGAAAAATCAAATCAGGTGCTCAGTTACTGGAAAAAAAAGATTTTGATACCAGTTTAGTTAACCAGTTGGTTCAACTTTTTTCACAGTCAAATCAATTCTTAGGGATGGCCTATCTTTCACCACAAAATAAAGGTATTGGTTGGTTACTATCAAGACAAGTTTTTGATTTTAACCATGATTACTTTGTATCGCTATTCGAAAAATCTAGAGAGAAGCGTCAAAAATTTGAAAAATCTAGCCAAACAACAGCCTACCGCTTGTTTAATCAGGATGGAGATAACTTTGGTGGCCTAACTATAGATTTTTATAGTGACTATGCTCTTTTTTCGTGGTACAATGAATTTGTTTATACTAATCGACAAATGATTGTTGCAGCCTTTAAGCAGGTCTATCCTAATATTAAAGGGGCATATGAAAAAATTCGTTTCAAAGGTTTAGACTTTGAAAGTGCTCATTTGTACGGTCAAGAGGCTCCTGAATCATTTTTGATTTTAGAAAATAATATCAAATATAGTGTCTTTTTGAATGATGGATTAATGACAGGTATTTTCCTTGACCAACATGATGTCAGAAAAGCCTTAGCAACTAATCTATCAGAAGGTAAAAAAGTTCTAAATATGTTTTCATACACTGCGGCTTTTTCTGTAGCTGCAGCTGTTGGAGGAGCATTAGAGACAACTTCTGTTGATTTAGCAAAACGCTCGCGTGAACTTTCAAAAGCACACTTTGATGCTAATCAGATTGTCACAGATAACCATCGATTTATCGTTATGGATGTTTTTGAATATTATAAGTATGCCAAAAGAAAACATCTATCATATGATGTGATTGTTATTGATCCACCAAGTTTTGCTCGAAATAAAAAACAAACTTTTTCGGTTACTAAAGATTACTATAAATTAATTGAACAAGCTTTAGATATTTTAACCCCTGGTGGAACTATCATTGCATCAACTAACGCAGCTAATCTAACCGTATCACAATTTAAGAAACAATTGGAAAAGGGGTTTGGTAAAGCTTCACATAATTACATTAGCTTACAGCAGTTGCCTGAAGATTTCACTATAAATGATAAGGACCAACAAAGTAATTATTTAAAAGTATTTACAATAAAGGTAAAATAA

SEQ ID NO: 2580 - protein, 385 aa, Streptococcus agalactiae
MNKLKVNSVVERKIKSGAQLLEKKDFDTSLVNQLVQLFSQSNQFLGMAYLSPQNKGIGWLLSRQVFDFNHDYFVSLFEKSREKRQKFEKSSQTTAYRLFNQDGDNFGGLTIDFYSDYALFSWYNEFVYTNRQMIVAAFKQVYPNIKGAYEKIRFKGLDFESAHLYGQEAPESFLILENNIKYSVFLNDGLMTGIFLDQHDVRKALATNLSEGKKVLNMFSYTAAFSVAAAVGGALETTSVDLAKRSRELSKAHFDANQIVTDNHRFIVMDVFEYYKYAKRKHLSYDVIVIDPPSFARNKKQTFSVTKDYYKLIEQALDILTPGGTIIASTNAANLTVSQFKKQLEKGFGKASHNYISLQQLPEDFTINDKDQQSNYLKVFTIKVK

SEQ ID NO: 2581 - protein, 2145 aa, Streptococcus agalactiae
GTGAAAAAAATTAAAGATTTTGCTAGCCGTGCGATCAATACACGACTCGGCTTTATTTTATTGTTAGTAGTTATATATTGGTTAAAGACAATTTGGGCTTACCATACTGATTTTAATTTAGGTTTAGAAAATTCCTATCAGTTGTTTTTGACCATTATAAACCCCATCCCCTTAGGACTCTTAATCATAGGTTTGGCCTTATATGTTAAGCGAACCAAAGCTTTTTATATTACCGCTTTTATCACCTATGCTATCGTAAATATCCTTCTAATTGCAAACGCAATCTACTATAGAGAGTTTTCCGATTTCATTACAGTTAGCGCCGTCTTGGCTAGTAGTAAAACTTCGGCTGGCCTTGGAGACTCTGCTCTTAATCTATTGAGAATTTGGGATCTTGTCTACGTTTTCGATTTCATTATCCTTATTTTCTTATTTGCAACCAAGAAAATCCACTTAGATGATCGTCCATTTAATAAACGTGCTAGTTTTTCTATCACAGCTTTGTCTGGTTTACTCTTTTCAATTAACTTATTCTTAGCTGAAATTGATCGTCCAGAACTACTAAGTCGTGGTTTTTCAAACACCTATATTGTTAAAGCTCTTGGCTTGCCATCATTTTCGATTTATAGTGGTAATCAAACTTATCAAGCACAGAAAGAAAGAAATGGTGCCACTGCACAAGAATTAGCGACTGCCAAAAAATATGTAGCAGAGCATTATGCCAAACCCAATCCAGAATATTATGGTATCGGAAAAGGGCGAAACGTTATCATGATTCATTTGGAGAGTTTTCAACAATTCTTGATTGACTATAAATTAAATATTGATGGTAAAGAACATGTGGTTACTCCATTTATTAACAGCCTTTATCATTCGAAAGAGACTGTCTCCTTCTCTAACTTCTTCCATCAAGTCAAAGCTGGTAAGACATCCGATGCTGAGACACTCATGGAAAACTCACTTTTTGGTCTAAGTAGTGGTTCATTCATGGTTAATTATGGTGGTGAAAATACACAATTTGCTGCTCCACATATCTTAGCTCAAAATGGAGGTTACAGTAGTGCGGTCTTCCACGGAAACGTCGGAACATTTTGGAATAGAAATAATGCTTACAAACAGTGGGGTTATGACTACTTCTTTGACTCTAGCTACTTCTCAAAACAAACCAAAGATAATTCATTCCAATACGGTTTGAATGATAAATATATGTTTGCTGACTCTATCAAATATCTAGAGCACATGCAACAACCATTTTATACTAAATTTATTACAGTAAGTAACCATTACCCTTACACAAGTTTGAAGGGAGAGTCTGACGAAGAGGGATTCCCACTTGCAAAGACTAACGATGAAACGATTAACGGTTATTTTGCCACAGCAAACTACCTTGATACAGCTCTTAAATCATTTTTTGAATATCTAAAAGCTGCTGGTGTGTATGATAATTCTATTATTGTAATGTATGGGGATCACTACGGTATTTCTAATACACGCAATCCTAGCTTAGCTGAATTATTAGGTAAAGACCCTGAAACATGGTCTGAATACGACAACGCTATGTTACAACGTGTTCCATATATGATTCACATTCCTGGCTATTCAAAAGGTTTTATCAGTAATACATACGGTGGTGAGGTAGATAATTTACCAACTTTACTTCATATTCTAGGAATAGATACGTCTAAATATACTCAGTTAGGACAAGACTTATTATCTAAAGATAATAAACAAATGGTCGCTATGAGAACAACTGGTCAGTATATTACTCCTAAATACACTAACTATAGTGGACATCTCTATTACACTGATTCAGGACAAGAAATCACAAATCCTGATGAAACAACTAAAGCTGAAATAAAAGCTATTCGAGATGCTACTAATAAACAATTATCTACAAGTGATTCGATTCAAACTGGAGATTTACTACGATTTGATGAAAACAATGGTTTGAAAACTGTAGAAGTTGAAAAATTCAATTACACACATTCTCTTAAAGCACTCAAAGCTAAAGAACGTAAATTGAAAGATCGTTCAACAAGCATATACAGCAAACATAACAACAAATCAACAGTTGATCTCTTCCATGCTCCAAGTTACTTGGAATTGCAAGATCCTAATAAGACACATAAAACATCTAAAAAATAA

SEQ ID NO: 2582 - protein, 714 aa, Streptococcus agalactiae
MKKIKDFASRAINTRLGFILLLVVIYWLKTIWAYHTDFNLGLENSYQLFLTIINPIPLGLLIIGLALYVKRTKAFYITAFITYAIVNILLIANAIYYREFSDFITVSAVLASSKTSAGLGDSALNLLRIWDLVYVFDFIILIFLFATKKIHLDDRPFNKRASFSITALSGLLFSINLFLAEIDRPELLSRGFSNTYIVKALGLPSFSIYSGNQTYQAQKERNGATAQELATAKKYVAEHYAKPNPEYYGIGKGRNVIMIHLESFQQFLIDYKLNIDGKEHVVTPFINSLYHSKETVSFSNFFHQVKAGKTSDAETLMENSLFGLSSGSFMVNYGGENTQFAAPHILAQNGGYSSAVFHGNVGTFWNRNNAYKQWGYDYFFDSSYFSKQTKDNSFQYGLNDKYMFADSIKYLEHMQQPFYTKFITVSNHYPYTSLKGESDEEGFPLAKTNDETINGYFATANYLDTALKSFFEYLKAAGVYDNSIIVMYGDHYGISNTRNPSLAELLGKDPETWSEYDNAMLQRVPYMIHIPGYSKGFISNTYGGEVDNLPTLLHILGIDTSKYTQLGQDLLSKDNKQMVAMRTTGQYITPKYTNYSGHLYYTDSGQEITNPDETTKAEIKAIRDATNKQLSTSDSIQTGDLLRFDENNGLKTVEVEKFNYTHSLKALKAKERKLKDRSTSIYSKHNNKSTVDLFHAPSYLELQDPNKTHKTSKK

SEQ ID NO: 2583 - protein, 360 aa, Streptococcus agalactiae
ATGGCTCGTGTTAAAGGTGGAGTTGTTTCACGTAAACGTCGTAAACGCGTACTTAAATTAGCTAAAGGTTACTATGGTGCAAAACATATCTTGTTCCGTACTGCAAAAGAACAAGTAATGAATTCTTACTACTATGCATACCGTGACCGTCGTCAGAAAAAACGTGACTTCCGTAAATTATGGATCACTCGTATCAATGCGGCTGCTCGTATGAATGGTTTATCATATTCACAATTGATGCACGGTTTGAAATTAGCTGAAATCGAAGTTAACCGTAAAATGCTTGCTGATTTAGCAGTTAACGATGCAGCAGCTTTCACAGCTCTTGCAGATGCAGCTAAAGCTAAACTTGGTAAATAA

SEQ ID NO: 2584 - protein, 119 aa, Streptococcus agalactiae
MARVKGGVVSRKRRKRVLKLAKGYYGAKHILFRTAKEQVMNSYYYAYRDRRQKKRDFRKLWITRINAAARMNGLSYSQLMHGLKLAEIEVNRKMLADLAVNDAAAFTALADAAKAKLGK

SEQ ID NO: 2585 - protein, 201 aa, Streptococcus agalactiae
ATGCCAAAACAAAAAACACACCGCGCATCAGCTAAACGCTTTAAACGCACAGGTTCAGGTGGATTGAAACGCTTCCGCGCGTTTACTTCACACCGTTTCCACGGTAAAACTAAAAAACAACGTCGTCATCTTCGTAAAGCTACTATGGTTTCATCAGGAGATTTCAAACGTATTAAAGCAATGCTTACTCGCCTTAAATAA

SEQ ID NO: 2586 - protein, 66 aa, Streptococcus agalactiae
MPKQKTHRASAKRFKRTGSGGLKRFRAFTSHRFHGKTKKQRRHLRKATMVSSGDFKRIKAMLTRLK

SEQ ID NO: 2587 - protein, 531 aa, Streptococcus agalactiae
GTGAAGATCATAGCTAAAAAAGATCTATTCATTAACGATGAAATTCGCGTTCGTGAAGTTCGTCTGGTTGGTCTCGAGGGTGAACAATTAGGTATTAAACCATTGTCTGAAGCTCAAGCAATTGCAGATGATGCTAATGTTGATTTAGTTTTAATTCAGCCACAAGCTACACCACCTGTTGCGAAAATTATGGACTATGGTAAGTTCAAATTTGAGTATCAAAAGAAACAAAAAGAACAACGTAAAAAACAAAGCGTTGTTACTGTTAAGGAAGTTCGTCTTAGCCCAGTTATTGATAAAGGGGATTTTGAAACAAAACTTCGTAACGGTCGTAAGTTCCTTGAAAAAGGTAACAAAGTTAAAGTTTCTATCCGATTCAAAGGACGTATGATTACTCATAAAGAAATTGGAGCAAAGGTATTGGCGGAATTTGCTGAAGCGACACAAGATATCGCTATTATTGAGCAAAGAGCTAAGATGGATGGTCGCCAAATGTTTATGCAGCTTGCACCAATTCCAGACAAGAAATAA

SEQ ID NO: 2588 - protein, 176 aa, Streptococcus agalactiae
MKIIAKKDLFINDEIRVREVRLVGLEGEQLGIKPLSEAQAIADDANVDLVLIQPQATPPVAKIMDYGKFKFEYQKKQKEQRKKQSVVTVKEVRLSPVIDKGDFETKLRNGRKFLEKGNKVKVSIRFKGRMITHKEIGAKVLAEFAEATQDIAIIEQRAKMDGRQMFMQLAPIPDKK

SEQ ID NO: 2589 - protein, 447 aa, Streptococcus agalactiae
ATGATAAAATTATTTGGGAAGATACGTTATCACTGGCAACCTGAACTTTCTTGGGCTATTATTTATTGGTCAATAGCCATTGCACCAATTTTTATTGGTTTATCTCTGCTATATGAAAGAACTGAGATTCCGAGTCAGGTATTTGTTCTATTTGCCATCTTTATTGTTTTAGTGGGCATTGGATTTCATCGCTATTTTGTTATTGAAGAAGACGGATATCTTAGGATTGTATCTTTTAACTTTTTAAGACGAACTAAGTTTCCAATTGAAGATATTGCTAAAATTGAGGTCACTAAATCAAGTGTTACTATCAAATTTAATAATAACCATGAGCGTATTTTTTACATGCGAAAATGGCCTAAAAAATATTTTTTAGATGCACTAGCTATTGAACCTACATTTAAGGGAGAAGTGGAGCTTCTCGATAANNNNNCATTCATTCATTAA

SEQ ID NO: 2590 - protein, 148 aa, Streptococcus agalactiae
  VARIANT 143, 144, 145: Xaa = Any Amino Acid
MIKLFGKIRYHWQPELSWAIIYWSIAIAPIFIGLSLLYERTEIPSQVFVLFAIFIVLVGIGFHRYFVIEEDGYLRIVSFNFLRRTKFPIEDIAKIEVTKSSVTIKFNNNHERIFYMRKWPKKYFLDALAIEPTFKGEVELLDXXXFIH

SEQ ID NO: 2591 - protein, 1221 aa, Streptococcus agalactiae
ATGTCTTACGAAAAGCTTTTAGAACGATTTTTAACATACGTCAAAATAAATACAAGAAGTAATCCTAATAGTACACAAACGCCAACAACTCAAAGTCAAGTTGACTTTGCTTTAACAGTTTTAAAACCAGAAATGGAAGCAATTGGTTTAAAAGATGTTCATTATTTACCTTCTAATGGGTATTTGGTTGGAACCTTACCTGCTACAAGCGACCGCTTACGCCATAAAATAGGTTTTATATCCCATATGGATACAGCTGATTTCAATGCTGAAAATATTACTCCACAAATTGTTGACTATAAAGGTGGAGATATTGAACTTGGAGACTCAGGTTACATTTTAAGTCCAAAAGATTTTCCAAATTTAAATAATTACCATGGGCAAACACTGATTACAACAGATGGTAAAACCTTACTGGGAGCAGACGATAAGTCTGGTATAGCAGAAATCATGACAGCTATGGAATATTTGGCTTCGCATCCAGAAATTGAGCATTGTGAAATTAGAGTTGGCTTTGGACCAGACGAAGAAATTGGTATAGGTGCAGATAAATTTGATGTTAAAGATTTTGATGTTGATTTTGCCTATACAGTGGATGGTGGACCACTAGGAGAATTACAGTATGAAACCTTTAGTGCAGCTGGTTTGGAGCTTACATTTGAAGGACGAAACGTTCACCCTGGAACTGCAAAAAATCAAATGATTAATGCTTTACAGCTTGCTATGGATTTTCATAGTCAATTACCAGAAAATGAACGTCCTGAACAAACAGATGGCTATCAAGGATTTTATCACTTATATGATTTAAGTGGAACAGTTGATCAAGCTAAAAGTTCATATATCATTCGAGATTTTGAGGAAGTTGATTTCTTAAAGCGTAAGCACTTGGCTCAAGATATCGCTGATAATATGAATGAAGCATTACAATCTGAACGTGTAAAGGTTAAACTATACGATCAATATTACAACATGAAGAAAGTTATTGAAAAAGACATGACACCTATCAACATTGCTAAAGAAGTAATGGAAGAGTTAGACATCAAGCCAATCATAGAACCGATTCGTGGTGGTACAGATGGCTCTAAAATTTCCTTTATGGGAATCCCTACTCCTAATCTTTTTGCAGGTGGTGAAAACATGCATGGACGCTTTGAATTCGTTAGTCTACAAACAATGGAAAAAGCAGTTGATGTTATTTTAGGCATCGTTGCTAAGGATTAG

SEQ ID NO: 2592 - protein, 406 aa, Streptococcus agalactiae
MSYEKLLERFLTYVKINTRSNPNSTQTPTTQSQVDFALTVLKPEMEAIGLKDVHYLPSNGYLVGTLPATSDRLRHKIGFISHMDTADFNAENITPQIVDYKGGDIELGDSGYILSPKDFPNLNNYHGQTLITTDGKTLLGADDKSGIAEIMTAMEYLASHPEIEHCEIRVGFGPDEEIGIGADKFDVKDFDVDFAYTVDGGPLGELQYETFSAAGLELTFEGRNVHPGTAKNQMINALQLAMDFHSQLPENERPEQTDGYQGFYHLYDLSGTVDQAKSSYIIRDFEEVDFLKRKHLAQDIADNMNEALQSERVKVKLYDQYYNMKKVIEKDMTPINIAKEVMEELDIKPIIEPIRGGTDGSKISFMGIPTPNLFAGGENMHGRFEFVSLQTMEKAVDVILGIVAKD

SEQ ID NO: 2593 - protein, 1668 aa, Streptococcus agalactiae
ATGCTAAATAATATTGAAAATAGAAAGTTTACCATGTCACAAAAAACAACAAAAGTTAGTCAGCAAGAACAAATGGTCAAAGGGACGGCTTGGTTAACAGCAGGGAATTTCATTAGTCGCTTGCTGGGAGCCATCTATATTATCCCTTGGTATGCTTGGATGGGAAAGCATGCTGCCGAAGCAAATGCTTTATTTGGGATGGGATATGAAATCTATGCTTTATTTCTTTTGATATCAACTGTTGGAATTCCAGTAGCAGTTGCAAAACAGGTATCTAAGTATAACACTTTAGGTAAAGAAGAGATGAGCATTTATCTGGTTCGGAAAATCTTGCAGTTTATGCTGATTTTAGGTGGAATTTTTGCATTAATTATGTATATTGGTTCACCTCTATTTGCTTCACTTAGTAAAGGAGGGCAAGAACTCGTTCCAATATTGCGTAGTCTAACTCTAGCTGTTTTAGTTTTTCCTTCAATGAGTGTTTTACGTGGTTTTTTTCAAGGTTTTAATAATTTAAAACCGTATGCCATTAGTCAAGTCGCTGAGCAGATTATACGTGTCATATGGATGTTATTAACTGCTTTCTATATTATGCGTCTAGGATCAGGAGATTATATTGCCGCTGTGACACAGTCAACATTCGCCGCCTTTGTCGGTATGTTTGCTAGTATAGCTGTGCTGCTTTATTTCTTATGGCGTTATAATATGCTATCTGCCTTGATTGGTAAAACTCCAAAGCACATTAAATTAGATACTAAAGAAATCCTAATTGAGACTATTAAGGAAGCAATCCCTTTTATTATTACTGGTGCAGCAATTCAAATTTTCAAACTGATTGATCAGTTTTCATTTGGGAATACGATGGCGCTCTTTACGAATTATTCAAGTGAAGAATTACGGGTTATGTTTGCTTACTTTTCAAGCAACCCTGGTAAAGTTACGATGATTCTAATTGCTGTTGCTACCGCAATTGCTGGAGTTGGTATTCCATTGTTAACAGAGAATTTTGTTAAGAATGATAAAAAAGCCGCCGCTCGTTTGGTTGTTAATAATCTACAAATGTTACTAATGTTTTTACTGCCAGCTGTTGCAGGATCCGTTATTTTAGCAAAACCTTTGTATACAGTCTTTTATGGGTTACCGCAGGGACAAGCTTTAGGACTTTTTGTCATATCTCTTATTCAAACAATTATTTTATCTATTTATACTGTTTTAGCACCAATGCTACAAGCATTGTTTGAAAATCGTAAAGCTATTATTTACTTCCTATATGGTCTGGTGGCAAAAGTTATTTTACAACTTCCCTCCATTTTCCTTTTCCATGCCTATGGACCACTTTTCTCAACGACAGTAGCTCTTTGTATCCCAGTAATTCTTATGTATTTGAAAATACATGAAATTACAGGATTTAAACGCCAAGCTATTCGTCGTACAAGTGCTTTAGTCCTTATTCTAACGCTATTGATGAGCTTTATTATTTCTATGATAATATGGTTAATGAATCTGGTTATTGTACCCGATAGTAGACTGGTAAGTCTAGTTTACATTATCGTTATCGGTGCAATAGGTTTAGGGGTATATGGCTTTATGGCACTGGCCACCCATCTACTTGATAAAATGATTGGTAGTCGTGCTCAAGACTTACGCCGAAAGTTGCACCTTAACTAA

SEQ ID NO: 2594 - protein, 555 aa, Streptococcus agalactiae
MLNNIENRKFTMSQKTTKVSQQEQMVKGTAWLTAGNFISRLLGAIYIIPWYAWMGKHAAEANALFGMGYEIYALFLLISTVGIPVAVAKQVSKYNTLGKEEMSIYLVRKILQFMLILGGIFALIMYIGSPLFASLSKGGQELVPILRSLTLAVLVFPSMSVLRGFFQGFNNLKPYAISQVAEQIIRVIWMLLTAFYIMRLGSGDYIAAVTQSTFAAFVGMFASIAVLLYFLWRYNMLSALIGKTPKHIKLDTKEILIETIKEAIPFIITGAAIQIFKLIDQFSFGNTMALFTNYSSEELRVMFAYFSSNPGKVTMILIAVATAIAGVGIPLLTENFVKNDKKAAARLVVNNLQMLLMFLLPAVAGSVILAKPLYTVFYGLPQGQALGLFVISLIQTIILSIYTVLAPMLQALFENRKAIIYFLYGLVAKVILQLPSIFLFHAYGPLFSTTVALCIPVILMYLKIHEITGFKRQAIRRTSALVLILTLLMSFIISMIIWLMNLVIVPDSRLVSLVYIIVIGAIGLGVYGFMALATHLLDKMIGSRAQDLRRKLHLN

SEQ ID NO: 2595 - protein, 1455 aa, Streptococcus agalactiae
ATGATTACAATAGATAAAATTTTAGAAATTTTAAAAAATGACCATAATTTCAGAGAGATTTTGTTTCATGAGCATTATTATTATAACTGGACACAAAATGTAACTTTTAATGCCTTATCATATGATAGTCGTCAAATTTCATCTGATACTTTATTTTTCGCTAAGGGTGCTACTTTTAAAAAAGAATATCTAGATTCTGCAATCACAGCAGGCCTTTCTTTTTACGTTTCTGAGATAGATTACGGCGCCGATATTCCAGTGATATTAGTCAATGATATCAAAAAAGCCATGAGTTTGATATCTATGTCTTTCTATAATAACCCACAAAACAAACTTAAACTTCTAGCTTTTACTGGAACAAAAGGAAAAACAACTGCGGCTTACTTTGCTTATCATATGTTAAAAGTAAACCATCGTCCTGCTATGCTCTCAACTATGAACACAACATTAGATGGTAAATCTTTCTTTAAATCACATCTCACAACCCCCGAGAGTCTTGATTTATTTCGGATGATGGCTACAGCCGTTGAGAATCAAATGACACACTTAATTATGGAAGTATCAAGCCAAGCATACCTAACCAAACGTGTTTATGGTTTAACCTTTGACGTTGGCGTTTTCTTAAATATTAGTCCCGATCATATTGGTCCTATCGAGCACCCTACATTCGAAGATTATTTTTTCCACAAACGGCTCTTGATGGAGAATAGCAATGCTGTTGTTGTAAATAGTCAGATGGATCATTTTAATATTGTCAAAGAACAGGTCGAATATATTCCTCATGATTTCTATGGAGATTATTCTGAAAATGTTATCACAGAATCAAAGGCCTTTTCTTTCCATGTCAAAGGAAAGTTGGAGAACACCTACGATATCAAGCTGATTGGAAAATTCAATCAAGAAAATGCTATCGCAGCTGGACTTGCTTGTCTCCGACTTGGTGTTTCAATTGAAGATATAAAAAACGGAATTGCACAAACTACCGTCCCTGGCCGCATGGAAGTCCTAACACAAACCAACGGCGCAAAGATTTTCGTTGACTATGCCCACAACGGAGACAGTTTGAAGAAATTATTAGCTGTTGTTGAGGAACACCAAAAAGGGGATATTATATTAGTACTCGGAGCTCCTGGTAATAAAGGTCAAAGCCGTCGTAAAGACTTTGGAGATGTCATTAATCAACATCCTAATCTACAAGTGATACTCACTGCAGATGATCCTAATTTTGAAGATCCCTTAGTTATCTCACAAGAAATAGCAAGCCATATTAATCGTCCGGTTACTATCATCATTGATCGAGAAGAAGCAATTGCTAATGCCAGTACTCTTACTAATTGCAAACTAGATGCAATTATTATCGCTGGTAAAGGAGCAGATGCTTATCAAATTATCAAAGGAAATCGTGACAATTACTCTGGAGATTTAGAAGTTGCGAAAAAATACCTTAAACGATAA

SEQ ID NO: 2596 - protein, 484 aa, Streptococcus agalactiae
MITIDKILEILKNDHNFREILFHEHYYYNWTQNVTFNALSYDSRQISSDTLFFAKGATFKKEYLDSAITAGLSFYVSEIDYGADIPVILVNDIKKAMSLISMSFYNNPQNKLKLLAFTGTKGKTTAAYFAYHMLKVNHRPAMLSTMNTTLDGKSFFKSHLTTPESLDLFRMMATAVENQMTHLIMEVSSQAYLTKRVYGLTFDVGVFLNISPDHIGPIEHPTFEDYFFHKRLLMENSNAVVVNSQMDHFNIVKEQVEYIPHDFYGDYSENVITESKAFSFHVKGKLENTYDIKLIGKFNQENAIAAGLACLRLGVSIEDIKNGIAQTTVPGRMEVLTQTNGAKIFVDYAHNGDSLKKLLAVVEEHQKGDIILVLGAPGNKGQSRRKDFGDVINQHPNLQVILTADDPNFEDPLVISQEIASHINRPVTIIIDREEAIANASTLTNCKLDAIIIAGKGADAYQIIKGNRDNYSGDLEVAKKYLKR

SEQ ID NO: 2597 - protein, 795 aa, Streptococcus agalactiae
ATGTCTCACATAAAAGCAGAAAACATTATCGTATCTTACGATCAGAAAGAAATCATCAATAATCTTTCCCTCAGTATACTTAACCAAAAAATAACAACGATTATTGGTGCCAATGGATGTGGAAAGTCTACTCTTTTGAAGGCTCTCACACGCATCCATAAAATAAAAGATGGTACTATCACTATTGATGGTCATGATATTGCACATTTACCCACAAAGGAAATTGCTAAGAAGATTGCACTTCTCCCACAGGTGTTAGAAGCAACTGAAGGGATAACAGTTTATGAACTAATATCTTATGGACGGTTCCCACACCAAAAATACCTTGGCAATTTGACAAATGACGATCGCAGTAAAATCCATTGGGCGATGGAAATGACTAACGTAGCGCAATTTGCTAATAGAGATGTTGATGACCTTTCAGGAGGTCAGAGGCAAAAAGTATGGATTGCTATGGCTTTAGCACAAGATACAGATACTATCTTTTTAGACGAACCTACAACTTATCTTGACATGAATCATCAATTAGAAGTCTTAGAATTGCTCAAAAAACTTAATGACGAAACGCAAAAAACAATTATTATGGTCCTACACGACCTAAACCTGTCTGCGCGCTATTCTGATTATCTAGTTGCAATGAAAACCGGTAAAATTATCTATGAAGGTAGTCCTAGTCAGATCATGACTAAAGATATTATCAAAGATATTTTTAAGATTGATGCTCATATCATTCAGGACCCTATTAGTAAACAACCTGTTTTGTTATCTTATCAATTATCAACTGATCAAAATTAA

SEQ ID NO: 2598 - protein, 264 aa, Streptococcus agalactiae
MSHIKAENIIVSYDQKEIINNLSLSILNQKITTIIGANGCGKSTLLKALTRIHKIKDGTITIDGHDIAHLPTKEIAKKIALLPQVLEATEGITVYELISYGRFPHQKYLGNLTNDDRSKIHWAMEMTNVAQFANRDVDDLSGGQRQKVWIAMALAQDTDTIFLDEPTTYLDMNHQLEVLELLKKLNDETQKTIIMVLHDLNLSARYSDYLVAMKTGKIIYEGSPSQIMTKDIIKDIFKIDAHIIQDPISKQPVLLSYQLSTDQN

SEQ ID NO: 2599 - protein, 933 aa, Streptococcus agalactiae
ATGAAAAAAATTGGAATTATTGTCCTCACACTACTGACCTTCTTTTTGGTATCTTGCGGACAACAAACTAAACAAGAAAGCACTAAAACAACTATTTCTAAAATGCCTAAAATTGAAGGCTTCACCTATTATGGAAAAATTCCTGAAAATCCGAAAAAAGTAATTAATTTTACATATTCTTACACTGGGTATTTATTAAAACTAGGTGTTAATGTTTCAAGTTACAGTTTAGACTTAGAAAAAGATAGCCCCGTTTTTGGTAAACAACTGAAAGAAGCTAAAAAATTAACTGCTGATGATACAGAAGCTATTGCCGCACAAAAACCTGATTTAATCATGGTTTTCGATCAAGATCCAAACATCAATACTCTGAAAAAAATTGCACCAACTTTAGTTATTAAATATGGTGCACAAAATTATTTAGATATGATGCCAGCCTTGGGGAAAGTATTCGGTAAAGAAAAAGAAGCTAATCAGTGGGTTAGCCAATGGAAAACTAAAACTCTCGCTGTCAAAAAAGATTTACACCATATCTTAAAGCCTAACACTACTTTTACTATTATGGATTTTTATGATAAAAATATCTATTTATATGGTAATAATTTTGGACGCGGTGGAGAACTAATCTATGATTCACTAGGTTATGCTGCCCCAGAAAAAGTCAAAAAAGATGTCTTTAAAAAAGGGTGGTTTACCGTTTCGCAAGAAGCAATCGGTGATTACGTTGGAGATTATGCCCTTGTTAATATAAACAAAACGACTAAAAAAGCAGCTTCATCACTTAAAGAAAGTGATGTCTGGAAGAATTTACCAGCTGTCAAAAAAGGGCACATCATAGAAAGTAACTACGACGTGTTTTATTTCTCTGACCCTCTATCTTTAGAAGCTCAATTAAAATCATTTACAAAGGCTATCAAAGAAAATACAAATTAA

SEQ ID NO: 2600 - protein, 310 aa, Streptococcus agalactiae
MKKIGIIVLTLLTFFLVSCGQQTKQESTKTTISKMPKIEGFTYYGKIPENPKKVINFTYSYTGYLLKLGVNVSSYSLDLEKDSPVFGKQLKEAKKLTADDTEAIAAQKPDLIMVFDQDPNINTLKKIAPTLVIKYGAQNYLDMMPALGKVFGKEKEANQWVSQWKTKTLAVKKDLHHILKPNTTFTIMDFYDKNIYLYGNNFGRGGELIYDSLGYAAPEKVKKDVFKKGWFTVSQEAIGDYVGDYALVNINKTTKKAASSLKESDVWKNLPAVKKGHIIESNYDVFYFSDPLSLEAQLKSFTKAIKENTN

SEQ ID NO: 2601 - protein, 1026 aa, Streptococcus agalactiae
ATGTTTAAAGCTTCAAAAAAACTCGTTCAAAAAAATAAGTCAAATCATTTTTGGCTTGTTTTTTTCATAACACTTATACTATTTCTTATTGGTTGTTACGCCAGCTTACGATTTGGTGCTATCAATTTCAAGACTAGTGATTTAATAACTGTTTTAAAAAATCCCTTAAAAAACTCTAATGCTCAGGATGTTATTTTTGACATTAGACTACCACGCATAATTGCAGCTATCTTAGTAGGTGCAGCTATGTCACAAGCAGGTGCTATTATGCAGGGAGTCACTCGAAACGCCATTGCTGATCCTGGACTACTAGGTATTAACGCCGGAGCTGGGTTAGCCCTTGTTGTAGCATATGCTTTTTTAGGGAGCATGCACTATAGTACGATTCTCATAGTCTGCTTACTAGGGTCTGTCATTTCTTGTCTTTTAGTCTTCACACTCTCTTATACAAAGCAAAAGGGTTACCACCAACTACGACTCATTTTAGCCGGAGCGATGATCTCCACACTTTTTACGTCTGTTGGACAAGTGGTTACATTATACTTTAAACTCAATCGAACTGTTATCGGTTGGCAAGCAGGTGGTTTATCCCAAATTAACTGGAAAATGCTAATCATAATAGCACCTATCATTATTTTAGGTTTACTTATTTCACAACTCCTAGCACATCAATTAACTATCTTGAGCCTTAATGAATCTGTGGCCAAAGCATTGGGACAAAAAACTCAATTAATGACTGCGTTTCTATTACTTATTGTTTTGTTTTTATCAGCTTCATCAGTCGCTTTGATAGGAACCGTTTCTTTCATTGGATTGATTATTCCACATTTTATTAAGCTTTTTATTCCCAAAGATTATCGTCTGTTATTACCTTTAATAGGATTTTCAGGGGCTACTTTCATGATCTGGGTAGACTTATCATCTCGTATTATAAATCCCCCTTCAGAGACATCAATTAGTTCTATAATCAGTATCGTAGGGCTTCCATGTTTCCTATGGTTAATTAGAAAAGGGAAAAATCTATGA

SEQ ID NO: 2602 - protein, 341 aa, Streptococcus agalactiae
MFKASKKLVQKNKSNHFWLVFFITLILFLIGCYASLRFGAINFKTSDLITVLKNPLKNSNAQDVIFDIRLPRIIAAILVGAAMSQAGAIMQGVTRNAIADPGLLGINAGAGLALVVAYAFLGSMHYSTILIVCLLGSVISCLLVFTLSYTKQKGYHQLRLILAGAMISTLFTSVGQVVTLYFKLNRTVIGWQAGGLSQINWKMLIIIAPIIILGLLISQLLAHQLTILSLNESVAKALGQKTQLMTAFLLLIVLFLSASSVALIGTVSFIGLIIPHFIKLFIPKDYRLLLPLIGFSGATFMIWVDLSSRIINPPSETSISSIISIVGLPCFLWLIRKGKNL

SEQ ID NO: 2603 - protein, 1002 aa, Streptococcus agalactiae
ATGATTCAAAAAAATAAAGCTCCTTTTGTTTTAATATCATCTGTCATTATCCTACTATTATTAATACTAGTATCAATTTCACTTGGCTATGCTAATACTTCCGTTATTGACGTTTTAAAACTAATAAGTGGAAAATCTGATGATGCCTTCCTTTTTATCATTACTAACATTCGTTTACCTCGTATTATTGTCTGTATCTTTGGGGGAGCTTCTTTAGGAATTGCTGGGTTGCTATTACAGACGTTAACCAAAAATCCACTAGCTGATTCCGGTATTCTTGGTATCAATGCTGGAGCTGGATTAGTAATCGCTCTAACCATAGGAACATTTAATGTTAGCAATCCAACTATATTATACTTTTTACCCCTATTTGCTATGTTTGGAGGGTTGGTAACTATTTTTCTTATCTATCTTATGTCATACAGAAGAAATCACAATATTAGCCCTACACGATTAATCGTCACTGGTATCGGAATATCTACAATTATTTCAGGCGTTATGATTTTGATTATTAGTCAGTCTAATAATCAAAAAATGGATATGATCGTTGAATGGCTTAGTGGAAAAATTACAATTAGTTCCTGGACTACCATTATCACTTTTATCCCGATTCTCATTTTGTTATGGGGATTAGCATATAGTCGCAGTCGCCACCTTAATATTATGAACCTAAACGAGCAGACTGCTCTCGCTCTAGGACTTCATTTAAAAAAGGAAAGAACATATACTTTGATGCTGACAAGTAGCCTCGCTGCTATTAGCGTCGTCTTAATTGGTAATATTACTTTTATAGGCTTACTCGCTGGGCACTTAAGTAGACGACTATTAGGAAATAACCATAAAATTATACTACCTAGCTGTCTTCTTATTGGTGCTATTATCCTATTGGTATCAGATACTATAGGTCGTCTCCTCTTAGTTGGTACGGGTATTCCCACTGGATTGGTTGTATCAATAATTGGTGCCCCCTATTTTCTCTGGTTGATGACAAAAGTTGACTAA

SEQ ID NO: 2604 - protein, 333 aa, Streptococcus agalactiae
MIQKNKAPFVLISSVIILLLLILVSISLGYANTSVIDVLKLISGKSDDAFLFIITNIRLPRIIVCIFGGASLGIAGLLLQTLTKNPLADSGILGINAGAGLVIALTIGTFNVSNPTILYFLPLFAMFGGLVTIFLIYLMSYRRNHNISPTRLIVTGIGISTIISGVMILIISQSNNQKMDMIVEWLSGKITISSWTTIITFIPILILLWGLAYSRSRHLNIMNLNEQTALALGLHLKKERTYTLMLTSSLAAISVVLIGNITFIGLLAGHLSRRLLGNNHKIILPSCLLIGAIILLVSDTIGRLLLVGTGIPTGLVVSIIGAPYFLWLMTKVD

SEQ ID NO: 2605 - protein, 654 aa, Streptococcus agalactiae
ATGATATTAACGTTTAATCCAGGAAAGTTAGAAAGACAAGAGTTTTTTAAGGAGCTTATTAACTATCTTTGGATACATGATGATGTAACACTAAGAAAAATAAAGTCCCACTTTACAGACTATTCTAAAATTGACCGTTTGTTAGAAGAATATATTAATCATGGATATATCCTTCGCCAAAATAAACGCTACAGCCTTAATCTTCCTTTTCTGAGTTCGCTAGATGGATTAGTATTAGATGATTTGGTTTTCATAGATTCTGATAGTCAAATCTATCAGTTATTACAGAAGCGAAAATTTGTGACAAATTTAGATAACCCAACCAATCACTTGGTATTTGTAGAAGAGACAGATTTTGAAAGAAACACTTTGACTCTTTCTAATTATTTCTATAAACTAACTAACGGTTATCCACTTTCAAGAGAACAAAAAAAGCTTTATCAACTTTTAGGAGATGTTAATTCGGAATATGCTTTAAAATATATGTCAAGCTTTATATTGAAATTTCTTCGCAAGGATAGTGTTAAGCAAAAACGTACAGTTATTTTTATCCAAGCTTTAGAATTACTTGGATATATTAGCTTAAACCAAGATACTACCTATCGTTTAAATGCTAAACTTGATGTTGAAGCTTTAAAGATTTACTTAACATAA

SEQ ID NO: 2606 - protein, 217 aa, Streptococcus agalactiae
MILTFNPGKLERQEFFKELINYLWIHDDVTLRKIKSHFTDYSKIDRLLEEYINHGYILRQNKRYSLNLPFLSSLDGLVLDDLVFIDSDSQIYQLLQKRKFVTNLDNPTNHLVFVEETDFERNTLTLSNYFYKLTNGYPLSREQKKLYQLLGDVNSEYALKYMSSFILKFLRKDSVKQKRTVIFIQALELLGYISLNQDTTYRLNAKLDVEALKIYLT

SEQ ID NO: 2607 - protein, 936 aa, Streptococcus agalactiae
ATGTCTAAAATTTTAGTCTTTGGTCACCAAAATCCAGATTCAGATGCTATTGGATCATCAGTTGCTTTTGCATATCTAGCTAAAGAAGCTTGGGGGCTTGACACAGAGGCCGTTGCTTTAGGAACTCCAAATGAAGAAACAGCATATGTTTTAGATTATTTTGGTGTTCAAGCACCTCGAGTAGTAGAATCTGCAAAAGCAGAGGGTGTAGAGACAGTCATTTTAACTGACCATAACGAATTCCAACAATCTATTTCTGATATTAAAGATGTGACAGTTTATGGTGTTGTTGATCATCATCGTGTTGCTAACTTTGAGACTGCCAATCCGTTATATATGCGTTTGGAACCAGTTGGCTCAGCATCATCGATTGTTTACCGTATGTTTAAGGAAAATGGAGTATCAGTACCCAAAGAGTTGGCTGGTTTATTATTATCAGGTTTGATTTCAGATACTCTTCTTTTGAAATCACCAACAACTCATGCTTCAGATATTCCAGTTGCAAAAGAACTAGCAGAGCTTGCAGGTGTAAACTTAGAAGAATATGGTTTAGAAATGCTTAAAGCAGGTACTAACCTCTCAAGTAAGACTGCAGCGGAGTTGATTGATATTGATGCTAAAACATTTGAATTAAATGGAGAAGCTGTTCGTGTTGCACAAGTTAATACTGTGGACATTAACGATATTTTAGCACGTCAAGAAGAGATTGAAGTTGCTATTCAAGAAGCAATTGTCACAGAAGGTTATTCTGATTTTGTATTGATGATTACTGACATTGTTAATTCAAATTCAGAGATTTTAGCTCTCGGTTCAAATATGGCTAAAGTTGAAGCAGCTTTTGAATTTACACTTGAAAATAACCACGCTTTTCTTGCTGGGGCAGTATCACGCAAAAAACAAGTTGTTCCTCAATTGACAGAAAGCTACAATGCTTAA

SEQ ID NO: 2608 - protein, 311 aa, Streptococcus agalactiae
MSKILVFGHQNPDSDAIGSSVAFAYLAKEAWGLDTEAVALGTPNEETAYVLDYFGVQAPRVVESAKAEGVETVILTDHNEFQQSISDIKDVTVYGVVDHHRVANFETANPLYMRLEPVGSASSIVYRMFKENGVSVPKELAGLLLSGLISDTLLLKSPTTHASDIPVAKELAELAGVNLEEYGLEMLKAGTNLSSKTAAELIDIDAKTFELNGEAVRVAQVNTVDINDILARQEEIEVAIQEAIVTEGYSDFVLMITDIVNSNSEILALGSNMAKVEAAFEFTLENNHAFLAGAVSRKKQVVPQLTESYNA

SEQ ID NO: 2609 - protein, 789 aa, Streptococcus agalactiae
ATGGCAGAAATAGACTATAAAAAAGTAACAGGAATGATCCATTCTACAGAAAGTTTCGGCTCTGTGGATGGGCCAGGTATTCGTTTTATCATTTTTATGCAAGGATGTAAAATGCGTTGTCAATACTGTCATAATCCTGATACTTGGGAAATGGAAACTAACAATTCAAAGGAACGTACCGTTGAGGATGTTCTAAAGGAAGCTCTCCGTTATAAACATTTTTGGGGAAAAGATGGAGGTATCACAGTTTCAGGTGGTGAAGCAATGCTGCAAATTGACTTTATTACAGCCCTCTTTATTGAGGCTAAGAAACTAGGTATTCATACGACGCTAGATACTTGTGGTTTTGCTTATCGAGCAACACCAGAATACCATGCTATCCTTGAAAAATTGTTAGATGTTACTGATTTGGTACTCCTTGACTTAAAAGAAATTGATCCAGAACAACATAAAATTGTAACTCGTCAGTCTAACAAAAATATTTTACAGTTTGCTAGATATTTATCTGATAGAGGTACTCCGGTATGGATTCGTCATGTTTTAGTTCCTGGATTGACTGATATTGATGACCATTTAAAACGTTTGGGTGAATTTGTCCAAACACTTGATAATGTCGATAAATTTGAAGTATTGCCTTATCATACTATGGGAGAGTTCAAATGGCGTGAATTAGGAATTCCGTATCCATTAGCTGGTGTGAAACCACCAACTCCAGAACGTGTTAAAAACGCTAAAGATATCATGAAAACAGAATCCTATACAGAATATCTAAAAAGGATTCAAAATTAG

SEQ ID NO: 2610 - protein, 262 aa, Streptococcus agalactiae
MAEIDYKKVTGMIHSTESFGSVDGPGIRFIIFMQGCKMRCQYCHNPDTWEMETNNSKERTVEDVLKEALRYKHFWGKDGGITVSGGEAMLQIDFITALFIEAKKLGIHTTLDTCGFAYRATPEYHAILEKLLDVTDLVLLDLKEIDPEQHKIVTRQSNKNILQFARYLSDRGTPVWIRHVLVPGLTDIDDHLKRLGEFVQTLDNVDKFEVLPYHTMGEFKWRELGIPYPLAGVKPPTPERVKNAKDIMKTESYTEYLKRIQN

SEQ ID NO: 2611 - protein, 1335 aa, Streptococcus agalactiae
ATGCAAGACCCTGGCAGTCAGAGTTTGTTACTACAATTTGTTATTTTATTAATATTAACCCTATTTAACGCCTTCTTTTCAGCATCTGAAATGGCTTTAGTATCGCTAAACCGCTCTAAAGTAGAACAGAAAGCTGAAGAAGGGGACAAAAGGTATCGACGTCTTTTGGACGTTCTTGAAAATCCCAATAATTTTTTATCAACAATTCAAGTTGGTATTACTTTTATTAGCCTTTTGCAAGGGGCTAGTTTATCTGCCTCACTAGGACATGTGATTTCAGGGTGGCTAGGAAATTCAGCAACAGCCCGTACAGCAGGGAGTATTATTGCGCTAATCTTTTTAACATATGTCTCTATTGTTCTAGGAGAATTATATCCTAAGCGTATTGCTATGAATTTGAAAGATCGTCTAGCAATTGTTTCAGCTCCCATTATTATCTTTCTAGGGAAAATCGTAAGCCCCTTTGTATGGTTGCTCTCAGCTTCAACTAACTTATTGAGTAGAATCACTCCGATGACTTTTGATGATGCTGACGAGAAGATGACACGTGATGAAATTGAATATATGTTGACGAATAGTGAAGAAACTTTGGAAGCTGAAGAAATTGAGATGCTGCAAGGGATTTTCTCGCTAGATGAAATGATGGCGCGTGAAGTTATGGTTCCGCGCACTGATGCTTTCATGATTGACATCAACAATGATGCACAATCAAATATTGAAGGAATTTTATCACAAAACTTTTCTCGTGTCCCTGTTTTTGATGACGATAAAGATAGAGTTGTTGGTGTTTTACATACCAAGCGCTTATTGGAAGCGGGCTTTAAAACTGGTTTTGATACTATCGACTTGCGAAAAATACTTCAGGAACCTCTTTTTGTTCCAGAAACGATTTTTGTAGATGACCTTTTAAAAGCATTACGCAACACTCAAAATCAAATGGCCATTTTACTAGATGAATATGGTGGCGTTGCTGGTTTAGTAACTCTAGAGGATTTATTGGAAGAAATTGTCGGCGAAATTGATGATGAAACAGATACAGCTGAACAATTTGTCAGGGAAATCGATGAGAATATCTATATTGTTCTAGGAACTATGACGCTTAATGAATTTAATGATTATTTTGAGACAGAGTTAGAAAGTGATGATGTTGATACAATTGCGGGTTATTATTTAACTGGTGTGGGTAGTATTCCAAACCAAGAGGAAAAAGTAGCTTACGAAGTAGACAGCAAAGATAAACACATCACTTTGATTAATGATAAAGTTAAAGATGGTCGTATAACAAAATTGAAGGTGCTATTGTCTGATATAGAACAGAATATTGAAAAAGACTAA

SEQ ID NO: 2612 - protein, 444 aa, Streptococcus agalactiae
MQDPGSQSLLLQFVILLILTLFNAFFSASEMALVSLNRSKVEQKAEEGDKRYRRLLDVLENPNNFLSTIQVGITFISLLQGASLSASLGHVISGWLGNSATARTAGSIIALIFLTYVSIVLGELYPKRIAMNLKDRLAIVSAPIIIFLGKIVSPFVWLLSASTNLLSRITPMTFDDADEKMTRDEIEYMLTNSEETLEAEEIEMLQGIFSLDEMMAREVMVPRTDAFMIDINNDAQSNIEGILSQNFSRVPVFDDDKDRVVGVLHTKRLLEAGFKTGFDTIDLRKILQEPLFVPETIFVDDLLKALRNTQNQMAILLDEYGGVAGLVTLEDLLEEIVGEIDDETDTAEQFVREIDENIYIVLGTMTLNEFNDYFETELESDDVDTIAGYYLTGVGSIPNQEEKVAYEVDSKDKHITLINDKVKDGRITKLKVLLSDIEQNIEKD

SEQ ID NO: 2613 - protein, 567 aa, Streptococcus agalactiae
ATGATTAAAAGACCAATTCATCTTTCTCATGATTTTTTAGCAGAAGTTATTGATAAAGAAGCAATAACGCTTGATGCAACTATGGGAAATGGGAATGATACTGTTTTTTTAGCGAAAAGTTCTAAAAAAGTTTATGCATTTGATATTCAAGAAGAAGCAATAGCAAAAACGAAAGCAAAGCTCACGGAGCAAGGGATCTCTAACGCTGAACTTATCTTGGATGGGCATGAAAATTTGGAACAATATGTTCATACACCTTTAAGAGCGGCTATATTTAATCTGGGATACTTACCCTCAGCGGATAAAACAGTTATTACAAAACCACACACAACTATCAAGGCAATCAAAAACGTTTTAGACATTTTAGAAGTAGGTGGACGTCTATCACTTATGGTTTATTATGGTCATGATGGTGGAAAAAGTGAGAAAGATGCGGTGATAGCATTCGTGGAACAATTACCACAGAATAATTTCGCTACAATGCTTTATCAACCACTCAATCAAGTTAATACGCCTCCCTTTTTAATTATGGTAGAAAAGTTACAATCATATGAAAATGAGGTGTAA

SEQ ID NO: 2614 - protein, 188 aa, Streptococcus agalactiae
MIKRPIHLSHDFLAEVIDKEAITLDATMGNGNDTVFLAKSSKKVYAFDIQEEAIAKTKAKLTEQGISNAELILDGHENLEQYVHTPLRAAIFNLGYLPSADKTVITKPHTTIKAIKNVLDILEVGGRLSLMVYYGHDGGKSEKDAVIAFVEQLPQNNFATMLYQPLNQVNTPPFLIMVEKLQSYENEV

SEQ ID NO: 2615 - protein, 936 aa, Streptococcus agalactiae
ATGAAAAAACGTTATCGTGCGATTAATGATTATTATCGAGAACTCTTTGGAGAAAAAATATTTAAATTACCTATAGATGCTGGTTTTGACTGTCCTAACAGAGACGGAACAGTTGCTAGAGGAGGGTGCACTTTTTGCACAGTTTCTGGTTCAGGGGATGCTATAGTTGCTCCAGAAGCTCCTATTCGTGAACAATTCTATAAAGAAATTGATTTCATGCATAGAAAGTGGCCTGAGGTTAATAAATACTTAGTCTATTTTCAAAATTTTACCAATACCCATGCTAAGTTAGAGATAATTAAAGAGCGTTACGAACAGGCTATTAATGAGCCAGGAGTTATCGGAATCAACATCGGAACAAGGCCGGATTGCTTACCTGATGAAACTATATACTATCTCGCTGAACTTTCTGAAAGAATGCATGTGACTTTAGAATTAGGCCTTCAGACAACTTATGAAGCAACTTCTGCATTAATAAATAGAGCACATTCATATGACCTTTACAAAAAAACTGTTAAGAGAATACGAGAATTAGCTCCTAAAGTAGAAATCGTTTCTCACCTAATAAATGGCCTTCCAGGGGAGACACATGATATGATGGTGGAAAATGTTCGTCGATGTGTTACGGATAATGATATTCAGGGTATAAAATTACACCTTCTGCATCTTATGACTAATACAAGAATGCAGAGAGATTACCATGAAGGTCGTTTACGTTTGTTAAGTCAAGAAGACTATATTTCGATTATTTGTGACCAACTGGAGATTATTCCAAAACATATTGTTATTCACCGAATTACTGGTGATGCGCCACGTCATATGTTAATTGGACCGATGTGGAGCCTTAATAAATGGGAAGTGCTTAATGCCATTGACAAAGAAATGGAGAAAAGACAGTCATATCAAGGATGTAAAGCTGAGGTAAAACATGATTAA

SEQ ID NO: 2616 - protein, 311 aa, Streptococcus agalactiae
MKKRYRAINDYYRELFGEKIFKLPIDAGFDCPNRDGTVARGGCTFCTVSGSGDAIVAPEAPIREQFYKEIDFMHRKWPEVNKYLVYFQNFTNTHAKLEIIKERYEQAINEPGVIGINIGTRPDCLPDETIYYLAELSERMHVTLELGLQTTYEATSALINRAHSYDLYKKTVKRIRELAPKVEIVSHLINGLPGETHDMMVENVRRCVTDNDIQGIKLHLLHLMTNTRMQRDYHEGRLRLLSQEDYISIICDQLEIIPKHIVIHRITGDAPRHMLIGPMWSLNKWEVLNAIDKEMEKRQSYQGCKAEVKHD

SEQ ID NO: 2617 - protein, 642 aa, Streptococcus agalactiae
ATGTTATCTCGTCAAAATAGTAAACTTATTCAAGCATTTATTGCTATTATCTTATTTTTCAGTTTAGGATTGGTCATCAAATATTGGCCCGACACTGTAATTTCATTTGACCAAACTATTCAAGAAAGTGTTAGAGGACAGTTGCCAAATCTTTCTACAAGATTTTTCAAGTTAATCACTGTGATTGGTAATACTGTAAGCCAGATAGCTATTGCGATTATGAGCGTCACTTTCTGTTACCTTAAGAAGTGGTATCCTCAAGCTAGATTTATCGCAGTAAATGCTATTATCTCTGGTATATGTATACTTTCTTTAAAACTTATTTTTCAAAGAGTAAGACCAACTTTAACCCATTTAGTATTTGCAGGTGGCTATTCGTTTCCCAGTGGGCACTCGATGGGAACATTTATGATATTTGGGAGTATTATTATTTTATTGCAGTACTATATGCCTAAGAGTATATGGAAACTGTTGTGCCAAGGTACTTTGGGTTTGCTCATTTTTTTAATTGGGTTATCTCGTATTTACCTAGGGGTTCATTTTCCGACAGATGTTTTAGCTGGTTTTATACTTGCTTATGGTATTTTGAATCTAACTGCGTATATCTTTTTAGCCAAGGATTGGTTAAAGAAAGTGAAGTAA

SEQ ID NO: 2618 - protein, 213 aa, Streptococcus agalactiae
MLSRQNSKLIQAFIAIILFFSLGLVIKYWPDTVISFDQTIQESVRGQLPNLSTRFFKLITVIGNTVSQIAIAIMSVTFCYLKKWYPQARFIAVNAIISGICILSLKLIFQRVRPTLTHLVFAGGYSFPSGHSMGTFMIFGSIIILLQYYMPKSIWKLLCQGTLGLLIFLIGLSRIYLGVHFPTDVLAGFILAYGILNLTAYIFLAKDWLKKVK

SEQ ID NO: 2619 - protein, 585 aa, Streptococcus agalactiae
ATGACAAATACACGTAAAATGGTGACAATCGCCATTCTTTCTGCCTTATCTTTTGTATTGATGATGGTTTCATTTCCATTAATACCAGGAGCAGAATTTTTAAAGGTTGATTTTTCAATCCTTCCGATGTTAGTTGCTTTTATTTTATTTGATTTGAAATCAAGTTATGGTGTACTCTTATTAAGATCACTTTTAAAAGTTATACTTGCTAATCGTGGTCCAGAAACGTTTATTGGTTTACCGATGAATATGGTTGCTCTAGCTTTATTTTTAGCAAGTTTCGCTATTTTCTGGAAAAATAGAGAGAGTGCAAAAGATTTTATTAAAGCTAGTCTATTTGGTACAGTTAGCTTGACCGTATCTATGGTAGCTCTCAACTATGTCTTTGCGATTCCTTTGTATGCTATATTTGCTAACTTTGATATCAGAACATTTATTGGTGTAGGCAATTACCTTTTAACAATGGTTATTCCATTTAATATCGTTGAGGGAATTTTAATTTCGATTGTTTTCTATCTAACTTACGTGGCTTGTTTGCCAATATTAGAAAGATATAAAAAGACTAATGTTATCTCGTCAAAATAG

SEQ ID NO: 2620 - protein, 194 aa, Streptococcus agalactiae
MTNTRKMVTIAILSALSFVLMMVSFPLIPGAEFLKVDFSILPMLVAFILFDLKSSYGVLLLRSLLKVILANRGPETFIGLPMNMVALALFLASFAIFWKNRESAKDFIKASLFGTVSLTVSMVALNYVFAIPLYAIFANFDIRTFIGVGNYLLTMVIPFNIVEGILISIVFYLTYVACLPILERYKKTNVISSK

SEQ ID NO: 2621 - protein, 927 aa, Streptococcus agalactiae
ATGAAAAAGATTAGAAAAAGTTTAGGACTTCTACTATGTTGCTTTTTAGGATTGGTACAATTAGCGTTTTTTTCGGTAGCCAGTGTAAATGCTGATACCCCTAATCAACTAACAATCACACAGATAGGACTTCAGCCAAATACTACAGAGGAGGGGATTTCTTATCGTTTATGGACTGTGACTGACAACTTAAAAGTTGATTTATTGAGCCAAATGACAGATAGCGAATTGAACCAGAAGTATAAGAGTATCTTGACTTCTCCTACTGATACTAATGGTCAGACAAAGATAGCACTCCCAAATGGTTCGTACTTTGGTCGTGCTTATAAAGCTGATCAAAGCGTTTCAACAATAGTACCTTTTTATATTGAATTACCAGATGATAAGTTATCAAATCAATTACAGATAAATCCTAAGCGAAAAGTTGAAACAGGCCGATTAAAACTTATTAAATATACAAAAGAAGGAAAGATAAAGAAAAGGCTATCCGGAGTAATATTTGTATTATACGATAACCAGAATCAGCCAGTTCGCTTTAAAAATGGACGATTTACGACCGATCAAGATGGGATTACTTCATTAGTAACTGATGATAAGGGAGAAATTGAGGTTGAAGGTTTATTACCTGGTAAGTATATTTTTCGAGAAGCAAAAGCACTAACTGGTTACCGTATATCTATGAAGGATGCTGTAGTTGCTGTAGTTGCTAATAAAACACAGGAAGTAGAGGTAGAAAACGAAAAAGAAACTCCTCCACCAACAAATCCTAAACCATCACAACCGCTTTTTCCACAATCATTTCTTCCTAAAACAGGAATGATTATTGGTGGAGGACTGACAATTCTTGGTTGTATTATTTTGGGAATTTTGTTTATCTTTTTAAGAAAAACTAAAAATAGCAAATCTGAAAGAAACGATACAGTATAG

SEQ ID NO: 2622 - protein, 308 aa, Streptococcus agalactiae
MKKIRKSLGLLLCCFLGLVQLAFFSVASVNADTPNQLTITQIGLQPNTTEEGISYRLWTVTDNLKVDLLSQMTDSELNQKYKSILTSPTDTNGQTKIALPNGSYFGRAYKADQSVSTIVPFYIELPDDKLSNQLQINPKRKVETGRLKLIKYTKEGKIKKRLSGVIFVLYDNQNQPVRFKNGRFTTDQDGITSLVTDDKGEIEVEGLLPGKYIFREAKALTGYRISMKDAVVAVVANKTQEVEVENEKETPPPTNPKPSQPLFPQSFLPKTGMIIGGGLTILGCIILGILFIFLRKTKNSKSERNDTV

SEQ ID NO: 2623 - protein, 885 aa, Streptococcus agalactiae
ATGGGAGGAAAATTTCAGAAAAACCTTAAGAAATCGGTCGTTTTAAATCGATGGATGAATGTAGGCTTGATACTATTGTTCTTAGTTGGTCTTTTGATAACCTCATATCCTTTTATTTCAAATTGGTACTATAATATTAAAGCTAATAATCAAGTAACTAACTTTGATAATCAAACCCAAAAATTAAATACTAAAGAGATTAATAGACGATTTGAGTTAGCAAAAGCTTATAATAGAACACTGGACCCAAGCCGCCTATCAGATCCCTATACTGAAAAAGAAAAAAAAGGTATTGCTGAATACGCCCACATGCTTGAGATTGCTGAAATGATTGGATATATTGATATACCGTCTATCAAGCAAAAATTACCTATCTATGCGGGGACTACCAGTAGTGTTCTTGAAAAAGGAGCAGGACACCTTGAAGGAACCTCCTTGCCAATTGGTGGAAAAAGTTCACATACTGTTATCACAGCTCATCGCGGCTTACCTAAAGCTAAGTTATTTACAGATTTAGATAAACTTAAAAAAGGAAAAATTTTTTATATTCATAATATCAAAGAAGTTTTAGCCTATAAGGTTGATCAAATAAGTGTTGTAAAGCCAGATAATTTTTCTAAATTATTGGTTGTTAAAGGTAAGGATTATGCGACTTTGCTAACATGTACACCTTATTCGATTAATTCACATCGTTTACTAGTTAGAGGGCATCGAATCAAGTATGTACCTCCTGTTAAAGAAAAGAACTATTTAATGAAAGAATTGCAAACACACTATAAACTTTATTTCCTCTTATCAATCCTAGTTATTCTTATATTAGTCGCTTTACTATTATATTTAAAACGAAAATTTAAAGAGAGAAAGAGAAAGGGAAATCAAAAATGA

SEQ ID NO: 2624 - protein, 294 aa, Streptococcus agalactiae
MGGKFQKNLKKSVVLNRWMNVGLILLFLVGLLITSYPFISNWYYNIKANNQVTNFDNQTQKLNTKEINRRFELAKAYNRTLDPSRLSDPYTEKEKKGIAEYAHMLEIAEMIGYIDIPSIKQKLPIYAGTTSSVLEKGAGHLEGTSLPIGGKSSHTVITAHRGLPKAKLFTDLDKLKKGKIFYIHNIKEVLAYKVDQISVVKPDNFSKLLVVKGKDYATLLTCTPYSINSHRLLVRGHRIKYVPPVKEKNYLMKELQTHYKLYFLLSILVILILVALLLYLKRKFKERKRKGNQK

SEQ ID NO: 2625 - protein, 882 aa, Streptococcus agalactiae
GTGAAGACTAAAAAAATCATCAAAAAAACAAAAAAAAAGAAGAAGTCAAATCTTCCTTTTATCATTCTTTTTCTAATAGGTCTATCTATTTTATTGTATCCAGTGGTATCACGTTTTTACTATACGATAGAATCTAATAATCAAACACAGGATTTTGAGAGAGCTGCTAAAAAACTTAGTCAGAAAGAAATCAATCGACGTATGGCTCTAGCACAAGCTTATAATGATTCTTTAAATAATGTCCATCTTGAAGATCCTTATGAGAAAAAACGAATTCAAAAGGGGGTAGCAGAGTACGCCCGTATGTTAGAGGTAAGTGAAAAAATCGGAACAATTTCAGTTCCTAAGATAGGTCAAAAACTCCCTATATTTGCAGGTTCAAGTCAAGAAGTTCTATCTAAAGGAGCAGGGCATTTAGAAGGTACCTCTCTTCCAATTGGGGGCAATAGTACACATACTGTTATAACAGCGCATTCAGGAATTCCAGATAAAGAACTCTTTTCTAACCTTAAAAAGTTAAAAAAAGGAGATAAGTTTTATATTCAAAACATAAAAGAAACGATAGCATATCAAGTAGATCAGATAAAAGTCGTTACACCCGATAACTTTTCAGATTTGTTGGTTGTTCCTGGACATGATTATGCAACCTTATTGACTTGCACCCCGATTATGATCAATACACACAGACTTTTAGTAAGGGGACATCGTATCCCTTATAAAGGTCCTATTGATGAAAAATTAATAAAAGACGGTCATTTAAACACGATTTATAGATATCTATTCTATATATCTTTAGTTATTATTGCTTGGTTACTTTGGTTAATAAAACGTCAACGTCAAAAAAATCGTTTAGCAAGTGTTAGAAAAGGAATTGAATCATAA

SEQ ID NO: 2626 - protein, 293 aa, Streptococcus agalactiae
MKTKKIIKKTKKKKKSNLPFIILFLIGLSILLYPVVSRFYYTIESNNQTQDFERAAKKLSQKEINRRMALAQAYNDSLNNVHLEDPYEKKRIQKGVAEYARMLEVSEKIGTISVPKIGQKLPIFAGSSQEVLSKGAGHLEGTSLPIGGNSTHTVITAHSGIPDKELFSNLKKLKKGDKFYIQNIKETIAYQVDQIKVVTPDNFSDLLVVPGHDYATLLTCTPIMINTHRLLVRGHRIPYKGPIDEKLIKDGHLNTIYRYLFYISLVIIAWLLWLIKRQRQKNRLASVRKGIES

SEQ ID NO: 2627 - protein, 2118 aa, Streptococcus agalactiae
ATGAAAAGAATCAACAAATATTTTGCAATGTTCTCGGCATTGTTACTGACTTTAACGTCATTGCTCTCAGTTGCACCAGCGTTTGCGGATGAAGCAACAACTAATACAGTGACTTTGCACAAGATTTTGCAAACCGAATCAAATCTTAACAAAAGTAACTTCCCAGGAACTACAGGTCTTAACGGAAAAGACTACAAAGGTGGAGCTATTTCTGACCTTGCTGGTTACTTTGGCGAGGGATCTAAAGAAATCGAAGGTGCGTTCTTTGCTTTAGCTTTGAAAGAAGATAAAAGTGGTAAAGTGCAATATGTTAAGGCAAAAGAAGGTAACAAATTAACACCAGCCTTAATTAATAAAGATGGTACTCCTGAAATAACAGTAAATATTGATGAGGCCGTGTCTGGATTGACACCAGAGGGAGATACTGGACTTGTTTTCAACACCAAAGGATTGAAAGGCGAGTTTAAAATTGTTGAAGTTAAATCAAAATCTACTTACAACAATAATGGTTCCCTCCTGGCTGCTTCAAAAGCGGTTCCAGTTAACATCACTCTTCCATTGGTAAATGAAGATGGTGTTGTTGCTGATGCCCATGTTTATCCAAAGAACACTGAAGAAAAACCAGAAATTGATAAAAACTTTGCTAAAACAAACGATTTGACAGCATTGACAGATGTTAATAGACTTTTGACAGCTGGCGCAAATTATGGTAATTATGCACGTGACAAAGCAACTGCTACTGCTGAAATCGGTAAAGTTGTTCCTTATGAAGTTAAAACAAAAATTCACAAAGGTTCTAAATACGAAAACTTGGTTTGGACAGATATAATGTCAAATGGTTTGACAATGGGTTCAACTGTTAGCCTTAAAGCTTCAGGAACTACAGAAACTTTTGCTAAGGATACAGACTATGAACTTAGCATTGATGCCCGTGGTTTCACATTAAAATTCACAGCTGATGGATTGGGCAAATTGGAAAAAGCAGCTAAAACAGCTGATATTGAATTTACATTGACTTATAGTGCTACTGTTAATGGTCAAGCAATTATTGATAATCCAGAATCCAATGATATCAAATTGTCGTATGGTAACAAACCAGGTAAAGACTTGACTGAACTTCCTGTTACACCTTCAAAGGGTGAAGTAACAGTTGCTAAAACTTGGTCTGACGGAATTGCACCTGATGGTGTAAACGTTGTTTACACATTGAAAGATAAAGATAAAACTGTTGCTTCAGTATCATTGACAAAAACATCTAAAGGTACAATCGACCTTGGAAATGGTATCAAATTTGAAGTATCTGGTAACTTCTCGGGTAAATTCACTGGTCTAGAAAACAAATCATACATGATCTCAGAACGTGTTTCTGGTTACGGAAGTGCAATAAATCTAGAAAATGGTAAAGTAACCATTACCAATACCAAAGATTCTGATAACCCAACACCATTGAACCCAACTGAACCAAAAGTTGAAACTCATGGTAAGAAATTTGTCAAAACTAATGAACAAGGTGACCGTTTGGCTGGTGCACAATTCGTTGTGAAAAACTCAGCAGGTAAATACCTTGCTCTTAAAGCAGATCAATCAGAAGGTCAAAAAACTTTAGCTGCTAAGAAAATAGCTTTAGATGAAGCTATCGCTGCTTATAACAAGTTGTCTGCAACAGACCAAAAAGGTGAAAAAGGAATTACTGCAAAAGAACTTATCAAAACTAAACAAGCAGATTACGATGCAGCCTTCATTGAGGCTCGTACAGCTTATGAGTGGATAACAGATAAGGCTAGAGCCATTACCTACACTTCAAACGATCAAGGTCAATTTGAAGTTACAGGTCTTGCAGACGGTACTTACAACCTTGAAGAAACACTTGCTCCAGCAGGATTTGCTAAGTTGGCAGGTAATATTAAGTTTGTAGTTAATCAAGGGTCATACATAACAGGTGGTAACATTGACTACGTTGCTAACAGCAACCAAAAAGATGCGACACGTGTAGAAAATAAAAAGGTAACAATCCCACAAACAGGTGGTATTGGTACAATTCTTTTCACAATTATTGGTTTAAGCATTATGCTTGGAGCAGTAGTTATCATGAAAAGACGCCAATCAAAGGAAGCTTAA

SEQ ID NO: 2628 - protein, 705 aa, Streptococcus agalactiae
MKRINKYFAMFSALLLTLTSLLSVAPAFADEATTNTVTLHKILQTESNLNKSNFPGTTGLNGKDYKGGAISDLAGYFGEGSKEIEGAFFALALKEDKSGKVQYVKAKEGNKLTPALINKDGTPEITVNIDEAVSGLTPEGDTGLVFNTKGLKGEFKIVEVKSKSTYNNNGSLLAASKAVPVNITLPLVNEDGVVADAHVYPKNTEEKPEIDKNFAKTNDLTALTDVNRLLTAGANYGNYARDKATATAEIGKVVPYEVKTKIHKGSKYENLVWTDIMSNGLTMGSTVSLKASGTTETFAKDTDYELSIDARGFTLKFTADGLGKLEKAAKTADIEFTLTYSATVNGQAIIDNPESNDIKLSYGNKPGKDLTELPVTPSKGEVTVAKTWSDGIAPDGVNVVYTLKDKDKTVASVSLTKTSKGTIDLGNGIKFEVSGNFSGKFTGLENKSYMISERVSGYGSAINLENGKVTITNTKDSDNPTPLNPTEPKVETHGKKFVKTNEQGDRLAGAQFVVKNSAGKYLALKADQSEGQKTLAAKKIALDEAIAAYNKLSATDQKGEKGITAKELIKTKQADYDAAFIEARTAYEWITDKARAITYTSNDQGQFEVTGLADGTYNLEETLAPAGFAKLAGNIKFVVNQGSYITGGNIDYVANSNQKDATRVENKKVTIPQTGGIGTILFTIIGLSIMLGAVVIMKRRQSKEA

SEQ ID NO: 2629 - protein, 2706 aa, Streptococcus agalactiae
ATGAGAAAATACCAAAAATTTTCTAAAATATTGACGTTAAGTCTTTTTTGTTTGTCGCAAATACCGCTTAATACCAATGTTTTAGGGGAAAGTACCGTACCGGAAAATGGTGCTAAAGGAAAGTTAGTTGTTAAAAAGACAGATGACCAGAACAAACCACTTTCAAAAGCTACCTTTGTTTTAAAAACTACTGCTCATCCAGAAAGTAAAATAGAAAAAGTAACTGCTGAGCTAACAGGTGAAGCTACTTTTGATAATCTCATACCTGGAGATTATACTTTATCAGAAGAAACAGCGCCCGAAGGTTATAAAAAGACTAACCAGACTTGGCAAGTTAAGGTTGAGAGTAATGGAAAAACTACGATACAAAATAGTGGTGATAAAAATTCCACAATTGGACAAAATCAGGAAGAACTAGATAAGCAGTATCCCCCCACAGGAATTTATGAAGATACAAAGGAATCTTATAAACTTGAGCATGTTAAAGGTTCAGTTCCAAATGGAAAGTCAGAGGCAAAAGCAGTTAACCCATATTCAAGTGAAGGTGAGCATATAAGAGAAATTCCAGAGGGAACATTATCTAAACGTATTTCAGAAGTAGGTGATTTAGCTCATAATAAATATAAAATTGAGTTAACTGTCAGTGGAAAAACCATAGTAAAACCAGTGGACAAACAAAAGCCGTTAGATGTTGTCTTCGTACTCGATAATTCTAACTCAATGAATAACGATGGCCCAAATTTTCAAAGGCATAATAAAGCCAAGAAAGCTGCCGAAGCTCTTGGGACCGCAGTAAAAGATATTTTAGGAGCAAACAGTGATAATAGGGTTGCATTAGTTACCTATGGTTCAGATATTTTTGATGGTAGGAGTGTAGATGTCGTAAAAGGATTTAAAGAAGATGATAAATATTATGGCCTTCAAACTAAGTTCACAATTCAGACAGAGAATTATAGTCATAAACAATTAACAAATAATGCTGAAGAGATTATAAAAAGGATTCCGACAGAAGCTCCTAAAGCTAAGTGGGGATCTACTACCAATGGATTAACTCCAGAGCAACAAAAGGAGTACTATCTTAGTAAAGTAGGAGAAACATTTACTATGAAAGCCTTCATGGAGGCAGATGATATTTTGAGTCAAGTAAATCGAAATAGTCAAAAAATTATTGTTCATGTAACTGATGGTGTTCCTACGAGATCATATGCTATTAATAATTTTAAACTGGGTGCATCATATGAAAGCCAATTTGAACAAATGAAAAAAAATGGATATCTAAATAAAAGTAATTTTCTACTTACTGATAAGCCCGAGGATATAAAAGGAAATGGGGAGAGTTACTTTTTGTTTCCCTTAGATAGTTATCAAACACAGATAATCTCTGGAAACTTACAAAAACTTCATTATTTAGATTTAAATCTTAATTACCCTAAAGGTACAATTTATCGAAATGGACCAGTGAAAGAACATGGAACACCAACCAAACTTTATATAAATAGTTTAAAACAGAAAAATTATGACATTTTTAATTTTGGTATCGATATATCTGGTTTTAGACAAGTTTATAATGAGGAGTATAAGAAAAATCAAGATGGTACTTTTCAAAAATTGAAAGAGGAAGCTTTTAAACTTTCAGATGGAGAAATCACAGAACTAATGAGGTCGTTCTCTTCCAAACCTGAGTACTACACCCCTATCGTAACTTCAGCCGATACATCTAACAATGAAATTTTATCTAAAATTCAGCAACAATTTGAAACGATTTTAACAAAAGAAAACTCAATTGTTAATGGAACTATCGAAGATCCTATGGGTGATAAAATCAATTTACAGCTTGGTAATGGACAAACATTACAGCCAAGTGATTATACTTTACAGGGAAATGATGGAAGTGTAATGAAGGATGGTATTGCAACTGGTGGGCCTAATAATGATGGTGGAATACTTAAGGGGGTTAAATTAGAATACATCGGAAATAAACTCTATGTTAGAGGTTTGAATTTAGGAGAAGGTCAAAAAGTAACACTCACATATGATGTGAAACTAGATGACAGTTTTATAAGTAACAAATTCTATGACACTAATGGTAGAACAACATTGAATCCTAAGTCAGAGGATCCTAATACACTTAGAGATTTTCCAATCCCTAAAATTCGTGATGTGAGAGAATATCCTACAATAACGATTAAAAACGAGAAGAAGTTAGGTGAAATTGAATTTATAAAAGTTGATAAAGATAATAATAAGTTGCTTCTCAAAGGAGCTACGTTTGAACTTCAAGAATTTAATGAAGATTATAAACTTTATTTACCAATAAAAAATAATAATTCAAAAGTAGTGACGGGAGAAAACGGCAAAATTTCTTACAAAGATTTGAAAGATGGCAAATATCAGTTAATAGAAGCAGTTTCGCCGGAGGATTATCAAAAAATTACTAATAAACCAATTTTAACTTTTGAAGTGGTTAAAGGATCGATAAAAAATATAATAGCTGTTAATAAACAGATTTCTGAATATCATGAGGAAGGTGACAAGCATTTAATTACCAACACGCATATTCCACCAAAAGGAATTATTCCTATGACAGGTGGGAAAGGAATTCTATCTTTCATTTTAATAGGTGGAGCTATGATGTCTATTGCAGGTGGAATTTATATTTGGAAAAGGTATAAGAAATCTAGTGATATGTCCATCAAAAAAGATTAA

SEQ ID NO: 2630 - protein, 901 aa, Streptococcus agalactiae
MRKYQKFSKILTLSLFCLSQIPLNTNVLGESTVPENGAKGKLVVKKTDDQNKPLSKATFVLKTTAHPESKIEKVTAELTGEATFDNLIPGDYTLSEETAPEGYKKTNQTWQVKVESNGKTTIQNSGDKNSTIGQNQEELDKQYPPTGIYEDTKESYKLEHVKGSVPNGKSEAKAVNPYSSEGEHIREIPEGTLSKRISEVGDLAHNKYKIELTVSGKTIVKPVDKQKPLDVVFVLDNSNSMNNDGPNFQRHNKAKKAAEALGTAVKDILGANSDNRVALVTYGSDIFDGRSVDVVKGFKEDDKYYGLQTKFTIQTENYSHKQLTNNAEEIIKRIPTEAPKAKWGSTTNGLTPEQQKEYYLSKVGETFTMKAFMEADDILSQVNRNSQKIIVHVTDGVPTRSYAINNFKLGASYESQFEQMKKNGYLNKSNFLLTDKPEDIKGNGESYFLFPLDSYQTQIISGNLQKLHYLDLNLNYPKGTIYRNGPVKEHGTPTKLYINSLKQKNYDIFNFGIDISGFRQVYNEEYKKNQDGTFQKLKEEAFKLSDGEITELMRSFSSKPEYYTPIVTSADTSNNEILSKIQQQFETILTKENSIVNGTIEDPMGDKINLQLGNGQTLQPSDYTLQGNDGSVMKDGIATGGPNNDGGILKGVKLEYIGNKLYVRGLNLGEGQKVTLTYDVKLDDSFISNKFYDTNGRTTLNPKSEDPNTLRDFPIPKIRDVREYPTITIKNEKKLGEIEFIKVDKDNNKLLLKGATFELQEFNEDYKLYLPIKNNNSKVVTGENGKISYKDLKDGKYQLIEAVSPEDYQKITNKPILTFEVVKGSIKNIIAVNKQISEYHEEGDKHLITNTHIPPKGIIPMTGGKGILSFILIGGAMMSIAGGIYIWKRYKKSSDMSIKKD

SEQ ID NO: 2631 - protein, 1530 aa, Streptococcus agalactiae
TTGATTGAAAATTATTTAGAAAAAGACATCCTTAATCAAATAAAACTTCTAACTTTATGCTATGATTACTACCCTTCCATTACTCTAGACAAATCATGTCATCAACTTGGTTTATCTGAACTACTTATTAGGAAATATTGTCATGATTTAACAACTTTATTTAACAGTCAACTCTCTCTGAATATCGAAAAGAGTACAATAGTCTACCAATCTAATGGTGTAACTAGAGAACAAGCTTTCAAATATATTTATCATCAATCACACGTTTTACAACTTTTAAAATTTTTGATCACGAATGATTCAGGCAGGTTACCTTTAACTTACTTTAGTGAAAAATTTGGACTATCTTGTGCAACTGCTTATCGCATACGAAAACATATTAGTCCATTACTAGAAAAACTTGGATTTCAGATTGTCAAAAATACTATTACCGGTGACGAGTATCGAATTCGCTATTTAATCGCATTTTTAAATGCTCAATTTGGTATAGAAGTTTATCCCATGTCTAAGATGGATAAATTGCTCATCAAACGATTGTTATTAGAACACTCAACTACTTTTACTGCTTCTCATTACTTCCCAAATACATTTATTTTCTTTGATACATTGTTGTCTCTATCATGGAAACGTATTAATTATAATGTAGTTGTCCCTTACTCATCCCTTTTCACTGAACTACAAAATATATTTATCTATGATACATTACAATATTGTGTCAAAAATGTTATTATAGATTCCTTTAAAATTAATTTAAAAAAAGACGATATAGACTATATTTTTCTTGCTTACCTTACTTCCCATAACTCTTTTTCTAATCCAAATTGGACTGAGAAGCGTATCGATAATGTAATAGCTATTTTCGAAAATTATCCCAAATTCCAAAAATTATTACAGCCACTCAAAGATGCTCTTCCCTTATCTGGCTCCTATCATGATGAGTTGGTAAAAGTTGCTATCTTTTTTTTCCGAACATTTATTTTAGGATTAAATCAATTAATCCCTGAAACAATTTCATTTCCTTCATGGAACTATCATAGACATGATAAATTAACTACTATTCTCCGACCGATAATTACAAATTGGTTAAGTAAAATTGGAGAATACACGTTTAAAGAACAACATTTTCTTCTCCTTTGTACTCATCTAGAAAGAATCATCAAAAATCATATTCCTCCGATACAGATAGCCGTACTAACTACAGACTTTATTAATAACCAAATTTTAACAGAATGCTTATTACAGAGATTTTCTTCTAAAAAGATTCATTTCCACCCTTACTATTTATTAACTGATGATCTTTCCAATATTACTAATCTTAATCCAGACATTATTATTACCAATAAAAAGCTTTCTCCCTTTATCAAACATGAGATTTCTTCAGAGAGTTTAATTACATATATTGATCTGATTAATACTTCAGACCAAATCAATCAAATCCAAAAAATTATTTCATCAATACAGGAAGAAAAATATTGCAAACTTTTTGCAAAAACTAATGAAATAACTAATCGTAGCTCCTATAACTCTTAA

SEQ ID NO: 2632 - protein, 509 aa, Streptococcus agalactiae
MIENYLEKDILNQIKLLTLCYDYYPSITLDKSCHQLGLSELLIRKYCHDLTTLFNSQLSLNIEKSTIVYQSNGVTREQAFKYIYHQSHVLQLLKFLITNDSGRLPLTYFSEKFGLSCATAYRIRKHISPLLEKLGFQIVKNTITGDEYRIRYLIAFLNAQFGIEVYPMSKMDKLLIKRLLLEHSTTFTASHYFPNTFIFFDTLLSLSWKRINYNVVVPYSSLFTELQNIFIYDTLQYCVKNVIIDSFKINLKKDDIDYIFLAYLTSHNSFSNPNWTEKRIDNVIAIFENYPKFQKLLQPLKDALPLSGSYHDELVKVAIFFFRTFILGLNQLIPETISFPSWNYHRHDKLTTILRPIITNWLSKIGEYTFKEQHFLLLCTHLERIIKNHIPPIQIAVLTTDFINNQILTECLLQRFSSKKIHFHPYYLLTDDLSNITNLNPDIIITNKKLSPFIKHEISSESLITYIDLINTSDQINQIQKIISSIQEEKYCKLFAKTNEITNRSSYNS

SEQ ID NO: 2633 - protein, 1140 aa, Streptococcus agalactiae
ATGGAAAATAAGGTAAAAACAGTTGCTGTTTTCTCAGGATATTATCTACCCTTCCTCGGAGGTATTGAACGTTATACAGATAAAATGACAGCAGATTTGGTTAAGCGTGGCTACCGTGTTGTTATTGTAACAACTAATCATGGTGATTTACCGATTATAGATGAAGACAAGGGTAGAAAAATTTACCGTTTACCGACCAAAAATATTGTCAAGCAGCGCTATCCTATTATTAACAAAAATCGAGAATACAACACGCTGATGAAATATGTTTCAGATGAAAATATTGATTTTGTGATTTGTAATACACGTTTTCAGTTAACAACGCTAGAAGGGCTATCTTTTGCAAAGAATCACCATTTACCTAGTATTGTTTTAGACCATGGGTCAAGTCATTTTTCTGTCAATAATCGTTTTTTAGATTTCTTTGGAGCTATCTATGAACATCTTCTCACAGCGCGTGTTAAGCATTATCGTCCAGATTTTTATGCGGTATCCAAGAGAAGCGTTGAATGGTTAAAACATTTTAATATAGAAGCTAAAGGAGTTATTTATAATTCGGTATCTGAAAGTCTAGGCTCTGATTTTGCTGGTACGGCTTACCTTGAAAAATCTGCTGATGATATTTTCATCACTTATGCTGGTAGAATTATTAAAGAAAAAGGCATTGAATTGCTCTTAGAAGCATTTTCGATGTCACAGTACTCTGAAAATGTTTATTTACAGATTGCAGGAGACGGACCTGAATTAGCACATTTGAAAGAGAAATATCAGTCCAAACAGATTAACTTTTTGGGGAAATTAAACTTTGAACAGACTATGTCTTTAATGGCACAGACTGATATCTTTGTTTACCCTTCAATGTATCCAGAGGGATTACCAACCTCTATTTTAGAAGCTGGTCTACTTTCAAGTGCTATTATTGCAACAGATCGCGGTGGAACAGTTGAAGTTATTGATAGCCCTGAGTTAGGAATCATCATGGAAGAAAATACTCAGTCACTCCATGAATCTCTTGATTTATTAGTAAAAGATAAGGCATTAAGAGAGAAACTACAACAGAATATTGCTAAAAGAATTAAAGAACATTTCACATGGGAAAAAACAGTTGAAAAGTTGGATTATATTATTCAAAAAAATTAA

SEQ ID NO: 2634 - protein, 379 aa, Streptococcus agalactiae
MENKVKTVAVFSGYYLPFLGGIERYTDKMTADLVKRGYRVVIVTTNHGDLPIIDEDKGRKIYRLPTKNIVKQRYPIINKNREYNTLMKYVSDENIDFVICNTRFQLTTLEGLSFAKNHHLPSIVLDHGSSHFSVNNRFLDFFGAIYEHLLTARVKHYRPDFYAVSKRSVEWLKHFNIEAKGVIYNSVSESLGSDFAGTAYLEKSADDIFITYAGRIIKEKGIELLLEAFSMSQYSENVYLQIAGDGPELAHLKEKYQSKQINFLGKLNFEQTMSLMAQTDIFVYPSMYPEGLPTSILEAGLLSSAIIATDRGGTVEVIDSPELGIIMEENTQSLHESLDLLVKDKALREKLQQNIAKRIKEHFTWEKTVEKLDYIIQKN

SEQ ID NO: 2635 - protein, 849 aa, Streptococcus agalactiae
ATGAAATATTTAGCGGGTATTGTCACCTTTAACCCCAATATTGAACGCTTAGATCAGAACATTCGAGCAATTTATCCTCAAGTAAGCCACATCTATATCGTAGATAATGGCTCGAAAAATAAGGAAGAAATTTCTCAATTAGTAGCCGATTATAATGAAGAGGGGCACCTAACTGTTGATTATTTAACAGAAAATAAAGGGATTGCATATGCTTTGAACTGTATCGGTCAATTTGCAGTAGCACAAGAATTTGATTGGTTCTTGACTTTAGATCAAGATTCGGTTGTCCTAGGTGATTTGATAGATAATTATGAAAATTACCTTCATTTACCTAAGGTCGGTATGTTATCTTGTTTGTATCAAGATATGAACCGTGAAAATTTAGTGATGCAAGAATTTGACTATAAAGAAATTGAAGAGTGTATTACTTCGGCTGCTTTAATGAAAACGAGCGTTTTCGAAGAAACATCTGGCTTTGCAGAAGAGATGTTTATTGATTTTGTTGACTCTGAAATGAATTATCGTCTGTCAGAGATGGGATATAAGACTTATCAGGTTAATTTTATTGGTCTGTTACACGAAATTGGACACTCTTCACGAGTTAAAAAATTTGGCCATGTTTTTCATGTATTGAATCATTCACCATTTCGAAAATATTACATGATACGCAATGCGATCTATATTATAAAAAAATATGGTAAGAAGAAGCGATACAAATATTTAGTATTTATGCGAAATGAATTTGTTCGAGTGTTGGTAGCAGAAGAGCAAAAGAGCAAAAAAATAGTTGCTATGATTAAAGGCTTAAAAGATGGCTTATTGATGAAAGTGGATAAATATGGAAAATAA

SEQ ID NO: 2636 - protein, 282 aa, Streptococcus agalactiae
MKYLAGIVTFNPNIERLDQNIRAIYPQVSHIYIVDNGSKNKEEISQLVADYNEEGHLTVDYLTENKGIAYALNCIGQFAVAQEFDWFLTLDQDSVVLGDLIDNYENYLHLPKVGMLSCLYQDMNRENLVMQEFDYKEIEECITSAALMKTSVFEETSGFAEEMFIDFVDSEMNYRLSEMGYKTYQVNFIGLLHEIGHSSRVKKFGHVFHVLNHSPFRKYYMIRNAIYIIKKYGKKKRYKYLVFMRNEFVRVLVAEEQKSKKIVAMIKGLKDGLLMKVDKYGK

SEQ ID NO: 2637 - protein, 1425 aa, Streptococcus agalactiae
ATGAAACTTTTGAAAAATATGTTTTATAATACCTCATACCAGTTATTGACTTTGTTGTTACCTTTAGTAACAGTTCCTTATGTTTCCCGTGTACTATCTCCTCAAGGCATCGGTATTAATGCCTATACGAGCTCCATTGTCATGTACTTTACTTTATTTGGTGCTTTAGGGATATCTTTGTACGGTAATCGTGAGATAGCTTTTGTGCAGTCAAATAAGTATAAGAGAAGTAAGATATTTTGGGAATTAGTTGTATTAAAACTTGCCTCTGTATCTATAGCAACGTTATTATTCTTTGGATTTGTCTTACTTACAAACGAATGGCAATTATTCTATTTAATTCAAGGTATTAATTTATTAGCGACTGCAACTGATATTTCGTGGTATTTTATTGGAGTTGAAGACTTTAAGATAATTGTCATTCGTAATACCATTGTTAAGCTTATTACAGTTGTTTTGACCTTCTTAGTTGTGAAGACGCCAGATGACCTAGCACTTTATATGTTTTTAATTGCATTTGCATCATTACTCGGAAATTTAACAGTCTGGCATCATTTAAAGCATGAAATCATCAAGATACCATTTAGTAGATTAGATATCTTAATACATCTAAGACCAACTTTAATGTTATTTTTACCCCAAATCACCATGCAGATTTATCTCTCTCTTAACAAGAGTATGCTGGGAGCAATGGATAGTGTGGTCAGTGCTGGATATTTTGATCAATCTGATAAAATTATTCGTATTTTATTTACCATTGTTTCAGCAATCGGAGGAGTTTTCTTACCAAGGCTCTCCAGTCTATTTTCTTCAGGAAAAGAAAAGCAAGCTAAGGCTTTACTTTTGAAACTTGTTGATTTAAGCAATGCTATCTCAATGTTAATGATTGCGGGAGTGGTAGGAGTTTCGTCGACATTTGCCGTCTTCTTTTTTGGGAAAGGGTATGAAGCTGTCGGTCCGCTAATGGCTGTTGAGTCTTTGATGATCATTTGCATTTCTTATGGTAACGCTTTAGGGACACAGTATCTACTGGCTTCAAGACGTACAAAAGCTTACACAATGTCTGCAGTTATTGGACTTGTGGCAAATGTTGTGCTTAATATACTTTTAATACCAATTTTAGGTGCTATGGGAGCTATTATCTCTACAGTTATTACTGAATTTATTGTCTCCCTATATCAAGCTATCTCTTTAAGAGATGTATTTACTTTTAAAGAATTAACAAGAGGAATGCTGCGCTATTTAATTGCTGCTACTCTTAGTGGAGCTGTACTCTATTATATCAATACTCAAATGTCAGTATCATTGGTAAATTATGTCATTCAAAGTTTAGTAGCAGTAACTATCTATGTCGGTATCGTTTTTATAACCAAAGCACCAGTCATTCAGTTATTTAGAGATTTTAGAAAAGAGCATAGAACATGA

SEQ ID NO: 2638 - protein, 474 aa, Streptococcus agalactiae
MKLLKNMFYNTSYQLLTLLLPLVTVPYVSRVLSPQGIGINAYTSSIVMYFTLFGALGISLYGNREIAFVQSNKYKRSKIFWELVVLKLASVSIATLLFFGFVLLTNEWQLFYLIQGINLLATATDISWYFIGVEDFKIIVIRNTIVKLITVVLTFLVVKTPDDLALYMFLIAFASLLGNLTVWHHLKHEIIKIPFSRLDILIHLRPTLMLFLPQITMQIYLSLNKSMLGAMDSVVSAGYFDQSDKIIRILFTIVSAIGGVFLPRLSSLFSSGKEKQAKALLLKLVDLSNAISMLMIAGVVGVSSTFAVFFFGKGYEAVGPLMAVESLMIICISYGNALGTQYLLASRRTKAYTMSAVIGLVANVVLNILLIPILGAMGAIISTVITEFIVSLYQAISLRDVFTFKELTRGMLRYLIAATLSGAVLYYINTQMSVSLVNYVIQSLVAVTIYVGIVFITKAPVIQLFRDFRKEHRT

SEQ ID NO: 2639 - protein, 1365 aa, Streptococcus agalactiae
ATGAACCTCAAAAAAGTTCGTCTATTTGAAAAGTTTTTTCTAGACAAGAACTTGCATAAAACATATTTTATATTAGGCTTAACGATTACTATTGTATTGAGCCTATTAATGCCATTTTTCAATGAACCTGATGGACAATACCATTTAGCTGTGTCTGGTCGTATTTCAAATAACATTATTGATACTTCTTACTATGGAGAATATAATATTGATTCAGGTATGAGACGACAATCGACCTCCTATAGAGATGGTACTAGATTTGAAAAATACTATTTAAATAAAGCCAATTTTGTTGATGGTAATCATTTGCCTCGTGAGATAAACTATTCTAAACATAACTTTGTTTTTTGGGGTCATCTTGTGCCAGCAGTTGGCTTATTTTTAGGCAAATTTGTGTATCCTTCTATGGGGGTAATGATTACAGTAGCAAGGTTATTTAGTTCCTTTGTCTCAATCACCTTGGTTGCCCTCATTATCCGGTATGTGAAAAAAGGAAAGTTAATCTACTTTGCTATTTTCCTCAGTCCCGTAGTTCTAAATTCATTTGCTAGTCTATCTTATGACTCGACTGGATATATTGTATTTGGAGCATTTTTATCGCTTTTGATAAATCTTTTAGTTGATAAATCGTTGACTAAAAATCTTAGTATTGCTCTTATAGGATTGATTCTTTTAGTCATTGTTGCATGTAAGCAGAATTACTGGCTGTTTTTATTGCTAGTAATACCGGTATTATTGCAGGTTAACAATCCTAAATTAATGGGCTATAATCAGAAGCTATCACATTTATTTCAAGGTCTTAAATCTAAAAAGCTATTTTGGCTATGTCTAACCTTTTTGTCACTTGCTATAGTTTATGTTCTGACCGCAAGACATGGTGGTGTCCTTGCTGTTTTAAGACGTTATGTAATGACATTTGGCTATAATTATGCTGGTATCAATATTTTAAGTAATGACATTACTTCCTGGCTTGCCTCTCCATATCCAAGTCAGAATTTTATTCCCACTTGGGTATCATCAGTATGGTATCTCATGGTCTTTCTAGTATGGTTTTCTGAAGAAAAATTTGTTAAGTCAAAAAATATGGGATTTCTTTTCTTAGCTAGTTTCTTTGTGGGAATTCTTGGTGTCTTTTTTATCATGTTAGAATATCGTGGAGCGCCAACAAGCTACATTGAAGGAGTTCAAGGACGTTACTTTACTGTTACATTGCTTTTGGTACAAGTTTTTGCATCAAGTATTCCAGCGCGTCTAAATGAGGCAGGAAGGAAAGTGGTGCCGTATGCGTTAACTGGCTTGGTAATTGTATCAAATGCCTTATTGTTATTTGATACTGTTATTAGTTTAATTATGAGGAGAAACTAA

SEQ ID NO: 2640 - protein, 454 aa, Streptococcus agalactiae
MNLKKVRLFEKFFLDKNLHKTYFILGLTITIVLSLLMPFFNEPDGQYHLAVSGRISNNIIDTSYYGEYNIDSGMRRQSTSYRDGTRFEKYYLNKANFVDGNHLPREINYSKHNFVFWGHLVPAVGLFLGKFVYPSMGVMITVARLFSSFVSITLVALIIRYVKKGKLIYFAIFLSPVVLNSFASLSYDSTGYIVFGAFLSLLINLLVDKSLTKNLSIALIGLILLVIVACKQNYWLFLLLVIPVLLQVNNPKLMGYNQKLSHLFQGLKSKKLFWLCLTFLSLAIVYVLTARHGGVLAVLRRYVMTFGYNYAGINILSNDITSWLASPYPSQNFIPTWVSSVWYLMVFLVWFSEEKFVKSKNMGFLFLASFFVGILGVFFIMLEYRGAPTSYIEGVQGRYFTVTLLLVQVFASSIPARLNEAGRKVVPYALTGLVIVSNALLLFDTVISLIMRRN

SEQ ID NO: 2641 - protein, 927 aa, Streptococcus agalactiae
ATGGCAACATATAATGGTCAAGGTTTCATCCACGATCAGCTAGATTCAATTAGAAATCAAACGTTGAGACCAGACTATGTCTTAATGAGGGACGATGGCTCTACTGATGATACTGTAAAGGTGGTTGAAGACTATATAAAAGAGCACCGTTTAGATGGTTGGTCAATAACTAGTAATGATAAAAATTTAGGTTGGCGTTTAAATTTTCGTCAATTACTTATTGATGTGTTAGCCTATGAGGTTGACTATGTCTTTTTTAGTGATCAAGATGACACATGGTATCATCATAAAAATAAGATGCAAGTTGATATTATGGAAGAACGCCAAGATATAAACCTTCTTAGCGCCGATATTGATATCAAAAAGTTATCAGAAGAGGCTACTATTCCCAATAATTTTAAGTTCAATGGTGAGGAAACAATTTCTAAGTATCCATTAGACTTTTCATATCATAACTATCGTCAAGGTTGGACTTTTTGTTTACGCAAGTCGTTTGTTGATCAAGTAATGACTTTTTACAGTGATAATTTAATTTTGTCACATGATAATCTTTTTGCAGGGGTATCTGGTGTCATTGGTTCAGGTTACAATTTAAACAGAAGTGTTGGTGAACATAAGCGACATGCTGAGAATGCAAGTGGGAATATCTTGAATATGAGCTCAAGTTACGAAAGGCATTTACAAGAACTGTATTTTGTTTTGAGTTACTATATCATCCTTGTACCATTTTTAGAAAAAAGTAGCTCTAGTCAATTAAGGGAAGCTAAAGCTTATCTGGATTTTAATCAGCAACGTTATAAAAATGCTCAAAATAAAGATTTTGTAGCAATACTTAAACAAATGATGACTAAAAAACGGTTCTATGATAGCTTTTCAAATCGCATTCGTGACTTGGTGTTTTTATTAAAAGATATAAAAAGGAGTTAA

SEQ ID NO: 2642 - protein, 308 aa, Streptococcus agalactiae
MATYNGQGFIHDQLDSIRNQTLRPDYVLMRDDGSTDDTVKVVEDYIKEHRLDGWSITSNDKNLGWRLNFRQLLIDVLAYEVDYVFFSDQDDTWYHHKNKMQVDIMEERQDINLLSADIDIKKLSEEATIPNNFKFNGEETISKYPLDFSYHNYRQGWTFCLRKSFVDQVMTFYSDNLILSHDNLFAGVSGVIGSGYNLNRSVGEHKRHAENASGNILNMSSSYERHLQELYFVLSYYIILVPFLEKSSSSQLREAKAYLDFNQQRYKNAQNKDFVAILKQMMTKKRFYDSFSNRIRDLVFLLKDIKRS

SEQ ID NO: 2643 - protein, 936 aa, Streptococcus agalactiae
ATGGTAAAGACAGCAGTTTTAATGGCGACATACAATGGCGAAAAATTTATATCTGAACAACTTGATTCAATTCGCCAACAGACATTAAAACCAGATTATGTATTATTGAGGGATGATTGTTCAACGGATGAAACAGTCAATGTCGTCAATAACTATATCGCAAAACATGAGTTAGAAGGCTGGAAAATTGTTAAAAACGACAAAAACTTAGGCTGGCGTTTAAATTTTCGTCAATTACTTATTGATGTGTTAGCCTATGAGGTTGACTATGTCTTTTTTAGTGATCAAGATGATATTTGGTATCTTGATAAAAACGAACGACAGTTTGCCATTATGTCAGATAAACCTCAAATTGAGGTTTTGAGTGCAGACGTTGATATCAAAACGATGTCTACAGAAGCCAGTGTTCCACATTTTCTAACTTTTTCTTCTAGTGATAGAATCAGTCAGTATCCTAAAGTATATGATTATCAAACATTCCGTCCCGGATGGACCATTGCTATGAAGAGAGATTTTGCGCAAGCTATCGCTGATAATTGGACTTTTGGAGCTAATATTTCGCACGATAATCTTATCGAGACAACTGCCAGTATTATTGGAAATGGTTATAACCTTAACGAAAGCGTAGGAGTTCATATTCGATATGGAGGAAACGCAAGTGGTAATAGCAAATTTGTTTTGAATTGGAAGTCGCCTAAAACACAACATATCACAGGATTAAAAACATTTGTTGATTTTTACGAAACCATGCAGAAGGTTGTCAACAAATATCAAAATGATGTCGCTTTAAATCAACGCTTAGCCTTTGAAAAAGAAAGATTGGAAGCTTCTAAATTGTCATTAATTCATAATAGTGCTTTTGTGATTAAAAATTGGCGACTCTATAACTCTAATAGTGGACGTATGAGAGATTTATTATTTGCGTTTAAAAAGTAA

SEQ ID NO: 2644 - protein, 311 aa, Streptococcus agalactiae
MVKTAVLMATYNGEKFISEQLDSIRQQTLKPDYVLLRDDCSTDETVNVVNNYIAKHELEGWKIVKNDKNLGWRLNFRQLLIDVLAYEVDYVFFSDQDDIWYLDKNERQFAIMSDKPQIEVLSADVDIKTMSTEASVPHFLTFSSSDRISQYPKVYDYQTFRPGWTIAMKRDFAQAIADNWTFGANISHDNLIETTASIIGNGYNLNESVGVHIRYGGNASGNSKFVLNWKSPKTQHITGLKTFVDFYETMQKVVNKYQNDVALNQRLAFEKERLEASKLSLIHNSAFVIKNWRLYNSNSGRMRDLLFAFKK

SEQ ID NO: 2645 - protein, 1059 aa, Streptococcus agalactiae
ATGATGATTAAATTTAGTAATAAAATTGTACAAGAAGATTTAGCACTTATTAGTAACCAAAATTATATTAATTGGGAAAGAATTGCTAATAAAGGCGTTTTAATAAGTGGTTCTAATAGTATGTTAGCGAGTTATATGGTATTTTTACTAGCCTATCTCAATGAGACAAGAAATTACCAAACGCAAATTATTGCGACAGCTAGAAACATTGAAAAAGCCCGTGATAAATTTTCAGATTTAGTTGGGAAAGATTATTTCACCTTAATTCCTTATGATGTAGAAGAACGCCTAGAGTATGATGGAAAAGTGGATTACATTATCCATGCAGCAAGCAATGCTAGTCCAACTGCTATTTTGAGTAATCCTGTTAGCATCATAAAAGCTAATACAATTGGTACATTGAATTTATTAGACTTTGCAAAGGAAAAAACAATTGAAAACTTCTTGTTCTTATCAACGCGTGAAGTATATGGAACATCTATTAAAGAAGTGATTGATGAAGAAGCTTATGGTGGATTTGATATTTTAGCTACTAGAGCTTGTTACCCAGAAAGCAAACGTATGGCTGAAACTCTACTGCAAAGTTACTATGATCAATATAAGGTACCCTTTACTATTGCTCGTATTGCACATTCATTTGGTCCTGGTATGGAGCTTGGTAACGATGGTCGTATTATGAATGATCTTTTATCGAATGTCATTGATGGCAAAGATATCGTTTTAAAAAGTAGTGGTACAGCAGAGCGTGCTTTCTGTTATTTAGCAGATGCTGTATCAGGGTTATTTACTATTTTATTAAATGGTGAAGTTGGTCAAGCTTACAATGTAGCAAATGAAGATCAACCCATTATGATTAAGGATTTGGCACAAAAGTTAGTTGATCTCTTTTCTGATAAAAATATTTCAGTAGTATTCGATATTCCTAAAACTATGAGTGCAGGTTATAGCAAAATGGGGAGAACACGTCTCACTATGGCCAAATTAGAAGCGTTGGGATGGAAGCGAGAAGTTTCTCTTGAATCTGGAATATTAAAAACAGTACAAGCATTTGAGGAGTAA

SEQ ID NO: 2646 - protein, 352 aa, Streptococcus agalactiae
MMIKFSNKIVQEDLALISNQNYINWERIANKGVLISGSNSMLASYMVFLLAYLNETRNYQTQIIATARNIEKARDKFSDLVGKDYFTLIPYDVEERLEYDGKVDYIIHAASNASPTAILSNPVSIIKANTIGTLNLLDFAKEKTIENFLFLSTREVYGTSIKEVIDEEAYGGFDILATRACYPESKRMAETLLQSYYDQYKVPFTIARIAHSFGPGMELGNDGRIMNDLLSNVIDGKDIVLKSSGTAERAFCYLADAVSGLFTILLNGEVGQAYNVANEDQPIMIKDLAQKLVDLFSDKNISVVFDIPKTMSAGYSKMGRTRLTMAKLEALGWKREVSLESGILKTVQAFEE

SEQ ID NO: 2647 - protein, 720 aa, Streptococcus agalactiae
ATGAATATTGGAGTTATTTTTGCAGGTGGTGTTGGTCGTCGCATGAATACCAAAGGTAAACCAAAGCAATTCCTAGAAGTGCATGGTAAACCCATTATTGTACACACAATTGATATTTTCCAAAATACAGAAGCTATTGATGCTGTAGTAGTTGTCTGTGTATCAGACTGGCTAGATTATATGAATAATCTGGTAGAGCGTTTCAACCTTACGAAAGTAAAAGCAGTTGTTGCAGGTGGAGAAACTGGCCAAATGTCAATTTTTAAGGGGCTTGAAGCCGCTGAACAGCTGGCTACAGATGATGCCGTTGTTTTAATTCATGACGGAGTACGTCCATTGATTAATGAAGAAGTTATTAATGCTAATATACAGTCAGTAAAAGAAACAGGAAGTGCGGTAACTTCAGTTCGTGCTAAAGAGACAGTTGTTCTAGTCAATGATTCTTCTAAAATATCTGAAGTTGTTGATCGTACTCGTTCCTTCATTGCTAAAGCGCCACAAAGTTTTTATCTATCAGATATCCTTTCTGTTGAACGTGATGCCATTAGCAAAGGGATTACTGATGCAATTGATTCTAGTACTTTGATGGGTATGTACAATCGTGAACTCACTATTGTTGAGGGACCATATGAAAATATCAAGATAACAACACCAGATGATTTTTATATGTTTAAAGCTTTGTATGATGCTAGAGAAAATGAACAAATTTATGGGATGTAA

SEQ ID NO: 2648 - protein, 239 aa, Streptococcus agalactiae
MNIGVIFAGGVGRRMNTKGKPKQFLEVHGKPIIVHTIDIFQNTEAIDAVVVVCVSDWLDYMNNLVERFNLTKVKAVVAGGETGQMSIFKGLEAAEQLATDDAVVLIHDGVRPLINEEVINANIQSVKETGSAVTSVRAKETVVLVNDSSKISEVVDRTRSFIAKAPQSFYLSDILSVERDAISKGITDAIDSSTLMGMYNRELTIVEGPYENIKITTPDDFYMFKALYDARENEQIYGM

SEQ ID NO: 2649 - protein, 780 aa, Streptococcus agalactiae
ATGTTAGCTTATATTGATAAAGTTGCGCGTGATAATAAAATTGAATATTCTTTAGGCGGAGGCAGCCTACTGGGAGCAATGAGACATAAAGGATTCATTCCATGGGATGACGATATTGATTTGATGCTAGAAAGAAGCCAGTATGAGCGTTTGATGAAAGCATTAGCTGATGCTAATAATAGCGATTTTAAATTGCTACATCATTCTGTTGAAAAAAATCTATGGCCATTTGCCAAGCTGTATCACACAAAGTCAATGTACTTAAGTAAAACAGATAGAATTCATCCTTGGACAGGGATTTTTATTGATATCTTCCCACTTGACCGATTACCAGAGAGTGCAGAAGAACGTCAAAGATTCTTTAAAAAAGTTCACTCTGCTGCTGCAAATTTGATGTGTACGACTTACCCCAATTTTGCTAGCGGTTCCCGAAAGCTTTATGCAAATGCAAGGCTAATTTTGGGGCTACCCCGATTCATCGCTTATCACGGCCAAGCTAAAAAACGTGCTGAAATTGTTGATCAAGTGATGGAAACATATAATAATCAAGAGGTTCCTTACATGGGTTATACCGATTCAAGATATCGCTTGAAAGAATATTTTCCAAGAGAAATTTTTTCTGAGTATGAAGATGTTATGTTTGAAAACATTAAAACCCGAAAAATTAAAAATGAGCATGCTTATCTGAATCAATTATATGGGGGTAGTTATATGGAATTACCTCCAGAAAGTAAGAGAGAAAGTCATAGTTATTACACTTGGTACTGGAAAGAAGGTTAA

SEQ ID NO: 2650 - protein, 259 aa, Streptococcus agalactiae
MLAYIDKVARDNKIEYSLGGGSLLGAMRHKGFIPWDDDIDLMLERSQYERLMKALADANNSDFKLLHHSVEKNLWPFAKLYHTKSMYLSKTDRIHPWTGIFIDIFPLDRLPESAEERQRFFKKVHSAAANLMCTTYPNFASGSRKLYANARLILGLPRFIAYHGQAKKRAEIVDQVMETYNNQEVPYMGYTDSRYRLKEYFPREIFSEYEDVMFENIKTRKIKNEHAYLNQLYGGSYMELPPESKRESHSYYTWYWKEG

SEQ ID NO: 2651 - protein, 1359 aa, Streptococcus agalactiae
ATGGAATGNNNNNTAGAAGAGCCAAGTGTTTTATATAATCCAGAAAATAAACGTTATAAGTTCACAAATAACAAAGGAAAAGCAATTGGTAATATTCCAGTTGGTTTAACTGCTTTTGAAAACAGCGCAGAAACTCAAGAATATGTGTTGAAAAATATTCAGAAAAACGAAACGATTTATCTTGGTAATACCCGAGTAGATAATCCTCGAGTAACTGTTAATAACAAAAAAAGAGATACTATAGGAGTTGAATACGGTAAACGTATTACTTATAGGATTCCAATTTATTCAAAGCAGCTGACTGTCAGAGTTAGCCCTAATTTTGTAGTAGATAGTACTAATTATAATTACCGACTTTCTCAAGCGCCTATTATTGCGGAAGAAGGTAAAGAGGGACGTTTGTATCCAATAGATAGCAGTATTAGTGTCGATGGTGATAAAATTGTTTTAAATAGTAGTGGTGATGAAACAGAGCAAAAAGAATTATTACAAAATAGCCTGTATAAACTTCACTCTATTGATAAGTTAGACTTTGATTTGACAAATGCTGATATTAAAGAGTTAGAGATTACAGGACATGTTGCTTCAAAAAGAGATTATAATTTGTCTGTTGCTCAGGAAAAGAAAGGCGTCATAGAGACTAAACGGAGTCTAATTTCTGTTGATAATCAAAAACAAGATCAAGGGATTTTTGTCGAGGATTCTAAAGGCTATATAAAGACACCTAGTTTGAGCAGTTATGGTATAAATTTTGCCATGTATGACGACAATCAAAATAGATTATTACAAGGTTCAGAGTATATTTTAGGAAGATTGAATGCAGATAAAAAAGTATCTCTATATCAACCTAATGGCTTTTGGATAAATACTCAAAAAACGATTAAGAGTTTAAATAAAGAATATCTTAACCAAAATGCTTACCATATTAGAGGAAATAACATTATAGGTATTGATGGCTATTCAAATGACATAGACTTGAATCCTAGGTTATGGGCTTATAACTATAAAAAACAAGTGAAAAGTAACCAATCATTATTTAAATTACGAGGTTTGTCTAATAAATATAAGTATTTCTTAATACAGACAAAATCTCCAAAAGGCTACTTACAAAGCAATAAACCATTTTATTTTACAGTAAATAAAGATAGTGTTTCTAAAGCACAATTTGGTAACTATAATATAAATGGTTATATAATGGACATGCAGTACAACAAACAAGAATACAATGCACTTGCAAACACTCCAAAAGGTCAAAAAACAAAGAAAACTTTCAAACCCATGACCCTAGTGATTCTTTTTGCAGTAGCTTTATTTATTTTCTATATTACAGCTATAAGATTTGTATTTAAAAGAATGTGA

SEQ ID NO: 2652 - protein, 452 aa, Streptococcus agalactiae
  VARIANT 3, 4, 5: Xaa = Any Amino Acid
MEXXXEEPSVLYNPENKRYKFTNNKGKAIGNIPVGLTAFENSAETQEYVLKNIQKNETIYLGNTRVDNPRVTVNNKKRDTIGVEYGKRITYRIPIYSKQLTVRVSPNFVVDSTNYNYRLSQAPIIAEEGKEGRLYPIDSSISVDGDKIVLNSSGDETEQKELLQNSLYKLHSIDKLDFDLTNADIKELEITGHVASKRDYNLSVAQEKKGVIETKRSLISVDNQKQDQGIFVEDSKGYIKTPSLSSYGINFAMYDDNQNRLLQGSEYILGRLNADKKVSLYQPNGFWINTQKTIKSLNKEYLNQNAYHIRGNNIIGIDGYSNDIDLNPRLWAYNYKKQVKSNQSLFKLRGLSNKYKYFLIQTKSPKGYLQSNKPFYFTVNKDSVSKAQFGNYNINGYIMDMQYNKQEYNALANTPKGQKTKKTFKPMTLVILFAVALFIFYITAIRFVFKRM

SEQ ID NO: 2653 - protein, 255 aa, Streptococcus agalactiae
ATGAGTAAAAAACATATTTTTATTTGTCTGTTTTTCATGCTTTTTTTAGTAGGTTGCCAAAATAATAAAAAAGTAAAAACAGATAAAAAAGTAGATATTACAGCTTATTATTATCATAATAATACCCCGCAATACAGTGTTCAGATTAATGCTATTCATTTACAAACAGCATTGGATAAAGTGAGGACGGGGGAGTTTGAGAGCAAAGACTTTACACACTATACTTTTGATANNNNNCATTCATTCATTAATTAA

SEQ ID NO: 2654 - protein, 84 aa, Streptococcus agalactiae
  VARIANT 78, 79: Xaa = Any Amino Acid
MSKKHIFICLFFMLFLVGCQNNKKVKTDKKVDITAYYYHNNTPQYSVQINAIHLQTALDKVRTGEFESKDFTHYTFDXXHSFIN

SEQ ID NO: 2655 - protein, 354 aa, Streptococcus agalactiae
ATGAGTTTAGCATTGCAAATTGAAATGTTTATTTTAGCCATTGTCCTACTTTATATGATTATAAGAATGGTTAATAAAAACACATTTTCTGTTAAACGTTCTTTACCTTGGCTATTAGTTGGTTTAATTCTAGTCTTTATTAGTGTATTTCCTGGGGTGGTCTCATTTATCGCTCATCACCTTGGATTCGCTTTAACGATGAATTTCTTGTTATTTGGTGCTATTTTATTTCTGTTTTGTTTAGAATTATTTGATACTAGTAGCAATACCAAAAGAGATGAGCAAATTAAACGCCTGATTCAAGAGGTTTCTTTGTTGAAAAAAGAGATAGAGGATAGCACTTTAGATGAGTAA

SEQ ID NO: 2656 - protein, 117 aa, Streptococcus agalactiae
MSLALQIEMFILAIVLLYMIIRMVNKNTFSVKRSLPWLLVGLILVFISVFPGVVSFIAHHLGFALTMNFLLFGAILFLFCLELFDTSSNTKRDEQIKRLIQEVSLLKKEIEDSTLDE

SEQ ID NO: 2657 - protein, 675 aa, Streptococcus agalactiae
ATGGAATGNNNNNCTATTGTAGATTTTAAGGCGTCTCGCTCACTACCTTTTGAGCTGGATTATATTGTTATTAACGATGGGTCAACCGATGGTACTCCAGAGTTATTAGATAGATTGGGTTTAAATCATATTGACCTTGTTCAAAATCTAGGTATTGGTGGCTGTGTGCAGACAGGATACTTATACGCTAATCGTAATCATTACGATGTTGCCGTTCAATTTGATGGTGATGGTCAACATGATATTAGAAGCATTGAAGATGTTGTTATGCCAATCTTAAATGACGAAGCAGATTTTGTTATTGGTTCTCGCTTTGTTGATAAAAAACATCAAAATTTTCAATCGACAGCAATGAGGCGTCTTGGCATAAATTTAATATCTGCTGCTATAAAATTAACGACGGGACACAAAGTCTATGATACAACAAGTGGTTATAGGGCAGCCAACGCGGCGCTAATAGCTTATTTATCGTGTCATTATCCAGTACAATACCCAGAGCCTGAATCAACTGCTCGGATTTTGAAAAAAGGCTATCGTTTGAAGGAAGTCACAGCTAATATGTTTGAACGTGAGGCAGGTACTTCAAGTATAAGTTCCCTAAAATCGATTTTTTATATGACGGATGTTTTAACATCAATTATTATTGCAGGGTTTATTAAGGAGGATGATAAATGA

SEQ ID NO: 2658 - protein, 224 aa, Streptococcus agalactiae
  VARIANT 3, 4, 5: Xaa = Any Amino Acid
MEXXXIVDFKASRSLPFELDYIVINDGSTDGTPELLDRLGLNHIDLVQNLGIGGCVQTGYLYANRNHYDVAVQFDGDGQHDIRSIEDVVMPILNDEADFVIGSRFVDKKHQNFQSTAMRRLGINLISAAIKLTTGHKVYDTTSGYRAANAALIAYLSCHYPVQYPEPESTARILKKGYRLKEVTANMFEREAGTSSISSLKSIFYMTDVLTSIIIAGFIKEDDK

SEQ ID NO: 2659 - protein, 858 aa, Streptococcus agalactiae
ATGGCAGAGAAAAAAGGAAATACAACTTTTAATGTTCAAGTTGCGGATTTTATTCGCAATCATAAAAAACAAGGTACTGCAATTGATGATGAGGTAACAGAAAAACTTGTTATTCCTTTTGTTTTAGATGCAGATCAAATTGATGATTTGTTAGAACGATTGACAGACGGTGGCATTTCAATCACAGATAAAGAAGGCAATCCTTCAACAAAGTATGTGGTAGAAGGGCCAAAACCTGAAGAATTGACTGATGAAGAGCTCATAGGAAGTAATTCTGCTAAAGTCAATGACCCAGTACGTATGTACTTGAAGGAAATTGGTGTTGTTCCTCTTTTAACGAATGAAGAAGAAAAAGAATTGGCTGTTGCGGTTGCTGAGGGAGATTTAATGGCTAAACAACGTTTAGCTGAAGCAAACCTTCGTCTTGTTGTCTCAATTGCAAAACGTTATGTTGGACGTGGAATGCAATTTCTTGATTTAATTCAAGAGGGTAACATGGGGCTCATGAAAGCTGTTGATAAATTTGATTATTCAAAGGGATTCAAATTTTCAACTTATGCAACATGGTGGATTCGTCAAGCTATAACACGTGCAATTGCAGATCAAGCACGTACGATTCGTATTCCTGTTCATATGGTTGAAACGATTAATAAATTGGTCCGTGAACAACGTAATCTTCTTCAAGAACTTGGTCAAGATCCAACTCCTGAGCAAATCGCAGAACGCATGGATATGACACCAGATAAAGTACGTGAAATCCTAAAAATTGCTCAAGAGCCGGTATCGCTAGAAACGCCAATCGGTGAGGAAGATGATAGCCATTTGGGTGATTTCANNNNNCATTCATTCATTAATTAA

SEQ ID NO: 2660 - protein, 285 aa, Streptococcus agalactiae
  VARIANT 279, 280: Xaa = Any Amino Acid
MAEKKGNTTFNVQVADFIRNHKKQGTAIDDEVTEKLVIPFVLDADQIDDLLERLTDGGISITDKEGNPSTKYVVEGPKPEELTDEELIGSNSAKVNDPVRMYLKEIGVVPLLTNEEEKELAVAVAEGDLMAKQRLAEANLRLVVSIAKRYVGRGMQFLDLIQEGNMGLMKAVDKFDYSKGFKFSTYATWWIRQAITRAIADQARTIRIPVHMVETINKLVREQRNLLQELGQDPTPEQIAERMDMTPDKVREILKIAQEPVSLETPIGEEDDSHLGDFXXHSFIN

SEQ ID NO: 2661 - protein, 1149 aa, Streptococcus agalactiae
GTGAAGTCATTGCGTTTTCAGGACGAGTTTGGACTCAAGAGGACATTGATAGAAACCAAGCTAAATATAAAAATTCTCGTGCCACCCCTATTTTTAATAAGTCTTACGAGCTTTACCATTAGATAAAGCGCGTGCTGTAATAATAAAGCACACGAAGTTTACCTAATGGAAGGCTTTATGGATGTTATTGCAGCTTATCGTGCAGGAATTGAGAATGTTGTTGCTTCTATGGGGACCGCTTTAACCAATGAACATGTTAGACACCTTAAAAGATTTACTAAGAAAGTTGTTCTGACTTATGATGGTGATAGAGCTGGTCAAAACGCAATTGACAAGTCTTTAGAACTGCTATCAGATATGACTGTTGATATCGTTAGGATACCTAATAAAATGGACCCTGATGAATTTCTACAAGCAAATTCAGCAGAAGATTTTAAACAACTCTTAGAAAATGGGCGCATCAGTAATACAGAGTTTTATATCCACTACTTAAAGCCTGAAAACACCGATAATTTACAATCTGAAATTGCTTATGTTGAAAAAATAGCGAAATTAATTGCTAAATCTCCATCGATAACAGCACAAAATTCATATATTACAAAAGTGGCTGAACTCTTGCCAGATTTTGATTATTTTCAAGTAGAACAATCGGTTAATAACGAACGATTGCATCATAGAAGTCAACAGCAAGCTTCATCTTCAGTACAAACAAGTGCTACAGTGCAATTACCACAGACAGGTAAGTTATCAGCTATCACTAAAACAGAAATGCAATTGTTTCATCGATTATTGAATCATCCCTACCTGTTAAATGAATTCCGTAATAGGGATAATTTTTATTTTGATACAACAGAAATACAAGTTTTATATGAGTTGCTAAAAGAAAGTGGTGAGATCACGTCTTATGATTTATCACAAGAAAGTGACAAAGTTAATCGTACTTATTATATAATTTTAGAGGAACAATTACCTGTAGAAGTATCTATTGGAGAGATTGAAGCCGTCGAAAAGGCACGTGACCGTTTATTGAAAGAACGTGATTTAAGAAAACAAAGCCAGTTAATTAGACAATCTAGTAATCAAGGTGATGAAGAAGGAGCCTTGGCTGCATTAGAAAATTTAATTGCTCAAAAAAGAAATATGGAATGA

SEQ ID NO: 2662 - protein, 383 aa, Streptococcus agalactiae
MKSFAFSGRVWTQEDIDRNQAKYKNSRATPIFNKSYELYHLDKARAVINKAHEVYLMEGFMDVIAAYRAGIENVVASMGTALTNEHVRHLKRFTKKVVLTYDGDRAGQNAIDKSLELLSDMTVDIVRIPNKMDPDEFLQANSAEDFKQLLENGRISNTEFYIHYLKPENTDNLQSEIAYVEKIAKLIAKSPSITAQNSYITKVAELLPDFDYFQVEQSVNNERLHHRSQQQASSSVQTSATVQLPQTGKLSAITKTEMQLFHRLLNHPYLLNEFRNRDNFYFDTTEIQVLYELLKESGEITSYDLSQESDKVNRTYYIILEEQLPVEVSIGEIEAVEKARDRLLKERDLRKQSQLIRQSSNQGDEEGALAALENLIAQKRNME

SEQ ID NO: 2663 - protein, 716 aa, Streptococcus agalactiae
TTGAAAAAGCTTTTGAAAAAATTTACACAGAAAAGAAAAAATGATATAATCAAATGTAAAACTATAATGGGTTATTTCTGTGGAGGTCATGACTTGGCAATTGATAAAGAAAAAATTTCTGAAATCAAGAACAGTGTTAACATTGTTGATGTCATCGGTGAAGTTGTCGGTTTGACAAAAACAGGACGCAATCATCTTGGTTTATGCCCATTTCATAAAGAAAAAACGCCATCTTTTAATGTTATCGAAGATAGGCAGTTTTTTCATTGTTTTGGTTGTGGTCGCTCTGGTGATGTCTTTAAATTTGTGGAAGATTACCAACATATTAGTTTTTTAGATAGTGTACAAGTTCTAGCTGAACGTTCAGGAATACCTCTAGATACTAATTTTAAGGGGCAAGTTCCTAAAAAACCTAAAGCTAATCAGTCGCTTTTAGATATTCATAGAGTTGCTTCGGGATTTTACCATGCCTATTTAATGACAACTAATGATGGTGAACGCGCTAGACAATACCTTGCCGAGCGCGGAGTGACAGAGGACTTAATTAAACATTTTCAAATAGGATTATCGCCGGGAGGGCAGGATTTTCTATATCGTCGTCTGGCAAAAGAGTTTGATGAAAAAACTTTGATGTCTTCTGGTTTGKTCAATTATTCAGAAAATAGCAATCAGTTTTACGATTCATTTAATAATAGAATTATGTTTCCGTTAACTAA

SEQ ID NO: 2664 - protein, 238 aa, Streptococcus agalactiae
  VARIANT 216: Xaa = Any Amino Acid
MKKLLKKFTQKRKNDIIKCKTIMGYFCGGHDLAIDKEKISEIKNSVNIVDVIGEVVGLTKTGRNHLGLCPFHKEKTPSFNVIEDRQFFHCFGCGRSGDVFKFVEDYQHISFLDSVQVLAERSGIPLDTNFKGQVPKKPKANQSLLDIHRVASGFYHAYLMTTNDGERARQYLAERGVTEDLIKHFQIGLSPGGQDFLYRRLAKEFDEKTLMSSGLXNYSENSNQFYDSFNNRIMFPVN

SEQ ID NO: 2665 - protein, 378 aa, Streptococcus agalactiae
ATGATTAAAGAACTAAAAGAATTTTTATTTAAGGGTAATGTTTTAGACCTTGCTGTTGCTGTTATTTTAGGTGCAGCTTTTAATGCTATCATCACTTCACTTGTTAAAGACGTTATTACACCGCTTATCCTTAATCCTGTATTAAAAGCTGCTGGCGTTTCAAATATCGCACAGCTTTCATGGAATGGTGTTGCTTACGGTAATTTCTTAAGTGCAGTTATTAATTTCTTAATCGTTGGTACTACTTTATTCTTCATCGTTAAAGCTGCTAACAAGGTTATGGCTAAGAAACCTGCTGAAGAAGAAATTATTGAAGTTGTTGAACCAACACAAGAGCAATTACTTGCTGAAATCCGCGACTTACTCGCTAACAAATAA

SEQ ID NO: 2666 - protein, 125 aa, Streptococcus agalactiae
MIKELKEFLFKGNVLDLAVAVILGAAFNAIITSLVKDVITPLILNPVLKAAGVSNIAQLSWNGVAYGNFLSAVINFLIVGTTLFFIVKAANKVMAKKPAEEEIIEVVEPTQEQLLAEIRDLLANK

SEQ ID NO: 2667 - protein, 171 aa, Streptococcus agalactiae
ATGGAATGNNNNNGTAAAAACGAATCACTTGACGATGCACTTCGTCGTTTCAAACGTTCTGTGACTAAAGCTGGTACTCTTCAAGAATCACGTAAACGTGAATTCTACGAAAAACCTTCTGTAAAACGTAAACGTAAATCAGAAGCAGCTCGCAAACGTAAAAAATTCTAA

SEQ ID NO: 2668 - protein, 56 aa, Streptococcus agalactiae
  VARIANT 3, 4, 5: Xaa = Any Amino Acid
MEXXXKNESLDDALRRFKRSVTKAGTLQESRKREFYEKPSVKRKRKSEAARKRKKF

SEQ ID NO: 2669 - protein, 1020 aa, Streptococcus agalactiae
GTGTTTTTACTATTATGTATTTTATCGATGTGGCTCATGATTTTTGGGGTTGCATTCTATTACTTTGGGTCGCTACATCAATCATTGACTTCAAGGATTATTTATCAGTTTGTACTTACTGTTTTGCTAACGACAACAGCTTGGTTCATGGGTGCCTATTTTTTAGCATTTGAAGGTCATTTTAAAACTGTCTTTCAATTCCAAGAAGCAGATGGTAAACAAATTGTAAATTGTTTATTTCAACTTTGTTTCGCCCTTTACGCAGTAGTAATGCTTATTGGGTCAATTATTGATAGAGTTCAGACGAAGCGACTTTTATTAGCTGTTGTTTCTTGGCTTTTCTTGGTGTATACGCCCTTAGCTTATTTAATTTGGAATTCAGAGGGTGTTTTTGCAAAGATGGGAGTACTTGATTTTTCAGGCGGAATGATCGTTCATTTATCTGCAGGGCTTTCTTCGTATATTTTAGCTCATGTTATTGGCAAGAGTGAACATCAGCACAATAAGGTTAAAAATGATAGTCTCTTTTTAGGAATGATACTTATTACATTTGGTTGGTTTGGATTTAATATGGGTCCAGTTGGTGAGTGGAATTCACAAGCCATTATGATACTTTTAAATACTATATTTGCTATTATAGGTGGTGGTTTGGCGTGGACATTGGCTGCTAAGTGGAATGGTGAGGAAGAGAAAACAGGAAGCTTATTGAATGGCATTATTGTTGGTCTTGTGACGAGTACAGCAGGAGTTGGGTATCTCTTAACTTGGCAATTATTAGCTGTAACATTCTTTGCATCCCTCTTCACCTACTTTGTAACGGATTACGTTGCGAAAGCTTTTGCCATTGATGATGTCGTTTCCTCCTTTGGAATGAATGGTATTGGGGGATTGTTGGGAAGTTTAGGAGTTGGTCTCTTTAAATTATCACATATGCCAGTTCAACTGTTAGCATTAGCTACCACAATTCTTTTGTCAATTATAATGACCTATATCATATCTAAAGCGATTTTTAGAAAATAA

SEQ ID NO: 2670 - protein, 339 aa, Streptococcus agalactiae
MFLLLCILSMWLMIFGVAFYYFGSLHQSLTSRIIYQFVLTVLLTTTAWFMGAYFLAFEGHFKTVFQFQEADGKQIVNCLFQLCFALYAVVMLIGSIIDRVQTKRLLLAVVSWLFLVYTPLAYLIWNSEGVFAKMGVLDFSGGMIVHLSAGLSSYILAHVIGKSEHQHNKVKNDSLFLGMILITFGWFGFNMGPVGEWNSQAIMILLNTIFAIIGGGLAWTLAAKWNGEEEKTGSLLNGIIVGLVTSTAGVGYLLTWQLLAVTFFASLFTYFVTDYVAKAFAIDDVVSSFGMNGIGGLLGSLGVGLFKLSHMPVQLLALATTILLSIIMTYIISKAIFRK

SEQ ID NO: 2671 - protein, 435 aa, Streptococcus agalactiae
ATGAAACATTATCAAACCATAATTATCGGTGCAGGCGCTGCAGGAATCGGTTTTGGTTCTGCCATGCAACGATTAGGACTTACAAATTTTCTTATCATTGAAAAAGGGCACATTGGAGAATCTTTTTTAAGATGGCCCAGAACAACACAATTTATCACACCTTCCTTCACTACCAATGGCTTTGGTTTTCCAGATCTAAACGCTGTTATTCCAGATACTTCTCCTGCTTTCTCATTTGAAAAAGAACATCTTTCTGGAGTGGAATATGCACGCTACTTACAATTAGTTGCTGCTCATTATAATCTCCCTATCCAAAACGAAACATCTGTTCTATCTATTGATAAACGAGATAGCCTTTTTGTTATTAAAACTTCAAAGGGAGATTTTTCTGCTGATTATCTTATTAGGCAACAGGNNNNNCATTCCATTCATTAA

SEQ ID NO: 2672 - protein, 144 aa, Streptococcus agalactiae
  VARIANT 139, 140: Xaa = Any Amino Acid
MKHYQTIIIGAGAAGIGFGSAMQRLGLTNFLIIEKGHIGESFLRWPRTTQFITPSFTTNGFGFPDLNAVIPDTSPAFSFEKEHLSGVEYARYLQLVAAHYNLPIQNETSVLSIDKRDSLFVIKTSKGDFSADYLIRQQXXHSIH

SEQ ID NO: 2673 - protein, 203 aa, Streptococcus agalactiae
ATGNNNNNAAATCAAGTCGAATTATATACAGATACGTTTGGTCGTAAAGAGAGCAATCCCGATCCAAGCATCTCTTTATCCCCCCTAACTAAAGAACGTTTAAAACATATACAAGACCACAAAAAAGAATATTATAGTATCTCTGAAGGCAAGAAAGCCATTGAGATTAAACAAATTGGAAAACAATATCAAGTTACTTTTGA

SEQ ID NO: 2674 - protein, 67 aa, Streptococcus agalactiae
  VARIANT 2, 3: Xaa = Any Amino Acid
MXXNQVELYTDTFGRKESNPDPSISLSPLTKERLKHIQDHKKEYYSISEGKKAIEIKQIGKTISSYF

SEQ ID NO: 2675 - protein, 987 aa, Streptococcus agalactiae
ATGTCAGAAAAAATCAGAGTTTTACTCTATTATAAATATGTTTCAATTGAAAATGCGGAAGAGTACGCTGCGAAACATCTAGAATTTTGTAAATCTATTGGGCTTAAAGGTCGTATTTTGATTGCGGATGAGGGGATTAATGGAACTGTTTCTGGAGATTATGAAACAACTCAGAAGTATATGGATTGGGTCCACAGCGATGAGCGTTTTGCTGATCTTTGGTTCAAGATTGACGAGGAAAATCAACAAGCTTTCCGTAAAATGTTTGTTCGTTATAAGAAAGAGATTGTGCACCTTGGGTTAGAAGATAATAACTTTGATAGCGATATTAATCCTTTGGAAACAACAGGTGAGTATTTAAATCCTAAACAATTTAAAGAAGCCTTGCTTGATGAAGATACTGTTGTTTTAGATACGCGTAATGATTATGAGTATGACTTAGGTCACTTCCGTGGAGCAATTCGTCCTGATATTCGCAATTTCCGTGAGTTACCACAATGGGTACGTGACAACAAAGATAAGTTTATGGAAAAACGTGTTGTTGTGTACTGTACCGGTGGTGTTCGTTGTGAGAAATTCTCGGGTTGGATGGTTCGAGAAGGTTTTAAAGATGTTGGACAATTACACGGTGGTATTGCAACATATGGAAAAGATCCGGAAGTTCAAGGTGAACTTTGGGATGGTGCGATGTATGTTTTTGATGATCGTATCTCGGTGCCAATTAATCATGTTAATCCAACTGTTATTAGTAAAGATTATTTTGATGGAACACCTTGTGAACGTTATGTCAATTGTGCAAATCCGTTTTGTAACAAACAAATTTTTGCTTCAGAAGAAAACGAAGCGAAGTATGTTCGAGGGTGCTCGCCTGAATGTCGTGCACATGAACGTAATCGCTATGTGCAAGAAAATGGTTTATCACGTCAAGAATGGGCAGAACGTTTAGAAGCTATTGGAGAATCCTTACCTCAAGTAGCAAATGTTTAA

SEQ ID NO: 2676 - protein, 328 aa, Streptococcus agalactiae
MSEKIRVLLYYKYVSIENAEEYAAKHLEFCKSIGLKGRILIADEGINGTVSGDYETTQKYMDWVHSDERFADLWFKIDEENQQAFRKMFVRYKKEIVHLGLEDNNFDSDINPLETTGEYLNPKQFKEALLDEDTVVLDTRNDYEYDLGHFRGAIRPDIRNFRELPQWVRDNKDKFMEKRVVVYCTGGVRCEKFSGWMVREGFKDVGQLHGGIATYGKDPEVQGELWDGAMYVFDDRISVPINHVNPTVISKDYFDGTPCERYVNCANPFCNKQIFASEENEAKYVRGCSPECRAHERNRYVQENGLSRQEWAERLEAIGESLPQVANV

SEQ ID NO: 2677 - protein, 1257 aa, Streptococcus agalactiae
ATGGGATACTATTTTGTTCGTAATACGACTTCAATTTTATCTGGTATCCTTAATATGTCTGCTACTGAGATTGGTATTATTACCTGTGCTAGCTACATTGCTTATGGTCTCTCTAAATTTATTTCTGGTTTGATTTCAGATGAATCGAATTCTAAAATTTTCCTTCCAGTTGGTTTGTTTCTTACAGGACTAGTTAATGTGTTAATCGGTGTTATTCCATCTGTAATTACTAGTATCTGGCTCTTTACTATCATGTATCTTATTAATGGTTGGTTACAAGGGATGGGATACCCTCCTGGAGCGCGTACATTAGTCTATTGGTATGATAATAAAGAAAGAATTAAATATGCTACCATTTGGAATTTATCTCACAATTTTGGTGGAGCAATAGCGCCGATTTTAACTGGTGTAGGTCTAGCTCTTGCTGGTAATGATTCTCTTAATCAAGCGCGTGCTGCTTATTGGTTTCCAGGGGTGGTGGCTTGTCTTTTGGCTGTTCTTGTTTACTTTTTACAAGAAGATACTCCAGAATCTATCGGACTTCCGCCTATAGAAGAGTATCATAAAGAGCAATATACTAATGTTGTGGATTCAAGTGACATTTTAGAAGAGCCTGAAGTTTTGGGTATGGGCGAAATTATAAAAAAATATATTCTACCAAATACTAAACTGATGTGGGCATCCTTGTATTCAATATTTGTATATATTTTACGTTACGGTATTGTCTCATGGACTCCTAAGTTTTTAGCGACGAGTGTGCAAGATGGTGGAAAAGGTATTACTGCAACAGCTGGTATGGGTGGTTTTTCACTTTTTGAAATAGGTGGTATTATTGGGATGCTAACAGCAGGATATCTATCTGCCAAAGTGTTTAAAAACTCTAAACCTTTAACCAATGTAGCCTTCTTAGTTGTAGCAATCTTATTACTAGCTGCCTATTGGTTTATTCCAGCAGGACCTCAATATATGGCATTAGACTTCATTATTTTACTAGGTTTGGGGGCATCAATCTACGGTCCTGTTATGATGGTTGGCCTGTATGCTATGGAGTTAGTTCCAAAAGCAGCAGCTGGAGCAGCTTCAGGATTGACTGGCACATTTAGTTATGTCGGAGGAGCAACGATCGCTACTCTAGCTATTGGTATTATTATTGACCACTTTGGTTGGGGAGTAGCATTTATAATATTTGGTATTTCTGGATTTGCGGCTATTGTCTGTACCTTGCTTTCAAGAGATAAGAGTCTAGAGTATTGGTGA

SEQ ID NO: 2678 - protein, 418 aa, Streptococcus agalactiae
MGYYFVRNTTSILSGILNMSATEIGIITCASYIAYGLSKFISGLISDESNSKIFLPVGLFLTGLVNVLIGVIPSVITSIWLFTIMYLINGWLQGMGYPPGARTLVYWYDNKERIKYATIWNLSHNFGGAIAPILTGVGLALAGNDSLNQARAAYWFPGVVACLLAVLVYFLQEDTPESIGLPPIEEYHKEQYTNVVDSSDILEEPEVLGMGEIIKKYILPNTKLMWASLYSIFVYILRYGIVSWTPKFLATSVQDGGKGITATAGMGGFSLFEIGGIIGMLTAGYLSAKVFKNSKPLTNVAFLVVAILLLAAYWFIPAGPQYMALDFIILLGLGASIYGPVMMVGLYAMELVPKAAAGAASGLTGTFSYVGGATIATLAIGIIIDHFGWGVAFIIFGISGFAAIVCTLLSRDKSLEYW

SEQ ID NO: 2679 - protein, 1041 aa, Streptococcus agalactiae
ATGGAAAAAACAAAATCATTCTTTGGACATCCTCGTGGTTTGTCCACTCTTTTCTTTACTGAAATGTGGGAAAGATTCTCATACTATGGTATGCGTGCTATTTTGCTGTACTATATGTACTATAGTGTTTCTCAAGGTGGCCTTGGTATGGACAAGACTGTCGCTGCATCAATCATGGCTGTCTATGGTTCACTGGTTTATCTCTCATCAGTAATTGGTGGTTTTGTCAGCGACCGTATTCTAGGTAGTCGTAAAACTGTTCTGTATGGTGGTATTCTAATCATGCTAGGTCATATTGCTCTAGCTACACCATTTGGTCAAACAGCTCTATTCATTTCGATTGCTCTAATTATCCTTGGTACTGGACTATTAAAACCAAATGTATCAGAGATGGTTGGTAATTTATATGGAGAAAATGATTCTCGTCGTGATGCTGGTTTTAGTATCTTTGTTTTTGGTATTAACCTTGGTGCTTTTATTTCACCCATTGTAGTGGGGTACCTCGGACAAGAAGTAAATTTCCATCTTGGTTTCTCACTTGCTGCTATTGGTATGTTCTTTGGTCTCCTCCAATATACCTTAGATGGAAAAAAATATTTGACTGAAGAGAGTCTCAGACCAAACGATCCTTTAAGTCCTGAAGAAAAGTCCTCTCTATATAAAAAAGTTGGGCTTATCCTTATTGGTATTGTTATTGTACTTATTCTACTTCACTTGATGCATATGCTAACAATTGAAGTAATTATCGATATTTTTAGTATTATTGCAATCGCCATCCCAATTATTTATTTTATCAAGATTTTAAGTAGTAAAAAGATTTCTTCTGTTGAGCGTTCTCGAGTGTGGGCATATATCCCTCTCTTTATCGCCTCAATTCTATTTTGGTCAATTGAAGAACAAGGTTCAGTTGTCTTAGCCTTATTTGCAGATGAACAAACAAAACTTTACCTTAACTTCTTTGGGCATCATATTAATTTCCCATCAAGTTATTTCCAAAGTATGAACCCTCTCTTCATTNNNNNCATTCCATTCATTAATTAA

SEQ ID NO: 2680 - protein, 346 aa, Streptococcus agalactiae
  VARIANT 340, 341: Xaa = Any Amino Acid
MEKTKSFFGHPRGLSTLFFTEMWERFSYYGMRAILLYYMYYSVSQGGLGMDKTVAASIMAVYGSLVYLSSVIGGFVSDRILGSRKTVLYGGILIMLGHIALATPFGQTALFISIALIILGTGLLKPNVSEMVGNLYGENDSRRDAGFSIFVFGINLGAFISPIVVGYLGQEVNFHLGFSLAAIGMFFGLLQYTLDGKKYLTEESLRPNDPLSPEEKSSLYKKVGLILIGIVIVLILLHLMHMLTIEVIIDIFSIIAIAIPIIYFIKILSSKKISSVERSRVWAYIPLFIASILFWSIEEQGSVVLALFADEQTKLYLNFFGHHINFPSSYFQSMNPLFIXXIPFIN

SEQ ID NO: 2681 - protein, 177 aa, Streptococcus agalactiae
ATGTCACGCAGTCAAAAAGTTATTTTAACTAATATGTGTCTTATTGAAGATAATAAAGGACGTATTGTGATGCAAATCCGTGATCCTAAACGTTATTCTTGGTCAGGAGCTGCTTTACCAGGCGGCCATATGAAGAAGGAGAATGCTCTCGTTCGAGANNNNNCATTCATTCATTAA

SEQ ID NO: 2682 - protein, 58 aa, Streptococcus agalactiae
  VARIANT 53, 54, 55: Xaa = Any Amino Acid
MSRSQKVILTNMCLIEDNKGRIVMQIRDPKRYSWSGAALPGGHMKKENALVRXXXFIH

SEQ ID NO: 2683 - protein, 189 aa, Streptococcus agalactiae
TTGAAAAAAAAGAATTTACTTCAGGAGAGTATTAATAAACGTCTATCTGAAGAGCGATATCAAATTCCTAAAGAAAAAAGAGAGAAAAAACGATTTGACATGCAGCTTATTCTGATTATTTCTATTTTAATAGGGTTAATCATGTCTATTATCGGAATTATTCGATTTTTCTTAACCTACAGTAGTTAA

SEQ ID NO: 2684 - protein, 62 aa, Streptococcus agalactiae
MKKKNLLQESINKRLSEERYQIPKEKREKKRFDMQLILIISILIGLIMSIIGIIRFFLTYSS

SEQ ID NO: 2685 - protein, 1326 aa, Streptococcus agalactiae
ATGATTAACTTATTTGATAGTTACACTCAATCAAGTTGGGATTTACATTTTTCCTTGATAAAATCAGGTTATATTAACCCTACTATAGCTTTGAATGATGATGGTTTTTTACCAGACGACGTAACATCACCCTATTTATATTACACTGGTTTTGCAAAGACAGGTGCTGGCCGCCCACTTTACTACAATGAACTTAGAGTTCCTGATACATGGGAAATTATTGGTTTTAGTAGTGGTGCTGATATTGTTGACTTAGGTGTCAAAAAGGGCAGAATTATTTATGCAAACCCAAATCATAAGCGTCTAATAAAAGAGGTAGACTGGTTTGATGAGCAAGGTAGAGTCATTTTAAAAGATCGCTTTAATAAGTTTGGGTTCTGTTTTGCACAAACCTTTTATAACGCGGATGGTCAAGCGATTCAGACGTCATATTATAATAAGGATAGGCAAGAGGTTATATCAGAGAACCATATGACAGGGGATTATATTTTAAATGATAATAATCAGTTTAAGGTTTTTAAATCTAAAGTTGAATTTGTCATAAATTATCTTCAAGAAGCAAAATTTAACTTAGATAGAATCTTCTATAATTCTCTGTCAACACCATTTTTAGTAAGCTTTTACCTTAATCGTCTAGAGAGTAAAGATGTTCTCTTTTGGCAGGAGCCTCTCGTAGATGATATTCCAGGAAATATGCGCTTATTATTGAACAATCCTTCCCCAAACACTAAAATTGTAATTCAAAGTTATGAAGCTTATGCTAATGCTATGAGGTTATTAACTGACGAAGAACAAAAACAAGTTAGCTTTTTAGGATTTATGTATCCTCTTAAAGAGACAGAAAAATTACATAACCAAGCTCTTATTTTGACGAATTCTGATCAAATCGAAGCATTAGAAAGTTTAGTGACTTCTCTTCCTAATTTGACTTTTAACATAGGTGCTTTGACCGAGATGTCTAGTGATCTCATGAATTTTGGCAAATATGATAATGTTGTACTCTACCCAAATATCACAACAAATCAAATACAATATTTATCAAATATTTGTGCTTTTTATCTTGATATTAATCATCATAATGAGATATTATCAGCAGTTCGCTCTGCTTTTGAACATCAACAGTTAATTTTTGCTTTCGAAGAGACTAGTCATCAAATTCGTTTTGTATCACCTAAAAATATTTTTCCAAAAAAAGATATTTTTACATTTATTTCGCACTTGCAGCCACTAATTGGCAATAAATGTAATATAGAAAAAGCATTAAAACAGCAGCTTGAAGATTGTCATGTTTCAAGCTCTACTCAGTATCAATCTGTAATTAATTAA

SEQ ID NO: 2686 - protein, 441 aa, Streptococcus agalactiae
MINLFDSYTQSSWDLHFSLIKSGYINPTIALNDDGFLPDDVTSPYLYYTGFAKTGAGRPLYYNELRVPDTWEIIGFSSGADIVDLGVKKGRIIYANPNHKRLIKEVDWFDEQGRVILKDRFNKFGFCFAQTFYNADGQAIQTSYYNKDRQEVISENHMTGDYILNDNNQFKVFKSKVEFVINYLQEAKFNLDRIFYNSLSTPFLVSFYLNRLESKDVLFWQEPLVDDIPGNMRLLLNNPSPNTKIVIQSYEAYANAMRLLTDEEQKQVSFLGFMYPLKETEKLHNQALILTNSDQIEALESLVTSLPNLTFNIGALTEMSSDLMNFGKYDNVVLYPNITTNQIQYLSNICAFYLDINHHNEILSAVRSAFEHQQLIFAFEETSHQIRFVSPKNIFPKKDIFTFISHLQPLIGNKCNIEKALKQQLEDCHVSSSTQYQSVIN

SEQ ID NO: 2687 - protein, 1509 aa, Streptococcus agalactiae
ATGACAGTTTATAATATAAACCATGGAATTGGTTGGGCAAGCAGCGGTGTTGAGTACGCTCAAGCATACCGAGGTTCTGTTTTGAGAAAACTTGGAATTGATGCTAAGTTTATTTTTACAGATTTTTTTTCAGCTGATAATATTATTAGCCTCACGCGAAATATAGGTTTTCAGGATAAAGAAATTATTTGGTTATATAATTTTTTTTCAGATATTGAGCTTGCCCCGACAACTTTTAGTATAGAAGATTTGCAAAAACAATATCTTGGAAAACTTGTTCGAAAAGAAGATAAAGGTCGGGTAATCAAGTTTTTCTACGAAGATGAAAATATCTATTTAACAGTTTACCTTGATAATTTTAACAAGGATAAAGTGCATCGTGTAGAAATCGTTTCAAATAACAACCTTATCAGAAAAGATTATTATAGTTATACACGTACTTTCTCAGAGTATTACTATCCTAAAGATGGTGTAGCTCACCTTTATCAACGTAGATTCTACAATGAAGATGAAAGTACAGCCTTTTTGGAGATGGTAGAAAATAGCTCAAGTCGTTTTATTATCAATGGCAGACTTTTACCATCCAAAGTAGCTTTTTTTGATTATTTTTTGGAATCAATGACTTTCACTTCAAAAGATATTATTCTTTTGGATAGAGGAACTGATACCGCTCAGAGTCTTTTGCGCCATGGTAAACCCGCTAAGCTAGGGACTGTTGTTCATGCGGAACATTTTAGTGAGAATGCTGTGACTGCTGACACTATTTTATGGAATAACTATTACGATTATCAGTTTACTAACGCTAATAGATTTGATTTTTTTATTACCTCCACTGATAAACAAACAGAACTTTTGGAACAACAATTTAAACAATTTACAAATCATAATCCTAGAATTATAACTATCCCGGTAGGCTCAATTGACAATCTTAAAATGCCAATGGACAATCGCCGTCCGTACTCTATTTTGACAGCTTCACGCCTAGCTAGTGAAAAACATGTAGATTGGTTAGTACGTGCAGTTATTAGGATAAGAGAAATTCTTCCTGAAGTGACCTTTGATATCTATGGATCAGGTGGAGAAGAAGAAAAAATTAGAAATATTATAAATGCAGCCAATGCAACGGAATACATTCGATTGATGGGACATAAAAATCTCTCGAATGTTTATCAAAATTATGAGTTATATTTGACAGCTTCTAAAAGTGAGGGGTTTGGCTTAACTTTACTTGAAGCTATTGGCGCAGGACTTCCTTTGATTGGGTTTGATGTTCGTTATGGTAATCAAACTTTTATCAAAGACGGAGAAAATGGTTATCTAATTCCTCGATTTGATATGGATGATGAGGAAGCTATTGTAGAAGCTTTTAAAGAGAAAGTGTTACAATTATTCCAACAGGATCAAAAGGCTTTACGAGAAGCTTCTTACGCCATTGCCGAAGGATTCTTAACAAATGAAGTAGAAGGAAAATGGTATAACTTAGTTAAGGAGTTGGTACAAGATGATTAA

SEQ ID NO: 2688 - protein, 502 aa, Streptococcus agalactiae
MTVYNINHGIGWASSGVEYAQAYRGSVLRKLGIDAKFIFTDFFSADNIISLTRNIGFQDKEIIWLYNFFSDIELAPTTFSIEDLQKQYLGKLVRKEDKGRVIKFFYEDENIYLTVYLDNFNKDKVHRVEIVSNNNLIRKDYYSYTRTFSEYYYPKDGVAHLYQRRFYNEDESTAFLEMVENSSSRFIINGRLLPSKVAFFDYFLESMTFTSKDIILLDRGTDTAQSLLRHGKPAKLGTVVHAEHFSENAVTADTILWNNYYDYQFTNANRFDFFITSTDKQTELLEQQFKQFTNHNPRIITIPVGSIDNLKMPMDNRRPYSILTASRLASEKHVDWLVRAVIRIREILPEVTFDIYGSGGEEEKIRNIINAANATEYIRLMGHKNLSNVYQNYELYLTASKSEGFGLTLLEAIGAGLPLIGFDVRYGNQTFIKDGENGYLIPRFDMDDEEAIVEAFKEKVLQLFQQDQKALREASYAIAEGFLTNEVEGKWYNLVKELVQDD

SEQ ID NO: 2689 - protein, 2388 aa, Streptococcus agalactiae
ATGATAGCCTTTAATAGTTTATTTTCGTTAGATAAGAAACGTTTAAAAAAACTTCAGCGTACTTTAAATACTATCAATAGTTTAAAGGGCCAAATGGCAACACTATCAAATGAGGAGTTGCAAGCTAAGACAACTGAATTTAGAAAACGTTTAGTTAATGGGGAAACACTAGATGATATTTGTGCTGAAGCTTTTGCTGTTGTTAGGGAAGCTGATGAGCGCGTATTAGGTCTATTTCCGTATGATGTACAGGTAATCGGTGGTCTTGTTCTGCACCAAGGAAATACTGCTGAGATGAAAACTGGTGAAGGAAAAACATTAACTGCCACTATGCCTTTGTATCTCAATGCTTTAGAAGGGAAGGGGGCAATGTTGCTGACTAATAATTCCTACCTTGCTATTCGAGATGCGGAAGAAATGGGAAAAGTATATCGTTTTTTAGGATTGAGTGTCGGTGTGGGAGTTTCTGATAATGAGGAAGAGGATAGAGATGCTGCGACTAAGCGAGCTGTTTATAGTTCGGATATTGTCTATAGTACAAGTAGTGCACTAGGCTTTGATTATTTAATTGATAACCTAGCTTCATCTAAATCTCAAAAATATATGCCCAAGTTACATTATGCTATTGTAGATGAAGCTGATGCAGTTCTTCTAGATATGGCCCAGACTCCTTTAGTTATTTCAGGTTCACCTCGAGTACAATCTAATCTCTATAAAATAGCAGATGAACTAATTCTTAGTTTTGAAGAACAAGTTGATTATTATTTTGACAAAGAGCGTCAGGAAGTGTGGATAAAAAACCAGGGTGTTCGTGAAGCTGAGAGATATTTTAGAATCCCTCATTTTTATAAACAGTCTAATCGAGAACTTGTGCGACATTTGAACTTATCTTTAAAAGCACATAAATTATTTGAACGAGGAAAAGATTATGTGGTTGACGATGGTGAAATCAAGTTGCTAGATGCGACTAATGGCCGTGTTTTAGAAGGTACTAAACTTCAAGGAGGTGTTCATCAAGCTATTGAGCAAAAAGAGCATCTTAATGTCACACCAGAGTCTCGAGCAATGGCTTCCATTACCTATCAAAATCTTTTTAGAATGTTTACTAAATTGGCTGGAATGACAGGAACTGGAAAAACTGCTGAAAAAGAGTTTATTGAGGTCTATGATATGGAAGTAGTTAGAATTCCAACTAATTCTCCTGTTAGACGAATTGACTATCCTGATAAGATTTATACAACCTTACCAGAGAAAATCCATGCAACGATTGAATTTGTTAAACAGGTTCATGATACAGGACAACCAATCCTACTAGTTGCCGGTTCTGTGAGAATGTCAGAGCTATTCTCAGAATTATTATTACTAAGTGGTATCCCTCATAGCCTGTTAAATGCTCAAAGTGCGGTTAAGGAAGCACAGATGATTGCAGAAGCAGGGCAAAAAGGTGCGGTCACTGTTGCAACGAATATGGCTGGTCGTGGTACAGATATTAAGTTAGGTAAGGGAGTATCAGAATTAGGTGGTCTTGCAGTTATTGGAACGGAGAGAATGAAGAGTCAAAGAATGGATTTACAATTAAGGGGACGTTCGGGTCGACAAGGCGATATTGGTTTTAGTCAATTTTTTGTATCATTTGAAGATGATCTAATGATAGAATCAGGTCCTAAATGGGCGCAAGATTACTTTAGGAAAAATCGTGACAAAGTTAATCCAGAAAAACCTAAAGCCTTAGGTCAGAGAAGATTTCAGAAGTTATTCCAGCAAACTCAGGAAGCTAGTGACGGTAAGGGAGAGTCTGCACGTAGTCAAACGATAGAGTTTGATTCGAGTGTACAGCTTCAGCGAGAGTATGTTTATCGTGAGAGAAATGCTTTGATCAATGGAGAAAGTGGACATTTTAGTCCAAGACAGATTATTGATACAGTGATTTCTTCCTTCATTGCTTATTTAGATGGTGAAGTAGAAAAAGAAGAACTCATTTTTGAAGTAAATCGTTTTATATTTGATAATATGTCTTACAATCTTCAAGGGATTTCTAAAGAGATGTCACTTGAAGAAATTAAAAACTATTTATTCAAAATAGCCGATGAGATTCTTCGAGAAAAGCATAATTTGCTTGGTGATAGTTTTGGTGACTTTGAACGTACTGCTGCTTTAAAAGCGATTGATGAAGCTTGGATTGAAGAAGTAGATTATCTACAACAATTACGTACTGTGGCAACAGCTCGTCAAACGGCACAGCGTAACCCGGTTTTCGAATATCATAAAGAAGCATATAAATCCTACAATATCATGAAAAAAGAAATTCGTGAACAAACTTTTAGAAATCTACTTTTGAGTGAAGTATCCTTCAATGAGAATGGAGATCTTCAAATTTATTTTATATAA

SEQ ID NO: 2690 - protein, 795 aa, Streptococcus agalactiae
MIAFNSLFSLDKKRLKKLQRTLNTINSLKGQMATLSNEELQAKTTEFRKRLVNGETLDDICAEAFAVVREADERVLGLFPYDVQVIGGLVLHQGNTAEMKTGEGKTLTATMPLYLNALEGKGAMLLTNNSYLAIRDAEEMGKVYRFLGLSVGVGVSDNEEEDRDAATKRAVYSSDIVYSTSSALGFDYLIDNLASSKSQKYMPKLHYAIVDEADAVLLDMAQTPLVISGSPRVQSNLYKIADELILSFEEQVDYYFDKERQEVWIKNQGVREAERYFRIPHFYKQSNRELVRHLNLSLKAHKLFERGKDYVVDDGEIKLLDATNGRVLEGTKLQGGVHQAIEQKEHLNVTPESRAMASITYQNLFRMFTKLAGMTGTGKTAEKEFIEVYDMEVVRIPTNSPVRRIDYPDKIYTTLPEKIHATIEFVKQVHDTGQPILLVAGSVRMSELFSELLLLSGIPHSLLNAQSAVKEAQMIAEAGQKGAVTVATNMAGRGTDIKLGKGVSELGGLAVIGTERMKSQRMDLQLRGRSGRQGDIGFSQFFVSFEDDLMIESGPKWAQDYFRKNRDKVNPEKPKALGQRRFQKLFQQTQEASDGKGESARSQTIEFDSSVQLQREYVYRERNALINGESGHFSPRQIIDTVISSFIAYLDGEVEKEELIFEVNRFIFDNMSYNLQGISKEMSLEEIKNYLFKIADEILREKHNLLGDSFGDFERTAALKAIDEAWIEEVDYLQQLRTVATARQTAQRNPVFEYHKEAYKSYNIMKKEIREQTFRNLLLSEVSFNENGDLQIYFI

SEQ ID NO: 2691 - protein, 993 aa, Streptococcus agalactiae
ATGAGTACGATAAGCTACATTTATTGGGATGATTTTTCAAGGTTTTCTTATAATTTTGGAACAAAATTACAATTTTTAGGAAAATCAGTATGCTTTGAAAATCCATTAGCTCCTTCTAGCACAAACTTGTATACATGGAGCTCCCAGACTAATTATCAGTCAAAAAGAATTTCTCCTAACTTACCTTTACTAAGAAAGGGAACTCGTTATAGCTTGTCATTAAATGCAGAACTCGATTTAGTTAGCTCTCTTTTTGTTCGCATTGAATTTTACAATCGCTTTAATGAGTCTGTTGGTTTTGAACTGTTAAAAAAAGATAGTATTATTTTTATCTATCCTAAAGAGGCTTATACCTATACCATTAGTTTGATTAATGCAGGTTGTAGCGATTTTACTTTTCATTATTTGAAACTTGAGGAAGTTACAGATAGCGTTATTCAGGAGAAAAATCTATCGACAGAGTTTACTATTGAAGAACATCAAGACGTTTTAAATCTTCTTTTGGTCGAGAAAAAAGATAGTGTATATATTAATAAAATAGAAAGCATTTCTCAATTGCAACAGAAAGTCGAGTTGGTCAGCAATCCCTCATTAAATTCTGATAGTTTGATATTACCTGAGTTGGAAAAGGGGTTAGAAGATGCATTAAAAGTTTTTCCTAACATTAAGATTAATGTCATTGCGTATGGAACACAAGGTAATTTTGCTGCTTTATATTATGCTAAAAAATTTCCCAGAATAACTGCCTATATTAATGATTGTTTTGCTCCTTTCGGAATTTTACTTAAATCCTTACCACACTTGACTGCCAAACAACAAATATTTCTTAGAGAAGTCTGGGATACGAGAGAGACGTCTCCAAATGTAAAGCACTATGGATTGGTTTCAGAAAATTCCTCTTTAAATTTAGTATCAATGATCTTATCTGGTAATGAACATCTACCTTACCTCACACTTTTAAAAAAGCAGGACGACAATTATGATAGCCTTTAA

SEQ ID NO: 2692 - protein, 330 aa, Streptococcus agalactiae
MSTISYIYWDDFSRFSYNFGTKLQFLGKSVCFENPLAPSSTNLYTWSSQTNYQSKRISPNLPLLRKGTRYSLSLNAELDLVSSLFVRIEFYNRFNESVGFELLKKDSIIFIYPKEAYTYTISLINAGCSDFTFHYLKLEEVTDSVIQEKNLSTEFTIEEHQDVLNLLLVEKKDSVYINKIESISQLQQKVELVSNPSLNSDSLILPELEKGLEDALKVFPNIKINVIAYGTQGNFAALYYAKKFPRITAYINDCFAPFGILLKSLPHLTAKQQIFLREVWDTRETSPNVKHYGLVSENSSLNLVSMILSGNEHLPYLTLLKKQDDNYDSL

SEQ ID NO: 2693 - protein, 1560 aa, Streptococcus agalactiae
ATGTCAAAAATAAAACTTACAATTCTTCAAGTTGGTGAAGAGAACTGGGCAACTAAAGAGAATATCCCTAATAATATGGAATGGCTCTTTATTAAACCAGATCAAATTTCTGACTTTGTAACTACAGAAAATAATTATCTTACATCGTCAAAGTTATTGCAAAAACTACCTCGAAAAATATCTGCTCTTTTGTTGACAGAGCAAACTTATGGACCAGAGTTATCTAGTTTATCGTCATTCTTTGAGGTTTATGAAGTATTTTATCCTAAAGATAAACATGCTACGGGGATAACAGAAGAGTTTTTACGCTCGAAAATGGCCCAACGATATGATAGTAGCTCTCCAGATCAGCTAATTCGTCAATTTTATAAAGGGCTTTTTATAGGACAATACGGAGAGAAACTTCAAGTTTCACAAATACAAATTAGAAATGATTTTGAAGGTGTAGTAAACTATCAGGGAAATAACTATCTTGAATTAGAAGGGCAATTTGGTGAGAACTATAGTTTTTTGCTTAATTTTGCTTACAATATTCCATTTTCATCGGATTTTTATAATGAGTTATTTTTAGAACACATTATAGAGGGTGATATAGATATTCGATTGGTTATCTCGTTGATTGTTGATGGTTCTGTTGATGATATTGCTAAAGAGTGGTACTTTGAGAAGGAAGACCTAAATCAACTTATTTCTTTAGAGTCCGATATTAGTGGTAGCCTTGCAGTTAAACTTTTTGCTAAGGGAAAGGGTATCGTTAAGTTAGGTCCATTGCACCGTCGTAATGGTAGAGGAGGATTGGGCACATTTCTACTAGGAGGAGAACGTCACATAGATGCTATAGGTCATGAATTTATGACTTATTTTGATCCAGTAGATTTCAAACCACCTCTAACTGTTTATTTTTCGGGATTTCGTTCAGCTGAAGGCTTTGAGGGATTCTGGATGATGAAGAGTATGAAGACTCCATTCATGTTAATTTGTGATCCACGATTACAAGGTGGTGCCTTTTATATAGGAAGCAAAGAATATGAACAAAAAATAGTTGATGCTATTCAAGAAAAACTGGCCTTTTTAAATTTTAGTTCTGATCAGTTAATTTTATCCGGACTTTCAATGGGGACTTATGGTGCTACTTACCATGGTGCTAAGCTAAATCCTCATGCTATTATTATTGGTAAACCAATATTTAATTTAGGAACAGTTGCTCAACGTGAAAGATTAGAGAGACCAGATGGATTTGCTACTTCATTAGATATTCAACTACTCAATCAAGGTGACTTGACCAGTTCCTCTTCTGAGAAGTTAAATAACTATTTTTGGAAATCTATAGAAGAAGGAGATTTTTCAAATACGACTTTTGCCTTAGCCTATATGAAAAACGATGACTATGATGCGACTGCCTTTTCTGATTTATTGCAATATTTTAGAGGAAAGAAGCATAAGATATTAGGCAGAGGTTGGGATGGCCGACATGGTGATTGTTCTGCAGAAGTTGGTGCATGGTTTACAAGTCAGTATAGGCGAATGCTATCTAATGATTTTGGAAGGAAAGAAGAATGA

SEQ ID NO: 2694 - protein, 519 aa, Streptococcus agalactiae
MSKIKLTILQVGEENWATKENIPNNMEWLFIKPDQISDFVTTENNYLTSSKLLQKLPRKISALLLTEQTYGPELSSLSSFFEVYEVFYPKDKHATGITEEFLRSKMAQRYDSSSPDQLIRQFYKGLFIGQYGEKLQVSQIQIRNDFEGVVNYQGNNYLELEGQFGENYSFLLNFAYNIPFSSDFYNELFLEHIIEGDIDIRLVISLIVDGSVDDIAKEWYFEKEDLNQLISLESDISGSLAVKLFAKGKGIVKLGPLHRRNGRGGLGTFLLGGERHIDAIGHEFMTYFDPVDFKPPLTVYFSGFRSAEGFEGFWMMKSMKTPFMLICDPRLQGGAFYIGSKEYEQKIVDAIQEKLAFLNFSSDQLILSGLSMGTYGATYHGAKLNPHAIIIGKPIFNLGTVAQRERLERPDGFATSLDIQLLNQGDLTSSSSEKLNNYFWKSIEEGDFSNTTFALAYMKNDDYDATAFSDLLQYFRGKKHKILGRGWDGRHGDCSAEVGAWFTSQYRRMLSNDFGRKEE

SEQ ID NO: 2695 - protein, 1545 aa, Streptococcus agalactiae
ATGTTTCATTTTATTCCATCTTGGTATAATGAAAATCGTACTTGGTATGATAATAATTACTTGTGGTATTTCAAGCCGACTAATGTCGGTTTTGATGATACTATCAACCAAATGAAGATGTTTGATTATGCTGGAAAAGAGAGTAGATTAGTTGTCTTAAACTATATGCCCAATTTACGTTATTATTTACATCGCTATGACTTGTTAGAATCAGGTTATTATTCAGTTTTTGATGATATTCAAGAAATTGGGAATGTAAGACAGCAAATGATTGACTTCCGACAACTCAATTGGCCTGAAGGGGTGGACTTTACCTATACTCCGTTTATAGTTTTGGTAAAAAAGTCAGGAGATTTAATTGCTAAGGTTCAATTTGGTGAAGAAGGAAATTTAACGCATATTGATTATTTTGCAAATGAACAAATAGCTAAGAAATACCTCTTTGATGATAGAGGATTTCTATCTAGTATTCTCTATTATGATAATGGTGGTGAAGCCTATCAAGATTATTTAGCACCATCAGGGGAAAGGATCATGAGAGAATACCTAAGAGAAGGTGACCACCATGTTGAAATTAATCCTAAGAAAGCTATTCATTTTTTAAAGTTATCTTACTCCGATATTGAAGAGTTGATTAGAGAGAAATATCTGACCTATCTCCATAAAGAAGTTAGTAAATCAGATACTATCATTGTTAGCTTTAATCAAGTTCATAACGCATTTATTGTTGGGAACACTAGTAAAGGAAATTTAATATTATCTGTTTTCTCGGAGAGGAATAATGCTCACAATGTATTGGAGGATTACTCTTCCTTATCTCGAGCAGACGCTATTATTTGTGATAGACTAGATATTGCTGCACAATTGAAAGAAAAAATAGATAAACCAGTTGTTCATGTTTCTCCCTTTGATACGCGTTTAGCTTTGGGAAAAAGTAATCAAGTTAGAGATTTAGAAATATATTTTGTCGTAGATAGACTTTCCCATAAAGAATTGCAAAAGTCTTTAACATCCTTATATAAGGTTATGCTCAAAAATAATGATATAAAAGTAACATTTGTCAGCTACGAACGAGAATTTGAAAGTCGGCAATTGACATATGACTACCTTAAAGAAGCAACAAAAGTTTTTGATCAGAAATTCTTTAGTTTATCAGACGATGATGCCAATCAAGTTCTTATGCAATCTGATGAAGTAGAAAAGGAAAAAACACGCCTTTCTTTTACCCATCCTTTGTCAGAAACAGATATCATAAACCGGTTAGAGTATGTCCGTTTGATTATTGATATCTCGAAAATACCAGACTTATACACGCAAATTGCAGGGATAAGTTCAGGTATCCCTCAGATAAATACAATATTAACAGAATTTGTTGAACACAGGAAAAACGGTTACATTATTGAAGAGATCCAAGAATTGGAAAAGGCAATTCCTTATTATTGTGAACAATTAACTAATTGGAACCGTTCTTTAATTTATTCTATTGATAAAATCAATGACTATACAGGTGGTCAATTGGTAGAAAGAATTATAAATAGTTATTAA

SEQ ID NO: 2696 - protein, 514 aa, Streptococcus agalactiae
MFHFIPSWYNENRTWYDNNYLWYFKPTNVGFDDTINQMKMFDYAGKESRLVVLNYMPNLRYYLHRYDLLESGYYSVFDDIQEIGNVRQQMIDFRQLNWPEGVDFTYTPFIVLVKKSGDLIAKVQFGEEGNLTHIDYFANEQIAKKYLFDDRGFLSSILYYDNGGEAYQDYLAPSGERIMREYLREGDHHVEINPKKAIHFLKLSYSDIEELIREKYLTYLHKEVSKSDTIIVSFNQVHNAFIVGNTSKGNLILSVFSERNNAHNVLEDYSSLSRADAIICDRLDIAAQLKEKIDKPVVHVSPFDTRLALGKSNQVRDLEIYFVVDRLSHKELQKSLTSLYKVMLKNNDIKVTFVSYEREFESRQLTYDYLKEATKVFDQKFFSLSDDDANQVLMQSDEVEKEKTRLSFTHPLSETDIINRLEYVRLIIDISKIPDLYTQIAGISSGIPQINTILTEFVEHRKNGYIIEEIQELEKAIPYYCEQLTNWNRSLIYSIDKINDYTGGQLVERIINSY

SEQ ID NO: 2697 - protein, 1230 aa, Streptococcus agalactiae
TTGAAATTACTATATATTTTTGAAAAAAATATTATTCTTCGTAAAATATTGATAACATTTTCATTAATAATCATTTTTTTACTTGGTCGCTATGTTCCAATACCTGGTGTCTTGATTTCTGCTTATAAGGGACAAGACAATAACTTTGCGACGCTTTATTCAACAGTAACTGGTGGTAATTTGTCTCAGGTTGGGGTCTTTTCATTGGGTATTGGTCCTATGATGACCACAATGATTTTACTAAGACTATTTACGATTGGTAAATACTCTAGTGGAGTATCTCAAAAAGTTCAACAGTTTCGCCAAAATGTGGTGATGCTTGTCATAGCAATTATTCAAGGGCTAGCCATAACCATATCTTTTCAATATCATAATGGTTTTTCTCTGACCAAATTATTACTCGCGACAATGATACTTGTGACTGGTGCATATATTATTTCCTGGATTGGTAATCTAAATGCGGAATACGGGTTTGGTGGAATGACTATTTTAGTGGTGGTAGGTATGCTTGTTGGGCAATTTAATAATATTCCTCTTATTTTTGAATTATTCCAAGATGGTTATCAACTTGCTATCATCTTATTTCTTTTGTGGACACTAGTAGCAATGTACTTAATGATAACTTTTGAACGTTCAGAATATCGTATACCAGTAATGCGTACTTCAATCCATAATCGTCTCGTTGATGATGCCTACATGCCAATAAAAGTAAATGCTTCGGGGGGGATGGCATTTATGTATGTTTATACCTTACTAATGTTCCCCCAGTATATTATTATTTTACTAAGAAGTATTTTCCCAACTAATCCAGATATCACATCATACAATGACTATTTTAGTTTATCTTCTATTCAGGGAGTGGTTATTTATATGATTTTAATGCTTGTTTTATCAGTTGCATTTACTTTTGTGAATATCGATCCGACTAAAATTTCTGAGGCAATGCGAGAAAGTGGTGATTTTATTCCTAATTATAGACCTGGTAAAGAAACACAAAGTTATTTATCGAAAATCTGTTATTTATTTGGAACTTTTAGTGGTTTTTTCATGGCTTTCTTAGGAGGGGTACCATTATTATTTGCTCTTGGAAATGATGATCTTAGGACAGTTTCATCTATGACAGGGATTTTTATGATGATCACAGGGATGTCATTTATGATATTGGATGAATTCCAAGTTATTCGTATTCGTAAACAATACACTTCTGTATTTGAAAATGAGGAGAATTAA

SEQ ID NO: 2698 - protein, 409 aa, Streptococcus agalactiae
MKLLYIFEKNIILRKILITFSLIIIFLLGRYVPIPGVLISAYKGQDNNFATLYSTVTGGNLSQVGVFSLGIGPMMTTMILLRLFTIGKYSSGVSQKVQQFRQNVVMLVIAIIQGLAITISFQYHNGFSLTKLLLATMILVTGAYIISWIGNLNAEYGFGGMTILVVVGMLVGQFNNIPLIFELFQDGYQLAIILFLLWTLVAMYLMITFERSEYRIPVMRTSIHNRLVDDAYMPIKVNASGGMAFMYVYTLLMFPQYIIILLRSIFPTNPDITSYNDYFSLSSIQGVVIYMILMLVLSVAFTFVNIDPTKISEAMRESGDFIPNYRPGKETQSYLSKICYLFGTFSGFFMAFLGGVPLLFALGNDDLRTVSSMTGIFMMITGMSFMILDEFQVIRIRKQYTSVFENEEN

SEQ ID NO: 2699 - protein, 1197 aa, Streptococcus agalactiae
ATGAGAGTTATTAAAGTAAAAACAATTTCGGAAACTTTAGATTATATTTCTAAACATACCGCTTCGGTAGCGCGTTTTGGTGATGGAGAAATTGATATTATTGCGGGGAATTCTATTCCTTACCAGGTTTATGATTCTGAACTTGCTAAGCGATTAGAACGTTTATTAAATCGACAGAGTAATGAGAAGTTAGTTATCTGTGTAAGTGATGTTTTTGATAATTTAGGTAGATACAACGATTTTTCACAACAATTTTGGAGGGATCATCTATATCAGTATAATGATTTGTACCAAAAAAATTGTCAGGCTGAATGGTATGGTTCAACTTTTATTTCTAGACCCTATATGGATTTACTGGATAAGAGTTTGTCAGTAACGTACTTTGAACAGCTAAAAGCATTATGGAAAAATAAAGATATTTTAATTGTCGAGGGTGAGACTTCTCGTTCAGGCGTTGGCAATGACTTATTTAATGATGCCAATACTATTTCGCGTATCATTTGTCCTTCGAAAGATGCATTTTCATCTTTTTATGAAATCAAGGAAACTATACTTGAACATAGTAGAGGTAAGCTAATTTTACTTATGCTTGGTCCAACTGCAAAGCTATTAGCTGAAGATTTATCGCAGCTAGGACATCAAGCTATTGATTTAGGTCATATCGATTCAGAATATGAGTGGTTTAAGATGGGAGCAGTTTCTAAGGTGAAACTTTCTCATAAACATACGGCAGAACATAATTTTGACGAAGATATTACTTTAATAGAAGACAATAGTTACGAAAATCAAATTGTATCAAAAATTGGTACATCAGATAGACAGTACGCTTTGACAGTGACGTTAACAGATGATATATGGGAGCTAGAACATTTATTACAAAGATGTCCTAATACTGATTTTCATATTGCTGCCCCAGTTTATTGTTCGGATAGACTTAAGCAGTTAGTAGGTTATCCAAATTATTACCTACATGAAGCTATTACTGAAGAGCAATTCGAAGTACTCCTATTAAATAGCGATATATATTTAGATATTAATCATGGTGAAGAAGTTTGGAATGTTGTTGATAGATGTATAACTGAGGGTAAAACTATATATGGAATCAGACGGGCAAGAAAAGATAATCAATATATTTCTTTTGAGCGAACCATGGATGATTTTGAATATTTGTGTGACACTATTAAACAAAATAGATAG

SEQ ID NO: 2700 - protein, 398 aa, Streptococcus agalactiae
MRVIKVKTISETLDYISKHTASVARFGDGEIDIIAGNSIPYQVYDSELAKRLERLLNRQSNEKLVICVSDVFDNLGRYNDFSQQFWRDHLYQYNDLYQKNCQAEWYGSTFISRPYMDLLDKSLSVTYFEQLKALWKNKDILIVEGETSRSGVGNDLFNDANTISRIICPSKDAFSSFYEIKETILEHSRGKLILLMLGPTAKLLAEDLSQLGHQAIDLGHIDSEYEWFKMGAVSKVKLSHKHTAEHNFDEDITLIEDNSYENQIVSKIGTSDRQYALTVTLTDDIWELEHLLQRCPNTDFHIAAPVYCSDRLKQLVGYPNYYLHEAITEEQFEVLLLNSDIYLDINHGEEVWNVVDRCITEGKTIYGIRRARKDNQYISFERTMDDFEYLCDTIKQNR

SEQ ID NO: 2701 - protein, 888 aa, Streptococcus agalactiae
ATGGAGGCAATAGTGACTGATAAATTAGTTTCTGTTATTATTCCAGTCTATAATGCAGCACCATATTTAGAGGGGTGTGTAAATACCATTTTAGGACAAACATACCAAGTTTTTGAAATTCTACTGATAGATGACGGTTCTACAGATACATCTGCTAGTATCTGCGATCAATTATCCCTAAGAGATAACCGTATTAGAGTTTTCCATATCGAAAATGGCGGTGCTTCTAAAGCTAGAAACTTTGGATTAGCACGAATTAGTCCAGAGAGCCAATTTGTTACGTTTGTTGATTCGGACGATTGGGTAAAGGAAAATTATTTGGAAGTACTGCTAGCTCAGCAAGAAAAATATAATGCTGATATTGTTATCAGTAATTACTATATCTACAGAGAAACAGAAGATATTTTTGGTTACTACATCACTGACAAAGATTTTGTTATCGAAGAAATCTCTGCTCAAACAGCTATTGATAGACAAGTGCATTGGCATTTAAATAGTTCAGTATTCATCGTTATTTGGGGGAAATTATATCGAAGAGAACTATTTGATACCATCACCTTCCCAATAGATAAAGTATTTGAAGATGAGTTGGTAAGTGTTTTACTTTTTATAAAAAGTAAAAAAACAATTTTAGTTAATGGAAGCTATTATGGCTATAGAATTCGTCCAAATAGCATTATGACATCGGCGTTTTCATCCAAAAGAGCAGAGGATCTTATTTATATTTTTGATAGTAAATTGTCGGAGATTATACTATCAGGATTGGATTCAACTGCAACTGTAGAGAGATATTTTTGGTTAATGCGTGACTATAAACAGCGCTTAGAACAAGAAAATTTACAGAAAACAATAATATATAAAGTGATATCAAATCGGTTATCAAGGTAA

SEQ ID NO: 2702 - protein, 295 aa, Streptococcus agalactiae
MEAIVTDKLVSVIIPVYNAAPYLEGCVNTILGQTYQVFEILLIDDGSTDTSASICDQLSLRDNRIRVFHIENGGASKARNFGLARISPESQFVTFVDSDDWVKENYLEVLLAQQEKYNADIVISNYYIYRETEDIFGYYITDKDFVIEEISAQTAIDRQVHWHLNSSVFIVIWGKLYRRELFDTITFPIDKVFEDELVSVLLFIKSKKTILVNGSYYGYRIRPNSIMTSAFSSKRAEDLIYIFDSKLSEIILSGLDSTATVERYFWLMRDYKQRLEQENLQKTIIYKVISNRLSR

SEQ ID NO: 2703 - protein, 1185 aa, Streptococcus agalactiae
GTGAAAAATAACGTTATTTGTTTGGCAGGTGATAATAAATCTTTAAATCAGATCCAAACAGTTATAAAATCGATTTTATGTCACAATGATAGAGTAAGTATTTATATTTTAAATCAAGATATAGCTTCAGAATGGTTTAGAAATATTCAAAGACGTTTATTAAATAGTCATAGTTGTATTTTTGATATAAAACTCTTTGATGATACTTTTAAGGAATTTAAAACGCCCCGTGCCCATATTACCTATATGGCTTATGCAAGGTACTACATTCCGCAACTGATTGATGCAGAGAAAGTTCTTTATTTAGATATTGATACTTTGGTTGTTGATAACTTAGATAAGTTGTTTGAGATAGAATTAGGGGACTACCCGATAGCAGCTATCTTAGATGGAGACGGTATTCATTTTAACTCAGGTGTTATGCTAATAAACTCGCTTTACTGGATGAGATATCGAGTAACAGAAAAACTTCTGGAAATAACAGAACGAGAATTGGATAATGGAATTTTTGGAGACCAAGGGGTTCTCAATCTTCTTTTTGATAATAATTGGCTTAAGTTAGAAGATAAGTATAATGCTCAAGTTGGAAATGATTTAGGTGCCTTTTATGAAAATTGGCAAGGGTATTTTGATCGTAACTTTGAATCGCCTACTATTATCCATTACTGTACTCATGATAAACCATGGAATACTTTTTCTTCTTCAAGGTTTAGGGAGACATGGTGGCAATATGAGCAACTAGATTGGAATGAGGTGTTTAATTTTGAAACGTATCTGTTACCTGAGCCAACATTTGAAAAACACTTCTTTACTTTCACAACGTCCGTGGATTTGCTTTATATTGAAGAATTGGTTGAACTATTCCCCAATAGTTGCTTCCATATAGCTGCTTGGACCTCTTTTGGCCCAAGATTACTTAAGTTAGCCACAAACTCTAACGTTCGTCTGTATCCTTCAATAACCAGCCCACTTTTTGAACAACTAATGACTAAAGCAAATTATTACCTTGATATCTCAACTTCTTGGAAGGAAATACAATTTTGTCAAAAAGCTATTGAGAAATCAATTCCGATATTGAGTTTTAATGAAGCAGTGACATTTGAATATAGGGAGTTAAGTCATTGCTTTATTAATTTGGAGGATATGCGACAGTTTTTATGTAAAAATGGAGGCAATAGTGACTGA

SEQ ID NO: 2704 - protein, 394 aa, Streptococcus agalactiae
MKNNVICLAGDNKSLNQIQTVIKSILCHNDRVSIYILNQDIASEWFRNIQRRLLNSHSCIFDIKLFDDTFKEFKTPRAHITYMAYARYYIPQLIDAEKVLYLDIDTLVVDNLDKLFEIELGDYPIAAILDGDGIHFNSGVMLINSLYWMRYRVTEKLLEITERELDNGIFGDQGVLNLLFDNNWLKLEDKYNAQVGNDLGAFYENWQGYFDRNFESPTIIHYCTHDKPWNTFSSSRFRETWWQYEQLDWNEVFNFETYLLPEPTFEKHFFTFTTSVDLLYIEELVELFPNSCFHIAAWTSFGPRLLKLATNSNVRLYPSITSPLFEQLMTKANYYLDISTSWKEIQFCQKAIEKSIPILSFNEAVTFEYRELSHCFINLEDMRQFLCKNGGNSD

SEQ ID NO: 2705 - protein, 1242 aa, Streptococcus agalactiae
ATGAAAAATAGAAAAGCTATCGCGTTAGCGGCAGATTTTGGCTATCAAGAGCAAGTTAAGACTATAATTAAATCAATATGCTTTCATAATCAATTTATTGATTTTTATATCTTAAATGACGATTTTCCAGTTGAATGGTTTCAAATGATGGAATATCATTTATCTAAAATGGATTGCACAATATCTAACACTAAAATTTTTAATGAAGAAATTAAACATTTTAAATTTCAAAAACCGATGCCCTATCCTACTTACTTTCGATACTTTATACCTGAAGTTATTCATGAAGATAAGGTACTATATTTAGACTGTGATATGATTATCACCAGTGATTTAACATCGATATTTACTCTTGATATTTCAAAATATGGTGTAGCGGCTGTTCGAGATGATTTGCTCGAAGAATATGATGGTAAAGAAGATTATTTTAATTCAGGTTTGCTATTAATTAATAATATTTTTTGGCGAGAACAAGGGATTAGTCAGCGACTGTTAGATTATACTAGAGAAAACCAAGGGGCTCTTCAATATCATGACCAGGATGTTTTGAATGATGTACTGTGCGATAATTGGCTAGAACTTGATGAAACTTATAACTATCATACAGGAGCAGATATGTTATATAACCTATTCCAACAGTCTGAACGTCAATTAAATCGCAGGAAAGATTTACCTAAAGTTATTCATTATACAGCGACAAAACCATGGAAATACCTTGAAACATCTGTTCGTTGGCGCGATATATGGTGGGAATATAATAGACTTGAATGGCGCGATATTTTTACAAGATGGCAAGTCAATGATGGTGTAGATGTTTCATTGAAGAAAGTGTTACAACCTATCCATCGAGCTTTCATTTTTACTTACTCAGATTCAATTGAAGGAATTGAGAGGTTGGCTAAGGATTTACCAAACTGGCAATTTCATATTGCTGCCTATACTCAAATTTCAGAAAAATTGAAACAATTGGAAATGCATTCAAATATAAAACTTTATCCACTTGTTTATCGTTTCAAATTAAATGAGCTAGTTGAAAATTCAGATATTTACCTTGATATTAATCATGGTGATGCAGATACTCAGGTTCTGGAGCAAGTGAAGAAATTAGGTAAAGATATTTTATCCCTTTCTACAACTTATCATGGTCAAGGCAAACAATTTGAGAGAGTTACGGATATTATTGATTATTTAAAGAATGAACGATTTAAAGAACATATTAGAAAGGAATATTGTGAAAAATAA

SEQ ID NO: 2706 - protein, 413 aa, Streptococcus agalactiae
MKNRKAIALAADFGYQEQVKTIIKSICFHNQFIDFYILNDDFPVEWFQMMEYHLSKMDCTISNTKIFNEEIKHFKFQKPMPYPTYFRYFIPEVIHEDKVLYLDCDMIITSDLTSIFTLDISKYGVAAVRDDLLEEYDGKEDYFNSGLLLINNIFWREQGISQRLLDYTRENQGALQYHDQDVLNDVLCDNWLELDETYNYHTGADMLYNLFQQSERQLNRRKDLPKVIHYTATKPWKYLETSVRWRDIWWEYNRLEWRDIFTRWQVNDGVDVSLKKVLQPIHRAFIFTYSDSIEGIERLAKDLPNWQFHIAAYTQISEKLKQLEMHSNIKLYPLVYRFKLNELVENSDIYLDINHGDADTQVLEQVKKLGKDILSLSTTYHGQGKQFERVTDIIDYLKNERFKEHIRKEYCEK

SEQ ID NO: 2707 - protein, 1206 aa, Streptococcus agalactiae
ATGAAGAAAACAATTGTTTTAGGTGCAGATTTCCAATATCGTGATCAAGTTATGACAACTATAAAATCTATTGTTAGTCATAATCAACATTTAACTATTTATATCATTAACACAGATTTTCCCGTAGAATGGTTTAATATCCTTAACCATTCTTTAGAACAGTTTGACTGTAGAGTAAAAAATATTCCCATAAGTTCAGATGTCTTTGAGGGGATACCTACCCTGAGCCATATCAGTGTGGCGGGATTTTTCAGATGGTTTATTCCAATTCACCTTGAAGAAGAGATAGTTTTATATTTAGATAGTGATGTAATAGTTAGGGGTTCTTTGGATCCTCTATTTGACATAAACCTTGAAGAGAATTTATTAGGAGCTGTAGCAGATCATTTTTCAACGCTTTACTATGGAGATACAGCACCAGTTAGTTTTAATTCAGGTGTTATGCTAATCAATAATTCATTATGGAAAAAAGAAGAAATTTATAATAGCCTTATGAGGATTGCTGATAAGGGTTCTGCTGTTGGGGTAGGAGATCAAGAATACCTTAATATTTTGACTCAGAATCGTTGGATAGATATCGGTAAACAATATAATGTTCAGATTGGTCAAGATGTCAATATTAATGTATATGGGCGACCAGATTTGTATCATTTTTATGAGGATTGCGAACCTGTTATTGTTCATTATAATAGTCAAGATAAACCGTGGAATAAATATAGTCAATCGCGATACCGTTCAGAATGGTGGTATTATTTTGGTTTAGAATGGTCAGTTATTTATGCTCAACAACAAAAAAATTTGAACAGGTTAACAGGTAAAACACTGAATTTATTTACATTAACAGCCTCAGATACATTAGAACATATTGAAGTACTTGCAAAAGCTCTACCAGATTATCAGTTTCATATTGCAGCACGTAGTGATATTTCAGAGAAATTAGCTAATCTAGAAACTTATAGCAATATTAAAGTTTATAAATTAGTTATCAACCCTATCTTGGAAGAGCTTATACGTAACTGTGATGTGTACTTGGATATTAATCATTCTTACGAAGTAGAAGGTATTCTAGATAAAATAAAAGAAGAGAATAAACCGATTTTAGCCTTTGATTCTACAGCACATACGACAAAAAATATAGAAGTTATCTCAGAAACAATGCCTGAATTGATGGTTAAAAGAATAAGGGAAGTAGGTCCTCTTAGATGA

SEQ ID NO: 2708 - protein, 401 aa, Streptococcus agalactiae
MKKTIVLGADFQYRDQVMTTIKSIVSHNQHLTIYIINTDFPVEWFNILNHSLEQFDCRVKNIPISSDVFEGIPTLSHISVAGFFRWFIPIHLEEEIVLYLDSDVIVRGSLDPLFDINLEENLLGAVADHFSTLYYGDTAPVSFNSGVMLINNSLWKKEEIYNSLMRIADKGSAVGVGDQEYLNILTQNRWIDIGKQYNVQIGQDVNINVYGRPDLYHFYEDCEPVIVHYNSQDKPWNKYSQSRYRSEWWYYFGLEWSVIYAQQQKNLNRLTGKTLNLFTLTASDTLEHIEVLAKALPDYQFHIAARSDISEKLANLETYSNIKVYKLVINPILEELIRNCDVYLDINHSYEVEGILDKIKEENKPILAFDSTAHTTKNIEVISETMPELMVKRIREVGPLR

SEQ ID NO: 2709 - protein, 1008 aa, Streptococcus agalactiae
ATGCGAGTACATATTACAAGTATATATGGGCAGTCACCGCGTAGCATTGCCCTTATATCACAAAAACTAGTTAAGGATGTCGGACGTCAACTTGGTTATGATGAAATGGGAATCTACTTTTATAATGATCATGCTGAAACGCATGGTGAAAGAAGTACTAGGATGGATGGTATCATTGCGGGATTAGGCAGAGGGGATATTGTTGTTTTTCAAGTACCTACATGGAATTCAACAGAATTTGATGAACTTTTTCTAGATAAATTACAGGCATACGGTGCTAGAATTATAACTTTTGTACATGATATTGTTCCCTTAATGTTTGAGTCTAATTTTTATTTATTAGATAGAGTAATTGACATGTATAATCGTTCGGATGTTGTTATTCTACCTACAAAAGCGATGCATGATTATCTAATTGAAAAAGGGATGACTACCTCTAAAGTTCTTTATCAAGAAGTATGGGATCATCCAGTTAATATAGACCTCCCTCGTCCAGAATGTCAAAAAGTCCTTAGTTTTGCAGGCGATATTCAACGCTTTCCCTTTGTCAATGACTGGAAGGAAAATATCCCGCTCATCTATTATGGAGACGGAAGCAGACTCAATTCTGAGGCAAATGTTCATGCTCAGGGATGGAAAGATGATGTAGAATTGATGCTAAGTCTTTCTAAGCGGGGAGGATTTGGCCTGTGTTGGAGTGAAGATAGAGAGGAGTTAGTCGAGCGTCGTTATTCGAGGATGAATGCCTCGTATAAATTATCTACTTTCTTGGCTGCTGGACTTCCAATTATTGCTAACCATGATATTTCAAGTAGAGACTTTATCAAACAACACGGATTAGGATTTACAGTTGAAACGCTAGAAGAAGCTGTTGAAAAAATTAATAATATGGAAAAAGAGACTTATGACAGCTATGTGGAAAATGTTGAGAAGATAGCAACTCTCTTGCGAAATGGTTATATCACTAAAAAATTGTTGATAGATGCTGTGCATATGCTTTATAGATAG

SEQ ID NO: 2710 - protein, 335 aa, Streptococcus agalactiae
MRVHITSIYGQSPRSIALISQKLVKDVGRQLGYDEMGIYFYNDHAETHGERSTRMDGIIAGLGRGDIVVFQVPTWNSTEFDELFLDKLQAYGARIITFVHDIVPLMFESNFYLLDRVIDMYNRSDVVILPTKAMHDYLIEKGMTTSKVLYQEVWDHPVNIDLPRPECQKVLSFAGDIQRFPFVNDWKENIPLIYYGDGSRLNSEANVHAQGWKDDVELMLSLSKRGGFGLCWSEDREELVERRYSRMNASYKLSTFLAAGLPIIANHDISSRDFIKQHGLGFTVETLEEAVEKINNMEKETYDSYVENVEKIATLLRNGYITKKLLIDAVHMLYR

SEQ ID NO: 2711 - protein, 2733 aa, Streptococcus agalactiae
ATGTCCCAAAAGACTTTTGGCAAGCAGTTAACAGTTGTAGATACTAAGAGTAGAGTCAAGATGCATAAATCAGAAAAAAACTGGGTAAGAACAGTAATGTCGCATTTTAATCTATTTAAAGCGATTAAAGGGAGAGCAACTGTTGAAGCAGATGTGTGTATTCAAGATGTTGAAAAAGAAGACCGACTATCTTCAGGAAATTTGACCTATCTCAAAGGAATACTAGCTGCTGGAGCTCTGGTAGGTGGAGCGAGTTTAACCAGTCGTGTTTATGCAGATGAGACTCCAGTTGTTCAAGAACAATCAAGTTCTGTACCAACACTGGCAGAACAAACGGAAGTGACTGTTAAAACAACTACTGTTCAAAATCATCAAGATGGGACAGTATCGAAAAACATTATTGATTCTAATAGTGTATCTATGTCAGAGTCAGCCTCAACAAGTACTAGTGAATCTGTAAGTATGTCTATGTCAGGGTCAACTTTAACAAGTGTAAGTGAATCTGTAAGTACATCTGCTTTAACAAGTGCTTCAGAATCGATAAGCACGTCAGCCTCAGAAAGTGTTTCAAAATCTACAAGTATTAGTGAGGTTTCAAATATTCTTGAAACTCAAGCTTCTTTAACTGATAAAGGAAGAGAGTCGTTTTCGGCAAACCAGATAGTAACAGAAAGTAGCTTAGTTACTGATGCTGGTAAAAATGCTTCAGTATCTAGCCTAATTGAAATTACAAAACCAAAATCGGAGTTACAGACTTCCAAAATGTCAAATGAGTCGCTTATAACTCCAGAGAAATCCCAAGTAATGATTGCAAGCGATAAAACTGGGAATGAGAGTCTAACTCCGACAATTAGATTAAAATCAGTTATTCAGCCAAGGAGTATGAACTTGATGACTTTGAGTTCGGAGATGGACTTGATACCACTAGAAGAAGTGTCTGATACTGAAATGTTAGGTAAAGATGTATCAAGCGAGTTGCAGAAAGTTAATATTGCGTTAAAAGATAACACTCTTAGTGAGCCTGGAACAGTTAAATTAGATAGTTCAGAAAACCTTGTTTTGAACTTTGCCTTTTCAATCGCTTCTGTTAACGAGGGAGATGTCTTTACTGTAAAGCTTTCTGATAACCTTGACACACAAGGGATTGGTACTATTCTAAAAGTTCAAGATATAATGGATGAAACGGGGCAGTTATTAGCGACTGGGTCATATAGTCCTTTAACACATAATATTACATACACCTGGACAAGGTATGCTTCTACGTTGAATAATATTAAAGCTAGAGTCAATATGCCAGTTTGGCCTGACCAGAGAATAATTTCTAAAACAACTTCAGATAAGCAGTGCTTTACTGCAACATTGAACAATCAAGTTGCTTCAATTGAGGAACGTGTTCAGTATAATAGTCCTTCAGTGACAGAACATACTAATGTTAAGACAAATGTAAGATCTCGGATCATGAAGCTTGATGATGAAAGACAGACAGAAACTTATATTACTCAAATTAATCCTGAAGGTAAGGAAATGTATTTCGCATCAGGACTTGGGAATCTATATACTATTATCGGTTCAGATGGAACATCAGGTTCACCAGTTAATTTATTAAATGCGGAAGTAAAGATTCTAAAAACTAATTCAAAAAATCTTACAGATAGTATGGATCAAAATTATGATTCGCCTGAGTTTGAAGATGTGACTTCCCAGTATAGTTATACTAACGATGGTTCTAAAATTACCATAGATTGGAAAACAAATTCTATTTCTTCCACTACATCTTATGTTGTTTTGGTCAAAATACCTAAACAAAGTGGTGTATTGTATTCAACTGTTTCTGATATAAATCAAACATATGGTTCTAAATATTCTTATGGGCATACGAATATAAGTGGTGACTCAGATGCGAATGCCGAAATTAAACTTTTATCAGAAAGTGCTTCTACGAGTGCGTCGACGTCAGCAAGTACCAGCGCTTCCATGAGTGCCTCGACATCAGCAAGTACCAGCGCTTCCATGAGTGCGTCGACGTCAGCCAGCACCAGTGCTTCAACAAGTGCAAGTATGAGTGCTTCAACAAGTGCAAGTACCAGCGCCTCAACCAGTGCCAGTACCAGTGCTTCCACCTCAGCAAGTATGAGCGCCTCAACAAGTGCAAGTACTAGCGCTTCCACAAGTGCCAGTACCAGTGCATCCACGTCAGCAAGTACTAGCGCCTCAATGAGTGCCTCGACGTCAGCCAGCACCAGTGCTTCCACAAGTGCAAGTACTAGCGCCTCAATGAGTGCCTCGACGTCAGCCAGCACCAGCGCTTCAACGAGTGCGTCAATGTCAGCCAGCACCAGTGCTTCAACCAGTGCCTCGATGTCAGCCAGCACTAGCGCTTCAACGAGTGCGTCAATGTCAGCCAGCACAAGTGCTTCAACAAGTGCCTCGATGTCAGCCAGCACAAGTGCTTCAACAAGTGCCTCGATGTCAGCCAGCACTAGCGCTTCAATGAGTGCCACGACGTCAGCCAGCACCAGCGTCTCAACGAGTGCATCGACATCAGCAAGTACCAGCGCTTCCACAAGTTCTTCAAGCTCAGTGACTTCTAATTCATCAAAAGAGAAGGTGTATTCTGCCTTACCTTCTACGGGTGACCAAGATTATTCTGTAACTGCTACTGCCTTAGGTTTAGGTTTAATGACTGGTGCAACCCTTTTGGGACGAAAAAAATCTAAAAAAGATAAAGACTAA

SEQ ID NO: 2712 - protein, 910 aa, Streptococcus agalactiae
MSQKTFGKQLTVVDTKSRVKMHKSEKNWVRTVMSHFNLFKAIKGRATVEADVCIQDVEKEDRLSSGNLTYLKGILAAGALVGGASLTSRVYADETPVVQEQSSSVPTLAEQTEVTVKTTTVQNHQDGTVSKNIIDSNSVSMSESASTSTSESVSMSMSGSTLTSVSESVSTSALTSASESISTSASESVSKSTSISEVSNILETQASLTDKGRESFSANQIVTESSLVTDAGKNASVSSLIEITKPKSELQTSKMSNESLITPEKSQVMIASDKTGNESLTPTIRLKSVIQPRSMNLMTLSSEMDLIPLEEVSDTEMLGKDVSSELQKVNIALKDNTLSEPGTVKLDSSENLVLNFAFSIASVNEGDVFTVKLSDNLDTQGIGTILKVQDIMDETGQLLATGSYSPLTHNITYTWTRYASTLNNIKARVNMPVWPDQRIISKTTSDKQCFTATLNNQVASIEERVQYNSPSVTEHTNVKTNVRSRIMKLDDERQTETYITQINPEGKEMYFASGLGNLYTIIGSDGTSGSPVNLLNAEVKILKTNSKNLTDSMDQNYDSPEFEDVTSQYSYTNDGSKITIDWKTNSISSTTSYVVLVKIPKQSGVLYSTVSDINQTYGSKYSYGHTNISGDSDANAEIKLLSESASTSASTSASTSASMSASTSASTSASMSASTSASTSASTSASMSASTSASTSASTSASTSASTSASMSASTSASTSASTSASTSASTSASTSASMSASTSASTSASTSASTSASMSASTSASTSASTSASMSASTSASTSASMSASTSASTSASMSASTSASTSASMSASTSASTSASMSASTSASMSATTSASTSVSTSASTSASTSASTSSSSSVTSNSSKEKVYSALPSTGDQDYSVTATALGLGLMTGATLLGRKKSKKDKD

SEQ ID NO: 2713 - protein, 1497 aa, Streptococcus agalactiae
ATGATAGAAAATTTTTTAGAAAAAAATAATCTTAATAAAGTTAAATTACTTACTTTATGTTATGATACCCCCTCACTATCCTTAGATACCGCCTGTAACCGACTCCACTTATCACCAGTTGAGCTTAAAAACTATTGTCATAAATTAAATGTTTTATTTGGTCATAAACTTTCTATCCATATCCAAAAAAAACGGATTTTATGTAAGCTAAATAAACTTACTCAGGAAGATGCCTTAAAAATAGTTTATAATGAGTCAAACACTTTACAACTTCTTAAATTTTTAATTGATGACTCGTCTGATAAAAAATCTCTAGTAGCTTTTGGAAATGATCTCTTCTTATCTCGTTCTTCTGTCTATCGTCTGCGAGAAAATTTAATTCCTTTAATTAAAGATTTAGGATTATCTTTATCTAAAAATACCATTGTAGGTGACGAATATCGCATTAGATATCTCATCGCATACCTCACTACTAAATTTGGTATTAAAATTTACGATCTGTCTGCTCTAGATATTAAGATTATTCGACAATTTTTATTTGAGAGTGGTACTAATATAAGACCTACTACGCACCTTTCTGATATCTTTGTTTTTTTTGATACGCTTTTCATTTTAACCTGGAAACGTCACCATCATAAAGTTAAAATTCCAAACTCCAAACTTTTCTCTTCTCTTAAAAAAATCTTTATTTATGAGGAGCTGAATACATGTGTAAAAAGTATCGTTCAACCTTACTTCAATGTTATTTTTAATTCAGAAGACATGGATTATATTTTTCTTATCTATCTTACAAGCGCTAACTCTTTTGCTGCTCAAAAGTGGACTGAAACACATGTCGATGAAGTGTTAGCTATTTTTAAAAGTCTTCCTAAATTCCAAATGCTACTACAACCTTTGAAAGAAGCTCTTCCATACTCTGACACCTACTACGATGAGCTAGTGAAAGTCACTATTTACTTTTCTCGAAACTTCATAGTTGGTCTGAATCAATTAATTCCTGAAACACTTAGTTTTCCTTCAACATTCTATCCTGGAAATAATCCTAAACTAATATCCATTATCGAACCAATAGTCACTCATTGGCTAACTGAAATTGGAGAATCAAAGTTCAAAAAAACGCACTTCTTCTTGCTCTGTGCTCACCTTGAAAGAGTAATAAAGAATAGCATGCCTCCTATAAATATTGTGTTGCTGACAACTGATTTTATTAATAATGAAATTTTAAAAGACTATATTTTGCAATCCCTTTCAACAGATAAAATTAGATTTCATTCCTATTACTTATTGACAGATAATATTAGTCAAATATCGACCTTAAAACCCGATTTAATTATCACTAATCGAAAACTGTTTACCTATGTTACAAAGGAACTAGCTACAAATAGTTTAGTCGCTCATATTGATTACAACGATACACCCTCTCAAATCAGTAATATCCAAACTATTATTTCTAATATTAAAGAAGAAAAATATCGAAAAATCTTTGATAAAATATAA

SEQ ID NO: 2714 - protein, 498 aa, Streptococcus agalactiae
MIENFLEKNNLNKVKLLTLCYDTPSLSLDTACNRLHLSPVELKNYCHKLNVLFGHKLSIHIQKKRILCKLNKLTQEDALKIVYNESNTLQLLKFLIDDSSDKKSLVAFGNDLFLSRSSVYRLRENLIPLIKDLGLSLSKNTIVGDEYRIRYLIAYLTTKFGIKIYDLSALDIKIIRQFLFESGTNIRPTTHLSDIFVFFDTLFILTWKRHHHKVKIPNSKLFSSLKKIFIYEELNTCVKSIVQPYFNVIFNSEDMDYIFLIYLTSANSFAAQKWTETHVDEVLAIFKSLPKFQMLLQPLKEALPYSDTYYDELVKVTIYFSRNFIVGLNQLIPETLSFPSTFYPGNNPKLISIIEPIVTHWLTEIGESKFKKTHFFLLCAHLERVIKNSMPPINIVLLTTDFINNEILKDYILQSLSTDKIRFHSYYLLTDNISQISTLKPDLIITNRKLFTYVTKELATNSLVAHIDYNDTPSQISNIQTIISNIKEEKYRKIFDKI

SEQ ID NO: 2715 - protein, 1992 aa, Streptococcus agalactiae
ATGATAGATAGAAAAGATACTAACCGATTTAAATTAGTTTCCAAATATAGCCCTTCGGGAGATCAACCTCAAGCTATTGAAACGTTGGTTGACAATATTGAAGGAGGAGAAAAAGCTCAGATTTTAAAAGGTGCTACTGGTACTGGTAAAACCTACACAATGAGCCAAGTTATCGCCCAAGTTAACAAGCCAACCTTGGTGATTGCACATAATAAAACCTTAGCAGGTCAACTTTATGGAGAGTTTAAAGAATTTTTTCCTGACAATGCCGTAGAGTACTTTGTTTCATATTATGATTATTATCAACCAGAAGCTTATGTGCCTTCTTCGGATACTTATATTGAAAAAGATAGTTCAGTCAATGACGAAATTGACAAATTACGTCACTCAGCGACTTCTTCGTTATTAGAAAGAAATGACGTTATTGTTGTAGCATCTGTTTCTTGTATTTACGGTTTAGGTTCTCCTAAAGAGTATGCAGACAGTGTTGTTAGCCTTAGGCCAGGTCAAGAAATTTCACGTGATCAGTTATTGAACAATCTCGTTGATATTCAATTTGAGCGTAACGATATTGATTTTCAACGTGGAAAATTTCGCGTTCGTGGCGATGTTGTAGAAGTTTTTCCTGCGAGTCGTGATGAGCATGCCTTTCGAATTGAATTTTTTGGTGATGAAATTGATCGTATAAGAGAAATAGAATCGTTAACAGGGCGTGTGCTAGGAGAAGTGGAACATTTAGCTATTTTCCCAGCAACACACTTTATGACAAATGATGAACATATGGAAGAAGCTATTTCAAAAATACAAGCTGAAATGGAAAATCAAGTAGAACTTTTTGAAAAAGAAGGGAAATTGATTGAAGCGCAACGTATTCGACAAAGGACAGAATATGATATTGAAATGCTTCGTGAAATGGGATATACAAATGGTGTTGAGAACTACTCACGTCACATGGATGGTAGAAGTGAAGGTGAGCCACCTTTTACTTTGTTAGATTTCTTCCCAGAAGATTTTTTGATTATGATTGATGAGAGTCACATGACAATGGGGCAAATCAAAGGGATGTATAATGGAGACCGTTCGCGTAAAGAAATGTTGGTTAATTACGGTTTCCGTTTACCATCTGCCTTAGATAACCGTCCACTTCGTCGTGAAGAATTCGAAAGCCATGTCCATCAAATTGTCTATGTATCTGCAACGCCAGGAGACTATGAAATGGAGCAAACAGATACAGTTGTTGAGCAAATTATCCGGCCAACAGGACTTCTTGATCCAGAAGTTGAAGTTAGACCAAGTATGGGGCAGATGGATGACTTGCTTGGTGAAATCAATTTGAGGACTGAAAAAGGTGAGCGTACCTTTATTACAACATTGACAAAGCGTATGGCAGAAGACTTAACAGATTATCTCAAAGAAATGGGAGTTAAAGTTAAGTATATGCACAGCGATATTAAAACCTTAGAACGTACAGAGATTATTCGTGATTTACGACTTGGTGTGTTTGATGTTTTAATTGGTATTAATCTCTTACGTGAAGGAATAGATGTTCCTGAGGTTTCCCTTGTTGCAATCTTAGATGCTGATAAGGAAGGTTTCCTTCGTAATGAGCGTGGTCTTATCCAAACAATCGGACGTGCAGCACGTAACAGTAATGGTCATGTTATTATGTATGCTGATAAAATAACAGATTCTATGCAAAGAGCTATGGATGAAACCGCTCGCCGTCGTCGTTTACAAATGGATTATAATGAAAAGCATGGAATTGTGCCACAAACAATTAAAAAAGAAATCCGTGATTTAATTGCTATTACTAAAAGTAATGACAGCGATAAGCCTGAAAAAGTTGTCGATTACAGTAGTTTATCTAAAAAAGAAAGGCAAGCTGAAATTAAAGCTCTTCAACAGCAAATGCAAGAAGCAGCTGAATTATTGGACTTTGAGCTAGCTGCACAAATCCGAGATGTTATCTTAGAACTAAAAGCAATCGATTAA

SEQ ID NO: 2716 - protein, 663 aa, Streptococcus agalactiae
MIDRKDTNRFKLVSKYSPSGDQPQAIETLVDNIEGGEKAQILKGATGTGKTYTMSQVIAQVNKPTLVIAHNKTLAGQLYGEFKEFFPDNAVEYFVSYYDYYQPEAYVPSSDTYIEKDSSVNDEIDKLRHSATSSLLERNDVIVVASVSCIYGLGSPKEYADSVVSLRPGQEISRDQLLNNLVDIQFERNDIDFQRGKFRVRGDVVEVFPASRDEHAFRIEFFGDEIDRIREIESLTGRVLGEVEHLAIFPATHFMTNDEHMEEAISKIQAEMENQVELFEKEGKLIEAQRIRQRTEYDIEMLREMGYTNGVENYSRHMDGRSEGEPPFTLLDFFPEDFLIMIDESHMTMGQIKGMYNGDRSRKEMLVNYGFRLPSALDNRPLRREEFESHVHQIVYVSATPGDYEMEQTDTVVEQIIRPTGLLDPEVEVRPSMGQMDDLLGEINLRTEKGERTFITTLTKRMAEDLTDYLKEMGVKVKYMHSDIKTLERTEIIRDLRLGVFDVLIGINLLREGIDVPEVSLVAILDADKEGFLRNERGLIQTIGRAARNSNGHVIMYADKITDSMQRAMDETARRRRLQMDYNEKHGIVPQTIKKEIRDLIAITKSNDSDKPEKVVDYSSLSKKERQAEIKALQQQMQEAAELLDFELAAQIRDVILELKAID

SEQ ID NO: 2717 - protein, 921 aa, Streptococcus agalactiae
ATGAATAAAAGGATTTTAAATAGTCAGTTCGCTGTCTATAAAAACTGGCCGTCATGGCTATTATTGTTATTTGCTTGTTTTATGGTATACCTATTTTTTTTCGTTGGTCTAACTCTAGGTGGTGTGGGAATTGTTCTAGTGTCTTCTGTACTCTATAAGTTTTCTTCCTATACTTTTTTTGAGTTTATTAATTTATTTAATAATATCTATGGAGAATTAGGAACCTTTAGTTTTTCAGCATTCCTTTTGCTTATCTGGGTAAAATTCGTAGAAAAAAGACCTTTTTCAGAATTGGGGTTTTCTACAAAGTTTAAAAGAACTCTGTGGTCACTTATAAAAGGCTGGAGTATAGGTTTTATTCTATTTTCAATTTCTGTCATCACTGCTTATATATTGGGAGGACTTGACTTTCATAGCTATGATGTTTCTAAGGCAACGATTTTCTATGTTGTAACTCTCCTTCCTTTTTGGCTTATTCAAAGCGGTACGGAAGAATTGCTAACACGAGGGTGGCTTCTTCCTCTAATTAATCATCGTTTTCATTTAGCTGTTGCCATAGGGGTCTCATCCACTTTATTTGGCATTTTGCACTTGGTAAATGCCCATGTCACTTTTCTTTCTATTGTAAGTATTATATGTTCGGGAGTTTTAATGTCCTTGTATATGATTAAAAGTGGTAATATTTGGAGTGTTGCAGCCTTACATGGAGCTTGGAATTTTAGCCAAGGTAATCTCTATGGTATTGCCGTAAGTGGTCAGAAAGCAGGAGCATCTCTTTTGCATTTTACCGTTAAAGAAAACGCACCGGACTGGATATCAGGTGGTGCATTCGGAATAGAAGGAAGTTTGATTTCTATTTTTGTTCTCTTAGCAGCAATTATATACCTTCTATGGCTAATTAAGACTGAAGAAACAGATTGA

SEQ ID NO: 2718 - protein, 306 aa, Streptococcus agalactiae
MNKRILNSQFAVYKNWPSWLLLLFACFMVYLFFFVGLTLGGVGIVLVSSVLYKFSSYTFFEFINLFNNIYGELGTFSFSAFLLLIWVKFVEKRPFSELGFSTKFKRTLWSLIKGWSIGFILFSISVITAYILGGLDFHSYDVSKATIFYVVTLLPFWLIQSGTEELLTRGWLLPLINHRFHLAVAIGVSSTLFGILHLVNAHVTFLSIVSIICSGVLMSLYMIKSGNIWSVAALHGAWNFSQGNLYGIAVSGQKAGASLLHFTVKENAPDWISGGAFGIEGSLISIFVLLAAIIYLLWLIKTEETD

SEQ ID NO: 2719 - protein, 2184 aa, Streptococcus agalactiae
ATGAAGCACAAGTTAAAAGCTTTTACGCTTGCTTTACTCTCAATATTCTTTGTGTTTGGTGGAAAGGTCAGTGCAGAGACTGTGAATATTGTTTCTGATACAGCATACGCTCCATTCGAATTTAAAGATTCTGATCAAACTTATAAAGGAATCGATGTTGACATCGTTAACGAAGTCGCTAAGCGTGCTGGCTGGAATGTTAACATGACGTACCCAGGTTTTGATGCCGCAGTTAACGCTGTTCAATCTGGACAGGCAGACGCGCTAATGGCCGGAACTACTGTTACTGAAGCACGTAAAAAAGTCTTTAATTTCTCAGATACTTATTACGATACTTCCGTTATTCTTTATACTAAAAATAATAATAAAGTCACAAACTACAAACAACTAAAAGGAAAAGTAGTCGGTGTAAAAAATGGAACAGCTGCTCAAAGCTTCTTAGAGGAAAATAAATCTAAATACGGCTATAAAGTTAAAACATTTGATACAAGTGACCTAATGAATAACAGCCTTGATTCTGGTTCTATTTACGCCGCTATGGACGATCAACCAGTTGTGCAATTTGCGATAAATCAAGGAAAAGCTTACGCCATTAACATGGAAGGCGAGGCAGTTGGTAGCTTTGCATTTGCTGTCAAAAAAGGTAGTGGACACGATAACCTAATTAAAGAATTTAACACAGCTTTTGCACAAATGAAATCAGATGGCACTTATAATGACATCATGGATAAATGGCTTGGGAAAGACGCTACAAAAACAAGCGGCAAAGCAACAGGTAATGCCAATGAAAAAGCAACTCCTGTAAAGCCAAGTTATAAAATTGTTTCTGATTCTTCATTCGCACCATTCGAATATCAAAACGGTAAAGGGAAATATACTGGTTTTGATATGGAATTAATCAAGAAAATTGCTAAACAGCAAGGTTTTAAACTTGATATCTCAAATCCAGGTTTTGATGCCGCTTTAAATGCTGTCCAATCTGGACAAGCTGACGGTGTTATTGCAGGAGCTACAATCACAGAAGCACGCCAAAAAATCTTTGATTTTTCTGATCCTTATTACACATCTAGCGTTATCTTAGCGGTTAAAAAAGGAAGCAATGTCAAATCATACCAAGATTTAAAAGGAAAAACAGTTGGTGCTAAAAATGGTACTGCCTCATATACTTGGTTATCAGACCACGCAGATAAGTACAACTATCATGTTAAAGCATTTGATGAAGCATCTACAATGTATGATAGTATGAACTCAGGTTCAATTGATGCTCTAATGGATGACGAAGCAGTTCTTGCTTACGCTATTAATCAAGGTCGTAAATTTGAAACACCTATCAAAGGTGAAAAATCAGGCGATATCGGATTTGCAGTGAAAAAAGGGGCAAATCCAGAATTAATTAAAATGTTTAACAACGGTCTTGCTTCACTCAAAAAATCGGGTGAGTACGATAAACTTGTTAAAAAATACCTTTCCACAGCCAGCACCTCTTCAAACGATAAAGCTGCTAAACCTGTAGATGAATCAACTATTTTAGGGTTAATTTCTAATAACTACAAACAATTGCTATCTGGTATTGGAACTACTTTAAGTTTAACTCTTATCTCATTTGCGATTGCTATGGTTATTGGTATTATCTTTGGTATGATGAGCGTATCACCAAGTAATACTCTCCGCACAATTTCAATGATTTTTGTTGATATTGTCCGTGGTATTCCACTCATGATTGTGGCCGCTTTTATTTTCTGGGGTATTCCTAATTTAATCGAAAGCATCACAGGTCACCAAAGTCCAATTAATGACTTCGTTGCTGCTACTATCGCTCTTTCTTTAAATGGTGGTGCGTACATTGCTGAAATTGTACGTGGTGGTATTGAAGCTGTTCCTTCTGGTCAAATGGAAGCAAGTCGTAGTTTAGGTATTTCTTACGGCAAAACTATGCAAAAGGTTATCTTGCCTCAAGCAGTACGCCTTATGTTACCAAACTTTATCAACCAATTTGTCATCTCATTAAAGGATACAACAATTGTATCAGCAATCGGACTTGTGGAACTCTTCCAAACTGGTAAAATCATAATTGCACGTAACTATCAATCATTCCGTATGTATGCTATCCTTGCAATTATGTATCTTGTAATCATTACCCTTCTCACCCGTCTAGCAAAACGTTTAGAAAAGAGGCTTAAATAA

SEQ ID NO: 2720 - protein, 727 aa, Streptococcus agalactiae
MKHKLKAFTLALLSIFFVFGGKVSAETVNIVSDTAYAPFEFKDSDQTYKGIDVDIVNEVAKRAGWNVNMTYPGFDAAVNAVQSGQADALMAGTTVTEARKKVFNFSDTYYDTSVILYTKNNNKVTNYKQLKGKVVGVKNGTAAQSFLEENKSKYGYKVKTFDTSDLMNNSLDSGSIYAAMDDQPVVQFAINQGKAYAINMEGEAVGSFAFAVKKGSGHDNLIKEFNTAFAQMKSDGTYNDIMDKWLGKDATKTSGKATGNANEKATPVKPSYKIVSDSSFAPFEYQNGKGKYTGFDMELIKKIAKQQGFKLDISNPGFDAALNAVQSGQADGVIAGATITEARQKIFDFSDPYYTSSVILAVKKGSNVKSYQDLKGKTVGAKNGTASYTWLSDHADKYNYHVKAFDEASTMYDSMNSGSIDALMDDEAVLAYAINQGRKFETPIKGEKSGDIGFAVKKGANPELIKMFNNGLASLKKSGEYDKLVKKYLSTASTSSNDKAAKPVDESTILGLISNNYKQLLSGIGTTLSLTLISFAIAMVIGIIFGMMSVSPSNTLRTISMIFVDIVRGIPLMIVAAFIFWGIPNLIESITGHQSPINDFVAATIALSLNGGAYIAEIVRGGIEAVPSGQMEASRSLGISYGKTMQKVILPQAVRLMLPNFINQFVISLKDTTIVSAIGLVELFQTGKIIIARNYQSFRMYAILAIMYLVIITLLTRLAKRLEKRLK

SEQ ID NO: 2721 - protein, 741 aa, Streptococcus agalactiae
ATGGCAGAATTAAAAATTGATGTCCAAGATTTACACAAGTCGTATGGGCAAAATGAAGTTTTAAAAGGTATTGATGCTAAATTTTATGAAGGTGATGTTGTTTGTATTATTGGACCTTCTGGTTCAGGAAAATCAACTTTCCTTCGCACATTGAACTTACTTGAATCAATCACAAGTGGAAAAGTTGTTGTGGACGGCTTTGAGTTATCAAACCCAAAAACAGACATAGACAAAGCACGTGAAAATATCGGAATGGTATTTCAACACTTCAATCTTTTCCCACATATGTCAGTTCTTGAAAACATCACTTTTGCTCCTATAGAACTTGGTAAAGAATCTAAAGAAGCAGCTGAAAAGCATGGGATGGAATTACTTGAAAAAGTTGGTTTAGCCGATAAAGCTAATGCCAAACCAGATAGTTTATCTGGAGGACAAAAACAACGTGTAGCTATCGCAAGAAGCTTAGCGATGAATCCAGATATCTTACTTTTTGACGAACCAACTTCTGCACTTGATCCAGAAATGGTTGGAGATGTTCTCAATGTTATGAAAGATTTAGCTGAACAAGGTATGACTATGTTAATTGTGACACACGAAATGGGATTTGCTCGTCAAGTTGCCAATCGTGTTATCTTTACAGATGGTGGTCGTTTCCTCGAAGATGGGACACCTGAGCAAATCTTTGATACACCTCAACACCCACGTCTCCAAGACTTCCTTAATAAAGTTTTAAACGTTTAA

SEQ ID NO: 2722 - protein, 246 aa, Streptococcus agalactiae
MAELKIDVQDLHKSYGQNEVLKGIDAKFYEGDVVCIIGPSGSGKSTFLRTLNLLESITSGKVVVDGFELSNPKTDIDKARENIGMVFQHFNLFPHMSVLENITFAPIELGKESKEAAEKHGMELLEKVGLADKANAKPDSLSGGQKQRVAIARSLAMNPDILLFDEPTSALDPEMVGDVLNVMKDLAEQGMTMLIVTHEMGFARQVANRVIFTDGGRFLEDGTPEQIFDTPQHPRLQDFLNKVLNV

SEQ ID NO: 2723 - protein, 351 aa, Streptococcus agalactiae
ATGAAAGACTATATTAACAGAATATTGCACTTTATTAAAGAACATATGACTTATCATGTCAACTTTATAGATGACTTTTTAGATATTAAATGGGAAAAGGTGAGTAACATCCATTTAAGGTTTTGGACAACTATTATTGCTTATTTAGTTATTTTTATCTTAAGTATCTCTACCGTAATTCTTAACCTTGTACTTCTTTTTCAAGGATTCTTAACGCAAAACCCTATTATTTACTTACTATTTTTTATAACTTTAGTTTGTGCTTTTTATTTTGCTTATAAATTTATTACTTATACTCCAACCATTGTAAAAAATGCTCTTCAGTATATCAAAAAGCTCAAAAACGTTTAA

SEQ ID NO: 2724 - protein, 116 aa, Streptococcus agalactiae
MKDYINRILHFIKEHMTYHVNFIDDFLDIKWEKVSNIHLRFWTTIIAYLVIFILSISTVILNLVLLFQGFLTQNPIIYLLFFITLVCAFYFAYKFITYTPTIVKNALQYIKKLKNV

SEQ ID NO: 2725 - protein, 159 aa, Streptococcus agalactiae
ATGGGAGATAAACCGATATCATTTCGTGATAAAGATGGGAATTTTGTTTCAGCGGCCGATGTCTGGAATGCTGAAAAATTAGAAGAACTCTTTAACACATTAAATCCTAATCGTAAACTTCGTTTAGAACGCGAAAAATTAGCAAAAGAAAAAGGATAG

SEQ ID NO: 2726 - protein, 52 aa, Streptococcus agalactiae
MGDKPISFRDKDGNFVSAADVWNAEKLEELFNTLNPNRKLRLEREKLAKEKG

SEQ ID NO: 2727 - protein, 1314 aa, Streptococcus agalactiae
ATGAGTATGTTTTTAGATACTGCCAAAATTAGTGTTAAGGCAGGTCGCGGTGGTGATGGCATGGTTGCTTTTCGCCGTGAGAAATATGTCCCCAATGGAGGCCCGTGGGGCGGTGATGGCGGTAAAGGCGGATCGGTCATTTTTAAAGTAAACGAAGGTTTACGAACTTTGATGGATTTTCGATATAACCGTAATTTTAAAGCAAAAGCTGGTGAAAAAGGGATGACTAAAGGTATGCACGGTCGAGGTGCAGAAGACCTTATTGTGTCATTACCACCTGGAACAACTGTTCGTGATGCTACTACAGGTAAGGTTATTACCGACCTTGTGGAGCATGATCAGGAATTCGTTGTAGCCAGAGGTGGCCGCGGTGGTCGTGGAAATATTCGCTTTGCAACCCCACGTAATCCAGCTCCTGAAATTGCTGAAAATGGGGAGCCTGGTGAAGAACGTGAATTACAATTAGAATTAAAAATTTTGGCTGATGTTGGTCTCGTTGGTTTCCCATCAGTTGGGAAGTCGACGCTACTTAGTGTTGTTTCAGCAGCAAAGCCTAAAATTGGTGCCTATCATTTTACGACAATTGTCCCTAATTTAGGGATGGTTCGTACAAAATCAGGTGATAGCTTTGCAATGGCTGATCTTCCTGGTTTGATTGAAGGGGCTAGTCAAGGTGTCGGATTAGGAACTCAGTTTCTTAGACATATTGAGCGTACACGTGTTATTCTACATGTTATTGATATGTCGGCAAGTGAAGGACGAGACCCTTACGATGACTATGTTTCAATTAATAATGAGTTGGAAACTTACAATCTTCGATTGATGGAACGTCCGCAAATTATTGTTGCCAATAAAATGGACATGCCTGATTCAGAAGAGAATTTGGCAGCATTCAAAGAAAAATTAGCAGCAAACTATGATGAGTTTGATGACATGCCTATGATTTTTCCAATTTCAAGTTTAGCACATCAAGGACTAGAAAACCTTATGGATGCGACGGCTGAATTATTAGCCAATACAGAAGAGTTTCTTCTTTATGACGAAACTGACATGCAAGAAGATGAAGCATACTATGGATTTAACGAAGATGAACGTCCATTTGAGATTACACGTGATGATGATGCAACGTGGGTATTGTATGGTGATAAGCTAGAAAAACTCTTTGTTATGACAAATATGGAACGCGATGAATCAATAATGAAATTTGCTCGTCAGTTACGTGGTATGGGCGTTGATGAAGCCCTTCGAGAGCGCGGAGCTAAGGATGGAGATATTGTTCGTATAGGTAACTTCGAATTTGAATTTGTAGATTAA

SEQ ID NO: 2728 - protein, 437 aa, Streptococcus agalactiae
MSMFLDTAKISVKAGRGGDGMVAFRREKYVPNGGPWGGDGGKGGSVIFKVNEGLRTLMDFRYNRNFKAKAGEKGMTKGMHGRGAEDLIVSLPPGTTVRDATTGKVITDLVEHDQEFVVARGGRGGRGNIRFATPRNPAPEIAENGEPGEERELQLELKILADVGLVGFPSVGKSTLLSVVSAAKPKIGAYHFTTIVPNLGMVRTKSGDSFAMADLPGLIEGASQGVGLGTQFLRHIERTRVILHVIDMSASEGRDPYDDYVSINNELETYNLRLMERPQIIVANKMDMPDSEENLAAFKEKLAANYDEFDDMPMIFPISSLAHQGLENLMDATAELLANTEEFLLYDETDMQEDEAYYGFNEDERPFEITRDDDATWVLYGDKLEKLFVMTNMERDESIMKFARQLRGMGVDEALRERGAKDGDIVRIGNFEFEFVD

SEQ ID NO: 2729 - protein, 129 aa, Streptococcus agalactiae
GTGGCTTTTGGAGATAACGGACAACGAAAAAAAACTGGGTTTGAAAAACTAACTCTTTTTGTTGTTATTTTGATGGTACTAGTAACAGTTGGTGGTTTGGTATTTGGTGCTATTAGTGCAATCATGTAA

SEQ ID NO: 2730 - protein, 42 aa, Streptococcus agalactiae
MAFGDNGQRKKTGFEKLTLFVVILMVLVTVGGLVFGAISAIM

SEQ ID NO: 2731 - protein, 1242 aa, Streptococcus agalactiae
ATGGTTTTACAAGATTTCGACAACCTTTTAAAAAAATATGCCCAATTAATTATTTCTAAAGGTTTAAATGTCCAAAAAGGGCACACTCTCGCTTTAACAATCGATGTGGAACAAGTCCACTTAGCAAGGCTTTTAACTGAAGCCGCTTATGAAAAGGGAGCAAGTGAAGTTATTGTTGATTATACAGATGATTTTATCACGCGCCAGCGACTACTTCATGCTTCAGACGAAGTTCTCACGAATGTTCCACAGTATACCGTTGATAAATCTTTAGCACTATTAAATAAGAAGGCTAGTCGATTAGTTGTGAAATCTTCTAACCCTAACGCTTTCGCTACTGTTGATCCTAAACGTTTATCTGAAACAACTAGAGCAACCGCTATTGCCTTAGAGGAACAAAGTAGAGCAATACAAGCTAATAAAGTATCTTGGAACGTGGCTGCAGCTGCTGGTAGAGAATGGGCTGCACTTGTCTTCCCAGAATTAAAAACAAGCGACCAACAAGTTGATGCTCTTTGGGATACCATTTTCAAATTAAATCGTATTTATGAAGATGATCCTATTGCTGCTTGGGACGCACATGAAGCTAAATTATTAGAAAAAGCTACTAGACTAAATCAAGAACAATTTGATGCTCTTCATTATACCGCACCAGGTACAGATTTAACGCTTGGTATGCCTAAAAATCATATTTGGGAGGCAGCCGGTAGTCTCAACGCTCAGGGAGAGACTTTTATCGCTAATATGCCTACTGAAGAAATCTTTTCAGCACCTGATTACCGTCGTGCAGATGGGTATGTGACAAGTACAAAACCTCTCAGTTATGCTGGCGTTATTATCGAAAATATGACATTTACCTTTAAAGACGGTAAAATTATCAATGTCACTGCAGAAAAAGGGCAAGAAACAGTCCAACGCTTAATCGAGGAAAATGATGGGGCAAGATCGCTTGGGGAAGTTGCACTTGTCCCACATAAAACACCAATTTCACTATCTGGACTGATTTTCTTTAATACTTTATTCGATGAAAATGCCTCTAATCACCTCGCTATTGGAACTGCATATGCCTTCAATGTAGAAGGAGGAACAGAAATGACAAGTCAAGAATTGGATGAAGCTGGTTTAAATCGTTCTTCAACACATGTTGATTTTATGATTGGTTCAGAACAAATGGATATTGATGGTATTCGTGCAGATGGAACTGCTGTCCCAATCTTTAGAAATGGCGAATGGGCTATTTAA

SEQ ID NO: 2732 - protein, 413 aa, Streptococcus agalactiae
MVLQDFDNLLKKYAQLIISKGLNVQKGHTLALTIDVEQVHLARLLTEAAYEKGASEVIVDYTDDFITRQRLLHASDEVLTNVPQYTVDKSLALLNKKASRLVVKSSNPNAFATVDPKRLSETTRATAIALEEQSRAIQANKVSWNVAAAAGREWAALVFPELKTSDQQVDALWDTIFKLNRIYEDDPIAAWDAHEAKLLEKATRLNQEQFDALHYTAPGTDLTLGMPKNHIWEAAGSLNAQGETFIANMPTEEIFSAPDYRRADGYVTSTKPLSYAGVIIENMTFTFKDGKIINVTAEKGQETVQRLIEENDGARSLGEVALVPHKTPISLSGLIFFNTLFDENASNHLAIGTAYAFNVEGGTEMTSQELDEAGLNRSSTHVDFMIGSEQMDIDGIRADGTAVPIFRNGEWAI

SEQ ID NO: 2733 - protein, 579 aa, Streptococcus agalactiae
ATGAAAGTGAAAAATAAGATTTTAACGATGGTAGCACTTACTGTCTTAACATGTGCTACTTATTCATCAATCGGTTATGCTGATACAAGTGATAAGAATACTGACACGAGTGTCGTGACTACGACCTTATCTGAGGAGAAAAGATCAGATGAACTAGACCAGTCTAGTACTGGTTCTTCTTCTGAAAATGAATCGAGTTCATCAAGTGAACCAGAAACAAATCCGTCAACTAATCCACCTACAACAGAACCATCGCAACCCTCACCTAGTGAAGAGAACAAGCCTGATGGTAGAACGAAGACAGAAATTGGCAATAATAAGGATATTTCTAGTGGAACAAAAGTATTAATTTCAGAAGATAGTATTAAGAATTTTAGTAAAGCAAGTAGTGATCAAGAAGAAGTGGATCGCGATGAATCATCATCTTCAAAAGCAAATGATGGGAAAAAAGGCCACAGTAAGCCTAAAAAGGAACTTCCTAAAACAGGAGATAGCCACTCAGATACTGTAATAGCATCTACGGGAGGGATTATTCTGTTATCATTAAGTTTTTACAATAAGAAAATGAAACTTTATTAA

SEQ ID NO: 2734 - protein, 192 aa, Streptococcus agalactiae
MKVKNKILTMVALTVLTCATYSSIGYADTSDKNTDTSVVTTTLSEEKRSDELDQSSTGSSSENESSSSSEPETNPSTNPPTTEPSQPSPSEENKPDGRTKTEIGNNKDISSGTKVLISEDSIKNFSKASSDQEEVDRDESSSSKANDGKKGHSKPKKELPKTGDSHSDTVIASTGGIILLSLSFYNKKMKLY

SEQ ID NO: 2735 - protein, 2043 aa, Streptococcus agalactiae
ATGAAACGTAAATACTTTATTCTTAATACGGTGACGGTTTTAACGTTAGCTGCTGCAATGAATACTAGCAGTATCTATGCTAATAGTACTGAGACAAGTGCTTCAGTAGTTCCTACTACAAATACTATCGTTCAAACTAATGACAGTAATCCTACCGCAAAATTTGTATCAGAATCAGGACAATCTGTAATAGGTCAAGTAAAACCAGATAATTCTGCGGCGCTTACAACAGTTGACACGCCTCATCATATTTCAGCTCCAGATGCTTTAAAAACAACTCAATCAAGTCCTGTCGTTGAGAGTACTTCTACTAAGTTAACTGAAGAGACTTACAAACAAAAAGATGGTCAAGATTTAGCCAACATGGTGAGAAGTGGTCAAGTTACTAGTGAGGAACTCGTTAATATGGCATACGATATTATTGCTAAAGAAAACCCATCTTTAAATGCAGTCATTACTACTAGACGCCAAGAAGCTATTGAAGAGGCTAGAAAACTTAAAGATACCAATCAGCCGTTTTTAGGTGTTCCCTTGTTAGTCAAGGGGTTAGGGCACAGTATTAAAGGTGGTGAAACCAATAATGGCTTGATCTATGCAGATGGAAAAATTAGCACATTTGACAGTAGCTATGTCAAAAAATATAAAGATTTAGGATTTATTATTTTAGGACAAACGAACTTTCCAGAGTATGGGTGGCGTAATATAACAGATTCTAAATTATACGGTCTAACGCATAATCCTTGGGATCTTGCTCATAATGCTGGTGGCTCTTCTGGTGGAAGTGCAGCAGCCATTGCTAGCGGAATGACGCCAATTGCTAGCGGTAGTGATGCTGGTGGTTCTATCCGTATTCCATCTTCTTGGACGGGCTTGGTAGGTTTAAAACCAACAAGAGGATTGGTGAGTAATGAAAAGCCAGATTCGTATAGTACAGCAGTTCATTTTCCATTAACTAAGTCATCTAGAGACGCAGAAACATTATTAACTTATCTAAAGAAAAGCGATCAAACGCTAGTATCAGTTAATGATTTAAAATCTTTACCAATTGCTTATACTTTGAAATCACCAATGGGAACAGAAGTTAGTCAAGATGCTAAAAACGCTATTATGGACAACGTCACATTCTTAAGAAAACAAGGATTCAAAGTAACAGAGATAGACTTACCAATTGATGGTAGAGCATTAATGCGTGATTATTCAACCTTGGCTATTGGCATGGGAGGAGCTTTTTCAACAATTGAAAAAGACTTAAAAAAACATGGTTTTACTAAAGAAGACGTTGATCCTATTACTTGGGCAGTTCATGTTATTTATCAAAATTCAGATAAGGCTGAACTTAAGAAATCTATTATGGAAGCCCAAAAACATATGGATGATTATCGTAAGGCAATGGAGAAGCTTCACAAGCAATTTCCTATTTTCTTATCGCCAACGACCGCAAGTTTAGCCCCTCTAAATACAGATCCATATGTAACAGAGGAAGATAAAAGAGCGATTTATAATATGGAAAACTTGAGCCAAGAAGAAAGAATTGCTCTCTTTAATCGCCAGTGGGAGCCTATGTTGCGTAGAACACCTTTTACACAAATTGCTAATATGACAGGACTCCCAGCTATCAGTATCCCGACTTACTTATCTGAGTCTGGTTTACCCATAGGGACGATGTTAATGGCAGGTGCAAACTATGATATGGTATTAATTAAATTTGCAACTTTCTTTGAAAAACATCATGGTTTTAATGTTAAATGGCAAAGAATAATAGATAAAGAAGTGAAACCATCTACTGGCCTAATACAGCCTACTAACTCCCTCTTTAAAGCTCATTCATCATTAGTAAATTTAGAAGAAAATTCACAAGTTACTCAAGTATCTATCTCTAAAAAATGGATGAAATCGTCTGTTAAAAATAAACCATCCGTAATGGCATATCAAAAAGCACTTCCTAAAACAGGTGATACAGAATCAAGCCTATCTCCAGTTTTAGTAGTAACCCTTTTATTAGCTTGTTTTAGCTTTGTAACAAAAAAGAATCAGAAAAGTTGA

SEQ ID NO: 2736 - protein, 680 aa, Streptococcus agalactiae
MKRKYFILNTVTVLTLAAAMNTSSIYANSTETSASVVPTTNTIVQTNDSNPTAKFVSESGQSVIGQVKPDNSAALTTVDTPHHISAPDALKTTQSSPVVESTSTKLTEETYKQKDGQDLANMVRSGQVTSEELVNMAYDIIAKENPSLNAVITTRRQEAIEEARKLKDTNQPFLGVPLLVKGLGHSIKGGETNNGLIYADGKISTFDSSYVKKYKDLGFIILGQTNFPEYGWRNITDSKLYGLTHNPWDLAHNAGGSSGGSAAAIASGMTPIASGSDAGGSIRIPSSWTGLVGLKPTRGLVSNEKPDSYSTAVHFPLTKSSRDAETLLTYLKKSDQTLVSVNDLKSLPIAYTLKSPMGTEVSQDAKNAIMDNVTFLRKQGFKVTEIDLPIDGRALMRDYSTLAIGMGGAFSTIEKDLKKHGFTKEDVDPITWAVHVIYQNSDKAELKKSIMEAQKHMDDYRKAMEKLHKQFPIFLSPTTASLAPLNTDPYVTEEDKRAIYNMENLSQEERIALFNRQWEPMLRRTPFTQIANMTGLPAISIPTYLSESGLPIGTMLMAGANYDMVLIKFATFFEKHHGFNVKWQRIIDKEVKPSTGLIQPTNSLFKAHSSLVNLEENSQVTQVSISKKWMKSSVKNKPSVMAYQKALPKTGDTESSLSPVLVVTLLLACFSFVTKKNQKS

SEQ ID NO: 2737 - protein, 723 aa, Streptococcus agalactiae
ATGAGACTTGATAAATTTTTAGTAGAATGCGGACTTGGTTCACGTACTCAAGTCAAATTAATATTGAAAAAAAAGCAGATTAGTGTTAATGGTAATAGCGAGACATCTCCAAAAGTACAGGTAGATGAATATAGAGATGAGATTAAATATAATGGAACTCTAGTGTCATATGAAAAGTTTGTTTATTATATGCTTCATAAACCCAAAGGTGTTATATCAGCAACGGATGATCCTTCGCATAAAACCGTGTTAGATTTGCTAGACAAAACTGCTCGAGATAAAGCTGTTTTCCCAGTGGGGCGTTTAGATATTGATACAACAGGCCTTTTGTTATTAACTAATAATGGGGAATTAGCGCATAAAATGTTATCACCTAAAAAACACGTTGATAAATGCTATGAGGTAAAAATCTCAGGGATAATGACAGAAGACGATATTTTGGCATTTGATAAAGGGATTATTCTGAAAGATTTTACTTGTTTACCAGCATTATTAGAAATTGTGGAAGTAAATCAGGTGAAGAAGCAGAGTCTTGTTAAAATCACCATTAAGGAAGGAAAATTCCATCAAGTTAAACGTATGGTTGCTGCGTGTGGTAAGGAAGTCTTAGAGCTAAAGCGTCTAAGGATGGGAAATCTACAATTAGATAAACAGCTAGAAAGTGGACAATGGAGACGGCTAACAATAAAAGAAATAGAAAAATTAGAAAAATATATGCAATAA

SEQ ID NO: 2738 - protein, 240 aa, Streptococcus agalactiae
MRLDKFLVECGLGSRTQVKLILKKKQISVNGNSETSPKVQVDEYRDEIKYNGTLVSYEKFVYYMLHKPKGVISATDDPSHKTVLDLLDKTARDKAVFPVGRLDIDTTGLLLLTNNGELAHKMLSPKKHVDKCYEVKISGIMTEDDILAFDKGIILKDFTCLPALLEIVEVNQVKKQSLVKITIKEGKFHQVKRMVAACGKEVLELKRLRMGNLQLDKQLESGQWRRLTIKEIEKLEKYMQ

SEQ ID NO: 2739 - protein, 843 aa, Streptococcus agalactiae
ATGGAAACATATACTTTATCGAATACTCTTAACATTCCTAAAATTGGTTTTGGGACATGGCAACTAACTGAAGGTGAAGAAGCTTATAAGGCAGTGACTCATGCTTTAAAAGTTGGTTATACTCATATTGATACTGCTCAGATTTATGGTAATGAACATAGTGTTGGACGTGCTATAAGAGACAGTGGTTTGGCAAGAGAAAGTATCTTTTTGACAACTAAGATTTGGAATGACAAACATGACTATCATTTAGCCAAAGCTTCTATTGATGAATCTCTGCAGAAATTAGGTGTTGATTATATTGATCTTCTTTTGATTCATTGGCCAAATCCAAAAGCTCTTCGTGAAAATGATGCGTGGAAAGCTGGGAATGCAGGCACTTGGAAAGCGATGGAAGAAGCTTATAAAGAAGGAAAGGTAAAAGCTATTGGTGTTTCGAATTTCATGAAACATCACTTAGAGGCTTTATTTGAAACTGCCGAAATAAAACCTATGGTTAATCAAATTATCCTAGCACCAGGTTGTGCTCAAGAGGATTTGGTTCGCTTCTGTAAAGGAAATGATATCTTATTAGAAGCTTACAGTCCATTTGGAACAGGTGCTATTTTTGAAAATGAATCTATAAAAGCTATTGCTGAAAAATATGGTAAATCAGTTGCGCAAGTAGCTCTTCGCTGGTCACTTGATAATGGCTTTTTACCATTACCTAAGTCAGCGACTCCCAAAAATATTGAAGCAAACCTTGATATTTTTGATTTTCAATTAAACGAAGATGATATTGCTACCTTAATACAACTAGATTCAGGTATTAAACCCAAAGATCCAGATAATGTCTCATTTTAA

SEQ ID NO: 2740 - protein, 280 aa, Streptococcus agalactiae
METYTLSNTLNIPKIGFGTWQLTEGEEAYKAVTHALKVGYTHIDTAQIYGNEHSVGRAIRDSGLARESIFLTTKIWNDKHDYHLAKASIDESLQKLGVDYIDLLLIHWPNPKALRENDAWKAGNAGTWKAMEEAYKEGKVKAIGVSNFMKHHLEALFETAEIKPMVNQIILAPGCAQEDLVRFCKGNDILLEAYSPFGTGAIFENESIKAIAEKYGKSVAQVALRWSLDNGFLPLPKSATPKNIEANLDIFDFQLNEDDIATLIQLDSGIKPKDPDNVSF

SEQ ID NO: 2741 - protein, 675 aa, Streptococcus agalactiae
ATGACAAAAGAAGATATCAAAAAACAAGTTCGAAGAGCTTTTGATTTTCGTATGGCGATTCGTGTTTATAATAATAATGATATTCCTAAAGAAGATATGGAGTATATTTTAGATACTGCTTGGTTGAGTCCTTCTTCAGTCGGTTTAGAAGGCTGGCGATTTTTGGTACTAGATAGACAAACAATTGCAAAATTTCGAGATAAACTTAAGGAAGTTGCTTGGGGAGCACAATATCAACTAGATACTGCTAGTCACTTTGTTTTACTACTAGCTGAAAAAGGTGCTTATTATAACGCTGATAGCATGATTAACAGTCTCATTCGACGTGGTCTAGGTGATCCAGCTGCCCTTGAGAGTAGGATACCTCTCTACAAATCCTTCCAAGAAAACGATATGAAAATTGATTCTGAACGTTCTCTTTGGGATTGGACAGCAAAACAAACTTATATCGCACTCGGTAATATGATGACGGCTGCTGCTATGATCGGCGTAGATTCATGCCCAATTGAAGGATTTGACTATGAAAAGGTCAATAATATCCTTAGTAAAGAAGGATTAATAGACGATAAGAAAGAAGCTATTTCTTGTATGGTTTCATTTGGTTATCGTTTGCGTGAACCTAAACATTCCCGTGCTAGGAAAGAACGCCAAGAAGTCATTACTTGGGTTGAGTAA

SEQ ID NO: 2742 - protein, 224 aa, Streptococcus agalactiae
MTKEDIKKQVRRAFDFRMAIRVYNNNDIPKEDMEYILDTAWLSPSSVGLEGWRFLVLDRQTIAKFRDKLKEVAWGAQYQLDTASHFVLLLAEKGAYYNADSMINSLIRRGLGDPAALESRIPLYKSFQENDMKIDSERSLWDWTAKQTYIALGNMMTAAAMIGVDSCPIEGFDYEKVNNILSKEGLIDDKKEAISCMVSFGYRLREPKHSRARKERQEVITWVE

SEQ ID NO: 2743 - protein, 393 aa, Streptococcus agalactiae
ATGCCATTTTTACATACTTGTATTCGCGTTAAAGATTTGGACGCCTCAATTGCTTTTTATCAAGAAGCACTTGGTTTTAAGGAAGTTCGTCGTAATGACTTTCCTGAAAATCAATTTACTTTAGTCTATATGGCCCTAGAGGACGACCCTAGTTACGAATTAGAGTTAACCTATAACTATGATCACGAAGCTTATGATTTAGGAAATGGGTATGGTCATATTGCTGTTGGTGTAGACGATTTGGAAACTACTTATGATGCCCATCAGAAAGCAGGTTACTCTGTAACAAAAATTTCTGGATTACCAGGTAAACCTAATATGTTCTACTTTATTCAAGATCCAGATGGCTATAAAATTGAAGTTATTCGACTCAGTCAATTTAAAGCTGACTAA

SEQ ID NO: 2744 - protein, 130 aa, Streptococcus agalactiae
MPFLHTCIRVKDLDASIAFYQEALGFKEVRRNDFPENQFTLVYMALEDDPSYELELTYNYDHEAYDLGNGYGHIAVGVDDLETTYDAHQKAGYSVTKISGLPGKPNMFYFIQDPDGYKIEVIRLSQFKAD

SEQ ID NO: 2745 - protein, 927 aa, Streptococcus agalactiae
ATGGCTTTATTATCAGTTATTGTCCCTTGTTATAATGAACAAGAGACTGTCTCAACTTTTTTAACAGAAATCAAAAAAGTTGAATCCGAAATGGCTCGTTACACCCATTTTGAATACATTTTCGTAAACGATGGTTCTACTGATCGTACACTCGAACTTCTTAAGAAAGCAGCTAAACAATTTGACAATGTTCATTACCTTTCATTTTCACGCCATTTTGGTAAAGATGCTGCTTTATTGGCTGGTTTAGAACATACTACTGGTGATTTTATCACTGTTATGGATGTTGACTTGCAAGATCCACCCACTTTATTACCAGAAATGTACCTAAAACTTCAAGAAGGTTATGATATTGTCGCTACAAGGCGAAAAGATCGTAAAGGGGAGCCGTTGATACGCTCTCTTTTTGCCAAGCTTTTTTATAAATTAATCAATCAAGTGTCAGATACTAAAATGGTTGATGGTGCGCGTGATTTTCGTCTCATGACAAAACAAGTTGTTGACAGTATTCTCGAGCTAAATGAAGTGAATCGCTTCTCAAAAGGGATTTTTTCCTGGATTGGATATGATGTCGCTTATATTAGTTATGAGAATCGAGAACGAATTGCGGGTAAGACCTCATGGAGTTTCTTTAATCTCTTAAAATACTCTCTAGACGGTTTCATCAACTTCTCAGAAATTCCATTAGCTATAGCTACCTGGATTGGAACCCTTAGTTCAGTACTATCACTTTTAGCTATCATTTTTATTATAATTCGAAAATTACTATTTGGGGATCCCGTTTCAGGTTGGGCAAGCACAGTTACCATTGTACTTTTTATGGGTGGTATTCAGTTATTGTCGCTAGGAATTATAGGCAAATACATCTCTAAGATTTTCCTAGAAACTAAAAAACGCCCAGTCTATATTGTCAAGGAAGAGGGATGA

SEQ ID NO: 2746 - protein, 308 aa, Streptococcus agalactiae
MALLSVIVPCYNEQETVSTFLTEIKKVESEMARYTHFEYIFVNDGSTDRTLELLKKAAKQFDNVHYLSFSRHFGKDAALLAGLEHTTGDFITVMDVDLQDPPTLLPEMYLKLQEGYDIVATRRKDRKGEPLIRSLFAKLFYKLINQVSDTKMVDGARDFRLMTKQVVDSILELNEVNRFSKGIFSWIGYDVAYISYENRERIAGKTSWSFFNLLKYSLDGFINFSEIPLAIATWIGTLSSVLSLLAIIFIIIRKLLFGDPVSGWASTVTIVLFMGGIQLLSLGIIGKYISKIFLETKKRPVYIVKEEG

SEQ ID NO: 2747 - protein, 576 aa, Streptococcus agalactiae
ATGNNNNNAGTTAATGAGTCACCTTTCGTTACAGTATTCAAACTAGCTGGGATTAAGTGGGCTGCCGCTTTGATTAACTTTGTTGTCCTAACGTCTGCAGCATCTGCTCTTAATTCTACTTTGTACTCAACAGGGCGTCATTTATTCCAATTGGCTAATGAATCACCAAATGCTCTTACAAAAGCGTTAAAATTAGACCAATTATCTCGTCAAAGCGTTCCAAGTCGAGCTATTATTGCATCAGCTGTAATCGTTGGAGCTTCAGCACTTATCAGTGTTTTACCTGGTATTTCAGATGCCTTCTCCTTAATTACTGCATCATCTTCTGGTGTTTACATTTCTATCTATGTTCTTATTATGATTGCACATTGGAAATATCGTAAATCACCTGATTTTATGGAAGATGGTTATAAAATGCCTGCCTACAAAATCCTTTCACCAATCACACTTCTCTTCTTCCTCTTTGTATTCGTTTCTCTCTTCTTGCAAGATTCAACATACATCGGGGCTATTGGAGCAACCATCTGGATTATTGGATTTGGTTTATATAGTCACTTCAAACATAAATCACATTAA

SEQ ID NO: 2748 - protein, 191 aa, Streptococcus agalactiae
  VARIANT 2, 3: Xaa = Any Amino Acid
MXXVNESPFVTVFKLAGIKWAAALINFVVLTSAASALNSTLYSTGRHLFQLANESPNALTKALKLDQLSRQSVPSRAIIASAVIVGASALISVLPGISDAFSLITASSSGVYISIYVLIMIAHWKYRKSPDFMEDGYKMPAYKILSPITLLFFLFVFVSLFLQDSTYIGAIGATIWIIGFGLYSHFKHKSH

SEQ ID NO: 2749 - protein, 468 aa, Streptococcus agalactiae
ATGGTTAAAGGTCAAGGAAACGTTGTAGCACAAAATAAAAAAGCGCATCACGACTATACTATCGTTGAAACAATAGAAGCAGGAATTGTTTTGACAGGAACAGAAATCAAAAGTGTCCGCGCAGCGCGTATTACATTGAAAGATGGATATGCACAAATAAAAAATGGTGAAGCGTGGTTGATTAATGTTCATATTACACCATATGATCAAGGTAACATATGGAATCAAGATCCTGATCGTACACGAAAGTTATTACTAAAAAAACGTGAGATTGAAAAAATATCAAATGAACTGAAAGGGACTGGTATGACTCTGGTACCTCTAAAAGTTTACTTAAAAGATGGTTTTGCTAAAGTTCTATTGGGTTTGGCAAAAGGAAAACATGATTATGATAAGCGAGAGTCTATCAAACGTCGTGAGCAAAACCGTGATATTGCCCGTCAGTTAAAAAACTATAATTCACGATGA

SEQ ID NO: 2750 - protein, 155 aa, Streptococcus agalactiae
MVKGQGNVVAQNKKAHHDYTIVETIEAGIVLTGTEIKSVRAARITLKDGYAQIKNGEAWLINVHITPYDQGNIWNQDPDRTRKLLLKKREIEKISNELKGTGMTLVPLKVYLKDGFAKVLLGLAKGKHDYDKRESIKRREQNRDIARQLKNYNSR

SEQ ID NO: 2751 - protein, 2406 aa, Streptococcus agalactiae
ATGAAAGAAAAAATTATAAAATATTTGGAAGAACACGGTAAAACCAGCGTTAATGATTTAGCTGCTGCCCTAGATATGGCAGGCGCAAAAGCATTTCCAAAATTAATCAAAACAATCTCAAATTTGGAGAGCCACAGGCAATTAAGATTTGACGATAATGGAAGTCTTTCTCTTCAAAAGAAAGAAGCTAAGAAAAAGGAAATCACAGTAAGGGGTCTTTTTAGAGCAAATAAAGCAGGATTTGGTTTTCTTAGTATTGACCAAGACGAAGATGATATGTTTATCGGAAAAAACGATATTGCTTATGCTATTGATGGTGACACGGTAGAAGCTGTTGTAAAGAAACCAGCGGACCGTCTTAACGGGACTGCAGCAGAAGCGCGTGTTGTTAATATTGTTGAACGTAGTTTAAAGACGCTTGTTGGTAAGTTTGTCTTAGACGATGAGCGCCCTAAATACGCAGGATATATCAAATCGAAAAATCAAAAAATCAATCAAAAGATTTATATACGCAAAGAACCGGTCGTTTTAGACGGAACAGAAATTATCAAAGTAGATATTGATAAATATCCGACACGAGGACATGATTACTTCGTAGCAAGTGTTCGTGATATCGTTGGACATCAAGGAGATGTTGGTATTGATGTTTTAGAAGTCTTGGAAAGTATGGATATCGTCTCAGAATTTCCTGAGGACGTTATTGCAGAAGCCAATGCTATCCCAGATGCTCCAACGGAGAAAGATTTAATTGGGCGTGTTGATTTACGTCAAGAGGTCACTTTCACTATTGATGGAGCGGACGCCAAAGATTTAGACGATGCTGTGCATATTAAATTACTGGATAATGGTCATTTTGAACTTGGAGTTCATATCGCAGATGTATCATACTACGTTACTGAAGGCTCTGCCTTAAATCGTGAAGCACTTAGTCGTGGTACGTCCGTATATGTCACAGATCGCGTTGTACCAATGTTACCAGAGCGTCTATCTAACGGTATATGTTCATTAAATCCAAATCTTGATCGTTTAACGCAGTCTTGTATTATGGAAATTGACCAAAATGGGAGAGTTGTTAATCATCAAATTACACAGTCAGTGATTAATACCACTTATCGTATGACTTATACCGCTGTAAATGATATTATTGCTGGCGATGAGGAAATCTGCTCAGAATATGAGTCTATTGTGTCCTCAGTACAGCATATGGTCACTTTACACCATACTTTGGAAGCTATGCGTACGCGTCGTGGAGCGCTGAATTTTGACACATCTGAAGCAAAAATTATGGTTAATGATAAGGGAATGCCAGTTGATATTGTTATTCGCAACAGAGGCATTGCTGAACGCATGATTGAGTCATTTATGTTGGCGGCAAATGAAACGGTTGCTGAACATTATGCTCGTCTAAAACTGCCATTTATTTATCGTATACACGAAGAGCCTAAAGCTGAAAAATTACAAAAATTCATCGATTATGCTTCTGTTTTCGGTGTTCAGATTCAAGGAACAGCAACTAAAATCACCCAATCTGCTTTACAGGACTTTATGAAAAAAGTACAAGGGCAGCCAGGAAGTGAAGTGTTATCTATGATGTTATTGCGCTCGATGCAACAAGCTAGATATTCTGAACACAACCATGGACATTATGGACTTGCTGCGGAATATTACACTCACTTTACTAGCCCCATTCGACGTTATCCAGACTTGTTAGTTCATCGTATGATTCGTGATTATGATGATAAAGCGATGGATAAAGCTGATCATTTTGCTAACCTTATCCCAGAAATTGCAACTCAAACGTCTAGTCTTGAGAGACGTGCCATTGATGCTGAACGTATTGTAGAGGCAATGAAGAAAGCCGAATATATGGAAGAATATGTTGGTGAGGAATTTGAAGGTGTGGTTGCAAGCGTTGTTAAATTTGGTATGTTTGTAGAATTACCAAATACTATTGAAGGATTGATTCACGTAACGACCTTGCCTGAATATTATCACTTTAATGAACGTACGCTGACGCTTCAAGGTGAGAAATCTGGGAAAGTTTTCCGTGTTGGTCAACAAATTAAGGTTAAGTTGATTCGTTCTGATAAGGAAACTGGTGATATCGATTTTGATTATTTACCATCAGATTTTGATATTGTTGAAAAGGTAAGTAAAAGTTCGCGTGAGGGTCGTCCTAATAGAAGTTCTAAACGAGAACATCAGCATAGAATTTCTGATCGTGATAATAAGAATAAAAATACATCTAAGAAAAAAGCATCTCGAAAACCCAAAAGGAACTCGGATAGCAAATCACATCATCATAAAGACGATAGAACAACAGGTTCAACCAAGAAAAAAACGAAAAAACCTTTCTATAAAGGCGTTGCTAAGAAAGGTCAGAAACGGAAATCTAAGAAAGGTTAA

SEQ ID NO: 2752 - protein, 801 aa, Streptococcus agalactiae
MKEKIIKYLEEHGKTSVNDLAAALDMAGAKAFPKLIKTISNLESHRQLRFDDNGSLSLQKKEAKKKEITVRGLFRANKAGFGFLSIDQDEDDMFIGKNDIAYAIDGDTVEAVVKKPADRLNGTAAEARVVNIVERSLKTLVGKFVLDDERPKYAGYIKSKNQKINQKIYIRKEPVVLDGTEIIKVDIDKYPTRGHDYFVASVRDIVGHQGDVGIDVLEVLESMDIVSEFPEDVIAEANAIPDAPTEKDLIGRVDLRQEVTFTIDGADAKDLDDAVHIKLLDNGHFELGVHIADVSYYVTEGSALNREALSRGTSVYVTDRVVPMLPERLSNGICSLNPNLDRLTQSCIMEIDQNGRVVNHQITQSVINTTYRMTYTAVNDIIAGDEEICSEYESIVSSVQHMVTLHHTLEAMRTRRGALNFDTSEAKIMVNDKGMPVDIVIRNRGIAERMIESFMLAANETVAEHYARLKLPFIYRIHEEPKAEKLQKFIDYASVFGVQIQGTATKITQSALQDFMKKVQGQPGSEVLSMMLLRSMQQARYSEHNHGHYGLAAEYYTHFTSPIRRYPDLLVHRMIRDYDDKAMDKADHFANLIPEIATQTSSLERRAIDAERIVEAMKKAEYMEEYVGEEFEGVVASVVKFGMFVELPNTIEGLIHVTTLPEYYHFNERTLTLQGEKSGKVFRVGQQIKVKLIRSDKETGDIDFDYLPSDFDIVEKVSKSSREGRPNRSSKREHQHRISDRDNKNKNTSKKKASRKPKRNSDSKSHHHKDDRTTGSTKKKTKKPFYKGVAKKGQKRKSKKG

SEQ ID NO: 2753 - protein, 294 aa, Streptococcus agalactiae
TTGAATCTTAATAAGTTTTATGTTAGAATGTACTTTGACCATAGTGGAGGAATTAACATGTATAACCTATTACTCACCATTCTACTTGTTTTATCAGTATTATTGATTATCTCAATTTTCATGCAACCACAAAAGAATCCAAGTAGTAATGTTTTTGATAGTAGCGGTTCTGAAGCCCTTTTTGAACGTAGTAAAGCTCGAGGATTTGAAGCTTTTATGCAACGTTTTACAGGTGTTTTAGTCTTTTTCTGGCTACTAATCGGCTTAGTATTATCTATTTTATCAAGTCATTAA

SEQ ID NO: 2754 - protein, 97 aa, Streptococcus agalactiae
MNLNKFYVRMYFDHSGGINMYNLLLTILLVLSVLLIISIFMQPQKNPSSNVFDSSGSEALFERSKARGFEAFMQRFTGVLVFFWLLIGLVLSILSSH

SEQ ID NO: 2755 - protein, 1170 aa, Streptococcus agalactiae
GTGGCTTGGCTCGGTAATTTTTTTACTGGGGCAAGCTTTTCACTTGTTATGCCTTTTATGGTATTATATGTAGAACAATTAGGAGCACCTAGCAACAAAGTAGAGTGGTATGCAGGCCTATCAGTATCCTTATCAGCCTTGTCTTCAGCTTTAGTTGCCCCATTATGGGGGCGCTTAGCTGATAAATATGGTAGAAAACCGATGATGGTAAGAGCAGGGTTGATGATGACTTTTACTATGGGAGGTCTTGCTTTCATTCATAGTGTTACAGGACTTCTGATTTTACGTATATTAAACGGCATTTTTGCAGGCTATGTACCTAACTCTACAGCTTTGATAGCAAGTCAAGCTCCTCAAGAGGAATCAGGATATGCCTTAGGAACCTTAGCGACAGGAGTGACTGGAGGTATGTTAATTGGTCCACTTTTAGGGGGACTTTTAGCAGAGTGGTTTGGTATTAGGGAAGTTTTTTTATTAGTGGGAACCATATTGTTAATATCTACTTTAATGACCATTTTTATGGTAAAGGAAGATTTCAAACCCATTTCTAACGAAGAAACCATGCCAACTACAGAAGTGTTCAAAAGCGTTAAAAGCTTACAAATTTTAATAGGGCTGTTTGTAACAAGCATGATTATTCAAATTTCTGCACAATCAATTGCACCTATTTTAACACTTTACATTCGTCATTTAGGACAGACTGAAAACTTGATGTTTGTTTCCGGATTAATTGTTTCTGGTATGGGATTCTCTAGTATTCTGAGTAGTCCAAAGCTAGGAAGAATCGGGGATCGCATAGGCAATCATCGTTTGCTATTATTAGCTCTACTGTATAGTTTCCTCATGTATGTCTTATGTTCATTGGCACAGACTTCATTACAGCTAGGGGTTATTAGATTCCTGTATGGTTTTGGAACAGGTGCCTTGATGCCGAGTATTAATTCAATCTTGACTAAAATTGCTCCAAGACAAGGTTTATCAAGGATTTTCAGTTATAACCAAATGTTTAGCAATTTAGGACAAGTATTAGGTCCTTTTGTCGGTTCAGCAGTTTCTATTCATTTAGGATTCCGATGGGTTTTCTTTGTGACTAGCTTCATCGTTTTAGCTAATTTTGTTTGGTGTTTTATTAATTTTAGAAAATATATTAGAGTTAAGGAAATTGTGTGA

SEQ ID NO: 2756 - protein, 389 aa, Streptococcus agalactiae
MAWLGNFFTGASFSLVMPFMVLYVEQLGAPSNKVEWYAGLSVSLSALSSALVAPLWGRLADKYGRKPMMVRAGLMMTFTMGGLAFIHSVTGLLILRILNGIFAGYVPNSTALIASQAPQEESGYALGTLATGVTGGMLIGPLLGGLLAEWFGIREVFLLVGTILLISTLMTIFMVKEDFKPISNEETMPTTEVFKSVKSLQILIGLFVTSMIIQISAQSIAPILTLYIRHLGQTENLMFVSGLIVSGMGFSSILSSPKLGRIGDRIGNHRLLLLALLYSFLMYVLCSLAQTSLQLGVIRFLYGFGTGALMPSINSILTKIAPRQGLSRIFSYNQMFSNLGQVLGPFVGSAVSIHLGFRWVFFVTSFIVLANFVWCFINFRKYIRVKEIV

SEQ ID NO: 2757 - protein, 99 aa, Streptococcus agalactiae
ATGTTAAAAGATGTTAATGTTGGAATGAGTCATTTATTAGTTAGAGGTGCTATTATTCTAGTAGTAGGGATTGTTTTTCTGTTGCAACAGATTCAGTAA

SEQ ID NO: 2758 - protein, 32 aa, Streptococcus agalactiae
MLKDVNVGMSHLLVRGAIILVVGIVFLLQQIQ

SEQ ID NO: 2759 - protein, 255 aa, Streptococcus agalactiae
TTGTTTGTCATGAGAACATTTGGGAACTCCCTGAGTGGTCCCTTGGTTGTGATCTTATCTTCTATACTATTTAGCTGGTCTCACTTACATGGTCTATCTGTCGTCGACTTTGTTGTCTATTTTGGTATGGGTTTGATTTTCGCTAGTTTGCACCACTATACAAAATCCATTCATTATTCGATTGGCGAGCATATTGTTTGGAATAGTTTGTCATATATTTTTTATTTTCTAACATTTTTGCTTGATTTACTCTAA

SEQ ID NO: 2760 - protein, 84 aa, Streptococcus agalactiae
MFVMRTFGNSLSGPLVVILSSILFSWSHLHGLSVVDFVVYFGMGLIFASLHHYTKSIHYSIGEHIVWNSLSYIFYFLTFLLDLL

SEQ ID NO: 2761 - protein, 750 aa, Streptococcus agalactiae
ATGACATTTAAGTCAGGATTTGTAGCAATTTTAGGTCGTCCAAATGTTGGAAAATCAACCTTCCTAAACCATGTTATGGGACAAAAAATTGCTATCATGAGTGATAAAGCTCAAACAACACGTAATAAAATTATGGGGATTTATACAACAGAAACTGAGCAAATTGTTTTCATTGATACCCCAGGAATTCATAAACCAAAGACCGCCCTTGGTGATTTTATGGTTGAATCTGCTTATAGTACTTTACGTGAAGTTGAAACAGTTCTTTTCATGGTTCCTGCCGATGAAAAGCGAGGCAAAGGCGATGATATGATTATTGAACGTCTTAAGGCTGCCAAGATTCCTGTTATTTTAGTAATCAACAAAATTGATAAGGTTCATCCAGACCAACTTTTGGAACAGATTGATGACTTCCGTAGTCAAATGGATTTTAAAGAAGTAGTGCCAATTTCTGCCCTTCAAGGAAATAATGTGCCAACCCTAATCAAGTTATTGACTGATAATCTTGAAGAAGGTTTCCAATATTTCCCAGAAGATCAGATTACTGATCATCCGGAACGATTTTTAGTATCAGAAATGGTTCGTGAGAAGGTACTTCATTTAACGCAACAAGAGGTTCCTCACTCAGTAGCTGTTGTTGTCGAATCCATGAAACGTGATGAAGAAACTGATAAAGTGCATATTCGTGCAACTATCATGGTTGAACGTGATAGTCAAAAAGGCATTANNNNNCATTCATTCATTAATTAA

SEQ ID NO: 2762 - protein, 249 aa, Streptococcus agalactiae
  VARIANT 243, 244: Xaa = Any Amino Acid
MTFKSGFVAILGRPNVGKSTFLNHVMGQKIAIMSDKAQTTRNKIMGIYTTETEQIVFIDTPGIHKPKTALGDFMVESAYSTLREVETVLFMVPADEKRGKGDDMIIERLKAAKIPVILVINKIDKVHPDQLLEQIDDFRSQMDFKEVVPISALQGNNVPTLIKLLTDNLEEGFQYFPEDQITDHPERFLVSEMVREKVLHLTQQEVPHSVAVVVESMKRDEETDKVHIRATIMVERDSQKGIXXHSFIN

SEQ ID NO: 2763 - protein, 399 aa, Streptococcus agalactiae
ATGGACTTAAACGACAATAATCAAAAAAAATGGAAAAATCGCACCTTAACATCAAGCATGGAATTTGCTGTTACAGGGATTTTTACAGCTTTTAAAGAAGAAAGAAATATGCGTAAGCATTTGGTTTCTGCCATTTTAGTAATACTTGCTGGTCTTACTTTCCAAGTATCTATGGTGGAGTGGTTATTTCTTTTATTGAGTATTTTTTTGGTAATTACTTTTGAAATTATCAATTCAGCTATTGAAAATGTAGTTGATTTGGCAAGTAATTACCATTTCTCGATGCTGGCTAAAAATGCTAAAGATATGGCAGCAGGAGCGGTTTTAGTTGTTTCCTTATTTGCCGTATTGGTGGGATTGATTATTTTTATACCCAAGATACTTGCTTTACTTTTATGA

SEQ ID NO: 2764 - protein, 132 aa, Streptococcus agalactiae
MDLNDNNQKKWKNRTLTSSMEFAVTGIFTAFKEERNMRKHLVSAILVILAGLTFQVSMVEWLFLLLSIFLVITFEIINSAIENVVDLASNYHFSMLAKNAKDMAAGAVLVVSLFAVLVGLIIFIPKILALLL

SEQ ID NO: 2765 - protein, 129 aa, Streptococcus agalactiae
ATGGGTTTTTTAGCTGTACATGGTTTTTTGCATATTAACGGTTATGATCATTATACACCCGAAGAAGAAAAAGAGATGTTCAGCTTACAGGAAGAAATTTTAACTGCTTATGGACTTAAACGACAATAA

SEQ ID NO: 2766 - protein, 42 aa, Streptococcus agalactiae
MGFLAVHGFLHINGYDHYTPEEEKEMFSLQEEILTAYGLKRQ

SEQ ID NO: 2767 - protein, 173 aa, Streptococcus agalactiae
ATGGAATGNNNNNAATATAAGCCTGAGGTTGATATTTCTTTTGATGAAGAAGATCTGGCTGAAAATCCTGAACTTGCTGAGATGCTAGAAGATTTTGATTCTTATATTGGTGAACTTTTTATTTCTATTGATAAAGCTAAAGAACAAGCAGAAGAGTACGGTCACTCTTATGA

SEQ ID NO: 2768 - protein, 57 aa, Streptococcus agalactiae
  VARIANT 3, 4, 5: Xaa = Any Amino Acid
MEXXXYKPEVDISFDEEDLAENPELAEMLEDFDSYIGELFISIDKAKRTSRRVRSLL

SEQ ID NO: 2769 - protein, 987 aa, Streptococcus agalactiae
TTGCAAGAATACTCTATCGAAATTACTTTACAACATCCAGATGATATGATGTCACTCTTTGGCAGCAATGAGCGCCATTTAAAATTAATCGAAGAAAATTTAGATGTTATCATTCATGCTAGAACTGAACGTGTTCAGGTATTAGGTGACTCTGAAGAAGCAGTAGAAACCGCTCGGTTAACCATTGAAGCATTATTAGTGCTTGTTAACCGCGGGATGACTGTGAATACTTCAGATGTTGTAACAGCCTTATCCATGGCACAAAATGGTTCAATTGATAAATTCGTTGCCCTTTATGAGGAAGAAATTATTAAGGATAGCTATGGTAAGCCTATCCGTGTTAAGACTTTAGGGCAAAAAATATACGTTGATAGCGTTAAAAATCATGATGTTGTTTTTGGTATTGGGCCTGCTGGAACGGGAAAAACTTTTTTAGCAGTCACTCTAGCAGTAACGGCACTAAAGCGTGGTCAAGTTAAACGAATAATCTTAACGAGACCAGCGGTTGAAGCTGGTGAAAGCCTTGGTTTCTTGCCTGGAGATCTCAAAGAGAAAGTTGATCCTTATTTGAGACCAGTTTATGATGCCCTATATCAAATTTTAGGTAAAGAGCAAACAAGTCGCTTAATGGAGCGTGAAATCATCGAAATTGCTCCATTGGCTTACATGCGTGGTCGTACTTTAGATGATGCATTTGTCATATTAGATGAAGCGCAAAACACCACTATAATGCAAATGAAAATGTTCCTAACACGTCTTGGCTTCAATTCTAAAATGATTGTAAATGGCGATGTTAGCCAAATTGACTTACCAAAGAATGTTAAATCTGGTTTGATTGATGCTGTTGAGAAATTACGAAATATCAAAAAGATTGACTTTATTCATTTATCAGCAAAGGATGTTGTAAGACACCCTGTCGTTGCTGAAATAATAAATGCTTATTCAGATTCAGAAAGTAGTCACAAGCTACAATCTGATAAGGACTGA

SEQ ID NO: 2770 - protein, 328 aa, Streptococcus agalactiae
MQEYSIEITLQHPDDMMSLFGSNERHLKLIEENLDVIIHARTERVQVLGDSEEAVETARLTIEALLVLVNRGMTVNTSDVVTALSMAQNGSIDKFVALYEEEIIKDSYGKPIRVKTLGQKIYVDSVKNHDVVFGIGPAGTGKTFLAVTLAVTALKRGQVKRIILTRPAVEAGESLGFLPGDLKEKVDPYLRPVYDALYQILGKEQTSRLMEREIIEIAPLAYMRGRTLDDAFVILDEAQNTTIMQMKMFLTRLGFNSKMIVNGDVSQIDLPKNVKSGLIDAVEKLRNIKKIDFIHLSAKDVVRHPVVAEIINAYSDSESSHKLQSDKD

SEQ ID NO: 2771 - protein, 258 aa, Streptococcus agalactiae
ATGGAATGNNNNNAATATTCTATTAGAACTGCTATGGAAGCTGTTTATACTTTCTTAAATATTGAACGTGGTGTTCCAGAAGTCTTTAATTCAGCATTTGATATTCGTGTCTTGTTGCAATCTTTATACTATCTCAATGATAAGAAATCTGTTGAAGATATGGATTTACCAATACCTGCCTTAATGCGTAAAGTAGGCATGAAAAAAATTAGAGGAACTTATTTAGAAGAATTACTTCGAGAAGCTCATCTTTTATAA

SEQ ID NO: 2772 - protein, 85 aa, Streptococcus agalactiae
  VARIANT 3, 4, 5: Xaa = Any Amino Acid
MEXXXYSIRTAMEAVYTFLNIERGVPEVFNSAFDIRVLLQSLYYLNDKKSVEDMDLPIPALMRKVGMKKIRGTYLEELLREAHLL

SEQ ID NO: 2773 - protein, 258 aa, Streptococcus agalactiae
ATGGAACGTGCGATTTTTGCTGGAGGTTGTTTTTGGTGTATGGTACAACCATTTGAAGAATTAGATGGTATTGAATCTGTTTTATCTGGATACACTGGAGGACATGTTGAGAATCCAACTTATAAAGAAGTTTGTAGTAAAACTACTGGACATACAGAAGCTGTTGAAATTATTTTTAATCCTGAAAAAATCTCTTATGCAGATTTAGTTGAGATATATTGGGCACAAACAGATTCCAANNNNNCATTCATTCATTAA

SEQ ID NO: 2774 - protein, 85 aa, Streptococcus agalactiae
  VARIANT 80, 81, 82: Xaa = Any Amino Acid
MERAIFAGGCFWCMVQPFEELDGIESVLSGYTGGHVENPTYKEVCSKTTGHTEAVEIIFNPEKISYADLVEIYWAQTDSXXXFIH

SEQ ID NO: 2775 - protein, 399 aa, Streptococcus agalactiae
ATGGAATGNNNNNCAATCGTTTATCGCTTAAAATTGTCAGGAACTTTTGTTTATCTACCAGAAAATAATATGCTCGGCTTTATTCACCCTAGTGAACGTTACAGTGAACCTCGTTTAGGGCAAGTGCTGGATGCACGAGTTATTGGCTTCAGAGAAGTTGATAGAACCTTAAATTTATCATTAAAGCCTCGTTCTTTTGAAATGTTAGAAAATGACGCACAAATGATTTTAACGTATTTAGAAAGTAACGGAGGATTCATGACTTTAAATGATAAATCTTCTCCAGAGGAAATTAAAGCTACTTTTGGAATTTCCAAAGGTCAGTTTAAAAAAGCACTTGGAGGACTCATGAAAGCTAAAAAGATCAAACAAGATCAGCTAGGTACAGAATTATTATAA

SEQ ID NO: 2776 - protein, 132 aa, Streptococcus agalactiae
  VARIANT 3, 4, 5: Xaa = Any Amino Acid
MEXXXIVYRLKLSGTFVYLPENNMLGFIHPSERYSEPRLGQVLDARVIGFREVDRTLNLSLKPRSFEMLENDAQMILTYLESNGGFMTLNDKSSPEEIKATFGISKGQFKKALGGLMKAKKIKQDQLGTELL

SEQ ID NO: 2777 - protein, 405 aa, Streptococcus agalactiae
ATGAATACATTATTAGCGACAGTCATAACAGGCTTAGTAACTGATGAAAACAAAGATTTTTACTTTATCCAAAAAGATGGCTTTACCTTTGCATTATCAAAGTCAGAAGGAGAGCATCACATTGGTGAAATGGTTAAAGGATTCGCCTATACAGATATGCAACAAAAAGCACGTCTTACAACTAAAGAAACATTTGCGACTCGAGATCATTATGGTTGGGGGACAGTTACTGAGGTACGTAAAGACTTGGGAGTATTTCTTGATACTGGTCTTCCAGATAAGCAAGTGGTTGTTTCTTTGGATGTTCTTCCTGAATTGAAAGAACTTTGGCCTAAAAAAGGTGATCGCCTCTACGTTTGCTTAGATGTTGATAAAAAANNNNNCATTCATTCATTAATTAATTAA

SEQ ID NO: 2778 - protein, 134 aa, Streptococcus agalactiae
  VARIANT 127, 128: Xaa = Any Amino Acid
MNTLLATVITGLVTDENKDFYFIQKDGFTFALSKSEGEHHIGEMVKGFAYTDMQQKARLTTKETFATRDHYGWGTVTEVRKDLGVFLDTGLPDKQVVVSLDVLPELKELWPKKGDRLYVCLDVDKKXXIHSLIN

SEQ ID NO: 2779 - protein, 558 aa, Streptococcus agalactiae
ATGACTAAGGAAATCGTTACAAAAGCTCAAGAGCGTTTTGAGCAATCACACCAAAGTTTATCAAGAGAATTTGCAGGGATTCGTGCAGGACGTGCTAATGCTAGCTTGCTTGATCGTATTCAAGTTGAGTATTATGGAGCGCCAACCCCCCTTAACCAATTAGCTTCTATTACTGTACCTGAAGCTCGTGTTCTTTTAATTTCACCATTTGATAAATCATCAATCAAAGATATTGAGCGTGCTATTAACGAATCAGATTTAGGTATTAATCCTGCAAATGATGGTTCAGTTATTCGTCTTGTTATTCCAGCTTTGACAGAAGAAACACGTCGTGATTTAGCTAAAGAAGTGAAAAAAGTCGGAGAAAATGCTAAGATTGCTATCCGTAATATTCGCCGTGATGCTATGGATGAAGCTAAGAAGCAAGAAAAGAATAAAGAAATTACAGAAGATGACTTGAAATCTCTTGAAAAAGATATTCAAAAGGCTACTGATGATGCTGTAAAACATATTGATGAGATGACTGCTAATAAAGAAAAAGAATTGTTGGAAGTTTAA

SEQ ID NO: 2780 - protein, 185 aa, Streptococcus agalactiae
MTKEIVTKAQERFEQSHQSLSREFAGIRAGRANASLLDRIQVEYYGAPTPLNQLASITVPEARVLLISPFDKSSIKDIERAINESDLGINPANDGSVIRLVIPALTEETRRDLAKEVKKVGENAKIAIRNIRRDAMDEAKKQEKNKEITEDDLKSLEKDIQKATDDAVKHIDEMTANKEKELLEV

SEQ ID NO: 2781 - protein, 729 aa, Streptococcus agalactiae
GTGGAACCTAAATATCAACGTATATTAATTAAGTTATCTGGTGAAGCATTGGCGGGAGATAAGGGTGTCGGTATTGACATTCCTACCGTTCAATCTATTGCAAAAGAAATTGCCGAAGTACACAATTCAGGTGTTCAAATAGCGCTTGTCATTGGTGGAGGTAATCTTTGGCGTGGAGAACCTGCAGCAGAAGCAGGGATGGATCGTGTTCAAGCTGATTATACAGGGATGTTAGGGACAGTAATGAATGCTCTTGTAATGGCTGATAGCCTTCAACAATATGGGGTAGATACTAGAGTTCAAACAGCTATTCCAATGCAAACTGTTGCTGAGCCTTACGTACGTGGTCGTGCTTTACGTCATCTAGAGAAGAATCGTATTGTTGTCTTTGGAGCGGGTATTGGTTCGCCTTATTTCTCAACTGATACAACAGCAGCGCTTCGTGCTGCTGAGATTGAGGCAGAAGCAATTTTAATGGCTAAAAATGGAGTAGATGGTGTTTATAATGCTGATCCAAAGAAAGATGCCAATGCTGTCAAATTTGATGAATTAACTCACGTTGAAGTAATAAAACGAGGGTTAAAAATCATGGATGCAACCGCATCAACTATTTCAATGGATAATGATATTGACCTTGTTGTTTTCAATATGAATGAGACTGGTAATATTAAGCGTGTTGTTCTTGGAGAACAAATCGGAACAACTGTTTCAAACAAAGCATCTGAATAG

SEQ ID NO: 2782 - protein, 242 aa, Streptococcus agalactiae
MEPKYQRILIKLSGEALAGDKGVGIDIPTVQSIAKEIAEVHNSGVQIALVIGGGNLWRGEPAAEAGMDRVQADYTGMLGTVMNALVMADSLQQYGVDTRVQTAIPMQTVAEPYVRGRALRHLEKNRIVVFGAGIGSPYFSTDTTAALRAAEIEAEAILMAKNGVDGVYNADPKKDANAVKFDELTHVEVIKRGLKIMDATASTISMDNDIDLVVFNMNETGNIKRVVLGEQIGTTVSNKASE

SEQ ID NO: 2783 - protein, 681 aa, Streptococcus agalactiae
ATGTTGGTTTGTAATCATGTCGGAAAAACATTTGGACGACAAGAGGTTTTAAAGGACTGTCATTTTCATCTTAAAAGAGGAGAAATAATTGGTATAATGGGTAAAAGTGGCAGTGGTAAAAGTAGCCTTGCCCGACTCATTATAGGACTAGATAGTCCTACTTGTGGTTCGATATATTTTCAAGGAAAAATTTACACACCTAAAGATGGTAAGGCGCAGATTATCCTTGTTTTTCAAGATGCGCTTAGTTCGGTCAATCCATATTTTAGTATTGAGGAAATTTTGAATGAAGCTTTTTATGGAAAAAAAACAACTTTTGAATTATGTCAAATATTAGAAGCGGTGGGTTTAGATGGAACTTATCTAAAATATAAAGCTAGACAACTTAGTGGTGGTCAGCTACAGAGAGTTTGTATCGCTAGAGCTTTACTCTTAAAGCCTAAAATTATTATTTTTGATGAATCCTTAAGTGGATTAGACCCAGTAACTCAAATTAAAATGCTACGTTTATTACAAAAAATAAAACGCCGTTATGAATTAAGTTTTATAATGATTTCTCATGACCCTAAAATTTGTCAAGCTATCTGTAACCGGGTCTTTCTGATAAAAAATGGTTATTTAGTAGAAGATAATGAATTCTTGAAGAGAGCGTGTTCTACTAACTGTTTGACCAATCTCTGA

SEQ ID NO: 2784 - protein, 226 aa, Streptococcus agalactiae
MLVCNHVGKTFGRQEVLKDCHFHLKRGEIIGIMGKSGSGKSSLARLIIGLDSPTCGSIYFQGKIYTPKDGKAQIILVFQDALSSVNPYFSIEEILNEAFYGKKTTFELCQILEAVGLDGTYLKYKARQLSGGQLQRVCIARALLLKPKIIIFDESLSGLDPVTQIKMLRLLQKIKRRYELSFIMISHDPKICQAICNRVFLIKNGYLVEDNEFLKRACSTNCLTNL

SEQ ID NO: 2785 - protein, 708 aa, Streptococcus agalactiae
ATGGGAGAATCGCTAACTATTATTGGTGAGAGTGGTTCAGGGAAAACCCTCTTGGCAAAATTATTGGTTGGTCACATTCCACAAGGTATGACAGTTAGAGGAAACATATTTTTTAAGGGAGTTGATTTAGGTAAACTAACTGTAAAGCAGTGGCAGAAATTAAGGGGACGAGATATTGCCTATTTAGTGCAAAATCCCATGTCTATGTTTAATCCTTTTCAAAAAATTGAAGCGCATATTTTGGAAACAATCCTTAGTCATGAGAAATGTTCAAAGAGAGTAGCCTTATCTAAAGCGTTAGAATGGATGAAACGTTTAAATTTAGATGATGCGATATCCCTGTTAAAAAAATACCCTTTTGAGCTTAGTGGAGGAATGCTACAAAGAATTATGTTAGCCACTATATTATCTCTTGATCCTCAGGTAATCATATTAGATGAGCCGACCTCAGCGGTTGATTGTCATAATTGTTCTACTATATCAGCTATTTTGCAGGAATTGCAAAATAATGGAAAAACCTTGATTACTGTAACGCATGATTATCAGTTAGCTAGAGACCTGGGGGGACAATTATTAGTTATAAGTGAGGGAGAAGTTGTTGAACAGGGACAAACCCAAGCTATTTTAAGCAATCCTCAACATAACTATACGAAAGCACTGACAGTGCAAATGGAGTATGAAGGAGATATTCTTAATGTTGGTTTGTAA

SEQ ID NO: 2786 - protein, 235 aa, Streptococcus agalactiae
MGESLTIIGESGSGKTLLAKLLVGHIPQGMTVRGNIFFKGVDLGKLTVKQWQKLRGRDIAYLVQNPMSMFNPFQKIEAHILETILSHEKCSKRVALSKALEWMKRLNLDDAISLLKKYPFELSGGMLQRIMLATILSLDPQVIILDEPTSAVDCHNCSTISAILQELQNNGKTLITVTHDYQLARDLGGQLLVISEGEVVEQGQTQAILSNPQHNYTKALTVQMEYEGDILNVGL

SEQ ID NO: 2787 - protein, 762 aa, Streptococcus agalactiae
GTGATTAGTGCCATTTTTGCCCCTATTCTATCTAGCTTTGATCCACAATACGTAGATTTATCACAAAAATTATTGGCTCCCAATAATGTTCATTTGTTAGGGACTGACCAATTGGGTAGAGATGTATTATCTCGCTTGCTTTATGGTGCTAGATATTCACTGTTTTTAGCTATTATTATTAGCTTATTGGAATTAACGATTGGTATGTTTGTGGGTCTTATTGTTGGTTGGTATCAAGGAAAGTTAGAAAACCTCTTTTTATGGATAGCTAATATTATTTTAGCTTTTCCGAGCTTTTTGCTCTCTCTTGCAACCGTGGGGATCTTAGGTCATGGTCTAGGGAATTTAATTTTTGCAATTGTCTTTGTGGAATGGGTTTACTATGCTAAATTAATGACCAATTTAGTTAAGAGTGCAAAAAAAGAGCCTTATGTGATAAATGCGCAAATTATGGGACTTTCAGTCTGGCATATTTTAAGAAAACATATTTTTCCTTTTGTGTATCAGCCAATCCTCGTTATGGTCCTTATGAATATAGGAAATATTATTTTAATGATTTCTGGCTTTTCTTTCTTAGGGATTGGTGTGCAACCTAATGTCACAGAATGGGGAATGATGTTGCACGATGCTAGAGGATATTTTAGGACAGCTACTTGGATGATGTTATCTCCTGGAATTGCGATTTTTTTAACAGTATTTTCCTTTAATACTTTAGGCGATGCCATAGATAAAAAAGATTGGAAACGACAATGGAACAGTTAG

SEQ ID NO: 2788 - protein, 253 aa, Streptococcus agalactiae
MISAIFAPILSSFDPQYVDLSQKLLAPNNVHLLGTDQLGRDVLSRLLYGARYSLFLAIIISLLELTIGMFVGLIVGWYQGKLENLFLWIANIILAFPSFLLSLATVGILGHGLGNLIFAIVFVEWVYYAKLMTNLVKSAKKEPYVINAQIMGLSVWHILRKHIFPFVYQPILVMVLMNIGNIILMISGFSFLGIGVQPNVTEWGMMLHDARGYFRTATWMMLSPGIAIFLTVFSFNTLGDAIDKKDWKRQWNS

SEQ ID NO: 2789 - protein, 945 aa, Streptococcus agalactiae
ATGTATCTAAGTAGTTCGATCATCAAAAAAATATTGTCAGCTTTTTTGGCATTGTTTTTCATATCACTTCTAACATTTATTCTTATCAAACTATCAACAGTTAATCCAGCAGAAAATTACCTTCGTTTATCAAAAATAAGTGTTAGTCCAGAAGCGCTAAAAGAAGCAGAGCACTATTTAGGTTTAGATAAGCCATTATGGAAGCAGTACTGGCTGTGGTTCCAAAAAGCATTAACAGGAGATTTTGGATATTCTTATGTGCTCAGGTTGCCAGTATTAGATTTGGTTTTACAACGGTTTTTGGCTACTTTATTTTTAGGCACGAGTGCCTTCTTGCTAATTGTTACCATTTCTACCCCGTTAGGTGTGTGGGCTGGCTTACATGAATCTGCTCGGAGTGATCACTTGATTCGATTTTTGAGTTTTTCTAGTGTGTCTATGCCAAATTTTTGGGTTGCTTACTTGTTGATGCTGCTATTTTCGGCAAAATTAAATCTTCTGCCTGTTTCAGGAGGTAACGATTTACAAAGTTTAATTTTGCCAAGTATTACCTTAAGTTTTTCTACCGTAGGTCAATACATAGCCCTTATTCGAAAAGCTATTAGTCAAGAAAATAGAAGTTTAAATGTGGAAAATGCCCGATTAAGAGGAGTAAAAGAACGTTATATTGTCACACATCACCTCCTTAGAAATGCCTTACCTGCGATAATGACAGCACTTAGCTTGACTTGGGTTTACTTATTAACAGGATCAATTATTGTTGAAGAAATTTTTTCATGGAATGGAATAGGACGTTTATTTGTGACCAGTCTAAGAACTTCAGATCTTCCAGTAATACAAGCTTGTATGCTAATTTTTGGAACCTTATTTTTAGCTAATAATTTTATGACACAGTGTTTTATGAATTGGGTTGATCCTCGGTTACGAAAGTCAAGGGAGAAATAA

SEQ ID NO: 2790 - protein, 314 aa, Streptococcus agalactiae
MYLSSSIIKKILSAFLALFFISLLTFILIKLSTVNPAENYLRLSKISVSPEALKEAEHYLGLDKPLWKQYWLWFQKALTGDFGYSYVLRLPVLDLVLQRFLATLFLGTSAFLLIVTISTPLGVWAGLHESARSDHLIRFLSFSSVSMPNFWVAYLLMLLFSAKLNLLPVSGGNDLQSLILPSITLSFSTVGQYIALIRKAISQENRSLNVENARLRGVKERYIVTHHLLRNALPAIMTALSLTWVYLLTGSIIVEEIFSWNGIGRLFVTSLRTSDLPVIQACMLIFGTLFLANNFMTQCFMNWVDPRLRKSREK

SEQ ID NO: 2791 - protein, 1617 aa, Streptococcus agalactiae
ATGAGACGTAACATATTATTGAGCATTACTTGTTTATTGATGGTGACTCTGACTGCATGCCATTCACAGGATAGCAAAAGTCATAAACTAAACAGTGATAAACTCACGCTTGCTTGGGGAGAAGACTTTGGTGATGTTAATCCGCATCGCTATAACCCTGATCAGTTTGTTATCCAGGATATGGTTTATGAGGGGTTGGTACGATATGGTGACAATGGGAAAATTGAACCAGCTTTAGCGAAAAGCTGGAGCATTAGTCAAGATGGAAAAACCTACACTTTTAAATTGAGAAATGCTAAATATTCTGATGGCAGTAACTTTAATGCTGCGAATGTCAAACGTAATTTTGATAGTATTTTTTCGAAGTCTAATAGAGGTAATCATAATTGGTTTAATTTAACGAATCAATTGGAAAATTATCGTGCCTTGAATCAAAGTACTTTTGAAATTAAACTGAAACAAGCTTATAGTGCTACTTTATATGATCTCTCTATGATTCGACCAATTCGCTTTTTATCTGATAGCGCTTTCCCTAAAGGTGATGATACAACTAAGAAGAATGTAAAAAAACCAATTGGAACGGGTCAATGGGTTGTGAAAAGTAAAAAGCAAAATGAATATATTACCTTCAAACGTAATGAGAATTACTGGGGAAAGAAACCAAAATTAAAAGAAGTAACCGTAAAAGTTATACCCGATGCTCAGACGCGTGCTTTAGCATTCGAATCAGGTGACGTTGATTTGATCTATGGGAATGGCATTATTGGTTTAGACACTTTTGCCCAATATACGAAGGACAAGAAATATGTCACAGCTATTTCTCAACCTATGTCAACAAGACTTTTGTTGCTAAATGCTAAGGAAAGTATTTTCCAAGATAAAAAAGTTCGTCAGGCAATGAATCATGCTATTGACAAGGTTTCTATTGCTAAGAACACCTTTAGAGGAACAGAAAAGCCAGCAGACACTATTTTTTCAAAATCAACATCTCACTCAGATGCTAAGTTAAATCCTTATAGCTATAATGTTGATAAAGCAAATCAGCTATTGGATCAAGCTGGTTGGAAGATGGGAAAAGATAAGGTTCGTGAAAAAGATGGTAAAACTCTAACCTTACGTCTTCCTTATATCGCCACTAAGGCAACTGATAAAGACCTGGTAACTTATTTCCAAGGAGAATGGCGTAAAATCGGTATTAATGTTTCTCTTATTGCTATGGAAGAAGATGATTATTGGGCTAATGCTAAAAAGGGTAATTTTGATATGATGTTAACCTATTCTTGGGGAGCACCATGGGACCCTCATGCTTGGATGTCGGCATTAACTGCCAAGGCAGATCATGGACATCCAGAAAATATAGCTTTAGAAAATCTAGCAACTAAAACTGAAATGGATAGACTTATTAAGTCAGCTCTAGTAGATCCTAAGGAAGAAAATGTTGATAGAGACTATAAGAAGGTTCTTGAATTATTGCATGATGAGGCTGTATATATCCCATTAACTTATCAATCGGTGATTTCTGTTTATAGGAAAGGTGATTTTAAAACCATGCGTTTTGCGCCAGAAGAAAATTCATTCCCATTACGCTATATAGAAAAAAACAATGTATCTAAGTAG

SEQ ID NO: 2792 - protein, 538 aa, Streptococcus agalactiae
MRRNILLSITCLLMVTLTACHSQDSKSHKLNSDKLTLAWGEDFGDVNPHRYNPDQFVIQDMVYEGLVRYGDNGKIEPALAKSWSISQDGKTYTFKLRNAKYSDGSNFNAANVKRNFDSIFSKSNRGNHNWFNLTNQLENYRALNQSTFEIKLKQAYSATLYDLSMIRPIRFLSDSAFPKGDDTTKKNVKKPIGTGQWVVKSKKQNEYITFKRNENYWGKKPKLKEVTVKVIPDAQTRALAFESGDVDLIYGNGIIGLDTFAQYTKDKKYVTAISQPMSTRLLLLNAKESIFQDKKVRQAMNHAIDKVSIAKNTFRGTEKPADTIFSKSTSHSDAKLNPYSYNVDKANQLLDQAGWKMGKDKVREKDGKTLTLRLPYIATKATDKDLVTYFQGEWRKIGINVSLIAMEEDDYWANAKKGNFDMMLTYSWGAPWDPHAWMSALTAKADHGHPENIALENLATKTEMDRLIKSALVDPKEENVDRDYKKVLELLHDEAVYIPLTYQSVISVYRKGDFKTMRFAPEENSFPLRYIEKNNVSK

SEQ ID NO: 2793 - protein, 690 aa, Streptococcus agalactiae
ATGGCTAAAAAAAGTAAAAACTTACGTGCTGCTCTTGAGAAAATTGACAGCACTAAAGCATACAGCGTAGAAGAAGCTGTAGCTCTTGCAAAAGAAACTAACTTTGCTAAATTTGATGCAACTGTTGAAGTTTCTTATAACCTTAACATTGACGTTAAAAAAGCTGACCAACAAATCCGTGGTGCTATGGTTTTACCAGCAGGTACTGGTAAAACTTCACGTGTTCTTGTTTTTGCTCGTGGTGCTAAAGCTGAAGAAGCTAAAGCAGCAGGTGCAGACTTTGTCGGTGAAGATGACTTAGTTGCTAAAATCCAAGGTGGATGGCTTGACTTTGATGTTGTTATCGCAACACCAGATATGATGGCACTTGTTGGACGTCTTGGACGTGTCCTTGGACCTCGTAACTTGATGCCAAACCCTAAAACTGGTACAGTAACTATGGACGTTGCTAAAGCAGTTGAAGAGTCTAAAGGTGGTAAAATTACTTACCGTGCTGATAAAGCAGGTAACGTCCAAGCCCTTATTGGTAAAGTTTCATTTGATGATGCTAAATTAGTTGATAACTTCAAAGCATTTAATGATGTTATTGTTAAAGCTAAACCAGCTACTGCAAAAGGAACTTACATCACAAACCTTTCAATTACAACAACACAAGGTGTTGGTATCAAAGTTGATCCTAACTCACTTTAA

SEQ ID NO: 2794 - protein, 229 aa, Streptococcus agalactiae
MAKKSKNLRAALEKIDSTKAYSVEEAVALAKETNFAKFDATVEVSYNLNIDVKKADQQIRGAMVLPAGTGKTSRVLVFARGAKAEEAKAAGADFVGEDDLVAKIQGGWLDFDVVIATPDMMALVGRLGRVLGPRNLMPNPKTGTVTMDVAKAVEESKGGKITYRADKAGNVQALIGKVSFDDAKLVDNFKAFNDVIVKAKPATAKGTYITNLSITTTQGVGIKVDPNSL

SEQ ID NO: 2795 - protein, 321 aa, Streptococcus agalactiae
ATGGGATTCACTAAAGAGTTTAACGCTCGTACAGCTGATCAAGCTGGTATGATTATTCCAGTTGTTATCTCAGTATATGAAGACAAATCATTTGATTTCATCACTAAAACACCACCAGCTGCTGTTCTTTTGAAAAAAGCTGCAGGTGTTGAAAAAGGATCAGGTGAACCTAACAAAACTAAAGTTGCAACAATTACTCGTGCGCAAGTACAAGAAATTGCTGAAACTAAAATGCCAGATTTAAACGCTGCAAACCTTGAGTCTGCAATGCGTATGATCGAAGGTACTGCTCGTTCTATGGGATTCACTGTTACTGACTAA

SEQ ID NO: 2796 - protein, 106 aa, Streptococcus agalactiae
MGFTKEFNARTADQAGMIIPVVISVYEDKSFDFITKTPPAAVLLKKAAGVEKGSGEPNKTKVATITRAQVQEIAETKMPDLNAANLESAMRMIEGTARSMGFTVTD

SEQ ID NO: 2797 - protein, 459 aa, Streptococcus agalactiae
ATGAATGNNNNNATCGAAACTGCTAAACACATACAGGTCATTAAGAGGACACTCTATGATAACAAGAGAGACTTCTTCGAACTCTTTCCTGTTATCCTAACGGATAATGGTGGGGAATTCGCTAGAGTGGATGATATTGAGATAGATGTTTGTGGACAGTCTCAACTCTTCTTTTGTGACCCTAATCGGTCTGACCAGAAAGCAAGAATCGAGAAGAATCATACCCTCGTGAGAGACATACTGCCTAAGGGGACTTCCTTCGACAACTTGACTCAAGAGGACATTAATCTGGCACTATCTCATATCAACAGCGTTAAGAGACAGGCTCTAAATGGTAAAACGGCTTATGAGCTATTCTCTTTTACTTACGGAAAAGACATCGCAAGTATACTCGGTATTGAGGAAATTACTGCGGAAGACGTCTGCCAATCTCCCAAACTATTAAAAGACAAAATCTAA

SEQ ID NO: 2798 - protein, 152 aa, Streptococcus agalactiae
  VARIANT 3, 4: Xaa = Any Amino Acid
MNXXIETAKHIQVIKRTLYDNKRDFFELFPVILTDNGGEFARVDDIEIDVCGQSQLFFCDPNRSDQKARIEKNHTLVRDILPKGTSFDNLTQEDINLALSHINSVKRQALNGKTAYELFSFTYGKDIASILGIEEITAEDVCQSPKLLKDKI

SEQ ID NO: 2799 - protein, 132 aa, Streptococcus agalactiae
ATGAATGAATGNNNNNCTTATGAGCTATTCTCTTTTACTTACGGAAAAGACATCGCAAGTATACTCGGTATTGAGGAAATTACTGCGGAAGACGTCTGCCAATCTCCCAAACTATTAAAAGACAAAATCTAA

SEQ ID NO: 2800 - protein, 43 aa, Streptococcus agalactiae
  VARIANT 4, 5, 6: Xaa = Any Amino Acid
MNEXXXYELFSFTYGKDIASILGIEEITAEDVCQSPKLLKDKI

SEQ ID NO: 2801 - protein, 1383 aa, Streptococcus agalactiae
ATGTTAACGACAAAGGAAAATTTCAAAGGAAATAACAAATTATTGGTGGGAATTGTACTCGCTGTACTATCATTTTGGTTATTTGCACAGTCTATTTTAAACATGGGACCAGATGTTCAGTCATCATTAGGTATTTCATCTGGTGCAATGGATATTGGTGTCTCAAGTACGGCATTGTTTTCAGGTTTATTTATTGTTGTAACTGGTGGTTTAGCAGATAAACTTGGTCGAGTTAAATTTACTTTTATTGGTCTTTGCTTAAATATTATTGGTTCTCTACTAATTGTTTTAGCTAATGGAGCAGTGCTATTTATTATGGGACGTATTTTTCAAGGATTGGCAGCAGCTTTTATTATGCCATCAACAATGGCCTTGGTTAAAACGTACTATGATGGTAAAGATAGACAACGTGCAGTTAGTTTCTGGTCAATCGGATCGTGGGGTGGCTCAGGTCTATGTTCTTATTTTGGTGGAGCGGTGGCAAGTACTCTAGGTTGGCGTTATGTCTTTATCTTTTCAATCATCGCATCAGTAGTTAGTTTTCTATTAATTTTAGGAACCCCAGAAAGTAAAAATGTTGGACAAAAAACTCACTTTGATTACCTTGGTTTAATTATTTTTATTATTTCAATGTTATCGTTAAATATTGGGATATCTATGGCTCAGGAACATGGATTGATGAACGTTATTCCATTGAGTCTTTTTACAGTGATGCTTATTGGATTTGTTCTGTTTTATTATGTTGAAACACGTAAATCTAATAGTTTTATTGACTTTCATCTGTTTGAAAATCGATTTTACTTAGGTGCGACAATATCAAATTTCTTACTGAATGCAGTTGCAGGAACTCTGATTGTTATTAATACTTACATGCAACAAGGTCGCCAGCTAACACCAAAGGTTGCAGGTGAAATGTCTTTAGGCTATTTGGTTTGTGTACTAATTGCTATCCGAGTTGGTGAGAAAATTTTACAACGTTTTGGTGCCCGTAAGCCAATGCTTTTGGGAGCTATGAGTACATTTGTTGGGATATTTTTAATGACTTTGGTCAATATTCAAGGACCTTTGTATCTTGTGTTAGTCTTTGTTGGTTATGCTTTATTTGGAACAGGCTTGGGGATCTATGCGACACCATCAACAGATACAGCTATTTCTAGTATTCCTAATGAAAAAGTAGGTTCTGCATCTGGAATTTACAAAATGGCAAGTTCACTAGGTGGTGCAATTGGTGTAGCAACTTCAATTGCGATTTATCATGCTTTTTCTGGTAATGCAGATTTTCACAAAGCAGCTTTGTGTGGATTAATTTTAAACCTAGTTTTTTGTAGTCTATCGATCTTATCAATTCTTTTTGTTATCCCTAAGAAAATTGAGGATAAATAA

SEQ ID NO: 2802 - protein, 460 aa, Streptococcus agalactiae
MLTTKENFKGNNKLLVGIVLAVLSFWLFAQSILNMGPDVQSSLGISSGAMDIGVSSTALFSGLFIVVTGGLADKLGRVKFTFIGLCLNIIGSLLIVLANGAVLFIMGRIFQGLAAAFIMPSTMALVKTYYDGKDRQRAVSFWSIGSWGGSGLCSYFGGAVASTLGWRYVFIFSIIASVVSFLLILGTPESKNVGQKTHFDYLGLIIFIISMLSLNIGISMAQEHGLMNVIPLSLFTVMLIGFVLFYYVETRKSNSFIDFHLFENRFYLGATISNFLLNAVAGTLIVINTYMQQGRQLTPKVAGEMSLGYLVCVLIAIRVGEKILQRFGARKPMLLGAMSTFVGIFLMTLVNIQGPLYLVLVFVGYALFGTGLGIYATPSTDTAISSIPNEKVGSASGIYKMASSLGGAIGVATSIAIYHAFSGNADFHKAALCGLILNLVFCSLSILSILFVIPKKIEDK

SEQ ID NO: 2803 - protein, 1215 aa, Streptococcus agalactiae
ATGGCCAATGCATCTTTGCGACATCAATTATTTGAAAAACTTGACCAAAAATGTGATCAAATGGTTGCTATTCGTCGCTATTTACATGAAAATCCCGAATTATCATTTAAAGAGACAAAAACAGCAGCTTATATTTCAGATTTTTATAAAGGTAAGGACTGTCATGTTCAGACACAATTTGGTGGTATGAATGGCGTCGTAGTTGATATCTATGGTGATAAAGCGACAGATAAGCCCATCAAACACATTGCTTTGAGAGCCGACTTTGATGCTCTTCCAATTCAGGAAGAGACAGGGCTTTCTTTTGCTTCAAAAACAGCGGGCGTCATGCATGCTTGTGGACATGATGCCCATACAGCTTATTTATTGATTTTGGCTGAGAGCTTGATTGAATTAAAATCAGAATTTTCAGGTCATATCCGTATCTTACATCAACCGGCTGAAGAGGTGCCACCAGGCGGAGCAAAAGCAATGATTGAAGCAGGATGTTTAGATGGCATTGATGCTGTCCTTGGTATCCATGTTATGTCAACGATGGAAGAGGGAACGGTACAATATCACGCAGGTCCCATTCAAACAGGGCGTGCCACTTTTAAAGTTATTTTGCAAGGTAAGGGTGGACATGGTTCCATGCCACATCGTGCAAATGATACAATTGTTGCAGCTTCTAGTTTTGTTATGGCAGCGCAAACGATTGTCAGTCGTCGAGTTAATCCATTTGACACAGCAGTAGTTACTATCGGATCTTTTGATGGTAAAGGTTCTGCTAATGTGATCAAAGATAGTGTAACCTTAGAAGGTGATGTGCGCGTGATGTCTGAAGAGACACGAGGTGTTGTTGAGGAGGAATTTAAGCGTATTCTAGATGGAATAGCACAAACTTATGGTGTTAGTTATCAGTTAGACTATCAGAATGATTATCCTGTTTTAGTTAATAACAGTGAAGTGACACAGAAAGTTGCAAATAGTTTAAAATCTGTTGCTATAAAAGAAATTTTAGATGTCATTGATTGCGACCCTCAAACGCCGTCTGAAGATTTTGCCTATTATGCTCAAACAATCCCAGCTTGCTTCTTCTATGTTGGAGCACATGAAGAGGGGCAACCATATTACCCACATCATCATCCAAAATTCCAAATTGCAGAATCATCATTGATGGTATCTGCTAAATCAATGGCAACAGCAGCGCTTGCTATGCTTGTAGAAGGAGAATAG

SEQ ID NO: 2804 - protein, 404 aa, Streptococcus agalactiae
MANASLRHQLFEKLDQKCDQMVAIRRYLHENPELSFKETKTAAYISDFYKGKDCHVQTQFGGMNGVVVDIYGDKATDKPIKHIALRADFDALPIQEETGLSFASKTAGVMHACGHDAHTAYLLILAESLIELKSEFSGHIRILHQPAEEVPPGGAKAMIEAGCLDGIDAVLGIHVMSTMEEGTVQYHAGPIQTGRATFKVILQGKGGHGSMPHRANDTIVAASSFVMAAQTIVSRRVNPFDTAVVTIGSFDGKGSANVIKDSVTLEGDVRVMSEETRGVVEEEFKRILDGIAQTYGVSYQLDYQNDYPVLVNNSEVTQKVANSLKSVAIKEILDVIDCDPQTPSEDFAYYAQTIPACFFYVGAHEEGQPYYPHHHPKFQIAESSLMVSAKSMATAALAMLVEGE

SEQ ID NO: 2805 - protein, 906 aa, Streptococcus agalactiae
TTGAAAAATCAACAAAAATTAATGTATCTAGAGAGTATCGAGCTATACTCAAACATCACTAAAGCCGCTGCACACCTTTTTATTTCTCAACCTTACCTAAGCAAAGTGATCAAGCAATTAGAAAATGAGTTAGAAATAAAACTCATCCAGAGCCAAGGACACCAAACCTTTTTAACTTATGCTGGACAGAGATATCTATTCTACCTAAAAGAAATTGATATGATTGAGCGTCAAATGGCCAAAGAACTATATCTCATCCGTTCTGATAAAAAAGGAGAAATCACACTTGGGATTAACTCTGGCTTAGCAAGTTCTATTCTGGCAAATGTACTTCCCAAATTTAACTTGGAGCACCCAGAAATTTCTGTCAAATTACTCGAAAACAATCAAAATATTTCTGAACAATTGGTAGCGAGTGGTGATATTGACCTAGCTGTTGGGATGGCTCCTATCCTTTATAAAGATGGAATTGCATCAACCACTATTTACCGCGACGAATTGTTTTTAATGATACCTACCACCAGCCAACTCTACAACGCTGAAAAACGTGGACAGATTATTCCTTTTGAATATCCTATTTCAGTTCTAGACAATGAACCTCTTATCCTAACACCATTAGAGTACGGAATTGGCAAAACAATTGCACAATTCTATGAGCTTCATCACATGTCATTAAATCAGATGATTACAACTAGTACCGTTCCTACAGCAGCTAGCCTATCTTTGTCAGGGATGGGAGCAACATTTGTTCCACAAACTCTCATTCATCGCTATTTGGATAAAGAGTGCAATGTCTACCATTTTCATAAGAATAAGTTATTTTCAGAGTACATTATGATTTATAAAAAAGATGTTGAATTATCTGGAATTGCTCTCCTACTTTATAAAGCTTTTTTAACCAAGTAG

SEQ ID NO: 2806 - protein, 301 aa, Streptococcus agalactiae
MKNQQKLMYLESIELYSNITKAAAHLFISQPYLSKVIKQLENELEIKLIQSQGHQTFLTYAGQRYLFYLKEIDMIERQMAKELYLIRSDKKGEITLGINSGLASSILANVLPKFNLEHPEISVKLLENNQNISEQLVASGDIDLAVGMAPILYKDGIASTTIYRDELFLMIPTTSQLYNAEKRGQIIPFEYPISVLDNEPLILTPLEYGIGKTIAQFYELHHMSLNQMITTSTVPTAASLSLSGMGATFVPQTLIHRYLDKECNVYHFHKNKLFSEYIMIYKKDVELSGIALLLYKAFLTK

SEQ ID NO: 2807 - protein, 537 aa, Streptococcus agalactiae
ATGAAATTAAGTTATGAAGATAAACTAGAAATATACGAGTTAAGAAAGATCGGGATGTCCTGGTCTCAGATTAGTCAACGATATGATGTTCGTATCTCGAATCTTAAATACATGATAAAACTCATGGATCGGTATGGTGTAGAAATCGTCGAAAAAGGTAGAAATGAGTATTATCCACCTGAATTAAAGCAGGAAATGATAGATAAAGTCTTGATTCATGGTTGTTCTCAACTCTCTGTTTCTCTTGATTATGCTCTCTCTAATTGTTCTATACTCACAAATTGGCTTTCCCAATTTAAGAAAAATGGTTATACTATTGTTGAGAAAACAAGAGGGAGACCGAGTAAAATGGGACGTAAGCGTAAGAAAACTTGGGAAGAAATGACAGAGCTCGAGCGACTTCAGGAAGAAAATGAGCGCTTGAGAACGGAGAATGCCTTTCTAAAAAAGTTGAGGGATTTGCGCTTGAGGGACGAAGCCTTACAGAGCGAACGGCAGAAACAATTAGAGAAATGGTCACAGGAGGATTCCGACTAG

SEQ ID NO: 2808 - protein, 178 aa, Streptococcus agalactiae
MKLSYEDKLEIYELRKIGMSWSQISQRYDVRISNLKYMIKLMDRYGVEIVEKGRNEYYPPELKQEMIDKVLIHGCSQLSVSLDYALSNCSILTNWLSQFKKNGYTIVEKTRGRPSKMGRKRKKTWEEMTELERLQEENERLRTENAFLKKLRDLRLRDEALQSERQKQLEKWSQEDSD

SEQ ID NO: 2809 - protein, 834 aa, Streptococcus agalactiae
ATGGTCACAGGAGGATTCCGACTAGACCTCTTACTTGAGATAACTAAGATAGCTCGTGCAACTTACTATTATCAACTAAAGAAACTGAATAAACCAAATAAAGACAAAGCAATCAAATCTGACATTCAATCCATTTATGATGAACATAGAGGAAACTATGGCTATCGTCGGATTTATTTAGAACTGCGAAATCGTGGCTTTGTCATCAACCACAAAAGGGTGCAAGGCTTGATGAAAAGTATGGGCTTGACTGCTCGTATTCGTCGTAAGCGCAAGTATGCCTCTTACAAAGGTGAGGTTGGTAAGAAGGCTGATAACCTGATTCAACGCCAGTTTGAGGGGTCGAAGCCCTATGAGAAGTGCTATACCGATGTGACGGAGTTTGCTTTACCTGAAGGGAAACTTTATCTATCGCCTGTTCTTGATGGCTATAACAGTGAGATAATTGATTTTACCCTGTCTCGGTCTCCTGACTTGAAACAGGTTCAAACCATGCTTGAGAGGGCTTTTCCTGCGGCTTCATACAGCGAAACCATTCTCCACAGCGACCAAGGCTGGCAGTACCAGCACAAGTCCTACCATCAATTTCTGGAGGACAAAGGCATTCGTCCTTCTATGTCACGGAAGGGGAACAGTCCTGACAACGGTATGATGGAATCTTTCTTTGGGATTCTAAAATCTGAGATGTTCTATGGCTTGGAGAAGTCTTACAAATCACTTGATGACCTTGAGCAAGCTATCACAGATTACATTTTTTACTACAACAACAAGCGAATCAAAGCAAAACTAAAAGGACTTAGTCCTGTGCAATACAGAACTAAATCCTTCACTTAA

SEQ ID NO: 2810 - protein, 277 aa, Streptococcus agalactiae
MVTGGFRLDLLLEITKIARATYYYQLKKLNKPNKDKAIKSDIQSIYDEHRGNYGYRRIYLELRNRGFVINHKRVQGLMKSMGLTARIRRKRKYASYKGEVGKKADNLIQRQFEGSKPYEKCYTDVTEFALPEGKLYLSPVLDGYNSEIIDFTLSRSPDLKQVQTMLERAFPAASYSETILHSDQGWQYQHKSYHQFLEDKGIRPSMSRKGNSPDNGMMESFFGILKSEMFYGLEKSYKSLDDLEQAITDYIFYYNNKRIKAKLKGLSPVQYRTKSFT

SEQ ID NO: 2811 - protein, 1716 aa, Streptococcus agalactiae
ATGCATATTGAGACTGTTATTGATTTCAAAGAATTAGGAAAAAGATATCGTTTTAAAAATCCTACAAAAGAATTAATAGCTGATACTTTAGAACAAGTCTTAGAAGTGATAAAAGAAGTTGATTATTATCAATCTCAAAATTATTATGTTGTTGGTTATTTATCTTATGAAGCATCTGCTGCTTTTGATTCACATTTTAAAGTTTCTCAACAGAAGTTGGCTGGAGAACATCTAGCTTATTTTACAGTACATAAAGATTGTGAGAACGAAGCTTTTCCTTTAAGTTATGAAAATGTTAGATTAGCAGATAATTGGACTGCTAATGTTTCTGAGCAAGAATATCAAGAGGCAATTGCTAATATTAAAGGACAAATTAGACAAGGAAATACTTATCAAGTAAATTATACACTAGAGCTTAGCCAACAATTATGCTCGGATCCCTTTAGTGTTTATGAACGCCTAATGGTAGAACAAGGAGCAGGATATAATGCTTATATTGCCTACGACGATAAAAGGATTTTATCTGTAAGCCCGGAATTGTTCTTTAAGAAGAAGGATGAAGTCTTAACAACTAGACCAATGAAGGGAACAAGCGCTAGAAAGCCTACTTATCAAGAAGATGTGGCGGAGCGAGATTGGTTGGCAAATGATCCTAAAAATCGTTCTGAAAATATGATGATTGTTGATTTATTAAGAAACGATATGGGCCGTATCTGTGATGTTGGAACAGTTAAGGTAAAAAAACTATGTCAAGTGGAGCAGTATGCAACTGTGTGGCAAATGACATCAACTATTGAAGGAGTTTTATCGCCAGAAGTGACACTTATGTCTATTTTTCAAGCTCTATATCCTTGTGGATCTATCACTGGAGCTCCTAAGATATCAACAATGGCTATTATTAATGAGTTGGAAAAACGGCCAAGAGGTATTTATTGTGGGACGATAGGACTTTGCATGCCAGACGGACAAGCTATTTTTAACGTTCCTATTCGCACAGTACAAATGAAAGGTCAACAAGCCTATTACGGCGTTGGTGGAGGTATTACGTGGGAGAGCCAGACAGATTCTGAATATGAAGAAACCCGTCAAAAATCAGCTGTTTTAACACGTGTCAATCCAAAATTTCAATTAATAACTACAGGAAGAGTGACTGAAAATAAACTTCTTTTCTCTCAACAACATGTCGAGAGATTAGTTGAATCAGCGTCTTATTTTGCTTATTCTTTTGATAAAAGTAAATTCGAAAGGGAACTGAAAAAATACCTTCATCAGCTAGATGAGAAGGATTACCGCTTGAAAATAATGCTTGATAAAACTGGTAAGGTAACGTTTGAGGTAAAACAACTAGTGAATTTATCAAAAAAGTTTTTAACGGCAGAGGTGGTCGTACAAGACTACCCTATTAAATTATCCCCGTTTACTTATTTTAAAACTTCTTATCGCCCACATATTATTGAAGGTCAGAATGAAAAGATATTTGTATCTCCTGAGGGGTTGCTATTGGAAACAAGTATTGGGAATATTGTTTTAGAAAAAAATGGAAGGTTTTTAACCCCAGATTTATCAGAAGGAGGGTTGAATGGGATTTATCGTCGTCATCTCCTTAAAAACCAAAAAGTAATTGAAGCACCACTAACTTTAAAAGATTTAGAATCAGCCGATGCTATATACGCCTGTAATGCTGTTAGAGGGCTTTATCCTCTAAACCTAAAGTAA

SEQ ID NO: 2812 - protein, 571 aa, Streptococcus agalactiae
MHIETVIDFKELGKRYRFKNPTKELIADTLEQVLEVIKEVDYYQSQNYYVVGYLSYEASAAFDSHFKVSQQKLAGEHLAYFTVHKDCENEAFPLSYENVRLADNWTANVSEQEYQEAIANIKGQIRQGNTYQVNYTLELSQQLCSDPFSVYERLMVEQGAGYNAYIAYDDKRILSVSPELFFKKKDEVLTTRPMKGTSARKPTYQEDVAERDWLANDPKNRSENMMIVDLLRNDMGRICDVGTVKVKKLCQVEQYATVWQMTSTIEGVLSPEVTLMSIFQALYPCGSITGAPKISTMAIINELEKRPRGIYCGTIGLCMPDGQAIFNVPIRTVQMKGQQAYYGVGGGITWESQTDSEYEETRQKSAVLTRVNPKFQLITTGRVTENKLLFSQQHVERLVESASYFAYSFDKSKFERELKKYLHQLDEKDYRLKIMLDKTGKVTFEVKQLVNLSKKFLTAEVVVQDYPIKLSPFTYFKTSYRPHIIEGQNEKIFVSPEGLLLETSIGNIVLEKNGRFLTPDLSEGGLNGIYRRHLLKNQKVIEAPLTLKDLESADAIYACNAVRGLYPLNLK

SEQ ID NO: 2813 - protein, 1512 aa, Streptococcus agalactiae
ATGGTTTATGATTTAGATGATGATGTAGATGATAGTGATATAGAAAATGTCGACTTTACACCTAAAACGACACTGGTTTATAAATTACCAACGATAGATTTATTTGCACCAGATAAGCCTAAAAATCAATCCAAAGAAAAGGATTTAGTCCGAAAGAATATCAGAGTTTTAGAAGAAACATTTAGAAGTTTTGGTATCGATGTAAAAGTAGAACGTGCTGAAATTGGACCATCAGTTACTAAATATGAAATTAAACCAGCAGTTGGAGTTCGTGTGAATCGTATTTCAAATCTATCTGACGACCTAGCTCTTGCTCTTGCAGCAAAAGATGTGCGTATAGAAACACCAATTCCTGGAAAATCATTAATAGGTATTGAAGTTCCTAACTCAGAAATTGCAACGGTTTCTTTCCGCGAACTTTGGGAACAATCTGATGCCAATCCTGAAAACCTTTTAGAAGTACCACTAGGAAAAGCTGTTAACGGCAATGCTCGCAGTTTTAACTTAGCTAGAATGCCGCATCTTTTGGTAGCTGGTTCAACTGGTTCAGGTAAATCTGTGGCAGTTAATGGAATTATTTCAAGTATTTTGATGAAGGCACGTCCAGATCAAGTTAAGTTTATGATGATTGATCCCAAAATGGTTGAATTATCTGTTTATAATGATATTCCACATTTATTAATCCCTGTTGTAACCAATCCGCGTAAAGCAAGTAAGGCACTCCAAAAAGTTGTTGATGAAATGGAAAATCGATACGAGTTATTTAGCAAAATTGGTGTGCGTAATATAGCAGGTTATAATACAAAGGTTGAAGAGTTTAATGCTTCCTCTGAGCAAAAACAAATACCTTTGCCTTTAATCGTTGTCATTGTAGATGAATTGGCTGACTTGATGATGGTTGCTAGTAAAGAAGTTGAAGATGCTATTATTCGTTTGGGGCAAAAAGCACGTGCTGCAGGTATCCATATGATTCTTGCAACTCAACGTCCATCCGTAGATGTTATTTCTGGTTTGATTAAAGCAAATGTTCCGTCGCGTATTGCATTTGCTGTTTCAAGTGGTACTGATAGCCGTACGATCCTTGATGAAAATGGTGCTGAAAAGCTCTTGGGACGGGGTGACATGCTCTTTAAGCCTATTGATGAGAATCATCCAGTACGACTACAAGGTTCCTTTATTTCAGATGATGATGTTGAAAGGATCGTTGGTTTTATCAAAGACCAAGCCGAGGCTGACTATGATGATGCCTTTGATCCTGGAGAAGTATCTGAAACAGATAACGGCTCTGGTGGTGGCGGCGGAGTACCTGAAAGTGATCCTCTTTTTGAAGAAGCCAAGGGACTCGTTTTAGAGACGCAAAAAGCAAGTGCCTCAATGATTCAACGCCGATTGTCTGTTGGTTTCAATAGAGCAACAAGACTAATGGAAGAATTAGAAGCAGCGGGGGTTATTGGTCCAGCAGAAGGAACCAAGCCACGAAAAGTTTTAATGACTCCAACTCCGAGTGAATAA

SEQ ID NO: 2814 - protein, 503 aa, Streptococcus agalactiae
MVYDLDDDVDDSDIENVDFTPKTTLVYKLPTIDLFAPDKPKNQSKEKDLVRKNIRVLEETFRSFGIDVKVERAEIGPSVTKYEIKPAVGVRVNRISNLSDDLALALAAKDVRIETPIPGKSLIGIEVPNSEIATVSFRELWEQSDANPENLLEVPLGKAVNGNARSFNLARMPHLLVAGSTGSGKSVAVNGIISSILMKARPDQVKFMMIDPKMVELSVYNDIPHLLIPVVTNPRKASKALQKVVDEMENRYELFSKIGVRNIAGYNTKVEEFNASSEQKQIPLPLIVVIVDELADLMMVASKEVEDAIIRLGQKARAAGIHMILATQRPSVDVISGLIKANVPSRIAFAVSSGTDSRTILDENGAEKLLGRGDMLFKPIDENHPVRLQGSFISDDDVERIVGFIKDQAEADYDDAFDPGEVSETDNGSGGGGGVPESDPLFEEAKGLVLETQKASASMIQRRLSVGFNRATRLMEELEAAGVIGPAEGTKPRKVLMTPTPSE

SEQ ID NO: 2815 - protein, 1317 aa, Streptococcus agalactiae
ATGGTATTTATGGCAAATAAGAAAAAAACAAAAGGAAAGAAAACCAGAAGACCTACTAAGGCAGAAATAGAGCGTCAAAGAGCTATTCAAAGGATGATTACTGCTCTTGTTTTAACAATTATTCTCTTCTTTGGTATTATCAGATTAGGTATTTTTGGTATTACAGTCTATAACGTCATCCGTTTTATGGTAGGTAGCTTGGCTTACTTATTTATTGCGGCAACTTTAATCTACCTTTATTTCTTTAAATGGTTGCGAAAGAAAGATAGCTTAGTAGCAGGTTTTTTGATAGCTTCTTTAGGATTATTGATTGAGTGGCATGCTTACCTTTTCTCAATGCCTATTTTGAAAGATAAAGAAATTTTGCGTTCAACTGCTCGATTAATTGTGTCTGATTTAATGCAATTTAAAATCACTGTTTTTGCCGGTGGAGGTATGTTGGGTGCTTTGATTTACAAGCCAATTGCTTTTCTCTTTTCTAATATTGGTGCCTATATGATTGGTGTTCTCTTCATCATTTTGGGTCTCTTTTTAATGAGTTCTCTGGAAGTTTATGACATCGTCGAATTTATTAGAGCTTTTAAAAATAAAGTGGCAGAGAAGCACGAGCAAAATAAAAAGGAGCGTTTTGCTAAGCGAGAGATGAAAAAAGCAATCGCTGAACAAGAGCGCATAGAGCGTCAAAAAGCTGAAGAAGAAGCTTATTTAGCTTCGGTTAATGTAGACCCTGAAACGGGTGAGATTCTAGAGGATCAAGCTGAGGACAATTTGGATGATGCGCTACCACCTGAGGTAAGTGAAACATCAACTCCGGTATTTGAGCCAGAGATCCTTGCTTATGAGACATCGCCTCAAAATGATCCTTTACCAGTAGAGCCGACAATTTATTTAGAAGACTATGATTCGCCGATTCCTAATATGAGAGAAAATGATGAGGAAATGGTTTATGATTTAGATGATGATGTAGATGATAGTGATATAGAAAATGTCGACTTTACACCTAAAACGACACTGGTTTATAAATTACCAACGATAGATTTATTTGCACCAGATAAGCCTAAAAATCAATCCAAAGAAAAGGATTTAGTCCGAAAGAATATCAGAGTTTTAGAAGAAACATTTAGAAGTTTTGGTATCGATGTAAAAGTAGAACGTGCTGAAATTGGACCATCAGTTACTAAATATGAAATTAAACCAGCAGTTGGAGTTCGTGTGAATCGTATTTCAAATCTATCTGACGACCTAGCTCTTGCTCTTGCAGCAAAAGATGTGCGTATAGAAACACCAATTCCTGGRAAATCATTAATAGGGTATTGA

SEQ ID NO: 2816 - protein, 438 aa, Streptococcus agalactiae
MVFMANKKKTKGKKTRRPTKAEIERQRAIQRMITALVLTIILFFGIIRLGIFGITVYNVIRFMVGSLAYLFIAATLIYLYFFKWLRKKDSLVAGFLIASLGLLIEWHAYLFSMPILKDKEILRSTARLIVSDLMQFKITVFAGGGMLGALIYKPIAFLFSNIGAYMIGVLFIILGLFLMSSLEVYDIVEFIRAFKNKVAEKHEQNKKERFAKREMKKAIAEQERIERQKAEEEAYLASVNVDPETGEILEDQAEDNLDDALPPEVSETSTPVFEPEILAYETSPQNDPLPVEPTIYLEDYDSPIPNMRENDEEMVYDLDDDVDDSDIENVDFTPKTTLVYKLPTIDLFAPDKPKNQSKEKDLVRKNIRVLEETFRSFGIDVKVERAEIGPSVTKYEIKPAVGVRVNRISNLSDDLALALAAKDVRIETPIPGKSLIGY

SEQ ID NO: 2817 - protein, 159 aa, Streptococcus agalactiae
ATGAAAAAAATTATTTATCTTGGTTTAGCCTGTGTCAGTATATTAACTTTAAGTGGTTGCGAGTCAATTGAGCGTTCTCTAAAAGGAGACCGTTATGTTGACCAAAAACTAGCTGAAAACTCTTCAAAGGAAGCTNNNNNCATTCCATTCATTAATTAA

SEQ ID NO: 2818 - protein, 52 aa, Streptococcus agalactiae
  VARIANT 46, 47: Xaa = Any Amino Acid
MKKIIYLGLACVSILTLSGCESIERSLKGDRYVDQKLAENSSKEAXXIPFIN

SEQ ID NO: 2819 - protein, 244 aa, Streptococcus agalactiae
ATGTTTACGAAATTTTTTGAAGGCTTATTGACTTATCATTTTTTGCAAAATGCTTTTATAACTGCAATTGTGATTGGTATTGTAGCGGGTGCAGTAGGCTGTTTTATTATCTTGCGCTCAATGTCTTTGATGGGTGATGCTATTTCTCACGCTGTTCTACCAGGTGTTGCTATATCTTTTATTTTAGGGATTAACTTTTTATAGGKGCTATTGKCTTTGGGTTTGKTGTCTCGATTATCATTAN

SEQ ID NO: 2820 - protein, 82 aa, Streptococcus agalactiae
  VARIANT 72, 76, 82: Xaa = Any Amino Acid
MFTKFFEGLLTYHFLQNAFITAIVIGIVAGAVGCFIILRSMSLMGDAISHAVLPGVAISFILGINFFIGAIXFGFXVFDYHX

SEQ ID NO: 2821 - protein, 372 aa, Streptococcus agalactiae
GTGATTGATCAAGTTGGTTTGAGAGGGTTTGAAAATAGACCAATTAATGCCTTATCAGGTGGACAATTTCAACGTATGCTTATGGCAAGATGTCTCGTTCAAGAAGCGGATTACATTTTTTTAGATGAGCCGTTTGTAGGGATTGATTCCATTAGTGAACAAATCATAGTTAATTTACTAAAAAAATTAAGTAAGGCCGGAAAATTAATTTTAGTCGTCCATCACGATTTGAGTAAAGTTGATCATTATTTTGATCAAGTAATTATTTTGAACCGTCATCTAATTGCTTGTGGACCAATAGATCAGGCATTTACCCGTGAGAATTTAAGTGCTGCTTACGGTGATGCTATTTTGTTAGGACAAGGAGACTAG

SEQ ID NO: 2822 - protein, 123 aa, Streptococcus agalactiae
MIDQVGLRGFENRPINALSGGQFQRMLMARCLVQEADYIFLDEPFVGIDSISEQIIVNLLKKLSKAGKLILVVHHDLSKVDHYFDQVIILNRHLIACGPIDQAFTRENLSAAYGDAILLGQGD

SEQ ID NO: 2823 - protein, 191 aa, Streptococcus agalactiae
ATGNNNNNAGGGATTGGGGGAGATTTGCTACCTTTAATGGGGAGAGTAGCATATGTTGAACAAAAAACTAATATTGATTACCAATTCCCTATAACTGTTGGAGAATGCGTTTCTTTAGGATTATATAAGGAACGAGGCCTCTTCAAGCGACTATCAAAAACTGACTGGGAAAAAGTATCCCGAGTGATTGA

SEQ ID NO: 2824 - protein, 63 aa, Streptococcus agalactiae
  VARIANT 2, 3: Xaa = Any Amino Acid
MXXGIGGDLLPLMGRVAYVEQKTNIDYQFPITVGECVSLGLYKERGLFKRLSKTDWGKSIPSD

SEQ ID NO: 2825 - protein, 648 aa, Streptococcus agalactiae
ATGACTCCAAATAAAGCAGATTACCTAAAATGCATTCATGAATTAGGTGAAAAAAACAACAAAATTTCCAATAAGAAAATCGCTGAAATGATGCAAGTCTCGGCTCCTGCCGTGTCAGAAATGATTAAAAAAATGATAAGTGAACAACTGATTGTTAAAGATAAAGATTTAGGATATTATCTTACCAAACAAGGTTTATTAGTTGTTTCTGACCTTTACCGTAAACATCGTCTAGTAGAGGTATTTTTAGTTAACCATTTGCACTATACTGCTGATGATATTCATGAAGAAGCGGAAGTTTTAGAACATACTGTATCAACAACTTTTGTTGATCAATTAGAAAAGTTGTTAGACTTTCCACAATTTTGTCCACACGGTGGGACTATTCCTAAAAAGGGAGAGTTTTTAGTAGAAATTAACCAAATGACATTGGACCAAATTAGTCAGCTTGGCACATATGTTATCAGTCGTGTTCATGATGATTTTCAGCTACTGAAATACCTAGAACAACACCGTTTGCATATCAACGATACCATTGAATTGACACAAATTGACCCTTATGCAAAAACTTATCACATCACCTATAACGATGAAAATCTAACAATCCCTGAGCGTATCGCAAGTCAAATATATGTATCTGCTACATAA

SEQ ID NO: 2826 - protein, 215 aa, Streptococcus agalactiae
MTPNKADYLKCIHELGEKNNKISNKKIAEMMQVSAPAVSEMIKKMISEQLIVKDKDLGYYLTKQGLLVVSDLYRKHRLVEVFLVNHLHYTADDIHEEAEVLEHTVSTTFVDQLEKLLDFPQFCPHGGTIPKKGEFLVEINQMTLDQISQLGTYVISRVHDDFQLLKYLEQHRLHINDTIELTQIDPYAKTYHITYNDENLTIPERIASQIYVSAT

SEQ ID NO: 2827 - protein, 690 aa, Streptococcus agalactiae
ATGAAAATTGGAATTATTGCAGCCATGGAGGAAGAGTTAAAACTCCTTGTGGAAAATCTTGAGGATAAATCTCAAGAGACAGTATTATCAAATGTATATTACAGTGGACGTTATGGTGAACATGAGCTTGTTTTAGTACAGTCTGGTGTTGGGAAAGTCATGTCAGCGATGAGTGTTGCTATTTTAGTAGAAAGCTTTAAAGTTGATGCTATTATTAATACAGGATCAGCTGGTGCAGTAGCAACAGGATTGAATGTAGGAGACGTCGTTGTCGCAGATACATTAGTTTATCACGATGTAGATTTAACCGCCTTTGGTTATGACTATGGACAAATGTCAATGCAGCCACTTTATTTTCATTCGGATAAGACTTTTGTTTCCACTTTTGAAGCAGTTTTATCTAAAGAAGAAATGATTAGTAAAGTTGGTTTAATTGCAACTGGGGATAGTTTTATTGCTGGCCAGGAAAAGATTGATGTTATTAAGGGGCATTTTCCACAGGTTTTAGCTGTCGAGATGGAAGGTGCAGCAATTGCCCAAGCTGCTCAAGCTACAGGAAAGCCCTTTGTGGTGGTACGTGCTATGAGTGATACTGCAGCTCATGATGCCAATATCACATTTGATGAATTTATCATTGAAGCTGGTAAACGCTCTGCCCAAGTATTAATGGCATTTTTGAAAGCATTATAA

SEQ ID NO: 2828 - protein, 229 aa, Streptococcus agalactiae
MKIGIIAAMEEELKLLVENLEDKSQETVLSNVYYSGRYGEHELVLVQSGVGKVMSAMSVAILVESFKVDAIINTGSAGAVATGLNVGDVVVADTLVYHDVDLTAFGYDYGQMSMQPLYFHSDKTFVSTFEAVLSKEEMISKVGLIATGDSFIAGQEKIDVIKGHFPQVLAVEMEGAAIAQAAQATGKPFVVVRAMSDTAAHDANITFDEFIIEAGKRSAQVLMAFLKAL

SEQ ID NO: 2829 - protein, 270 aa, Streptococcus agalactiae
ATGGGAAAACCATTGTTAACAGATGATATGATTGAACGTTCAAATCGAGGTGAAAAAGTTTCAGGTCAAACAATCTTAGATCAAGAAACTAAAATTATTTCTACAGAAGATGGCATGGAGCAACTAACTGACGAGAACGGTAAACATATCTACAAGAGTCGCCGGATTGAGAATGCAAAACGAAATGAATTTCAACGTAAGTTGAATTTAGTTTTATTCATTTTGCTTATTTTGTTGGCTCTCTTGTTTTATGCAATTTTTAAATTATAA

SEQ ID NO: 2830 - protein, 89 aa, Streptococcus agalactiae
MGKPLLTDDMIERSNRGEKVSGQTILDQETKIISTEDGMEQLTDENGKHIYKSRRIENAKRNEFQRKLNLVLFILLILLALLFYAIFKL

SEQ ID NO: 2831 - protein, 554 aa, Streptococcus agalactiae
ATGGATTTTGAAGAAAAAACAATTAATCGTCAAACTGTTTTTGATGGACAAATTATCAAAGTAGCTGTTGATGATGTAGAGTTGCCAAATGGATTGGGACAATCCAAACGTGAACTTGTTTTTCATGGAGGAGCTGTTGCTACTTTGGCGGTAACTCCTGAGCATAAAATTGTTTTAGTGAAACAGTATCGTAAGGCTATTGAAGGTATTTCTTACGAAATTCCAGCAGGGAAACTTGAGACGGGTGAGTCAGGTTCTAAGGAAGAAGCTGCCCTTCGGGAATTAGAAGAAGAGACTGGCTACACAGGGAATCTTGAAATTCTTTATAGTTTCTACACTGCTATTGGTTTTTGTAATGAGAAAATCGTCCTCTATCTAGCTACTGATTTACAAAAAGTTGAAAATCCTAGGCCACAAGATGATGATGAGGTCCTTGAGCTTCTAGAGTTAAGTTATGAGGATTGTATGCAAATGGTAGAAAAAGGCATGATTCAGATGCGAAAACGATCATTGCTTTACAATATTACGGTTTAAAAATGGGAGGTCATTCTTAA

SEQ ID NO: 2832 - protein, 184 aa, Streptococcus agalactiae
MDFEEKTINRQTVFDGQIIKVAVDDVELPNGLGQSKRELVFHGGAVATLAVTPEHKIVLVKQYRKAIEGISYEIPAGKLETGESGSKEEAALRELEEETGYTGNLEILYSFYTAIGFCNEKIVLYLATDLQKVENPRPQDDDEVLELLELSYEDCMQMVEKGMIQDAKTIIALQYYGLKMGGHS

SEQ ID NO: 2833 - protein, 1242 aa, Streptococcus agalactiae
ATGGAATGNNNNNTTATTGGACATAAGGCGGAGCTTGTACGTGATGTTTTAGGTGACAAATCAGAGTTTGTAATGCAAACAGAACAGCTAGGAACTGGCCATGCTGTAATGATGGCGGAAGAAGAATTAGCGACATCAAAAGGACATACACTAGTTATTGCAGGTGATACACCCCTGATTACTGGAGAAAGTTTAAAAAACTTAATTGATTTTCATGTCAATCATAAAAACGTTGCAACAATCTTAACAGCCGATGCTGCAAATCCATTTGGATATGGTCGTATTATCCGTAATTCAGATGATGAAGTTACTAAAATTGTAGAACAAAAGGATGCTAATGACTTTGAGCAGCAGGTTAAAGAGATTAATACTGGAACTTATGTTTTTGATAATCAAAGTCTATTTGAAGCACTTAAAGACATTAATACAAATAACGCTCAAGGAGAGTATTATCTAACTGATGTTATTGGAATTTTCAAAGAAGCGGGTAAAAAGGTAGGTGCCTATAAACTTCGTGACTTTGACGAAAGTCTAGGAGTTAATGATCGTGTAGCACTTGCAACTGCTGAAAAAGTGATGCGTCACCGAATTGCACGTCAACATATGGTTAATGGGGTCACAGTGGTTAATCCTGATTCCGCTTATATTGATATTGATGTTGAGATTGGAGAAGAATCTGTAATTGAGCCTAATGTGACTTTAAAAGGACAGACGAAGATTGGTAAAGGTACTTTATTAACCAATGGTAGTTATTTAGTAGATGCTCAAGTCGGAAATGATGTTACCATCACTAATTCGATGGTTGAAGAATCCATTATTTCTGATGGAGTAACCGTAGGCCCTTATGCGCATATTAGACCAGGAACAAGTCTTGCAAAAGGTGTTCATATTGGTAATTTCGTTGAAGTAAAGGGTTCTCAAATAGGTGAGAATACGAAGGCAGGTCATTTAACTTATATCGGCAATGCAGAGGTAGGTTGTGATGTTAACTTTGGCGCAGGGACGATTACTGTCAATTATGATGGACAAAATAAATTTAAAACAGAAATCGGAAGTAATGTCTTTATCGGAAGTAATTCTACTCTGATTGCACCACTTGAAATTGGTGATAATGCTTTAACAGCAGCTGGATCTACCATCACAGATAATGTTCCAATTGATAGCATAGCTATTGGAAGAGGACGTCAAGTCAATAAAGAAGGATATGCCAATAAAAAACCACATCATCCTTCACAAAAGTAA

SEQ ID NO: 2834 - protein, 413 aa, Streptococcus agalactiae
  VARIANT 3, 4, 5: Xaa = Any Amino Acid
MEXXXIGHKAELVRDVLGDKSEFVMQTEQLGTGHAVMMAEEELATSKGHTLVIAGDTPLITGESLKNLIDFHVNHKNVATILTADAANPFGYGRIIRNSDDEVTKIVEQKDANDFEQQVKEINTGTYVFDNQSLFEALKDINTNNAQGEYYLTDVIGIFKEAGKKVGAYKLRDFDESLGVNDRVALATAEKVMRHRIARQHMVNGVTVVNPDSAYIDIDVEIGEESVIEPNVTLKGQTKIGKGTLLTNGSYLVDAQVGNDVTITNSMVEESIISDGVTVGPYAHIRPGTSLAKGVHIGNFVEVKGSQIGENTKAGHLTYIGNAEVGCDVNFGAGTITVNYDGQNKFKTEIGSNVFIGSNSTLIAPLEIGDNALTAAGSTITDNVPIDSIAIGRGRQVNKEGYANKKPHHPSQK

SEQ ID NO: 2835 - protein, 414 aa, Streptococcus agalactiae
ATGGTTAAAGCACTAGAAACATACATCGTAACAAATGGAAATGGGCGACAAGCGGTTGATTTTTATAAAGATGTCTTTCAAGCGGATTTAGTGAATATGATGACATGGGAAGAGATGGACCCCAACTGTCTTGAAGACCGCAAGGATTTAATCATTAATGCTCAGCTTATTTTTGATGGCATTCGTCTTCAAATCTCGGATGAAAATCCAGATTTCGTGTATCAAGCTGGTAAAAATGTTACAGCCGCTATTATTGTGGGTAGCGTAGAGGAGGCGCGTGAAATTTATGAAAAATTAAAGAAGAGTGCACAAGAAGTTCAGTTAGAGTTACAAGAAACTTTCTGGAGTCCTGCTTACGCAAACTTAGTAGACCAATTTGGTGTGATGTGGCAAATTTCAACAGAGTTAAACTAA

SEQ ID NO: 2836 - protein, 137 aa, Streptococcus agalactiae
MVKALETYIVTNGNGRQAVDFYKDVFQADLVNMMTWEEMDPNCLEDRKDLIINAQLIFDGIRLQISDENPDFVYQAGKNVTAAIIVGSVEEAREIYEKLKKSAQEVQLELQETFWSPAYANLVDQFGVMWQISTELN

SEQ ID NO: 2837 - protein, 378 aa, Streptococcus agalactiae
ATGATTTCATCAATTGGACAGGTAATGCTCTACGTTAGCAATGTTGAAGCATCAGCAGATTTTTGGAAAAACAAGGTGGGTTTTGAGCGTGTTGAAAAACAGACACAAGGAGATTATGTAACCTATATAGTTGCACCGAAGTTGGATAGTGAAGTTAGCTTCGTCTTACATGACAAAGCAATTATAGCTCAAATGAGTCCTGAGCTAGATTTAGCAACTCCCTCTATTTTATTTGAAACTACTGATATTGACAGTACATATCAAGAATTAACAGCAAATGAGGTTATGACAAATCCTATTGTTGATATGGGGAGTATGAGAGTTTTTAATTTTTCCGATAATGACAATAATTACTTTGCAATCCGTGAAGTAAAATAA

SEQ ID NO: 2838 - protein, 125 aa, Streptococcus agalactiae
MISSIGQVMLYVSNVEASADFWKNKVGFERVEKQTQGDYVTYIVAPKLDSEVSFVLHDKAIIAQMSPELDLATPSILFETTDIDSTYQELTANEVMTNPIVDMGSMRVFNFSDNDNNYFAIREVK

SEQ ID NO: 2839 - protein, 957 aa, Streptococcus agalactiae
ATGAAATTAGCGGTTTTGGGGACAGGTATGATTGTTAAGGAAGTTTTGCCTGTCTTGCAGAAAATTGAAGGTATTGATCTAGTTGCTATCTTATCAACAGTTAGAAGTTTGGAGACAGCTAAAGATCTAGCTAAGGAATATAACATGTCTCTAGCTACGAGTGAATATAAGGCTGTCTTGGACAATGAGGAGATTGACACAGTCTATATTGGACTGCCGAATCACTTGCATTTTGACTATGCTAAGGAGGCACTCTTGGCAGGAAAACATGTCATTTGTGAGAAGCCATTTACATTAGAAGCAAGTCAATTAGAAGAACTTGTATCTATTGCCAATACTAGGCAACTAATATTACTCGAAGCAATTACAAATCAATATTTACCTAATTTTGACCTTGTAAAAGAACATTTAAGCAACCTTGGAGATATTAAAATTGTAGAATGTAATTATTCCCAATATTCATCGCGTTATGATGCCTTTAAACGTGGGGAAATAGCACCAGCTTTCAATCCTGAAATGGGTGGAGGTGCGTTGAGAGACCTTAATATTTATAATTTACATTTAGTAATTGGACTTTTTGGAGAACCTATAACAGCACAGTATTTACCAAATATAGAGCGTGGTATTGATACTTCAGGAGTTCTAGTCCTAGACTATGGGCACTTTAAAACAGTCTGTATTGGAGCAAAAGATTGTAGTGCAGAAGTAAAATCTACTATTCAAGGTGATAAGGGGTCTATAGCGATTTTAGGGCCAACTAATACTATGCCTAAAATTTCATTAACTATGAATGGACAAGAAAGTCATGTTTATCAATTAAATGGTGATAGGCACCGCATGCACGATGAATTTGTTATTTTTGAAGGTATTATTAGCAATTTAGATTTTAAGCGTGCTGCTCAAGCTTTAGAACATAGTAGAACGGTGATGAAAGTTCTAGATATGGTAACGAAATAA

SEQ ID NO: 2840 - protein, 318 aa, Streptococcus agalactiae
MKLAVLGTGMIVKEVLPVLQKIEGIDLVAILSTVRSLETAKDLAKEYNMSLATSEYKAVLDNEEIDTVYIGLPNHLHFDYAKEALLAGKHVICEKPFTLEASQLEELVSIANTRQLILLEAITNQYLPNFDLVKEHLSNLGDIKIVECNYSQYSSRYDAFKRGEIAPAFNPEMGGGALRDLNIYNLHLVIGLFGEPITAQYLPNIERGIDTSGVLVLDYGHFKTVCIGAKDCSAEVKSTIQGDKGSIAILGPTNTMPKISLTMNGQESHVYQLNGDRHRMHDEFVIFEGIISNLDFKRAAQALEHSRTVMKVLDMVTK

SEQ ID NO: 2841 - protein, 249 aa, Streptococcus agalactiae
TTGGATAGCAATGATGAAGCTATCTGTATTATTGAAATAACTAAAGTTGATATTGTCCCTTTTAAAGATGTCTCTGCAGACCATGCTTTTAAAGAAGGAGAAGGAGATAAAACTTTAGAATGGTGGAGAAAAGCTCACATTGATTTCTTTAAACCTTATTTTGAGGAGTTTGGTTTAATGTTTAGTGAGGACTCTAGGATAGTTTTAGAGGAATTCCAAGTGGTTTACCCAAAGGAGATTAACGAATGA

SEQ ID NO: 2842 - protein, 82 aa, Streptococcus agalactiae
MDSNDEAICIIEITKVDIVPFKDVSADHAFKEGEGDKTLEWWRKAHIDFFKPYFEEFGLMFSEDSRIVLEEFQVVYPKEINE

SEQ ID NO: 2843 - protein, 243 aa, Streptococcus agalactiae
ATGAAGGCACAAGAATTATGGAATAAGTTTAAATCTTTGAATCCTTCAATCGGTGATGAGATAGACGCATGGCAATTTGGAGCAGAACCAGATCTTCTGGCAAAGTTAGTTGTAGATGGGACAAAAACTGCAACGGCCTCTGCCTATGATTTATATGAATTAGATGAGGAAGGGTTACACAAGTTGGTTCATATGATATTATTTTGGATAGCAATGATGAAGCTATCTGTATTATTGAAATAA

SEQ ID NO: 2844 - protein, 80 aa, Streptococcus agalactiae
MKAQELWNKFKSLNPSIGDEIDAWQFGAEPDLLAKLVVDGTKTATASAYDLYELDEEGLHKLVHMILFWIAMMKLSVLLK

SEQ ID NO: 2845 - protein, 699 aa, Streptococcus agalactiae
ATGACTAAAGTTGTTTTAGTGACGGGCTGTGCTAGTGGAATTGGTTATGCACAGGCTCAATATTTTTTGAAACAAGGGTATCAAGTATATGGTGTGGATAAGTCGGATAAACCGAACTTAAATGGTAATTTTAACTTTATAAAGTTGGATTTATCCTCTGATTTATCCCCACTATTCACAATGGTACCGACTGTTGATATTTTGTGTAATACTGCAGGTATTCTAGATGCCTACAAGCCACTTCTAGAAGTAAGTGATGAAGAACTGGAACACCTATTTGATATTAATTTTTTCGTGACTGTTAGGCTAACACGTCATTATCTTAGACGTATGGTGGAAAAGAAGTCAGGTATTATTATCAATATGTGCTCAATAGCAAGTTTTATAGCGGGTGGCGGTGGAGCTGCATATACTAGTTCTAAACATGCCCTTGCGGGATTCACACGTCAATTGGCTTTGGATTACGCAAAAGATTGTATTCAAATTTTTGGTATAGCGCCAGGTGCTGTACAAACTGCTATGACTGCTAGTGATTTTGAACCTGGTGGATTAGCAGAATGGGTAGCTAGTGAGACGCCAATTGGTCGTTGGACTAAACCAAGTGAAGTTGCTGAATTAACTGGATTTCTTGCTTCAGGAAAAGCGAGATCAATGCAAGGTGAAATTGTCAAAATTGATGGTGGCTGGAGTTTGAAATGA

SEQ ID NO: 2846 - protein, 232 aa, Streptococcus agalactiae
MTKVVLVTGCASGIGYAQAQYFLKQGYQVYGVDKSDKPNLNGNFNFIKLDLSSDLSPLFTMVPTVDILCNTAGILDAYKPLLEVSDEELEHLFDINFFVTVRLTRHYLRRMVEKKSGIIINMCSIASFIAGGGGAAYTSSKHALAGFTRQLALDYAKDCIQIFGIAPGAVQTAMTASDFEPGGLAEWVASETPIGRWTKPSEVAELTGFLASGKARSMQGEIVKIDGGWSLK

SEQ ID NO: 2847 - protein, 237 aa, Streptococcus agalactiae
ATGACATTTGAAGAAATTTTACCAGGTTTAAAAGCAAAGAAAAAATATGTACGTACAGGTTGGGGGGGCGCTGAAAATTATGTTCAGTTATTTGATACCCTTGAAGTTAATGGGAAAGTACTACAGGCTACACCTTATTTTCTTATTAATGTTACTGGTGAAGGTGAAGGTTTTTCCATGTGGGCACCAACACCATGTGATGTTTTAGCAGAGGATTGGATCGAGGTCAATGACTAA

SEQ ID NO: 2848 - protein, 78 aa, Streptococcus agalactiae
MTFEEILPGLKAKKKYVRTGWGGAENYVQLFDTLEVNGKVLQATPYFLINVTGEGEGFSMWAPTPCDVLAEDWIEVND

SEQ ID NO: 2849 - protein, 249 aa, Streptococcus agalactiae
ATGGAGAAAATTACGAATGATTTTGAAAAAGTTATAGCTGTGCTAAATCAACTAAGTATTTCTTATGAATTAGTGGAAAATGGACCTGTTTTGTTGACGGAGCAAGCAGATAACTTTATTGTGGGAATTGAAGGAGTAAGAACAAAAATAATGTTCTTGACCAACAAGAAAAAGACGAAATATTATTTACTAATAATGGATGACCAGAAACTATTTTATCCTATGAAAACAATAGTAGCCTTTAGATGA

SEQ ID NO: 2850 - protein, 82 aa, Streptococcus agalactiae
MEKITNDFEKVIAVLNQLSISYELVENGPVLLTEQADNFIVGIEGVRTKIMFLTNKKKTKYYLLIMDDQKLFYPMKTIVAFR

SEQ ID NO: 2851 - protein, 501 aa, Streptococcus agalactiae
ATGGCTTGCATAATCAGGAGAGCAAGATTAGGAGATGAAGTCAATTTAGCTTATATTCAAACGGAGAGCTGGAAAGCTGCTTTTGGTAAGATACTACCTGAGGATATCATTCAAAAAACTACGGAAATAGAACCTGCCATAACAATGTATCAACAGCTACTACACAAGGAGGTTGGTAAGGGGTATATATTGGAAGTAGATAGCAATCCTCATTGTATGGCTTGGTGGGATAAAAGTAGAGAAGATGGTATGCTTGATTATGCAGAACTCATTTGTATACATAGTCTTAAAGAAGGTTGGGGAAAAGGTTATGGGTCTCAAATGATGAATCATGTACTATCAGAGATACAACAAGCAGGTTATAATAAAGTGATACTTTGGGTATTTACAGAAAATACACGCGCAAGGAAATTTTACGATAGGTTTGGTTTTTCTTTTAAGGGTAAATCAAAAACTTATTTTGAAAAGGAAGAAATGTGTTATGAGAAGATTTTGCACTAG

SEQ ID NO: 2852 - protein, 166 aa, Streptococcus agalactiae
MACIIRRARLGDEVNLAYIQTESWKAAFGKILPEDIIQKTTEIEPAITMYQQLLHKEVGKGYILEVDSNPHCMAWWDKSREDGMLDYAELICIHSLKEGWGKGYGSQMMNHVLSEIQQAGYNKVILWVFTENTRARKFYDRFGFSFKGKSKTYFEKEEMCYEKILH

SEQ ID NO: 2853 - protein, 1413 aa, Streptococcus agalactiae
ATGGCATTATTTTTTACCTTCCTAAAGGTATCTCAAGTCATTTTCTTAGTATTATTGATTGCCTATGCCAGCTTTTTAGTGATTTCATTAGTCATTGGAGGTGTTCATCTCTATGAAAAAAATGAGCGCAAAAAAAGTTTAACTAGAAATAAAGAAAAAATTCCAATTTCAATTATTGTACCAGCCTATAATGAATCAACAACCATTGTGAGTTCGATTGATTCGTTATTGCACCTTGATTATGAAGCGTATGAAATTATCGTTGTGGATGACGGTTCCAGTGACAATACTTCAGATGTTCTCAAGGAAGAGTTTGCATTAATGAAAATCTCGAATACGATTGATTCAATTATTGCTACTCAAACTTGTAAAGATGTCTTTCAGAGACAGGTTGGTAAGGTTAAACTGACACTCATTGTTAAAGAAAATGGTGGCAAAGGGGATGCCTTAAATATGGGGATCAATGCTGCTAATTACGATTATTTTCTATGTCTAGATGCAGATTCTATGTTGCAGGTAGATTCTTTGAGTCAAATTAGCAAATCCATACAGGTAGATCCGACGGTTATAGCAGTGGGAGGGCTCGTCCAAGTTGCCCAAGGTGTTAAGATTGAGCAGGGGAAAGTAGCATCTTATCGTTTGCCTTGGAGAATTATTCCTTGTGCACAAGCACTTGAGTATGATTCATCATTTTTAGGAGCTCGAATCTTTTTAGACTATTTAAGAGCTAATTTAATTATTTCGGGGGCTTTCGGTCTTTTTAAGAAAGACCTTGTTAAAGCGGTGGGAGGATATGACACCCAGACTCTAGGAGAAGATATGGAGTTGGTGATGAAATTACATTTCTTCTGTCGTAATAATAATATTCCTTATCGTATTTGTTATGAAACAGATGCTGTTTGTTGGAGTCAAGCACCAACGAATTTAGGGGATTTACGTAAACAGAGACGCCGATGGTATCTTGGCTTGTACCAATGTTTAAAAAAATATAAAAGTATTTTTGCCAATTATCGCTTTGGAGCTGTAGGATCAATTTCTTATATTTACTATATTTTATTTGAATTACTGACCCCTTTTATAGAATGTTTTGGTATTGTCATTATATTTTTGTCCTTATTATTTAATCAATTAAACATCCCATTCTTTATATCATTGGTGAGCCTTTATATCTTTTACTGTGTTTTAATTACATTAAGCTCTTTCTTACACCGTATTTATTCTCAGCAACTAGTAATAGGAATTTTAGATATTGTTAAAGTATTTTATATTGCTGTTTTTAGGTATCTTATCCTACATCCTGTATTAACTTTTGTTAAGGTTGCAAGTGTTATTGGCTATAAAAATAAAAAAATGGTTTGGGGGCATATTACGAGAGAGAAACAAATGAAGGATTTTGAAACAAGTGTTACTTAG

SEQ ID NO: 2854 - protein, 470 aa, Streptococcus agalactiae
MALFFTFLKVSQVIFLVLLIAYASFLVISLVIGGVHLYEKNERKKSLTRNKEKIPISIIVPAYNESTTIVSSIDSLLHLDYEAYEIIVVDDGSSDNTSDVLKEEFALMKISNTIDSIIATQTCKDVFQRQVGKVKLTLIVKENGGKGDALNMGINAANYDYFLCLDADSMLQVDSLSQISKSIQVDPTVIAVGGLVQVAQGVKIEQGKVASYRLPWRIIPCAQALEYDSSFLGARIFLDYLRANLIISGAFGLFKKDLVKAVGGYDTQTLGEDMELVMKLHFFCRNNNIPYRICYETDAVCWSQAPTNLGDLRKQRRRWYLGLYQCLKKYKSIFANYRFGAVGSISYIYYILFELLTPFIECFGIVIIFLSLLFNQLNIPFFISLVSLYIFYCVLITLSSFLHRIYSQQLVIGILDIVKVFYIAVFRYLILHPVLTFVKVASVIGYKNKKMVWGHITREKQMKDFETSVT

SEQ ID NO: 2855 - protein, 1836 aa, Streptococcus agalactiae
ATGNNNNNCGATGCCTTATATCACCTTTACAAAGCATCAAAGAGGCCACTGTATTTGTTGCAAGGAATACGTATAGATTCTTATCGCAATAATGCTTCTATAACAGCTTTTAATGATAATTATAGGGGGTATTTAAAACGAGAAGCAAAAGGCGTTGTGGATATTCTCCATGGGCGTAAGCAAGTATGGAATACTGATTTGGGTAGCCGTCATTATCATTATGATCTTAGTCCTTGGGTACTTGGTTATGTCGTAGGGGATGATTGGAATAGTGGTACTGTCGCTTATACTAATCATCAAGAGAAAAAAACGCAATATAAAGGACGTTATTTTAAAACTTCTGTGGCAGCTAATCCATTTGAGGTCATGCTAGCTCAAGTAATGGATGAATTGACACATTATGAGACAGCTAAATATGGKTGGCAACATTTGATTAGTTTTTCAAACTCACCAACAACAGACCCTTTTCATTATCGAAAACCATTTGAGGCACAGGCTCCTAAATACGTACAACTAAATGTAGAAAATATTCAAGCTAATTCAAATGTTAAAGCAGGTATGTTTGCAGCATATAAAGCTATTGATTTCCATCCTCGATACAAGGATTATCTATTATTTGATAAAGAGAATATCAGTAAAGAAGATAGACAAAAGATTAAAGAACTTTCTTTGTCACAGGGATACGTTAAACTGCTAAATGCTTATCACAAAATCCCTGTTCTAGTCACGGGTTATGGCTATTCGACAGCGAGAGGTATTGCCCAAAAAGAAATTGATAAACGTCCTCTGCCGATTAATGAAAAAGAACAAGGTCAGCGTTTACTAGAAGATTATGAATCTTTTATATCATCCGGTAGTTTTGGAGCGACTATCAATGCATGGCAAGACGATTGGAATGCAAGGGCGTGGAATACATCTTTCGCCACAAATAAACATAGTCAATTCCTATGGGGGGATGCACAAGTATTTAATCAAGGTTATGGTTTATTAGGCTTTAAAAACGCAAAACATCATTATCAAGTTGATGGTAAAAGAGGCAAAGGAGAGTGGAAACATCCTCTGATGACTAGTGCAACAGGAGATGACTTATATGCTAGCAGTGATGAAAGCTATCTCTACCTTGCGATTAAAACAAAACCTGAAAAACTAAAAGAAAAACGATTATTACCAATAGATATTACACCAAAATCTGGTAGTAGAAAAATGAATGGTAGTAAGGTCACATTTTCTAAATCTAGTGACTTTGTATTGTCTATTGATCCAAATGGCAAGTCTGAATTATTTGTCCAAGAGCGCTATAATGCCTTAAAAGCGAACTATCTTCGACAGCTTAACGGTAAAGATTTTTATGCTTTCCCACCAAAGAAGAACAGTAGTAATTTTGAGCAGATAAATATGGTATTGAGAAATACAAAGATTGTTGAAGACATGGAAAAAGTAAAAGCAACAGAGAGGTTCTTACCAACTCATCCTACTGGTCTTCTCAAAACAGGAACAACTGATAGGCACCAAAAAACATTTGATTCACAAACAGATATTTCGTTTGGAAAGGACTTTATAGAGGTCAGAATTCCGTGGCAGTTGTTGAATTTTTCTGATCCATCATCTCAAAAAATTCACGATGATTACTTTAAACATTATGGTGTGAAGGAGTTAGAAATTGAGAGCATTGCTTTAGGATTAGGTGCTAATAGCAAAGAAAACACACTGATAAAGATGGCAGATTATCGTTTGAAAAATTGGGAGAGACCCGATACCAAAACCTTTTTAAAAGACTCCTATTATAGTATTAAGAAAGAATGGTCTAAAGAAAGAGAGAGAACATATGGTACATAA

SEQ ID NO: 2856 - protein, 611 aa, Streptococcus agalactiae
  VARIANT 2, 3: Xaa = Any Amino Acid
MXXDALYHLYKASKRPLYLLQGIRIDSYRNNASITAFNDNYRGYLKREAKGVVDILHGRKQVWNTDLGSRHYHYDLSPWVLGYVVGDDWNSGTVAYTNHQEKKTQYKGRYFKTSVAANPFEVMLAQVMDELTHYETAKYGWQHLISFSNSPTTDPFHYRKPFEAQAPKYVQLNVENIQANSNVKAGMFAAYKAIDFHPRYKDYLLFDKENISKEDRQKIKELSLSQGYVKLLNAYHKIPVLVTGYGYSTARGIAQKEIDKRPLPINEKEQGQRLLEDYESFISSGSFGATINAWQDDWNARAWNTSFATNKHSQFLWGDAQVFNQGYGLLGFKNAKHHYQVDGKRGKGEWKHPLMTSATGDDLYASSDESYLYLAIKTKPEKLKEKRLLPIDITPKSGSRKMNGSKVTFSKSSDFVLSIDPNGKSELFVQERYNALKANYLRQLNGKDFYAFPPKKNSSNFEQINMVLRNTKIVEDMEKVKATERFLPTHPTGLLKTGTTDRHQKTFDSQTDISFGKDFIEVRIPWQLLNFSDPSSQKIHDDYFKHYGVKELEIESIALGLGANSKENTLIKMADYRLKNWERPDTKTFLKDSYYSIKKEWSKERERTYGT

SEQ ID NO: 2857 - protein, 243 aa, Streptococcus agalactiae
ATGAAAAAATATCTAAGTATTGTAGCCCTTTTAACTATTTTGTTTAGCTCTATTTATTATTTGTATTACTTTGATGGTAGTTTGTATTTACCAAAGGGCTTATTAAAAGAAAATACAAGAACTAACTTTGTTGTTAAAGGTGATACTGTACTTCACAAGCCCACCAATAAACCTTTTGTTGTTAAAGGAGTAGACGTTGAGTCTTCCTTAGCGGGTNNNNNCATTCATTCATTAATTAATTAA

SEQ ID NO: 2858 - protein, 80 aa, Streptococcus agalactiae
  VARIANT 73, 74: Xaa = Any Amino Acid
MKKYLSIVALLTILFSSIYYLYYFDGSLYLPKGLLKENTRTNFVVKGDTVLHKPTNKPFVVKGVDVESSLAGXXIHSLIN

SEQ ID NO: 2859 - protein, 1485 aa, Streptococcus agalactiae
TTGATTATTTCAACATTGTTAGCCAAAGCGACGAAATCAATGGGTAGACTTATGAGAGGGAAGGTTATTTACGGCACAACCCTTATAGGTCTTTTTCTATTCTTATTTTTCTATTTTTGGATTCCTAAGCATCACATCGAGAGAATACATCATCATCGTATAAAGCAGGTAGATGCGAAGAGTGATTTAACAGGATTTAAAACCCATTTGCCCATTATCAGCATTGATACAAAGCAACAAGTTATTCCTCTTGTTACAAAAGAAGGCGGAAAATATGTCAAAGCTAGGGATAATATTAATGTTGATATCGAATTACGGGATTCTCCAAGTAGATCACATCATTTATCAGAAAAGCCGAGAATTAGGACAAAAGGGTTAATATCATATAGAGGAAATTCCTCTCGTTACTTTGATAAGAAGTCATTGAAAGTTAAGTTTGTTACTAATAAGTTAAAGGAAAAGAAGCATCGATTAGCAGGAATGCCTAAAGAATCGGAGTGGGTATTGCATGGTCCCTTTCTAGACAGAACATTATTAAGAAATTATCTGAGTTATAATATTGCTGGTGAGATTATGTCCTATGCCCCAAACGTTCGCTACTGTGAGTTATTTGTCAATGGTGAGTATCAGGGAGTATATCTAGCAGTTGAGAATATCGAACAAGGTGAGCAACGAGTTCCCATTGAAAAAAGTGATAAAAAGTTGCATAAAACACCTTATATCGTTGCTTGGGATCGTGAACATAAGGCAAAGCAAAAGTTAGATAACTATGTACATTATACACACCAGTCTGGTATCTCAGCTCTTGATGTGAAATATCCAGGTAAACAAAGATTGACATCAAAACAATTAGAGTTTATTAATAAGGACATCAATCATATTGAAAAAGTCCTTTATTCTTATGATTTTTCACAATATCCTAAATATATTGATAGAGAATCATTTGCAAATTATTTTGTCATCAATGAATTTTTTAGAAATGTGGATGCGGGTAAATTTTCAACCTATCTATATAAAGATCTTCGTGATAGAGCAAAACTAGTAGTTTGGGATTTTAATAATGCTTTTGATAATCAAATTGAAGGACGTGTTGATGAGGCAGATTTTACCTTGACGGATGCACCGTGGTTCAATATGCTCATTAAGGACAAAGCATTTATAGACCTGGTTGTTCATCGCTATAAAGAATTACGAAAGGGAGTTCTAGCGACAGAATATTTATCTAATTACATAGACGAGACAAGGCATTTTTTAGGTCCAGCTATTGATCGAAATTATAAAAAATGGGGCTATGTCTTTGATTTAAAGAATACTGATCCAAGGAATTATTTGATTCCTACTGAACGCAATGTGACAAGTTATCACAAATCAGTAGAACAATTAAAAGATTTTATCAAAAAGCGTGGCAGATGGATGGATAGAAATATTGAGACCTTGTATCAATATAGTGCACCATCGAAAAATACTAATACTTTACTGGAGTAG

SEQ ID NO: 2860 - protein, 494 aa, Streptococcus agalactiae
MIISTLLAKATKSMGRLMRGKVIYGTTLIGLFLFLFFYFWIPKHHIERIHHHRIKQVDAKSDLTGFKTHLPIISIDTKQQVIPLVTKEGGKYVKARDNINVDIELRDSPSRSHHLSEKPRIRTKGLISYRGNSSRYFDKKSLKVKFVTNKLKEKKHRLAGMPKESEWVLHGPFLDRTLLRNYLSYNIAGEIMSYAPNVRYCELFVNGEYQGVYLAVENIEQGEQRVPIEKSDKKLHKTPYIVAWDREHKAKQKLDNYVHYTHQSGISALDVKYPGKQRLTSKQLEFINKDINHIEKVLYSYDFSQYPKYIDRESFANYFVINEFFRNVDAGKFSTYLYKDLRDRAKLVVWDFNNAFDNQIEGRVDEADFTLTDAPWFNMLIKDKAFIDLVVHRYKELRKGVLATEYLSNYIDETRHFLGPAIDRNYKKWGYVFDLKNTDPRNYLIPTERNVTSYHKSVEQLKDFIKKRGRWMDRNIETLYQYSAPSKNTNTLLE

SEQ ID NO: 2861 - protein, 678 aa, Streptococcus agalactiae
ATGAAAGACCTATTACGAAATAGTCTAGAGCAAAGTGGAAATTTAAGTTTTCAAGATATGATTTTACATATTCTTGTAGCAGCTTTATTGAGTGTAGTTATTTATGTTTCCTATGCTTATACGCATAGTGGAACTGCCTATAGTAAAAAGTTTAATGTTTCATTAATGACATTGACGGTCTTGACTGCAACAGTAATGACCGTTATTGGTAATAATGTAGCCTTGTCATTGGGTATGGTCGGTGCCTTGTCAGTTGTTCGTTTTAGGACAGCCATAAAAGATTCAAGAGATACAGTTTATATTTTTTGGACCATAGTTGTTGGTATCTGTTGTGGTGTCGGTGACTATGTGGTAGCTGCATTAGGAAGTAGCGTTATCTTTATCTTATTATGGGTTATGGGACGTGTTAAAAACGAGAATCGTATGTTATTGATTGTGAAGTGCGATAGAACACTAGAAGTTGATTTAGAAGGAATTTTCTTCCAATATTTTGACGGAAAAGCTGTTCAGCGTGTTAAAAATTCAACAACTAATACTATTGAAATGATTTTCGAAATCTCTAGAAAAGATTACGATAAGCAACTCCATGTAGATAATCAGTTAACTGAAAAAGTGTACCAATTGGGAAATATTGATTATTTCAACATTGTTAGCCAAAGCGACGAAATCAATGGGTAG

SEQ ID NO: 2862 - protein, 225 aa, Streptococcus agalactiae
MKDLLRNSLEQSGNLSFQDMILHILVAALLSVVIYVSYAYTHSGTAYSKKFNVSLMTLTVLTATVMTVIGNNVALSLGMVGALSVVRFRTAIKDSRDTVYIFWTIVVGICCGVGDYVVAALGSSVIFILLWVMGRVKNENRMLLIVKCDRTLEVDLEGIFFQYFDGKAVQRVKNSTTNTIEMIFEISRKDYDKQLHVDNQLTEKVYQLGNIDYFNIVSQSDEING

SEQ ID NO: 2863 - protein, 696 aa, Streptococcus agalactiae
ATGAACGAAGTTCTTAGACAGGAAAAAAAATATTTAATATCACTTGAAGATTACTATCTTTTATCTAAGAAATTTTCCCAAGTAATGACGCTCGATTCGCATAGTTCAGACGACGGCTATACTATCCGTTCGCTATACTTTGATTCTTTAGAAGATGTTGATTGGCAAGAAAAGGAAGATGGTGTTGAGATACGAAGAAAGATTCGTTTGCGCAATTATGGTAGTCAAAGCAATTTTGCGAAATTAGAAATGAAACAAAAACAAGGTGCTAATCAAAAAAAGCGCTCTCTAAAATTAAGCAAGACAGATGCTCAAGCGCTGATTAATGGTAACAATAGTGTTTTATTAAATTATCCGGATACATTTGCTGCGGAGTGTTATTCAAGGATAACAACGCAACTTTATCAACCTAAAACGGTTATTGAGTACCAAAGAAAAGCTTTTGTTGCTAAGGAAAACAATATCCGAATCACCTTTGACCACCATATAATAGGTACAGAGGCTAGTTATGATATTTTCTCAGAGGATTTAAATCAAAATTATTTATTAGATCCTTATCTTGTTATTTTAGAAGTTAAATATAATGGATTTTTATTGTCTTATATTAAAGAACTCTTAGATTCGGTAGATAGAAGTGAACTTTCAGCGAGTAAGTATTGTTTAGGAAGAGCTGTTAGTAAACATTATCGTTTTTAG

SEQ ID NO: 2864 - protein, 231 aa, Streptococcus agalactiae
MNEVLRQEKKYLISLEDYYLLSKKFSQVMTLDSHSSDDGYTIRSLYFDSLEDVDWQEKEDGVEIRRKIRLRNYGSQSNFAKLEMKQKQGANQKKRSLKLSKTDAQALINGNNSVLLNYPDTFAAECYSRITTQLYQPKTVIEYQRKAFVAKENNIRITFDHHIIGTEASYDIFSEDLNQNYLLDPYLVILEVKYNGFLLSYIKELLDSVDRSELSASKYCLGRAVSKHYRF

SEQ ID NO: 2865 - protein, 1344 aa, Streptococcus agalactiae
TTGCTTATGGTAAAAAAAGGCTTTTTAACGGGATTACTCTTATTTGGTATCTTCTTTGGTGCAGGGAACCTCATTTTTCCACCAGCATTAGGTGTAGCATCTGGACAAGATTTCTGGCCAGCGATTTTAGGATTTTGTTTGTCAGGAGTTGGATTAGCTATTATTACCCTCCTACTAGGCACACTAACTAATGGTGGTTATAAGACAGAGATGTCGGAAAAATTTAGTCCGTGGTTTTCTTTAACATTTTTAGTTATACTCTACCTAACTATTGGTCCACTTTTTGCTATTCCTAGAACAGCAACGGTTTCTTTTGAAATTGGGGTTGCTCCAATTGTAGGGCATAGTCCGATTGCTCTTTTGTGTTTTACAGCCTGTTTTTTTGCTGCAGCTTATTATCTCGCTATTAGACCAAATGGTATATTAGATAGTGTTGGAAAAATCTTAACGCCTGTTTTTGCCTTTTTAATTCTCTCTTTGGTTGTTGTTGGAGCTATTGCTTATGGAAACTTGGAGAGTGCTAAGGCGAGTGCTGACTATGCAGGAAAAGCGTTTGGAAGTGGTGTCTTAGCAGGCTATAATACACTTGATGCACTTGCAGCAGTTGCTTTTTGTCTAGTAGCAACAGAAACGCTTAAAAAGTTTGGTTTTAAAACTAAAAAAGAATATTTATCAACCATTTGGATTGTTGGAATTGTTACTAGTTTAGCATTTAGTATTTTATATATTGGCTTAGGTTTTTTAGGGAATAAGTTTCCTGTCCCAGCTGATATTTTAGCTGACCCAAATGTTAATAAAGGAGCTTATGTATTATCACAAGCATCTTATAAATTATTTGGAAATTTTGGTCGTTATTTCTTGAGTATTATGGTAACATTGACATGCTTTACAACAACAGTTGGGCTTATTGTGTCAGTATCTGAATTTTTTGATAAGAACTTTCGTTTTGGGAATTATAAATTATTTGCTACTGTTTTTACTTTGATTGGCTTTTTAATTGCTAATCTTGGTTTAAATGCTGTAATTACTTTTTCAGTTCCTGTGCTAACTTTATTGTATCCGATTGTTATTGTTATTGTCTTAATTATTTTGATTAATAAGTGGTTGCCGCTTTCAAAAAAGGGAATGTCTTTGACAATTGGTCTTGTCACTTTAGTGTCGTTTGTTGAGGTTCTAGCGGGACAATGGCAAGAAAAAACATTAACTCAGTTAGTTGGATTCCTCCCCTTTCATACTATTTCAATGGGGTGGCTAGTTCCAATGTTGATTGGTATAGTATTTTCTTTGGTGCTGTCAGATAAACAAAAAGGCCAAGCATTTGATTTAGAGAAATTTGAAGGATAG

SEQ ID NO: 2866 - protein, 447 aa, Streptococcus agalactiae
MLMVKKGFLTGLLLFGIFFGAGNLIFPPALGVASGQDFWPAILGFCLSGVGLAIITLLLGTLTNGGYKTEMSEKFSPWFSLTFLVILYLTIGPLFAIPRTATVSFEIGVAPIVGHSPIALLCFTACFFAAAYYLAIRPNGILDSVGKILTPVFAFLILSLVVVGAIAYGNLESAKASADYAGKAFGSGVLAGYNTLDALAAVAFCLVATETLKKFGFKTKKEYLSTIWIVGIVTSLAFSILYIGLGFLGNKFPVPADILADPNVNKGAYVLSQASYKLFGNFGRYFLSIMVTLTCFTTTVGLIVSVSEFFDKNFRFGNYKLFATVFTLIGFLIANLGLNAVITFSVPVLTLLYPIVIVIVLIILINKWLPLSKKGMSLTIGLVTLVSFVEVLAGQWQEKTLTQLVGFLPFHTISMGWLVPMLIGIVFSLVLSDKQKGQAFDLEKFEG

SEQ ID NO: 2867 - protein, 264 aa, Streptococcus agalactiae
GTGGAAGGTTCTGATAAACTTCTTCGTTTCCGTCTAGATGCTGGTGATGAGGGCCATCGTCAAATCTTATCAGGGATTGCAAAATTTTACCCAAATGAACAAGAGTTAGTAGGGAAAAAACTCCAAATTGTTGCTAACCTCAAACCACGTAAAATGATGAAAAAATATGTCAGTCAAGGCATGATTCTCTCAGCAGAACATGATGGTAAATTGACAGTGTTGACGGTCGATTCAGCAGTGGCAAATGGATCAATTATTGGTTAA

SEQ ID NO: 2868 - protein, 87 aa, Streptococcus agalactiae
MEGSDKLLRFRLDAGDEGHRQILSGIAKFYPNEQELVGKKLQIVANLKPRKMMKKYVSQGMILSAEHDGKLTVLTVDSAVANGSIIG

SEQ ID NO: 2869 - protein, 1452 aa, Streptococcus agalactiae
ATGACAGAAAAAAAATCATTTTACATTACTACCCCAATTTATTACCCATCAGGTAAATTGCACATCGGTTCTGCCTATACAACGATAGCATGTGATGTTTTGGCACGTTACAAACGCATGATGGGCTTTGATGTTCAGTATTTGACTGGTCTTGATGAGCATGGTCAGAAAATTCAACAAAAGGCTGAAGAAGCAGGCATTACACCACAGGAATATGTTGATGGCATGGCTGAAAGTGTCAAAACATTATGGGAACTTTTAGATATTTCCTATGACAAATTCATCCGTACAACAGATACTTACCATGAAGAAGCGGTTGCTAAAATTTTTGAACAATTGTTGGCACAAGGGGACATCTATCTTGGTGAGTATACCGGATGGTATTCTGTTTCAGATGAAGAATTTTTTACTGAAAGCCAATTAGCAGAAGTTTATCGTGACGAAAACGGTAATATGATTGGTGGTGTTGCGCCATCTGGTCATGAAGTTGAAAAAGTTTCTGAAGAATCTTATTTCTTCCGCATGAGCAAATATGCAGATCGTTTAAAAGCGTACTACGCTGAGCATCCAGAATTTATTCAGCCAGATGGTCGTATGAATGAAATGCTTAAAAACTTTATAGAACCAGGTTTAGAAGATTTAGCAGTGTCTCGTACAACTTACACATGGGGAGTTCAGGTACCATCAAATCCAAAACATGTTATTTATGTCTGGATTGATGCTTTGATGAACTATATTTCTGCTCTTGGTTATGGTTGGTCTGACGATCTCAGTCAATATCATAAATTTTGGCCAGCAGACATTCATATGATTGGTAAAGATATTCTTCGTTTCCACTCTATTTATTGGCCTATCATGTTGATGGCGCTGGATTTGCCATTACCAAAACGTCTAGTTGCTCATGGTTGGTTTGTGATGCAAGATGGTAAAATGTCTAAATCAAAAGGGAATGTCGTTTATCCAGAAATGTTAGTAGAGCGTTTTGGTCTTGATCCACTCCGTTATTATCTCATGCGTTCATTGCCTGTTGGTTCAGACGGAACTTTTACGCCAGAAGATTATGTTGGACGTATTAACTATGAACTTGCTAATGATTTAGGAAACCTTCTCAACCGCACTATTGCTATGGTTAACAAGTATTTCGATGGAGAAGTACCAAGGTTTGCTGTTGCAACTGACTTTGATGCCGATTTAGCTTCTGTTGCGACAGATAGTATTGAAAACTATCATAAACAAATGGAAGCGGTGGATTTCCCACGTGCCCTTGAAGCTGTATGGAATCTTATTTCACGAACTAACAAATATATTGATGAAACAGCACCGTGGGTACTTGCAAAAGACGAAACAGATCGTGATAAGTTAGCAGCTGTAATGAGTCATTTAGTTGCTAGTCTACGTGTTGTTGCTCACCTCATTCAACCGTTCNNNNNCATTCATTCATTAATTAATTAA

SEQ ID NO: 2870 - protein, 483 aa, Streptococcus agalactiae
  VARIANT 476, 477: Xaa = Any Amino Acid
MTEKKSFYITTPIYYPSGKLHIGSAYTTIACDVLARYKRMMGFDVQYLTGLDEHGQKIQQKAEEAGITPQEYVDGMAESVKTLWELLDISYDKFIRTTDTYHEEAVAKIFEQLLAQGDIYLGEYTGWYSVSDEEFFTESQLAEVYRDENGNMIGGVAPSGHEVEKVSEESYFFRMSKYADRLKAYYAEHPEFIQPDGRMNEMLKNFIEPGLEDLAVSRTTYTWGVQVPSNPKHVIYVWIDALMNYISALGYGWSDDLSQYHKFWPADIHMIGKDILRFHSIYWPIMLMALDLPLPKRLVAHGWFVMQDGKMSKSKGNVVYPEMLVERFGLDPLRYYLMRSLPVGSDGTFTPEDYVGRINYELANDLGNLLNRTIAMVNKYFDGEVPRFAVATDFDADLASVATDSIENYHKQMEAVDFPRALEAVWNLISRTNKYIDETAPWVLAKDETDRDKLAAVMSHLVASLRVVAHLIQPFXXIHSLIN

SEQ ID NO: 2871 - protein, 633 aa, Streptococcus agalactiae
ATGGTTAATACAAAAACACTTCTCCCCTACAAAACTATGCCGGTTTGGACTGCACAGTCTATTCCAAAGGCATTTTTAGAAAAGCATAATACTAAGGAAGGCACCTGGGCAAAACTAACCATTCTAAGTGGTTCTTTAGTATTTTACCAGTTATCTCCTGATGGAGAGGAAATCTCGCGGCATATTTTTGATGCTAGTAGTGATATTCCTTTTGTTGATCCACAAGTCTGGCATAAAGTTTCGCCGAATAGTCCAGACTTAAGTTGCTATCTAACTTTTTACTGCCAAAAAGAAGATTACTTCCATAAAAAATATGGTCTCACGCGCACACATTCTGAGGTTATCGCCAGTGCACCTCTCTTATCTGAGAAGAGTAATATATTAGACCTTGGGTGTGGTCAAGGGCGAAACTCACTTTATTTATCGCTGCTGGGACATCAAGTGACTTCTGTCGATTCAAACGGACAGAGCCTTGTAGCTTTAGAAAATATGGCATTAGAAGAAGAGCTTCCTTACAATATAAAAAGGTATGATATTAATACTGCTGCTATTGAAGGGCACTATGATTTTATTTTATCAACTGTGGTATTTATGTTTTTAAATCCCGACGGCANNNNNCATTCCATTCATTAA

SEQ ID NO: 2872 - protein, 210 aa, Streptococcus agalactiae
  VARIANT 205, 206: Xaa = Any Amino Acid
MVNTKTLLPYKTMPVWTAQSIPKAFLEKHNTKEGTWAKLTILSGSLVFYQLSPDGEEISRHIFDASSDIPFVDPQVWHKVSPNSPDLSCYLTFYCQKEDYFHKKYGLTRTHSEVIASAPLLSEKSNILDLGCGQGRNSLYLSLLGHQVTSVDSNGQSLVALENMALEEELPYNIKRYDINTAAIEGHYDFILSTVVFMFLNPDGXXHSIH

SEQ ID NO: 2873 - protein, 696 aa, Streptococcus agalactiae
ATGTCTAAAAAGTCTCACCGTCAATATCAAATATATGAAGGGCTCAGGTGTGCGGTTGCACTCTGTTTTATTTCAGGTTATATCAATGCTTTTACTTATGTAACACAAGGAAAACGTTTTGCAGGTGTACAAACAGGGAATTTGTTATCTTTTGCTATTCATCTTAGTAATAAGCATTATAGTCAAGCGCTTGCTTTTTTGCTACCTATAATGGTTTTCATGTTAGGTCAATCGTTTACTTATTTCATGAATCGTTGGGCGAATAAACATCAACTGCACTGGTACCTATTATCTAGTTTTGCGTTGACACAGGTTGCTATAGTAACAATTATATTGACTCCTTTCTTACCATCGTCGTTTACTGTGGCAGGACTAGCCTTCTTTGCTTCAATACAAGTAGATACCTTTAAATCGCTCAGAGGAGCACCTTATGCTAATATGATGATGACTGGTAATATCAAGAATGCTGCTTATTTATTAACAAAGGGACTTTACGAAAAAAATTCTGATATTTTCTTAATTGCTAGAAATACGATTATTATTATTGGAGGATTTATCTTTGGTGTTGTTTGCTCGACTTATTTTTCAAGTAAACTGGGCGAATGGAGCTTATCATTAATATTAATTCCTCTTTTATATGTCAACTTGCTGTTAGGCCATGAATTTTATAACCTACAAGTAGAAAGGCACTCCTAA

SEQ ID NO: 2874 - protein, 231 aa, Streptococcus agalactiae
MSKKSHRQYQIYEGLRCAVALCFISGYINAFTYVTQGKRFAGVQTGNLLSFAIHLSNKHYSQALAFLLPIMVFMLGQSFTYFMNRWANKHQLHWYLLSSFALTQVAIVTIILTPFLPSSFTVAGLAFFASIQVDTFKSLRGAPYANMMMTGNIKNAAYLLTKGLYEKNSDIFLIARNTIIIIGGFIFGVVCSTYFSSKLGEWSLSLILIPLLYVNLLLGHEFYNLQVERHS

SEQ ID NO: 2875 - protein, 1218 aa, Streptococcus agalactiae
ATGCACAGCACTATTTATAAATGTCATCATTGCCGTTATCTAATTTATAAAAGTTTTAAAGATATCTTTCCTTTTGCTCTCATTTTTTCTTGGATTGAAATCCTTCAAAAACTCGTTATATCAGATGATTCTTTTTTAGCTCAAACAACAAAGTCCAGTATTTATAAAAACGAGTGGTTATATACGGTTTCCAATACTCTTTATGATTTATCTCATTTACTAATCTACTTTATGGCTAGTTATTTTGTGGCTAGTTTAGTATGGAGAGACTTATCTAACCAAACTAAAGAAAGTTTTTCTGCAAGTTTACTTGGCTTTGCCACTGTTTGGTTGCTTCTAACTTCAGTTGTTCCAGGTACAGATTATCACTATCCTAGCCAACCCATTTGGCTTATGCTGGCTTTGATTTCGTATCTTTTTATCTTTTTAACTCGACTGCTTCAAAATCGACATCATATTTTCCAGTATAGTATGTTAGCTATACTACTATTAATCTCTTCTATTTTGTCACATATCTTATATCGTTATCCTAATATTGATTTAGAATACCTTATACAAAATCACTTTTCTCAATGGCTGGGTGATGGGCCACATCAATTAATTCCTATTATGCTTTGGTCTATCTTAGCTATTTTTCTAACCTTATCAGGTCTTTTTGTACCAGATATTTTATTTCGTCCTTACTCCTATTTTTCAGTAGTTAGCGAAAATTTAAATGCTGCCTTGAGCCAACATACAGATAAAATCCCTTATCTGTATACCTTTTATACTGTTAAAAATAGCTTTGCTATGTTTGGCGGTATTGGAATCCTATTATCCTTATTTTTAGCAGTTTTATATGAAAGTAGAAAACTACAATCGAAGAATTACTATAAATTGACATTACTGACCTTAACTCCTCTTATTTTTGATCAAAATTTACCATTTTTAGTAGGTCTACCTGTCATTTTACAACCAATATTATTCATTCCGATGGTATTAACAACTATCTTTGCAGAGGCTTTTGGAGCTCTTATGCTCTACCTAAAATTTGTCGACCCTGCAGTTTATACTGTCCCAAGTGGTACACCTAGTCTACTATTTGGCTTTCTTGCTTCAAATGGGGATTGGCGTTACCTTCCAGTCACTGCAATTATTCTAGTTGTTGGCTTCTTTATTTATCGTCCGTTTGTCAAAATCGCTTTCGCTAAGGAGGAGCAATATGAAAAAATTACTTAG

SEQ ID NO: 2876 - protein, 405 aa, Streptococcus agalactiae
MHSTIYKCHHCRYLIYKSFKDIFPFALIFSWIEILQKLVISDDSFLAQTTKSSIYKNEWLYTVSNTLYDLSHLLIYFMASYFVASLVWRDLSNQTKESFSASLLGFATVWLLLTSVVPGTDYHYPSQPIWLMLALISYLFIFLTRLLQNRHHIFQYSMLAILLLISSILSHILYRYPNIDLEYLIQNHFSQWLGDGPHQLIPIMLWSILAIFLTLSGLFVPDILFRPYSYFSVVSENLNAALSQHTDKIPYLYTFYTVKNSFAMFGGIGILLSLFLAVLYESRKLQSKNYYKLTLLTLTPLIFDQNLPFLVGLPVILQPILFIPMVLTTIFAEAFGALMLYLKFVDPAVYTVPSGTPSLLFGFLASNGDWRYLPVTAIILVVGFFIYRPFVKIAFAKEEQYEKIT

SEQ ID NO: 2877 - protein, 843 aa, Streptococcus agalactiae
ATGAAAAAATTACTTAGATGGCTTCCTCCTGTACTTTTCATTATTATCCTTATAGGAATGACTATCTTAGGTAAGTCCTATATCAATAAAGTAACAGCTCACAAAATAAAACTCTATAACTCTCGAATGACTCCTACTATTTTAATTCCAGGATCCAGTGCTACTCAAGAACGATTTAACAGCATGTTAGCACAGCTCAACCAAATGGGAGAAAAACATAGCGTTTTAAAGTTAACTGTCAAAAAAGACAATAGCATTATCTACAATGGACAAATTAGCGGCAATGACCACAAACCCTACATTGTCATTGGATTTGAAAATAATGAAGATGGTTATAGTAACATCAAAAAACAAACAAAATGGCTACAGATTGCTATGAATGATCTTCAGAAGAAATATAAATTTAAACGTTTTAACGCTATCGGTCATTCAAATGGTGGCTTATCATGGACTATTTTCCTAGAAGATTATTACGACTCTGATGAATTTGATATGAAATCATTGTTAACAATGGGAACACCTTTTAACTTTGAAGAAAGTAACACCTCAAATCATACTCAAATGCTTAAAGATTTAATCAGTAATAAAGGAAATATTCCATCAAGTCTCATGGTATACAATTTGGCAGGAACTAATTCATATGATGGTGATAAAATTGTTCCATTTGCTAGTGTGGAGACTGGTAAATATATTTTCCAAGAAACCGCTAAACACTATACCCAACTAACAGTAACTGGTAATAATGCTACACATTCTGACTTGCCTGATAATCCTGAAGTTATCCAATATGTCGCAGAAAAAATTCTTAAAAATGAGAAAGGTAAATTACCAAAACCTCACTAA

SEQ ID NO: 2878 - protein, 280 aa, Streptococcus agalactiae
MKKLLRWLPPVLFIIILIGMTILGKSYINKVTAHKIKLYNSRMTPTILIPGSSATQERFNSMLAQLNQMGEKHSVLKLTVKKDNSIIYNGQISGNDHKPYIVIGFENNEDGYSNIKKQTKWLQIAMNDLQKKYKFKRFNAIGHSNGGLSWTIFLEDYYDSDEFDMKSLLTMGTPFNFEESNTSNHTQMLKDLISNKGNIPSSLMVYNLAGTNSYDGDKIVPFASVETGKYIFQETAKHYTQLTVTGNNATHSDLPDNPEVIQYVAEKILKNEKGKLPKPH

SEQ ID NO: 2879 - protein, 828 aa, Streptococcus agalactiae
ATGAAACTCATTTCATGGAATATTGATTCCCTCAATGCGGCATTAACAAGTGAATCAACACGTGCTTTAATGTCACGCCAAGTTATTGATACTTTAGTTGCTGAAGATGCCGACATCATTGCGATTCAAGAAACTAAACTGTCTGCCAAAGGACCTACTAAAAAACATTTGGAAGTACTTGAAACTTACTTCCCAGAATATGATTTGGTTTGGCGATCATCAGTCGAACCTGCTCGTAAGGGCTATGCTGGTACAATGTTCTTATATCGTAAAGGGTTAAATCCTATTGTTAGCTTCCCTGAAATCGATGCTCCTACTACAATGGATAATGAAGGTCGCATTATTACTCTCGAATTGGAAAACTGCTATATCACACAGGTCTATACTCCAAATGCAGGTGATGGCCTAAAGCGCTTAGCTGACCGTCAAATATGGGATATTAAATATGCTGAGTATTTAGCAACATTGGATAGTCAAAAACCTGTTCTAGCAACAGGTGACTATAACGTAGCCCACAAGGAAATAGACCTAGCTAATCCTAGCAGTAATCGTCGTTCTGCTGGATTCACAGCTGAAGAGCGCCAAGGCTTTACAAATCTACTAGCCAAAGGTTTTACAGATACTTTTCGTTACCTTCATGGCGATGTTCCAAATGTTTATAGCTGGTGGGCACAACGAAGTCGTACATCCAAAATCAACAATACAGGGTGGAGAATTGATTATTGGCTAACAAGTAACCGTGTCGCAGATAAAATTACCAAGTCAGAAATGATTCATTCTGGTGATCGTCAAGATCATACACCAATTATTTTGGAGATTGAACTATAA

SEQ ID NO: 2880 - protein, 275 aa, Streptococcus agalactiae
MKLISWNIDSLNAALTSESTRALMSRQVIDTLVAEDADIIAIQETKLSAKGPTKKHLEVLETYFPEYDLVWRSSVEPARKGYAGTMFLYRKGLNPIVSFPEIDAPTTMDNEGRIITLELENCYITQVYTPNAGDGLKRLADRQIWDIKYAEYLATLDSQKPVLATGDYNVAHKEIDLANPSSNRRSAGFTAEERQGFTNLLAKGFTDTFRYLHGDVPNVYSWWAQRSRTSKINNTGWRIDYWLTSNRVADKITKSEMIHSGDRQDHTPIILEIEL

SEQ ID NO: 2881 - protein, 357 aa, Streptococcus agalactiae
ATGTATACGTTTTATGAATACCCCAAATGTACCACTTGTCGTTCAGCAAAAAAAGAGTTAACTGAACTCGGCTTGACTTTTGAAGCGATTGATATAAAAAGCAATCCTCCCAAAGTTTCGTTATTAAAAGAATTGTTAGAGAATTCGCCTTATGACCTTAAAAAGTTTTTCAATACTTCAGGAAATTCTTACAGAGAATTAGGCTTAAAAGATAAATTTGATGATTTAACTCTTGACCAAGCTTTGGACTTATTGGCATCGGATGGAATGCTTATTAAGCGTCCATTGCTAGTTAAAGATAATAAAATTCTTCAGATTGGCTACCGTACTAAGTATAAAGACCTCAACTTAGTATAA

SEQ ID NO: 2882 - protein, 118 aa, Streptococcus agalactiae
MYTFYEYPKCTTCRSAKKELTELGLTFEAIDIKSNPPKVSLLKELLENSPYDLKKFFNTSGNSYRELGLKDKFDDLTLDQALDLLASDGMLIKRPLLVKDNKILQIGYRTKYKDLNLV

SEQ ID NO: 2883 - protein, 1020 aa, Streptococcus agalactiae
ATGGTTTTTAGTGTCAAAACATTTAATAATATTAATCAAATTGGTTTACAAGAGTTAGGGAATCGTTTCCAGATTGATGGGGATATGTCAGAAAATCCTGATGCCTATATTATTCGTAGTCAAAATTTGCATAATCAGGATTTCCCAAGTAACCTCAAAGCTATTGCTAGGGCGGGTGCAGGAACAAATAATATTCCTATTGAAGAGGCAAGTGCACAGGGAATAGTCGTGTTTAATACCCCAGGTGCAAATGCTAATGCTGTAAAAGAAGCGGTCATTGCTGCCTTATTACTTTCAGCTCGTGATTATTTAGGAGCTAACCGATGGGTTAATACTCTAACTGGAACAGATATTCCCAAACAAATTGAAGCAGGAAAGAAAGCTTTTGCTGGTAATGAAATTGCAGGAAAAAAATTGGGAGTTATCGGCCTTGGTGCCATTGGAGCTAGAATTGCGAATGATGCTAGACGCTTAGGAATGACAGTTCTTGGTTATGATCCCTATGTTTCAATTGAAACAGCTTGGAATATTTCAAGCCATGTTCAAAGGGTTAAAGAGATTAAGGATATTTTTGAAACTTGTGACTATATCACAATTCATGTTCCCTTAACAAATGAAACTAAGCATACTTTTGATGCGAAAGCTTTTTCAATCATGAAAAAAGGAACTACGATTATCAACTTTGCTCGTGCAGAATTAGTCAATAACCAAGAGCTATTTGAAGCGATAGAAACTGGTGTTGTCAAGCGCTATATTACTGATTTTGGAGACAAAGAATTATTAAACCAAAAAGGAATTACAGTCTTTCCTCATGTAGGCGGATCAACAGATGAGGCAGAGCTAAATTGTGCTATTATGGCAAGTCAAACCATTCGTTGTTTTATGGAGACAGGAGAAATCACTAATTCAGTTAATTTCCCCAATGTACATCAAATTCAAACCGCACCATTTCGTATTACTTTAATTAACAAGAATGTTCCTAACATTGTGGCTAAATTTCAACTGCTGTATCAGAGTTAG

SEQ ID NO: 2884 - protein, 339 aa, Streptococcus agalactiae
MVFSVKTFNNINQIGLQELGNRFQIDGDMSENPDAYIIRSQNLHNQDFPSNLKAIARAGAGTNNIPIEEASAQGIVVFNTPGANANAVKEAVIAALLLSARDYLGANRWVNTLTGTDIPKQIEAGKKAFAGNEIAGKKLGVIGLGAIGARIANDARRLGMTVLGYDPYVSIETAWNISSHVQRVKEIKDIFETCDYITIHVPLTNETKHTFDAKAFSIMKKGTTIINFARAELVNNQELFEAIETGVVKRYITDFGDKELLNQKGITVFPHVGGSTDEAELNCAIMASQTIRCFMETGEITNSVNFPNVHQIQTAPFRITLINKNVPNIVAKFQLLYQS

SEQ ID NO: 2885 - protein, 549 aa, Streptococcus agalactiae
ATGCAAATCAGATTAGCTTTTCCAAATGAAATTGACCAAATTATGCTTCTTATTGAGGAAGCGCGTGCCGAAATTGCTAAAACAGGAAGTGATCAATGGCAAAAAGAAGATGGATACCCTAATCGTAACGATATTATTGATGATATCTTGAACGGTTATGCTTGGGTTGGTATTGAAGATGGGATGCTAGCGACTTATGCGGCTGTCATTGATGGTCATGAAGAGGTTTATGATGCTATTTATGAGGGAAAATGGCTCCATGATAACCATCGCTATCTTACATTTCATCGTATTGCGATCTCAAATCAATTTCGTGGTAGAGGACTAGCACAGACATTCCTTCAAGGGTTAATTGAAGGTCATAAAGGACCTGATTTTCGTTGCGATACTCATGAAAAAAATGTCACTATGCAGCATATTCTAAATAAATTAGGCTATCAATATTGTGGTAAAGTACCTCTAGATGGGGTACGATTGGCTTATCAGAAGATAAAAGAAAAGGGAGAAACGAGCATCTATCGTGAGATTGATGAAAGAAATCCCATGTAA

SEQ ID NO: 2886 - protein, 182 aa, Streptococcus agalactiae
MQIRLAFPNEIDQIMLLIEEARAEIAKTGSDQWQKEDGYPNRNDIIDDILNGYAWVGIEDGMLATYAAVIDGHEEVYDAIYEGKWLHDNHRYLTFHRIAISNQFRGRGLAQTFLQGLIEGHKGPDFRCDTHEKNVTMQHILNKLGYQYCGKVPLDGVRLAYQKIKEKGETSIYREIDERNPM

SEQ ID NO: 2887 - protein, 797 aa, Streptococcus agalactiae
GTGGGGGGAAAAAAGCTTATACAGAGGCTGTAAAACTATCAAAAACAATTCCTTTTGAACCAATTCTATTAGCTTCATCAGAAGAATCAGTTTATGATTATATTCCAGAGTTTGATGAAAAAGAGATTGATCCTAAAGCTGCCTATGTTCATGTGACAACAAATAATACCATTGAAGGAACATCGCTTTATGATATTCCTAAAACTAATGAAGTGCCTGTTATTGCGGATATGTCTTCTAATATATTAGCTGTAAAATATAAAGTAGAAGATTTTGCAATGATTTATGCAGGAGCTCAAAAAAATATTGGACCTGCTGGTGTAACGGTAGTTATTATCCGTGAAGATATGATTAATGAGGAACCAACTTTATCATCAATGTTGGATTATAAGATTCAGTCAGATGCTGGTTCTCTTTATAATACGCCGCCTGCTTACAGTATTTACATTGCTAAATTAGTCTTTGAATGGGTGAAAAGTCTAGGTGGTGTTGATGCTATGGAAAAAGCTAATCGTGAAAAATCAGGACTTCTCTATGATTATATTGATTCCTCAGAATTTTATAGTAATCCTGTCAGAGATAAAAAGAGTCGTTCTCTATGTAACATTCCTTTCATAACTATTAATAAAGATTTAGATGAAAAATTTGTAAAGGAAGCGACAGAACGTGGATTTAAAAATATTAAAGGACATCGTTCGGTAGGTGGTATGAGAGCTAGCCTTTATAATGCCTTTCCTAAACAAGGTGTCATCGAATTAATTGATTTTATGAAAACATTTGAAGCAGAAAATACATAG

SEQ ID NO: 2888 - protein, 265 aa, Streptococcus agalactiae
MGGKKAYTEAVKLSKTIPFEPILLASSEESVYDYIPEFDEKEIDPKAAYVHVTTNNTIEGTSLYDIPKTNEVPVIADMSSNILAVKYKVEDFAMIYAGAQKNIGPAGVTVVIIREDMINEEPTLSSMLDYKIQSDAGSLYNTPPAYSIYIAKLVFEWVKSLGGVDAMEKANREKSGLLYDYIDSSEFYSNPVRDKKSRSLCNIPFITINKDLDEKFVKEATERGFKNIKGHRSVGGMRASLYNAFPKQGVIELIDFMKTFEAENT

SEQ ID NO: 2889 - protein, 636 aa, Streptococcus agalactiae
ATGATTTTGAGGGAATTTTGTGCAGAGAATTTAACAGACTTAACCAGATTAGATAAAGCTATTATTTCACGTGTCGAGCTTTGTGATAACCTTGCTGTCGGAGGCACTACTCCTAGCTACGGTGTTATCAAAGAAGCTAATCAATATTTACATGAAAAAGGTATTAGTGTCGCTGTTATGATTCGTCCCCGTGGAGGAAATTTTGTATACAATGATTTAGAATTACGTATTATGGAAGAGGATATCCTACGTGCTGTTGAGTTAGAATCAGATGCTCTTGTTTTGGGAATATTAACTTCAAATAATCATATTGATACTGAAGCCATTGAACAACTTCTACCTGCTACCCAAGGTTTGCCACTTGTTTTTCATATGGCATTTGATGTTATCCCGAAATCTGACCAAAAAAAATCAATAGATCAATTAGTTGCTTTAGGCTTTACAAGGATTCTCCTACATGGTTCATCTAATGGCGAACCAATTATAGAAAATATCAAACATATCAAAGCATTAGTTGAATATGCTAATAATCGTATTGAAATTATGGTTGGCGGCGGTGTGACTGCTGAAAACTATCAATATATTTGCCAAGAAACTGGGGTTAAACAAGCCCATGGTACTAGAATAACTCAATAA

SEQ ID NO: 2890 - protein, 211 aa, Streptococcus agalactiae
MILREFCAENLTDLTRLDKAIISRVELCDNLAVGGTTPSYGVIKEANQYLHEKGISVAVMIRPRGGNFVYNDLELRIMEEDILRAVELESDALVLGILTSNNHIDTEAIEQLLPATQGLPLVFHMAFDVIPKSDQKKSIDQLVALGFTRILLHGSSNGEPIIENIKHIKALVEYANNRIEIMVGGGVTAENYQYICQETGVKQAHGTRITQ

SEQ ID NO: 2891 - protein, 864 aa, Streptococcus agalactiae
ATGCAAGTTCAAAAAAGTTTTAAATCAAATATACATTACGGAACACTCTATCTAGTCCCAACTCCAATTGGTAATCTAGATGATATGACTTTTCGTGCCATTAGGATTTTAAGAGAAGTTGATTTTATTTGTGCAGAGGATACACGAAATACGGGACTTTTACTCAAGCACTTTGATATTACTACTAAACAAATTAGTTTTCACGAACACAATGCTTACGATAAAATCTCTGGGTTAATTGATTTGTTAAAAGAAGGGAAATCTTTAGCCCAAGTATCTGATGCAGGAATGCCCTCTATTTCTGACCCAGGACATGACCTTGTCAAGGCTGCTATTGAAGGGGATATCCCAGTTGTATCTATACCAGGAGCTAGCGCTGGTATTACTGCTCTCATCGCTTCAGGTTTAGCTCCACAACCTCATATTTTTTATGGCTTCTTACCACGTAAGAAAGGTCAACAAATAACTTTCTTTGAAACAAAGCAAGATTACCCTGAAACACAAATCTTTTATGAGTCACCGTTTCGAGTCTCTGATACGCTAAAACACATGAAAGAGATTTACGGAGATCGCCAAGTTGTTTTAGTACGCGAATTGACGAAACTCTATGAAGAGTATCAAAGAGGAACCATTAGTCAACTTTTAGAGCATATTGAAAAGGTCCCTCTCAAAGGTGAATGCTTAATTATTGTTGATGGTAAGAGAGATACCGAGCGAGTGAAAGACAGTAGCCAACAAGATCCACTAGTATTAGTAAAAGAATATATCGCTAATGGTGATAAAACTAATCAAGCGATAAAAAAAGTAGCAAAAGAATTTAATCTCAATAGACAAGAACTCTATGCTAGTTTCCATGATTTATAA

SEQ ID NO: 2892 - protein, 287 aa, Streptococcus agalactiae
MQVQKSFKSNIHYGTLYLVPTPIGNLDDMTFRAIRILREVDFICAEDTRNTGLLLKHFDITTKQISFHEHNAYDKISGLIDLLKEGKSLAQVSDAGMPSISDPGHDLVKAAIEGDIPVVSIPGASAGITALIASGLAPQPHIFYGFLPRKKGQQITFFETKQDYPETQIFYESPFRVSDTLKHMKEIYGDRQVVLVRELTKLYEEYQRGTISQLLEHIEKVPLKGECLIIVDGKRDTERVKDSSQQDPLVLVKEYIANGDKTNQAIKKVAKEFNLNRQELYASFHDL

SEQ ID NO: 2893 - protein, 327 aa, Streptococcus agalactiae
ATGGATAAAAAAGACTTGTTTGATGCCTTTGATGATTTTTCACAAAATTTATTAGTTGGGTTGTCTGAAATTGAGACTATGAAAAAACAAATCCAAAAATTATTGGAGGAGAATACTGTTCTACGCATTGAAAATGGTAAACTTCGTGAGCGTCTGAGCGTTATTGAAGCAGAAACAGAAACTGCAGTTAAAAATTCTAAACAAGGAAGAGAATTACTCGAAGGCATTTACAATGATGGCTTTCACATTTGTAATACTTTCTATGGTCAACGTCGTGAAAATGACGAAGAATGTGCTTTTTGTATTGAATTATTATATAGAGATTGA

SEQ ID NO: 2894 - protein, 108 aa, Streptococcus agalactiae
MDKKDLFDAFDDFSQNLLVGLSEIETMKKQIQKLLEENTVLRIENGKLRERLSVIEAETETAVKNSKQGRELLEGIYNDGFHICNTFYGQRRENDEECAFCIELLYRD

SEQ ID NO: 2895 - protein, 447 aa, Streptococcus agalactiae
TTGACTAATGATGAAAACAATGTTTTGCCAACAATTAAGAGTAGAACGCAAATTTTTCGTTTTCCAAAACAATTGGACATGTTGGTTCATCAAGCTGAACAAGCAGGATTGCTAAAATCACAAGCTAGCTTATTAGCTCAAGTAGCAGACGATCCTAAACATTTAGAAATATTGTTGACTAACAAAAAGTTATTAGATTACTTGAATTTAAGTCAACAGTTTGTGACGACTTTGGCAAAAGATAGGCAAACTGCTTATTTAGAAGTATCTCGCTTGACATCGCAAGTTGTAGATAAAAATGATCAGGCATTTGTTTTTCAATGGCTGACAATAATGCTGGCTAAAGAAGGCCAACTTTATGATTTAGAAAATACTTATAGAGCTCAGCAAATGTGGAAGAGCAATGTTAGTTTTCAAAATAGTTTAGAGTATATGGTGCTTTCTTAG

SEQ ID NO: 2896 - protein, 148 aa, Streptococcus agalactiae
MTNDENNVLPTIKSRTQIFRFPKQLDMLVHQAEQAGLLKSQASLLAQVADDPKHLEILLTNKKLLDYLNLSQQFVTTLAKDRQTAYLEVSRLTSQVVDKNDQAFVFQWLTIMLAKEGQLYDLENTYRAQQMWKSNVSFQNSLEYMVLS

SEQ ID NO: 2897 - protein, 385 aa, Streptococcus agalactiae
ATGGATTTAAAGCGAACACAACCCAAATTGCTGGAAAAGTTTAATACTATTTTACAGTCAGATAGGATGAGTCATGCCTATCTTTTTTCGGGAAATTTTGCAAGTCTAGATATGGCACTTTATTTAGCACAAAGTCAGTTCTGTGAAAAGCGCCAGAGTGGTTTACCATGTCAAGAGTGTAGAGCCTGTCGTTTAATCGCTAATGGGGAATTTTCAGATGTTAAAATCATAGAACCACAGGGGCAACTTATTAAGACAGAGACTATAAAAGAGCTGACTAAAGATTTTTCAAGATCAGGTTTCAAGGGAAATCACAGGTCTTTATCATCAAAGATTGCGAAAAAATGCATGTCAATGCAGCCAACAGTCTTTTGAAATTTATTGA

SEQ ID NO: 2898 - protein, 128 aa, Streptococcus agalactiae
MDLKRTQPKLLEKFNTILQSDRMSHAYLFSGNFASLDMALYLAQSQFCEKRQSGLPCQECRACRLIANGEFSDVKIIEPQGQLIKTETIKELTKDFSRSGFGREITGLYHQRLRKNACQCSQQSFEIY

SEQ ID NO: 2899 - protein, 636 aa, Streptococcus agalactiae
ATGAAAAAAGGACTAATGATTTCTTTTGAGGGCCCAGATGGTGCGGGTAAAACAACCGTTTTAGAAGCTGTTTTACCCTTGCTCAGAGAAAAATTATCACAAGATATTCTCACCACCAGAGAGCCTGGTGGCGTAACTATTTCAGAAGAAATTCGTCATATTATTTTAGATGTTAAACACACGCAAATGGATAAAAAAACAGAGCTATTGCTTTACATGGCTGCTCGACGCCAACATCTAGTGGAAAAGGTACTCCCAGCTCTAGAAGAAGGGAAAATAGTCCTAATGGATCGTTTTATTGATAGTTCTGTTGCCTATCAGGGATCAGGAAGAGGATTAGATAAGTCACATATAAAATGGCTTAATGACTATGCGACTGATAGTCATAAACCTGATTTAACTTTATATTTTGATGTTCCTTCTGAAGTAGGTTTAGAGCGTATTCAAAAAAGTGTTCAAAGGGAGGTAAATCGTCTAGATCTCGAGCAATTAGATATGCATCAACGCGTCCGTCAAGGTTACCTTGAATTGGCGGATTCGGAGCCAAACCGCATTGTGACGATTGATGCCTCCCAACAGCTAGATGAAGTAATAGCTGAGACATTCTCTATTATTTTAGATCGTATCAACCAATGA

SEQ ID NO: 2900 - protein, 211 aa, Streptococcus agalactiae
MKKGLMISFEGPDGAGKTTVLEAVLPLLREKLSQDILTTREPGGVTISEEIRHIILDVKHTQMDKKTELLLYMAARRQHLVEKVLPALEEGKIVLMDRFIDSSVAYQGSGRGLDKSHIKWLNDYATDSHKPDLTLYFDVPSEVGLERIQKSVQREVNRLDLEQLDMHQRVRQGYLELADSEPNRIVTIDASQQLDEVIAETFSIILDRINQ

SEQ ID NO: 2901 - protein, 1167 aa, Streptococcus agalactiae
ATGACAAAACACAAACACCTAACTCTCTTAGACCGTAATGACATCCAATCTGGTTTGGATAGAGGAGAAACCTTTAAAGCCATCGGGCTTAATCTACTGAAACACCCTACTACTATCGCAAAAGAAGTCAAACGAAATAAGCAACTAAGAGAATCAACCAAAGACTGCCTAGACTGTCCGCTACTAAGAAAAGCTCCCTATGTTTGTAATGGGTGTCCAAAGAGGAGGATCAACTGTGGTTACAAGAAGACCTTCTATCTTGCTAAGCAAGCTCAAAGAAACTATGAAAAACTTTTAGTTGAATCTAGAGAAGGAATCCCTTTGAACAAAGAGACCTTCTGGAAAATAGATAGAGTGCTTTCTAATGGGGTCAAGAAGGGCCAACGTATCTATCATATCCTCAAAACCAACGATCTAGAAGTGAGTTCTTCAACCGTTTATCGACACATCAAGAAAGGCTACCTATCCATCACACCAATCGACCTACCCAGAGCTGTGAAGTTCAAAAAAAGGCGAAAGAGCACACTCCCTCCTATTCCAAAAGCGATTAAAGAAGGGCGACGGTACGAGGATTTTATAGAACACATGAACCAATCAGAGCTGAACTCCTGGCTTGAAATGGACACGGTTATTGGACGGATTGGTGGAAAGGTCCTTCTCACCTTCAATGTCGCCTTCTGTAACTTCATCTTTGCCAAACTGATGGATTCTAAGACAGCTATCGAAACTGCTAAACACATACAGGTCATTAAGAGGACACTCTATGATAACAAGAGAGACTTCTTCGAACTCTTTCCTGTTATCCTAACGGATAATGGTGGGGAATTCGCTAGAGTGGATGATATTGAGATAGATGTTTGTGGACAGTCTCAACTCTTCTTTTGTGACCCTAATCGGTCTGACCAGAAAGCAAGAATCGAGAAGAATCATACCCTCGTGAGAGACATACTGCCTAAGGGGACTTCCTTCGACAACTTGACTCAAGAGGACATTAATCTGGCACTATCTCATATCAACAGCGTTAAGAGACAGGCTCTAAATGGTAAAACGGCTTATGAGCTATTCTCTTTTACTTACGGAAAAGACATCGCAAGTATACTCGGTATTGAGGAAATTACTGCGGAAGACGTCTGCCAATCTCCCAAACTATTAAAAGACAAAATCTAA

SEQ ID NO: 2902 - protein, 388 aa, Streptococcus agalactiae
MTKHKHLTLLDRNDIQSGLDRGETFKAIGLNLLKHPTTIAKEVKRNKQLRESTKDCLDCPLLRKAPYVCNGCPKRRINCGYKKTFYLAKQAQRNYEKLLVESREGIPLNKETFWKIDRVLSNGVKKGQRIYHILKTNDLEVSSSTVYRHIKKGYLSITPIDLPRAVKFKKRRKSTLPPIPKAIKEGRRYEDFIEHMNQSELNSWLEMDTVIGRIGGKVLLTFNVAFCNFIFAKLMDSKTAIETAKHIQVIKRTLYDNKRDFFELFPVILTDNGGEFARVDDIEIDVCGQSQLFFCDPNRSDQKARIEKNHTLVRDILPKGTSFDNLTQEDINLALSHINSVKRQALNGKTAYELFSFTYGKDIASILGIEEITAEDVCQSPKLLKDKI

SEQ ID NO: 2903 - protein, 465 aa, Streptococcus agalactiae
ATGGATTCTAAGACAGCTATCGAAACTGCTAAACACATACAGGTCATTAAGAGGACACTCTATGATAACAAGAGAGACTTCTTCGAACTCTTTCCTGTTATCCTAACGGATAATGGTGGGGAATTCGCTAGAGTGGATGATATTGAGATAGATGTTTGTGGACAGTCTCAACTCTTCTTTTGTGACCCTAATCGGTCTGACCAGAAAGCAAGAATCGAGAAGAATCATACCCTCGTGAGAGACATACTGCCTAAGGGGACTTCCTTCGACAACTTGACTCAAGAGGACATTAATCTGGCACTATCTCATATCAACAGCGTTAAGAGACAGGCTCTAAATGGTAAAACGGCTTATGAGCTATTCTCTTTTACTTACGGAAAAGACATCGCAAGTATACTCGGTATTGAGGAAATTACTGCGGAAGACGTCTGCCAATCTCCCAAACTATTAAAAGACAAAATCTAA

SEQ ID NO: 2904 - protein, 154 aa, Streptococcus agalactiae
MDSKTAIETAKHIQVIKRTLYDNKRDFFELFPVILTDNGGEFARVDDIEIDVCGQSQLFFCDPNRSDQKARIEKNHTLVRDILPKGTSFDNLTQEDINLALSHINSVKRQALNGKTAYELFSFTYGKDIASILGIEEITAEDVCQSPKLLKDKI

SEQ ID NO: 2905 - protein, 660 aa, Streptococcus agalactiae
ATGCCAGTGAAAGATTTTATGACAAAAAAATTAGTTTATGTCTCTCCAGATACTACAGTTGCAGAAGCTGCTGATTTATTGAGAGAACACCACTTAAGGCGTTTGCCAGTTGTTGAAAATGATCAGCTAGTGGGGTTAGTGACAGAAGGGACAATGGCAGAAGCACAACCTTCTAAAGCAACCAGTCTTTCTATATATGAGATGAACTATCTTCTTAATAAGACAAAAATTCGAGATATTATGATTAAAGATATTGTGACTGTTTCACAGTATGCTAGCCTTGAGGACGCTATTTATTTGATGATGTCTCGAAAGATCGGTGTTTTACCAGTAGTTGATAATGGACAACTTTATGGGATTGTCACGGATAGGGATGTTTTTAAAGCCTTCCTTGAAATTGCGGGGTATGGTCAAGAAAGTTATCGCTTGGTTATATTAGCTGATGAGGGGATAGGGGTACTATCAAAAGTCCTAAATCGTCTTTCTAGTGCAAATTTAAGTGTTAAACGTTTAGTCATTATTGAACGAAAAGCAGGTAAGAAAGCGGTCGAGATACAACTAGAAGGATACGCTGACAAGGATGTTTTAAAACAAGAACTAGTATTTGATGATGTTATTGTGGAAACTTTAGAAAAGACCATGAAAAAACCACTTTCTTAA

SEQ ID NO: 2906 - protein, 219 aa, Streptococcus agalactiae
MPVKDFMTKKLVYVSPDTTVAEAADLLREHHLRRLPVVENDQLVGLVTEGTMAEAQPSKATSLSIYEMNYLLNKTKIRDIMIKDIVTVSQYASLEDAIYLMMSRKIGVLPVVDNGQLYGIVTDRDVFKAFLEIAGYGQESYRLVILADEGIGVLSKVLNRLSSANLSVKRLVIIERKAGKKAVEIQLEGYADKDVLKQELVFDDVIVETLEKTMKKPLS

SEQ ID NO: 2907 - protein, 711 aa, Streptococcus agalactiae
ATGACCATGTTGAAAGTAGAAAATCTATCTATTCACTATGGTGTTATTCAAGCGGTGAATGATGTCTCGTTTGAAGTTAACCAAGGTGAGGTTGTAACCTTAATTGGAGCCAATGGTGCAGGAAAGACATCAATTTTGAGGACAATTTCTGGTTTAGTAAGACCAAGTCAGGGTTCTATTTCTTTTATGGGGAAACCTATACATAAGTTAGCAGCTAGAAAAATTGTTGGCAATGGTTTAGCTCAGGTTCCAGAAGGGCGCCACGTTTTCTCAAGTTTGTCTGTTATGGAAAATTTAGAAATGGGAGCCTTTCTTCAAAAGGATCGTGAACAAAATCAAAAAATGTTAAAAAAAGTGTTTGATCGTTTTCCTCGCTTAGAAGAACGTAAAAACCAAGATGCAGCAACCTTATCAGGTGGTGAGCAGCAAATGCTCGCTATGGGGCGTGCATTGATGAGTCGTCCTAAATTATTACTTTTAGATGAACCGTCAATGGGCCTAGCTCCAATTTTTATTCAAGAAATTTTTAATATCATTGAAGACATCAAAAAACAAGGGACTACAGTTCTTTTAGTTGAACAAAATGCAAATAAAGCTCTGACGATTGCTGATAAAGCATATGTTCTAGAGACTGGGAAGGTTGTTTTATCAGGGACAGGTAAGGAATTACTAGTTTCAGATCAAGTTCGTAAAGCTTACTTAGGTGGATAA

SEQ ID NO: 2908 - protein, 236 aa, Streptococcus agalactiae
MTMLKVENLSIHYGVIQAVNDVSFEVNQGEVVTLIGANGAGKTSILRTISGLVRPSQGSISFMGKPIHKLAARKIVGNGLAQVPEGRHVFSSLSVMENLEMGAFLQKDREQNQKMLKKVFDRFPRLEERKNQDAATLSGGEQQMLAMGRALMSRPKLLLLDEPSMGLAPIFIQEIFNIIEDIKKQGTTVLLVEQNANKALTIADKAYVLETGKVVLSGTGKELLVSDQVRKAYLGG

SEQ ID NO: 2909 - protein, 765 aa, Streptococcus agalactiae
ATGGCACTTCTTGAAGTAAAAAATTTAAGTAAACATTTCGGTGGCCTAACTGCTGTAGGTGATGTTTCGATGAAATTACATAAAGGTGAATTAATTGGCTTAATCGGCCCCAACGGTGCGGGTAAGACAACGCTTTTTAATCTCTTAACAGGAGTATACCTTCCTAGTAAAGGGACAATATCAATTGATGGTAAGATATTAAATGGGAGGAAACCAGCTAAAATAGCTTCTTTAGGTTTAGGTAGAACTTTTCAAAATATCCGACTTTTTAAAAATATGACTGTTTTAGACAATGTACTAGTAGGACTCAGTAATCATCACTTATCACATCCTATTGCTAGTTTTTTACGATTACCCAAATACTATCATAGTGAAAAAGCCTTAAGGAAAAAGGCACTGGAGCTATTAGAGATTTTTGGTTTGAAAGCATATCAAGATGCTCTTGCTAAGAACCTCCCTTATGGAAAACAACGGCGTTTAGAAATTGTTCGTGCTTTAGCAACAGAACCAAAAATATTGTTTTTGGATGAGCCCGCGGCAGGAATGAATCCTCAAGAAACTGCAGAATTGACGCAGTTAATTAGTCAAATAAAGAGTGATTTTGATATTACTATTATGCTGATTGAACATGATATGAACTTGGTTATGCAAGTAACAGAGAGAATTTATGTATTGGAATATGGTCGTCTGATTGCTCACGGGACACCTGAAGAAATTAAAAATAATAAACGTGTTATAGAAGCATACTTGGGGGGTGAGCTATAA

SEQ ID NO: 2910 - protein, 254 aa, Streptococcus agalactiae
MALLEVKNLSKHFGGLTAVGDVSMKLHKGELIGLIGPNGAGKTTLFNLLTGVYLPSKGTISIDGKILNGRKPAKIASLGLGRTFQNIRLFKNMTVLDNVLVGLSNHHLSHPIASFLRLPKYYHSEKALRKKALELLEIFGLKAYQDALAKNLPYGKQRRLEIVRALATEPKILFLDEPAAGMNPQETAELTQLISQIKSDFDITIMLIEHDMNLVMQVTERIYVLEYGRLIAHGTPEEIKNNKRVIEAYLGGEL

SEQ ID NO: 2911 - protein, 954 aa, Streptococcus agalactiae
ATGAAAGAAAATATGAAATCAATTTTATCTTGGTTAGCTATAGTAGTGTTAGATTATCTCTTGATTAGCGTGCTAATATCTATGGGTATATTTAACCTCTATCATATTCAAATTATTGAAACAATTGGGATTAATGTTATTTTAGCAGTTGGTTTGAACCTAATTGTAGGTTGTTCGGGACAGTTTTCACTAGGACATGCAGGTTTCATGGCTATTGGCGCTTATGCAGTTGCTATTATCGGCGTTAAAATGCCAACTTATGTAGGTTTTTTGATAGCTATACTTGTTGGAACTCTTGTTGCAGGAGGTATTGCCTTAGGTGTAGGAATTCCTACTTTGAGACTAAAAGGTGATTATTTAGCTATAGCTACTTTAGGTGTTGCTGAGATTATCCGTATTTTGTTGGTTAATGGAGGTGATATTACGAATGGTGCTGCGGGTATCATGGGGATTCCGCCTTTTACAACCTGGTCTTTAGTTTATGGGGTGGCAGTTGTGAGCCTTATCCTTGCAATGAATTTTTTGCGTAGTCCCTTAGGGCGTAATACAATTGCTATACGAGAAGATGAAATTGCAGCAGAGTCTATGGGTGTGGATACAACAAAAGTGAAAGTAATTGTTTTTGTTTTTGGAGCTATTTTAGCTTCTATCGCTGGTAGTTTACAGGCTGGCTACGTTGGAACTGTTATGCCAAAAGACTTTTCATTTATGATGTCTGTCAATGTTTTAATTATTGTTGTTTTAGGTGGTTTAGGTTCAATGACAGGGACAGTTTTAGCAGCAATTTTATTAGGATTATTGAATATGTTACTACAAGACTACGCTTCTGTTCGAATGATTATCTATGCTTTAGCCCTGATTTTAATTATGATTTTTAGACCTAGCGGTTTATTAGGAACGAAAGAGTTAACTCTATCTCATCTATTTCGTAAGACGAGTAAGGGAGGCAATTAG

SEQ ID NO: 2912 - protein, 317 aa, Streptococcus agalactiae
MKENMKSILSWLAIVVLDYLLISVLISMGIFNLYHIQIIETIGINVILAVGLNLIVGCSGQFSLGHAGFMAIGAYAVAIIGVKMPTYVGFLIAILVGTLVAGGIALGVGIPTLRLKGDYLAIATLGVAEIIRILLVNGGDITNGAAGIMGIPPFTTWSLVYGVAVVSLILAMNFLRSPLGRNTIAIREDEIAAESMGVDTTKVKVIVFVFGAILASIAGSLQAGYVGTVMPKDFSFMMSVNVLIIVVLGGLGSMTGTVLAAILLGLLNMLLQDYASVRMIIYALALILIMIFRPSGLLGTKELTLSHLFRKTSKGGN

SEQ ID NO: 2913 - protein, 801 aa, Streptococcus agalactiae
ATGGTATATGGCATTATTAAGCTGATTAATTTTGCTCATGGGGACATCTATATGATGGGCGCTTTCATGGGCTATTATTTGATTAATCATCTTCATCTTAATTTTTTCCTAGCTTTATTAATTGCAATGCTGGGGTCTGCTTTCCTAGGTGTTGTAATTGAATATTTAGCTTATCGTCCACTGAGAAAATCAACTAGAATTGCCGCGTTAATTACAGCTATTGGTGTTTCTTTTCTTTTGGAGTACGGGATGGTATACCTTGTTGGAGCGGATACTAGGGCATTTCCGCAAGCCATTCATACTGTTAAATATAATTTAGGACCGATAACTATAACCAATGTTCAGCTCATCATTTTAGGTATTGCGCTATTACTAATGCTTACTTTACAGTTCATCGTTCAAAAAACTAAAATGGGGAAAGCTATGAGAGCTTTATCAGTGGATAGCGATGCCGCACAATTGATGGGAATTAATGTTAACCGTACCATTAGTTTTACATTTGCGCTGGGGTCTGCTTTAGCTGGAGCAGGTGGAGTACTGATTGGGCTTTATTATAATTCTGTTCAACCTCTTATGGGGGTAACTCCAGGGTTGAAAGCATTTGTTGCAGCTGTCTTAGGTGGTATTGGTATCATTCCGGGAGCGGCTATCGGTGGTTTTGTTATTGGCATTTTAGAAACTTTAGCGACTGCACTTGGTGTGTCAGATTTTCGAGATGGTATCGTTTATGCTATTTTAATTCTCATTTTCTTGATCCGTCCAGCAGGAATTCTTGGAAAAAATATTAAGGAGAAGGTCTAG

SEQ ID NO: 2914 - protein, 266 aa, Streptococcus agalactiae
MVYGIIKLINFAHGDIYMMGAFMGYYLINHLHLNFFLALLIAMLGSAFLGVVIEYLAYRPLRKSTRIAALITAIGVSFLLEYGMVYLVGADTRAFPQAIHTVKYNLGPITITNVQLIILGIALLLMLTLQFIVQKTKMGKAMRALSVDSDAAQLMGINVNRTISFTFALGSALAGAGGVLIGLYYNSVQPLMGVTPGLKAFVAAVLGGIGIIPGAAIGGFVIGILETLATALGVSDFRDGIVYAILILIFLIRPAGILGKNIKEKV

SEQ ID NO: 2915 - protein, 1167 aa, Streptococcus agalactiae
ATGGAAAAGAGACTTAGTTTAGGAGCGCTTGTTTTAGCTAGTACAGTTCTTTTAGCAGCATGTGGAAATGTCGGAGGAGGAGCATCTTCGACAGGAACAAAAATAGGGAAAGATATTAAGGTAGGGTATAACTGGGAATTATCAGGAAACGTTTCTTCGTATGGAAATTCAATGAAGAATGGAGCTGACTTAGCAGTAAAAGAAATTAATGCTGCTGGAGGGGTTGGCGGCAAGAAGTTAAAAGTCCTATCACAGGATAATAAATCAGAAAATGCAGAGGCAGCAACGGTTGCCACAAACTTGGTTACCAAAGGAGCTAATGTCATTATCGGACCAGCAACATCGGGTGCAGCTGCATCTTCAACTCCAAAAGTAAATGCAGCAGCAGTTCCAATGATTGCACCTGCTGCGACACAAGACAATTTAGTCTATGGTTCTGATGGAAAAACCTTAAATCAGTATTTCTTCCGAGCTACTTTTGTCGATAATTATCAAGGAAAGCTATTGTCTCAGTATGCTACAGACAACCTTAAAGCTAAAAAAGTTGTTCTATTTTATGATAATTCATCAGATTACTCAAAGGGGGTAGCAAAATCATTTAAGGAAAGTTATAGTGGAAAAATTGTTGATAGTATGACATTCTCCGCTGGTGATACTGATTTCCAAGCGTCATTGACTAAGTTGAAAGGGAAAGAATATGATGCTATTGTGATGCCAGGTTACTATACCGAGACAGGATTAATAGTTAAGCAAGCGCGTGATTTAGGTATCTCTAAACCGGTTCTTGGGCCTGATGGTTTTGATAGTCCGAAATTTGTGCAATCGGCAACACCTGTAGGAGCTTCAAACGTTTATTATTTGACAGGTTTCACTACACAAGGATCAACCAAAGCTAAAGCTTTCCATGATCATTACGTTAAGGCATATGGTGAAGAACCATCCATGTTCTCGGCTTTATCATACGACGCTGTGTATATGGCAGCTAAATCTGCTAAAGGAGCTAAAACTTCAATTGATATTAAAAAAGCTTTAGCTAAGCTGAAAGATTTTAAAGGTGTGACAGGGAAAATGTCTATTGATAAAAATCACAATGTTGTTAAATCAGCTTACGTTGTCAAATTAGAGGATGGAAAAACAAGTAGCGTTAACATTATTTCAGCAAAATAA

SEQ ID NO: 2916 - protein, 388 aa, Streptococcus agalactiae
MEKRLSLGALVLASTVLLAACGNVGGGASSTGTKIGKDIKVGYNWELSGNVSSYGNSMKNGADLAVKEINAAGGVGGKKLKVLSQDNKSENAEAATVATNLVTKGANVIIGPATSGAAASSTPKVNAAAVPMIAPAATQDNLVYGSDGKTLNQYFFRATFVDNYQGKLLSQYATDNLKAKKVVLFYDNSSDYSKGVAKSFKESYSGKIVDSMTFSAGDTDFQASLTKLKGKEYDAIVMPGYYTETGLIVKQARDLGISKPVLGPDGFDSPKFVQSATPVGASNVYYLTGFTTQGSTKAKAFHDHYVKAYGEEPSMFSALSYDAVYMAAKSAKGAKTSIDIKKALAKLKDFKGVTGKMSIDKNHNVVKSAYVVKLEDGKTSSVNIISAK

SEQ ID NO: 2917 - protein, 306 aa, Streptococcus agalactiae
TTGTTGGAATTATGTTATAATCTTAGTAATTACAGATATGACGCAGAAAGGAAAAAATTATTGAATAAACAAGAGCGTTTAGGAATGAGCGTTTATCTTTACTATAATCGTGACGCTCGTAAATTATATAAATACGGAGATGTTCATTATCATTCTCGTAGATTAAGATATCTAGTCATTTATGTTAATAAAGAGGATATTGTTAGCGTTAGTAAAGAGATAAAACATTTAAAATTTGTTAAGGATGTTCGGTTATCAGCAATTGATGATATTGATCAGGATTTTGTTGGAAACTTATATCGTTAA

SEQ ID NO: 2918 - protein, 101 aa, Streptococcus agalactiae
MLELCYNLSNYRYDAERKKLLNKQERLGMSVYLYYNRDARKLYKYGDVHYHSRRLRYLVIYVNKEDIVSVSKEIKHLKFVKDVRLSAIDDIDQDFVGNLYR

SEQ ID NO: 2919 - protein, 591 aa, Streptococcus agalactiae
ATGATTCCAGTAGTTATTGAACAAACAAGTCGTGGTGAACGTTCTTATGATATTTACTCACGTCTTTTAAAAGATCGTATTATTATGTTGACAGGCCAAGTTGAGGATAATATGGCCAATAGTATCATTGCACAGTTATTGTTTCTCGATGCACAAGATAATACAAAGGATATTTACCTTTATGTCAATACACCAGGTGGTTCAGTATCGGCTGGACTTGCTATTGTGGACACCATGAACTTCATTAAATCGGACGTACAGACGATTGTTATGGGGATGGCTGCTTCGATGGGAACCATTATTGCTTCAAGTGGTGCTAAAGGAAAACGTTTTATGTTACCGAATGCAGAATATATGATCCACCAACCAATGGGCGGAACAGGCGGAGGTACACAGCAATCTGATATGGCTATCGCTGCTGAGCATCTTTTAAAAACGCGTCATACTTTAGAAAAAATCTTAGCTGATAATTCTGGTCAATCTATTGAAAAAGTCCATGATGATGCAGAGCGTGATCGTTGGATGAGTGCTCAAGAAACACTTGATTATGGCTTTATTGATGCTATTATGGAAAATAATAATTTACAATAA

SEQ ID NO: 2920 - protein, 196 aa, Streptococcus agalactiae
MIPVVIEQTSRGERSYDIYSRLLKDRIIMLTGQVEDNMANSIIAQLLFLDAQDNTKDIYLYVNTPGGSVSAGLAIVDTMNFIKSDVQTIVMGMAASMGTIIASSGAKGKRFMLPNAEYMIHQPMGGTGGGTQQSDMAIAAEHLLKTRHTLEKILADNSGQSIEKVHDDAERDRWMSAQETLDYGFIDAIMENNNLQ

SEQ ID NO: 2921 - protein, 219 aa, Streptococcus agalactiae
ATGGAATGNNNNNAAGCAGTAGATTCTCTAAAAAAACGTGGCGCAGCTAGTATCAAATTCGTTTGTTTAGTAGCAGCTCCAGAAGGAGTGGCAGCACTTCAAGAAGCACATCCAGATGTAGATATTTATACCGCTGCTTTGGATGAAAAACTCAACGAACATGGCTACATTGTTCCTGGACTCGGAGATGCTGGGGATCGCTTATTTGGTACAAAATAA

SEQ ID NO: 2922 - protein, 72 aa, Streptococcus agalactiae
  VARIANT 3, 4, 5: Xaa = Any Amino Acid
MEXXXAVDSLKKRGAASIKFVCLVAAPEGVAALQEAHPDVDIYTAALDEKLNEHGYIVPGLGDAGDRLFGTK

SEQ ID NO: 2923 - protein, 1170 aa, Streptococcus agalactiae
ATGATTACATATGATTTCACAAGTTTACCAGAACGTTTTTCAAGTAATACCATAAAATGGAAGGCGGTTCAAAAAGATCAAGAAATCCTTCCCCTTTGGATTGCGGATATGGATTTTCCTATCTTTCCAGAAATGTCGGAGGCTATTGAAGATTTTTCACACCAAATGGTTTTTGGCTATGATAGTCCTAAAGACAGTTTATACCAAGCTATCTCTAATTGGGAAGTGCAAGAACATGGTTATCAATTTGATAAAAAATCATTATTATTAATTGATGGGGTTGTACCAGCGATTTCAGTTGCTATACAAGCCTTCACAAAGGAGGGAGATGCTGTTCTAATTAATACCCCAGTCTATCCGCCCTTTGCTAGAACTATAAAATACAATAATCGTCATTTAGTTTCAAATAGTTTACTTAATAATAATCAGTATTTTGAGATTGACTTTAAACAATTAGAAAAAGATATCATTGAAAATAATGTAAAGCTTTATATTTTTTGTAGTCCACACAATCCCGGTGGGCGTGTCTGGACAAAAGGAGAAATTCAAAAAATAGGAGATATCTGTAAACGATATAATGTTATCCTCGTTTCTGACGAAATACATCAAGATTTGGTATTATTTGATAATGTACACCATAGCTTTAATACTGTTGATTCTAGTTTTAAAGAATTGAGTGTTATTTTATCTAGTGCAACTAAAACGTTTAATATTGCAGGGACTAAAAATAGTTTTGCAATAATTGAAAATGAAAAGTTACGCTCGGATTTTAAGAAGAGGCAAATAGCTAACAATCAACAAGAAATTTCTTCATTGGGGTTATTAGCTACAGAAGTTGCCTTTACAAAAGAGAAACAATGGTTAAAGGCCCTAAAAATGGAGTTAGAAGGATCAATAGAATACCTTTATGAGCAATTAACGCAAAAAACTCATATCAAAGTGATGAAACCAGAGGGAACTTATCTTGTTTGGTTAGATTTTTCTGCTTATAATTTAACGCATTTAGAAATTCAAGAAAAACTTCGATATGATGCCAAATTAATATTAAATGATGGTTTAACTTTTGGAAAAGAAGGGAAAAAACATGCTAGAATCAATGTCGCAGCTCCTAGGTCTGTTATTGAGGAGGCAGTTTTGCGATTAGTGACAAACTTTAGAAAAAATGACTAG

SEQ ID NO: 2924 - protein, 389 aa, Streptococcus agalactiae
MITYDFTSLPERFSSNTIKWKAVQKDQEILPLWIADMDFPIFPEMSEAIEDFSHQMVFGYDSPKDSLYQAISNWEVQEHGYQFDKKSLLLIDGVVPAISVAIQAFTKEGDAVLINTPVYPPFARTIKYNNRHLVSNSLLNNNQYFEIDFKQLEKDIIENNVKLYIFCSPHNPGGRVWTKGEIQKIGDICKRYNVILVSDEIHQDLVLFDNVHHSFNTVDSSFKELSVILSSATKTFNIAGTKNSFAIIENEKLRSDFKKRQIANNQQEISSLGLLATEVAFTKEKQWLKALKMELEGSIEYLYEQLTQKTHIKVMKPEGTYLVWLDFSAYNLTHLEIQEKLRYDAKLILNDGLTFGKEGKKHARINVAAPRSVIEEAVLRLVTNFRKND

SEQ ID NO: 2925 - protein, 207 aa, Streptococcus agalactiae
ATGTTTGGTCGTGAAGATAAAGGATTGCCAGAAACTTTTATGCGCGAGCATGCCGAAAAGGCCTTACGAATTCCCATGAACGATGAGCATGTGCGTAGCTTGAATGTTTCAAACACTGTTTGTATGATTGTTTATGAAGCCCTTAGGCAGCAAAGCTTTCCTAATTTAGAATTAAGCCATACTTATGAAAATGATAAATTAAAATAA

SEQ ID NO: 2926 - protein, 68 aa, Streptococcus agalactiae
MFGREDKGLPETFMREHAEKALRIPMNDEHVRSLNVSNTVCMIVYEALRQQSFPNLELSHTYENDKLK

SEQ ID NO: 2927 - protein, 281 aa, Streptococcus agalactiae
ATGAATATTGAAACACTAACGCAGAAAAATCATCGTTCCGATAGCGGACGAAATCATATTGTTTTATTTGAACCACAGATTCCAGCAAATACTGGTAATATTGCTAGAACTTGTGCGGCAACAAATGCTCCTTTGCACATCATACGACCGATGGGATTTCCTATTGATGATAAAAAAATGAAACGAGCGGGACTGGATTACTGGGATAAGCTAGATGTTAGTTTCTATGATGGTTTGGAAGAATTTATGTTGTCATGTCGAGGGAAAGTTCACCTAATTAG

SEQ ID NO: 2928 - protein, 93 aa, Streptococcus agalactiae
MNIETLTQKNHRSDSGRNHIVLFEPQIPANTGNIARTCAATNAPLHIIRPMGFPIDDKKMKRAGLDYWDKLDVSFYDGLEEFMLSCRGKVSPN

SEQ ID NO: 2929 - protein, 1239 aa, Streptococcus agalactiae
ATGGAGAATCATAATTCTATTAAACAGACCTATGGATTAATGACTACAATTGCTATGATTGTAGGTGTAGTGATTGGTTCAGGCATTTATTTTAAAGTTGATGACATCCTTAAATTTACTGGTGGAGATGTCTTTTTAGGCATGGTAATTTTAGTACTAGGTTCTTTTTCGATTGTTTTTGGAAGTTTGTCAATTTCTGAGCTAGCTATTAGAACGAGTGAAAGTGGTGGTATTTTTTCTTACTACGAAAAATATGTTAGCCCAGCTTTAGCAGCAACTTTAGGCTTGTTTGCGTCTTTTTTGTATCTTCCAACTTTAACAGCAATCGTTTCATGGGTAGCTGCATTTTATACTTTAGGTGAATCATCAAGTTTGGAATCACAGATTATTTTAGCTGCTGTTTATATTTTAGCGCTTAGTCTCATGAATATCTTTGCTAAGCGTATTGCAGGGGGATTCCAATCTTTAACGACCTTTGTAAAAATGATTCCTTTAGTTCTAATTGCTTTAATTGGTGCTTTTTGGTCTGATAAAGCTCCACAACTTCCACAACATTTAACAGCTATTCAACCGTCAAATGTTGGATGGAGTTGGGTGTCAGGTCTGGTACCATTGTATTTTGCATATGATGGTTGGACAATTTTTGTTAATATTGCACCAGAAGTCAAGAATCCCAAGAAGAATTTACCACTTGCCTTTGTCATTGGTCCAGCGCTTATCTTATTATCATATTTGGCATTTTTCTATGGTTTGACACAAATTTTAGGTGCTAGCTTTATTATGACAACCGGTAATGATGCTATTAATTATGCAGCTAATATTATTTTCGGTCCTAGTGTTGGGCGTTTATTATCTTTCATTGTTATTCTATCTGTATTAGGTGTTGCCAATGGACTTTTACTTGGGACGATGCGTCTACCTCAAGCTTTTGCGGAACGCGGATGGATCAAAAGTGAGAGGATGGCTAACATAAATTTGAAGTATCAAATGTCATTGCCAGCTAGTTTGACGGTGACGGCTGTAGCTATTTTTTGGCTTTTTGTTCATTTTATGGTTACAAAATTTAACTTATTGCCGGGTAGTGATATTAGTGAAATTGCTGTGGTGTTTAATAATACCAGTTTAATCATTCTTTATGTTTTAGTACTCAGCCTTTATCTCAAAAAAGATATTAAAAATAAATTTACCGGCTTAGTTTCACCGATTCTAGCAATTTTAGGNNNNNCATTCATTCATTAA

SEQ ID NO: 2930 - protein, 412 aa, Streptococcus agalactiae
  VARIANT 408, 409: Xaa = Any Amino Acid
MENHNSIKQTYGLMTTIAMIVGVVIGSGIYFKVDDILKFTGGDVFLGMVILVLGSFSIVFGSLSISELAIRTSESGGIFSYYEKYVSPALAATLGLFASFLYLPTLTAIVSWVAAFYTLGESSSLESQIILAAVYILALSLMNIFAKRIAGGFQSLTTFVKMIPLVLIALIGAFWSDKAPQLPQHLTAIQPSNVGWSWVSGLVPLYFAYDGWTIFVNIAPEVKNPKKNLPLAFVIGPALILLSYLAFFYGLTQILGASFIMTTGNDAINYAANIIFGPSVGRLLSFIVILSVLGVANGLLLGTMRLPQAFAERGWIKSERMANINLKYQMSLPASLTVTAVAIFWLFVHFMVTKFNLLPGSDISEIAVVFNNTSLIILYVLVLSLYLKKDIKNKFTGLVSPILAILGXXFIH

SEQ ID NO: 2931 - protein, 1350 aa, Streptococcus agalactiae
ATGAGAATAATTGTTGTCGGCGGAGGTAAAGTCGGAACCGCACTTTGTCGCTCACTTGTTGCTGAAAAGCACGATGTTGTTTTAATTGAGAAAAAAGAAAACGTCCTTAAACGTGTCACTAAACAGCATGATATTATGGGAATTGTTGGGAATGGAGCAAACTATAAAATTTTAGAACAAGCCGAAGTCAAAAATTGTGATATTTTTATCGCTATCACTGATCGAGATGAAGTTAATATGATTTCAGCAGTTCTTGCCAAAAAAATGGGGGCAAAAGAGACTGTTGTTCGCATGCGTAATCCTGAGTATTCTAATCCTTACTTCAAAGATAAAAACTTTCTTGGCTTCTCTTCAGTTGTCAACCCTGAATTGTTAGCAGCACAATATATCGCTAATACCATAGAATTTCCAAATGCAACTTCAGTTGAACACTTCGCCAACGGGCGTGTGATGTTAATGGAATTTAAAATTTTAGAAGGAAATAAACTCTGTCATACTTCAATGAGTCAAATTCGTAAAAAATTTGGTAATATTGTTATTTGCGCAATTGAACGCGATGGCAAATTGATTATTCCTGATGGCGATGCAACTATCCAAGTCAAAGATAAAATCTTTGTAACTGGAAATCGTATTGAAATGATACTTTTCCATAATTACGTTAAAAATAAAGTTGTCAAAAACTTGATGGTTATCGGTGCAGGACGCATCGCCTACTACCTACTCAATATCCTTAAAAATACCAATACACACGTCAAACTAGTTGAACTCAACCAAGAGCAAGCTGAATATTTTAGTCAAGAATTTCCCAATGTTCCTGTCGTTCATGGGGATGGTACTGCTAAAAATATTTTGTTAGAAGAAAGCGTTACAAGTTTTGACGCAGTTGCTACTTTGACTGGTGTTGATGAAGAAAATATCATTACCTCAATGTTCTTAGAAAGTATCGGTATCCCTAAAAACATTACCAAAGTTAATCGAACTAGCCTACTAGAAATCATTGACGATAAACAACTATCAAGCATTATCACACCCAAGCGTATTGCCGTAGACCATGTGATGCACTTTGTACGCGGGCGTGTAAATGCTCAGGATTCCAACCTAGAAGCTATGCATCATATTGCTAACGATCGCATTGAAACCTTACAATTTGAAATAAAAGAAACTAGCAAATTAGCAAATCGTAGCCTTGCATCTTTAAAATTAAAGCAAAATATTTTAATTGCAGCGATTATTCGCAATAATAAAACGATTTTCCCAACTGGTGAGGATGTTTTAACAGTGGGTGATCGTATCGTTGTTATCACCTTATTAAAAAATATTACTAGAACTAGTGATATGTTAGCGAGGTAG

SEQ ID NO: 2932 - protein, 449 aa, Streptococcus agalactiae
MRIIVVGGGKVGTALCRSLVAEKHDVVLIEKKENVLKRVTKQHDIMGIVGNGANYKILEQAEVKNCDIFIAITDRDEVNMISAVLAKKMGAKETVVRMRNPEYSNPYFKDKNFLGFSSVVNPELLAAQYIANTIEFPNATSVEHFANGRVMLMEFKILEGNKLCHTSMSQIRKKFGNIVICAIERDGKLIIPDGDATIQVKDKIFVTGNRIEMILFHNYVKNKVVKNLMVIGAGRIAYYLLNILKNTNTHVKLVELNQEQAEYFSQEFPNVPVVHGDGTAKNILLEESVTSFDAVATLTGVDEENIITSMFLESIGIPKNITKVNRTSLLEIIDDKQLSSIITPKRIAVDHVMHFVRGRVNAQDSNLEAMHHIANDRIETLQFEIKETSKLANRSLASLKLKQNILIAAIIRNNKTIFPTGEDVLTVGDRIVVITLLKNITRTSDMLAR

SEQ ID NO: 2933 - protein, 1437 aa, Streptococcus agalactiae
ATGATTCGTTTCCTTCTCTCAAAACTTTTGCTAATTGAAGCTGCTCTTCTAGCGATTCCTCTAACTGTTGGACTTATTTACCGTGAACCGCAAAGTGTCATGATGAGTATAGTCATTACCATGATTATTTTAATCATCCTTGGATTACTGGGTTCTCTCTTTAAACCTAAAAATTATCATATCTACACTAAAGAAGGCATGTTAATTGTTGCACTCTGCTGGATACTTTGGTCCTTCTTTGGCGCCCTTCCATTTGTTATTTCAGGGCAAATCCCTAATATTATCGATGCTTTCTTTGAAGTATCTTCTGGTTTTACGACAACAGGAGCAACTATTCTTGATGACGTCAGTGTCTTATCACCCGCGCTCTTATTTTGGCGTAGCTTTACCCATCTTATCGGTGGAATGGGGGTTTTAGTATTTGCCCTTGCCATCATGGAAAATTCTAAAAATAGCCATTTAGAGGTTATGAGAGCTGAAGTTCCTGGACCTGTATTTGGTAAAGTTGTCTCGAAACTTAAAAAAACTGCACAAATTTTGTATTTGTTATATCTTCTTATGTTTGCAGTATTTGCAGTAATATTATATTTTGCAGGTATGCCTTTCTTTGATAGTATTATCATAGCGATGGGAACTGCAGGTACAGGTGGTTTTGCAGTTTACAATGATAGCATTGCTCATTATAATAGTCCTCTGATAACTAACTTAGTTTCTATTGGTATGCTTATCTTCGGGGTTAACTTTAATCTTTACTATCTTCTTTTACTCCGAAAAATTAAAGCATTCTTTGGTGATGAGGAACTAAAAACCTATCTCCGCATCGTGGCAATAGCAACTTTCATGATTGCTCTAAACGTCATCGGTATGTATGATAATTTTCGACAAGGCCTCGAACATATTTTCTTTGAAGTATCAGCTATTATTACGACAACTGGTTTTGGCGTGACTGATATCACTCGTTGGCCTTTGTTTTCACAGGTTATTTTGCTATTCTTGATGTTTATCGGTGGTTCTGCTGGCTCTACAGCTGGGGGCTTTAAAGTCATGCGTAGCTTAATCCTAGCAAAGATTGCACGTAACCAAGTATTGTCTACACTCTATCCTAATAGAGTCATGTCACTACACATTAATAAAAGCGTTCTAGATAAAAATACACAACATGGTGTTTTAAAATATCTAACTATCTATTTAGCTATCTTCATGGCACTCGTTCTTGTTTTAACGCTTGATACTAATGATTTTTTGGTTGTTATCAGTGCTGCAGCCTCATGTTTTAACAACATAGGCCCACTCTTAGGTAGCAATGAAACTTTCTCATTCTTTAGTCCATTCTCAAAACTCCTTCTTTCATTTGCTATGATAGCAGGACGTTTAGAAATATACCCTGTTTTATTGATGTTATTCCTAAAACATGGTCAAAACTATAATTACAAATAA

SEQ ID NO: 2934 - protein, 478 aa, Streptococcus agalactiae
MIRFLLSKLLLIEAALLAIPLTVGLIYREPQSVMMSIVITMIILIILGLLGSLFKPKNYHIYTKEGMLIVALCWILWSFFGALPFVISGQIPNIIDAFFEVSSGFTTTGATILDDVSVLSPALLFWRSFTHLIGGMGVLVFALAIMENSKNSHLEVMRAEVPGPVFGKVVSKLKKTAQILYLLYLLMFAVFAVILYFAGMPFFDSIIIAMGTAGTGGFAVYNDSIAHYNSPLITNLVSIGMLIFGVNFNLYYLLLLRKIKAFFGDEELKTYLRIVAIATFMIALNVIGMYDNFRQGLEHIFFEVSAIITTTGFGVTDITRWPLFSQVILLFLMFIGGSAGSTAGGFKVMRSLILAKIARNQVLSTLYPNRVMSLHINKSVLDKNTQHGVLKYLTIYLAIFMALVLVLTLDTNDFLVVISAAASCFNNIGPLLGSNETFSFFSPFSKLLLSFAMIAGRLEIYPVLLMLFLKHGQNYNYK

SEQ ID NO: 2935 - protein, 252 aa, Streptococcus agalactiae
ATGCTTAAATCTTTTTTGATTTTCTTAGTTCGCTTTTACCAAAAAAATATTTCTCCAGCTTTCCCAGCTAGCTGTCGTTATCGTCCAACTTGCTCTACGTATATGATAGAAGCTATTCAAAAACATGGTCTAAAAGGTGTGTTGATGGGGATTGCACGTATTTTGCGATGTCATCCCTTAGCCCACGGAGGAAATGATCCTGTCCCTGATCATTTTAGCTTAAGACGTAATAAAACGGATATATCAGATTGA

SEQ ID NO: 2936 - protein, 83 aa, Streptococcus agalactiae
MLKSFLIFLVRFYQKNISPAFPASCRYRPTCSTYMIEAIQKHGLKGVLMGIARILRCHPLAHGGNDPVPDHFSLRRNKTDISD

SEQ ID NO: 2937 - protein, 721 aa, Streptococcus agalactiae
ATGAGAATTAATAAATATATTGCGCATGCAGGGATTGCAAGTCGTAGAAAAGCTGAGGAATTAATCAAGCAAGGAATGGTCACGATTAATGGTCAAGTGGTTAATGAATTGGCGACCCAAGTAAAGGCTGGTGATCTGGTTGAAATTGAAGGAAGTCCAATTTACAACGAAGAGAAGGTATATTATCTCTTAAATAAACCACGTGGTGTTATTTCAAGTGTCTCAGATGATAAAGGACGTAAGACAGTTATTGACTTGTTGCCACAAGTCAAAGAACGGATATATCCTGTTGGTCGCTTGGATTGGGATACAACTGGACTTTTAATTTTGACTAATGATGGTGATTTTACTGATAAAATGATTCATCCTCGTAATGAAATTGATAAAGTTTATTTAGCACGTGTTAAGGAATAGCTACTAAAGAAAACCTTCGACCATTAACGCGTGGCGTTGTTATCGATGGTAAGAAAACAAAACCTGCTCGCTATACTATCATAAAAGTGGATCATGAAAAAAATCGTTCAGTAGTTGAATTACTATTCATGAAGGTCGTAATCATCAAGTTAAGAAAATGTTTGAACAAGTTGGGTTATTAGTGGACAAGCTATCTCGTACACAATTCGGTACCTTAGATTTAACGGGTCTCCGTCCTGGGGAAGCACGACGATTAAATAAAAAAGAAATTAGTCAGTTGCATAATGCGGCTATTAATAAATCTTAA

SEQ ID NO: 2938 - protein, 240 aa, Streptococcus agalactiae
MRINKYIAHAGIASRRKAEELIKQGMVTINGQVVNELATQVKAGDLVEIEGSPIYNEEKVYYLLNKPRGVISSVSDDKGRKTVIDLLPQVKERIYPVGRLDWDTTGLLILTNDGDFTDKMIHPRNEIDKVYLARVKGIATKENLRPLTRGVVIDGKKTKPARYTIIKVDHEKNRSVVELTIHEGRNHQVKKMFEQVGLLVDKLSRTQFGTLDLTGLRPGEARRLNKKEISQLHNAAINKS

SEQ ID NO: 2939 - protein, 174 aa, Streptococcus agalactiae
GTGTTGGGACGTCCTAACCTTTATGAGACAACTAATTATTTCTTAGATTATATGGGAATTAATCAGTTAGATGACTTAATTGACGCCTCTTCAATTGAATTAGTTGACGAAGAAGTATCGTTATTTTCAATGGATTCAATTAATACAGAAGATAAGGAAAACAATGAGAATTAA

SEQ ID NO: 2940 - protein, 57 aa, Streptococcus agalactiae
MLGRPNLYETTNYFLDYMGINQLDDLIDASSIELVDEEVSLFSMDSINTEDKENNEN

SEQ ID NO: 2941 - protein, 465 aa, Streptococcus agalactiae
ATGGATATTAAGTTAAAAGATTTCGAGGGGCCCCTAGACTTACTCTTGCACCTCGTATCTAAATATGAGGTTGATATATACGATGTACCGATTGTGGAAGTTATTGAGCAGTACCTTGCTTATATAGCAACATTACAGGCGATGCGTCTAGAAGTAGCTGGTGAGTATATGCTTATGGCAAGTCAGCTGATGTTGATAAAAAGCCGTAACTTATTACCTAAAGTAGTGGAGTCAAATCCTATTGAAGATGATCCAGAAATGGAATTGTTGAGCCAATTAGAGGAATATAGACGTTTTAAAGTGCTAAGTGAAGAGTTAGCTAATCAGCATCAGGAACGCGCCAAATATTTTTCAAAACCAAAACAAGAAGTTATCTTTGAAGATGCAATTCTTCTACACGATAAATCGGTGATGGATCTTTTTTTGACTTTTTCTCAANNNNNCATTCATTCATTAATTAATTAA

SEQ ID NO: 2942 - protein, 154 aa, Streptococcus agalactiae
  VARIANT 147, 148: Xaa = Any Amino Acid
MDIKLKDFEGPLDLLLHLVSKYEVDIYDVPIVEVIEQYLAYIATLQAMRLEVAGEYMLMASQLMLIKSRNLLPKVVESNPIEDDPEMELLSQLEEYRRFKVLSEELANQHQERAKYFSKPKQEVIFEDAILLHDKSVMDLFLTFSQXXIHSLIN

SEQ ID NO: 2943 - protein, 780 aa, Streptococcus agalactiae
ATGATTTTACAGACGAATATACTATCACTCCTAAAAACAATGATAAATGATATTAATAATTTTATTGAGAGTAAGAAATTATCTCTCAATTCGCGTAAGTCCTATCACTATGATTTAAAGCAATTTTATAAAATAATTGGTGGACATGTAAATTCTGAAAAACTGGCATTGTATCAACAGTCTCTAAGTGAATTTAAGTTAACAGCTCGTAAGCGAAAGTTATCTGCAGTCAATCAATTTCTTTTCTTTTTATATAATAGAGGAACGCTGAAGGAATTTTACAGACTACAAGAGACTGAAAAAATCACTTTGGCTCAGACAAAGTCTCAAATAATGGATTTATCAAATTTCTATCAAGATACTGATTATCCGAGTGGTCGTTTGATTGCTTTGTTGATTTTATCTTTAGGTTTAACTCCGGCTGAAATTGCTAATTTGAAGAAGGCTGATTTTGATACAACTTTTAATATCTTAAGTATTGAAAAATCGCAGATGAAGCGTATTTTAAAACTTCCAGAAGACTTGCTTCCTTTTCTTTTGGAATCTTTAGAGGAAGATGGTGACTTAGTCTTTGAGCATAACGGTAAGCCTTATTCTAGACAATGGTTTTTTAATCAATTAACAGATTTCTTAAATGAGAAGAATGAGCAACAACTAACTGCACAACTTCTGCGAGAACAATTTATTCTAAAGCAAAAAGAAAATGGCAAAACGATGACGGAGCTCAGTCGCCTTCTAGGCTTAAAAACTCCTATCACTTTAGAGAGATATTATAGATAA

SEQ ID NO: 2944 - protein, 259 aa, Streptococcus agalactiae
MILQTNILSLLKTMINDINNFIESKKLSLNSRKSYHYDLKQFYKIIGGHVNSEKLALYQQSLSEFKLTARKRKLSAVNQFLFFLYNRGTLKEFYRLQETEKITLAQTKSQIMDLSNFYQDTDYPSGRLIALLILSLGLTPAEIANLKKADFDTTFNILSIEKSQMKRILKLPEDLLPFLLESLEEDGDLVFEHNGKPYSRQWFFNQLTDFLNEKNEQQLTAQLLREQFILKQKENGKTMTELSRLLGLKTPITLERYYR

SEQ ID NO: 2945 - protein, 474 aa, Streptococcus agalactiae
ATGATTGCTAAAGAATTTGAGTCGTTTTTGCTAAATCATTTGGACCACTATCTAATTCCAGCTGAAGACGTTGCTATTTTTGTGGATACACACAATGCAGACCACGTTATGTTACTATTAGCAAGTAATGGTTTTTCACGTGTACCAGTTATCACTAAAGAGAAAAAATATGTAGGTACTATTAGTATCTCAGACATTATGGGCTACCAATCTAAAGGTCAATTAACAGATTGGGAGATGGCACAGACTGATATTGTTGAGATGGTTAATACAAAAATCGAGCCGATTAATGAGGCAGCTACTCTGACAGCAATTATGCATAAGATTGTAGATTATCCATTTTTACCTGTTATCAGTGATCAAAATGATTTTAGAGGCATTATAACCCGTAAATCGATTTTAAAAGCTATTAATAGCCTCCTACATGATTTTACAGACGAATATACTATCACTCCTAAAAACAATGATAAATGA

SEQ ID NO: 2946 - protein, 157 aa, Streptococcus agalactiae
MIAKEFESFLLNHLDHYLIPAEDVAIFVDTHNADHVMLLLASNGFSRVPVITKEKKYVGTISISDIMGYQSKGQLTDWEMAQTDIVEMVNTKIEPINEAATLTAIMHKIVDYPFLPVISDQNDFRGIITRKSILKAINSLLHDFTDEYTITPKNNDK

SEQ ID NO: 2947 - protein, 522 aa, Streptococcus agalactiae
ATGGCAATTAGAAAATTAGTTGTAATGAGTGATTCTCACGGAGATCGTGACATTGTAAAAGATATAAAGAATCATTATTTGGGAAAAGTGGATGCTATTTTTCACAATGGGGATTCCGAACTTCCTAGCTCAGATCCTATATGGGAAGGCATTCATGTGGTCACAGGAAATTGTGATTATGATTCAGGTTATCCGGAAGTTTTGGTTACAAAAATAGATAATGCTGTTATTGTTCAAACCCATGGTCATCTCCATCAGATTAATTTTACCTGGGATAAATTGGATTTATTAGCTCAGCAAGAAGACGCGGATATTTGTTTATATGGTCATCTTCATCGTGCAGATGCTTGGAAAAATGGTAAAACTATTTTTATCAATCCAGGTAGTGTTTTGCAGCCAAGAGGACCAATAAATGAGAAGCTTTACGCTGTTGTAACTATAACAGATAGTAAGGTTTTGGTAGAGTATTATACTCGCCAACACCAACCCTATCCTAACTTGACAAAGGAATTATCAAGATGA

SEQ ID NO: 2948 - protein, 173 aa, Streptococcus agalactiae
MAIRKLVVMSDSHGDRDIVKDIKNHYLGKVDAIFHNGDSELPSSDPIWEGIHVVTGNCDYDSGYPEVLVTKIDNAVIVQTHGHLHQINFTWDKLDLLAQQEDADICLYGHLHRADAWKNGKTIFINPGSVLQPRGPINEKLYAVVTITDSKVLVEYYTRQHQPYPNLTKELSR

SEQ ID NO: 2949 - protein, 975 aa, Streptococcus agalactiae
ATGACAAAAACAATTTTTGAAAGTAAAACTGAAGGCAATTGGTTTTTAGGTAGTTTCCAAGCTTTTAATTATTTTACTTGTTTTGGTAATGATGAATCTTACGAAGCTATCCAAGATGTTTTTCATCGTCTATTATCAACTTTGAAAGTTGAAGGTCTACAGCTTCACGTTGTGCAGATGACTTCGGATTTTCAATTATTAGCATTCCTCGTTGATATGATTAATCAAGAGTATTCAAGGCATATCAAAGTGACTCAACATAAAGGGGCCATCTTAGTTAGTGAAGATGATCAGTTGTTCTTAGTTCACTTACCTAAAGAGGGCACTTCTTTAGAAAAATTCTTTGATTTAAAGAATGATAATAATTTTGGGGATACCATATTAATTGCGACTCACAATGAAGGAAAAACGAAGGAATTTAGAGAATTATTTGGGAAATTAGGACTCAAAGTTGAAAATTTAAATGATTACCCAGATTTACCAGAAGTTGAAGAGACTGGTATGACCTTTGAAGAAAATGCTCGACTTAAAGCAGAGACTATTTCAAAATTAACTGGAAAAATGGTAATTTCAGATGATTCCGGATTAAAAGTAGATGCTTTAGGTGGTTTGCCAGGGGTATGGTCTGCTCGTTTTTCAGGTCCTGACGCGACAGATGCTCGTAATAATGCCAAATTATTGCATGAATTAGCCATGGTATTTGACAAAGAAAGACGTTCAGCACAGTTTCATACAACCTTAGTCGTGTCAGCTCCAAATAAAGAAAGTTTGGTAGTTGAAGCAGAGTGGCCAGGTTATATTGGTACGGAACCTAAGGGGGAAAATGGCTTTGGTTATGATCCGCTCTTTATTGTCGGAGAAGGTAGTAGGACAGCAGCTGAATTGAGCGCACAAGAAAAAAATAATCTATCACATCGTGGGCAAGCTGTCCGTAAATTGATGGAGGTATTTCCAAAATGGCAATTAGAAAATTAG

SEQ ID NO: 2950 - protein, 324 aa, Streptococcus agalactiae
MTKTIFESKTEGNWFLGSFQAFNYFTCFGNDESYEAIQDVFHRLLSTLKVEGLQLHVVQMTSDFQLLAFLVDMINQEYSRHIKVTQHKGAILVSEDDQLFLVHLPKEGTSLEKFFDLKNDNNFGDTILIATHNEGKTKEFRELFGKLGLKVENLNDYPDLPEVEETGMTFEENARLKAETISKLTGKMVISDDSGLKVDALGGLPGVWSARFSGPDATDARNNAKLLHELAMVFDKERRSAQFHTTLVVSAPNKESLVVEAEWPGYIGTEPKGENGFGYDPLFIVGEGSRTAAELSAQEKNNLSHRGQAVRKLMEVFPKWQLEN

SEQ ID NO: 2951 - protein, 795 aa, Streptococcus agalactiae
ATGGATAGTAGGCCTATTGGCTTTCTAGATTCTGGTGTAGGTGGTTTAACGGTTGTTAAGGAAATGTTCCGTCAACTTCCAGAAGAGGAAGTAATCTTCATTGGAGATCAGGCTAGAGCTCCGTATGGTCCTAGACCTGCTCAACAGATTAGAGAGTTTACCTGGCAGATGGTTAACTTCTTATTGACTAAAAATGTTAAGATGATTGTTATAGCTTGTAATACAGCAACTGCAGTTGCCTGGCAAGAAATTAAAGAAAAACTAGACATCCCTGTTTTAGGCGTTATTTTACCAGGAGCTAGCGCAGCTATCAAATCAACTAATTTAGGGAAAGTTGGTATTATAGGTACTCCCATGACTGTTAAATCAGATGCTTATCGTCAAAAAATTCAAGCTTTGTCTCCAAATACTGCTGTGGTATCCCTTGCTTGTCCGAAATTTGTTCCAATTGTGGAATCAAATCAGATGTCTTCTAGTTTAGCCAAAAAGGTGGTTTATGAAACGTTGTCCCCATTAGTTGGTAAATTAGATACTTTAATTTTAGGTTGCACGCATTATCCCCTATTACGTCCCATCATTCAAAATGTTATGGGGGCTGAGGTTAAATTAATTGATAGTGGCGCAGAAACCGTTCGTGATATTTCTGTTTTATTGAACTATTTTGAGATAAACCATAATTGGCAAAATAAACACGGTGGTCATCACTTTTACACAACCGCCAGCCCAAAAGGTTTTAAAGAAATTGCAGAACAATGGCTTAGTCAAGAAATAAATGTGGAGCGTATCGTATTATGA

SEQ ID NO: 2952 - protein, 264 aa, Streptococcus agalactiae
MDSRPIGFLDSGVGGLTVVKEMFRQLPEEEVIFIGDQARAPYGPRPAQQIREFTWQMVNFLLTKNVKMIVIACNTATAVAWQEIKEKLDIPVLGVILPGASAAIKSTNLGKVGIIGTPMTVKSDAYRQKIQALSPNTAVVSLACPKFVPIVESNQMSSSLAKKVVYETLSPLVGKLDTLILGCTHYPLLRPIIQNVMGAEVKLIDSGAETVRDISVLLNYFEINHNWQNKHGGHHFYTTASPKGFKEIAEQWLSQEINVERIVL

SEQ ID NO: 2953 - protein, 240 aa, Streptococcus agalactiae
ATGTCAACAACTATTTGGATTTTATTAATTATCGTCGCTTTGTTTGGTGGTCTCGTGGGAGGCATTTTTATTGCTCGTAAACAAATTGAAAAAGAGATTGGAGAGCACCCTCGTTTAACACCGGATGCTATTCGTGAAATGATGAGTCAAATGGGACAAAAACCTMKTGAAGCTAAAGTTCAACAAACATACCGTAATATTGTAAAACACGCAAAAACAGCTATCAAAACTAAAAAATAA

SEQ ID NO: 2954 - protein, 79 aa, Streptococcus agalactiae
  VARIANT 56: Xaa = Any Amino Acid
MSTTIWILLIIVALFGGLVGGIFIARKQIEKEIGEHPRLTPDAIREMMSQMGQKPXEAKVQQTYRNIVKHAKTAIKTKK

SEQ ID NO: 2955 - protein, 543 aa, Streptococcus agalactiae
ATGTCAAAAAAAACAACACAAATGGTTTCTTATACTTCTATTTTAGTAGCTTTTGCAATCATGATTCCTATAATCATGCCTGCTAAAATAATTATTGGGCCTGCTTCTTTCACCTTAGCAAGCCATGTACCTTTATTTTTAAGTATTTTTATATCTGTTCCAGTTGCAATATTGGTAGCTTTAGGGACAGGACTTGGATTTCTACTAGCTGGTTTTCCGATTGTAATCGTTCTTAGAGCTTTATCACATATCGGATTTGCATTAATTGCGGCTTTCTTGATTAAGTCAAAGCCCTCTTTATTGATGAGTAAATGGCAAACATTGTTATTTGCTGTAGCTATTAACATAATTCATGGTCTGCTCGAATTTATTACTGTTTATATAATCACAATGACTTCTAACAGTAGTTCAACTTATTTATGGTCACTATTTTCTTTGATAGGACTAGGCTCTTTGCTACATGGATTGGTAGATTTTTACATAGCTCTCTTCATTTGGAAATGGATGACACAAAAGTTGGGGAAAACACTTAGGATAAGATAA

SEQ ID NO: 2956 - protein, 180 aa, Streptococcus agalactiae
MSKKTTQMVSYTSILVAFAIMIPIIMPAKIIIGPASFTLASHVPLFLSIFISVPVAILVALGTGLGFLLAGFPIVIVLRALSHIGFALIAAFLIKSKPSLLMSKWQTLLFAVAINIIHGLLEFITVYIITMTSNSSSTYLWSLFSLIGLGSLLHGLVDFYIALFIWKWMTQKLGKTLRIR

SEQ ID NO: 2957 - protein, 522 aa, Streptococcus agalactiae
ATGAAGGCACAGGAGCGTCGAGAAAATATTTTAACGACTTTAAAAGGAACAAAAGAAGCTATATCGGCAAGCACATTAGCAAAGATTTTTAGTGTTAGTAGGCAGGTGATTGTTGGAGATATTGCCTTATTGCGTGCACAACAATGTGATATTATTTCTACCCCAAAAGGATACCTTATGTCCAGTGCTCTAAGTACTCATCAATTCACAGCTAGATTGGTTTGTCAGCATGGCATAGAACAGACAGAAGAAGAACTGGAAATTATTTTGCGGTATCAAGGAATCATTATGAATGTGGAGGTAGAGCACCCTATTTATGGGATGCTGACTGCTCCCTTAAACATTCAAAGCCAAAAAGACATTGATAATTTTACTGCTAAATTAAAAGTTTCCAATGCAGAATTGCTATCCTCTTTGACAGATGGTCTACATACACATATGATTTCTTGTCAAGATCAGTCAGTTTTTGACCAAATATGTGAGGCTCTAAAAAAAGCAGGAATTTTATACATAGACAAATAA

SEQ ID NO: 2958 - protein, 173 aa, Streptococcus agalactiae
MKAQERRENILTTLKGTKEAISASTLAKIFSVSRQVIVGDIALLRAQQCDIISTPKGYLMSSALSTHQFTARLVCQHGIEQTEEELEIILRYQGIIMNVEVEHPIYGMLTAPLNIQSQKDIDNFTAKLKVSNAELLSSLTDGLHTHMISCQDQSVFDQICEALKKAGILYIDK

SEQ ID NO: 2959 - protein, 567 aa, Streptococcus agalactiae
ATGTTTCCACAAAATATGATTGCCATCATGCAAAAAATGCCAGGGTTGTATTTTGGAGCAATCATCTTAGAATTGGTTTTAGTCTTTGTTGCTAGTGGAGCGGCGCGTCGAAACACACCAGCTGCATTACCATTATTTTTGATTTATTCAGCTTTGAATGGGTTTACTTTAAGTTTCATTATCGCAAGGTACACGCAAACTACAGTTCTTCAAGCTTTTATAACATCTGCGGCTGTTTTCTTTGCAATGGCTTTGATTGGAGCTAAGACTAAAAAAGATTTATCAGGTATGCGTAAAGCGTTAATGGCTGCTTTAATTGGGATTTTAATTGCAAGTCTTGTTAATTTATTTATCGGTAGTGGGGGTATGAGTTATATCATTAGTATCGTATGTGTCATCATCTTTTCTGGATTGATTGCTTACGATAACCAAATGATTAAATATGTCTACAATAGCCAAGGCGGCCAAGTCGCAGATGGTTGGGCAGTTTCGATGGCACTAAGCCTTTATCTTGATTTTATTAATCTATTCTTAAATATTCTTCGTCTTTTTGCACGAAATGATTGA

SEQ ID NO: 2960 - protein, 188 aa, Streptococcus agalactiae
MFPQNMIAIMQKMPGLYFGAIILELVLVFVASGAARRNTPAALPLFLIYSALNGFTLSFIIARYTQTTVLQAFITSAAVFFAMALIGAKTKKDLSGMRKALMAALIGILIASLVNLFIGSGGMSYIISIVCVIIFSGLIAYDNQMIKYVYNSQGGQVADGWAVSMALSLYLDFINLFLNILRLFARND

SEQ ID NO: 2961 - protein, 504 aa, Streptococcus agalactiae
ATGAAAAAGTATCAAGACGATAAGGACTTCATGGATTTGGTCGGTCACCTTATTGACCATCCACGTTTCCAAAAACTCGAAGCTATTGTCCAACATCATCACTCAACTCGCTTAGAGCATTCTATAAATGTTAGTTATACAAGTTATAAAATTGCTAAGAAGTTTGGTTGGGATGCGAGTAGTACTGCTCGAGGTGGTTTACTACATGATTTCTTTTATTATGATTGGCGTGTAACGAAATTTAACAAGAGCCATGCCTGGGTTCATCCAAGGATAGCGGTTCGTAATGCGCGAAAATTAACTGATTTAAACGCTAGAGAAGAAGATATTATTTTGAAGCACATGTGGGGAGCGACTATTGCACCGCCACGTTATAAAGAAAGTTATATTGTGACTATGGTTGATAAGTATTGGGCAGTACGAGAGGCTTCTCGTCCACTCAAACGTATTTTTAAGAAACCTATCCGTTTTAGTCGCAAATTCTTAGGTAGTCATAATCATTAA

SEQ ID NO: 2962 - protein, 167 aa, Streptococcus agalactiae
MKKYQDDKDFMDLVGHLIDHPRFQKLEAIVQHHHSTRLEHSINVSYTSYKIAKKFGWDASSTARGGLLHDFFYYDWRVTKFNKSHAWVHPRIAVRNARKLTDLNAREEDIILKHMWGATIAPPRYKESYIVTMVDKYWAVREASRPLKRIFKKPIRFSRKFLGSHNH

SEQ ID NO: 2963 - protein, 744 aa, Streptococcus agalactiae
ATGACTACTATTATAACTTCAAAATCAAATAATCTCATTAAAAAAACGAAAAAGTTGTTACAAAAAAAATATCGGAAATCTTCATATCTTATTGAAGGCTGGCATTTATTTGAGGAAGCTGAAAAATATGGTGCACAATTTTTAAATATTTTTGTGACAGAAACGGCAATAGATCGTTTGAGAAAACCCGAGAGAGCTATTGTTGTTACAGATGATGTTTTGAAAGAATTAACTGACTCACAGACTCCTCAAGGGATTGTAGCTGAGATTGCCTTTCAAGAGACAAGATGGACAGATATTAAAAAAGGACGTTTTCTTGTATTAGAAGATGTGCAGGATCCAGGAAACCTAGGAACAATGGTTCGAACTGCAGATGCAGCGAATTTTGATGCTGTTTTTTTATCTCAGAAATCTGCTGATTTGTATAACCAAAAAACACTTCGTTCTATGCAAGGCAGTCACTTTCATTTACCAGTATTTAGGGTAGAAATAGAGCAGTTTGTTAACTTTTGTAAAGCAGAAGGGATAACTATGATTGCGACAACTTTATCTGAACAATCGGTAAATTATAAGAATCTCCCTAAATATGATTATTTTGCTTTAATCATGGGAAATGAGGGACAGGGAATTTCCAAAACTATGACAGAAGAAGCAGATGTTTTAGCACATATTGAAATGCCTGGACAAGCAGAAAGTCTTAATGTAGCAGTAGCTGCGGGAGTAGTCATTTTCAGCTTAATTTAA

SEQ ID NO: 2964 - protein, 247 aa, Streptococcus agalactiae
MTTIITSKSNNLIKKTKKLLQKKYRKSSYLIEGWHLFEEAEKYGAQFLNIFVTETAIDRLRKPERAIVVTDDVLKELTDSQTPQGIVAEIAFQETRWTDIKKGRFLVLEDVQDPGNLGTMVRTADAANFDAVFLSQKSADLYNQKTLRSMQGSHFHLPVFRVEIEQFVNFCKAEGITMIATTLSEQSVNYKNLPKYDYFALIMGNEGQGISKTMTEEADVLAHIEMPGQAESLNVAVAAGVVIFSLI

SEQ ID NO: 2965 - protein, 279 aa, Streptococcus agalactiae
ATGAAAAAAGTTCATTTAATTGTCTCAGGGCGCGTTCAAGGAGTCGGATTTCGCTATGCAACTTATTCCTTAGCTTTAGAAATAGGTGATATTTACGGTCGCGTTTGGAATAACGATGATGGAACTGTTGAAATTTTAGCACAATCTACAGATTCAAATAAAATGACACAATTTATTCAGAAAATTCGAAAAGGACCTTCAAAATGGTCTAAAGTAACTTATGTTGATATTAAACTAGATAACTTCGATGATTTTAATGACTTTAAAATGAGTAATTAA

SEQ ID NO: 2966 - protein, 92 aa, Streptococcus agalactiae
MKKVHLIVSGRVQGVGFRYATYSLALEIGDIYGRVWNNDDGTVEILAQSTDSNKMTQFIQKIRKGPSKWSKVTYVDIKLDNFDDFNDFKMSN

SEQ ID NO: 2967 - protein, 801 aa, Streptococcus agalactiae
ATGGCCAACCTCATTACTTATTTCGCTCAACACCAAGGGCTTGGTTTTGGTGTCGCTATCATTATTGTAACCGTCATCGTACGTGTCGTTATCTTACCACTTGGACTTTATCAGTCTTGGAAAGCTAGCTATCAAGCTGAAAAAATGGCATACTTTAAGCCTTTATTTGAACCTATTAATGAACGACTACGCAATGCTAAAACACAAGAAGAAAAATTAGCAGCTCAGACAGAATTAATGACAGCTCAACGTGAGAATGGCCTTAGCATGTTTGGCGGTATTGGCTGCTTGCCATTACTCATTCAGATGCCATTTTTCTCAGCTATTTTCTTTGCTGCACGCTATACTCCTGGAGTCTCTAGTGCAACCTTCTTGGGACTTAACTTAGGTCAAAAGAGTCTGACACTTACTGTCATTATCGCCATTCTTTATTTTGTACAATCTTGGTTGTCAATGCAAGGTGTTCCAGATGAACAACGTCAGCAAATGAAAACAATGATGTATCTGATGCCAATAATGATGGTATTCATGTCTATTAGTTTACCTGCTAGTGTTGCGCTTTATTGGTTTATTGGTGGTATTTTCAGTATTATCCAGCAGCTAGTTACGACTTATGTACTTAAGCCTAAACTACGCCGAAAAGTAGAAGAAGAATATACTAAAAATCCTCCTAAAGCCTACAAAGCTAATAACGCACGAAAAGATGTTACAAATTCAACTAAAGCCACTGAATCTAATCAAGCAATTATTACATCTAAAAAAACAAATCGTAACGCCGGAAAACAAAAAAGACGGGGATAA

SEQ ID NO: 2968 - protein, 266 aa, Streptococcus agalactiae
MANLITYFAQHQGLGFGVAIIIVTVIVRVVILPLGLYQSWKASYQAEKMAYFKPLFEPINERLRNAKTQEEKLAAQTELMTAQRENGLSMFGGIGCLPLLIQMPFFSAIFFAARYTPGVSSATFLGLNLGQKSLTLTVIIAILYFVQSWLSMQGVPDEQRQQMKTMMYLMPIMMVFMSISLPASVALYWFIGGIFSIIQQLVTTYVLKPKLRRKVEEEYTKNPPKAYKANNARKDVTNSTKATESNQAIITSKKTNRNAGKQKRRG

SEQ ID NO: 2969 - protein, 666 aa, Streptococcus agalactiae
GTGATAAACTGGGATGCCATTTTTAATTTGGAACTAGCTGTTAAGGCTTTTCCAAGTGTTATTCAGGGGTTACCATATACCATTGGATTATCCTTGGTTGGCTTTATTTTAGGAGCTATCGTAGGATTCTTTGTAGCTCTAATGAAGATGTCTCATTTCCGCTTACTGAGGTATCTAGCTAATATTCATATTTCCTTAATGCGTGGGATTCCTTTAATGGTTCTACTCTTTCTTATCTACTTTGGTTTGCCTTTTATAGGGATACAGTTAGATGCTGTGACTGCTTCTATCGTAGGTTTTACCATGATGTCTAGTGCATATATATCAGAAATTATCAGAGCAGCTCTTTTAGCTGTTGATCATGGTCAGTGGGAAGCTGCTAGAGCTTTAGGGTTAAAAACACCGACGATTTATAGAGGCATTATTATTCCGCAAGCAACAAGAATTGCACTCCCTTCTTTAAGTAATGTTTTGCTAGATATGGTCAAGAGTTCCTCATTGACTGCGATGATTACGGTACCTGATATCTTTAATAATGCTAAAATAGTTGGGGGAACCTACTCCGACTATATGACCGCCTATATCTTAGTAGCCCTTATCTATTGGGTAATTTGTACGCTTTATGCAATTATTCAAGACTGGTGGGAAAAACGATTACTTTATTAA

SEQ ID NO: 2970 - protein, 221 aa, Streptococcus agalactiae
MINWDAIFNLELAVKAFPSVIQGLPYTIGLSLVGFILGAIVGFFVALMKMSHFRLLRYLANIHISLMRGIPLMVLLFLIYFGLPFIGIQLDAVTASIVGFTMMSSAYISEIIRAALLAVDHGQWEAARALGLKTPTIYRGIIIPQATRIALPSLSNVLLDMVKSSSLTAMITVPDIFNNAKIVGGTYSDYMTAYILVALIYWVICTLYAIIQDWWEKRLLY

SEQ ID NO: 2971 - protein, 858 aa, Streptococcus agalactiae
ATGAAAAAGACAATTTTACTTGGTTTAGTCGGTTTATCTGCAATGACATTAGCAGCTTGCTCAAATGGTCAATCTAGCAAAGAAACAACATGGGACAATATTAAAAAAGATGGTGTCCTTAAGGTTGCTACCCCTGCAACGCTTTATCCAACAAGTTATTATGATGACCATAAAAAATTGACTGGTTATGAGATTGATATGATGAAAGCGATTGCTAAAAAACTTAAGATAAAAGTTAAGTTTGTTGAAGTTGGAGTTGCTGAATCATTTACTTCTGTAGATAGTGGTAAGGTGGATGTTGCTGTCAATAACTTTGACACAACTCCCGAGCGTTTGAAAAAATACAATTTCTCTCAACCTTATAAATATTCTGTTGGAGGTATGATTGTACGTGCAGATGGTTCTTCAAAGATTACAGCAAAAGATTTATCTGACTGGAAAGGTAAAAAAGCTGGTGGTGGCGCTGGAACGCAATATATGAAAATTGCAAAACAGCAAGGTGCTGAACCTGTTATTTATGACAATGTAACTAATGACGTTTACCTTCGAGATGTATCAACTGGACGTACAGATTTCATTCCGAATGATTACTACACACAAGTCATTGCTGTAAAATATGTAACAAAACAATATCCAGATATCAAAGTAAAAATGGGTGATGTGAAGTATAATCCGACTGAGCAAGGTATTGTGATGAGTAAAAAAGATAAGAGCCTCAAAACAAAAATTGATGCAGCTATCAAGGATATGAAGAAAGACGGTTCTTTGAAAAAAATCTCTGAAAAATATTATGCTGGTCAAGATCTCACAAAAGAACCTGCTGGAACGGATAAAATTCCAGTAATTAAAGTTAAATAA

SEQ ID NO: 2972 - protein, 285 aa, Streptococcus agalactiae
MKKTILLGLVGLSAMTLAACSNGQSSKETTWDNIKKDGVLKVATPATLYPTSYYDDHKKLTGYEIDMMKAIAKKLKIKVKFVEVGVAESFTSVDSGKVDVAVNNFDTTPERLKKYNFSQPYKYSVGGMIVRADGSSKITAKDLSDWKGKKAGGGAGTQYMKIAKQQGAEPVIYDNVTNDVYLRDVSTGRTDFIPNDYYTQVIAVKYVTKQYPDIKVKMGDVKYNPTEQGIVMSKKDKSLKTKIDAAIKDMKKDGSLKKISEKYYAGQDLTKEPAGTDKIPVIKVK

SEQ ID NO: 2973 - protein, 1461 aa, Streptococcus agalactiae
ATGGTTTTTAAAGATGCTACCGCTATGGTACAAGCGATAAAACAGCATAAGATTTCGTCGCAAGAATTAGTAGAGCAAGCAATCTACAAGATCGAGGAACAGAATGTAAGCGTTAATGCTGTTGTCAGCAAGCAATATAATGAGGCGCGTCAAGCAGCCAAATACGCAAATGAATCAAATGCTCCTTTTGCAGGAGTTCCTATTCTTCTGAAAGATTTGGGACAGAATCAAAAAGGACAACTCTCAACCTCAGGTTCACAATTATTTAAACACTATCATGCTAAACAAACGGACTATTTAGTGCAGTCCTTTGAAAAATTAGGGTTTATTATTTTAGGAAGAACAAATACCCCTGAATTTGGTTTTAAGAATATTAGTGATGGTCAACTTCACGGGAATGTTAATCTTCCATTTGACCATTCAAGAAATGCTGGAGGCTCTAGTGGTGGTGCAGCCGCAGCTGTTAGTTCAGGAATGGTTCCAATTGCAGGAGCTAGTGATGGAGGAGGGTCAATCAGAATTCCAGCAAGTTTTAATGGTTTGATTGGTTTAAAACCGAGTCGAGGACGTATACCTGTTGGACCTTCATCCTATAGAGGTTGGCAAGGGGCTTCTAGTCATTTTGCTTTAACAAAGTCAGTTAGAGATACAAAACGACTATTATATTATTTACAATCATATCAAGTAGAAAGCCCATTTCCCCTGAAAAAACTCAGCAAAGAGAGTCTTTTCGAGTTTAGCGTTAGTAAACCCCTAAAAATAGCAGTATTGATGGATTCTCCCTTAAAAACAAAGGTATCAAGTGAGGCTAAAGCAGCTATTAAAGAAGCCGCAGATTTTCTGTCTCAAAAAGGGAATCATTTAGAATTAGTAGAACAACCTTTAGATGGTATTCATTCTATGAAAACTTATTGTATGATGAATAGCGTTGAAACAGCAGCAATGTTTGATGACATCGAAAAGAGTTTAGGGCGTTCAATGGAATTTAGCGATATGGAATTAATGACCTGGGCTATGTATCAGAGTGGACAAAGGGTATTGGCTAAAGATTACAGTAAACTCTTAGATTCATGGGATCAATTTGCAGCTACCATGGCGAGGTTTCATGAAAATTATGATTTAATTTTAACAGCAGCAACTAATCAACCAGCTCCTTTTCATGGACAATTTGATTTAGACGAGACACTCCAGAAACAATTGAGGCATATGGGAGAATTCTCAGTAAGTGAACAACAGGATTTAATTTGGAAAATGTTTGAAGACTCAATGGCCTGGACACCTTTTACACATCAGCCAAACTTGACAGGGCAACCTTCTTTAGCCATACCAACTCATCTAACTAAAGAGGGGCTACCTTTAGGTGTACAATTGACAGCGGCTAAAGGGAGAGAAGATTTATTGCTTGCTGTTGCAGAGTTGTTTGAAAAAGAGAAGCAATTCAAAGGGCCTGTTTACCATTAA

SEQ ID NO: 2974 - protein, 486 aa, Streptococcus agalactiae
MVFKDATAMVQAIKQHKISSQELVEQAIYKIEEQNVSVNAVVSKQYNEARQAAKYANESNAPFAGVPILLKDLGQNQKGQLSTSGSQLFKHYHAKQTDYLVQSFEKLGFIILGRTNTPEFGFKNISDGQLHGNVNLPFDHSRNAGGSSGGAAAAVSSGMVPIAGASDGGGSIRIPASFNGLIGLKPSRGRIPVGPSSYRGWQGASSHFALTKSVRDTKRLLYYLQSYQVESPFPLKKLSKESLFEFSVSKPLKIAVLMDSPLKTKVSSEAKAAIKEAADFLSQKGNHLELVEQPLDGIHSMKTYCMMNSVETAAMFDDIEKSLGRSMEFSDMELMTWAMYQSGQRVLAKDYSKLLDSWDQFAATMARFHENYDLILTAATNQPAPFHGQFDLDETLQKQLRHMGEFSVSEQQDLIWKMFEDSMAWTPFTHQPNLTGQPSLAIPTHLTKEGLPLGVQLTAAKGREDLLLAVAELFEKEKQFKGPVYH

SEQ ID NO: 2975 - protein, 483 aa, Streptococcus agalactiae
ATGGCAGAAAAAACTTACCCAATGACACAAGTGGAAAAAGATCAACTTGAAAAAGAACTTGAAGAGTTAAAATTAGTTCGTAGACCAGAAGTTGTAGAGCGTATCAAGATTGCTCGTTCTTATGGTGACTTATCAGAAAATAGCGAATATGATGCAGCAAAAGACGAACAAGCATTTGTTGAGGGTCAAATTCAAATTTTAGAAACAAAAATTCGTTATGCTGAAATTATTGATAGTGATGCAGTTGCTAAAGATGAGGTTGCAATTGGTAAAACTGTCCTTGTCCAAGAAGTTGGTACAAATGATAAAGATACTTACCATATCGTTGGTGCTGCTGGAGCTGACATTTTTTCAGGAAAAATTTCGAATGAAAGCCCAATTGCTCATGCTTTAATTGGTAAAAAAACAGGAGACTTAGCTACAATTGAATCACCTGCTGGTAGCTATCAAGTTGAAATCATTAGTGTTGAAAAAACAAATTAA

SEQ ID NO: 2976 - protein, 160 aa, Streptococcus agalactiae
MAEKTYPMTQVEKDQLEKELEELKLVRRPEVVERIKIARSYGDLSENSEYDAAKDEQAFVEGQIQILETKIRYAEIIDSDAVAKDEVAIGKTVLVQEVGTNDKDTYHIVGAAGADIFSGKISNESPIAHALIGKKTGDLATIESPAGSYQVEIISVEKTN

SEQ ID NO: 2977 - protein, 1803 aa, Streptococcus agalactiae
TTGACCGAATTTAATGACGATCAGCATTCTAACCATGATCAGAAAAGTTTTAAAGAACAAATTCTGGCAGAGTTAGAAGAAGCTAACCGTTTGAGAAAGTTGCGTGAAGAAGAACTCTATCAAAAAGAGCAAGAAGCCAAAGAAGCTGCTCGCAGAACAGCACAATTGATGGCAGATTATGAAGCGCAACGTTTGAAAGACGAACAAGAAGCTAGAGCAAAGGCGCTAGAGACTAAGCAACGCTTAGAAGAGCAAGAGAAGGCTCGGATTGAGGCGAAACTTCTGGCAGAAGCTGCTCGAGAAGAAGAAAGACGTCAGGCGGAACAAGCATTAGCTTCCCAAGAAGAACAAGTTATCAATCAAGGGATGGAACCTTCAAGAGAGCTTGATAGCGGCTCCAAATCTAGTGAATTTAGGACAACTGAAAATGTACCTGACATAGATTTAAAAGCAGATAAGACTGATGTTGCAACTGCTGTGCCTAATCAAGAAACGGAAGAAATCTTTCTTGTGAGAGCAACAGATATTCCTACAGAAGGTGAAAATGTAAAACTTGGTGAGATATCAGAGTTAGAGCCCGTAGCAAAGGAACCTATCCGAGTAGAGGATTTGTCAAAAGAAGAAGAGGGTATAGCTTTGTCAGCCAAGAACAAACATAACAAGCGTGATAGACGTCAGAAAGCAGATAATGTGGCAAAACGAATTGCACGTATTCTGATATCAATTATCATACTTGTATTGCTCTTGACAGCATTTGTAGGTTATCGTTTTGTAGATAGTGCTATTAAACCTGTTGATTCCAATTCAAATAAATTTGTACAAGTTGAAATTCCGATAGGATCTGGGAATAAATTAATTGGTCAAATTTTAGAAAAAGCAGGAGTCATTAAGAGCGCCACAGTCTTTAATTACTATTCCAAGTTCAAAAACTATAGTAATTTTCAAAGTGGATACTACAATCTTAAAAAAAGTATGACTTTAGATCAGATTGCTGCTGAATTGGAAAAAGGCGGAACTGCAGAACCGACAAAACCAGCTTTAGGTAAGATATTAATTACCGAGGGTTACACTATTAAACAGATTGCTAAAGCTATTGAGTCTAATAAAATTGATACAAAGACTACAAGTACACCTTATAAAGCTGATGATTTCTTGAAACTTGTTCAAGATGAAACGTTTATTAAAAAAATGGTAGCTAAATATCCAAATTTACTAGGAAGTTTACCTGATAAATCAAAAGCTATTTATCAATTGGAAGGATATTTATTCCCAGCTACCTACAACTATTATAAAGATACAACCTTAGAAGGACTTGTTGAAGATATGATTTCAACAATGAATACTAAGATGGCACCTTACTATAACACTATTAAAGCGAAGAATATGTCTGTAAATGATGTTTTGACATTATCATCTCTTGTTGAAAAAGAGGGATCAACAGACGAAGATCGCCGTAAAATAGCAAGTGTCTTTTATAACCGATTATCAGCCGGTCAAGCTCTTCAAAGTAACATTGCAATTTTGTATGCTATGGGGAAATTAGGTGATAAAACAAGTTTAGCTGAAGATGCTCAAATTAATACTTCAATTAAATCACCATACAACATCTATACTAATACTGGTTTGATGCCTGGACCAGTTGATAGTCCAAGTATCTCAGCAATTGAAGCGACTATAAAACCTGCTTCAACAGATTACCTTTATTTTGTCGCTGATGTGAAGACCGGAAATGTATACTACGCTAAAGATTTTGAAACACACAAGGCTAACGTTGAAAAATATATCAATAGTCAAATTAACTAA

SEQ ID NO: 2978 - protein, 600 aa, Streptococcus agalactiae
MTEFNDDQHSNHDQKSFKEQILAELEEANRLRKLREEELYQKEQEAKEAARRTAQLMADYEAQRLKDEQEARAKALETKQRLEEQEKARIEAKLLAEAAREEERRQAEQALASQEEQVINQGMEPSRELDSGSKSSEFRTTENVPDIDLKADKTDVATAVPNQETEEIFLVRATDIPTEGENVKLGEISELEPVAKEPIRVEDLSKEEEGIALSAKNKHNKRDRRQKADNVAKRIARILISIIILVLLLTAFVGYRFVDSAIKPVDSNSNKFVQVEIPIGSGNKLIGQILEKAGVIKSATVFNYYSKFKNYSNFQSGYYNLKKSMTLDQIAAELEKGGTAEPTKPALGKILITEGYTIKQIAKAIESNKIDTKTTSTPYKADDFLKLVQDETFIKKMVAKYPNLLGSLPDKSKAIYQLEGYLFPATYNYYKDTTLEGLVEDMISTMNTKMAPYYNTIKAKNMSVNDVLTLSSLVEKEGSTDEDRRKIASVFYNRLSAGQALQSNIAILYAMGKLGDKTSLAEDAQINTSIKSPYNIYTNTGLMPGPVDSPSISAIEATIKPASTDYLYFVADVKTGNVYYAKDFETHKANVEKYINSQIN

SEQ ID NO: 2979 - protein, 504 aa, Streptococcus agalactiae
ATGATTATTAGAAATGGTTGCCTAGAGGATTTACAGCAAGTCATTAGTATTGAACAAATAAATTTTTCAGAAGCAGAGGCTGCGAGTAAAAAAGCAATGCAAGAACGTTTAACGATAATGACTGATACTTTTTTAGTTGCAGAGATTAATGGTCGTTTAGCAGGTTACATTGAAGGACCGGTTATTAAAGGTCGGTACTTAACGGACGATTTATTCCATAAAGTTTCTGAATTCCCTGTAAGGGTAGGTGGTTTCATAGGAATTACTAGTCTATCAATACATCCTGATTTTAAAGGTCAGGGGATTGGTACAGCATTATTAGCAGCGATGAAAGACCTGGTTGTTTCTCAAGAACGAGATGGTATAAGTTTAACTTGCCATGATGATTTAATTTCCTTCTATGAAATGAATGGATTTAAAGATGAGGGAGAATCTGACTCCAAACATGGTGGTTCGCTTTGGTATAATATGATTTGGAATAATCCAACACGATCAATTTGTTAA

SEQ ID NO: 2980 - protein, 167 aa, Streptococcus agalactiae
MIIRNGCLEDLQQVISIEQINFSEAEAASKKAMQERLTIMTDTFLVAEINGRLAGYIEGPVIKGRYLTDDLFHKVSEFPVRVGGFIGITSLSIHPDFKGQGIGTALLAAMKDLVVSQERDGISLTCHDDLISFYEMNGFKDEGESDSKHGGSLWYNMIWNNPTRSIC

SEQ ID NO: 2981 - protein, 1332 aa, Streptococcus agalactiae
ATGTCAAAAACTTATCATTTTATTGGTATTAAAGGATCCGGAATGAGTGCCCTAGCACTGATGCTTCATCAAATGGGACATAACGTCCAAGGAAGTGACGTTGACAAATATTATTTTACCCAACGTGGTTTAGAGCAAGCAGGTGTAACTATATTACCTTTCTCACCGAATAATATCAGTGAGGATTTAGAGATTATTGCAGGAAATGCTTTTCGTCCAGATAACAATGAAGAGTTGGCTTATGTTATTGAAAAGGGCTATCATTTTAAACGATATCATGAATTTCTCGGAGATTTTATGCGTCAGTTCACTAGTCTAGGTGTAGCTGGGGCACATGGAAAAACCTCAACGACAGGTTTATTAGCTCATGTTTTAAAAAATATTACAGACACTTCTTTCCTAATTGGAGATGGTACAGGACGTGGTTCTGCTAATGCTAATTACTTTGTGTTTGAAGCTGATGAATACGAACGTCATTTTATGCCGTACCATCCAGAATACTCAATTATTACCAATATTGATTTTGACCATCCTGATTATTTTACAGGCTTAGAGGACGTATTCAATGCCTTTAATGACTATGCTAAGCAAGTTCAAAAAGGTTTATTCATTTATGGAGAAGATCCAAAACTTCATGAAATCACTTCTGAGGCACCAATATATTATTATGGTTTTGAAGATTCAAATGATTTTATAGCAAAAGACATCACTCGAACTGTTAATGGTTCTGACTTTAAGGTTTTCTATAACCAAGAAGAAATTGGTCAGTTTCATGTACCAGCATACGGTAAACATAATATCTTAAATGCAACTGCTGTTATTGCTAACCTTTACATAATGGGAATTGATATGGCATTAGTAGCTGAGCATTTGAAGACGTTTTCAGGGGTAAAGCGTCGTTTTACTGAGAAGATTATTGACGATACTGTCATTATTGATGACTTTGCTCACCATCCTACTGAGATTATTGCGACATTAGATGCTGCTCGACAAAAATACCCGTCAAAAGAAATTGTAGCTATTTTCCAACCGCATACGTTCACTCGTACGATAGCTCTTTTAGACGAATTTGCCCATGCCTTGAGTCAAGCGGATAGCGTTTATCTCGCTCAAATATATGGTTCTGCTAGAGAAGTAGATAATGGTGAGGTGAAGGTAGAAGATTTAGCTGCTAAGATTGTCAAACACTCAGATTTAGTGACAGTCGAAAATGTCTCGCCTTTACTCAATCATGATAATGCTGTCTATGTCTTTATGGGTGCTGGAGACATTCAATTGTATGAGCGCTCTTTTGAAGAATTATTAGCTAACCTAACTAAAAATACACAATAA

SEQ ID NO: 2982 - protein, 443 aa, Streptococcus agalactiae
MSKTYHFIGIKGSGMSALALMLHQMGHNVQGSDVDKYYFTQRGLEQAGVTILPFSPNNISEDLEIIAGNAFRPDNNEELAYVIEKGYHFKRYHEFLGDFMRQFTSLGVAGAHGKTSTTGLLAHVLKNITDTSFLIGDGTGRGSANANYFVFEADEYERHFMPYHPEYSIITNIDFDHPDYFTGLEDVFNAFNDYAKQVQKGLFIYGEDPKLHEITSEAPIYYYGFEDSNDFIAKDITRTVNGSDFKVFYNQEEIGQFHVPAYGKHNILNATAVIANLYIMGIDMALVAEHLKTFSGVKRRFTEKIIDDTVIIDDFAHHPTEIIATLDAARQKYPSKEIVAIFQPHTFTRTIALLDEFAHALSQADSVYLAQIYGSAREVDNGEVKVEDLAAKIVKHSDLVTVENVSPLLNHDNAVYVFMGAGDIQLYERSFEELLANLTKNTQ

SEQ ID NO: 2983 - protein, 618 aa, Streptococcus agalactiae
GTGAATAGAGGCTCTAGACGATTTCCGTTGATAGCAGATGATGAACCAGTAATGTCTCCGCTTGTAAAGATGAATCTTTATGATAATGAAGATTTAATTAACAACATTCGAGACTTTTATCAAGAAAAAACATATCAAAGCATGGTCAAAAGCAATTATGAACATGAAGAAATATCACATCCTAAGGTAATTGAAAATGATCCTGTACCACCGCAGAGTTTTGTAAAAAAAGCGACAGAGTTGAGCAAATCTCGACAAGAGGCAAAGAGGTCTGTTCGGGAGAAACGACAAGCTTACTATGCGAAACAGGAATTTAAGGCGCCATCAAAGGAAGCTTTTCAGCAACAATTGAAGGCAACAGTACCGAAAAAACAAACTCAGCGAAAGGTGACTGAACTAAGTCATCTTTCTGATCGTTTACAGCAGGAAAGCTATATATTAGCAGAAATTCCAATCATATTTCAAGAACCTGATAATACACCGAACCCAAAAACAAAGAAAAATAATTTTGATTTTTTGAAACGCAGTCAAGTTTACAATAAACAAGACAATCAGTTTCATAAAGAAAGAGCCAAGGCTCAAGAATTAAATCTGACACGTTTTAAAGACATTAATTAA

SEQ ID NO: 2984 - protein, 205 aa, Streptococcus agalactiae
MNRGSRRFPLIADDEPVMSPLVKMNLYDNEDLINNIRDFYQEKTYQSMVKSNYEHEEISHPKVIENDPVPPQSFVKKATELSKSRQEAKRSVREKRQAYYAKQEFKAPSKEAFQQQLKATVPKKQTQRKVTELSHLSDRLQQESYILAEIPIIFQEPDNTPNPKTKKNNFDFLKRSQVYNKQDNQFHKERAKAQELNLTRFKDIN

SEQ ID NO: 2985 - protein, 99 aa, Streptococcus agalactiae
ATGAATGAAAAATACCAATCTGATAAGCTTTACTTAGTTGAAAACTTTGAAAAAACAGAAAAATTAGTTTATAATAGGTCTGTTGTAGAAAGGAAGTGA

SEQ ID NO: 2986 - protein, 32 aa, Streptococcus agalactiae
MNEKYQSDKLYLVENFEKTEKLVYNRSVVERK

SEQ ID NO: 2987 - protein, 3099 aa, Streptococcus agalactiae
ATGAGTAGAATGATTCCAGGACGTATTCGAAATCAAGGTATAGAACTCTACGAACAAGGTTTGGTGTCCTTGATTTCTCAAGAAGGTAATCTATTAAAAGCTAAAGTTGGGGATTGTCAGATTGAATATTCATTAGTAACAGAAGAAACAAAATGTTCTTGTGATTTTTTTGCAAGAAAAGGCTATTGTCAACATTTAGCTGCTCTGGAGCATTTCTTGAAAAACGATCCAGAAGGTAAAGCAATCTTATCTAAAGTTCAAGTTCAACAAGAAAGTCAACAAGAAACTAAGAAGAAAACCTCTTTTGGTAGTGTTTTTTTAGATAGTCTAATTATTAATGAAGATGATACTATAAAATATCAATTATCGGCTCAAGGAGAACAAAATCCTTATGCTAATGATATCTGGTGGACTTTAAAAATTAGACGACTGCCTGATGATAGAAGTTATGTTATTCGTGACATCAAAGCCTTTTTAAATACTGTTCGAAAAGAAGCTTATTATCAGATTGGAAAACAATACTTTGAAACTTTGTCTTTAATACAGTTTGATGAGACCAGTCAAGAATTGATAGAATTTTTATGGAGGCTCATTCCAAGTCATTCAAGCAAAATTGATCTAGAGTTTATTTTACCAAATCAAGGTCGTCACCTTAGTCTCACTCGTGGTTTTTTTGAAGAGGGTGTTACTTTGATGAATGCTTTAGAAAATTTTTCATTTGAAAGTGATTTTCATCAATTTAATCACCTCTACTTTAAGGAATTAGAAGGTGAGGATCATCTTTATCAATTTAAGGTTATTGTCCATAGGCAATCAATTGAATTAGAAATCAAAGAGAAAGACTTAAAACCACTATTTGCGAATTCTTATTTGTTTTATCGCGATACTTTCTACCATCTTAATTTGAAGCAAGAAAAGATGGTAACGGCTATTCGTAGTCTTCCCATTGAGGGAGATTTAGCAAAACATATCCATTTTGATTTAGATGATCAAGATAAGTTAGCAGCTCATTTACTGGATTTTAAGGAGATTGGACTAGTGGATGCTCCACGGAGCTTCTCTATTCATGATTTTAAGGTAAATTTTGAGTTCGATATTAATAGTCAAAATGAAATTTTATTGCAAATGGTATTTGATTATGGTAATGATTTAACTGTTCATAATCGTCAAGAACTAGAACAGTTAACATTTGCTAGTCACTTCAAACATGAAGAAAAAGTATTTAAACTCTTAGAAAAATATGGCTTTGCACCCCACTTTTCAACCAGCCATCCAGCATACAGTGCACAAGAATTATACGATTTTTATACCTATATGCTTCCACAATTTAAAAAAATGGGAACAGTGAGCTTATCCGCAAAATTGGAAAGTTATCGTCTCATAGAACGACCGCAAATTGATATTGAAGCTAAGGGAAGCCTGCTAGATATTTCTTTTGATTTCTCTGATTTACTGGAAAACGATGTTGATCAAGCTCTGGTAGCTTTGTTTGACAATAATCCTTATTTTGTGAATAAATCAGGGCAATTAGTTATTTTTGATGAAGAAACTAAGAAAGTAAGTGCAACTTTGCAAGGGTTGAGAGCTAGACGAGCAAAGAATGGGCATATTGAATTAGATAATATTGCAGCATTTCAATTATCAGAACTGTTTGCAAATCAAGATAATGTTAGCTTTTCACAACATTTTTACCAATTGATTGAAGATTTGAGACACCCAGAAAAGTTTAAAATACCTGGTCTATCTGTTTCAGCTTCCTTGCGCGATTATCAGCTTACAGGTGTCCGTTGGTTAAGTATGTTAGATCATTATGGCTTTGCAGGGATTTTAGCTGATGATATGGGGCTTGGAAAAACACTTCAAACGATTTCATTTTTAAGTACAAAACTAACTAGAGATTCTCGTGTGCTTATTTTATCACCATCAAGTTTAATTTATAATTGGCAAGATGAATTCCACAAATTTGCGCCAGACGTAGATGTAGCAGTTGCCTATGGTTCTAAGATTCGTAGAGATGAAATTATTGCTGAACGTCATCAAGTAATCATTACAAGTTATTCATCATTTAGGCAGGATTTTGAGACTTATTCTGAAGGAAATTATGATTATTTAATTTTGGATGAAGCACAGGTTATGAAAAATGCTCAAACTAAAATAGCCCATAGCTTGAGATCTTTTGAGGTCAAAAACTGTTTTGCATTATCGGGAACACCTATTGAGAATAAACTGTTAGAAATTTGGTCCATTTTCCAGATCATTTTACCTGGTTTATTACCTGGTAAGAAAGAGTTTTTGAAGTTGAACCCTAAACAAGTTGCTCGTTATATCAAACCATTTGTGATGAGACGTCGAAAAGAAGAAGTTCTCCCAGAATTACCGGATTTGATTGAAATGAACTATCCAAATGAAATGACAGACAGTCAAAAAGTTATCTATTTGGCGCAATTACGCCAAATTCAAGAAAGTATCCAACATTCTAGTGACGCTGACTTAAATCGTCGTAAAATTGAAATTTTATCTGGCATCACACGATTACGTCAAATTTGTGACACTCCACGTCTTTTTATGGATTATGATGGTGAAAGCGGTAAGTTAGAAAGCCTACGTCAACTTTTAACACAAATTAAGGAAAATGGACATCGTGCTCTGATTTTTTCTCAGTTCAGGGGTATGTTAGATATCGCAGAACGTGAGATGGTAGCTATGGGGCTTACAACTTATAAAATTACTGGTTCTACACCAGCAAATGAACGTCATGAAATGACCAGAGCATTTAATGCAGGATCAAAAGATGCTTTCTTGATTTCTTTAAAAGCTGGTGGCGTTGGTCTCAACCTTACAGGAGCTGATACCGTTGTTCTGATTGACTTGTGGTGGAATCCAGCTGTTGAAATGCAGGCGATTAGTCGCGCACATAGGTTGGGGCAAAAAGAGAATGTCGAGGTTTATCGCTTGATTACTAGAGGCACAATCGAAGAAAAAATTCTAGAAATGCAAGAAACTAAAAAACATTTGGTTACAACAGTTCTGGATGGAAATGAAACCCATGCTAGCATGAGCGTAGATGATATTCGAGAGATACTTGGAGTTTCTAAATAA

SEQ ID NO: 2988 - protein, 1032 aa, Streptococcus agalactiae
MSRMIPGRIRNQGIELYEQGLVSLISQEGNLLKAKVGDCQIEYSLVTEETKCSCDFFARKGYCQHLAALEHFLKNDPEGKAILSKVQVQQESQQETKKKTSFGSVFLDSLIINEDDTIKYQLSAQGEQNPYANDIWWTLKIRRLPDDRSYVIRDIKAFLNTVRKEAYYQIGKQYFETLSLIQFDETSQELIEFLWRLIPSHSSKIDLEFILPNQGRHLSLTRGFFEEGVTLMNALENFSFESDFHQFNHLYFKELEGEDHLYQFKVIVHRQSIELEIKEKDLKPLFANSYLFYRDTFYHLNLKQEKMVTAIRSLPIEGDLAKHIHFDLDDQDKLAAHLLDFKEIGLVDAPRSFSIHDFKVNFEFDINSQNEILLQMVFDYGNDLTVHNRQELEQLTFASHFKHEEKVFKLLEKYGFAPHFSTSHPAYSAQELYDFYTYMLPQFKKMGTVSLSAKLESYRLIERPQIDIEAKGSLLDISFDFSDLLENDVDQALVALFDNNPYFVNKSGQLVIFDEETKKVSATLQGLRARRAKNGHIELDNIAAFQLSELFANQDNVSFSQHFYQLIEDLRHPEKFKIPGLSVSASLRDYQLTGVRWLSMLDHYGFAGILADDMGLGKTLQTISFLSTKLTRDSRVLILSPSSLIYNWQDEFHKFAPDVDVAVAYGSKIRRDEIIAERHQVIITSYSSFRQDFETYSEGNYDYLILDEAQVMKNAQTKIAHSLRSFEVKNCFALSGTPIENKLLEIWSIFQIILPGLLPGKKEFLKLNPKQVARYIKPFVMRRRKEEVLPELPDLIEMNYPNEMTDSQKVIYLAQLRQIQESIQHSSDADLNRRKIEILSGITRLRQICDTPRLFMDYDGESGKLESLRQLLTQIKENGHRALIFSQFRGMLDIAEREMVAMGLTTYKITGSTPANERHEMTRAFNAGSKDAFLISLKAGGVGLNLTGADTVVLIDLWWNPAVEMQAISRAHRLGQKENVEVYRLITRGTIEEKILEMQETKKHLVTTVLDGNETHASMSVDDIREILGVSK

SEQ ID NO: 2989 - protein, 1311 aa, Streptococcus agalactiae
ATGGTATTACCTACAGTTGCTATTGTTGGTCGTCCGAATGTTGGAAAATCAACATTATTTAACAGAATTGCAGGAGAACGTATTTCCATTGTTGAGGACGTTGAAGGAGTCACTCGTGATCGTATCTATACAACGGGTGAGTGGCTAAATCGTAAGTTTTCATTAATTGATACTGGTGGGATTGATGATGTTGATGCACCGTTTATGGAGCAAATTAAGCACCAAGCAGACATTGCTATGACAGAGGCTGATGTTATTGTGTTTGTTGTGTCGGGTAAAGAAGGTGTGACTGATGCAGATGAGTATGTCTCACGTATTCTTTATAAGACCAATAAACCGGTTATTTTAGCTGTTAATAAGGTAGATAATCCTGAGATGCGCAATGATATTTACGATTTCTACTCTCTTGGTTTAGGGGATCCTTATCCCTTGTCATCAGTTCATGGTATTGGTACTGGTGATATATTGGATGCTATTGTGGAAAATCTTCCGGTAGAAGAGGAAAATGAAAATCCAGATATTATTCGTTTTAGTTTGATTGGACGTCCAAATGTTGGGAAATCTAGTTTAATTAATGCCATCCTTGGGGAAGACCGTGTTATTGCTAGCCCAGTTGCTGGTACTACGCGCGATGCTATTGATACTAATTTCGTTGATAGCCAGGGGCAAGAGTATACTATGATTGATACTGCTGGTATGCGTAAATCTGGTAAGGTATATGAAAACACAGAGAAATATTCTGTTATGCGTTCTATGCGCGCCATCGACCGCTCAGATGTTGTTCTTATGGTGATTAATGCAGAGGAAGGTATTCGTGAGTATGACAAGCGTATTGCAGGGTTTGCACATGAAACTGGTAAAGGTATTATTATTGTAGTTAATAAATGGGATACTATCGAAAAAGACAATCATACTGTCAGTCAGTGGGAAGCTGATATACGTGATAACTTCCAATTCTTGTCTTATGCGCCAATTATCTTTGTTTCTGCAGAGACAAAGCAACGTTTGCACAAGTTACCAGATATGATTAAACGTATTAGCGAAAGTCAAAACAAACGTATTCCGTCTGCTGTATTAAATGATGTGATTATGGATGCTATTGCTATTAATCCAACACCAACTGATAAAGGAAAACGTCTTAAGATTTTCTACGCAACTCAAGTTGCTGTTAAACCACCAACTTTCGTTGTTTTTGTTAACGAAGAAGAATTGATGCACTTTTCATATCTTCGTTTCTTAGAAAATCAAATCCGTGAAGCATTTGTTTTTGAAGGAACACCAATTAATCTAATAGCACGTAAACGTAAATAA

SEQ ID NO: 2990 - protein, 436 aa, Streptococcus agalactiae
MVLPTVAIVGRPNVGKSTLFNRIAGERISIVEDVEGVTRDRIYTTGEWLNRKFSLIDTGGIDDVDAPFMEQIKHQADIAMTEADVIVFVVSGKEGVTDADEYVSRILYKTNKPVILAVNKVDNPEMRNDIYDFYSLGLGDPYPLSSVHGIGTGDILDAIVENLPVEEENENPDIIRFSLIGRPNVGKSSLINAILGEDRVIASPVAGTTRDAIDTNFVDSQGQEYTMIDTAGMRKSGKVYENTEKYSVMRSMRAIDRSDVVLMVINAEEGIREYDKRIAGFAHETGKGIIIVVNKWDTIEKDNHTVSQWEADIRDNFQFLSYAPIIFVSAETKQRLHKLPDMIKRISESQNKRIPSAVLNDVIMDAIAINPTPTDKGKRLKIFYATQVAVKPPTFVVFVNEEELMHFSYLRFLENQIREAFVFEGTPINLIARKRK

SEQ ID NO: 2991 - protein, 831 aa, Streptococcus agalactiae
ATGATTTTAGCAGATGCTCAGGTAGCGGAGTTCATTAAAACCCACCAACTTTCTCAGCGTGAAATAAATATCAGCATGTCTAAATTTAATCAATTTTTGATTGAGCGTCAGAAATTTAAAAATAAGGATAGTCAATATATTGCTAAAGGCTATGAGCCTATTTTGGTTATGAATGAAGGTTATGCAGATGTTTCTTATTTAGAAACACGAGAGTTAATTGAAGCACAAAAAAAACAAGCTATCAGTGATCGTATTAATTTAGTTAATCTACCCAAGTCCTATCGGAATATCAGAATGACTGACTTTGATATTAATAACGAGAGTCGAATGAAAGCTATGTCACAACTGCTTGATTTTGTAGAGACTTATCCTTCATATAATCACAAGGGGCTTTATTTATATGGAGATATGGGGGTTGGGAAATCCTATTTAATGGCAGCAATGGCGAGGGAATTATCAGAGAGAAAGGGTGTGTCAACGACTCTTCTTCATTTCCCTAGTTTTGCTATTGATGTCAAAAATGCTATTTCAAGCGGAACTGTAAAAGATGAAATTGATGCTGTGAAAAGTGTTCCGATTTTGATTTTAGATGATATTGGGGCTGAACAGGCAACGTCCTGGGTTCGTGACGAGATTTTACAAGTTATATTACAACATCGTATGCTAGAAGAGTTGCCCACTTTCTTTACGTCAAATTATAGTTTTAACGATTTGGAAAGAAAATGGGCTAATATAAAAGGAAGCGACGAAACTTGGCAAGCAAAACGAGTTATGGAGCGCGTACGGTATTTAGCGATAGAATTCCACTTAGAAGGACCGAATCGCCGTTAA

SEQ ID NO: 2992 - protein, 276 aa, Streptococcus agalactiae
MILADAQVAEFIKTHQLSQREINISMSKFNQFLIERQKFKNKDSQYIAKGYEPILVMNEGYADVSYLETRELIEAQKKQAISDRINLVNLPKSYRNIRMTDFDINNESRMKAMSQLLDFVETYPSYNHKGLYLYGDMGVGKSYLMAAMARELSERKGVSTTLLHFPSFAIDVKNAISSGTVKDEIDAVKSVPILILDDIGAEQATSWVRDEILQVILQHRMLEELPTFFTSNYSFNDLERKWANIKGSDETWQAKRVMERVRYLAIEFHLEGPNRR

SEQ ID NO: 2993 - protein, 1176 aa, Streptococcus agalactiae
ATGAGTCCAATAGATGAGTTTACATATATTAAGCAAAATAAGATTGTTTATGATAGTAATAGTTTAATACAATTGTATTTCCCAATTATGGGAAGTGATGCCATGGCACTCTATGATTATTTTGTTCATTTTTTTGATGACGGAATACGACGTCATAAATTTTCAGAGGTTCTCAATCATCTGCAATACGGGATGCCAAGATTTCAAGATGCATTGGTAATGTTAACAGCTTTGGATTTGTTGACTGTTTACCAAGCCACAGGTACTTACCTTGTTAAGTTGAATCAAGCTATGTCAAATGAGTTATTTTTATCTAATCCCATCTATCGTCGTTTGTTAGAAAAACGTATAGGAGAGGTAGCAGTGGCAGAATTAGATATGAAAATACCTAAAAATGCTAGAGATATCTCTAAAAAATTTACAGATGTTTTCTCGGATTTAGGACAACCAAAACAAGAGGTAAACCGGAGTAAAAATGTTTTTGACTTGGAAAGTTTCAAACGTTTGATGATGCGAGATGGCTTACGTTTTAACAATGAAAAAGATGATGTCTTAGGTATTTATAGTGTATCAGAACTTTATCATTTAAATTGGTATGATACCTATCAATTAGCAAAACAAACAGCTATCAATGGAATGATTGCGCCTCAGCGAATGAAAGTTCAACAAAATGAGGGGCAGCATATTAAAGATAATCAGAGTTTTACAAATAATGAAAAGGTCATACTAAGGGAATCTAAAAATGATAGTGCTCTAGTGTTCCTTGAAAAAATCAAGAGAAGCCGTAAGGCAGTGACAACAAGTGGTGAGAAGACTTTACTTGAGGATTTGGCAAAAATGAATTTCCTAGACGAAGTCATTAATGTTATGGTTTTATATACCTTGAATAAGACAAAATCTGCTAACTTAAATAAGGCCTATATCATGAAAGTTGCTAATGATTTTGCTTTTCAGAATGTTATGACGGCCGAAGATGCTGTGCTTAAAATTCGTGATTTTTCAGATCAAAAAGTAAGGACTAAAACAGAAACGAAGAAGAAACAATCGAATGTTCCTGAATGGAGTAATCCTGATTATAAAGATGAGGTTAGCCCAGAAAAAGAAATTGAATTAGAACAGTTTAAAACAGATGCCCTCAAGCGTTTAGAACGATTAGGAAAGGATGGTGAATCATGA

SEQ ID NO: 2994 - protein, 391 aa, Streptococcus agalactiae
MSPIDEFTYIKQNKIVYDSNSLIQLYFPIMGSDAMALYDYFVHFFDDGIRRHKFSEVLNHLQYGMPRFQDALVMLTALDLLTVYQATGTYLVKLNQAMSNELFLSNPIYRRLLEKRIGEVAVAELDMKIPKNARDISKKFTDVFSDLGQPKQEVNRSKNVFDLESFKRLMMRDGLRFNNEKDDVLGIYSVSELYHLNWYDTYQLAKQTAINGMIAPQRMKVQQNEGQHIKDNQSFTNNEKVILRESKNDSALVFLEKIKRSRKAVTTSGEKTLLEDLAKMNFLDEVINVMVLYTLNKTKSANLNKAYIMKVANDFAFQNVMTAEDAVLKIRDFSDQKVRTKTETKKKQSNVPEWSNPDYKDEVSPEKEIELEQFKTDALKRLERLGKDGES

SEQ ID NO: 2995 - protein, 351 aa, Streptococcus agalactiae
TTGGAAGAATTGCCTCTTTTAGTCATAAAGAAAGATGGTACTCGCGAGCAATTTTCTCGAGATAAAATTTTGAATGGTATTATTCAGAGTGCTCAAAAACGCCCTGTTTCGAGCGAAGATATTGAAAATTGTATCTTACGTATCGAACGTAAAATTAGGAGTGAGTATGAAGATGAGGTTTCTAGTATCACTATCGGAAATTTAGTGATGGATGAACTCGCCGAATTAGATGAGATTACTTATGTGCGCTTTGCTAGTGTTTATAAATCTTTTAAAGATGTAGATGAAATTGAAGAACTACTTCAACAAATTACAAAGCGCGTACGGAGTAAAAAGAGTGGTAGCGTGTGA

SEQ ID NO: 2996 - protein, 116 aa, Streptococcus agalactiae
MEELPLLVIKKDGTREQFSRDKILNGIIQSAQKRPVSSEDIENCILRIERKIRSEYEDEVSSITIGNLVMDELAELDEITYVRFASVYKSFKDVDEIEELLQQITKRVRSKKSGSV

SEQ ID NO: 2997 - protein, 843 aa, Streptococcus agalactiae
GTGAAAAATAAAAAAGATCAGTTTATAGGGGTAAAACAACCTCTGTCAAAAAAATTATCGCAATTAGTTTTTATCTTATTTTTTAGCCTATTTACAGTATTTTCTGTTTTAGTTTATACTTCGGCAACAAGATACGTCCTTCACAGGGAAAAAATTAATGTCGGTAGGTCATTAGAAAAAACTAGAGTTCGTTTGTCGCAAGCGAACTCTAGTTTGACATCCGATGATATTTTAGAGATCCTGTACAACCAGGTTTTTGCGGATGACATCTATCCTCATAAGCGTCAAAATGGAATTGTTAGAACGGGCGAGTCAATCGATAGTATTCTTTATGTTAATCAAGAAATGACCCTATACGATGTCAACAGGAAACCAGTTTTTTCTACACTGAGAACGGGTATGCCAACTATTGGTAAATCCATGGGAAAAGTTATCATCTCTAAAGTTGCAGATATGGAAGGTTTTGTTGGTACAAAAGCAATCTACTCTCAAAAAACAGGACAGTTGCTTGGATACGTTCAAATTTTCTATAATTTAGGTCGTTATTATAGTATGAGGCAAAACATCATTGTTTTCTTGATTATGATGGAAGTTTTAGGGACTGTTTTAGCCTTGGTCGTTATTAATAGTGCTACTAAGCGTATTGTTCGTCCGGTTAAAAATTTACACGACTTAATGCATCAGATATCTGAAAATCCTAGTAATTTAGAAATTAGAAGTAAGGTCCGTTCAGAAGACGAAATTGGAGAATTGTCTAGGATTTTTGATGGGATGTTGGATCAGTTGGAAGACTATACTCGTCGACAATCACAATTCNNNNNCATTCATTCATTAATTAATTAA

SEQ ID NO: 2998 - protein, 280 aa, Streptococcus agalactiae
  VARIANT 273, 274: Xaa = Any Amino Acid
MKNKKDQFIGVKQPLSKKLSQLVFILFFSLFTVFSVLVYTSATRYVLHREKINVGRSLEKTRVRLSQANSSLTSDDILEILYNQVFADDIYPHKRQNGIVRTGESIDSILYVNQEMTLYDVNRKPVFSTLRTGMPTIGKSMGKVIISKVADMEGFVGTKAIYSQKTGQLLGYVQIFYNLGRYYSMRQNIIVFLIMMEVLGTVLALVVINSATKRIVRPVKNLHDLMHQISENPSNLEIRSKVRSEDEIGELSRIFDGMLDQLEDYTRRQSQFXXIHSLIN

SEQ ID NO: 2999 - protein, 690 aa, Streptococcus agalactiae
ATGGGTAAAAAGATCTTAATAATCGAAGATGAGAAAAATTTAGCTCGCTTCGTCTCGTTAGAACTACTACATGAAGGATATGATGTTGTTGTTGAAACAAACGGTCGTGAAGGATTGGACACAGCATTAGAAAAAGATTTTGATTTGATTCTACTGGATTTAATGCTTCCAGAGATGGATGGTTTCGAAATCACACGTCGCCTGCAGGCTGAAAAAACAACCTATATCATGATGATGACAGCACGTGATTCTGTTATGGATATTGTAGCTGGTCTTGATCGTGGAGCAGATGATTATATTGTTAAGCCGTTTGCAATCGAAGAATTATTAGCACGTGTTAGAGCGATTTTCCGACGCCAAGAAATTGAAACGAAGACAAAAGAAAAAGGTGATAGTGGTAGTTTCCGTGATTTGTCATTAAATACTCATAATCGTTCAGCGATGCGTGGTGATGAGGAAATTTCACTAACAAAACGTGAATTTGATTTGTTGAATGTCTTGATGACAAATATGAATCGTGTTATGACACGAGAAGAGTTGCTAGAACATGTTTGGAAATACGATGTGGCAGCAGAGACAAACGTTGTTGATGTTTATATCCGTTACCTAAGAGGTAAAATTGATATCCCAGGTCGTGAATCATATATTCAAACTGTTCGCGGAATGGGCTATGTGATTCGTGAAAAATAA

SEQ ID NO: 3000 - protein, 229 aa, Streptococcus agalactiae
MGKKILIIEDEKNLARFVSLELLHEGYDVVVETNGREGLDTALEKDFDLILLDLMLPEMDGFEITRRLQAEKTTYIMMMTARDSVMDIVAGLDRGADDYIVKPFAIEELLARVRAIFRRQEIETKTKEKGDSGSFRDLSLNTHNRSAMRGDEEISLTKREFDLLNVLMTNMNRVMTREELLEHVWKYDVAAETNVVDVYIRYLRGKIDIPGRESYIQTVRGMGYVIREK

SEQ ID NO: 3001 - protein, 459 aa, Streptococcus agalactiae
ATGGAGCGTCATTCAGAGATAATGGATATTTCTGATATTCAAGTTTCAGGTCATGTGGTGTATGAAGATGGTCTCTATCTACTTGACTATAATATGGCTTACGATATTACATTACCGTCTAGTCGTTCTATGAAACCAGTTGTTTTATCTGAAAAGCAAACTATTAATGAAGTTTTTATTGAAGCTGAAAATGTTAGCACTAAAAAAGAGCTCGTTGATCAGGAGTTGGTCTTAATATTAGAGGAAGATGATATTAATTTAGAAGAAAGCGTTATCGATAATATCTTGTTAAATATACCTCTTCGTGTTCTGGCAGCTGATGAGGTTGGGGTAGAAGCGGATTTATCAGGTAAAAATTGGTCGTTAATGACTGAAAAGCAGTATGAAGAAAAACAAGCTAAAGAAAAAGAAAAATCTAATCCTTTCGCAGCCTTAGAAGGTATGTTTGATAGTGATTAG

SEQ ID NO: 3002 - protein, 152 aa, Streptococcus agalactiae
MERHSEIMDISDIQVSGHVVYEDGLYLLDYNMAYDITLPSSRSMKPVVLSEKQTINEVFIEAENVSTKKELVDQELVLILEEDDINLEESVIDNILLNIPLRVLAADEVGVEADLSGKNWSLMTEKQYEEKQAKEKEKSNPFAALEGMFDSD

SEQ ID NO: 3003 - protein, 891 aa, Streptococcus agalactiae
TTGCTGTATCAACAAATTGCAAGTAATAAGAGAAAAACAGTTGTCTTGTTAATTGTCTTCTTCTGTCTTTTAGCAGCTATTGGAGCAGCTGTAGGTTATTTGGTATTAGGCAGCTACCAATTTGGGCTTGTTCTAGCTCTAATTATTGGGGTTATCTATGCAGTAAGTATGATTTTTCAATCAACTAATGTTGTTATGTCAATGAACAATGCGCGTGAAGTTACAGAAGATGAGGCGCCAAATTATTTTCATATTGTTGAAGATATGGCAATGATAGCTCAGATACCTATGCCACGCGTTTTCATTGTTGAAGATGACTCCCTAAATGCCTTTGCCACAGGCTCTAAGCCAGAAAATGCTGCTGTTGCAGCAACGACAGGCCTATTAGCTGTTATGAACCGCGAAGAGTTAGAGGGTGTTATTGGACATGAGGTTAGTCATATTCGTAATTATGATATCCGTATTTCAACCATTGCAGTAGCTTTAGCGAGTGCTGTAACTCTAATATCAAGCATTGGTAGCCGTATGTTATTTTACGGCGGAGGTCGTAGGCGTGATGATGACAGAGAAGATGGTGGAAACATCTTGGTTTTGATTTTCTCTATTTTATCACTAATCCTTGCACCATTAGCCGCTAGTTTAGTTCAATTAGCTATTTCAAGACAGCGCGAATACTTAGCAGACGCTAGTTCTGTTGAGTTAACAAGAAATCCACAAGGAATGATCTCTGCTTTAGAAAAACTTGATCGTTCTGAACCTATGGGGCATCCAGTAGATGATGCTAGTGCGGCTCTCTATATCAATGACCCAACGAAAAAAGAAGGGTTAAAGTCTTTATTTTATACGCATCCACCAATTGCAGATCGTATTGAGCGTTTGCGTCATATGTAG

SEQ ID NO: 3004 - protein, 296 aa, Streptococcus agalactiae
MLYQQIASNKRKTVVLLIVFFCLLAAIGAAVGYLVLGSYQFGLVLALIIGVIYAVSMIFQSTNVVMSMNNAREVTEDEAPNYFHIVEDMAMIAQIPMPRVFIVEDDSLNAFATGSKPENAAVAATTGLLAVMNREELEGVIGHEVSHIRNYDIRISTIAVALASAVTLISSIGSRMLFYGGGRRRDDDREDGGNILVLIFSILSLILAPLAASLVQLAISRQREYLADASSVELTRNPQGMISALEKLDRSEPMGHPVDDASAALYINDPTKKEGLKSLFYTHPPIADRIERLRHM

SEQ ID NO: 3005 - protein, 555 aa, Streptococcus agalactiae
ATGGGAACTATGATTTTAATAGCAATTATTGCTTTGTTTGTTATTTGGTTGATTGTTGCTTATAACAGTTTAGTTAGAAGTCGCATGCATACTAAAGAATCATGGAGTCAAATAGACGTTCAATTGAAACGTCGTAACGATTTAATTCCAAACCTAATCGAAACTGTTAAAGGCTATGCTGCGTACGAAGGGAAAACACTTGAGAAGATTGCAGAACTGCGTGCTCAAGTTGCTAAAGCTAACACACCTGCTGAAGCAATGACAGCAAGTAATGAGCTAACAAGACAGCTTTCAAGTATTTTAGCGGTTGCTGAAAATTACCCAGATTTAAAAGCCAACAATAGCTTTGTTAAACTTCAAGAAGAACTAACTAATACGGAAAATAAAATTTCTTATTCACGTCAGTTATATAACACAACAACATCCAATTATAATGTGAAATTAGAAACTTTCCCAAGTAATATTGTTGGAAAACTATTTGGGTTCAAACCAAGCCAATTCTTAGAAACTCCTGAAGAAGAAAAAGAAGTGCCAAAAGTTTCCTTTGACTTTTAA

SEQ ID NO: 3006 - protein, 184 aa, Streptococcus agalactiae
MGTMILIAIIALFVIWLIVAYNSLVRSRMHTKESWSQIDVQLKRRNDLIPNLIETVKGYAAYEGKTLEKIAELRAQVAKANTPAEAMTASNELTRQLSSILAVAENYPDLKANNSFVKLQEELTNTENKISYSRQLYNTTTSNYNVKLETFPSNIVGKLFGFKPSQFLETPEEEKEVPKVSFDF

SEQ ID NO: 3007 - protein, 714 aa, Streptococcus agalactiae
ATGACACCCCAAGCATTTTATCAAGTTCTGATAGAGCATGGTATTACACTTACTGACAAACAGAAAAAACAATTTGAAACTTATTTTAGACTTCTTGTTGAATGGAATGAGAAAATTAACCTAACAGCTATTACAGATAAGGAAGAGGTTTACTTAAAGCACTTCTATGATTCTATTGCGCCGATTTTACAAGGTTATATTGACAATAGTCCTCTTAGCATTTTAGATATTGGTGCTGGTGCAGGTTTTCCTAGTATTCCTATGAAAATCCTTTATCCTGAAATTGATATTACTATTATTGATTCACTGAATAAACGCATTAATTTTCTAAACATATTAGCTAATGAACTTGAACTTTCAGGAGTTCACTTCTTCCATGGGCGCGCTGAGGACTTTGGTCAAGATAGAGTATTTCGAGCTAAATTTGATATCGTAACAGCTCGTGCAGTAGCTAAAATGCAGGTTCTAGCAGAATTGACAATACCTTTTCTTAAAGTTAATGGTCGCTTGATTGCACTGAAAGCTGCAGCTGCTGAAGAGGAATTAATTTCTGCAGAAAAAGCTTTGAAAACACTATTTTCACAAGTAACTGTAAATAAAAATTATAAGTTACCTAATGGTGATGACCGAAATATCACAATCGTTAGCAAGAAAAAAGAAACGCCTAATAAATACCCTCGTAAAGCTGGTACTCCAAACAAGAAGCCTTTGTAA

SEQ ID NO: 3008 - protein, 237 aa, Streptococcus agalactiae
MTPQAFYQVLIEHGITLTDKQKKQFETYFRLLVEWNEKINLTAITDKEEVYLKHFYDSIAPILQGYIDNSPLSILDIGAGAGFPSIPMKILYPEIDITIIDSLNKRINFLNILANELELSGVHFFHGRAEDFGQDRVFRAKFDIVTARAVAKMQVLAELTIPFLKVNGRLIALKAAAAEEELISAEKALKTLFSQVTVNKNYKLPNGDDRNITIVSKKKETPNKYPRKAGTPNKKPL

SEQ ID NO: 3009 - protein, 795 aa, Streptococcus agalactiae
ATGAAACATTTCTTTGATTACAAGACAATGTCTGTCGCACGTAAACTCAGCATTAGTTTTATCGCTGTTATCCTATTGGGAAGTATTTTACTTTCACTTCCAATTTTTCAATATGCTAACGCCCCTAAAACACATTACATTGATCACCTTTTCACGACTGTTTCAATGGTATGTGTAACTGGTTTATCTGTTTTTCCTATCAGTAAGGTTTATAACGGTTGGGGGCAGATTGTAGCTATTTTACTCATGCAAACAGGGGGACTTGGTTTAGTAACACTAATGTCGTTGTCTTACTATACCCTAAGACGTAAAATGTCGTTAAATGATCAGACCCTTTTGCAGTCAGCGATAACTTATAACAGTTCGACAGATTTAAAAAAATATCTCTATATGATTTTTAAAGTAACTTTAACTTTAGAAGTTTTAGCAGCCAGCATTTTAGCCATAGATTTTATTCCTCGATTTGGTTTGGGTCATGGTATCTTTAATAGTATATTCTTAGCTGTCTCAGCCTTTTGTAATGCCGGTTTTGATAATCTAGGGGCAACGAGCTTAGCTCAATTTAAACTAAATCCTTTGGTTAACATTATCGTTTGTTTCTTGATTATTTCAGGAGGACTTGGATTTGCCGTATGGAAAGATTTAATTGAAGCTACTATACAAACATCTCACAAGGGACCAAAATTAATCAAGACATTTCCAAAACGCCTCAGCAACCATTCTAAACTGGTTTTAAAAACAACAACCATTATTTTACTAACAGGAACTTTGCTTTNNNNNCATTCCATTCATTAA

SEQ ID NO: 3010 - protein, 264 aa, Streptococcus agalactiae
  VARIANT 259, 260: Xaa = Any Amino Acid
MKHFFDYKTMSVARKLSISFIAVILLGSILLSLPIFQYANAPKTHYIDHLFTTVSMVCVTGLSVFPISKVYNGWGQIVAILLMQTGGLGLVTLMSLSYYTLRRKMSLNDQTLLQSAITYNSSTDLKKYLYMIFKVTLTLEVLAASILAIDFIPRFGLGHGIFNSIFLAVSAFCNAGFDNLGATSLAQFKLNPLVNIIVCFLIISGGLGFAVWKDLIEATIQTSHKGPKLIKTFPKRLSNHSKLVLKTTTIILLTGTLLXXHSIH

SEQ ID NO: 3011 - protein, 753 aa, Streptococcus agalactiae
ATGNNNNNTGCGCTGTTCTTTGGAGCCGGTAATCTTATTTATCCAGCCTACTTAGGTATCTACTCTGGTTCTAATTGGGCGTGGGCTATCATTGGGTTCTGCTTAACAGGCGTAACTTTACCCCTACTTGGTGTTGCAGCTGTGGCGTACTCAGGAGCAACCGATGTTGAAAGCTTCACCAAACCTGTCTCTAAAACATATGCTATTTTCTTTGCAGTAGCACTATACCTATCTATTGGACCTTTCTTTGCCATTCCTCGAACAGGGGCAACCTCATTCTCAGTTGGTATTCAACCTATCTTAGGCGACAGCTCCTTAGTCAAAATTATCTATGGTTTAATTTTCTTTGGTATTTCTTATTTCTTAGCTATTAGACCTAGTCAGATTGTAGATCGTATTGGTAAATATCTAACTCCCTTTTTACTAACTGTTATTAGTATTTTAATTATTGCCTCACTCATCCATCCAGCTGCTATCGTTGGAACACCACATAACGCTTCAACGAATGTCAGCGATGCTTTCMAGGATTTACCATTCCTAGCAGGACTGATTCAGGGGTATGGTACAATGGATGCCCTTGCATCAATTGCTTTTGCTATTATCGTTATTCAAGCAAGTAAACAGTACGGAGCAATTACCAAAAAAGAAATTACTTCTATGGCACTTAAATCTGGTGCTATCGCTACATKTCTTTTAGCTTTTATTTATATTTTTGGAGGGACGTATTGGNNNNNCATTCCATTCATTAATTAA

SEQ ID NO: 3012 - protein, 250 aa, Streptococcus agalactiae
  VARIANT 2, 3, 175, 230, 244, 245: Xaa = Any Amino Acid
MXXALFFGAGNLIYPAYLGIYSGSNWAWAIIGFCLTGVTLPLLGVAAVAYSGATDVESFTKPVSKTYAIFFAVALYLSIGPFFAIPRTGATSFSVGIQPILGDSSLVKIIYGLIFFGISYFLAIRPSQIVDRIGKYLTPFLLTVISILIIASLIHPAAIVGTPHNASTNVSDAFXDLPFLAGLIQGYGTMDALASIAFAIIVIQASKQYGAITKKEITSMALKSGAIATXLLAFIYIFGGTYWXXIPFIN

SEQ ID NO: 3013 - protein, 471 aa, Streptococcus agalactiae
ATGGTTGATTTATCTCAAAAACGACTTGAAGCCTCTAAAAAATTTGGTGCAACACACACCATTCTATCAACGTCTACTCAAGAAGTTAAAGAAGAAATTGATAAAATTACCAAAGGCCGTGGCGTTGATGTCGTATTAGAATGTGTTGGTTATCCTGCAACATTTGATATTTGTCAAAATGTAGTTTCTATTGGAGGACATATCGCAAATGTTGGTGTTCATGGTAAACCTGTTGAATTTAACCTCCAAGATTTATGGATAAAAAATATAACCCTTAATACTGGATTAGTTAATGCTAATACAACTGAAATGCTCCTTGAAGTTCTTGAGACAGGCAAAATCGATGCAACACAACTAGTAACACATCACTTCAAGCTATCTGAAATCGAAGAAGCTTATAAGGTATTTAAAGCTGCTGAAGAAAACAATACTCTCAAAGTTATCATCGAAAACGATATTACTCCAGCCTGA

SEQ ID NO: 3014 - protein, 156 aa, Streptococcus agalactiae
MVDLSQKRLEASKKFGATHTILSTSTQEVKEEIDKITKGRGVDVVLECVGYPATFDICQNVVSIGGHIANVGVHGKPVEFNLQDLWIKNITLNTGLVNANTTEMLLEVLETGKIDATQLVTHHFKLSEIEEAYKVFKAAEENNTLKVIIENDITPA

SEQ ID NO: 3015 - protein, 693 aa, Streptococcus agalactiae
ATGATAGAGTGGATTCAAACACATTTACCAAATGTATATCAAATGGGTTGGGAAGGTGCTTACGGCTGGCAGACAGCTATTGTACAAACCCTTTATATGACTTTTTGGTCGTTCCTTATTGGAGGTTTAATGGGATTGTTAGGAGGTTTATTCCTTGTTTTAACTAGTCCTAGAGGAGTTATTGCTAATAAATTAGTATTTGGAGTTTTAGATAAAGTTGTTTCTGTTTTTAGAGCTCTGCCCTTCATTATTCTTCTTGCTTTGATTGCGCCAGTAACTCGCGTAATTGTAGGAACAACACTTGGTTCACCAGCAGCTTTGGTACCTCTTTCTTTGGCAGTTTTCCCATTTTTTGCTCGTCAAGTTCAAGTTGTTTTAGCTGAACTTGATGGTGGAGTTATTGAGGCTGCACAAGCCTCAGGTGGAACACTTTGGGATATTATTGTAGTTTATCTTCGTGAAGGTCTACCAGATTTAATTCGAGTATCAACGGTTACTTTGATTTCTTTAGTAGGTGAAACAGCTATGGCTGGCGCTATTGGTGCAGGAGGATTGGGTTCTGTTGCTATTACTAAAGGATATAACTATTCTCGTGATGATATTACTTTAGTAGCGACTATTCTGATTTTATTATTAATTTTCTTTATCCAATTTTTAGGTGATTTTTTAACACGTCGCTTGAGTCATAAATAA

SEQ ID NO: 3016 - protein, 230 aa, Streptococcus agalactiae
MIEWIQTHLPNVYQMGWEGAYGWQTAIVQTLYMTFWSFLIGGLMGLLGGLFLVLTSPRGVIANKLVFGVLDKVVSVFRALPFIILLALIAPVTRVIVGTTLGSPAALVPLSLAVFPFFARQVQVVLAELDGGVIEAAQASGGTLWDIIVVYLREGLPDLIRVSTVTLISLVGETAMAGAIGAGGLGSVAITKGYNYSRDDITLVATILILLLIFFIQFLGDFLTRRLSHK

SEQ ID NO: 3017 - protein, 1068 aa, Streptococcus agalactiae
ATGAGTAAAGAACCAATTATTAAATTAGACAACATTGATGTTACTTTCCACCAAAAGAAACGTGAGATTAATGCTGTTAAAGATGTTACTATCCATATTAATCAAGGTGATATATATGGAATTGTCGGTTATTCAGGAGCCGGAAAATCTACCCTTGTTCGTGTTATTAATTTGCTACAAGAACCTTCAGCAGGTAAAATTACTATTGATGACCAAGTTATTTACGACAACAAGGTGACACTGACTAGCACACATTACGCGAACAGCGCCGTGAAATGGAATGATTTTTCAACATTTAACCTAATGTCACAGTTGACAGCAGAGCAGAATGTAGCTTTTGCTCTTAAACATTCAGGTTTATCAAAAGAGGCGAAAGCAGCTAAGGTTGCTAAATTATTAGAACTTGTTGGATTATCCGATCGTGCTCAAAACTATCCTTCACAATTATCAGGAGGGCAAAAACAGCGTGTTGCCATTGCGCGTGCATTGGCTAACGATCCTAAAATCTTAATTTCAGATGAGTCTACCTCTGCACTTGACCCTAAAACAACAAAACAAATACTTGCCCTTCTCCAAGATCTGAATAAAAAATTGGGACTTACGATTGTTTTGATTACACATGAGATGCAAATTGTCAAAGACATTGCTAATCGCGTTGCTGTTATGCAAAATGGTAAATTGATTGAAGAAGGATCAGTTTTAGACATTTTTTCACATCCTAGAGAGAGTCTTACACAAGATTTTATAAAAATAGCTACTGGTATTGATGAGGCAATGCTTAAGATTGAGCAACAAGAAGTTGTCAAAAATCTACCAGTAGGTAGCAAATTAGTTCAACTGAAATACGCTGGGCATAGCACGGATGAGCCGCTTTTAAATCAAATTTATAAAGAATTTGAAGTAACTGCTAACATCCTCTATGGGAATATTGAAATTTTAGATGGTATTCCAGTTGGAGAAATGGTAGTTATCTTATCAGGTGACGAAGAAAAATTAAGACAAGCCTGCCAAGCAATTACAGATTCGCAAGTTCAATTAACGTTATTGAAAGAAGGTGGTAAAGCATGA

SEQ ID NO: 3018 - protein, 356 aa, Streptococcus agalactiae
MSKEPIIKLDNIDVTFHQKKREINAVKDVTIHINQGDIYGIVGYSGAGKSTLVRVINLLQEPSAGKITIDDQVIYDNKVTLTSTQLREQRREIGMIFQHFNLMSQLTAEQNVAFALKHSGLSKEAKAAKVAKLLELVGLSDRAQNYPSQLSGGQKQRVAIARALANDPKILISDESTSALDPKTTKQILALLQDLNKKLGLTIVLITHEMQIVKDIANRVAVMQNGKLIEEGSVLDIFSHPRESLTQDFIKIATGIDEAMLKIEQQEVVKNLPVGSKLVQLKYAGHSTDEPLLNQIYKEFEVTANILYGNIEILDGIPVGEMVVILSGDEEKLRQACQAITDSQVQLTLLKEGGKA

SEQ ID NO: 3019 - protein, 1377 aa, Streptococcus agalactiae
ATGACTTTAACAAACGAAGAAAATCAAATTCAAAAGTTTCTATCTGATACTATTGTTCAGGATGATATCAATATTTTAAGAGATTTAATTGCAATTAAGTCAATTTTTGCTCAGAAAGTTGGTTTAAATGACTTATCAAGCTATCTTGGAGAAGTTTTCATAAAAGCTGGCGCAGAAGTCATTATAGATGACAGCTATAGCGCTCCCTTTATCGTGGCAAATTTCAAATCATCAAAAGTAGATGCTAAGCGTATTATTTTTTACAATCATTATGATACTGTACCAGCAGATGAGGTAGAACAGTGGACTGAGGACCCTTTTACACTTTCACTTCGATATGGTAAGATGTATGGACGTGGTGTAGATGATGATAAAGGTCACATTACCGCACGTTTATCAGCAGTTAAAAAATATTTATCAAGACACAAAGGGGAACTTCCTCTAGATATCACTTTTATTGTGGAAGGAGCAGAGGAATCAGCTTCAGTAGGCCTTGATTATTATTTAGAAAAGTATCAAGAGCAGCTACAAGGGGCTGATTTGATCGTGTGGGAAGATGGCCCTAAAAATCCTAAAGGACAGTTGGAAATTGCTGGTGGAAATAAAGGCATTGTCACTTTTGATTTATCAGTAAGTTCAGCGGATGTTGATATTCATTCATCCTTTGGTGGGGTTGTTGATTCCTCGACATGGTATTTAATTCAAGCCCTCAATACGTTAAGGGATAACAAAGGTCATATATTGGTAGAAGGTATTTATGATAAAGTTATTCCCCCTACTAAGAGAGAGTTAGAATTAGTTGAAAAATATTCTTATAGATCTGCAAAGGCGCTAGAAGGTGCTTACCAATTAGTTTTGCCCAGTTTAGCAGATAGTCATAAAACTTTTTTGAGAAAGCTTTATTTTGAACCTTCTATAGCCATTGAAGGTATAACCTCAGGTTATCAAGGTGAAGGCGTCAAAACAATTTTACCTGCTTATGCTAAATGTAAAGCAGAGGTTAGGTTAGTACCAGGGTTAACCCCGAAAGGTGTACTAGATTCAATACAAAATCATTTGAAAGAGAATGGCTTTAAAGACATTGAGCTAACCTATACCCTTGGTGAAATGTCTTATCGTAGTGATATGTCAGCGCCATCTATCCTAAAGGTTGTTGATTTAGCTGAGCAATTTTATCCAGAAGGGATATCTCTGTTACCTACCTCACCAGGTACAGGACCAATGTATTTAGTTCATCAAGCTCTAAGAGCGCCAATTGCAGCTATTGGCATAGGACATGCCAATAGTCGAGACCATGGCGTTGATGAAAATGTTAGTATTGCTGATTATTACACCCATATTGAATTAGTGGAGGCTTTAATAGAATCATATGAGTAA

SEQ ID NO: 3020 - protein, 458 aa, Streptococcus agalactiae
MTLTNEENQIQKFLSDTIVQDDINILRDLIAIKSIFAQKVGLNDLSSYLGEVFIKAGAEVIIDDSYSAPFIVANFKSSKVDAKRIIFYNHYDTVPADEVEQWTEDPFTLSLRYGKMYGRGVDDDKGHITARLSAVKKYLSRHKGELPLDITFIVEGAEESASVGLDYYLEKYQEQLQGADLIVWEDGPKNPKGQLEIAGGNKGIVTFDLSVSSADVDIHSSFGGVVDSSTWYLIQALNTLRDNKGHILVEGIYDKVIPPTKRELELVEKYSYRSAKALEGAYQLVLPSLADSHKTFLRKLYFEPSIAIEGITSGYQGEGVKTILPAYAKCKAEVRLVPGLTPKGVLDSIQNHLKENGFKDIELTYTLGEMSYRSDMSAPSILKVVDLAEQFYPEGISLLPTSPGTGPMYLVHQALRAPIAAIGIGHANSRDHGVDENVSIADYYTHIELVEALIESYE

SEQ ID NO: 3021 - protein, 498 aa, Streptococcus agalactiae
ATGNNNNNACTTAGCTTCCTTCGTATCTATTCTGAGAAGGTAAAATCTCTTAAAAAATTGAAAAAAGGAGCCACTATTGCAATTCCAAATGATGCAACAAATGGTAGCCGTGCATTGTATGTCCTTCAGTCAGCAGGTTTAATCAAATTGAATGTTTCTGGTAAGAAGGTTGCAACAGTTGCTAATATCACATCTAATAAAAAGGATATTAATATTCAGGAGTTAGATGCGAGTCAAACACCACGTGCACTCAAAGATGTAGATGCAGCTATTATTAATAATACATACATTGAGCAAGCTAATTTAAAACCTTCAGATGCTATCTTTGTTGAGAAATCAGATAAAAATTCAAAACAATGGATTAATATCATTGCGGGACGTAAAAATTGGAAAAAGCAAAAGAACGCTAAAGCTATCCAAGCTATCTTGGATGCTTATCACACAGATGAAGTGAAAAAAGTTATCAAAGATACTTCAGCTGATATTCCACAATGGTAA

SEQ ID NO: 3022 - protein, 165 aa, Streptococcus agalactiae
  VARIANT 2, 3: Xaa = Any Amino Acid
MXXLSFLRIYSEKVKSLKKLKKGATIAIPNDATNGSRALYVLQSAGLIKLNVSGKKVATVANITSNKKDINIQELDASQTPRALKDVDAAIINNTYIEQANLKPSDAIFVEKSDKNSKQWINIIAGRKNWKKQKNAKAIQAILDAYHTDEVKKVIKDTSADIPQW

SEQ ID NO: 3023 - protein, 444 aa, Streptococcus agalactiae
ATGACAATAAAAAAAGTGTTAAGTGTAACAGGAATTATTTTAGTGACAGTAGCGTCTCTAGCTGCTTGTAGCTCAAAATCTCATACTACTAAGACGGGCAAAAAAGAAGTTAATTTTGCAACTGTTGGAACAACGGCACCTTTTTCTTATGTGAAGGATGGGAAACTGACTGGCTTTGATATTGAAGTAGCCAAAGCTGTTTTTAAAGGTTCAGATAACTATAAAGTCACTTTTAAAAAAACAGAATGGTCATCGGTATTTACCGGCATTGATTCAGGAAAGTTTCAAATGGGTGGAAATAATATTTCTTATTCATCAGAGAGATCTCAAAAATATTTATTTTCATACCCAATAGGCTCTACTCCTTCAGTTTTAGCAGTTCCTAAGAATAGTAATATCAAAGCTTATAATGATATTNNNNNCATTCATTCATTAATTAATTAA

SEQ ID NO: 3024 - protein, 147 aa, Streptococcus agalactiae
  VARIANT 140, 141: Xaa = Any Amino Acid
MTIKKVLSVTGIILVTVASLAACSSKSHTTKTGKKEVNFATVGTTAPFSYVKDGKLTGFDIEVAKAVFKGSDNYKVTFKKTEWSSVFTGIDSGKFQMGGNNISYSSERSQKYLFSYPIGSTPSVLAVPKNSNIKAYNDIXXIHSLIN

SEQ ID NO: 3025 - protein, 690 aa, Streptococcus agalactiae
ATGTTAACAAAGCCTATTATTGGTATTACAGGAAATGAAAGAGAAATGTCAGATATTCCAGGTTATTATTATGATTCGGTATCTAGGCATATTTCGGAAGGAGTTAAAAACGCAGGCGGGTTACCAGTTATCCTACCAATAAGTGAAGCAGAAAGTGCCAAAGCTTATGTTGAGATGATAGATAAGCTGATCATATCTGGTGGCCAAAATGTTTTACCATCCTATTATGGTGAAGAGAAGATAATTGAGAGTGATGATTATTCACTTGCGCGTGATATTTTTGAATTTGCATTAGTCGAAGAAGCGTTGAAACAAAATAAACCAATCTTTGCGATTTGCCGTGGCATGCAGTTAGTAAATGTGGCGCTTGGTGGTACACTTAATCAATCTATTGATAATCACTATCAAGAGCCTTACATTGGATTTGCTCATTATTTAAATGTGGAAAAAGGGAGTTTTCTAGAAGGCTTTATATCAGGTGATTTTAAGATCAATTCTCTTCATAGACAAAGTGTTAAACTGTTAGCTGAAGGTCTGATAGTTAGTGCTAGAGATCCTAGAGATGGGACAGTAGAAGCTTATGAAAGTCGAACAGAACAATGTATTATAGGTGTTCAATGGCATCCAGAATTAATGCTTCACCAAATTGAAAACCAAACCTTATTTGGTTATTTTGTTAATGAAACGTAG

SEQ ID NO: 3026 - protein, 229 aa, Streptococcus agalactiae
MLTKPIIGITGNEREMSDIPGYYYDSVSRHISEGVKNAGGLPVILPISEAESAKAYVEMIDKLIISGGQNVLPSYYGEEKIIESDDYSLARDIFEFALVEEALKQNKPIFAICRGMQLVNVALGGTLNQSIDNHYQEPYIGFAHYLNVEKGSFLEGFISGDFKINSLHRQSVKLLAEGLIVSARDPRDGTVEAYESRTEQCIIGVQWHPELMLHQIENQTLFGYFVNET

SEQ ID NO: 3027 - protein, 717 aa, Streptococcus agalactiae
ATGGGACGTAAGTGGGCCAATATTGTTGCCAAAAAGACTGCTAAAGATGGTGCTAACTCAAAAGTATACGCTAAATTCGGTGTTGAAATATATGTTGCTGCAAAGCAAGGTGAACCAGACCCCGAGTCAAACTCAGCTCTAAAATTCGTTTTGGACCGTGCTAAGCAAGCACAAGTTCCAAAGCATGTTATTGATAAAGCGATTGATAAAGCCAAAGGAAACACAGATGAAACTTTCGTAGAGGGACGTTATGAAGGTTTTGGTCCAAATGGTTCAATGATTATTGTGGATACTTTGACATCAAATGTTAACCGTACGGCAGCAAATGTACGTACTGCTTACGGTAAGAACGGTGGCAATATGGGAGCTTCAGGATCGGTATCCTACTTATTTGATAAAAAAGGTGTCATCGTTTTTGCTGGTGATGATGCTGACACTGTCTTCGAACAATTACTTGAAGCGGATGTAGACGTAGATGATGTTGAAGCAGAAGAGGGAACAATAACAGTTTATACCGCCCCAACAGATCTTCATAAAGGTATCCAAGCACTTCGCGATAATGGTGTAGAAGAATTCCAAGTTACTGAACTTGAAATGATTCCTCAATCAGAAGTAGTATTGGAAGGTGATGACCTTGAAACTTTTGAAAAGCTTATTGACGCACTCGAATCAGATGATGATGTTCAAAAAGTTTATCATAATGTAGCAGATTTCTAA

SEQ ID NO: 3028 - protein, 238 aa, Streptococcus agalactiae
MGRKWANIVAKKTAKDGANSKVYAKFGVEIYVAAKQGEPDPESNSALKFVLDRAKQAQVPKHVIDKAIDKAKGNTDETFVEGRYEGFGPNGSMIIVDTLTSNVNRTAANVRTAYGKNGGNMGASGSVSYLFDKKGVIVFAGDDADTVFEQLLEADVDVDDVEAEEGTITVYTAPTDLHKGIQALRDNGVEEFQVTELEMIPQSEVVLEGDDLETFEKLIDALESDDDVQKVYHNVADF

SEQ ID NO: 3029 - protein, 987 aa, Streptococcus agalactiae
ATGAGAAAAACAGAACATCATAAAATGGAATATGTTTTTGAAACAATAAAAGCAATCACTAAAACTAATCCTAAAGTAGAGCAAATAAAAGATTTGCCCGCTATTCATTATTTAGGGCAATCCGAGCAAGTAATTCCGATTTTATCAGGAGGAGGCAGCGGACATGAGCCGGCTCACTTTGGATATGTTGGTGAGGGAATGCTATCGGCAGCGATTAGTGGTCCTATTTTTGTACCACCATGTGCTAGTGATATTCTAGAGACTATTAGATTTATCAATCGAGGCAAAGGTGTCTTTGTTATTATCAAAAATTTTGAAGCTGATTTGGAAGAATTTTCCCAAGCGATTGAACAGGCTCGTCAAGAAGGCATTCCAATCAAATACATCGTTTCTCATGATGACATCTCTGTTGAAACATCAAATTTTAAAATTCGTCATCGAGGCGTTGCTGGTACTGTGTTGCTACATAAAATTATTGGACAAGCTGCTTTAGAAGGAGCAAGCTTAGATGAATTAGAACAGCTAGGACTATCTTTGACAACTTCAATGGCTACTTTAGGTGTAGCAAGTAAGTCAGCCACTATTTTAGGTCAGCATCAACCTGTTTTTGATTTAGAAGAAGGTTACATCTCATTTGGAATCGGTATTCATGGTGAGCCAGGATACCGGACAATGCCTTTCGTGTCCATGGAACATTTGGCAAACGAACTAGTTAACAAATTGAAAATGAAATTACGTTGGCAAGATGGAGAAGCATTCATTCTATTGATAAATAATCTTGGAGGAAGTTCTAAAATGGAGGAATTACTTTTTACAAATGCTGTCATGGAATTTCTGGCTTTAGACGATTTACAATTACCTTTTATTAAAACAGGCCACCTAATTACAAGTTTAGATATGGCTGGTTTATCAGTTACCTTGTGTCGTGTAAAGGATAGTAGATGGATTGATTACTTAAAACATAAGACAGATGCTAGAGCTTGGTGA

SEQ ID NO: 3030 - protein, 328 aa, Streptococcus agalactiae
MRKTEHHKMEYVFETIKAITKTNPKVEQIKDLPAIHYLGQSEQVIPILSGGGSGHEPAHFGYVGEGMLSAAISGPIFVPPCASDILETIRFINRGKGVFVIIKNFEADLEEFSQAIEQARQEGIPIKYIVSHDDISVETSNFKIRHRGVAGTVLLHKIIGQAALEGASLDELEQLGLSLTTSMATLGVASKSATILGQHQPVFDLEEGYISFGIGIHGEPGYRTMPFVSMEHLANELVNKLKMKLRWQDGEAFILLINNLGGSSKMEELLFTNAVMEFLALDDLQLPFIKTGHLITSLDMAGLSVTLCRVKDSRWIDYLKHKTDARAW

SEQ ID NO: 3031 - protein, 537 aa, Streptococcus agalactiae
ATGACTTCTTCGCTTATTACTAAGAAAAAAATAGCCAAGTCATTTAAACGTTTATTTATTTCGCAAGCTTTTGACAAAATATCGGTGAGTGATATTATGGAAGATGCAGGTATTAGACGTCAAACATTTTATAATCACTTTGTTGATAAATATGCTTTATTAGAATGGATTTTCCAAACAGAATTAAGCGAACAAGTTACGGATAATTTAGACTATATCTCAGGTTTTCAGTTGTTATCAGAGTTGTTGACTTTTTTTAAAATGAATCAAGAATTCTATATTAAATTATTTCAAATTGAAGATCAAAATGATTTTTCTTCGTATTTTGAGTCTTACTGTGAGCAGTTAGTAGATAAGCTTCTTTCTGATTATAGTAAATCTAACTTTAATCAGAAAGAAAGAGTTACATTTATTAATTATCATAGTAAAGCCCTCTCTTATTTTATAAAATATGAGTTAATAAATAACTCAAAAGAAGAATTATTTAATAGGAAAGTCATTGAAAAAATTATCAGAACATCAATAGAAAATTATTAG

SEQ ID NO: 3032 - protein, 178 aa, Streptococcus agalactiae
MTSSLITKKKIAKSFKRLFISQAFDKISVSDIMEDAGIRRQTFYNHFVDKYALLEWIFQTELSEQVTDNLDYISGFQLLSELLTFFKMNQEFYIKLFQIEDQNDFSSYFESYCEQLVDKLLSDYSKSNFNQKERVTFINYHSKALSYFIKYELINNSKEELFNRKVIEKIIRTSIENY

SEQ ID NO: 3033 - protein, 114 aa, Streptococcus agalactiae
ATGATTATTGAAAACCCTAACAAAGCGGACAAACAAGAAAATCTGTCCATTCCAGAAAAGGCTTACAAATTTTATAATAAAAGAGAATTAAACATAAAAGGAGTTTCCAAATGA

SEQ ID NO: 3034 - protein, 37 aa, Streptococcus agalactiae
MIIENPNKADKQENLSIPEKAYKFYNKRELNIKGVSK

SEQ ID NO: 3035 - protein, 990 aa, Streptococcus agalactiae
ATGAAAAAAATTCTCAATCAACCAACTGATGTTGTTACTGAAATGCTAGATGGATTAGCATATGTTCATAATGATTTAGTACATCGCATAGAAGGTTTTGATATCATTGCTCGCAATGAAGAGAAGTCAGGAAAAGTGGCTCTCATTTCTGGCGGAGGAAGTGGACATGAGCCTTCACATGCTGGTTTCGTAGGCGAAGGAATGTTATCTGCAGCTGTGTGTGGTGCAGTATTTACTTCTCCAACTCCTGACCAAGTTCTTGAAGCAATTAAAGAAGCTGATGAGGGGGCTGGAGTTTTCATGGTTATCAAAAATTATTCAGGGGATATCATGAACTTTGAAATGGCACAAGATATGGCTGAAATGGAAGGCATAGAAGTTGCAAGTGTGGTCGTTGATGATGATATTGCAGTCGAAGACAGTCTTTACACACAAGGAAAACGTGGTGTAGCTGGTACGATACTCGTCCATAAAATTCTAGGACATGCTGCTCGTCATGGCAAATCACTTCAGGAAATCAAAGCTATTGCTGATGAATTAGTACCAAACATTCACACTGTTGGACTTGCACTAAGCGGGGCTACTGTTCCTGAAGTAGGCAAGCCAGGATTTGTTCTTGCAGAAGATGAAATTGAATTTGGTATCGGTATTCATGGTGAACCAGGTTATCGTAAAGAAAAAATGCAACCTTCAAAGGCTTTAGCGACAGAATTAGTTGATAAGTTAATTGAATCGTTCGATGCTAAATCTGGCGAAAAATATGGTGTCCTTATTAACGGTATGGGTGCAACCCCACTTATGGAACAATATGTCTTTGCTAACGATGTTGCCAAACTCCTTGAGGATAAAGGCATTGAAGTGAATTACAAAAAACTTGGTAACTATATGACTTCAATTGATATGGCTGGTTTATCACTAACCTTGATTAAACTGGAAAATCAAGAGTGGTTAGAAGCACTTAATAGTGACGTTACAACCATTGCTTGGTAA

SEQ ID NO: 3036 - protein, 329 aa, Streptococcus agalactiae
MKKILNQPTDVVTEMLDGLAYVHNDLVHRIEGFDIIARNEEKSGKVALISGGGSGHEPSHAGFVGEGMLSAAVCGAVFTSPTPDQVLEAIKEADEGAGVFMVIKNYSGDIMNFEMAQDMAEMEGIEVASVVVDDDIAVEDSLYTQGKRGVAGTILVHKILGHAARHGKSLQEIKAIADELVPNIHTVGLALSGATVPEVGKPGFVLAEDEIEFGIGIHGEPGYRKEKMQPSKALATELVDKLIESFDAKSGEKYGVLINGMGATPLMEQYVFANDVAKLLEDKGIEVNYKKLGNYMTSIDMAGLSLTLIKLENQEWLEALNSDVTTIAW

SEQ ID NO: 3037 - protein, 579 aa, Streptococcus agalactiae
ATGGAAGTAAAAACTGCAATAGAATGGATGCACACTTTTAACCAAAAAATTCAATCCAACAAGGACTATTTATCCGAACTAGATACTCCAATAGGTGATGGCGACCATGGTGGCAATATGGCGCGTGGTATGACTGCTGTTATTGAAAACCTTGATAACAATGAATTTAGTAGTGCTGCCGATGTTTTCAAAACCGTGTCCATGCAACTTTTAAGCAAAGTAGGCGGAGCATCTGGACCACTCTATGGTTCTGCATTTATGGGAATTACAAAAGCTGAACAGAGTAAAAGTACCATTTCAGAGGCACTTGGCGCAGGACTTGAAATGATTCAAAAACGTGGTAAAGCTGAACTTAATGAAAAAACAATGGTTGATGTTTGGCACGGTGTTATTGAAGCGATTGAAAAAAATGAATTGACTGAAGACCGTATCGATTCCTTAGTAGATGCTACAAAAGGGATGAAAGCAACAAAAGGACGCGCTTCTTATGTTGGAGAACGCTCAGTAGGACACATTGATCCAGGATCATTTTCTTCAGGATTATTATTTAAAGCATTACTAGAAGTTGGAGGTGTCTAA

SEQ ID NO: 3038 - protein, 192 aa, Streptococcus agalactiae
MEVKTAIEWMHTFNQKIQSNKDYLSELDTPIGDGDHGGNMARGMTAVIENLDNNEFSSAADVFKTVSMQLLSKVGGASGPLYGSAFMGITKAEQSKSTISEALGAGLEMIQKRGKAELNEKTMVDVWHGVIEAIEKNELTEDRIDSLVDATKGMKATKGRASYVGERSVGHIDPGSFSSGLLFKALLEVGGV

SEQ ID NO: 3039 - protein, 375 aa, Streptococcus agalactiae
ATGTCTGATATTGGTATTATTGTTGTTTCTCACTCTAAAAATATTGCTCAAGGAGTTGTTGATCTTATTTCAGAGGTAGCAAAGGATGTCTCAATAACTTACGTGGGTGGAACAGAAGATGGTGAGATTGGTACTTCTTTTGATCAAGTTCAACAGATTGTAGAGCAAAATGATAAAAAGACGTTATTAGCTTTCTTTGATTTAGGTTCAGCAAAAATGAATTTAGAGTTAGTAGCTGATTTTTCAGAAAAAAATATTATCATTAACTCTGTCCCAGTAGTGGAGGGAGCTTACACCGCTGCTGCTCTTCTACAGGCAGGTGCTGACCTGGATAGTATTCAATCACAATTAGCTGAATTAACTATCAATAAATAA

SEQ ID NO: 3040 - protein, 124 aa, Streptococcus agalactiae
MSDIGIIVVSHSKNIAQGVVDLISEVAKDVSITYVGGTEDGEIGTSFDQVQQIVEQNDKKTLLAFFDLGSAKMNLELVADFSEKNIIINSVPVVEGAYTAAALLQAGADLDSIQSQLAELTINK

SEQ ID NO: 3041 - protein, 714 aa, Streptococcus agalactiae
ATGACTCAATTTCTTGGGGAATTTTTAGGAACATTTATTTTGGTTCTTCTTGGGGATGGCGTAGTTGCAGGAAATGTGCTCAGTAAAACCAAAGAAGAAGGAACTGGATGGACTGCTATTGTTTTTGGCTGGGGAATTGCTTGTACCGTTGCTGTTTATGTTTCTGGATTATTCAGTCCCGCTCATCTAAATCCAGCAGTCACATTAGCAATGGCTTCTATTGGAGCAATTTCTTGGGGACAAGTTATCCCCTTTATCATTGCACAGATGTTAGGAGCAATGGTTGCGGCAACTATTTTATGGTTACACTATTATCCTCATTGGAAAGAAACAAAAGATAGTGGACTTATCCTTGCCAGCTTCTCAACCGGACCTGCTATCCGCCATACACCATCGAATCTCCTTGGTGAAATTATCGGTACTGCTATTCTTGTGATTACAATTATGGCAATTGGTCCTAGTAAAGTTGCAGCAGGTCTTGGTCCAATTATCGTTGGTATAGTTATTTTCGCAGTAGGATTCTCTCTTGGTCCAACAACTGGTTATGCTATTAACCCTGCACGTGACCTAGGGCCTCGTCTTATGCATGCTATCTTACCTATTGAAAATAAGGGTAACTCAGATTGGTCATACGCTTGGATTCCAGTTGTAGGTCCAATTATCGGCGGTGTCCTTGGGGCTATCTTATACAATATTGCTTTGACTTTAGTTTAA

SEQ ID NO: 3042 - protein, 237 aa, Streptococcus agalactiae
MTQFLGEFLGTFILVLLGDGVVAGNVLSKTKEEGTGWTAIVFGWGIACTVAVYVSGLFSPAHLNPAVTLAMASIGAISWGQVIPFIIAQMLGAMVAATILWLHYYPHWKETKDSGLILASFSTGPAIRHTPSNLLGEIIGTAILVITIMAIGPSKVAAGLGPIIVGIVIFAVGFSLGPTTGYAINPARDLGPRLMHAILPIENKGNSDWSYAWIPVVGPIIGGVLGAILYNIALTLV

SEQ ID NO: 3043 - protein, 405 aa, Streptococcus agalactiae
ATGAAAGGATTTCATGGGAATATCGAAAAATTGACACTAGGAAATACAAATTTCCGCCAAGTCCTCTATACCGCAGAACATTGTCAACTCGTTTTAATGACACTGCCTGTTGGTGGAGAAATTGGTAGCGAGATTCATGCAGAAAATGATCAGTTTTTCCGTTTTGAAGCTGGTCATGGTAAGGTTGTCATTGATGGTAATGAATATGAAGTTGCAGATGGAGACGCTATAATAGTTCCGGCAGGTGCTGAACATAACGTAATTAACACTTCTGAAACTGAGATGTTAAAACTCTATACAATTTACAGTCCAGCTCATCACAAAGATGGTATTATCCGTGCCACAAGAGAAGAAGCTGAAGAAAATGAAGAAGATTTTGATGGAGTTACTACTGAAACTAAATAA

SEQ ID NO: 3044 - protein, 134 aa, Streptococcus agalactiae
MKGFHGNIEKLTLGNTNFRQVLYTAEHCQLVLMTLPVGGEIGSEIHAENDQFFRFEAGHGKVVIDGNEYEVADGDAIIVPAGAEHNVINTSETEMLKLYTIYSPAHHKDGIIRATREEAEENEEDFDGVTTETK

SEQ ID NO: 3045 - protein, 714 aa, Streptococcus agalactiae
ATGAAAACAGTTAAAGAAATAAGTCACATTTCTGGTATTAGTGTGCGCACACTTCATTATTATGATGAAATAGATTTGTTATCTCCTTCATTTGTAGGAGAGAATGGTTATCGTTACTATGATGATGAATCACTGATTAAGTTACAAGAAATTTTGTTATTTAAGGAACTGGAATTTCCTCTTAAAAAAATAAAAGAGATAATGGATAGTCCAAATTATGATCGTAATCAAGCACTTCTTGATCAAATTAGGTGGCTGGAACTAAAGAAACAGCGACTAGAAGAAGTAATTGAACATGCAAAGTCTATCCAGAGGGGTAAAAATATGTCAGATTTTACAGCTTATAATCAAGAAGAATTAGAAGCATTTCAAGAGGAAGCTAGAACACGCTGGGGGGATACAGATAGTTACAAAGAATTTGAAAATAGCCATAGTAAGAATGATTTTTCAATGATTTCACAAGCTATGAGTCAGATTTTTAAAGACTTTGGACAGTTGAAAGAACTTTCTCCGACAGATGAGAAAGTTCAAAAACAAGTTCAGATTTTACAAGATTATATCACAGCTCAGTTTTACAACTGCACTAACGATTTATTAGCAAGTCTTGGAATAATGTACATCCAAGATGAGCGTTTCCAAAAGTCTATTGATAATTGGGGAGGCCAGGGAACAGCATTATTTGTTTCTAAAGCTATAGATAGCTATTGTCATTAG

SEQ ID NO: 3046 - protein, 237 aa, Streptococcus agalactiae
MKTVKEISHISGISVRTLHYYDEIDLLSPSFVGENGYRYYDDESLIKLQEILLFKELEFPLKKIKEIMDSPNYDRNQALLDQIRWLELKKQRLEEVIEHAKSIQRGKNMSDFTAYNQEELEAFQEEARTRWGDTDSYKEFENSHSKNDFSMISQAMSQIFKDFGQLKELSPTDEKVQKQVQILQDYITAQFYNCTNDLLASLGIMYIQDERFQKSIDNWGGQGTALFVSKAIDSYCH

SEQ ID NO: 3047 - protein, 1110 aa, Streptococcus agalactiae
ATGACAGTTACAGGAATTGTTGCCGAATTTAATCCCTTTCATAATGGGCATAAGTACCTTTTAGAACAAGCTCAAGGCATAAAAGTAATAGCCATGTCGGGTAATTTTATGCAACGTGGTGAGCCGGCGATTGTAGATAAATGGACCCGTYCCCAGATGGCACTAGAAAATGGTGCTGATTTAGTGATTGAACTCCCTTTTCTGGTTTCGGTACAGTCAGCGGATTATTTCGCTAGTGGAGCTGTGTCTATCCTGGCACGATTAGGTGTGGATAACTTATGCTTCGGTACCGAAGAAATGCTTGATTATGCCCGTATTGGGGATATTTATGTGAATAAAAAAGAGGAGATGGAAGCTTTTTTGAAAAAACAATCGGATTCTCTTTCCTATCCACAAAAAATGCAAGCTATGTGGCAAGAATTTGCAGGGATTACATTTTCGGGACAAACCCCAAATCACATTTTAGGCTTAGCCTACACCAAAGCAGCTAGCCAAAATGGTATTCGATTAAATCCGATACAACGTCAAGGAGCTGGTTATCATTCATCAGAAAAAACAGAGATATTTGCTTCTGCAACAAGTCTTCGTAAACATCAATCTGATCGTTTCTTTGTAGAAAAAGGTATGCCTAACAGTGACTTGTTTTTGAATAGTCCACAAGTAGTTTGGCAAGATTATTTTAGTTTACTCAAATATCAGATAATGACGCATTCTGATTTGACACAAATTTATCAAGTGAATGAAGAGATAGCCAATCGTATAAAAAGTCAAATTCGTTATGTGGAGACTGTGGATGAGTTAGTTGATAAAGTCGCAACTAAACGGTATACCAAAGCAAGAATTCGACGTTTATTAACCTATATCTTGATAAATGCTGTGGAAAGTCCTATACCAAATGCTATTCATGTCTTAGGTTTTACACAAAAAGGTCAACAGCATTTAAAGTCTGTGAAGAAGTCTGTGGATATCGTGACGAGGATTGGTTCACAAACGTGGGATAGTTTGACGCAACGAGCAGATTCTGTTTATCAGATGGGAAATGCTAATATAGCAGAGCAAACATGGGGACGTATCCCTTTTTATCAACCTGTTAGTCAAAGTGACCTTTGA

SEQ ID NO: 3048 - protein, 369 aa, Streptococcus agalactiae
  VARIANT 51: Xaa = Any Amino Acid
MTVTGIVAEFNPFHNGHKYLLEQAQGIKVIAMSGNFMQRGEPAIVDKWTRXQMALENGADLVIELPFLVSVQSADYFASGAVSILARLGVDNLCFGTEEMLDYARIGDIYVNKKEEMEAFLKKQSDSLSYPQKMQAMWQEFAGITFSGQTPNHILGLAYTKAASQNGIRLNPIQRQGAGYHSSEKTEIFASATSLRKHQSDRFFVEKGMPNSDLFLNSPQVVWQDYFSLLKYQIMTHSDLTQIYQVNEEIANRIKSQIRYVETVDELVDKVATKRYTKARIRRLLTYILINAVESPIPNAIHVLGFTQKGQQHLKSVKKSVDIVTRIGSQTWDSLTQRADSVYQMGNANIAEQTWGRIPFYQPVSQSDL

SEQ ID NO: 3049 - protein, 250 aa, Streptococcus agalactiae
ATGATAATATTCTTATACGCTTGTCTGATGATATTTGGGATACTTTATATTATTGAACGTCGGGTAAGTCAGAAAAAGTCTAAAGTTATTTTGGAATTATTGATGAACCCTAAACTTCATTTGGATTTATTATCGGCATTAAAACCATTTGAAAAAGAAACAGATCGTCTCATATACCTTCGTAAAACTTATCACCTAGATATTATTGATGCTGTTACTTAATAATCAATTGAAAGAGAAAGAAGTATGA

SEQ ID NO: 3050 - protein, 83 aa, Streptococcus agalactiae
MIIFLYACLMIFGILYIIERRVSQKKSKVILELLMNPKLHLDLLSALKPFEKETDRLIYLRKTYHLDIIDAVTLNNQLKEKEV

SEQ ID NO: 3051 - protein, 735 aa, Streptococcus agalactiae
ATGGCAACGTATGAAACTTTTGCAGCTGTTTATGATGCTGTCATGGATGATACTTTATATGCTAAATGGACTGATTTTTCACTTCGTCATTTTCCAAAAGGTAAGAAAAAACTTTTGGAATTAGCATGTGGTACGGGAATTCAGTCTGTTCGATTTGCACAAGCTGGTTATGCTGTTACAGGACTTGATCTTAGTGGCGATATGCTGAAACTTGCCAAAAAACGTGCAACTTCTGCTCACCAAAGTATCCAGTTTATTGAAGGAAATATGTTAGATTTATCTAATGTTGGTAAATATGATCTCATCACGTGCTATTCAGACTCTATTTGTTATATGCAAGATGAAGTCGAGGTTGGTGATGTTTTTATCGAAGTCTATAAGGCCTTAGAAGAAAATGGCGTCTTTATTTTTGATGTTCATTCGACTTATCAAACAGATAAAGTATTTCCTGGTTATTCTTATCATGAAAATGCAGATGACTTTGCTATGGTGTGGGATACTTATGAAGATGATGCACCTCATTCTATTGTCCATGAATTAACATTTTTTGTTCAAGAAGAAGATGGTCGATTTACACGTCATGATGAAGTTCATGAAGAGCGTACTTATGATATTTTGACTTATGATATTTTACTTGAACAGGCAGGTTTTAAAGATGTTAAGGTGTATGCAGATTTTGAAGATAAAAAACCAACTGCAACTTCTGCTCGCTGGTTTTTTGTAGCTCATAAATAA

SEQ ID NO: 3052 - protein, 244 aa, Streptococcus agalactiae
MATYETFAAVYDAVMDDTLYAKWTDFSLRHFPKGKKKLLELACGTGIQSVRFAQAGYAVTGLDLSGDMLKLAKKRATSAHQSIQFIEGNMLDLSNVGKYDLITCYSDSICYMQDEVEVGDVFIEVYKALEENGVFIFDVHSTYQTDKVFPGYSYHENADDFAMVWDTYEDDAPHSIVHELTFFVQEEDGRFTRHDEVHEERTYDILTYDILLEQAGFKDVKVYADFEDKKPTATSARWFFVAHK

SEQ ID NO: 3053 - protein, 369 aa, Streptococcus agalactiae
ATGGAATGNNNNNTGACAGAAAAAGACTTACTACAGCTAGTCGTTAAGGCTGCGGATGAAAAACGAGCAGAAGATATTGTAATTTTAGATTTACAGCCTGTAACGAGTGTTGCAGATTACTTTGTGATTATGAGTGCAAGTAATAGTAGGCAGTTAGAAGCAATCGCAGACAATATCCGTGAACAAGTAAAAGGAAATGGTGGGGATGCTAGCCACCTTGAAGGCGATAGTAAAGCTGGTTGGGTACTTCTTGACCTCAATAGCGTCGTGGTTCATATCTTCTCTGAAGATGAGAGACAGCACTATAACCTTGAAAAACTTTGGCATGAAGCACCATTGCTTGATGCTGAAGTCTTTATGACAGAATAA

SEQ ID NO: 3054 - protein, 122 aa, Streptococcus agalactiae
  VARIANT 3, 4, 5: Xaa = Any Amino Acid
MEXXXTEKDLLQLVVKAADEKRAEDIVILDLQPVTSVADYFVIMSASNSRQLEAIADNIREQVKGNGGDASHLEGDSKAGWVLLDLNSVVVHIFSEDERQHYNLEKLWHEAPLLDAEVFMTE

SEQ ID NO: 3055 - protein, 636 aa, Streptococcus agalactiae
ATGACTAAAAAAGAAAAAGGAACAATGATGACCTTAGCTGCCGGACTAGCATGGGGCATTTCTGGAATTAGTGGTCAATACTTGATGTCGCACGGAGTACACGTTAACCTTTTGACTTCTTTACGATTGTTGATAACAGGTATCTTTCTCTTGTCTTTAGCTAGATCAAAACAAAAGGAGCATTTAGTAGCAGCGTGGAAACAGCCAAAATTTTTAAAGCAGGTTTTACTTTTTTCTATATTTGGTTTAGTTTTAAATCAATATGCTTTTCTCAGAGCGATTCATTTAACAAATGCTGGAACTGCAACGGTTTTGCAATATATGGCACCAATACTTATTTTGAGTATTGTTTGTATCCTAAACAGACAAAGACCAACATCTTTTGAAATAATAGCAATTGCTATGGCAATTTTAGGAACCTATATGATTGCAACGCATGGGAAGTTAGGAAGTTTAGCTATCACACCGAAAGGATTAATGTGGGGGCTTGGTTCCGCCATTACTTATTCTATTTATATTTTATTACCTGTGAAACTTATTCATGAATGGGGAAGTACGATTGTTATTGGTTCAGGAATGTTTATAGGTGGGATTTTATTTAGTTTGGTGACAAAAGCNNNNNCATTCATTCATTAA

SEQ ID NO: 3056 - protein, 211 aa, Streptococcus agalactiae
  VARIANT 207, 208: Xaa = Any Amino Acid
MTKKEKGTMMTLAAGLAWGISGISGQYLMSHGVHVNLLTSLRLLITGIFLLSLARSKQKEHLVAAWKQPKFLKQVLLFSIFGLVLNQYAFLRAIHLTNAGTATVLQYMAPILILSIVCILNRQRPTSFEIIAIAMAILGTYMIATHGKLGSLAITPKGLMWGLGSAITYSIYILLPVKLIHEWGSTIVIGSGMFIGGILFSLVTKAXXFIH

SEQ ID NO: 3057 - protein, 1443 aa, Streptococcus agalactiae
ATGAATTTTGAAACAGTCATTGGACTTGAAGTCCATGTTGAATTAAATACGAACTCTAAAATTTTCTCACCTTCTTCCGCTCATTTTGGTCAGGAACAAAATGCTAATACAAATGTAATTGACTGGTCTTTCCCAGGTGTCCTTCCAGTCATGAATAAAGGAGTTATTGATGCAGGAATCAAGGCGGCACTTGCCTTGAATATGGATATCCATCAAAACATGCATTTTGATCGTAAAAATTATTTCTATCCAGATAATCCTAAAGCTTATCAAATTTCACAGTTTGATGAGCCTATTGGTTACAATGGTTGGATTGAAATCGAATTAGAAGATGGTACACGAAAAAAAATTCGTATTGAGCGTGCCCACCTCGAAGAAGATGCAGGAAAAAATACACATGGGACAGATGGTTATTCCTATGTTGACCTTAATAGACAAGGTGTTCCACTGATTGAAATTGTATCAGAAGCTGATATGCGTTCTCCTGAGGAAGCTTATGCTTATTTGACAGCTCTCAAAGAGATTATCCAATATACTGGAATTTCTGACGTTAAAATGGAAGAAGGTTCTATGCGTGTAGATGCCAATATTTCACTTCGTCCTTATGGTCAAGAAGAGTTTGGTACTAAAGCAGAACTTAAGAACCTTAACTCATTCAATAATGTACGTAAAGGTTTGATACATGAAGAAAAACGTCAAGCACAAGTTTTACGATCTGGTGGTCAAATTCAGCAAGAGACTCGTCGTTTTGATGAAACAACAGGTGAGACTATTTTGATGCGTGTCAAGGAAGGCTCATCAGATTATCGCTATTTCCCTGAACCAGATTTACCACTATTTGATATCTCGGATGAATGGATTGATCAAGTTCGTTTAGAATTACCAGAATTTCCACAGGAACGTCGTGCGAAATATGTATCGTCTTTTGGTCTATCATCTTATGATGCTAGCCAATTAACAGCTACAAAAGCAACTTCTGATTTCTTTGAAAAAGCTGTTGCTATTGGGGGTGATGCAAAACAAGTTTCCAATTGGTTACAAGGAGAAGTGGCGCAATTTCTTAACAGTGAATCAAAATCAATCGAAGAAATTGGTCTGACTCCTGAGAATTTGGTTGAGATGATTGGCTTGATTGCTGACGGTACAATTTCATCCAAAATTGCTAAAAAAGTTTTTGTGCATTTAGCTAAAAATGGTGGTTCAGCTGAAGAATTCGTTAAAAAGGCTGGTTTAGTTCAAATTTCAGATCCTGAAGTATTAATCCCAATTATTCATCAAGTCTTTGCAGATAATGAAGCTGCTGTGATTGACTTTAAGTCAGGAAAACGCAATGCTGATAAGGCCTTCACAGGTTATCTAATGAAAGCAACAAAAGGACAAGCTAATCCACAAGTTGCTCTGAAGCTGTTAGCGCAAGAATTAGCAAAATTAAAAGAAGAATAG

SEQ ID NO: 3058 - protein, 480 aa, Streptococcus agalactiae
MNFETVIGLEVHVELNTNSKIFSPSSAHFGQEQNANTNVIDWSFPGVLPVMNKGVIDAGIKAALALNMDIHQNMHFDRKNYFYPDNPKAYQISQFDEPIGYNGWIEIELEDGTRKKIRIERAHLEEDAGKNTHGTDGYSYVDLNRQGVPLIEIVSEADMRSPEEAYAYLTALKEIIQYTGISDVKMEEGSMRVDANISLRPYGQEEFGTKAELKNLNSFNNVRKGLIHEEKRQAQVLRSGGQIQQETRRFDETTGETILMRVKEGSSDYRYFPEPDLPLFDISDEWIDQVRLELPEFPQERRAKYVSSFGLSSYDASQLTATKATSDFFEKAVAIGGDAKQVSNWLQGEVAQFLNSESKSIEEIGLTPENLVEMIGLIADGTISSKIAKKVFVHLAKNGGSAEEFVKKAGLVQISDPEVLIPIIHQVFADNEAAVIDFKSGKRNADKAFTGYLMKATKGQANPQVALKLLAQELAKLKEE

SEQ ID NO: 3059 - protein, 1467 aa, Streptococcus agalactiae
ATGTCGTTTAATAATCAATCAATTGATCAGTTGCATGATTTTCTCGTTAAAAAAGAAATTTCAGCAACTGAATTAACAAAAGCTACATTGGAAGATATTCATGCGCGTGAACAAGCGGTTGGATCTTTTATTACTATTTCTGATGAGATGGCAATAGCTCAAGCCAAAGAAATTGATGATAAAGGAATTGATGCTGATAATGTTATGTCAGGTATTCCCTTAGCAGTTAAAGATAATATTTCAACAAAGGGGATTCTTACAACAGCTGCTTCTAAAATGCTCTATAACTATGAGCCAATCTTTGATGCTACGGCTGTTGAAAAGTTATATGCTAAAGATATGATTGTGATTGGTAAAGCAAACATGGATGAATTTGCCATGGGAGGCTCTACAGAAACATCTTATTTTAAAAAGACAAATAACGCTTGGGACCATAGTAAAGTTCCGGGAGGATCATCAGGTGGTTCTGCAGCAGCAGTAGCTTCAGGACAAGTACGTTTATCATTGGGCTCTGATACAGGTGGTTCAATTCGCCAACCGGCTTCATTTAATGGAATCGTTGGTATGAAGCCAACTTACGGACGTGTATCACGCTTTGGTTTGTTTGCTTTCGGTAGTTCGCTTGACCAGATTGGACCGATGTCTCAAACAGTAAAAGAGAATGCACAGCTTTTGACAGTTATTTCTGGGCATGATGTAAGAGATTCAACTTCTTCTGAGCGTACTGTAGGCGATTTTACTGCTAAAATTGGTCAAGATATTCAAGGAATGAAAATTGCTTTACCAAAAGAATATTTGGGAGAAGGAATAGCGCAAGGAGTTAAAGAAACGATTATTAAGGCCGCAAAACATCTGGAAAAACTAGGTGCAGTTATTGAGGAAGTTAGTTTACCGCATTCTAAATACGGTGTTGCTGTTTATTATATTGTTGCTTCATCGGAAGCTTCTTCAAACTTACAACGTTTTGATGGTATTCGTTATGGATACCGTACAGAAAATTATAAAAACTTGGATGATATCTATGTCAATACACGATCTGAAGGTTTTGGAGACGAAGTTAAGCGTCGCATTATGCTGGGAACGTTCAGTTTATCTTCTGGGTATTACGATGCTTATTATAAAAAAGCAGGTCAAGTTCGTAGTTTGATTATTCAAGATTTTGAAAAAGTTTTCGCAGATTATGACTTGATTTTAGGTCCAACAGCTCCAACAACAGCCTTTGACTTAGATTCTTTAAATCACGATCCAGTTGCAATGTACCTAGCTGATATTCTAACAATACCAGTTAATTTGGCTGGTTTACCAGGTATTTCAATCCCTGCTGGTTTTGATCAAGGTCTACCGGTTGGTATGCAGTTGATTGGTCCGAAATTCAGTGAAGAAACAATATATCAGGTTGCTGCTGCCTTCGAAGCAACGACAGATTATCATAAACAACAACCTAAAATTTTTGGAGGTGAGAACTAA

SEQ ID NO: 3060 - protein, 488 aa, Streptococcus agalactiae
MSFNNQSIDQLHDFLVKKEISATELTKATLEDIHAREQAVGSFITISDEMAIAQAKEIDDKGIDADNVMSGIPLAVKDNISTKGILTTAASKMLYNYEPIFDATAVEKLYAKDMIVIGKANMDEFAMGGSTETSYFKKTNNAWDHSKVPGGSSGGSAAAVASGQVRLSLGSDTGGSIRQPASFNGIVGMKPTYGRVSRFGLFAFGSSLDQIGPMSQTVKENAQLLTVISGHDVRDSTSSERTVGDFTAKIGQDIQGMKIALPKEYLGEGIAQGVKETIIKAAKHLEKLGAVIEEVSLPHSKYGVAVYYIVASSEASSNLQRFDGIRYGYRTENYKNLDDIYVNTRSEGFGDEVKRRIMLGTFSLSSGYYDAYYKKAGQVRSLIIQDFEKVFADYDLILGPTAPTTAFDLDSLNHDPVAMYLADILTIPVNLAGLPGISIPAGFDQGLPVGMQLIGPKFSEETIYQVAAAFEATTDYHKQQPKIFGGEN

SEQ ID NO: 3061 - protein, 303 aa, Streptococcus agalactiae
ATGAAAATTTCTGAAGAAGAAGTGCGTCATGTTGCCAATCTGTCAAAATTGCGCTTTTCTGATCAAGAGACTAAAGAATTTGCGTCAAGTTTGTCAAAGATTGTTGATATGATTGAACTCTTAAATGAAGTTGACACAGAAGGCGTACCAGTAACAACGACCATGGCAGATCGCAAAACCGTGATGCGTGAAGATATTGCTCAACCAGGCCATAATCGTGATGACTTATTTAAAAATGTACCACAGCATCAAGATTATTATATTAAAGTACCTGCAATTCTTGAGGATGGAGGAGATGCCTAA

SEQ ID NO: 3062 - protein, 100 aa, Streptococcus agalactiae
MKISEEEVRHVANLSKLRFSDQETKEFASSLSKIVDMIELLNEVDTEGVPVTTTMADRKTVMREDIAQPGHNRDDLFKNVPQHQDYYIKVPAILEDGGDA

SEQ ID NO: 3063 - protein, 2646 aa, Streptococcus agalactiae
ATGGAAACTAAGTTTGTGTATCATTTTGATGAAGGTTGTAAGGAAATGAAGGAACTGCTAGGTGGTAAGGGGGCTAATCTAGCTGAAATGACGAGTATTGGGTTACCGGTACCACAAGGTTTTACTATTACAACACAGGCTTGTAATGATTATTATGATAACGCTTGCCATATCCGAGAGAGTATTCTTAGTCAAATTGATCAAGCAATGGCACAATTGGAGGTTGAACAGAACAAGCAATTAGGAAGTGTTGATGATCCTTTGTTGGTGTCAGTTCGGTCAGGATCAGTTTTTTCAATGCCTGGTATGATGGACACAGTTTTAAATTTAGGGTTAAATGATCGTAGTGTCCAAGGTTTAGTGAAAAAGACAGAAGACGAGCGTTTTGCTTATGACAGTTATCGTCGTTTTATCCAAATGTTTGCAGATGTGGTTACAGGCATTCCAAAATATAAATTTGATACCATTTTAGATCGACTTAAGACAGATAAATGTTATCAAGATGACACAGAACTAACTGGTTCAGATTTAAAGAGACTTGTTGAATTTTACAAGGAACTATATCAAAAAGAAGCAGGAGAAAAATTTCCGCAAGATCCTAAAAGGCAGCTTTTGTTAGCAATTGAGGCAGTTTTTAAATCATGGAATAATCCAAGAGCTAAGATTTATCGTAAATTAAATGATATTCCGGAGACGCTTGGGACAGCCGTTAATATCCAAGCTATGGTTTTTGGGAATATGGGAAATAACAGCGGAACGGGAGTTGCTTTTACACGAAACCCATCAACTGGAGCAGCAAATTTATTTGGTGAGTATTTGATTAATGCACAAGGAGAAGATGTTGTTGCAGGTATCAGAACACCACAATCCATATCAAAATTGGCAGAACAAATGCCTATTATTTACCAAGAGTTTGTAAGCGTTACCCAAAAGTTAGAAGCTCATTATCGCGATATGCAAGATATGGAGTTTACAATTGAAAATGGTAATCTTTATATGCTTCAGACGAGAAGCGGTAAGCGTACAGCGAAGGCAGCTATCAAAATAGCAGTAGATCAAGTAAATGAAGGCCTAATTAGTAAAGAAGAAGCTATACTACGTATCGAGCCCAAACAATTAGATCAGTTATTACACCCTTCTTTTGACTTGAAAAGTTTAAAGAAAGCTATTATTTTGACGACAGGACTTCCAGCTTCTCCTGGAGCTGCTTATGGGAAAGTTTATTTCCATGCAGAAGATGTTGTTAAAGAGATGAAAAAGGGAAATCCAGTGCTATTGGTCAGACAAGAGACATCACCTGAAGATATCGAGGGGATGGTTAGTGCAAACGGGATTATAACAGCAAGAGGCGGAATGACTTCCCATGCGGCAGTAGTAGCCAGAGGAATGGGGAAACCATGCGTTGCAGGCTGTAGTCAATTATTGGTTGATGAAGTAAGACGAGAAATTTCTATTGGGCATCAAACGATAAAAGAAGGTGAGATGTTATCAATCGATGGTGCTACAGGAAATGTTTATATAGGACAAGTTCCGATGGCAGAGACTAGCGTAGATCGTGATTTTGAGATATTTATGAAATGGGTAGATGAAAATCGAGATATGATGGTGTGTTCAAATGCAGATAATCCGAGAGATGCTCAAAAGGCCTTGGACTTTGGAGCAGAAGGAATAGGTCTTTGTCGCACGGAACATATGTTTTTTGACGATGAACGTATTCCAGTCGTTAGAGAAATGATTTTAGCGGATGAAATATTGAGCCGAAGGAAGGCTCTAGAAAGGCTTTTATCTTTCCAAAGAGACGATTTTTATCAAATTTTTAAAGTATTGAAAGGTAAAGCTTGTACGATTCGTTTGCTTGACCCTCCTTTACATGAATTCTTACCCCATGATAAAGAGTCTATAGAATCTATGGCAAGACAAATGGGGATATCTACTTTAGCTATTGAAAAACGGATTCAAACATTAGAAGAATTCAACCCTATGTTAGGTCATCGTGGTTGTAGACTTGCGATTACCTATCCGGAAATTTACCAAATGCAGGTGAGAGCTCTTGTACAAGGCGCTATACTTGCAATGAAAGAGGGATATGAGGCAAAGCCAGAAATTATGATTCCTTTAGTGACAGCGCATGAAGAAATCTCTATAATACGTGATCTGATTGAAGAGACAATTGTTGAGGAGAGTAAATCTAAAAAAATTAACTTATCATTCCCTATTGGGACAATGATTGAAACACCAAGAGCTTGTATGATAGCGGATGATATTGCAAAGTTTGCGGATTTCTTTAGTTTTGGGACCAATGATTTAACACAAATGAGCTTTGGATTTTCACGAGATGATGCTGGAAAATTCTTAGGAGAATACGTTGATAAAGGACTTCTAAAAAAAGACCCTTTCCAAGTTTTAGATCAAAAAGGAATAGGAAGGTTTATTGGGCAGGCAGTGAGGTTAGGAAAAGAAGTTAAGCCAAACCTTAAAATAGGTATCTGTGGAGAGCATGGTGGAGAACCATCATCTATTGAGTTCTGTTACCAACTGGGGTTACATTATGTATCGTGTTCGCCGTTTAGGATTCCTATTGCTAAATTAGCGGCTGCACAGGCTAAAATCAAACAAAGCAGAAATGATATAACAATAGATAAATAA

SEQ ID NO: 3064 - protein, 881 aa, Streptococcus agalactiae
METKFVYHFDEGCKEMKELLGGKGANLAEMTSIGLPVPQGFTITTQACNDYYDNACHIRESILSQIDQAMAQLEVEQNKQLGSVDDPLLVSVRSGSVFSMPGMMDTVLNLGLNDRSVQGLVKKTEDERFAYDSYRRFIQMFADVVTGIPKYKFDTILDRLKTDKCYQDDTELTGSDLKRLVEFYKELYQKEAGEKFPQDPKRQLLLAIEAVFKSWNNPRAKIYRKLNDIPETLGTAVNIQAMVFGNMGNNSGTGVAFTRNPSTGAANLFGEYLINAQGEDVVAGIRTPQSISKLAEQMPIIYQEFVSVTQKLEAHYRDMQDMEFTIENGNLYMLQTRSGKRTAKAAIKIAVDQVNEGLISKEEAILRIEPKQLDQLLHPSFDLKSLKKAIILTTGLPASPGAAYGKVYFHAEDVVKEMKKGNPVLLVRQETSPEDIEGMVSANGIITARGGMTSHAAVVARGMGKPCVAGCSQLLVDEVRREISIGHQTIKEGEMLSIDGATGNVYIGQVPMAETSVDRDFEIFMKWVDENRDMMVCSNADNPRDAQKALDFGAEGIGLCRTEHMFFDDERIPVVREMILADEILSRRKALERLLSFQRDDFYQIFKVLKGKACTIRLLDPPLHEFLPHDKESIESMARQMGISTLAIEKRIQTLEEFNPMLGHRGCRLAITYPEIYQMQVRALVQGAILAMKEGYEAKPEIMIPLVTAHEEISIIRDLIEETIVEESKSKKINLSFPIGTMIETPRACMIADDIAKFADFFSFGTNDLTQMSFGFSRDDAGKFLGEYVDKGLLKKDPFQVLDQKGIGRFIGQAVRLGKEVKPNLKIGICGEHGGEPSSIEFCYQLGLHYVSCSPFRIPIAKLAAAQAKIKQSRNDITIDK

SEQ ID NO: 3065 - protein, 831 aa, Streptococcus agalactiae
ATGGAAGATCAACTCACTATATTTATTATTTCAGATTCTTTAGGGGAAACAGCCAAAGCTATTGCGAAAGCATGTTTGTCACAATTTCCAGGACATGATGATTGGCATTTTCAACGTTTTTCCTATATTAACAGTCAGGAACGCTTAGAACAAGTTTTTGAAGAGGCTAGCCAGAAGACAGTATTTATGATGTTTAGTTTAGTTGATGTTGCTTTGGCTTCCTATGCACAGAAACGATGTGAAAGTGAACATTATGCTTATGTTGACTTATTAACAAATGTTATTCAAGGAATATCAAGGATATCGGGTATAGATCCTTTGGGAGAACCAGGGATTTTACGACGCTTAGACAATGATTATTTCAAAAGAGTAGAATCAATAGAATTTGCAGTAAAATATGATGATGGGAGAGATCCGCGAGGTATTTTACAAGCAGATTTAGTTATTATAGGAATTTCAAGAACTTCTAAAACACCATTAAGTATGTTTTTAGCAGATAAAAATATTAAAGTTATTAATATTCCTTTGGTTCCAGAGGTTCCTGTTCCTAAAGAATTACGTATGATTGATTCTAGAAGGATTATCGGACTAACTAATTCGGTTGATCATCTTAATCAAGTCCGAAAAGTTCGATTAAAGTCCTTAGGTCTTTCTAGTACGGCAAATTATGCCAGTTTAGAACGGATTTTGGAGGAGACGAGGTATGCTGAAGAAGTTATGAAAAATTTAGGTTGCCCAATCATTAATGTATCTGATAAAGCAATCGAAGAAACAGCAACGATTATTTTAGAAATCTTAAAAACAAATGGACAAGTAGCTAAAAATCTGTAA

SEQ ID NO: 3066 - protein, 276 aa, Streptococcus agalactiae
MEDQLTIFIISDSLGETAKAIAKACLSQFPGHDDWHFQRFSYINSQERLEQVFEEASQKTVFMMFSLVDVALASYAQKRCESEHYAYVDLLTNVIQGISRISGIDPLGEPGILRRLDNDYFKRVESIEFAVKYDDGRDPRGILQADLVIIGISRTSKTPLSMFLADKNIKVINIPLVPEVPVPKELRMIDSRRIIGLTNSVDHLNQVRKVRLKSLGLSSTANYASLERILEETRYAEEVMKNLGCPIINVSDKAIEETATIILEILKTNGQVAKNL

SEQ ID NO: 3067 - protein, 552 aa, Streptococcus agalactiae
ATGNNNNNAGGAGTAACAAGAGCAGCACTAAGGTCTGATTTGGCGGTTTTAAGTATGCTAGGTATCATAGATGCAAAACCTAAGGTTGGTTATTTTTATTTAGGACAGTATCATGCTTCAATAGGGACAAGTCATTTTGAAAAGATGACAGTTTCAGAAATTATGGGGATCCCTCTGACAGTTCATCAAAAAGATTCAGTTTATGATGTTATTGTACATATTTTTATGGAAGATGCTGGTTGTGCTTTTATCTTGGATGATGATGATTTTCTCTGTGGAGTCGTGTCACGTAAAGATTTACTAAAAATCAGTATTGGCGGAGGAGATCTTTCTAAAATGCCAATAGGAATGGTGATGACACGTATGCCACACGTGACAACTGTTTTAGAAAATGAAAGTCTTTTTGCGGCAGCTGATAAATTAGTGAGCAGAAAAGTGGATAGTCTCCCTGTCGTTCGTCATGATAAGCAATATCCCGAAAAATTTAAAGTGATCGGGAAATTATCTAAAACAATCCTCGCTAGTTTGTTTTTAGAAATAAGAGATTATTAG

SEQ ID NO: 3068 - protein, 183 aa, Streptococcus agalactiae
  VARIANT 2, 3: Xaa = Any Amino Acid
MXXGVTRAALRSDLAVLSMLGIIDAKPKVGYFYLGQYHASIGTSHFEKMTVSEIMGIPLTVHQKDSVYDVIVHIFMEDAGCAFILDDDDFLCGVVSRKDLLKISIGGGDLSKMPIGMVMTRMPHVTTVLENESLFAAADKLVSRKVDSLPVVRHDKQYPEKFKVIGKLSKTILASLFLEIRDY

SEQ ID NO: 3069 - protein, 522 aa, Streptococcus agalactiae
ATGCCGAATTTATTAGAAAAAACTAGAAAAATTACATCCATCTTACAGCGTTCCGTAGATAGCTTAGATGCCGAACTACCATATAATACAATGGCGGCTCAATTAGCTGATATTATTGACTGTAACGCATGTATTATTAATGGTGGTGGTAACTTACTTGGCTATGCCATGAAATATAAAACAAACACTGACCGTGTGGAAGAATTTTTTGAAACAAAACAATTCCCAGATTACTATGTTAAATCTGCTAGTCGTGTTTATGATACAGAAGCTAACTTATCAGTAGATAATGATTTGTCAATTTTCCCAGTTGAGACAAAGGAAAACTTCCAAGATGGTATTACAACAATCGCTCCAATTTATGGTGGTGGAATGCGCTTGGGAACATTTATTATCTGGCGTAATGATAAAGAATTTAGCGACGATGATTTGATTTTAGTTGAAATTGCAAGCACCGTTGTTGGTATTCAATTACTTAACCTTCAAACAGAAAATCTAGAAGANNNNNCATTCATTCATTAA

SEQ ID NO: 3070 - protein, 173 aa, Streptococcus agalactiae
  VARIANT 168, 169, 170: Xaa = Any Amino Acid
MPNLLEKTRKITSILQRSVDSLDAELPYNTMAAQLADIIDCNACIINGGGNLLGYAMKYKTNTDRVEEFFETKQFPDYYVKSASRVYDTEANLSVDNDLSIFPVETKENFQDGITTIAPIYGGGMRLGTFIIWRNDKEFSDDDLILVEIASTVVGIQLLNLQTENLEXXXFIH

SEQ ID NO: 3071 - protein, 1131 aa, Streptococcus agalactiae
ATGAGGGCAAATGGTGAAAAGATATTGCGGTTAAATACTGGAAATCCAGCTGCCTTTGGCTTCGAAGCGCCAGATGAAGTCATTCGTGATTTAATTACGAATGCGCGTGAATCAGAAGGTTACTCTGATTCGAAAGGTATTTTTTCAGCTCGTAAGGCTGTTATGCAGTATTACCAGTTACAAAACATCCATGTTGACATGGATGATATATACATTGTTAATGGTGTTAGTGAGGGAATCTCTATGTCAATGCAAGCTTTGCTTGATAATGATGACGAGGTTCTAGTTCCAATGCCAGATTACCCGTTATGGACAGCTTGTGTTAGCCTTGCTGGTGGAAATGCTGTGCATTATATTTGTGATGAGGAAGCTAATTGGTATCCTGATATTGATGATATCAAATCAAAAATCACATCCAAAACAAAAGCAATTGTCCTCATTAATCCAAATAATCCAACTGGAGCAGTCTATCCGCGTGAAATTCTGCAAGAGATTGTGGATATCGCTAGACAAAATGACTTGATTATTTTTTCAGACGAGGTTTATGACCGTTTAGTTATGGATGGAATGGAGCATATCCCAATTGCTTCTATTGCAGAGGATATTTTTACAGTTACTTTATCTGGCTTATCTAAATCACATCGCATCTGTGGTTTCCGCGTTGGTTGGATGGTATTGTCTGGTCCGCGACAACATGTTAAAGGTTATATTGAAGGTTTGAATATGTTAGCTAACATGAGGCTGTGTTCAAATGTTCTTGCTCAACAGGTTATTCAAACATCGTTAGGCGGACAGCAATCTATTGATAGTATGTTGTTGCCAGGAGGTCGTATCTACGAGCAACGTAATTATATCCATAAAGCAATTAATGAAATACCTGGTTTATCTGCTGTAAAACCAAATGCTGGACTGTATCTTTTCCCTAAAATTGATACAGATATGTACCGTATTGATAATGATGAAGAGTTTGTGCTTAATTTCTTAAAACAAGAAAAAGTATTACTAACACACGGTAGAGGATTTAATATGAATACCGCTGACCATTTTAGAATTGTTTACTTACCACGTGTTGATGAATTGACTGAACTACAAGAAAAAATGGCTCGCTTTTTAAGCCAATACAAGCGCTAG

SEQ ID NO: 3072 - protein, 376 aa, Streptococcus agalactiae
MRANGEKILRLNTGNPAAFGFEAPDEVIRDLITNARESEGYSDSKGIFSARKAVMQYYQLQNIHVDMDDIYIVNGVSEGISMSMQALLDNDDEVLVPMPDYPLWTACVSLAGGNAVHYICDEEANWYPDIDDIKSKITSKTKAIVLINPNNPTGAVYPREILQEIVDIARQNDLIIFSDEVYDRLVMDGMEHIPIASIAEDIFTVTLSGLSKSHRICGFRVGWMVLSGPRQHVKGYIEGLNMLANMRLCSNVLAQQVIQTSLGGQQSIDSMLLPGGRIYEQRNYIHKAINEIPGLSAVKPNAGLYLFPKIDTDMYRIDNDEEFVLNFLKQEKVLLTHGRGFNMNTADHFRIVYLPRVDELTELQEKMARFLSQYKR

SEQ ID NO: 3073 - protein, 452 aa, Streptococcus agalactiae
ATGTCACAAAAATATGAACGCATCCTTGTCGCTATTGATGGATCAACAGAATCTGAACTTGCTTTGAAAAGGCAGTTAACGTTGCTCTTCGCAATGATTCTGAATTAATCTTGACACATGTTATAGATACACGTGCTTTACAAAGCTTTGCGACATTTGATACTTATATCTATGAAAAATTAGAAAAAGAAGCAAAAGATGTCCTTGAGGAATATGAAAAACAAGCTCGTGAAAAAGGAGCAGATAAAGTTAGACAAGTCATTGAATTTGGTAATCCCAAAACATTACTTGCACATGATATTCCAGAAAAAGAAAAAGTAGACTTGATTATGGTTGGTGCAACAGGTCTTAATACCTTTGAACGTTTCCTTATCGGATCTTCCTCAGAATACATCCTTCGTCACGCTAAAGTAGATTTACTCATTGTACGTGACCCTAATAAAACAATGTAA

SEQ ID NO: 3074 - protein, 150 aa, Streptococcus agalactiae
MSQKYERILVAIDGSTESELAFEKAVNVALRNDSELILTHVIDTRALQSFATFDTYIYEKLEKEAKDVLEEYEKQAREKGADKVRQVIEFGNPKTLLAHDIPEKEKVDLIMVGATGLNTFERFLIGSSSEYILRHAKVDLLIVRDPNKTM

SEQ ID NO: 3075 - protein, 1290 aa, Streptococcus agalactiae
TTGAAAGACCAAGGAATACTAGTCGGTTTAGCAACGGGGCGAGGTCCTAGTTTTGTACAACCTTTTTTAGAAAACCTTGGTTTAGATTTTGCTGTAACCTATAATGGTCAATATATCTATAGTAGAAGTGAAATTATTTATACCAATCAATTATCTAAGACAACTGTCTATCGTCTGATTCGTTATGCTGGAGCAAGAAGAAGAGAAATTTCATTAGGAACAGCCTCAGGATTACTCGGTTCAGGTATTATTGGTCTAGGAACTAGCCGTTTGGGGCAGATTGTATCTAGCCTTGTTCCGAGAAAATGGGCAAAAGCGATTGAACGAAGCTTTAAGCATTTTATTCGTCGGATTAAACCTCAAAATATTGATAGCCTCATGGTTATCTTACGAGAACCTATTTATCAGGTCGTTTTAGTTGCAACAGAGGGCGAATCAGAGCGAATTCAAAAACAATTTCCTCGTGTTAAATTAACAAGAAGCAGTCCTTACTCAATGGATGTCATTTCTGAAGGGCAGTCAAAAGTTAAGGGAATTGAACGTGTTGGTCAACGCTATGGTTTTGATCTATCCGAAGTGATAGCATTTGGAGATTCTGATAATGATATTGAGATGTTATCTCAAGTTGGCATTGGTGTTGCCATGGGGAACGCTAGTCAGCAAGTGAGAGAAAATGCACGTTATACAACTGCTGACAATAATGATGATGGTATCTCTAAGGCATTAGCCCATTATGGACTTATCCAATTTGAGATTGAAAAAACATTCAGTAGTCGTGACGAGAATTTCAATAAAGTAAAATCCTTCCATCTATTAATGGATGGTGAAACTATTGAAACGCCACGCTTATATGACAGTAAGGAAGCTGGTTTCAGGTCAGACTTTAAAGTAGAAGAAATCGTTGAGTTCTTGTATGCTGCTAGTCAAGGTAACCAAAAAGTATTTGACCAATCTATCCGTAATTTACACTTAGCTATTGATAAAGCAAGAGATAAGGTTATTTCTAAAGACCATCCAGAAACACCATTAGTGGGAGAAGTGGATGCCTTAACAGATTTACTTTATCTGACTTATGGCTCCTTTGTTCTTATGGGAGTCGACCCAAAACCTCTTTTTGATACAGTACATGAGGCCAATATGGGGAAAATCTTTCCAGATGGCAAAGCTCATTTTGATCCTGTTACTCATAAAATTTTAAAACCAGACGACTGGGAAGAACATTTCGCTCCTGAGCCATCAATTCGACGTGAATTAGATAGCCAAATTCAGAAATCCTTAAATCGAAAATAA

SEQ ID NO: 3076 - protein, 429 aa, Streptococcus agalactiae
MKDQGILVGLATGRGPSFVQPFLENLGLDFAVTYNGQYIYSRSEIIYTNQLSKTTVYRLIRYAGARRREISLGTASGLLGSGIIGLGTSRLGQIVSSLVPRKWAKAIERSFKHFIRRIKPQNIDSLMVILREPIYQVVLVATEGESERIQKQFPRVKLTRSSPYSMDVISEGQSKVKGIERVGQRYGFDLSEVIAFGDSDNDIEMLSQVGIGVAMGNASQQVRENARYTTADNNDDGISKALAHYGLIQFEIEKTFSSRDENFNKVKSFHLLMDGETIETPRLYDSKEAGFRSDFKVEEIVEFLYAASQGNQKVFDQSIRNLHLAIDKARDKVISKDHPETPLVGEVDALTDLLYLTYGSFVLMGVDPKPLFDTVHEANMGKIFPDGKAHFDPVTHKILKPDDWEEHFAPEPSIRRELDSQIQKSLNRK

SEQ ID NO: 3077 - protein, 267 aa, Streptococcus agalactiae
ATGATTGTTGGACACGGAATTGATTTACAAGAGATAGAGGCGATTACTAAAGCATATGAGCGTAATCAACGTTTTGCAGAACGCGTTTTGACCGAACAAGAATTGCTTCTTTTTAAAGGAATTTCCAATCCCAAGCGTCAGATGTCTTTTTTAACAGGGCGATGGGCAGCAAAAGAGGCTTATAGCAAAGCACTTGGAACAGGAATTGGGAAAGTTAATTTTCATGATATCGAAATTTTATCGGATGANNNNNCATTCATTCATTAA

SEQ ID NO: 3078 - protein, 88 aa, Streptococcus agalactiae
  VARIANT 83, 84, 85: Xaa = Any Amino Acid
MIVGHGIDLQEIEAITKAYERNQRFAERVLTEQELLLFKGISNPKRQMSFLTGRWAAKEAYSKALGTGIGKVNFHDIEILSDXXXFIH

SEQ ID NO: 3079 - protein, 1008 aa, Streptococcus agalactiae
ATGGGATTTCATCAGTTAAGTGATAAAATTAATATTGAAATATTGAAGCAGAAAACTAGCTTAGATCTAGAAGTTAGCCAAAAAAAATTAGCCAAAGAAGAAGAGTTAAAAAATATCATAAAAGGTGAGGATCAGCGGTTTCTAGTAATAGTAGGTCCTTGTTCTGCGGATAATCCAAAGGCGGTGCTAACTTATGCAAAGCGTTTAGCTAAATTGGAAGCTGCCTTTAAAGATAAAATGTTTTTGGTTATGAGAGTTTATACCGCTAAGCCAAGAACGAATGGTGATGGTTATAAAGGCTTAGTTCACCATTCTGACAAACTAGGAGTTTTTTTTCAAGCACGTAAGATGCACTATGACATCATTCGAGAGACTGGACTCCTGACAGCTGATGAATTACTTTATCCAGAGATGTTATCAGTGATGGATGATTTAGTTTCTTACTATGCTATTGGTGCGCGTTCAGTGGAAGATCAGGGACACCGTTTTATATCTTCAGGTATAGATGCACCAGTAGGTATGAAAAATCCAACGTCTGGTAATTTAAGAGTCATGTTTAATGCGGTCTATGCAGCACAAAATCAACAGGAATTATTCTATCAAAATAAGCAAGTTAGAACAGATGGTAATTTGCTGTCACATGTTATTTTGAGAGGATATCATAATGCCGACTATCGAAGTATCCCTAATTATCATTATGAAAACCTTTTAGAAACTATTACTCATTATGAAGAGACTGATTTGCAAAATCCCTTTATTGTTGTTGATACAAATCATGACAATTCAGGTAAGCAATTTTTAGAACAAATTCGCATTGTGAAATCAGTACTTGCAGACCGACAGTGGCATACTAAAATTAGAAACTATGTTCGTGGTTTTTTGATAGAATCTTATTTAGAAGATGGAAGACAAGATAAACCAGATGTTTTTGGTAAGTCTATCACAGATCCATGTCTAGGTTGGGATAAAACAGAAATGCTAATTAGGGATATTTACAATAGTTTGTAA

SEQ ID NO: 3080 - protein, 335 aa, Streptococcus agalactiae
MGFHQLSDKINIEILKQKTSLDLEVSQKKLAKEEELKNIIKGEDQRFLVIVGPCSADNPKAVLTYAKRLAKLEAAFKDKMFLVMRVYTAKPRTNGDGYKGLVHHSDKLGVFFQARKMHYDIIRETGLLTADELLYPEMLSVMDDLVSYYAIGARSVEDQGHRFISSGIDAPVGMKNPTSGNLRVMFNAVYAAQNQQELFYQNKQVRTDGNLLSHVILRGYHNADYRSIPNYHYENLLETITHYEETDLQNPFIVVDTNHDNSGKQFLEQIRIVKSVLADRQWHTKIRNYVRGFLIESYLEDGRQDKPDVFGKSITDPCLGWDKTEMLIRDIYNSL

SEQ ID NO: 3081 - protein, 2529 aa, Streptococcus agalactiae
ATGGCAAATATTCTACGCACTGTTATTGAAAATGACAAGGGTGAATTAAAAAAATTAGATAAAATAGCTAAGAAAGTTGACTCTTACGCAGATCATATGGCTGCGTTATCAGATGAAGCTTTACAAGCAAAAACTCCAGAATTTAAAGAACGTTATCAAAATGGTGAAACTTTAGATCAATTGTTACCGGAAGCGTTTGCGGTAGTTCGTGAAGCTTCTAAACGTGTATTAGGTTTATACCCATACCACGTCCAAATTATGGGTGGTATCGTTCTTCACCATGGTGATATTCCAGAAATGCGTACTGGTGAGGGAAAAACTTTAACAGCGACAATGCCTGTTTATCTAAATGCTATCTCAGGATTAGGTGTTCATGTTATTACTGTTAATGAGTATTTATCAACACGTGATGCGACCGAAATGGGTGAGGTTTATAGTTGGCTTGGATTATCTGTAGGGATTAACTTAGCAGCTAAGTCACCATTTGAAAAACGCGAAGCTTACAATTGTGATATCACATACTCAACTAACGCAGAAGTCGGATTTGACTACCTTCGAGACAATATGGTTGTTCGCCAAGAAGATATGGTGCAACGCCCACTCAACTATGCTTTGGTTGATGAGGTTGACTCTGTATTAATCGATGAAGCTAGGACGCCATTGATTGTTTCAGGTCCTGTAAGCTCTGAGATGAACCAACTGTATACACGTGCGGACATGTTTGTAAAAACGCTTAATAGCGATGATTATATCATTGATGTTCCAACAAAAACAATTGGTTTATCAGATACAGGTATTGACAAGGCTGAAAACTATTTCCATCTAAATAACTTGTATGATCTCGAAAATGTTGCCTTAACTCACTACATTGATAACGCTCTTCGAGCTAACTATATTATGTTGTTAAATATTGATTATGTGGTTAGTGAAGAACAAGAGATTTTAATTGTGGACCAATTTACCGGTCGTACGATGGAAGGACGTCGTTTCTCAGATGGCTTACACCAAGCTATTGAAGCAAAAGAGTCAGTGCCAATCCAAGAAGAATCAAAAACGAGCGCTTCAATTACTTACCAAAATATGTTCCGTATGTACCATAAATTAGCAGGAATGACTGGTACTGGTAAGACTGAGGAAGAAGAGTTTCGTGAAATTTATAATATGCGCGTTATTCCTATCCCAACAAATCGTCCTGTTCAACGTATAGATCATTCAGATCTACTTTATCCAACTCTTGACTCTAAATTTAGAGCGGTGGTAGCAGATGTCAAAGAACGTTATGAACAAGGACAACCTGTACTGGTTGGTACAGTAGCTGTTGAAACGTCAGACTTAATTTCTAGAAAATTAGTTGCTGCTGGAGTACCACATGAAGTTTTGAATGCTAAAAATCACTTTAAAGAAGCTCAAATCATTATGAATGCTGGGCAACGTGGTGCTGTTACAATCGCAACCAACATGGCTGGTCGTGGTACTGATATCAAGCTTGGTGAAGGGGTTCGTGAACTTGGTGGTTTATGTGTTATTGGTACAGAGCGTCATGAAAGCCGTCGTATTGATAACCAGCTTCGTGGTCGTTCGGGTCGTCAAGGAGATCCAGGTGAATCACAATTCTATCTTTCGTTAGAAGATGATTTGATGCGTCGCTTTGGTACAGATCGTATTAAAGTGGTTCTTGAGCGAATGAATTTAGCTGAAGATGATACAGTTATTAAATCAAAAATGTTGACACGACAAGTTGAATCAGCTCAACGCCGCGTTGAAGGTAATAACTATGACACACGTAAACAAGTCTTGCAATACGATGATGTTATGCGTGAACAACGTGAGATTATTTATGCTAACCGTAGAGAAGTGATTACTGCTGAGCGTGATTTAGGACCAGAGCTCAAAGGGATGATTAAACGTACGATTAAAAGAGCAGTTGATGCACATAGCAGAAGCGATAAAAATACTGCAGCAGAAGCTATTGTTAATTTTGCAAGATCGGCGTTATTAGATGAAGAAGCTATCACAGTTTCAGAACTTCGTGGTCTAAAAGAGGCTGAAATTAAAGAACTTCTTTATGAACGTGCCTTAGCTGTTTATGAGCAACAAATTGCTAAATTAAAAGATCCAGAAGCTATTATCGAATTCCAAAAAGTCTTAATCTTGATGGTAGTGGATAATCAATGGACAGAGCATATTGATGCCTTAGATCAATTACGTAACTCCGTTGGACTTCGTGGTTATGCTCAAAATAACCCAATCGTTGAGTATCAATCAGAAGGTTTCCGTATGTTCCAAGATATGATTGGTTCGATTGAGTTTGATGTGACACGTACATTGATGAAAGCTCAAATTCATGAACAAGAGCGTGAACGTGCTTCTCAACATGCTACGACAACAGCAGAGCAAAATATCTCGGCACAACATGTACCTATGAATAATGAATCACCAGAATACCAAGGGATTAAACGTAATGATAAATGTCCTTGTGGCTCTGGCATGAAGTTTAAAAATTGTCATGGTCTGAGATGTTTACAATAA

SEQ ID NO: 3082 - protein, 842 aa, Streptococcus agalactiae
MANILRTVIENDKGELKKLDKIAKKVDSYADHMAALSDEALQAKTPEFKERYQNGETLDQLLPEAFAVVREASKRVLGLYPYHVQIMGGIVLHHGDIPEMRTGEGKTLTATMPVYLNAISGLGVHVITVNEYLSTRDATEMGEVYSWLGLSVGINLAAKSPFEKREAYNCDITYSTNAEVGFDYLRDNMVVRQEDMVQRPLNYALVDEVDSVLIDEARTPLIVSGPVSSEMNQLYTRADMFVKTLNSDDYIIDVPTKTIGLSDTGIDKAENYFHLNNLYDLENVALTHYIDNALRANYIMLLNIDYVVSEEQEILIVDQFTGRTMEGRRFSDGLHQAIEAKESVPIQEESKTSASITYQNMFRMYHKLAGMTGTGKTEEEEFREIYNMRVIPIPTNRPVQRIDHSDLLYPTLDSKFRAVVADVKERYEQGQPVLVGTVAVETSDLISRKLVAAGVPHEVLNAKNHFKEAQIIMNAGQRGAVTIATNMAGRGTDIKLGEGVRELGGLCVIGTERHESRRIDNQLRGRSGRQGDPGESQFYLSLEDDLMRRFGTDRIKVVLERMNLAEDDTVIKSKMLTRQVESAQRRVEGNNYDTRKQVLQYDDVMREQREIIYANRREVITAERDLGPELKGMIKRTIKRAVDAHSRSDKNTAAEAIVNFARSALLDEEAITVSELRGLKEAEIKELLYERALAVYEQQIAKLKDPEAIIEFQKVLILMVVDNQWTEHIDALDQLRNSVGLRGYAQNNPIVEYQSEGFRMFQDMIGSIEFDVTRTLMKAQIHEQERERASQHATTTAEQNISAQHVPMNNESPEYQGIKRNDKCPCGSGMKFKNCHGLRCLQ

SEQ ID NO: 3083 - protein, 948 aa, Streptococcus agalactiae
ATGTCGGAACCATTATTTTTAGAAGCAAGCATGCACGATAAAATCTGGGGTGGAACAAAGTTAAGGGATGAATTTGGCTATGATATTCCAAGTGAAACAACAGGAGAATATTGGGCTATTTCAGCTCATCCTAACGGTGTCTCAAGAGTTAAGAATGGTCGCTTTAAAGGTTGTTTTTTAGATAAGCTGTATCAAGGTGAAAAAAGCTTATTTGGCAACCCTGATGATACTGTCTTTCCTTTACTAACTAAAATCTTAGATGCTAATGACTGGCTTAGTGTACAGGTTCATCCGGATGATGCTTATGCTCTTAAACATGAAGGTGAACTTGGTAAAACAGAATGTTGGTATATTATTTCTGCTGATGAAGGATCTGAAATTATCTATGGTCATAATGCTAAAACTAAAGAAGAACTTCGCCAAATGATTGAATCTGGAGATTGGGAACATCTTTTAACCCGAATTCCTGTTAAATCAGGGGATTTTTACTACGTTCCAAGTGGGACAATGCATGCTATAGGTAAAGGGATATTAATTTTAGAAACACAGCAATCTAGTGATACTACTTATCGTGTTTATGATTTTGATCGTCCAGATGCTTCAGGAAAATTACGTGATTTACACATTGAACAATCAATAGATGTTCTCACGATTGGTAAACCTGCCAATACTGTTCCTGCCAATATGAAGTTAAAACATCTATCTTCAACTTTATTAGTTTCAAATGATTTCTTTACAGTTTATAAATGGGAAATTTCTGGTGTTACCAACTTTAAACAATTTGCACCCTACCTTTTGGTTAGTGTCTTAGACGGAGCGGGTCACATTACAGTAGATAACAAAGTTTATACACTTAAAAAAGGTGACCACTTTATCTTGCCAAATGATGTTGTCAAATGGGATATTGATGGACAGTTAGAAATTATAGCAAGTCATGTTAAAAAATAA

SEQ ID NO: 3084 - protein, 315 aa, Streptococcus agalactiae
MSEPLFLEASMHDKIWGGTKLRDEFGYDIPSETTGEYWAISAHPNGVSRVKNGRFKGCFLDKLYQGEKSLFGNPDDTVFPLLTKILDANDWLSVQVHPDDAYALKHEGELGKTECWYIISADEGSEIIYGHNAKTKEELRQMIESGDWEHLLTRIPVKSGDFYYVPSGTMHAIGKGILILETQQSSDTTYRVYDFDRPDASGKLRDLHIEQSIDVLTIGKPANTVPANMKLKHLSSTLLVSNDFFTVYKWEISGVTNFKQFAPYLLVSVLDGAGHITVDNKVYTLKKGDHFILPNDVVKWDIDGQLEIIASHVKK

SEQ ID NO: 3085 - protein, 882 aa, Streptococcus agalactiae
ATGACAAAGTTATATGGTAGTATTGAAGCAGGTGGGACAAAGTTTGTTTGTGCAGTTGGTGATGAGGAATTAAAAGTTGTAGAAAAAATGCAATTTCCAACAACGACGCCTCAAGAAACGATTAAAAAGACTGTTGATTTCTTTAAAAGATTTGAAAAGAAGTTAGAGGCAGTTGCTATTGGTTCTTTTGGTCCCATTGATATTGATAAAAAATCAAAGACATACGGTTATATCACAACGACCCCAAAGTTGCATTGGGCTAATGTTGATTTACTCGGCTTAATTTCTAAAGATTTCAATGTTCCATTTTATTTCACAACAGATGTTAATAGCTCTGCCTATGGTGAAGTTATAGCTCGTAACAATATTGATTCACTTGTTTATTACACCATTGGTACGGGAATTGGTGCAGGAGCTATACAAAAGGGTGAATTTATAGGAGGAACTGGTCATACTGAAGCAGGTCATACTTATATGGCGATGCATCCGCAGGACCAAGCAAATGATTTTAAAGGTATCTGTCCGTTTCATAATAGCTGTTTAGAAGGTTTGGCATCTGGTCCAACTCTAGAAGCTAGGACTGGTATTCGTGGTGAATTGATTGAAGAAAATTCAATGGTTTGGGATGTTCAAGCCTATTATATTGCTCAGGCTGCAATACAAGCAACTGTATTATATCGTCCACAAGTCATTGTATTTGGTGGAGGCGTCATGGCACAAGAGCACATGTTAAGACGTGTTCGCCAGACATTTGCAACTTTATTAAATGGGTATTTACCAGTTCCCGATTTGTCTGATTATATTGTGACACCAGCTATAGAAGAAAATGGTTCTGCAACGTTAGGAAATTTTGCTTTAGCAAAGAAAATATCAAAAGGTTAA

SEQ ID NO: 3086 - protein, 293 aa, Streptococcus agalactiae
MTKLYGSIEAGGTKFVCAVGDEELKVVEKMQFPTTTPQETIKKTVDFFKRFEKKLEAVAIGSFGPIDIDKKSKTYGYITTTPKLHWANVDLLGLISKDFNVPFYFTTDVNSSAYGEVIARNNIDSLVYYTIGTGIGAGAIQKGEFIGGTGHTEAGHTYMAMHPQDQANDFKGICPFHNSCLEGLASGPTLEARTGIRGELIEENSMVWDVQAYYIAQAAIQATVLYRPQVIVFGGGVMAQEHMLRRVRQTFATLLNGYLPVPDLSDYIVTPAIEENGSATLGNFALAKKISKG

SEQ ID NO: 3087 - protein, 1920 aa, Streptococcus agalactiae
ATGGCTTCAAATACAGAAATTGCTAAACAAGTCATTAATGCGATTGGTGGTGCTAGTAATGTGCGTAGCGTAGCACACTGTGCCACTCGTCTTCGCGTTATGGTAAAAGATGAGACAGTCATTGATAAAAATACTGTTGAAAATATCGAAAAAGTTCAGGGAGCATTTTTCAATTCAGGTCAATATCAAATTATTTTTGGAACTGGTACTGTTAATAAGATTTATGATGAAGTAGTGGCTCAAGGTTTGCCAACTTCGTCAACCTCTGATCAAAAGGCAGAAGCAGCTAAACAAGGGAATGCTTTCCAACGAGCTATTCGTACTTTCGGTGATGTTTTTGTTCCATTGTTGCCAGCCATTGTTGCTACTGGTTTATTTATGGGGATTCGCGGTGCGATTAATAATGATACAGTTTTAGCTTTATTTGGGACGACTTCAAAAGCATTTTCAAGTTCTAATTTTTATACCTATACTGTCGTTTTGACTGACACGGCCTTTGCTTTTTTTCCTGCCTTGATTTCTTGGTCAGCTTTTAGAGTTTTTGGTGGAAATCCTGTTATCGGTCTCGTATTAGGATTGATGATGGTCAACTCTGCCCTTCCAAACGCTTGGGCAGTGGCCTCAGGTGATGCCCATCCCATAAAATTTTTCGGTTTTATTCCAGTAGTTGGTTATCAAAATTCAGTATTGCCGGCATTCTTTGTAGGTTTACTTGGTGCTAAACTTGAAAAATGGTTGCATAAGAAAATCCCAGATGTTCTTGATTTACTATTAGTGCCGTTCCTAACTTTTACAGTTATGTCAATTTTAGCACTTTTTGTCATTGGTCCTATTTTCCATTCAGTTGAAAACTATGTTTTAGCAGGGACAAAATTTGTCCTTAATTTACCTCTTGGCCTGTCAGGTCTTATTTTAGGTGGTGTTCATCAGATAATCGTTGTTACAGGTGTTCATCATATCTTTAATTTACTTGAAGCTCAGTTAATTGCTGCTGATGGGAAAGATCCATTTAATGCTATTATTACAGCTGCTATGACAGCACAAGCAGGTGCCACTTTGGCAGTTGGTGTTAAAACAAAAAATAAAAAATTAAAAGCCCTTGCTTTTCCGGCAGCGCTTTCAGCTGGACTTGGTATTACAGAACCGGCTATATTTGGAGTAAACTTACGTTTTGGTAAGCCATTTATTATGGGATTAATTGCAGGAGCAGCAGGTGGCTGGTTAGCTTCAATATTGAAATTAGCAGGAACTGGTTTTGGTATTACCATTATCCCAGGAACATTACTTTATTTAAATGGTCAAATTGTTAAGTACCTTATTATGGTAATTGGAACTACGTCTTTGGCTTTTGTATTAACTTATATGTTTGGATATGAAGATAAAGATGAAAAAGCAGTAGCTGAAGTTAGTCCTTTGGTTGAAGAAACAGATGACGATCCAACAATTACTCAAACTAGCCAATTAAGGGCAGAAACGATTGTTAGCCCTCTTGATGGACAGGTTATTGCTCTTGATACAGTAAGTGACCCAGTTTTTTCATCAGGTATTATGGGAGATGGCCTTGCTATTAAACCAAGAGGTAATACAATTTACTCACCTGTTGATGGTTTTGTCCAAATTGCTTTTGAAACAGGTCATGCTTACGGTATCAAATCAGATAAAGGTGCAGAAATTTTGATTCATATAGGTATTGATACTGTCACCATGAATGGCACAGGGTTTACTTCTAAAGTCAAGGCAGACCAAAAAGTGAAAAAAGGTGATATTCTTGGCACCTTTGATTCAGCCAAGATTGCAGAAGCAGGTCTGGATAATACAGCTATGATTATTGTGACTAATACAGCTGATTTTGCTGATGTTGTACCATTGGTAAAAGAGGGTGTTGTTACTACAGGTGACATGATTATTGATGTTAAGTGA

SEQ ID NO: 3088 - protein, 639 aa, Streptococcus agalactiae
MASNTEIAKQVINAIGGASNVRSVAHCATRLRVMVKDETVIDKNTVENIEKVQGAFFNSGQYQIIFGTGTVNKIYDEVVAQGLPTSSTSDQKAEAAKQGNAFQRAIRTFGDVFVPLLPAIVATGLFMGIRGAINNDTVLALFGTTSKAFSSSNFYTYTVVLTDTAFAFFPALISWSAFRVFGGNPVIGLVLGLMMVNSALPNAWAVASGDAHPIKFFGFIPVVGYQNSVLPAFFVGLLGAKLEKWLHKKIPDVLDLLLVPFLTFTVMSILALFVIGPIFHSVENYVLAGTKFVLNLPLGLSGLILGGVHQIIVVTGVHHIFNLLEAQLIAADGKDPFNAIITAAMTAQAGATLAVGVKTKNKKLKALAFPAALSAGLGITEPAIFGVNLRFGKPFIMGLIAGAAGGWLASILKLAGTGFGITIIPGTLLYLNGQIVKYLIMVIGTTSLAFVLTYMFGYEDKDEKAVAEVSPLVEETDDDPTITQTSQLRAETIVSPLDGQVIALDTVSDPVFSSGIMGDGLAIKPRGNTIYSPVDGFVQIAFETGHAYGIKSDKGAEILIHIGIDTVTMNGTGFTSKVKADQKVKKGDILGTFDSAKIAEAGLDNTAMIIVTNTADFADVVPLVKEGVVTTGDMIIDVK

SEQ ID NO: 3089 - protein, 1440 aa, Streptococcus agalactiae
ATGAATTTACCCACTGAAATCCGCTATCGTCCTTATGATGAATGGACTGAAGAAGATAAGGAAAATATTGTAAAGAATGTCTCAAAATCCCCTTGGAGAGCAACTTATCACTTAGAAGCTAAAACAGGGCTTTTAAATGACCCAAATGGCTTCTCTTACTTTAATGGAAAATTCCATCTTTTTTACCAAAATTGGCCCTTTGGAGCTGCACATGGTTTAAAACAATGGGTACATACAGAATCAGATGATTTAGTTCATTTCAAAGAAACAGGAATCAAGCTTAAACCTGACCATGTCAATGATAGCCATGGTGCATACTCCGGTTCTGCATTAGCCATTGACGATAAGCTTTTTCTTTTTTATACTGGTAATGTCCGTGACATGAAATGGAACCGTGACCCCCGCCAAATTGGAGCATGGATGACAAATGATGGCAAGATTACAAAATTTGATAAAGTCCTTATTTCACAACCAAATGATGTCACTGAGCATTTTCGTGACCCTCAGATTTTCAATTATGATAATCAATTCTATGCTGTTATCGGGGCGCAAAATAGTAAAAAATGCGGATTCATTAAATTATATAAAGCACTTAATAATGACATCCATCATTGGGAGTTTGTGGGAGATTTAGATTTTGGTGGTACTGGATCTGAGTATATGATTGAATGTCCAAATATTATTTTTGTCAAAGGAAAACCTGTATTACTTTATAGTCCTCAAGGACTAGATAAAAACGAATTGGACTACCAAAACATTTATCCAAATACCTACAAAATCGGACAATATTTCGATGCTAACTCATCTAAGATAGTTGAACCATCCCCTATCTATAATTTAGATTATGGTTTTGAAGCCTATGCTACTCAAGGATTTAACACTTCTGATGGTCGTGCCTTTATCGTGAGTTGGATAGGCTTGCCAGATATTGATTATCCTAGCGATCAATTTGATTATCAAGGAGCTATGAGTTTAGTTAAAGAGTTAAGCATAAAAAATGGGAACCTTTATCAATATCCCGTTCCTGCTATGAAAAATCTTCGTCAACATCAAGCAGAATTTAAAACACAACTTCAAACTAACAACACCTATGAATTAGAATTACTGGTTCCTAGAAATGATCTTTCTTCATTTGTTCTCTTTGCTAATCCGAAAGGACAAGGACTATCCATTACTATTGATACTGTAAAGGGGAAAGTTATCATTGACCGCTCACAAGCCGGACAGCAGTACGCCACAGAATTTGGTACTAGTCGCCAGTGTGACATTCCAAAAGATGCTACTAGTATCAATATTTTTATCGATAAGTCCATCTTTGAAATCTTTATAAATAAAGGAGAAAAAGTATTTACGGGACGAGTCTTTCCAGATGCAGAACAATCAGGGATTCAACTAAAAGAAGGGCACGTTCATGGTAAATATTTTGAATTAAAATATTAA

SEQ ID NO: 3090 - protein, 479 aa, Streptococcus agalactiae
MNLPTEIRYRPYDEWTEEDKENIVKNVSKSPWRATYHLEAKTGLLNDPNGFSYFNGKFHLFYQNWPFGAAHGLKQWVHTESDDLVHFKETGIKLKPDHVNDSHGAYSGSALAIDDKLFLFYTGNVRDMKWNRDPRQIGAWMTNDGKITKFDKVLISQPNDVTEHFRDPQIFNYDNQFYAVIGAQNSKKCGFIKLYKALNNDIHHWEFVGDLDFGGTGSEYMIECPNIIFVKGKPVLLYSPQGLDKNELDYQNIYPNTYKIGQYFDANSSKIVEPSPIYNLDYGFEAYATQGFNTSDGRAFIVSWIGLPDIDYPSDQFDYQGAMSLVKELSIKNGNLYQYPVPAMKNLRQHQAEFKTQLQTNNTYELELLVPRNDLSSFVLFANPKGQGLSITIDTVKGKVIIDRSQAGQQYATEFGTSRQCDIPKDATSINIFIDKSIFEIFINKGEKVFTGRVFPDAEQSGIQLKEGHVHGKYFELKY

SEQ ID NO: 3091 - protein, 963 aa, Streptococcus agalactiae
ATGGTTGCAAAATTAACAGATGTTGCTGCACTTGCCGGTGTTAGCCCAACGACTGTATCACGCGTTATTAACAAAAAAGGCTATTTATCTCAAAAAACAGTCACCAAAGTCAATGAAGCCATGAGAACCCTTGGTTATAAACCTAATAATTTAGCACGTAGCTTACAGGGAAAGTCCGCTAAATTAATTGGACTCATTTTCCCCAACATCCGTAACATTTTTTACGCTGAATTAATTGAACACCTTGAAATTGAGTTGTTTAAGCATGGTTATAAAACTATCTTATGTAATAGTGAAAAGGATCCTATCAAAGAAAAAGAATACCTCGAAATGCTAGGAGCAAATCAAGTAGACGGTATCATTTCAAGTAGTCACAACCTAGGAATTGATGATTACGAGAAAGTTGAGGCTCCCATAGTAGCATTCGATAGAAATTTAGCTCCACACATCCCTATCGTCTCATCTGATAATTTCTTTGGAGGAAAAATGGCTGCTCAAACCCTTAAAAAACATGGCTGTCAAAAGATGATTATGATTACAGGGAATGATAATTCAGATTCTCCTACTGGACTTAGGCGGCTAGGTTTTTCCTATGAATCAAAGGAATCCAAAGTTATCACAGTCACAAATGGGCTATCTAACATGAGACGTGAGATGGAATTAAAATCAATTATCTCGACTCACAAACCAGATGGTATTTTTACATCAGACGACTTAACTGCTTTATTAGTAATCAAACTTATCAGCCAACTAGGGTTGTCCATTCCAGAAGATATCAAAGTGATTGGATATGATGGTACAAGTTTCATTCAAGATTACGTCCCACATCTAACCACTATTAAACAACCTATTCGAGAAATTGCGCAATTGATGGTTGAGATACTCCTAGCTAAGATTGAGGGGCAAAAGACAAATAAGGATTATATTTTACCAGTCAGTCTCATCCCTGGTAGTAGCGTTTAG

SEQ ID NO: 3092 - protein, 320 aa, Streptococcus agalactiae
MVAKLTDVAALAGVSPTTVSRVINKKGYLSQKTVTKVNEAMRTLGYKPNNLARSLQGKSAKLIGLIFPNIRNIFYAELIEHLEIELFKHGYKTILCNSEKDPIKEKEYLEMLGANQVDGIISSSHNLGIDDYEKVEAPIVAFDRNLAPHIPIVSSDNFFGGKMAAQTLKKHGCQKMIMITGNDNSDSPTGLRRLGFSYESKESKVITVTNGLSNMRREMELKSIISTHKPDGIFTSDDLTALLVIKLISQLGLSIPEDIKVIGYDGTSFIQDYVPHLTTIKQPIREIAQLMVEILLAKIEGQKTNKDYILPVSLIPGSSV

SEQ ID NO: 3093 - protein, 435 aa, Streptococcus agalactiae
ATGACTAGTGTATTTAAAGATTCAAGACGTGATTTACGTGAACGTGCTTTTCAAACACTATTTAGCTTAGAAACTGGTGGAGAGTTTATTGATGCGGCTCACTTTGCTTATGGTTATGATAAAACAGTATCTGAAGACAAAGTTTTAGAGGTTCCAATCTTTTTACTTAATCTTGTTAATGGTGTTGTAGATCACAAAGATGAATTAGATACTTTGATTTCTAGTCACTTAAAATCAGGATGGAGCTTAGAACGTCTAACATTGGTTGATAAATCTCTCTTACGCTTAGGCCTCTATGAAATTAAATATTTTGATGAAACGCCTGATCGTGTAGCTCTAAATGAGATTATCGAGATTGCTAAAAAATATTCAGATGAGACGTCAGCAAAATTTGTCAATGGTTTATTAAGTCAATTTATAACAAATGAAAATTAA

SEQ ID NO: 3094 - protein, 144 aa, Streptococcus agalactiae
MTSVFKDSRRDLRERAFQTLFSLETGGEFIDAAHFAYGYDKTVSEDKVLEVPIFLLNLVNGVVDHKDELDTLISSHLKSGWSLERLTLVDKSLLRLGLYEIKYFDETPDRVALNEIIEIAKKYSDETSAKFVNGLLSQFITNEN

SEQ ID NO: 3095 - protein, 390 aa, Streptococcus agalactiae
ATGACAACTGAAAATCTTGGAGAAATTGTCATTTCACCACGTGTACTTGAGGTAATTACAGGTATTGCTGCAACTAAAGTTGATGGTGTTCATTCGTTACGTAACAAAGCGGTAACGGATAGCCTTAGTAAGAAATCTCTAGGTAGAGGTGTCTACCTTAAAAATGAAGAAGATGATACAGTAGCTGCAGATATTTATGTTTACTTGCAGTATGGTGTAAATGTACCAGCAGTTTCAATTGCTATTCAACAAGCTGTCAAAACAGCTGTATATGACATGGCAGAAGTAAAAATTTCTTCGGTCAATATCCATGTTGAAGGTATTGTTCCAGAGAAAACACCAAAACCAGACTTGAAGTCATTGTTTGATGAGGATTTCTTAGATGACTAG

SEQ ID NO: 3096 - protein, 129 aa, Streptococcus agalactiae
MTTENLGEIVISPRVLEVITGIAATKVDGVHSLRNKAVTDSLSKKSLGRGVYLKNEEDDTVAADIYVYLQYGVNVPAVSIAIQQAVKTAVYDMAEVKISSVNIHVEGIVPEKTPKPDLKSLFDEDFLDD

SEQ ID NO: 3097 - protein, 561 aa, Streptococcus agalactiae
ATGATTGAAGCAAGTAAGCTTAAAGCAGGCATGACTTTTGAAACGGCTGATGGGAAATTAATCCGTGTTCTTGAAGCTAGCCACCACAAACCAGGTAAAGGTAACACAATCATGCGTATGAAATTGCGTGATGTTCGTACTGGTTCAACTTTTGATACAAGTTACCGTCCTGAAGAAAAATTTGAGCAAGCTATTATTGAAACTGTACCTGCTCAATACCTTTATAAGATGGATGATACAGCTTACTTCATGAATAATGAAACTTACGATCAATATGAAATTCCAACTGTTAACATTGAAAATGAATTACTCTACATTCTTGAAAACTCAGAAGTAAAAATTCAATTCTATGGAACAGAAGTTATTGGTGTTCAAATTCCAACAACTGTTGAATTGACAGTTGCTGAAACTCAACCATCAATCAAAGGTGCTACTGTAACTGGTTCAGGAAAACCTGCAACTATGGAAACAGGACTTGTTGTTAACGTTCCAGATTTTATTGAAGCTGGACAAAAGTTAGTAATCAATACAGCAGAAGGAACTTACGTTTCACGCGCCTAA

SEQ ID NO: 3098 - protein, 186 aa, Streptococcus agalactiae
MIEASKLKAGMTFETADGKLIRVLEASHHKPGKGNTIMRMKLRDVRTGSTFDTSYRPEEKFEQAIIETVPAQYLYKMDDTAYFMNNETYDQYEIPTVNIENELLYILENSEVKIQFYGTEVIGVQIPTTVELTVAETQPSIKGATVTGSGKPATMETGLVVNVPDFIEAGQKLVINTAEGTYVSRA

SEQ ID NO: 3099 - protein, 126 aa, Streptococcus agalactiae
TTGAAAACGGAAATAGAAACAAATAATCTTATTAATTTAGGATGGTTTCATGATAATGCTGTTTATTATGATATGAAAACGAAAAAATTATATAAATCTAATCTAAAAAAAATAGCACAGGTATAA

SEQ ID NO: 3100 - protein, 41 aa, Streptococcus agalactiae
MKTEIETNNLINLGWFHDNAVYYDMKTKKLYKSNLKKIAQV

SEQ ID NO: 3101 - protein, 165 aa, Streptococcus agalactiae
TTGTTGCTGACCTCAATAGATGTAAATCCAGTTTATGCTAATATGGCATTTGATTGGGTGTATGATAACTATAAAGATGATATCATCAATTATGGACAAGAAACTATCAAAAATATTGGTAAATCCATTTCAGCTAATAATAGTTTAGGTACTTTATATAATTAA

SEQ ID NO: 3102 - protein, 54 aa, Streptococcus agalactiae
MLLTSIDVNPVYANMAFDWVYDNYKDDIINYGQETIKNIGKSISANNSLGTLYN

SEQ ID NO: 3103 - protein, 246 aa, Streptococcus agalactiae
ATGAATAGACTTTCTTGGGAAGATTATTTTATGGCAAATGCAGAGTTGATTTCTAAACGTTCTACCTGTGACCGTGCTTTTGTTGGAGCTGTTTTAGTCAAAAATAATCGCATCATTGCTACAGGTTATAACGGAGGAGTCTCTGAGACAGATAACTGTAACGAAGTGGGACATTATATGGAAGATGGTCACTGTATTAGGACTGTTCATGCTGAGATGAATGNNNNNCATTCATTCATTAATTAA

SEQ ID NO: 3104 - protein, 81 aa, Streptococcus agalactiae
  VARIANT 75, 76: Xaa = Any Amino Acid
MNRLSWEDYFMANAELISKRSTCDRAFVGAVLVKNNRIIATGYNGGVSETDNCNEVGHYMEDGHCIRTVHAEMNXXHSFIN

SEQ ID NO: 3105 - protein, 615 aa, Streptococcus agalactiae
GTGTTGGATTTTATAAAGCCTGATCGAACAACTGAATTGCAAGTTGCTAATTTTTTAGACTTTCGCATGAGAGAATTAGGAGCAACTGGTCCTTCATTTGATTTTATTGTAGCATCTGGATATCGATCAGCGATGCCACATGGGGTTGCGAGTCAGAAGACTATTCAATCGGGAGAAACTCTGACTTTAGATTTTGGTTGTTACTATCAGCACTATGTTAGTGATATGACACGTACGATTCATATCGGTCATGTCACTGATCAGGAACGCGAGATTTACGATATCGTTTTGAAAAGTAATCAAGCTATTATTGGTAATGTAAAATCAGGAATGAAGCGTTGTGATTATGATTACTTGGCGCGACAAGTCATTGAAAATTCTGGATACGGTAATCATTTTACCCACGGTATAGGGCATGGTATGGGGCTTGATGTTCATGAAATTCCTTATTTTGGTAAGTCAGAGGGAGTGATTGCATCTGGGATGGTAGTGACTGACGAGCCAGGAATATATCTCGATAATAAATACGGTGTTCGTATTGAAGATGATTTATTAATAACGGAAACAGGTTGCGAAGTATTGACATCTGCACCTAAAGAATTAATTGTACTTTAA

SEQ ID NO: 3106 - protein, 204 aa, Streptococcus agalactiae
MLDFIKPDRTTELQVANFLDFRMRELGATGPSFDFIVASGYRSAMPHGVASQKTIQSGETLTLDFGCYYQHYVSDMTRTIHIGHVTDQEREIYDIVLKSNQAIIGNVKSGMKRCDYDYLARQVIENSGYGNHFTHGIGHGMGLDVHEIPYFGKSEGVIASGMVVTDEPGIYLDNKYGVRIEDDLLITETGCEVLTSAPKELIVL

SEQ ID NO: 3107 - protein, 402 aa, Streptococcus agalactiae
ATGGGTTTTGAACAACGTCTAACTAGATGTCAAACAGCAATTTCACAATTATCATGTGACGCACTCTTAATAACAAATTTAACAAATATTTTTTATTTGACTGGTTTTTCAGGAACTAATGCAACGGTACTCATTAGTCCAAAACACCGGATTTTTGTTACAGATTCACGATATGCCTTGATAGCAAAGAATACTGTAAGAGAGTTTGATATTATCATTAGCAGAGAACCACTTGCGGCTATTTTGAAAATTATTCGCGATGACGCATTGATAGCGATTGGTTTTGAAACTGATATTTCTTATCATATGTACAAACATATGGTGGAAGTTTTTGAAGATTATCGCTTGATAGAAGCTCCATCTGTTGTTGAAAAGTTACGTATGATTAAAGATGTAACATAA

SEQ ID NO: 3108 - protein, 133 aa, Streptococcus agalactiae
MGFEQRLTRCQTAISQLSCDALLITNLTNIFYLTGFSGTNATVLISPKHRIFVTDSRYALIAKNTVREFDIIISREPLAAILKIIRDDALIAIGFETDISYHMYKHMVEVFEDYRLIEAPSVVEKLRMIKDVT

SEQ ID NO: 3109 - protein, 605 aa, Streptococcus agalactiae
TTGCCTCAGTTTGGATGTTAACGGATCACTTTATTAATCATACAGGTATGACTATTGAAACTAAGACAAAGACACGTGAGATTTATAGTGCGGGTGATAGTAAGGCTCCATTTGGTCTCATGATTTATAAAGAGATTGGTACTCATTCGAGTAATAATGTTTTAGTTTATCGAACAGATTTAAATCAAAAAGAAGCAAAAGCTCACTTTGTTCCAAATACAAAAGAAGTGACAAGTGCTGTGAAAAAATCTGCTAGCTACCAATTAGCTGATGTGAAAAAAGCCACAGTAACAACAAAGACTAAACGTTATGTGTGGAAAGATAGTCTTTCGAAACTACTTTATGGCTTTGCAGGTGAAAATGGAGAATTGATTTCTCAGAAATCAGTTGCTAAAATACCACGAAAAACTTGGCTAGTTTTGACTAAAGAGCAGTCCGAACACTTAGAATCGGCTGCGGCTAAACTAAAAGAACAAATGACTTCGCAAGCAAAAGTAAACCCAGTGAAAGCTATGGAGATAAAGACATTAGCTAAGACAAATCCAGAAGCTTATGCTGAGATGCAAGTTAAAGCATTAAAAGAAGCTCTTAATATAAAAGAATAG

SEQ ID NO: 3110 - protein, 201 aa, Streptococcus agalactiae
MPSVWMLTDHFINHTGMTIETKTKTREIYSAGDSKAPFGLMIYKEIGTHSSNNVLVYRTDLNQKEAKAHFVPNTKEVTSAVKKSASYQLADVKKATVTTKTKRYVWKDSLSKLLYGFAGENGELISQKSVAKIPRKTWLVLTKEQSEHLESAAAKLKEQMTSQAKVNPVKAMEIKTLAKTNPEAYAEMQVKALKEALNIKE

SEQ ID NO: 3111 - DNA, 1500 bp, Streptococcus agalactiae
atgactacaaaagcaaaacatgatattcatggcaaaccatataatcgtacagccatgatcaccttattgttgattgctacatttgcaggggtattaaatcagacaagtttgggaacggctatcccaactttgatgaatagctttaacatttcgttgtcaacggctcaacaagcaacaacatggtttttattagcgaatgggattatgattcctgtttcagcttatttagcgacacgtttttcaacaaaatggttgtatgtgacatcctacgttgttttacttattggactgttaatgacgacgttagcacctacatctaactggaacctttttttagtaggacgtattattcaagcgatttctgtagggatttctatgcctttgatgcaggttgttatggtgaatgtttttcctccagagcagcgtggtgccgctatgggacttaatggtttggtggttggtcttgccccagctattgggcctacattagcagggtggattttaaaacaagaatttcattttgcagggcatgatttaacatggcgtgcaattttccttcttcctttactaattttaacggtcactacaattttatccccctttgttctaaaagatgtggttgataataagtcagttaaattggaagtgccttcccttatcctttcaataattggctttggtagctttttgtggggcttcacaaatgtggcaacttatggatggggagatattggatatgttatttctcctattatggttggtattatttttatcgccttattcattcatcgtcaattaaaactagaaacaccgttcttagatatccgtgttttcaaaaataaacaattctcagtaacaacagcagctattgcactttcaatgatggcgatgatgggtgttgaaatgatgctaccgctttacttgcaaaatgttcatggtctctctgcacttgattctggtttagctttattaccaggtgccttgatgatggggatagttagtccaatttctggagctgtatatgataaagttggtgcaagacgtatggctatgattggttttaccatactaggtgtagcgacgttaccttttgttttcttaacgactacaacaccagatcattttattaccctcttatatgcagtacgtatgtttggtattgctatggttatgatgccattgacagcaagtgcgatgagcgcacttccaccacatgaggccgcacatggaacagcagctaataatactgctcgtcaaattgcttcagcagttgtagttgcattgctttcaagtgttgctcaaaatattatcaccaacaataaaccatcaaaagatttgctaacaatgaatcctttaaaatatgcaaatcagatgttgaatgctagtcttgatggcttccatgtttcttttgccattggttttgtatttgcggttcttggtttactggtatctcttttcctgagaaaagggaaaattattgagacggaaaaggaggtatag

SEQ ID NO: 3112 - protein, 499 aa, Streptococcus agalactiae
MTTKAKHDIHGKPYNRTAMITLLLIATFAGVLNQTSLGTAIPTLMNSFNISLSTAQQATTWFLLANGIMIPVSAYLATRFSTKWLYVTSYVVLLIGLLMTTLAPTSNWNLFLVGRIIQAISVGISMPLMQVVMVNVFPPEQRGAAMGLNGLVVGLAPAIGPTLAGWILKQEFHFAGHDLTWRAIFLLPLLILTVTTILSPFVLKDVVDNKSVKLEVPSLILSIIGFGSFLWGFTNVATYGWGDIGYVISPIMVGIIFIALFIHRQLKLETPFLDIRVFKNKQFSVTTAAIALSMMAMMGVEMMLPLYLQNVHGLSALDSGLALLPGALMMGIVSPISGAVYDKVGARRMAMIGFTILGVATLPFVFLTTTTPDHFITLLYAVRMFGIAMVMMPLTASAMSALPPHEAAHGTAANNTARQIASAVVVALLSSVAQNIITNNKPSKDLLTMNPLKYANQMLNASLDGFHVSFAIGFVFAVLGLLVSLFLRKGKIIETEKEV

SEQ ID NO: 3113 - DNA, 2814 bp, Streptococcus agalactiae
atgataagaggagcaagagctcacaatttaaaaaatataagtgtcgacattccacgagacaagttagttgtcgttacgggactatcaggatcaggtaagtctagtttggcctttgacactatctatgcagaaggacaacgtcgttacgttgaaagtctttctgcttacgcgcgccaatttttgggaaatatggaaaagcctgatgtagattctattgatggccttagtccagctatttctattgatcagaaaacaacaagtaagaatcctcgctctactgttgggactgtaacagaaattaacgattatttacgtttgctttatgctcgtgttggaaccccatattgtatcaatggtcacggagccatcacagcatcttctgtagagcaaattgtggataaggtactagcgcttccagagcgaacaaagatgcaaattttagccccaattatacgtcgaaaaaaaggacaacacaaatcaacatttgagaaaatacaaaaagatggttacgttcgtgttcgtattgatggtgatattcacgatgttactgaggtgcctgaattatcaaaaagtaagatgcacaatattgatattgtagtagatcgattaattaataaagagggcattcgttcccgcttatttgattccgttgaagcggctctacgtttgtcggatggttatgtcgttattgatacaatggatggcaatgagttattgttttcagaacattattcttgtcctgaatgtggttttactgttcctgaattagagccacgccttttttcttttaatgctccctttggttcttgtccgacctgtgatggcttaggaattaagttagaagtagatatagatttggttattccagatagaagtaagacccttagagaaggggccttagttccttggaatccaatttcatcaaattattatccaacgatgctagagcaagctatgactcaatttggtgttgatatggatacgccatttgaaaaattaagcaaggcggagcaggacctagccctatatggttcaggcgaacgagagttccatttccattatattaacgattttggaggcgagagaaatattgatttgccttttgaaggggttgtcaataatattaatcgtcgttaccatgaaactaatagcgattacacacgcaatgttatgcgagaatatatgaacgagctaaaatgtaacacttgtcatggctatcgtctcaatgatcaagcactttgcgtaagagttgggggagaagaaggtcttaatattgggcaagtctcagatttatcgatagcagaccatttagaacttttagaaacattgcgtttatcttcaaatgaacaattaattgctcgaccaattatcaaagaaatccatgaccgtctaagtttcttaaataatgttggacttaattatttaaatctgtcacgttctgcaggaacactttccgggggcgagagtcaacgtattcgtttggctactcaaattgggtctaatttatcaggtgtcctttatgtacttgatgagccgtccattggacttcatcagcgagacaatgaccgtttgattgatagtcttaagaaaatgcgtgatttgggtaatacgcttattgttgttgaacatgatgaagatacaatgatggcagctgattggttaatcgatgtgggacctggcgctggtgcgtttggtggtgagattgtggcctctggtacaccgaagcaagtagctaaaaatactaaatctattacaggacaatatttgtcaggtaagaaagtgattcctgtgccatctgaacgaagagtaggtaatggtcgctttttagaaatcaaaggtgcggcagaaaacaacctacaaaatttagatgtcaagttccctctcggtaaatttattgccgtaactggtgtctcaggttctggaaaatcaaccttaattaatagtattttgaaaaaagctgttgcgcagaagcttaaccgtaactcagataaaccaggtaaatatgtttctttagaaggcattgaatatgttgatcgattgattgatattgatcaaagtccaattggtcggactccacgttctaatcccgcaacctatacaggtgtttttgatgatattcgtgatctttttgctcaaactaatgaggcaaagattcgaggttataaaaaaggacgcttctcatttaacgtcaaaggtggacgttgtgagtcttgttctggcgatggtatcatcaaaattgagatgcattttttaccagatgtctacgttccttgtgaagtatgccacggcacgcgctataatagtgagactctggaagtacattacaaagaaaaaaatattgcacaaattcttgatatgacagtgaatgatgcagttacattttttgcagctattcctaaaattgctcgtaagttacagactattaaggatgttggtttgggatatgtcactttggggcaaccagctacaaccttatcaggaggagaagctcagcgaatgaagctggcaagtgaattacataagcgttcgacaggtaagagtctttacatattagacgaaccaacaacggggcttcatgcagatgatattgctcgtttacttaaggttttggatcgttttgtagatgatggtaatacagtgcttgttattgagcataaccttgatgttattaaaactgctgaccacattattgatcttggccctgaaggaggtattggtggcggacaaattgtagctatcggaacaccagaagaagttgctgaaaatcctaaatcctatacaggatattatttaaaagagaagttagcaagatag

SEQ ID NO: 3114 - protein, 937 aa, Streptococcus agalactiae
MIRGARAHNLKNISVDIPRDKLVVVTGLSGSGKSSLAFDTIYAEGQRRYVESLSAYARQFLGNMEKPDVDSIDGLSPAISIDQKTTSKNPRSTVGTVTEINDYLRLLYARVGTPYCINGHGAITASSVEQIVDKVLALPERTKMQILAPIIRRKKGQHKSTFEKIQKDGYVRVRIDGDIHDVTEVPELSKSKMHNIDIVVDRLINKEGIRSRLFDSVEAALRLSDGYVVIDTMDGNELLFSEHYSCPECGFTVPELEPRLFSFNAPFGSCPTCDGLGIKLEVDIDLVIPDRSKTLREGALVPWNPISSNYYPTMLEQAMTQFGVDMDTPFEKLSKAEQDLALYGSGEREFHFHYINDFGGERNIDLPFEGVVNNINRRYHETNSDYTRNVMREYMNELKCNTCHGYRLNDQALCVRVGGEEGLNIGQVSDLSIADHLELLETLRLSSNEQLIARPIIKEIHDRLSFLNNVGLNYLNLSRSAGTLSGGESQRIRLATQIGSNLSGVLYVLDEPSIGLHQRDNDRLIDSLKKMRDLGNTLIVVEHDEDTMMAADWLIDVGPGAGAFGGEIVASGTPKQVAKNTKSITGQYLSGKKVIPVPSERRVGNGRFLEIKGAAENNLQNLDVKFPLGKFIAVTGVSGSGKSTLINSILKKAVAQKLNRNSDKPGKYVSLEGIEYVDRLIDIDQSPIGRTPRSNPATYTGVFDDIRDLFAQTNEAKIRGYKKGRFSFNVKGGRCESCSGDGIIKIEMHFLPDVYVPCEVCHGTRYNSETLEVHYKEKNIAQILDMTVNDAVTFFAAIPKIARKLQTIKDVGLGYVTLGQPATTLSGGEAQRMKLASELHKRSTGKSLYILDEPTTGLHADDIARLLKVLDRFVDDGNTVLVIEHNLDVIKTADHIIDLGPEGGIGGGQIVAIGTPEEVAENPKSYTGYYLKEKLAR

SEQ ID NO: 3115 - DNA, 672 bp, Streptococcus agalactiae
atgactttacaagacttaactaaaaagaatcaagagtttgttcatattgcaactaatcaacttttagctgatggaaaatcagatgcagaaatcaaagctattttagaagaacatctcccagagattatagataatcagaaaaaaggaattaccgcacgctcactcttaggagcaccaactacttgggcagcctcattcactgagcgacctgaggataaagctagagtatctgtacaaaaaaataccaatccttggttgatgtggttagatacttccttactatttcttggcttagtaactgctttgaatggtttaatgttgctatttggtcaatctaatgtcaatacagggcttatttcaattttaactcttggttttggtggtggtgcggccatgtacgttacttattactatatttatcgccatatgggtaaaccaaaatctgaaagaccaggctggcttaaatctttcgcagtactggcactagttatgttagtttggtttgccttatttgcagtagtacctcttctacctgcaactattaatcctaaacttcctgaggttgttttgtttattattgctttagcatcgtttggtttgcgcttttatttacaacgtaaatataatattcaaagctcaatggcaccagtggcaccacaacaaagaagataa

SEQ ID NO: 3116 - protein, 223 aa, Streptococcus agalactiae
MTLQDLTKKNQEFVHIATNQLLADGKSDAEIKAILEEHLPEIIDNQKKGITARSLLGAPTTWAASFTERPEDKARVSVQKNTNPWLMWLDTSLLFLGLVTALNGLMLLFGQSNVNTGLISILTLGFGGGAAMYVTYYYIYRHMGKPKSERPGWLKSFAVLALVMLVWFALFAVVPLLPATINPKLPEVVLFIIALASFGLRFYLQRKYNIQSSMAPVAPQQRR

SEQ ID NO: 3117 - DNA, 945 bp, Streptococcus agalactiae
atgaagcaaatgtttctttcaacggcaattgaatttaaagaaattgaaacattcgagccaggtgcttggataaatctggttaatccctcccaggaagaatccgaacaagtagctgatcaatttggtattgatattgatgatttacgtgctcccctcgatgtggaagaaacttcccgtatctcggttgaagatgattatactttagttattgttgacgttcctacctatgaagaacgcaataacaaaagttattatatgactattcctatgggcattatcgttactgacaacgctgttattactacttgcctagaacatttgacgctgtttgatcacttttatagacgacgtgtcaaaaatttttatacctttatgaagacacgttttgttttccaattgctttatcgcaatgccgaattatacttacaggctttgcgtactatcgataggcagagcgataaaattgaagcacaactagagagtgcaactcgaaatgagcaattgatcgatatgatggaattggaaaaatctattgtctatctaaaggcctctttaaaatttaatgagcgaatcgtcaaaaaattgaccagtagtaccagtagtttaaaaaaatacattgaagatgaagatctgcttgaagatacattgatcgaaactcagcaggctattgaaatggcaaatatctatgaaaatgtcttaaatgccatgacagaaacgactgcttcaatcatcggtaataatcagaataccattatgaaaaccttagccctagtaactatgacattggatattccaacggttattttttcggcgtatgggatgaactttcaaaataattggatgcctttgaatggtctcgcacatggctttatctatgttgktcttttggcctttttgatgagttcatttgttgtattttattttattcgtaaaaaatggttttaa

SEQ ID NO: 3118 - protein, 314 aa, Streptococcus agalactiae
  VARIANT 294: Xaa = Any Amino Acid
MKQMFLSTAIEFKEIETFEPGAWINLVNPSQEESEQVADQFGIDIDDLRAPLDVEETSRISVEDDYTLVIVDVPTYEERNNKSYYMTIPMGIIVTDNAVITTCLEHLTLFDHFYRRRVKNFYTFMKTRFVFQLLYRNAELYLQALRTIDRQSDKIEAQLESATRNEQLIDMMELEKSIVYLKASLKFNERIVKKLTSSTSSLKKYIEDEDLLEDTLIETQQAIEMANIYENVLNAMTETTASIIGNNQNTIMKTLALVTMTLDIPTVIFSAYGMNFQNNWMPLNGLAHGFIYVXLLAFLMSSFVVFYFIRKKWF

SEQ ID NO: 3119 - DNA, 240 bp, Streptococcus agalactiae
atggctcaacaacgtcgtggcggattcaaacgccgtaaaaaagttgattatatcgcagctaacaagattgaatatgttgattacaaagatacagagcttcttagccgtttcgtttcagaacgtggaaaaattttaccacgtcgtgtaacaggaacttcagctaaaaaccaacgtaaagtaacaacagcaatcaaacgtgctcgtgttatggctcttatgccttacgtaaatgaagattaa

SEQ ID NO: 3120 - protein, 79 aa, Streptococcus agalactiae
MAQQRRGGFKRRKKVDYIAANKIEYVDYKDTELLSRFVSERGKILPRRVTGTSAKNQRKVTTAIKRARVMALMPYVNED

SEQ ID NO: 3121 - protein, 492 aa, Streptococcus agalactiae
ATGATTAATAATGTAGTACTTGTAGGTCGCATGACCCGTGATGCAGAACTTCGTTATACACCAAGTAATCAAGCGGTAGCCACTTTTTCACTTGCAGTTAATCGTAATTTTAAAAATCAATCTGGCGAACGTGAGGCTGATTTTATTAACTGTGTTATTTGGCGCCAACAAGCTGAAAACTTGGCTAACTGGGCAAAAAAAGGTGCTTTGGTTGGAATTACAGGTCGTATCCAAACGCGTAATTATGAAAACCAACAAGGTCAACGTGTCTATGTAACAGAAGTTGTTGCGGAAAGTTTCCAATTATTGGAAAGTCGTGCTACACGAGAAGGTGGTTCACCTAACTCTTATAATAACGGTGGCTATAACAATGCTCCGTCAAATAATAGTTATTCAGCTTCTTCTCAACAAACACCTAATTTTAGTCGTGATGAGAGTCCGTTTGGTAACTCAAATCCAATGGATATTTCAGATGATGATCTACCATTCTAA

SEQ ID NO: 3122 - protein, 163 aa, Streptococcus agalactiae
MINNVVLVGRMTRDAELRYTPSNQAVATFSLAVNRNFKNQSGEREADFINCVIWRQQAENLANWAKKGALVGITGRIQTRNYENQQGQRVYVTEVVAESFQLLESRATREGGSPNSYNNGGYNNAPSNNSYSASSQQTPNFSRDESPFGNSNPMDISDDDLPF

SEQ ID NO: 3123 - protein, 288 aa, Streptococcus agalactiae
ATGGCTAAATACGAAATTCTTTATATTATTCGTCCAAACATTGAAGAAGAAGCTAAAAACGCTTTGGTAGCACGTTTTGATTCTATCTTATCTGACAACGGTGCAACTGTTGTTGAATCAAAAGATTGGGAAAAACGTCGTCTTGCATACGAAATCCAAGATTTCACTGAAGGACTTTACCATATCGTTAACGTTGAAGCTGAAGATGCAGTAGCTCTTAATGAGTTTGATCGTCTTTCAAAAATCAACGGTGACATTCTTCGTCACATGATCGTTAAAGTAGACTAA

SEQ ID NO: 3124 - protein, 95 aa, Streptococcus agalactiae
MAKYEILYIIRPNIEEEAKNALVARFDSILSDNGATVVESKDWEKRRLAYEIQDFTEGLYHIVNVEAEDAVALNEFDRLSKINGDILRHMIVKVD

SEQ ID NO: 3125 - protein, 1101 aa, Streptococcus agalactiae
ATGNNNNNGTCGCAACTTTTAGGGTGGTATGACCAAGAAAAACGTGATCTCCCTTGGCGAAGAACTACTAATCCATACTATATTTGGGTTTCTGAAATCATGTTGCAACAAACACAAGTTAATACAGTAATCCCTTATTATAAACGTTTTCTAGAGTGGTTTCCTCAAATAAAAGATTTGGCAGACGCTCCTGAAGAACAATTACTAAAGGCATGGGAGGGACTAGGCTATTATTCTCGGGTGCGTAATATGCAAAAGGCTGCACAGCAAGTGATGGTTGATTTTGGTGGCATATTTCCTCACACTTATGATGATATTGCTTCATTAAAAGGGATTGGTCCTTATACTGCAGGTGCTATCGCCAGCATCTCATTCAACTTACCAGAGCCTGCTGTTGATGGCAATGTGATGCGTGTCATGGCTCGTTTGTTTGAAGTTAATTATGACATCGGTGACCCTAAAAATCGTAAAATTTTTCAAGCTATTATGGAAATACTAATTGACCCTGACAGACCCGGTGATTTTAACCAAGCACTTATGGATCTGGGTACAGACATCGAATCCGCTAAGACACCTAGACCTGATGAAAGCCCTATTCGTTTCTTTAATGCTGCTTATTTGAATGGTACTTATAGTAAATATCCCATAAAAAATCCTAAGAAAAAGCCTAAACCAATGCGAATTCAGGCTTTTGTCATTCGTAACCAAAATGGTCAATATCTACTGGAGAAAAATACTAAAGGGAGACTTCTAGGGGGTTTTTGGTCATTTCCTATTATCGAAACGTCACCTCTTTCTCAACAATTAGATTTATTTGATGACAATCAATCCAACCCCATAATCTGGCAAACCCAAAATGAAACTTTCCAAAGAGAATATCAATTAAAGCCCCAATGGACTGATAATCACTTTCCAAATATTAAGCACACTTTTAGTCACCAGAAGTGGACAATAGAACTCATAGAGGGGGTGGTCAAAGCAACAGATTTACCTAATGCTCCTCACCTAAAGTGGGTAGCAATTGAGGACTTTTCTCTGTATCCCTTTGCAACACCACAAAAGAAAATGCTAGAGACCTACTTAAAACAGAAAAATGCTTAA

SEQ ID NO: 3126 - protein, 366 aa, Streptococcus agalactiae
  VARIANT 2, 3: Xaa = Any Amino Acid
MXXSQLLGWYDQEKRDLPWRRTTNPYYIWVSEIMLQQTQVNTVIPYYKRFLEWFPQIKDLADAPEEQLLKAWEGLGYYSRVRNMQKAAQQVMVDFGGIFPHTYDDIASLKGIGPYTAGAIASISFNLPEPAVDGNVMRVMARLFEVNYDIGDPKNRKIFQAIMEILIDPDRPGDFNQALMDLGTDIESAKTPRPDESPIRFFNAAYLNGTYSKYPIKNPKKKPKPMRIQAFVIRNQNGQYLLEKNTKGRLLGGFWSFPIIETSPLSQQLDLFDDNQSNPIIWQTQNETFQREYQLKPQWTDNHFPNIKHTFSHQKWTIELIEGVVKATDLPNAPHLKWVAIEDFSLYPFATPQKKMLETYLKQKNA

SEQ ID NO: 3127 - protein, 594 aa, Streptococcus agalactiae
ATGGAAATTGGTCAGCAAATTATTCGCTACCGTAAACAACAAGCGCTCTCGCAAGAAGAATTAGCCGAGAAAGTCTATGTAAGCCGTCAGAGCATATCTAACTGGGAAAATGACAAAACTTACCCAGACATCCATAGCCTCTTACTCCTAAGTCAAATTTTTCAAGTGAGCTTAGACCAACTAATTAAAGGAGACATTGAGAAAATGAAATATACCATCACTCAGGTTGATAAAAAGAATTTTGAACGAGATACCAAAGTAATGGTGACATTGATGATACTATTAATGATTTCAAGTTATCCATTAGTCTATTTCTTAGAGTGGCTAGGACTTGGCATTTTTGTTTTATTATCGATAATTACTATGACTTATGCTAATCGTGTGGAACGTTTTAAGAAAAAATATGATGTGCAAACTTATAAGGAAATCCTAGCTGTTTCAAGTGGAAAATTATTAGACGAAATCGAAAAACGGGAAGAAAGAGCAAAACTTCCTTATCAGAAACCCCTTATTGTCACTGTATTTTTCCTCATTACTGTTGCCACCTTTTTTGCAAGTCGTTTTATTTTCACATGGTTGTTCCATTTAAGTTAG

SEQ ID NO: 3128 - protein, 197 aa, Streptococcus agalactiae
MEIGQQIIRYRKQQALSQEELAEKVYVSRQSISNWENDKTYPDIHSLLLLSQIFQVSLDQLIKGDIEKMKYTITQVDKKNFERDTKVMVTLMILLMISSYPLVYFLEWLGLGIFVLLSIITMTYANRVERFKKKYDVQTYKEILAVSSGKLLDEIEKREERAKLPYQKPLIVTVFFLITVATFFASRFIFTWLFHLS

SEQ ID NO: 3129 - protein, 315 aa, Streptococcus agalactiae
ATGGCATTAGAAGTAACAGATGCTACATTTGTAGAAGAAACTAAAGAAGGTTTAGTACTCATTGATTTTTGGGCAACTTGGTGTGGTCCATGTCGTATGCAAGCACCAATCTTAGAACAGTTATCTCAAGAAATCGATGAAGATGAACTCAAAATTTTGAAAATGGATGTTGATGAGAATCCGGAAACTGCCCGTCAGTTTGGTATTATGTCAATTCCAACATTGATGTTTAAAAAAGACGGAGAAGTGGTTAAACAAGTTGCAGGTGTTCATACTAAAGACCAACTGAAAGCTATTATTGCTGAATTGAGTTAA

SEQ ID NO: 3130 - protein, 104 aa, Streptococcus agalactiae
MALEVTDATFVEETKEGLVLIDFWATWCGPCRMQAPILEQLSQEIDEDELKILKMDVDENPETARQFGIMSIPTLMFKKDGEVVKQVAGVHTKDQLKAIIAELS

SEQ ID NO: 3131 - DNA, 387 bp, Streptococcus agalactiae
ctctatccatcttttctgatatttactctttggcaagggatgacatttcaattatggttaaggctattaattatccctgctgttggctttatagctttgtcttacattaggaaacgccttgattttccacgaccatatgaaaaatggaatattaaacctttaatttataaggatactgagggaaggtcaatgcctagcagacatgttttttcagctacgatgattagtatgtgtttgttacgatattatgtttactttggaatagtttgtttaatattatcggttctattggcaatttgccgtgtgatagcaggtattcactatcctaaggatgttattgtaggttaccttattggcttgattttagggctttgtttatttatttag

SEQ ID NO: 3132 - protein, 128 aa, Streptococcus agalactiae
LYPSFLIFTLWQGMTFQLWLRLLIIPAVGFIALSYIRKRLDFPRPYEKWNIKPLIYKDTEGRSMPSRHVFSATMISMCLLRYYVYFGIVCLILSVLLAICRVIAGIHYPKDVIVGYLIGLILGLCLFI

SEQ ID NO: 3133 - DNA, 2349 bp, Streptococcus agalactiae
atgaagagtatgaataacaagattttagaacagttagaatttaacaaagttaaggaattgatattaccttatctcaagacagaacaatcacaagaagaattatcagagctggagccgatgacggaggctcctaaaatagaaaaaagttttaatgaaatttctgacatggaacagatttttgttgaacatcactcatttggcatagtcagcctaagttcaatctctgagagtttaaaacgcttagagctttcagctgatcttaatattcaagaacttttggctatcaaaaaagttttacagagttcttcggatatgattcacttttattctgatttggataatgtttctttccaatctttggatcgtttgtttgaaaatttggaacaattccctaatctgcaagggtcttttcaagctatcaatgatggtggttttttagaacattttgcgagtccagaattagagcgtatccgtcgtcaattaacaaacagtgaacgacgggttcgtcagattttacaggatatgcttaaggaaaaagcagagcttttatcagagaatctaatcgctagtcgtagtggacgaagtgtcctaccagtaaaaaatacttatcggaatcgtatttctggtgtggttcatgacatctcttcttcaggaagtactgtttatattgagcctcgtgctgtagttacactaaacgaagagataacgcagcttagagctgacgaacgtcatgaagaaagtcgtattttacacgcattttcagacttgttaagaccccatgtcgccactattagaaataatgcatggattcttgggcatcttgattttgtaagggctaaatatctttttatgtctgataataaggcgacgatacctgagatttctaatgacagcacgttagcattaatcaatgttcgtcatcctctgttaagtaaccctgtggctaatgacttacattttgatcaagatttaactgcaattgtcatcactggtcccaatactggtggtaagacgattatgctaaaaacactcggtttagcacaattaatgggacagtctggtttgccagtattagcggataaaggtagtaaaattgcagtatttaacaatatctttgcagatattggcgatgagcaatctattgaacaaagtctatcaactttttctagtcatatgacgcacatagtcagtattttaaacgaggctgaccacaatagtttagtcctctttgatgaactgggagcaggaacggatcctcaagaaggtgctagtttggctatggctattttagaacaccttaggttaagtaatatcaaaacgatggcgaccacgcactatccagaattaaaagcttatgggattgagacaaattttgtagagaatgcgagcatggaatttgatgccgaaacgcttagccctacgtatcgctttatgcaaggagttcctggacgatcaaatgcatttgaaattgcttctcgccttggtttagctccatttattgttaaacaagctaagcagatgacagattctgactcagatgttaaccgtattattgaacagttagaggcacagacacttgagacacgtagaagactggatcatattaaagaagttgaacaagaaaacctcaaattcaatcgtgcggttaagaaactctataatgaattttcacatgagcgcgataaagagttagaaaaaatctatcaagaagctcaagaaattgtagatatggctttgaatgagagtgatactatcttaaaaaaactcaatgataagagccaattaaaacctcacgaaattatagatgctaaggcacaaataaaaaaattagcacctcaagttgatttatcaaaaaataaagtcttaaataaggctaaaaaaattaaagcagctcgtgctcctagaattggtgatgatattatagtgactagctatggacagcgaggtaccttaactagtcaattaaaagatggacgttgggaagcacaagtgggaattatcaaaatgacattaacacaagatgaatttacccttgttagagtccaagaagaacagaaagtcaaaagtaaacagattaatgtggttaaaaaggctgatagttctggaccaagagctcgacttgatcttagaggtaaaagatacgaagaagctatgcaagagttagataattttattgatcaagcattgcttaacaatatgggacaagttgatatcattcatggtattggtacaggcgttatccgtgagggagtgacaaaatatcttcgtcgtaataagcacgttaagcattttgcttatgccccacaaaatgcagggggatctggcgccacaattgtaacgttagggtaa

SEQ ID NO: 3134 - protein, 782 aa, Streptococcus agalactiae
MKSMNNKILEQLEFNKVKELILPYLKTEQSQEELSELEPMTEAPKIEKSFNEISDMEQIFVEHHSFGIVSLSSISESLKRLELSADLNIQELLAIKKVLQSSSDMIHFYSDLDNVSFQSLDRLFENLEQFPNLQGSFQAINDGGFLEHFASPELERIRRQLTNSERRVRQILQDMLKEKAELLSENLIASRSGRSVLPVKNTYRNRISGVVHDISSSGSTVYIEPRAVVTLNEEITQLRADERHEESRILHAFSDLLRPHVATIRNNAWILGHLDFVRAKYLFMSDNKATIPEISNDSTLALINVRHPLLSNPVANDLHFDQDLTAIVITGPNTGGKTIMLKTLGLAQLMGQSGLPVLADKGSKIAVFNNIFADIGDEQSIEQSLSTFSSHMTHIVSILNEADHNSLVLFDELGAGTDPQEGASLAMAILEHLRLSNIKTMATTHYPELKAYGIETNFVENASMEFDAETLSPTYRFMQGVPGRSNAFEIASRLGLAPFIVKQAKQMTDSDSDVNRIIEQLEAQTLETRRRLDHIKEVEQENLKFNRAVKKLYNEFSHERDKELEKIYQEAQEIVDMALNESDTILKKLNDKSQLKPHEIIDAKAQIKKLAPQVDLSKNKVLNKAKKIKAARAPRIGDDIIVTSYGQRGTLTSQLKDGRWEAQVGIIKMTLTQDEFTLVRVQEEQKVKSKQINVVKKADSSGPRARLDLRGKRYEEAMQELDNFIDQALLNNMGQVDIIHGIGTGVIREGVTKYLRRNKHVKHFAYAPQNAGGSGATIVTLG

SEQ ID NO: 3135 - DNA, 543 bp, Streptococcus agalactiae
atgctatcattgcttttgctgattattgttatttggcatttttatattggctacagtagaggtatttttttacaagtcttttacgtgttaatgtcaatggtatctttgatgattgctagtcaattttaccaagaattagctagtcagattacgttatgggtaccgtattctaatcctgtacaaggagtagaagtttacttttttaaagatattagcaaatttcaattgagtcatgtttattatgcaggtgttgcctttgtttttatctacagtttatcttacttagtaggtcgcttgttaggtgttttactacatttagcaccagttgaacattttgatagcttgcaaaataatattattagtggttttttagccgttctggtttgtctcttatttatgagtatgtgtttgactattctggcaacagtccctatgtcatttgttcaagaaaagttatggaatagtctgtttgttagatttttaattaacgacttaccattcttctcacagtttttggtaaggacttgggcggtaggtctttga

SEQ ID NO: 3136 - protein, 180 aa, Streptococcus agalactiae
MLSLLLLIIVIWHFYIGYSRGIFLQVFYVLMSMVSLMIASQFYQELASQITLWVPYSNPVQGVEVYFFKDISKFQLSHVYYAGVAFVFIYSLSYLVGRLLGVLLHLAPVEHFDSLQNNIISGFLAVLVCLLFMSMCLTILATVPMSFVQEKLWNSLFVRFLINDLPFFSQFLVRTWAVGL

SEQ ID NO: 3137 - DNA, 312 bp, Streptococcus agalactiae
atggaaacaaaaataaataatagtcagaaaaatcgttataaatttgtctttggagataagcctctcacattgacgacagataaagacaacctttttatggaagagattgagcgtgtagctacagaaaagtatgaagctattaaagaaaaattacctaatgctgataatgaaacgattgctattctcatggcaattaatgctttatcagtgcaactaagtcgagaaattgacattgaaaaaatggaagatgagctcaataagttacgctccaaaacgatttcggacattaaagaaaaagtgagtgaggattaa

SEQ ID NO: 3138 - protein, 103 aa, Streptococcus agalactiae
METKINNSQKNRYKFVFGDKPLTLTTDKDNLFMEEIERVATEKYEAIKEKLPNADNETIAILMAINALSVQLSREIDIEKMEDELNKLRSKTISDIKEKVSED

SEQ ID NO: 3139 - DNA, 861 bp, Streptococcus agalactiae
ttgcaagaaaagataagaaccgatttagctcaacatcatataagtaataacaatccttatgtggtattttcagctaaaatatcaggagctactgttcttttatatacttctggaaaacttgtcttccagggttctaacgcttcacatatcgcccaaaagtatggttttattgagcaaaaagaaagttgttcctctgagagtcaagatattcccataattggtactgatgaagtgggaaatggctcttactttggtggactggcagtggtagctagttttgtaactcctaaggaccatgcttacctcaaaaaattaggtgttggtgattcaaaaacacttactgatcaaaaaattaagcaaatcgcgcctcttttggaaaaagcaattccacacaaagcattattgttatcgcctcaaaaatataatcaagtggttagtccaaataacaaacataatgctgtctccgtaaaagttgctttacacaatcaagctatcttccttcttcttcaagatggttttgaaccagaaaaaatcgttattgatgcttttactagctccaaaaactatcaaaattatttgaaaaatgaaaagaatcaatttaaacaaacgattactctggaagaaaaagctgaaaataaatatctagctgtagcggtcagttctattattgcacgtaatctattcttagaaaaccttaacaaattaagcgacgacgtaggatataaacttccaagtggagctggtcaccaatctgataaggtcgctagccaattactcaaagcttatggtatctcttcgcttgaacactgcgcaaaacttcattttgccaacaccaaaaaagcacaagcattattaaaataa

SEQ ID NO: 3140 - protein, 286 aa, Streptococcus agalactiae
MQEKIRTDLAQHHISNNNPYVVFSAKISGATVLLYTSGKLVFQGSNASHIAQKYGFIEQKESCSSESQDIPIIGTDEVGNGSYFGGLAVVASFVTPKDHAYLKKLGVGDSKTLTDQKIKQIAPLLEKAIPHKALLLSPQKYNQVVSPNNKHNAVSVKVALHNQAIFLLLQDGFEPEKIVIDAFTSSKNYQNYLKNEKNQFKQTITLEEKAENKYLAVAVSSIIARNLFLENLNKLSDDVGYKLPSGAGHQSDKVASQLLKAYGISSLEHCAKLHFANTKKAQALLK

SEQ ID NO: 3141 - protein, 594 aa, Streptococcus agalactiae
ATGAAAGAATTTATTAAAGAATGGGGTGTCTTTATCCTCATCCTCTCACTTTTTTTACTATCGCGTATCTTTTTATGGCAATTCGTTAAAGTTGACGGACACTCCATGGATCCAACTTTAGCTGACAAGGAACAGCTAGTAGTTCTCAAACAAACAAAAATCAATCGATTCGATATTGTAGTGGCTAACGAAGAAGAAGGCGGCCAAAAGAAAAAAATTGTTAAACGTGTCATTGGTATGCCAGGTGATGTCATCAAATATAAAAATGACACCTTAACTATTAACAATAAAAAAACAGAAGAACCTTACCTCAAGGAATATACTAAATTATTTAAAAAGGATAAATTACAGGAAAAATATTCGTATAACCCACTTTTCCAAGACCTAGCACAAAGCTCTACCGCTTTCACCACTGACAGCAATGGCAGCAGCGAATTTACTACTGTCGTGCCTAAAGGCCACTACTATCTTGTTGGTGATGACCGAATTGTCTCTAAAGATAGTCGTGCCGTCGGTCCCTTCAAAAAATCAACGATTGTGGGAGAGGTTAAATTCCGCTTCTGGCCAATTCGTCGTTTTGGAACTATCAACTAA

SEQ ID NO: 3142 - protein, 197 aa, Streptococcus agalactiae
MKEFIKEWGVFILILSLFLLSRIFLWQFVKVDGHSMDPTLADKEQLVVLKQTKINRFDIVVANEEEGGQKKKIVKRVIGMPGDVIKYKNDTLTINNKKTEEPYLKEYTKLFKKDKLQEKYSYNPLFQDLAQSSTAFTTDSNGSSEFTTVVPKGHYYLVGDDRIVSKDSRAVGPFKKSTIVGEVKFRFWPIRRFGTIN

SEQ ID NO: 3143 - protein, 2421 aa, Streptococcus agalactiae
ATGGAAGTATTTTTTACAGGAACCATTGAACGCATTATATTTGAAAATGCCAGCAATTTTTTTAAAATATTACTTCTGGAAATCGAAGATACGGATAGCGATTTTGATGATGTAGAAGTAATTATTACTGGTACTATGGCCGACGTTATAGAGGGAGAAGAATATACTTTTTGGGGAACACTAACCCAACATCCAAAATACGGCGAGCAACTACAAAGTGTACGCTATGAAAGAGCCAAGCCTACTTCAGGTGGCCTTGTGAAATACTTTTCTAGCGAACAATTTAAAGGAATTGGTAAAAAGACTGCCCAACGCATCGTAGAACTCTATGGAGATAATACCATTGATAAAATCCTTGAATCCCCTGAACAGTTAAGTACAATCTCAGGACTATCAAAAATTAATAGAGAAGCATTCATCGCTAAACTGAAACTCAATTATGGAACAGAGCAAGTTTTAGCTAAACTCGCTGAATATGGGTTAAGCAATCGTGCTGCTATTCAAATATTTGATCACTATAAAGAAGAATCACTTGAAGTGATAAACGAAAATCCTTATCAACTTGTTGAGGATATCCAAGGTATCGGTTTTAAAATAGCTGACCAACTTGCTGAACAAGTCGGTATTGAAAGTGATTCTCCTAAACGCTTTCGTGCTGCTATTATTCATACTTTAGTTGAGTCTTCTATGGAGCAAGGAGATACCTATATTGAGGCTCGTACTCTCTTGGAAAAAACCATTACTCTCCTTGAAGAAGCTCGTCAAATCGAACTAGATCCTTCAATTGTTGCTAAGGAATTGACAAATTTAATTGCAGAAGATAAAGTGCAACATATTGGAACTAAAATTTTTAGTAATACTCTATTTTTTGCCGAAGAAGGCATCAAAAAAAACTTACAACGAATACTAAATCAGCCTCTTGATAAACAACTAAATCACAAAGATATTGACCGTGAAATCAGAGATATTCAAAAATCTTTAAATATCCACTACGATAATATCCAAGAAAAAGCTATTAGAGAAGCTTTACTAAGTAAGGTATTTATCTTGACTGGTGGCCCAGGAACAGGTAAAACAACAGTTATAAATGGTATTATTGAAGCCTATTCCGAGTTACATCATATTGATTTAAACAAAAATGATATTCCTATTGTACTTGCTGCTCCTACAGGTCGTGCTGCTAGACGCATGAATGAACTTACCGGTTTACCGAGTGCTACTATTCATAGGCATTTGGGATTAAACGGAGATAGTGACTATCAAAGTCTAGATGACTATCTAGATTGTTCCTTAATTATCATTGATGAATTTTCAATGGTTGACACTTGGCTTGCTAATCAATTATTTGACGCTTTGGACTCGCACACACAAGTTATTATTGTCGGAGATAGTGATCAATTACCGTCTGTAGGTCCAGGACAAGTTCTAGCAGATCTTTTAAATATAAATGCACTTCCACACGTTAAACTTGAAAAGATTTTTAGACAATCAGAAGAATCAACTATTGTGACTTTAGCTAATCAAATGAGACAGGGCTTTTTGCCAGAGGACTTTACAGCTAAAAAAGCCGATCGCTCATACTTTGAAGCATCTGCTAATATCATCCCAAATATGATTTCTAAAATTGTTCAATCTGCACTTAAGAGCGGTATTGAAGCTCATGAAATTCAAATTTTAGCTCCTATGTATCGCGGCCAAGCAGGTATTAATAATCTTAACCTTATCATGCAAAATCTCCTCAATCCATTAAAAGATAATAACCAATTTACTTTTAATGATATAAATTTCCGAATAGGAGATAAAGTGTTACATTTAGTCAACGATACAGAGCTTAATGTTTTTAATGGGGATATTGGTTACATAACGGACCTTATACCAGCCAAATATACTGAGAGCAAGCAAGATGAGATTTATATGACTTTTGACGGTCAAGAAGTTATCTATCAACGCAAAGAATGGCTTAAAATAACACTAGCCTATGCTATGAGTATTCATAAATCACAGGGTTCTGAATTTCAAGTTGTTATTCTGCCAATAACGAGACAGAGTGGTCGAATGTTACAGCGAAACCTTATTTATACAGCTATTACGAGATCTAAAAGTAAACTAATACTTTTAGGAGAAATTGGTGCATTTGATTTCGCTGTTAAAAACGAGGGGGCAAAGCGCAATACTTATCTGATAGAAAGATTTGAAAACAAGCAAGAAATAGCTAATTCTCAAAAAATTGAAGATAGCTCAATAGATCAAAAGATTGACAACACAATAATTAATACGTCCATTCCAAAAACAGCAACACCAATTGAGCAGACTAATCTTTCAAAAATAACTTATCGCCTAACTGAAGAAAATTATTTAACAATCGATCCAATGATTGGTATTAATCAACAAGATATAAGTGCAATTTTTGATAGTAAATAA

SEQ ID NO: 3144 - protein, 806 aa, Streptococcus agalactiae
MEVFFTGTIERIIFENASNFFKILLLEIEDTDSDFDDVEVIITGTMADVIEGEEYTFWGTLTQHPKYGEQLQSVRYERAKPTSGGLVKYFSSEQFKGIGKKTAQRIVELYGDNTIDKILESPEQLSTISGLSKINREAFIAKLKLNYGTEQVLAKLAEYGLSNRAAIQIFDHYKEESLEVINENPYQLVEDIQGIGFKIADQLAEQVGIESDSPKRFRAAIIHTLVESSMEQGDTYIEARTLLEKTITLLEEARQIELDPSIVAKELTNLIAEDKVQHIGTKIFSNTLFFAEEGIKKNLQRILNQPLDKQLNHKDIDREIRDIQKSLNIHYDNIQEKAIREALLSKVFILTGGPGTGKTTVINGIIEAYSELHHIDLNKNDIPIVLAAPTGRAARRMNELTGLPSATIHRHLGLNGDSDYQSLDDYLDCSLIIIDEFSMVDTWLANQLFDALDSHTQVIIVGDSDQLPSVGPGQVLADLLNINALPHVKLEKIFRQSEESTIVTLANQMRQGFLPEDFTAKKADRSYFEASANIIPNMISKIVQSALKSGIEAHEIQILAPMYRGQAGINNLNLIMQNLLNPLKDNNQFTFNDINFRIGDKVLHLVNDTELNVFNGDIGYITDLIPAKYTESKQDEIYMTFDGQEVIYQRKEWLKITLAYAMSIHKSQGSEFQVVILPITRQSGRMLQRNLIYTAITRSKSKLILLGEIGAFDFAVKNEGAKRNTYLIERFENKQEIANSQKIEDSSIDQKIDNTIINTSIPKTATPIEQTNLSKITYRLTEENYLTIDPMIGINQQDISAIFDSK

SEQ ID NO: 3145 - protein, 483 aa, Streptococcus agalactiae
ATGGTTTCATATGAAAAAGTCCGCCGCTCTCTGCGCACAGCTACAATCACTATCATTGTATTAAATAGTTTGTCTTTAGTATTCAGATTGTTTACAGGAATTTCAGTGCAGCTAGCCAAAACTGAAATTAATAAAGGGAACACAGGTAATCTTCCTAAAGAACATATCGAAGCAGTCTTGAGCGCCACAACACCATTTATGCTATTTGTCACTGCTTTAATAGTATTAGTCAACATTGCCATTGTTATTTTCTGTATTAAAAATTTAAGAGCAATTAAAAGAAATCAAATGGTTAATTACCTTCCTTATTACCTTGGCTTCGCCATTACTGTAGGACTTGTTATTTTGGGTTTTCTAACTACTAAAGCACCATGGGCAATAGCTATAAATATCGTCTTCCAAGCTATTTTCGGTCTTCTTTATTTCCATGCTTATCAAAAAGCACAAAAACTCAACGAACGTGATCTTGAAGAGACTAACTAA

SEQ ID NO: 3146 - protein, 160 aa, Streptococcus agalactiae
MVSYEKVRRSLRTATITIIVLNSLSLVFRLFTGISVQLAKTEINKGNTGNLPKEHIEAVLSATTPFMLFVTALIVLVNIAIVIFCIKNLRAIKRNQMVNYLPYYLGFAITVGLVILGFLTTKAPWAIAINIVFQAIFGLLYFHAYQKAQKLNERDLEETN

SEQ ID NO: 3147 - protein, 1095 aa, Streptococcus agalactiae
ATGTTAATTTTTCCTTTAATAAATGATACGTCGCGTAAAATTATCCACATTGATATGGATGCTTTTTTTGCATCTGTGGAAGAGCGTGACAATCCCTCTCTTAAAGGAAAGCCTGTTATTATTGGTTCTGATCCCAGAAAAACCGGCGGCAGAGGGGTTGTTTCTACTTGTAATTATGAGGCTCGAAAGTTTGGAGTTCATTCAGCTATGTCTTCAAAAGAAGCGTATGAACGATGCCCTCAAGCTATCTTTATTTCGGGAAATTACCAAAAATATCGCCAAGTAGGAATGGAAGTACGAGATATATTTAAAAAGTATACGGATTTGGTTGAACCGATGAGTATAGACGAAGCTTATTTAGATGTAACTGAAAATAAAATGGGAATAAAATCAGCTGTTAAACTTGCTAAAATGATACAATACGATATTTGGAATGATGTCCATTTGACCTGTTCAGCGGGTATTTCCTACAATAAATTTTTGGCAAAATTGGCTTCTGACTTTGAGAAACCAAAAGGACTTACCCTCATCCTACCAGATCAAGCTCAAGATTTCTTGAAGCCCTTACCAATAGAGAAATTTCATGGTGTTGGTAAACGCTCCGTCGAAAAATTACATGCTTTAGGGGTTTATACTGGTGAGGACCTCCTTTCCTTATCTGAAATTTCTTTAATTGATATGTTTGGTCGTTTCGGGTATGACCTTTATCGTAAGGCAAGAGGGATTAATGCTTCCCCGGTAAAACCTGATAGAGTTCGTAAATCAATAGGAAGTGAGAAAACCTATGGGAAATTACTATATAACGAAGCAGATATCAAAGCTGAGATTTCAAAGAACGTTCAGAGAGTTGTTGCTTCTCTGGAGAAAAATAAGAAAGTTGGTAAGACAATCGTTTTAAAAGTTAGATATGCGGATTTTGAAACATTGACGAAACGTATGACATTAGAAGAGTATACTCAAGATTTTCAAATCATTGATCAAGTTGCTAAAGCGATATTTGATACCTTAGAAGAGTCAGTTTTTGGCATACGACTCTTAGGTGTTACAGTAACGACCCTGGAAAATGAACATGAAGCTATCTATTTAGATTTTTAA

SEQ ID NO: 3148 - protein, 364 aa, Streptococcus agalactiae
MLIFPLINDTSRKIIHIDMDAFFASVEERDNPSLKGKPVIIGSDPRKTGGRGVVSTCNYEARKFGVHSAMSSKEAYERCPQAIFISGNYQKYRQVGMEVRDIFKKYTDLVEPMSIDEAYLDVTENKMGIKSAVKLAKMIQYDIWNDVHLTCSAGISYNKFLAKLASDFEKPKGLTLILPDQAQDFLKPLPIEKFHGVGKRSVEKLHALGVYTGEDLLSLSEISLIDMFGRFGYDLYRKARGINASPVKPDRVRKSIGSEKTYGKLLYNEADIKAEISKNVQRVVASLEKNKKVGKTIVLKVRYADFETLTKRMTLEEYTQDFQIIDQVAKAIFDTLEESVFGIRLLGVTVTTLENEHEAIYLDF

SEQ ID NO: 3149 - protein, 2313 aa, Streptococcus agalactiae
ATGGCAACAGTTAAAACAAACACAGATATCTTTGAACAAGCTTGGGAAGGCTTTAAAGGTGTTGATTGGAAAGAAAAAGCAAGTATTGCTCGCTTCGTTCAAGCAAACTATGCACCTTACGATGGAGATGAAAGCTTCTTAGCTGGAGCAACTGAACGTTCACTTCACATCAAAAAAGTGATTGAAGAAACAAAAGCTCACTATGAAGAAACTCGCTTCCCAATGGATACTCGTGTTGCTTCAATTTCTGAATTACCAGCTGGTTTTATCGACAAAGATAACGAGCTTATCTTTGGTATTCAAAACGACGAGCTTTTCAAATTGAACTTCATGCCTAAAGGTGGTATCCGTATGGCGGAAACTACACTTAAAGAAAATGGTTATGAACCTGATCCAGCTGTTCACGAAATCTTCACTAAGTACGCTACAACAGTAAATGATGGTATCTTCCGCGCTTATACTTCTAACATTCGTCGTGCTCGCCATGCACACACTGTTACTGGTCTTCCAGACGCTTATTCACGCGGACGTATCATTGGTGTATATGCTCGTCTAGCTGTTTACGGTGCTGACTACTTGATGCAAGAAAAAGTTAATGACTGGAATGCATTGAATGATATTGATGAAGAGTCAATTCGTCTTCGTGAAGAAATCAACCTTCAATACCAAGCTCTTGGTGAAGTTGTAAAACTTGGTGACCTTTACGGCGTAGATGTTCGTAAACCAGCCATGAACACTAAAGAAGCCATTCAATGGGTGAACATTGCTTTCATGGCTGTATGTCGTGTTATCAATGGTGCTGCAACATCACTTGGACGTGTTCCTATTGTCCTTGATATCTTTGCAGAACGTGACCTCGCTCGCGGTACATTCACAGAATCAGAAATCCAAGAATTTGTTGATGATTTTGTCCTTAAACTCCGTACTGTAAAATTTGCTCGTACTAAAGCTTATGATGCCCTTTACTCAGGTGACCCAACCTTTATCACAACTTCAATGGCAGGTATGGGAGCTGATGGACGTCATCGTGTTACCAAAATGGACTATCGTTTCTTAAATACACTTGACAATATCGGTAACTCACCAGAACCAAACTTAACTGTTCTTTGGTCAGATCAATTACCATATGCTTTCCGTCGCTACTGTATGTCAATGAGTCATAAACACTCTTCAATCCAATATGAAGGTGTATCAACAATGGCTAAAGAAGGCTACGGTGAAATGTCATGTATTTCATGTTGTGTATCTCCACTTGATCCAGAAAACGAAGACAAACGTCACAACCTTCAATATTTTGGTGCTCGTGTTAACGTTATGAAAGCACTTCTTACTGGTCTTAACGGTGGTTATGATGATGTTCATAAAGATTACAAAGTATTTGACATCGACCCAATTCGTGACGAAGTACTCAACTTTGACACTGTAAAAGCTAACTTTGAAAAATCTCTTGACTGGTTGACTGATACTTATGTTGATGCGATGAATATCATCCACTACATGACTGATAAATACAACTATGAAGCTGTACAAATGGCATTCTTACCTTCACATGTACGTGCTAATATGGGATTTGGTATCTGTGGTTTTGCAAATACTGTCGATTCATTATCTGCGATTAAATACGCTACTGTTAAACCAATCCGTGACGAAGATGGTTACATCTACGACTACGAAACAGTTGGTGACTTCCCACGTTATGGTGAAGATGATGATCGTGTTGACTCAATCGCTGAATGGTTACTTGAAGCCTTCCATGGACGCCTTGCTAAACACAAACTTTATAAAGATGCTGAAGCAACTGTTTCTCTTCTTACAATCACATCAAACGTTGCTTACTCTAAACAAACTGGTAACTCACCGGTACATAAAGGAGTATATCTCAATGAAGATGGTAGTGTAAACCTTTCTAAAGTAGAATTCTTCTCACCAGGTGCTAACCCTTCTAACAAAGCTAAAGGTGGCTGGTTACAAAACTTGAATTCACTTTCTAAACTTGATTTCGCTCATGCAAATGATGGTATTTCATTGACAACTCAAGTTTCTCCACGCGCTCTTGGTAAAACATTTGATGAACAAGTTGATAACTTGGTAACAGTCCTTGATGGTTACTTTGAAAACGGTGGTCAACACGTTAACTTGAATGTCATGGACCTTAAAGATGTCTATGACAAGATTATGAATGGTGAAGATGTTATCGTTCGTATCTCAGGTTACTGTGTCAATACTAAATATCTAACTCCTGAGCAAAAAACTGAGTTGACACAACGTGTCTTCCATGAAGTACTTTCAATGGACGATGCATTAACTAACTAG

SEQ ID NO: 3150 - protein, 770 aa, Streptococcus agalactiae
MATVKTNTDIFEQAWEGFKGVDWKEKASIARFVQANYAPYDGDESFLAGATERSLHIKKVIEETKAHYEETRFPMDTRVASISELPAGFIDKDNELIFGIQNDELFKLNFMPKGGIRMAETTLKENGYEPDPAVHEIFTKYATTVNDGIFRAYTSNIRRARHAHTVTGLPDAYSRGRIIGVYARLAVYGADYLMQEKVNDWNALNDIDEESIRLREEINLQYQALGEVVKLGDLYGVDVRKPAMNTKEAIQWVNIAFMAVCRVINGAATSLGRVPIVLDIFAERDLARGTFTESEIQEFVDDFVLKLRTVKFARTKAYDALYSGDPTFITTSMAGMGADGRHRVTKMDYRFLNTLDNIGNSPEPNLTVLWSDQLPYAFRRYCMSMSHKHSSIQYEGVSTMAKEGYGEMSCISCCVSPLDPENEDKRHNLQYFGARVNVMKALLTGLNGGYDDVHKDYKVFDIDPIRDEVLNFDTVKANFEKSLDWLTDTYVDAMNIIHYMTDKYNYEAVQMAFLPSHVRANMGFGICGFANTVDSLSAIKYATVKPIRDEDGYIYDYETVGDFPRYGEDDDRVDSIAEWLLEAFHGRLAKHKLYKDAEATVSLLTITSNVAYSKQTGNSPVHKGVYLNEDGSVNLSKVEFFSPGANPSNKAKGGWLQNLNSLSKLDFAHANDGISLTTQVSPRALGKTFDEQVDNLVTVLDGYFENGGQHVNLNVMDLKDVYDKIMNGEDVIVRISGYCVNTKYLTPEQKTELTQRVFHEVLSMDDALTN

SEQ ID NO: 3151 - DNA, 375 bp, Streptococcus agalactiae
atgttaaatcacaaatttcttcaagttctaaaatatgagggtgtcgtttcgataacaagctggatcgaattagctcctcacgttacaaacacttggaatagctacctgactattacagatgaccagcgtatattagctcctgcagcaggaatgactcatcttgaaaatgatctcaataataattctaaaattattatgactctgggcagccgtgaagtcgagggtcgtgatggttatcaaggtacaggctttagaattgaaggaactgctaagctattagaagcaggaagcgattttgaaattgttaaagaaaaatacccttttctgcgtaaagtattggaagtaactcccataaatgttatccaacttttataa

SEQ ID NO: 3152 - protein, 124 aa, Streptococcus agalactiae
MLNHKFLQVLKYEGVVSITSWIELAPHVTNTWNSYLTITDDQRILAPAAGMTHLENDLNNNSKIIMTLGSREVEGRDGYQGTGFRIEGTAKLLEAGSDFEIVKEKYPFLRKVLEVTPINVIQLL

SEQ ID NO: 3153 - DNA, 945 bp, Streptococcus agalactiae
ttggatttcaaaagaatgattaaaactaatactgttttagaactcattaaggagcaaatcaaagataatctttatcatggtgcaagcttagctatttatgaaaatggagagtggcacgaacattacttggggacaattgatggcaatgagaaagttaaagcgggattggtctatgatctagccagtgtatcaaaagttgtcggcgtgggaactttactagcaaagttagtttatcaagggactattgatattgataagccattaaggtattattaccctacgtttcatcatcagacgttaactgtaaggcaattagctacacatagcagtggaattgacccttttattccaaatcgtgatcagttgaatgctactcagctgaaagatgccattaatcatatcaaggttttggaagataaatcgtttaaatacactgatattaattttcttttacttggttttatgttagaagaggtattaggggatagtttggataaacttttcaaacgttatattttcactccttttcagatgaaagaaacctcttttggtcctagagtagaagctgttccaactgtagccggtattaacgatggtattgtacacgatcctaaagctaaggtattaggaaagcatactggttctgcaggtttattttcaactattgatgatttacaaagattttctattcattatttaaaagatgattttgcgaagcctttgtggaataattatagtttgagtaaatcaagatcattagcttgggatatagataaggattggataaaccatactggttatactggtccttttattgcactaaattatcaaaagcaggcagcagctatttttttgacaaacagaaccttttcctatgatgaccgtccactttggattaagaaacgacgacatgtacaagaggcgataacatcgtactttgaataa

SEQ ID NO: 3154 - protein, 314 aa, Streptococcus agalactiae
MDFKRMIKTNTVLELIKEQIKDNLYHGASLAIYENGEWHEHYLGTIDGNEKVKAGLVYDLASVSKVVGVGTLLAKLVYQGTIDIDKPLRYYYPTFHHQTLTVRQLATHSSGIDPFIPNRDQLNATQLKDAINHIKVLEDKSFKYTDINFLLLGFMLEEVLGDSLDKLFKRYIFTPFQMKETSFGPRVEAVPTVAGINDGIVHDPKAKVLGKHTGSAGLFSTIDDLQRFSIHYLKDDFAKPLWNNYSLSKSRSLAWDIDKDWINHTGYTGPFIALNYQKQAAAIFLTNRTFSYDDRPLWIKKRRHVQEAITSYFE

SEQ ID NO: 3155 - DNA, 756 bp, Streptococcus agalactiae
atgacgttatttcattcattgacatttaaacacccagtattacgtgttaataatagagacttgaatattgcattttatcaggagtctcttggatttaaattgataagtgaagaaaatgcaatcgcagttttctcagcatggcagaacaaagaggctagctttattattgaggaatccccaacttatcgtactcgtgcggtgaatggtactaagaagttagcaaagattattgttaagtctcaagatgcaaaagatattgaaaagcttttggcaaatggtgcgcaagccattcaagtatatcaaggtcaaaatggttatgcctatgaaacagtttcgcccgagggagaccttttcttacttcatgctgaagatgatttgtcacaattagtggcaattgagcgcccagagttagaaaaaaaagatgacactacaggtctatcaaactttgctttccaatctattagtttgaatgtacctgatgccgtgaaagctgaagctttttacgataaagtatttgctgggaagttcccaattaatttatctttcaaagaagcacagggacaagatttgcaaattgctccaaatgaaacttgggatattgagatactagaatgctgtgttaatgaagatactaatttaaatgacttgaaatcaacttttgaatcattgggacttgatgtttaccttgattctaaagaaaagattttagtcatctctgacactagtaatattgagatttggatttcaaaagaatga

SEQ ID NO: 3156 - protein, 251 aa, Streptococcus agalactiae
MTLFHSLTFKHPVLRVNNRDLNIAFYQESLGFKLISEENAIAVFSAWQNKEASFIIEESPTYRTRAVNGTKKLAKIIVKSQDAKDIEKLLANGAQAIQVYQGQNGYAYETVSPEGDLFLLHAEDDLSQLVAIERPELEKKDDTTGLSNFAFQSISLNVPDAVKAEAFYDKVFAGKFPINLSFKEAQGQDLQIAPNETWDIEILECCVNEDTNLNDLKSTFESLGLDVYLDSKEKILVISDTSNIEIWISKE

SEQ ID NO: 3157 - DNA, 960 bp, Streptococcus agalactiae
ttgtgctctcaataccataaagtcaaattgacagtttcactatttttttgtagactggatattatgaatgaaacactactattacatgggattcagcttattctgattatcgccatgattatcactttttatcagattgttagacatattaggtctcaaaaaataaatcctttcaaacgatttttcactggtttgtggatcggttttgtaactgatgctctcgatactcttggtatcggctcttttgcaacaacgaccacattttttaaactaactaagcttgttgaagacgatcgtaagatacccgcaacaatgacagctgcacacgtacttccagttttgttgcagtcactctgttttatttttgttgtaaaagtagaggctttaacactaataacaatggctggtgcagcttttattggggcttttgttggagctaaaatgactaaaaattggcacgctcctactgttcaacgtattctaggaacactgctcatcacagctgctattattatgctctatcgtatgatcactaaccctggcgctggtatttcagattcagtgcatggtctacacggcatttggttatttgttggtatcggcttcaattttattattggtgtattaatgactatgggactaggtaattatgctcccgaacttatcttcttctccctaatgggactgagtcctgcagttgctatgcctgtcatgatgctagatgcagctatgataatgacagcttctagtacacaatttatcaagagtggtcgtgttaattggaacggctttgccggtctggttactgggggaatattaggcgttattgtcgctgttctcttcttaactaaccttgatcttaacagcttgaaaacactggttgtaggtattgttttatttactggagcaatgttaatacgttcttcctttaaaaaaactatgcccaaaagtcatcattaa

SEQ ID NO: 3158 - protein, 319 aa, Streptococcus agalactiae
MCSQYHKVKLTVSLFFCRLDIMNETLLLHGIQLILIIAMIITFYQIVRHIRSQKINPFKRFFTGLWIGFVTDALDTLGIGSFATTTTFFKLTKLVEDDRKIPATMTAAHVLPVLLQSLCFIFVVKVEALTLITMAGAAFIGAFVGAKMTKNWHAPTVQRILGTLLITAAIIMLYRMITNPGAGISDSVHGLHGIWLFVGIGFNFIIGVLMTMGLGNYAPELIFFSLMGLSPAVAMPVMMLDAAMIMTASSTQFIKSGRVNWNGFAGLVTGGILGVIVAVLFLTNLDLNSLKTLVVGIVLFTGAMLIRSSFKKTMPKSHH

SEQ ID NO: 3159 - DNA, 828 bp, Streptococcus agalactiae
gtgaagtatatcacagaatttatcgcaaccgcttttcttatcatcttaggaaatggggctgtagctaacgttgacttaaaaggcacaaaaggaaataattcaggttggattattattgcaattggttatggtttaggtgttatgatgccagcgcttatgtttggtaatgtctctggaaaccatattaacccagctttcacacttggattggcattttcaggtcttttcccttgggcacacgttggacaatacattcttgcacaaattttaggagcaatgtttggacagttagttgtcgttatggtttatcaaccttactttgttaagacagaaaatccaaatcatgttcttggatcattttcaactatttctgcattagatgatggacagaaatcaagtcgtaaagcggcttacattaatggtttcttaaatgaattcgttggttcttttgttcttttctttggagctttggctttaacgaagaactattttggtgtagaacttgttggtaaacttgttcaagctggttatgaccaaacgacagcagcgacaaggatttcaccatacgtaactggttcacttgctgtagctcacttaggtattggtttcttggtaatgactctagttgcttctttaggtggaccgactggacctgcattgaaccctgcgcgtgaccttggtccacgtattgttcaccgcttattaccaaaacaaattcttggacaagctaaagaagattcaaaatggtggtatgcatgggtgccagttttagcaccaatcgtagcaagtatactcgctgtagccttgttcaaactattatatctttaa

SEQ ID NO: 3160 - protein, 275 aa, Streptococcus agalactiae
MKYITEFIATAFLIILGNGAVANVDLKGTKGNNSGWIIIAIGYGLGVMMPALMFGNVSGNHINPAFTLGLAFSGLFPWAHVGQYILAQILGAMFGQLVVVMVYQPYFVKTENPNHVLGSFSTISALDDGQKSSRKAAYINGFLNEFVGSFVLFFGALALTKNYFGVELVGKLVQAGYDQTTAATRISPYVTGSLAVAHLGIGFLVMTLVASLGGPTGPALNPARDLGPRIVHRLLPKQILGQAKEDSKWWYAWVPVLAPIVASILAVALFKLLYL

SEQ ID NO: 3161 - protein, 218 aa, Streptococcus agalactiae
TTGATCGAAATCACTTGGACTGTGAAGTATATCACAGAATTTATCGCAACCGCTTTTCTTATCATCTTAGGAAATGGGGCTGTAGCTAACGTTGACTTAAAGGCACAAAAGGRAATAATTCAGGTTGGATTATTATTGCAATTGGTTATGGKTTAGGTGTTATGATGCCAGCGCTTATGTWTGGTAATGTCTCTGGAAANNNNNCATTCATTCATTAA

SEQ ID NO: 3162 - protein, 72 aa, Streptococcus agalactiae
  VARIANT 33, 61, 67, 68, 69: Xaa = Any Amino Acid
MIEITWTVKYITEFIATAFLIILGNGAVANVDXKGTKGNNSGWIIIAIGYGLGVMMPALMXGNVSGXXXFIH

SEQ ID NO: 3163 - protein, 453 aa, Streptococcus agalactiae
ATGACACAAAAATATGAGCGTATTCTTATTGCTATTGATGGGTCTTACGAGTCAGAATTGGCGGTAGAAAAAGGGATAAATGTTGCTCTTCGTAATGATGCTGAATTACTGCTAACGCATGTTATAGATGCTCACGCTTACCAAAGTGAGGGAGTCTTTAGTGACTATGTTTTTGATAGGCAAGAACAAGAGTCAGCAGATGTGCTAGCCTATTTTGAGAAATTAGCACATTCAAAAGGCCTTACAAAGATTAAAAAAATTACTGAAATCGGAAATCCTAAGACTCTTTTGGCAAAGGATATCCCCATAAGGGAAAAAGCAGATTTAATTATGGTAGGCGCAACAGGATTAAACACTTTTGAAAGACTATTGATCGGCTCAACTTCAGAATACATTTTACGTCATTCGAAAGTTGATATGCTAGTCGTTCGTGATAGTAAGAAAACCTTATAA

SEQ ID NO: 3164 - protein, 150 aa, Streptococcus agalactiae
MTQKYERILIAIDGSYESELAVEKGINVALRNDAELLLTHVIDAHAYQSEGVFSDYVFDRQEQESADVLAYFEKLAHSKGLTKIKKITEIGNPKTLLAKDIPIREKADLIMVGATGLNTFERLLIGSTSEYILRHSKVDMLVVRDSKKTL

SEQ ID NO: 3165 - protein, 867 aa, Streptococcus agalactiae
ATGGAATGNNNNNCAACTAATACTATTGTAACAGCCTATATACCAGCTGATAAAAGAGGTGAGGGGATTAACTTTTACGGTCTATCAACAAGTTTAGCCGCAGCTATTGGTCCTTTTGTAGGAACATTTATGCTAGACAACCTTCATATTAACTTTAAAATGGTTATTGTATTATGTAGTATTTTAATTGCGATTGTAGTGTTGGGAGCATTTGTTTTCCCAGTCAAAAATATTACTTTAAATCCAGAACAGTTAGCTAAATCAAAATCATGGACTATTGATAGTTTCATTGAGAAAAAAGCAATTTTTATCACAATTATTGCATTTTTGATGGGTATCTCCTATGCTTCCGTGTTAGGTTTCCAAAAATTATATACAACAGAAATTAATTTGATGACAGTAGGAGCTTATTTCTTTATTGTTTATGCACTTGTCATCACTTTAACCAGACCATCTATGGGAAGATTAATGGACGCTAAGGGAGATAAGTGGGTGCTTTATCCAAGTTATCTGTTCTTAACTTTGGGACTTGCTTTATTAGGGAGTGCTATGGGAAGTGTTACCTACCTTCTATCAGGTGCTTTGATTGGTTTTGGTTATGGCACCTTTATGTCTTGTGGCCAAGCAGCATCAATCAAAGGTGTTGAGGAACATCGTTTCAATACAGCCATGTCAACTTACATGATAGGTCTTGATTTAGGGTTAGGTGCTGGACCTTACATTTTGGGACTTGTTAAAGATGGTTTTCTTGGAGCTGGTGTGCAATCCTTTAGAGAATTATTCTGGATAGCAGCGATTATTCCTGTTGTTTGTGGTATTCTATATTTCTTAAAATCATCTAGACAAGTTGAAACTAAAACTATATAA

SEQ ID NO: 3166 - protein, 288 aa, Streptococcus agalactiae
  VARIANT 3, 4, 5: Xaa = Any Amino Acid
MEXXXTNTIVTAYIPADKRGEGINFYGLSTSLAAAIGPFVGTFMLDNLHINFKMVIVLCSILIAIVVLGAFVFPVKNITLNPEQLAKSKSWTIDSFIEKKAIFITIIAFLMGISYASVLGFQKLYTTEINLMTVGAYFFIVYALVITLTRPSMGRLMDAKGDKWVLYPSYLFLTLGLALLGSAMGSVTYLLSGALIGFGYGTFMSCGQAASIKGVEEHRFNTAMSTYMIGLDLGLGAGPYILGLVKDGFLGAGVQSFRELFWIAAIIPVVCGILYFLKSSRQVETKTI

SEQ ID NO: 3167 - protein, 1089 aa, Streptococcus agalactiae
TTGGAAGACAAATTATTCAACAAACATTTTATAGGCATTACTATTTTAAACTTTATTGTTTATATGGTCTATTATTTGTTTACCGTTATCATAGCTTTTATTGCGACTAAAGAGTTAGGTGTTAGCACTAGCCAAGCAGGATTAGCAACGGGGATTTATATTGTAGGGACTTTGATTGCTCGTCTTATATTTGGCAAGCAATTAGAAGTTCTAGGACGTAAGTTAGTTTTACGTGGAGGGGCTATTTTTTACTTACTAACAACTTTAGCTTATTTTTATATGCCAAGTATCGGAGTAATGTATTTAGTTCGTTTCCTAAATGGTTTTGGTTATGGCGTCGTGTCAACAGCAACTAATACTATTGTAACAGCCTATATACCAGCTGATAAAAGAGGTGAGGGGATTAACTTTTACGGTCTATCAACAAGTTTAGCCGCAGCTATTGGTCCTTTTGTAGGAACATTTATGCTAGACAACCTTCATATTAACTTTAAAATGGTTATTGTATTATGTAGTATTTTAATTGCGATTGTAGTGTTGGGAGCATTTGTTTTCCCAGTCAAAAATATTACTTTAAATCCAGAACAGTTAGCTAAATCAAAATCATGGACTATTGATAGTTTCATTGAGAAAAAAGCAATTTTTATCACAATTATTGCATTTTTGATGGGTATCTCCTATGCTTCCGTGTTAGGTTTCCAAAAATTATATACAACAGAAATTAATTTGATGACAGTAGGAGCTTATTTCTTTATTGTTTATGCACTTGTCATCACTTTAACCAGACCATCTATGGGAAGATTAATGGACGCTAAGGGAGATAAGTGGGTGCTTTATCCAAGTTATCTGTTCTTAACTTTGGGACTTGCTTTATTAGGGAGTGCTATGGGAAGTGTTACCTACCTTCTATCAGGTGCTTTGATTGGTTTTGGTTATGGCACCTTTATGTCTTGTGGCCAAGCAGCATCAATCAAAGGTGTTGAGGAACATCGTTTCAATACAGCCATGTCAACTTACATGATAGGTCTTGATTTAGGGGTTAGGTGCTGGACCTTACATTTTGGGANNNNNCATTCATTCATTAATTAA

SEQ ID NO: 3168 - protein, 362 aa, Streptococcus agalactiae
  VARIANT 356, 357: Xaa = Any Amino Acid
MEDKLFNKHFIGITILNFIVYMVYYLFTVIIAFIATKELGVSTSQAGLATGIYIVGTLIARLIFGKQLEVLGRKLVLRGGAIFYLLTTLAYFYMPSIGVMYLVRFLNGFGYGVVSTATNTIVTAYIPADKRGEGINFYGLSTSLAAAIGPFVGTFMLDNLHINFKMVIVLCSILIAIVVLGAFVFPVKNITLNPEQLAKSKSWTIDSFIEKKAIFITIIAFLMGISYASVLGFQKLYTTEINLMTVGAYFFIVYALVITLTRPSMGRLMDAKGDKWVLYPSYLFLTLGLALLGSAMGSVTYLLSGALIGFGYGTFMSCGQAASIKGVEEHRFNTAMSTYMIGLDLGVRCWTLHFGXXHSFIN

SEQ ID NO: 3169 - protein, 660 aa, Streptococcus agalactiae
ATGAATCATCAAATTTTACAAAATTACATTAATAGTCATAATCTTCCAATTATCGAAAAAGACTACCATAAATACCTTACATTTGAAAGTTTAGAAGAAGACTATACTTATATCCTAAAAGATGGTATTGTTAAACAAAGTGTTCTCTCTAAATATGGTACTGAGTTCAATCTGCGTTATGTGACAGGCTTAGAAATCACTTCTATCCTAAATACAGACTACTCCCAACACATGGGAGAACCTTACAACGTTCGAATCGAATCCGAAACTGCCCACTTTTACAAAGTACGTCGCTCTACCTTCCTAAAAGATATCAATAATGATATTGAACTGCAAGGATATGTGAAAGATTTCTATCATAACCGCCTTGAAAAATCTATGAAAAAAATGCAATGTATGCTCACTAATGGTCGAATTGGTGCTATCTCCACACAATTATATGACCTCAGTAAGATGTTTGGTGAAGAACGAGATAACGGTGATATCTATATTAATTTTGTTATCACGAACGAAGAACTTGGTAAATTTTGCGGAATATCCACAGGAAGTAGCGTGAGCCGCATTTTGAAACAACTAAAAGACGATCATATTATTCGTATTGAAAAACAACATATCATTATTACAAATGTTGAGAAATTAAAAGATCATATTGTATTTTAA

SEQ ID NO: 3170 - protein, 219 aa, Streptococcus agalactiae
MNHQILQNYINSHNLPIIEKDYHKYLTFESLEEDYTYILKDGIVKQSVLSKYGTEFNLRYVTGLEITSILNTDYSQHMGEPYNVRIESETAHFYKVRRSTFLKDINNDIELQGYVKDFYHNRLEKSMKKMQCMLTNGRIGAISTQLYDLSKMFGEERDNGDIYINFVITNEELGKFCGISTGSSVSRILKQLKDDHIIRIEKQHIIITNVEKLKDHIVF

SEQ ID NO: 3171 - DNA, 2286 bp, Streptococcus agalactiae
atgcgttataatcaattcagctacattccaactaaacctaacgaagcttttgaagagctcaaaggactaggttttccattaaacaaaaagaattctgataaagctaatttggaagcttttctcagacattcttttttaaatcaaactgatactgattacgctcttagtctccttatcgttgatgcaaaaaccgatgctctaaccttttttaaatcaaatagtgacttaacactagaaaatttacaatggatttatttacagttattaggctttatcccttttgtagactttaaagaccctaaagcattcttacaagatattaacttcccagtctcatatgacaatatttttcaaagtctacatcacttactcgcctgtcgtggaaaatctggcaatacattaatcgaccaattagttgctgatggtttacttcatgcagataatcactaccattttttcaatgggaagtctctggccactttcaatactaaccaattgattcgcgaagttgtctatgttgaaacatccttagatactatgtctagtggtgaacatgatttagtaaaagttaacattatcagacccactaccgagcatactatccctacgatgatgacagctagcccctatcatcaaggtatcaatgatcctgccgcagaccaaaaaacataccaaatggagggtgcgctagcagttaaacaacctaaacacatacaagttgacacaaaaccatttaaagaagaagtaaaacatccttcaaaattacccatcagccctgcaactgaaagcttcacacacattgacagttatagtctcaatgactattttctttctcggggttttgctaatatatacgtttcaggtgtgggtactgctggctctacgggtttcatgaccagtggggattaccaacaaatacaaagctttaaagcagtcattgattggttaaatggtaaggttactgcattcacaagtcataaacgagataaacaagtcaaggctaattggtcaaatggccttgtagcaaccacaggtaaatcttatcttggtaccatgtcaactggtttagcaacaactggcgttgaggggctgaaagtcattatcgctgaagccgcaatctccacatggtatgattattatcgagaaaatgggcttgtgtgtagtccaggcggctaccccggtgaagatttagacgttttaacagaattaacatactcacgaaacctcttagctggtgattacatcaaaaacaacgattgctatcaagcattgttaaatgaacaatcaaaagcaattgaccgtcaaagtggggattacaaccaatactggcatgaccgtaattacctaactcacgtcaataatgtcaaaagtcgagtagtttacactcatggactacaggattggaatgttaagccaagacatgtctataaagttttcaatgcattgcctcaaaccatcaaaaaacacctttttttacatcaaggtcaacatgtgtatatgcataattggcagtcgattgattttcgtgaaagcatgaatgccttactaagccaagaactacttggcattgacaatcatttccaattagaagaggtcatttggcaagataatactactgagcaaacttggcaagttttagatgctttcggaggaaaccatcaagagcaaattggtttaggtgatagtaaaaaacttattgataaccattatgacaaagaagcctttgatacttattgtaaagacttcaatgtgttcaaaaatgatcttttcaagggaaataataaaaccaatcaaatcactattaatcttcctctaaagaaaaattatctcctgaatggacagtgcaaactccatctacgtgttaaaactagtgacaaaaaggccattttatcagcccaaatcttagactatggtcctaaaaaacgattcaaagatacaccaaccatcaaattcttaaacagccttgataatggtaaaaattttgccagagaagctttacgtgaactcccgtttactaaagatcattatcgtgtcatcagtaaaggtgtcttgaaccttcaaaatcgtacagacttacttacaattgaggctatcgagccagaacaatggtttgatatcgagtttagcctccaaccaagtatatatcaattgagtaaaggtgataatctaaggattatcctttatacaactgattttgaacataccattcgagataatgctagttactctataacagtagatttaagtcaatcttatttaactatcccaactaatcaaggaaattaa

SEQ ID NO: 3172 - protein, 761 aa, Streptococcus agalactiae
MRYNQFSYIPTKPNEAFEELKGLGFPLNKKNSDKANLEAFLRHSFLNQTDTDYALSLLIVDAKTDALTFFKSNSDLTLENLQWIYLQLLGFIPFVDFKDPKAFLQDINFPVSYDNIFQSLHHLLACRGKSGNTLIDQLVADGLLHADNHYHFFNGKSLATFNTNQLIREVVYVETSLDTMSSGEHDLVKVNIIRPTTEHTIPTMMTASPYHQGINDPAADQKTYQMEGALAVKQPKHIQVDTKPFKEEVKHPSKLPISPATESFTHIDSYSLNDYFLSRGFANIYVSGVGTAGSTGFMTSGDYQQIQSFKAVIDWLNGKVTAFTSHKRDKQVKANWSNGLVATTGKSYLGTMSTGLATTGVEGLKVIIAEAAISTWYDYYRENGLVCSPGGYPGEDLDVLTELTYSRNLLAGDYIKNNDCYQALLNEQSKAIDRQSGDYNQYWHDRNYLTHVNNVKSRVVYTHGLQDWNVKPRHVYKVFNALPQTIKKHLFLHQGQHVYMHNWQSIDFRESMNALLSQELLGIDNHFQLEEVIWQDNTTEQTWQVLDAFGGNHQEQIGLGDSKKLIDNHYDKEAFDTYCKDFNVFKNDLFKGNNKTNQITINLPLKKNYLLNGQCKLHLRVKTSDKKAILSAQILDYGPKKRFKDTPTIKFLNSLDNGKNFAREALRELPFTKDHYRVISKGVLNLQNRTDLLTIEAIEPEQWFDIEFSLQPSIYQLSKGDNLRIILYTTDFEHTIRDNASYSITVDLSQSYLTIPTNQGN

SEQ ID NO: 3173 - DNA, 360 bp, Streptococcus agalactiae
atgaaacttctcactaaagaacggtttgatgattctcaacacttttggtaccagatcaatttattacaagagagtaacttcggagcagtttttgaccatgataataaaaacattccacaggttgttgcaactattgttgatgatttacaaggttccggaagttcgaattatttctggtattttggcaatactactgatacttccatccttatgattgctcatttaaatcgaaaattctatattcaggttaatttaaaggactttgactttgcactcaatttaatagctataaataattggaagagtctcctccaaactcaactcgaagctctaaacgataccctagcaatatttcaataa

SEQ ID NO: 3174 - protein, 119 aa, Streptococcus agalactiae
MKLLTKERFDDSQHFWYQINLLQESNFGAVFDHDNKNIPQVVATIVDDLQGSGSSNYFWYFGNTTDTSILMIAHLNRKFYIQVNLKDFDFALNLIAINNWKSLLQTQLEALNDTLAIFQ

SEQ ID NO: 3175 - DNA, 981 bp, Streptococcus agalactiae
atgtcatcttattggaataactatcctgaacttaaaaaaaatattgatgaaaccaatcaactaattcaagaaagaatacaggtcagaaataaagatattgaagcggcgctaagccaactcacagctgcgggaggaaaacagctcagaccagcattcttttaccttttttctcaacttggtaataaggagaatcaagatactcagcaactaaagaaaatcgctgcttctttagaaatccttcacgttgctacattaatccatgatgatgtcattgatgactcaccactaagacgtggaaatatgaccattcaaagcaagtttggcaaagacatcgcagtttacactggggatttacttttcacagtctttttcgatcttattttagaatctatggctgatacaccatttatgaggattaatgcaaaatctatgcgtaaaattctcatgggagaattggaccagatgcaccttcgttacaatcaacaacaaggtatccatcactatttacgtgcgatttcaggtaagacagccgaactctttaaattagctagcaaagaaggagcttactttggtggtgcagagaaggaggttgttcgtctagcaggccatatcggctttaacattggtatgacattccaaattttggatgatatcctggattatactgcagataaaaaaacatttaacaagcctgtcttagaggatttagcacaaggcatttacagccttcctctacttcttgccattgaagaaaatcctgatattttcaaacctattttagataaaaaaacagatatggctactgaagacatggaaaaaattgcttatctcgtcgtttcccatagaggtgttgacaaagctcgccatctagctcgtaaatttactgaaaaagctattagtgacataaataagctaccccagagctctgcaaaaaaacagttgctacaattaactaattaccttttaaaacgcaaaatttaa

SEQ ID NO: 3176 - protein, 326 aa, Streptococcus agalactiae
MSSYWNNYPELKKNIDETNQLIQERIQVRNKDIEAALSQLTAAGGKQLRPAFFYLFSQLGNKENQDTQQLKKIAASLEILHVATLIHDDVIDDSPLRRGNMTIQSKFGKDIAVYTGDLLFTVFFDLILESMADTPFMRINAKSMRKILMGELDQMHLRYNQQQGIHHYLRAISGKTAELFKLASKEGAYFGGAEKEVVRLAGHIGFNIGMTFQILDDILDYTADKKTFNKPVLEDLAQGIYSLPLLLAIEENPDIFKPILDKKTDMATEDMEKIAYLVVSHRGVDKARHLARKFTEKAISDINKLPQSSAKKQLLQLTNYLLKRKI

SEQ ID NO: 3177 - DNA, 219 bp, Streptococcus agalactiae
  misc_feature 9, 10, 11, 12, 13: n = A,T,C or G
atggaatgnnnnnaacaagccttactaagggtatttatgaaagaattggaaggtaagaccttagtttggattacacatcacttaaaaggtattgaacatgctgatcgtatcttatttatagaaaatgggcaattagagttggaaggttctcctcaagaattgtctcaaagtagccaacgttaccgtcagctgaaagcctctgatgatggtgatctatga

SEQ ID NO: 3178 - protein, 72 aa, Streptococcus agalactiae
  VARIANT 3, 4, 5: Xaa = Any Amino Acid
MEXXXQALLRVFMKELEGKTLVWITHHLKGIEHADRILFIENGQLELEGSPQELSQSSQRYRQLKASDDGDL

SEQ ID NO: 3179 - DNA, 1749 bp, Streptococcus agalactiae
atgtttaaaatccctttgtttaaagaattaaagacagatcaatggataaaaccatttttcaaacaatataaagtttccttagtaattgctcttttccttggttttatgactttcttttctgccagtgctcttatgtttaattcgggctatctgattagtaagtcagcttcactaccgagtaatattcttctagtatatgttccaattgtactaacacgtgcttttggcattggacgtcctgtttttcgttatatagaacgcctaacgagtcacaattgggtattacgaatgacttcacagctgcgcttgaagctttaccattccttagaaagcaatgctatctttatgaagcgtgattttcgtttaggagatgttatggggcttttagcggaggatattaattatttgcaaaatttgtatcttaggacaatatttccaacgattatagcgtggatattatatagctttattattattgcaacaggcttcttttctctatggtttgctttaatgatgttgctttatttagctattatgatttttctttttccactttggtcgattttagctaatggtgctcgtcagactcgtgaaaaagaattaaaaaatcatctttatactgatttgacggataatgtcttaggtatttcagactggatttttagtcaacgtggtcaagagtacgtcgccttgcatgagcgttcggaaagtgaactcatggctgttcagaaaaaaattcgttcctttgataatcgtagagctcttattgtggaattagtttttggctttctagctattttggttattatttgggctagtaatcagtttattggtcacagaggtggcgaagctaactggattgcagcatttgttctaacagtatttcccttgtcagaggcatttgctggtttgtctgctgctgctcaagaaacaaataaatattctgattcaattcatcgtcttaatgaattatcagaaacgtattttgaaacaactcaaaatcagttgcctaataagccatacgatttttccgtcaagaatttaagtttccagtataagccacaagagaaatgggttttgcatcatttagatttggatattaaagaaggagaaaaaattgctattttagggcgtagtggttctggcaagagtaccttagccagtctacttcgtggcgacttgaaagcaagtcaaggggagattaccctaggcgatgctgatgtttcaatagttggtgattgcatttctaactatattggagtgatacaacaagcgccctacctttttaatacaaccctgctaaataacattcgcattggaaaccaagatgctagtgaagaagatgtatggaaagttcttgaacgagttggattgaaagagatggtcactgatttatcagatggtctctatacaatggttgatgaagctggacttaggttttcaggtggcgaaaggcatagaattgctttggctagaatcttactaaaagatgtcccaattgttatcttagatgagccaactgttggacttgatcctattactgaacaagccttactaagggtatttatgaaagaattggaaggtaagaccttagtttggattacacatcacttaaaaggtattgaacatgctgatcgtatcttatttatagaaaatgggcaattagagttggaaggttctcctcaagaattgtctcaaagtagccaacgttaccgtcagctgaaagcctctgatgatggtgatctatga

SEQ ID NO: 3180 - protein, 582 aa, Streptococcus agalactiae
MFKIPLFKELKTDQWIKPFFKQYKVSLVIALFLGFMTFFSASALMFNSGYLISKSASLPSNILLVYVPIVLTRAFGIGRPVFRYIERLTSHNWVLRMTSQLRLKLYHSLESNAIFMKRDFRLGDVMGLLAEDINYLQNLYLRTIFPTIIAWILYSFIIIATGFFSLWFALMMLLYLAIMIFLFPLWSILANGARQTREKELKNHLYTDLTDNVLGISDWIFSQRGQEYVALHERSESELMAVQKKIRSFDNRRALIVELVFGFLAILVIIWASNQFIGHRGGEANWIAAFVLTVFPLSEAFAGLSAAAQETNKYSDSIHRLNELSETYFETTQNQLPNKPYDFSVKNLSFQYKPQEKWVLHHLDLDIKEGEKIAILGRSGSGKSTLASLLRGDLKASQGEITLGDADVSIVGDCISNYIGVIQQAPYLFNTTLLNNIRIGNQDASEEDVWKVLERVGLKEMVTDLSDGLYTMVDEAGLRFSGGERHRIALARILLKDVPIVILDEPTVGLDPITEQALLRVFMKELEGKTLVWITHHLKGIEHADRILFIENGQLELEGSPQELSQSSQRYRQLKASDDGDL

SEQ ID NO: 3181 - protein, 1719 aa, Streptococcus agalactiae
ATGCTAGATAAAGCGGTTATGCGCTTGTCAGGTATTCATAAGTTGTTAGGATTGCTTGCGGGACTTGATGTTCTTCAAGCAATCTTTATTATCGGACAAGCTTATTATTTGAGTCTTTCTATAACTGGTTTGTGGGAAGGGCAAAAACTTTCTTCTCAAACGGTTTATATTTTGTTATTTATGGTCTCATATTTAGGCCGTCATGTTATTGATTACATCAAAAATAGAAAACTTGATGACTTTTCAACAGCACAATCTAGTCTTTTGAGACGTCAATTATTAGATAAGTTATTTGATCTAGGTCCTAAAGTCGTTCAAGAACAAGGAACTGGTAATGTTGTTACAATGGCATTAGATGGCGTTTCTTTAGTTGAAAATTATTTACGTTTAGTCTTGAATAAGATGATTAACATGTCTATTATCCCATGGATTATTCTAGCTTATATTTTCTATTTAGATATTGAATCAGGTGCAATTTTACTTATCGTTTTTCCTTTAATTATCATCTTTATGATTATTTTAGGCTATGCGGCTCAAGCTAAAGCAGATAAACAATATGAATCCTATCAAGTACTTTCTAATCATTTTTTAGATTCATTACGAGGCATTGATACTCTCAAATATTTTGGTCTTAGTAAACGTTATGGTAAAAGCATTTATCAAACTAGTGAATCTTTTCGTAAAGCAACAATGAGTACTTTGAAAATTGGTATTTTATCAACGTTTGCTTTAGACTTTTTTACAACTTTATCCATTGCTATCGTTGCTGTTTTTCTAGGTTTACGATTATTAAATGAGCAGATTTACCTTTTACCGGCTTTAACAATTTTGATTTTATCCCCTGAATACTTTTTACCCGTAAGAGATTTTTCTAGTGATTATCATGCAACGTTAGACGGGAAAAATGCATTTCAAGCGATTCAAAAAGTTCTAAACAAAACTGGTATTAAAGGTGAGCAATTAGTCATAGATGATTGGTCTAAAGAGAGTCGTTTGGATTTAGAAAACATTGCTATTGCGTACGACCAAAAACGTGTTGTTGAGGATGTAACCTTACGATTTAGAGGACATCAAAAGGTTGCTTTAGTAGGAGTTAGTGGTTCAGGTAAGTCTAGCTTAATTAACCTTCTGAGTGGTTTTTTAGGGCCTGATAATGGTTCTTTAAAAGTGGATGGTAGAGAAGTGACTAACCTTGATCAAGAAGATTGGCATAAACAGATGATCTATATTCCTCAAACTCCTTATGTTTTTGAAATGTCATTACGTGATAATATTACCTTCTATACTCCCAATGCTAGTGACGAAGAGGTGGTAAGAGCGATTCATATGGTAGGTTTAGATAGCTTGCTAAGCGAGTTACCTGACGGTTTAGAAACGCGTATTGGTAATGGAGCGCGTCCGCTTAGTGGAGGACAAGCCCAGCGTATAGCTCTGGCTCGTGCTTTTCTTGATCAAAATCGTCGTATTATGGTTTTTGATGAACCAACTGCTCATTTAGATATTGAAACAGAGTTAGAATTAAAAGAGAAAATGTTGCCACTGATGTCAGATCGTTTAGTTATCTTTGCAACTCATCGTCTTCACTGGTTGAACCAAATGGATGTTATAGTCGTTATGGAGAAGGGGAGAGTTGCAGAAGTAGGCTCTTATCAGGAATTATTAGCTAAAAAAGGATATCTCTATCAACTGAAGCATGCTATGGGAGGAAATGATGTTTAA

SEQ ID NO: 3182 - protein, 572 aa, Streptococcus agalactiae
MLDKAVMRLSGIHKLLGLLAGLDVLQAIFIIGQAYYLSLSITGLWEGQKLSSQTVYILLFMVSYLGRHVIDYIKNRKLDDFSTAQSSLLRRQLLDKLFDLGPKVVQEQGTGNVVTMALDGVSLVENYLRLVLNKMINMSIIPWIILAYIFYLDIESGAILLIVFPLIIIFMIILGYAAQAKADKQYESYQVLSNHFLDSLRGIDTLKYFGLSKRYGKSIYQTSESFRKATMSTLKIGILSTFALDFFTTLSIAIVAVFLGLRLLNEQIYLLPALTILILSPEYFLPVRDFSSDYHATLDGKNAFQAIQKVLNKTGIKGEQLVIDDWSKESRLDLENIAIAYDQKRVVEDVTLRFRGHQKVALVGVSGSGKSSLINLLSGFLGPDNGSLKVDGREVTNLDQEDWHKQMIYIPQTPYVFEMSLRDNITFYTPNASDEEVVRAIHMVGLDSLLSELPDGLETRIGNGARPLSGGQAQRIALARAFLDQNRRIMVFDEPTAHLDIETELELKEKMLPLMSDRLVIFATHRLHWLNQMDVIVVMEKGRVAEVGSYQELLAKKGYLYQLKHAMGGNDV

SEQ ID NO: 3183 - protein, 1020 aa, Streptococcus agalactiae
ATGAGTGCTTTACAATTCTTTTGGTTTTTCCTAATCGGCCTCCTATTTTCAGGATTCTTCTTCCTTGAAGGATTCGACTTTGGGGTTGGGATGGCTGTTCAAACTTTAACACATAATGAGCATGAAAAAGATCAAGTAGTAGAAACCATTGGCCCAGTTTGGGATGGTAATGAAGTTTGGCTTCTTACCGGTGGTGGAGCAATGTTTGCTTCTTTTCCATACTGGTATGCTTCACTATTTAGTGGTTACTATTTGATTCTCCTTACGATTCTCTTTGGATTAATTATTCGTGGTGTTTCCTTCGAATTTAGACATAAAGTTCCTGCAGAGAAAAAGCAGTTTTGGAACTGGACCTTAACAATTGGTTCCGCTATTGTTCCATTCTTCTTTGGGATTATGTTTATAAGTTTGATTCAAGGTATGCCACTTGATGCCAGTGGTAACTTATCAGCTCAATTCAGTGATTACTTTAATATATTCTCGTTGGTGGGTGGAGTTGCAATGGTATTGCTAGCCTATCTTCATGGTTTAAACTACATTGCATTGAAGACAGAAGGGCCAATTAGAGAGCGTGCCCGTAATTATGCTCAGTTGCTTTATTGGGTACTCTATCTTGGTTTAGCCTTGTTTGCAGTTCTCTTGTATTTCAAGACAGATTTCTTTAGCAATCATCCGATAGTTACGACAATTATGGTTTTGGTTATTGTTGTATTAGCTGTATTAGCGCATGCTTCAACTTTTAAAGGAGCAGAGATGACAGCATTTTTAGCGAGTGGTCTCAGTCTTGTTTCAGTGGTTGTTCTGTTGTTCCAAGGTCTATTCCCACGAGTTATGATTTCATCAATTAGCCCTAAATATGATTTGCTGATTCAAAATGCATCCTCAACGCCATATACTTTAAAAGTAATGTCGATTGTCGCAATTACTCTAGTTCCCTTTGTTCTAGCTTATACAGCATGGGCATATTATATCTTTAGAAAACGTATTACCTTGCCAGTGATTGTGACAGGAGAAAAATAA

SEQ ID NO: 3184 - protein, 339 aa, Streptococcus agalactiae
MSALQFFWFFLIGLLFSGFFFLEGFDFGVGMAVQTLTHNEHEKDQVVETIGPVWDGNEVWLLTGGGAMFASFPYWYASLFSGYYLILLTILFGLIIRGVSFEFRHKVPAEKKQFWNWTLTIGSAIVPFFFGIMFISLIQGMPLDASGNLSAQFSDYFNIFSLVGGVAMVLLAYLHGLNYIALKTEGPIRERARNYAQLLYWVLYLGLALFAVLLYFKTDFFSNHPIVTTIMVLVIVVLAVLAHASTFKGAEMTAFLASGLSLVSVVVLLFQGLFPRVMISSISPKYDLLIQNASSTPYTLKVMSIVAITLVPFVLAYTAWAYYIFRKRITLPVIVTGEK

SEQ ID NO: 3185 - protein, 585 aa, Streptococcus agalactiae
ATGGAATGNNNNNAAGTTTTTGGGATTAAGATTCCTTATATGTTGAGTATTTTATCTTACGGGAAACCATCTGGTTCTGTGAAAGGTATGGATACAGCTAATAAAGAATTGGTTGCTAAGTATGGTAAAGATAACTACTATCCAATGGTTAACCTACTTTTCTATGGTTTCCGTACAATGGCGGCGATGGGAACAGCTATTATGGGTGTTTCTGTTTTAGGACTCTTTTTAACTCGTAAGAAAAAACCAATTCTTTATAAACACAAATGGATGCTTTGGATTGTTGCTTTAACAACCTTTGCACCATTCTTAGCCAATACATTTGGTTGGATTGTGACAGAACAAGGACGATACCCTTGGACTGTCTATGGTCTTTTCAAGATTAAGGACTCTGTCTCTCCAAACGTTTCAGTTGCATCATTATTTGTTTCCAATACTGTGTATTTCTTGTTGTTTGGTGGTTTAGCGGTGATGATGATAAGCCTAACAATAAGAGAATTGAAGAAAGGGCCAGAGTATGAAGATGAACACGGACATCATGGTGCATATACTTCAATTGATCCCTTTGAGGAAGGAGCATACTAA

SEQ ID NO: 3186 - protein, 194 aa, Streptococcus agalactiae
  VARIANT 3, 4, 5: Xaa = Any Amino Acid
MEXXXVFGIKIPYMLSILSYGKPSGSVKGMDTANKELVAKYGKDNYYPMVNLLFYGFRTMAAMGTAIMGVSVLGLFLTRKKKPILYKHKWMLWIVALTTFAPFLANTFGWIVTEQGRYPWTVYGLFKIKDSVSPNVSVASLFVSNTVYFLLFGGLAVMMISLTIRELKKGPEYEDEHGHHGAYTSIDPFEEGAY

SEQ ID NO: 3187 - protein, 627 aa, Streptococcus agalactiae
ATGACAATTGAAACTTTAGCTCGTTTTCAATTTGCGATGACTACAGTTTTCCACTTTTTCTTTGTACCATTTACAATTGGTACATGCCTAGTGGTTGCTATTATGGAGACAATGTATGTTATCACAAAAAATGAAGAGTATAAAAAATTGACAAAATTTTGGGGTAATATCATGCTCCTTAGTTTTGCGGTTGGTGTTGTGACAGGTATCATTCAAGAGTTCCAATTTGGAATGAACTGGTCAGACTATTCACGTTTCGTAGGTGATATTTTTGGAGCTCCATTGGCTATTGAAGCTTTATTAGCTTTCTTTATGGAATCTACTTTCCTTGGTTTATGGATGTTTACATGGGATAACAAAAAAATTAGTAAAAAATTACATGTGACATTCATTTGGCTAGTGGTTTTTGGCTCATTAATGTCAGCGATGTGGATTCTTACTGCTAATAGCTTCATGCAACATCCTGTTGGTTATGAAGTTGTAAACGGTAGAGCGCAAATGACTGATTTTCTTGCACTTGTAAAAAATCCACAGTTCTTCTATGAATTTACCCATGTTATTTTTGGTGCCATTACGATGGGTGGTACAGTGGTTGCTGGTATGTNNNNNCATTCATTCATTAATTAA

SEQ ID NO: 3188 - protein, 208 aa, Streptococcus agalactiae
  VARIANT 202, 203: Xaa = Any Amino Acid
MTIETLARFQFAMTTVFHFFFVPFTIGTCLVVAIMETMYVITKNEEYKKLTKFWGNIMLLSFAVGVVTGIIQEFQFGMNWSDYSRFVGDIFGAPLAIEALLAFFMESTFLGLWMFTWDNKKISKKLHVTFIWLVVFGSLMSAMWILTANSFMQHPVGYEVVNGRAQMTDFLALVKNPQFFYEFTHVIFGAITMGGTVVAGMXXHSFIN

SEQ ID NO: 3189 - protein, 744 aa, Streptococcus agalactiae
ATGAAAGAAATCCTAGTTTTAGGTGCTGGTTATGCCGGTTTGAAAGCAGTTCGTAATTTACAAAAACAATCAGGTGATTTTCATATTACCCTTGTTGACATGAATGATTATCACTACGAAGCTACAGAATTACATGAAGTAGCTGCAGGCTCTCAGCCAAAAGAAAAAATTACATTCCCAATTAAGGATGTTATCAACACTAATAAGGTTAACTTCATGCAAGATGAGGTGCTTAGAGTCGATGCTGAAAATAAAACAGTAACAGTTAAAAATAACGGTGAACTCCATTATGATTATGTCGTAGTTGCCTTAGGCTTTGTATCTGAAACTTTTGGCATCAAGGGTGCTATGGAGAATGCTTTGCAGATGACCAATATTTCGCAAGCAGAAAACATCCATAATCACATTGTTAATACAATGAAGTTGTACCGTGAGACAAAAGATGAAAATCTTCTCAAACTCTTAGTATGTGGTGCTGGTTTTACAGGTATTGAGTTAGCCGGAGCTATGGTTGATGAGCGACCAAAATATGCTGCTTTAGCGGGTGTAAAACCTGAACAAATTGAAATTATTTGTGTAGAGGCAGCAACTCGCATCCTACCAATGTTTGATGATGAATTAGCGCAATATGGTGTCAACTTAATTAAGGATTTAGGTATTAATTTGATGCTTGGAAGTATGATTAAGGAAATCAAACCGGGTGAAGTTGTTTATGGTACTAGTAAAGAGGATGAAGAACTCTAA

SEQ ID NO: 3190 - protein, 247 aa, Streptococcus agalactiae
MKEILVLGAGYAGLKAVRNLQKQSGDFHITLVDMNDYHYEATELHEVAAGSQPKEKITFPIKDVINTNKVNFMQDEVLRVDAENKTVTVKNNGELHYDYVVVALGFVSETFGIKGAMENALQMTNISQAENIHNHIVNTMKLYRETKDENLLKLLVCGAGFTGIELAGAMVDERPKYAALAGVKPEQIEIICVEAATRILPMFDDELAQYGVNLIKDLGINLMLGSMIKEIKPGEVVYGTSKEDEEL

SEQ ID NO: 3191 - DNA, 201 bp, Streptococcus agalactiae
  misc_feature 175, 176, 177, 178, 179: n = A,T,C or G
atgaacaaacttattacagaaaaaaaagtcaacaacgtctcaactgctaactatttgaaacttggtcttgtctcagcaatgtttgctggaggagcattcgtagctcttggttctacacaaggtgtttcagcttcaactttcacagcaccgcaagcaacacctccaaaagcagaannnnncattcattcattaattaattaa

SEQ ID NO: 3192 - protein, 66 aa, Streptococcus agalactiae
  VARIANT 59, 60: Xaa = Any Amino Acid
MNKLITEKKVNNVSTANYLKLGLVSAMFAGGAFVALGSTQGVSASTFTAPQATPPKAEXXIHSLIN

SEQ ID NO: 3193 - DNA, 108 bp, Streptococcus agalactiae
atgcttgttttattaagtgtttatactaaagataatggtatgggatatcaagaagaattatgtatgcataaaaggttaaaatggttagtggcagctatgtgtttatga

SEQ ID NO: 3194 - protein, 35 aa, Streptococcus agalactiae
MLVLLSVYTKDNGMGYQEELCMHKRLKWLVAAMCL

SEQ ID NO: 3195 - DNA, 300 bp, Streptococcus agalactiae
atgatgaatatgcaaaatatgatgcgtcaagcacaaaagcttcaaaaacaaatggaacaaaagcaagctgatttagcagctagccagtttactggaaaatctgctcaagagctcgttaccgtgacatttacaggcgataaaaagctaatttcaattgattacaaagaagctgtggtagaccctgaagatattgaaacactacaagacatgacaactcaagctatcaatgacgctttaagccaagttgacgatgctacaaaaaaaattatgggagcatttgcgggtaaaatgccattctaa

SEQ ID NO: 3196 - protein, 99 aa, Streptococcus agalactiae
MMNMQNMMRQAQKLQKQMEQKQADLAASQFTGKSAQELVTVTFTGDKKLISIDYKEAVVDPEDIETLQDMTTQAINDALSQVDDATKKIMGAFAGKMPF

SEQ ID NO: 3197 - DNA, 999 bp, Streptococcus agalactiae
atggatggagacattgaaatttatggttctatacaagaattaattttatcagcttaccgctgtggagacagctttctacgtaatagtaaatttagcaaattgattcctaaacaatttcatgataaaaaacacagtaaatccgacattcaaaagcattatgacatcggaaatgatttctataaactgtggcttgatgataccatgacttattcatgcgcctattttaaacatgaaaatgatagtctagagcaagctcaactaaacaaagtacaccatattcttaataaattaaatgctcagccgggagggaaattactagacatcggttgtggctgggggacacttatcattactgctgctaaagaatatggcttaaatgcgacaggtatcaccttaagtgaagagcaggcttctttcattactaagcgtatcaaggaagaagggttggaaaataaagtaacagtcctcattaaagattatcgtgacattcgtgaaacatacgattatatcactagtgttggtatgtttgaacatgtaggaaaagaaaatttatctcaatacttccaaaccatttctaaaagactcaacatcaatggtctagctcttattcatggtattactggacaagtgggtggtaatcatggtagtggaactaattcttggattaataagtatatcttcccaggaggatatatccctcgtttaactgaaaatttaaatcatatagctagtgctggacttcaaattgctgacttagaaccgcttcgtcgtcactatcaaaagactctcgaattatggacaaaaaatttccacaatgcccttcctgaagttcagaaaactcatgataagcgttttatcaatatgtgggacctctatcttcaatcttgtgcggcctcttttgaatctggcaatattgatatttttcaatacttgctttcaaaaggtgtttcaaaagacactatgcctatgacacgcgattatatgtattctgctaattga

SEQ ID NO: 3198 - protein, 332 aa, Streptococcus agalactiae
MDGDIEIYGSIQELILSAYRCGDSFLRNSKFSKLIPKQFHDKKHSKSDIQKHYDIGNDFYKLWLDDTMTYSCAYFKHENDSLEQAQLNKVHHILNKLNAQPGGKLLDIGCGWGTLIITAAKEYGLNATGITLSEEQASFITKRIKEEGLENKVTVLIKDYRDIRETYDYITSVGMFEHVGKENLSQYFQTISKRLNINGLALIHGITGQVGGNHGSGTNSWINKYIFPGGYIPRLTENLNHIASAGLQIADLEPLRRHYQKTLELWTKNFHNALPEVQKTHDKRFINMWDLYLQSCAASFESGNIDIFQYLLSKGVSKDTMPMTRDYMYSAN

SEQ ID NO: 3199 - DNA, 726 bp, Streptococcus agalactiae
atgtcagaaaaatattccactggtgacttagctaaagaagcaggagttactgttcgtactgttcagtactatgacaaaagaggaattttatccccatcagaactatctgaaggaggtaggagggtttatagtattgctgatttagaaaagcttagacaaattatttatttacgagatttagatttttcaattgataatatcaaaaatctatttactgaagacaatgctagccagattttagagctttttttacaagtgcagataagagaattaaggctagctattgatagtaaaaaagacaaacttgacaaagctgtcaacctactaaaaactgtagaaaaacaagatagtaaaacattaggctatctttctgacattgtgcttatggaagaaaacaaaagaaaatggggtatactacaaaaaagcatagtgctacaagtcgttatgattattatggtctatattacgttaataatagcagcagtttctctaaatcaaagatggcttatgtggatagcagtaacagtattcttaatagctatgaatggtatggtttggtattttaaacaacaggttgtttatctttgtccaaattgtcatcaaacctttacaccgacatatcaagcatttaatctagcgaaacatacccctaagacgcgaaaagtattctgtccacattgtcaccaaaagtcacattgtatagagttagccagagaagaacgttaa

SEQ ID NO: 3200 - protein, 241 aa, Streptococcus agalactiae
MSEKYSTGDLAKEAGVTVRTVQYYDKRGILSPSELSEGGRRVYSIADLEKLRQIIYLRDLDFSIDNIKNLFTEDNASQILELFLQVQIRELRLAIDSKKDKLDKAVNLLKTVEKQDSKTLGYLSDIVLMEENKRKWGILQKSIVLQVVMIIMVYITLIIAAVSLNQRWLMWIAVTVFLIAMNGMVWYFKQQVVYLCPNCHQTFTPTYQAFNLAKHTPKTRKVFCPHCHQKSHCIELAREER

SEQ ID NO: 3201 - protein, 588 aa, Streptococcus agalactiae
ATGAAACAATTACAAGAATATATAGCTTTTGATTTAGAGTTTAACACGGTTGGTGAGCATAGCCATATTATTCAAGTGTCGGCCGTTAAATATTCTAATCATCAAGAGATTGCTTTATTTGATACTTATGTTCACACAAAAGTTCCATTACAAAGCTTTATTAATGGTTTAACAGGTATTACAGCTAGAGATATTATAGGGGCTCCTAAAATTGAGATAGTTTTGACAGACTTTCAGAGTTTTGTTGGAGATACACCACTGATTGGTTATAATGGGTATAAATCGGATTTACCCCTTTTAGTTGAAAATGGTTTGGATCTAACTAGTCAATATCAGGTGGACTTATATGATGAAGCTTTTGTGAGACGCAGTACAGATTTAAATGGTATTGTCAACCTTAAATTGACTACTGTTGCTGACTTTTTAGGAATAAAGGGTAAAGCACATAATAGCTTAGAGGATGCCCGTATGACTGCGCGTGTTTATGAAAAATTTCTGGACTTGGATGAAAATAAAATCTATTTAAAACAGCAAAAAGAGGTAGCAGTTGATAGCCCATTTGCGACTTTAGGAAATTTGTTTGATTAA

SEQ ID NO: 3202 - protein, 195 aa, Streptococcus agalactiae
MKQLQEYIAFDLEFNTVGEHSHIIQVSAVKYSNHQEIALFDTYVHTKVPLQSFINGLTGITARDIIGAPKIEIVLTDFQSFVGDTPLIGYNGYKSDLPLLVENGLDLTSQYQVDLYDEAFVRRSTDLNGIVNLKLTTVADFLGIKGKAHNSLEDARMTARVYEKFLDLDENKIYLKQQKEVAVDSPFATLGNLFD

SEQ ID NO: 3203 - protein, 537 aa, Streptococcus agalactiae
ATGACAGTTGAAAAGACGGTTAGTGAATTAGCTGAAATTTTAGGGGTTAGTCGTCAAGCGATGAATAACAGAGTTAAAACACTCCCTGAAGAATGTGTGGAAAAGAATAGTAAAGGCGTTACAGTTGTTAATCGTGATGGCTTGATTAAATTGGAAGAAATCTATAAAAAAACTATTTTGGAAGAGGAACCAATTGACGAAGAAGCATCAAGACGAGAACTTTTAGAAATTCTCGTTGATGAGAAGAATACTGAAATCACACGTTTATATGAACAGTTAAAAGCAAAAGATATTCAGATTGCTTCAAAAGACGAGCAGTTACATGTAAAAGATATTCAAATAGCAGAGAAAGATAAGCAATTAGATCAACAACAGCAATTGACTTTAACTGCTATGGAAGATACGCAACGTCTGCAACTTGAGTTAAATGAAGCTAAAGCAGAGGTTGAGGAGATTCAAGAAGCCAAAGAAGAAAAAATTCAAGAATTAGAAGCTGTTAAAAAAAGTTTCTTTGGACGTTTCTTCAATAAAAAATAG

SEQ ID NO: 3204 - protein, 178 aa, Streptococcus agalactiae
MTVEKTVSELAEILGVSRQAMNNRVKTLPEECVEKNSKGVTVVNRDGLIKLEEIYKKTILEEEPIDEEASRRELLEILVDEKNTEITRLYEQLKAKDIQIASKDEQLHVKDIQIAEKDKQLDQQQQLTLTAMEDTQRLQLELNEAKAEVEEIQEAKEEKIQELEAVKKSFFGRFFNKK

SEQ ID NO: 3205 - protein, 225 aa, Streptococcus agalactiae
ATGAATGNNNNNTATGCTGAACTACGTCGTGAGTTAAAAGAAAAGGGTGATTACGAAGCACTTCGTAAACTTCCTAAAGATTCTAACCCTAACCGACTTAAAAATCGTGATTTAATCGATGGCCGTCCTCACGCTTACATGCGTAAATTCGGTATGAGTCGTATTAACTTCCGTAACCTAGCTTACAAAGGCCAAATTCCTGGCATTAAAAAAGCAAGCTGGTAA

SEQ ID NO: 3206 - protein, 74 aa, Streptococcus agalactiae
  VARIANT 3, 4: Xaa = Any Amino Acid
MNXXYAELRRELKEKGDYEALRKLPKDSNPNRLKNRDLIDGRPHAYMRKFGMSRINFRNLAYKGQIPGIKKASW

SEQ ID NO: 3207 - protein, 1026 aa, Streptococcus agalactiae
ATGTTACATTTTGAAAATGATTATAATAAAGGAGCTCATCCAGAGCTTTTAAATGCCCTTATTGAAACTAATGATCAAGGTCTATCGGGATATGGGACAGATAGTTACTGTCAACAAGCGGCAGATAAAATTCGAGAAGTCTGTTCCTGTCCACAAGCTGAAGTTGAGTTTTTAGTGGGTGGTACTCAAACAAATCAAGTAGTTATCAGTAGTATGCTTGCTTCTTATGAAGGAGTTATTGCTGCAGAAACAGGTCATGTGAGTAGTCATGAAGCAGGAGCCATAGAATTTTCAGGGCATAAGGTATTGACTTTACCTTCTCATAATGGGAAATTACTCGCAAGCGAAGTCGCAACTTATATTGAGACTTTTTATGCTGATGGTAATTACCAACACATGGTTTTTCCAGGAATGGTTTATATATCACATCCAACAGAATATGGAACACTTTATAGTAAAGCAGAACTAGAAGAGTTATCGAAGATTTGTAAACATTATCAAATCCCCTTATTTATTGACGGTGCTCGTCTGGGGTATGGTTTGGCTGCGAAAGATACAGATGTTGATTTCCCAACGATTGCAGCCTTATCAGATGTTTTTTATATTGGTGGAACCAAAATGGGGGCTCTTGCTGGGGAAGCAGTTGTTTTCACAAAGAAAAATCGTCCAAAACAGTTTACTACAATTGTAAAGCAGCATGGTGCGTTATTAGCCAAGGGAAGATTGCTGGGGCTTGCTTTTGATCGTTTCTTTACGGATAACCTTTACTTAAAAATTGGAAAGCATGCGATCGACTTAGCAGAGGAATTAAAAATCATTTTAGAAGAAAAAGGTTACTCATTCTATTTAAAATCACCAACTAATCAACAATTTATTATTGTAGAAAATACAAAACTAGCAGATTTAGCAAAGAATGTAGCTTATAGTTTTTGGGAAAAATATGATGACCATCATACTGTAATACGTCTAGCAACTAGTTGGTCAACTAGTCGCGAAGATGTAACTGCTTTAAGAAATGTCTTGTGA

SEQ ID NO: 3208 - protein, 341 aa, Streptococcus agalactiae
MLHFENDYNKGAHPELLNALIETNDQGLSGYGTDSYCQQAADKIREVCSCPQAEVEFLVGGTQTNQVVISSMLASYEGVIAAETGHVSSHEAGAIEFSGHKVLTLPSHNGKLLASEVATYIETFYADGNYQHMVFPGMVYISHPTEYGTLYSKAELEELSKICKHYQIPLFIDGARLGYGLAAKDTDVDFPTIAALSDVFYIGGTKMGALAGEAVVFTKKNRPKQFTTIVKQHGALLAKGRLLGLAFDRFFTDNLYLKIGKHAIDLAEELKIILEEKGYSFYLKSPTNQQFIIVENTKLADLAKNVAYSFWEKYDDHHTVIRLATSWSTSREDVTALRNVL

SEQ ID NO: 3209 - protein, 729 aa, Streptococcus agalactiae
ATGGCTGCAGCAAAAGCTTTCGCTTGGGCAAATAAATTACCTCTAATTCCTATAAACCACATGGCAGGTCATTTAATGGCAGCACGTGACGTTAAGGAACTTCAATACCCATTGTTAGCTTTGCTTGTCAGTGGGGGACATACAGAATTAGTATATGTTTCTGAACCGGGAGATTACAAAATAGTAGGAGAAACTCGGGATGATGCTGTTGGAGAAGCTTATGATAAAGTAGGCCGTGTTATGGGCTTAACTTATCCAGCAGGTCGCGAGATTGATCAGTTAGCTCATAAGGGTCAAGATACTTACCATTTTCCTAGAGCGATGATCAAAGAAGATCATCTTGAATTTTCTTTTTCTGGATTAAAATCTGCATTTATCAATTTACATCATAATGCAGAACAAAAGGGTGAAGCATTGGTTCTTGAAGATTTATGTGCTTCCTTTCAGGCGGCTGTTTTGGATATTTTATTGGCCAAAACTCAAAAAGCTTTGCTAAAGTATCCAGTGAAAACTTTAGTCGTTGCTGGTGGAGTTGCAGCTAATCAAGGACTTCGGGAACGCTTGGCTACTGATATTTCTCCTGATATTGATGTGGTTATTCCTCCTCTTAGATTATGTGGGGATAATGCAGGAATGATTGCATTAGCAGCAGCGATAGAGTTTGAAAAAGAGAATTTTGCTTCTTTAAAATTGAATGCCAAACCTAGTTTAGCTTTTGAGAGTTTATAG

SEQ ID NO: 3210 - protein, 242 aa, Streptococcus agalactiae
MAAAKAFAWANKLPLIPINHMAGHLMAARDVKELQYPLLALLVSGGHTELVYVSEPGDYKIVGETRDDAVGEAYDKVGRVMGLTYPAGREIDQLAHKGQDTYHFPRAMIKEDHLEFSFSGLKSAFINLHHNAEQKGEALVLEDLCASFQAAVLDILLAKTQKALLKYPVKTLVVAGGVAANQGLRERLATDISPDIDVVIPPLRLCGDNAGMIALAAAIEFEKENFASLKLNAKPSLAFESL

SEQ ID NO: 3211 - protein, 171 aa, Streptococcus agalactiae
ATGAAAGATAGATATATTTTAGCAGTGGAAAGTTCATGTGATGAAACTAGTGTTGCTATTTTAAAAAATGATAAAGAGTTACTAGCTAATATTATTGCAAGTCAAGTTGAAAGTCACAAACGTTTTGGTGGTGTTGTTCCTGAANNNNNCATTCATTCATTAATTAATTAA

SEQ ID NO: 3212 - protein, 56 aa, Streptococcus agalactiae
  VARIANT 49, 50: Xaa = Any Amino Acid
MKDRYILAVESSCDETSVAILKNDKELLANIIASQVESHKRFGGVVPEXXIHSLIN

SEQ ID NO: 3213 - protein, 408 aa, Streptococcus agalactiae
ATGGAATCATCAGAACAAGCACTGGCTATATGGAGCGTACTATCTGATGTCTATGACAAATCTCCGTGGAGTTTATCGCAGATTTCAGAAGATTTAAAAAAAGATTCAACAGATTATTTTTTTGTTTATAATGACGGTGAAGTCATTGGTTTTTTGGCTCTTCAACAATTGGTAGGTGAAGTAGAAATTACTAATATTGCTGTTAAAAAAAATTATCAAGGTAAAGGTTATGCTTACCAGTTAATGTCAATGATCGCTGATATAGAGGTGCCAGTTTTTCTTGAGGTTCGTTATTCAAATATCGTAGCACAAAAACTTTATGAGAGGTGTGGTTTTGTAGTTTTAAGAAAGCGCAAAAATTATTACCATGATCCAATTGAAGATGCTATAGTGATGCGCAAGGGATAA

SEQ ID NO: 3214 - protein, 135 aa, Streptococcus agalactiae
MESSEQALAIWSVLSDVYDKSPWSLSQISEDLKKDSTDYFFVYNDGEVIGFLALQQLVGEVEITNIAVKKNYQGKGYAYQLMSMIADIEVPVFLEVRYSNIVAQKLYERCGFVVLRKRKNYYHDPIEDAIVMRKG

SEQ ID NO: 3215 - protein, 693 aa, Streptococcus agalactiae
ATGATGAAAGTTTTAGCCTTTGATACTTCAAGCAAAGCACTATCAGTGGCTGTACTAAACAATATGGAATGTTTAGCGACTGTCACTATCAATATCAAAAAGAATCATAGCATTAATTTGATGCCAGCCATTGATTTTTTAATGCAATCAATTGATTTAGAACCTCAAGATTTGGACCGTATCGTAGTAGCAGAGGGTCCAGGATCTTATACGGGCTTACGTGTAGCTGTTGCTACAGCAAAAATGCTAGCTTATACGCTTAAGATTGACTTAGTTGGAGTATCTAGCCTGTACGCTTTAACAAATGGATTTTCAGAAAATGATTTATTGGTACCACTTATAGATGCACGACGTAATAATGTTTATGTTGGTTTCTATCAAAATGGTGATACTGTTAAACCAGACTGTCACACTTCTCTTGAAGAAGTCTTACAAGAGGTGGGGAATAAAGCCAATGTTCATTTTGTCGGAGAGGTTGCAGCATTTTTTGATCAGATTAAGAAAGCCTTACCACATGCTAAAATTACAGAAACTTTACCTTGTGCAGTAGCAATTGGGCGCAAAGGACAAAAAATGAAAAGCGTTAATGTAGATGCGTTTGTTCCACGATACTTAAAACGTGTTGAAGCTGAGGAAAATTGGTTAAAAAACCACTGTGAAACGAATACAGAAGAATATATTAAGAGAGTTTGA

SEQ ID NO: 3216 - protein, 230 aa, Streptococcus agalactiae
MMKVLAFDTSSKALSVAVLNNMECLATVTINIKKNHSINLMPAIDFLMQSIDLEPQDLDRIVVAEGPGSYTGLRVAVATAKMLAYTLKIDLVGVSSLYALTNGFSENDLLVPLIDARRNNVYVGFYQNGDTVKPDCHTSLEEVLQEVGNKANVHFVGEVAAFFDQIKKALPHAKITETLPCAVAIGRKGQKMKSVNVDAFVPRYLKRVEAEENWLKNHCETNTEEYIKRV

SEQ ID NO: 3217 - protein, 231 aa, Streptococcus agalactiae
ATGATTTATAAAGTTTTCTATCAAGAAACAAAAGAACGCAACCCACGTCGTGAGCAAACCAAAACACTTTACGTTACTATTGATGCAGCTAATGAATTAGAAGGTCGCATTGCTGCACGTAAACTAGTTGAAGAAAATACAGCTTACAATATCGAATTCATCGAGTTACTTTCAGACAAACACCTTGAATATGAAAAAGAAACTGGTGTTTTCGAGCTCACTGAGTTCTAG

SEQ ID NO: 3218 - protein, 76 aa, Streptococcus agalactiae
MIYKVFYQETKERNPRREQTKTLYVTIDAANELEGRIAARKLVEENTAYNIEFIELLSDKHLEYEKETGVFELTEF

SEQ ID NO: 3219 - protein, 1680 aa, Streptococcus agalactiae
ATGTCAAATATCAACTTAAAACCCGAAGAAGTTGGGGTTTATGCGATTGGTGGTCTCGGTGAAATCGGAAAAAATACTTACGGTATCGAATATCAAGACGAAATTATTATTGTAGACGCTGGTATTAAATTCCCTGAAGATGATCTTTTGGGAATAGATTATGTTATCCCAGACTATTCATATATCGTTGAAAACATTGACCGTATCAAGGCCCTTGTTATAACTCATGGGCACGAGGACCACATCGGTGGTATTCCTTTTCTATTAAAACAAGCTAATTTACCGATTTATGCAGGTCCTCTCGCTCTTGCTCTAATCAAAGGTAAGTTAGAAGAACATGGTTTACTTCGTGACGCTACATTATACGAAATCCACGCTAATACAGAGCTGACTTTTAAAAACTTAAGCGTTACATTTTTCCGCACTACTCACTCCATTCCTGAACCATTAGGTATTGTTATTCATACCCCTCAAGGTAAGGTTATTTGTACAGGTGACTTCAAATTTGACTTTACACCTGTTGGGGAGCCCGCTGACTTACATCGTATGGCTGCTCTAGGTGAAGATGGTGTCCTCTGCCTTTTATCAGACTCGACAAATGCTGAAGTTCCAACCTTCACTAATTCCGAAAAAATTGTTGGGCAATCTATTATGAAGATTATCGAAGGTATCGAGGGACGTATTATTTTCGCCTCTTTTGCTTCAAACATCTTCCGACTCCAACAGGCTGCTGAAGCTGCTGTTAAAACTGGTCGTAAAATTGCTGTTTTTGGACGGTCAATGGAAAAGGCAATTGTTAACGGTATTGAACTTGGCTATATTAAAGTTCCAAAAGGTACCTTCATTGAGCCAAGCGAACTTAAAAATCTTCATGCTAGTGAAGTTTTAATTATGTGTACAGGTAGTCAAGGTGAGTCTATGGCAGCACTTGCTCGTATCGCTAATGGTACTCATCGTCAAGTTACTTTGCAGCCTGGTGATACTGTGATTTTCTCATCAAGCCCAATCCCTGGTAATACAACAAGTGTCAATAAATTAATCAATACCATTCAAGAAGCTGGTGTCGATGTTATTCATGGTAAAATTAACAATATCCATACCTCCGGCCATGGTGGTCAACAAGAACAAAAATTAATGTTACGCTTGATTAAACCAAAGTATTTCATGCCCGTACACGGTGAGTATCGCATGCAAAAAGTCCATGCTGGTTTAGCAGTTGACACAGGTATTCCTAAAGAGAATATCTTCATTATGGAAAACGGTGATGTTTTAGCTTTAACGAGCGACTCTGCTCGTATTGCTGGACATTTCAATGCTCAAGATATCTACGTTGATGGGAATGGTATTGGCGATATTGGTGCGGCAGTTCTACGTGACCGCCACGACTTATCTGAAGATGGTGTTGTCCTTGCCGTTGCTACCGTTGATTTCGATTCAAAAATGATTTTAGCTGGACCAGACATCCTTAGCCGAGGCTTTATCTATATGAGAGAATCTGGGGACCTTATTCGCGAAAGCCAACATATCTTATTCAATGCTATTCGTATTGCACTGAAAAATAAAGATGCAAGTATCCAATCAGTAAATGGAGCTATTGTTAATGCCTTACGCCCATTCTTATATGAAAAAACTGAGCGTGAGCCTATCATTATTCCTATGGTCCTTACCCCTGATAAATAA

SEQ ID NO: 3220 - protein, 559 aa, Streptococcus agalactiae
MSNINLKPEEVGVYAIGGLGEIGKNTYGIEYQDEIIIVDAGIKFPEDDLLGIDYVIPDYSYIVENIDRIKALVITHGHEDHIGGIPFLLKQANLPIYAGPLALALIKGKLEEHGLLRDATLYEIHANTELTFKNLSVTFFRTTHSIPEPLGIVIHTPQGKVICTGDFKFDFTPVGEPADLHRMAALGEDGVLCLLSDSTNAEVPTFTNSEKIVGQSIMKIIEGIEGRIIFASFASNIFRLQQAAEAAVKTGRKIAVFGRSMEKAIVNGIELGYIKVPKGTFIEPSELKNLHASEVLIMCTGSQGESMAALARIANGTHRQVTLQPGDTVIFSSSPIPGNTTSVNKLINTIQEAGVDVIHGKINNIHTSGHGGQQEQKLMLRLIKPKYFMPVHGEYRMQKVHAGLAVDTGIPKENIFIMENGDVLALTSDSARIAGHFNAQDIYVDGNGIGDIGAAVLRDRHDLSEDGVVLAVATVDFDSKMILAGPDILSRGFIYMRESGDLIRESQHILFNAIRIALKNKDASIQSVNGAIVNALRPFLYEKTEREPIIIPMVLTPDK

SEQ ID NO: 3221 - protein, 510 aa, Streptococcus agalactiae
ATGGAGGAAAACATGAACATAAAACAATTAAAGTCTAAAACAATGCTTGGAACAGTGGCTTTGGTGTCCGCTTTTTCATTTGCTTCAACAAATGCAGATGCGAATACATATAACTATGCAGTAGATGTAGACTACCTAGCAAGTGCGGAGGAAATTGCTCAAGCACATCCAGCTAGTAATACGTTTCCACTAGGTCAATGCACATGGGGTGTAAAGGAGATGGCAACATGGGCAGGTAACTGGTGGGGAAACGGTGGTGATTGGGCTGCGAGCGCCGCATCAGCTGGTTATACAGTAGGGACACAACCGCGCGTGGGTTCTATCGTATGTTGGACTGATGGTAGTTATGGACATGTGGCTTATGTTACAGCTGTAGATCCTGTCACTAATAAAATTCAGGTTTTAGAATCTAATTATGCAGGTCATCAATGGATTGATAATTATCGTGGTTGGTTTGATCCACAAAATACAGTAACACCAGGGGTAGTTAGCTACATTTATCCGAATTAA

SEQ ID NO: 3222 - protein, 169 aa, Streptococcus agalactiae
MEENMNIKQLKSKTMLGTVALVSAFSFASTNADANTYNYAVDVDYLASAEEIAQAHPASNTFPLGQCTWGVKEMATWAGNWWGNGGDWAASAASAGYTVGTQPRVGSIVCWTDGSYGHVAYVTAVDPVTNKIQVLESNYAGHQWIDNYRGWFDPQNTVTPGVVSYIYPN

SEQ ID NO: 3223 - protein, 1347 aa, Streptococcus agalactiae
ATGACTATCACAGCAGAAGATATTCGTCGCGAAGTTAAGGAAAAAAATGTTACCTTCCTCCGTTTGATGTTCACAGATATCTTAGGAGTAATGAAAAATGTCGAAATTCCGGCTACAGATGAACAATTAGACAAAGTTTTATCAAATAAAGCAATGTTTGATGGATCTTCTATTGAGGGCTTTGTTCGTATCAATGAATCTGATATGTATTTATATCCTGATTTAGATACTTGGATTGTCTTTCCTTGGGGAGATGAAAATGGAGCTGTTGCAGGTCTAATCTGTGATATCTATACAGCAGAAGGAGAACCTTTTGCCGGAGATCCACGTGGAAATCTTAAGCGTAATATGAAACGTATGCAAGAGATGGGCTATAAGTCATTTAACTTAGGACCAGAACCTGAATTTTTCCTATTTAAAATGGATGAAAATGGTAACCCAACACTTGATGTTAATGACAAAGGAGGCTACTTTGACTTAGCTCCAACAGACTTAGCAGATAATACACGTCGTGAAATTGTTAATGTCTTAACACAAATGGGCTTTGAAGTTGAAGCTAGTCATCATGAAGTAGCAGTTGGACAGCATGAAATTGACTTTAAATATGATGATGTTTTAAAAGCCTGTGACAACATTCAATTATTTAAATTGGTTGTTAAAACAATTGCTCGTAAGCATGGTTTATATGCTACTTTTATGGCAAAACCTAAGTTTGGTATCAATGGTTCAGGTATGCATTGTAATATGTCTCTTTTTGATAATGAAGGGAACAATGCTTTCTTTGATCCAGAAGATCCACGTGGAATGCAATTATCAGAGGATGCCTACTACTTTTTAGGTGGGTTAATGAAACACGCTTACAATTACACAGCTATCATTAATCCAACTGTTAATTCTTATAAACGTTTGGTACCAGGATACGAAGCACCAGTTTACGTTGCTTGGGCAGGTCGCAATCGTTCGCCACTTATTCGTGTACCTGCATCTCGAGGTATGGGAACACGCCTAGAATTGCGCTCGGTTGACCCAACAGCAAATCCTTATCTTGCTTTATCAGTACTTTTGGGATCAGGACTTGAGGGAATCGAGAATAAAATTGAAGCACCAGAACCAATTGAGACAAATATCTATGCTATGACTGTAGAAGAACGTCGTCAAGCAGGTATTGTTGATTTACCATCTACTCTTCATAATGCTCTTAAAGCACTTGAAGAAGATGAAGTGGTAAAAGCGGCCCTAGGAACTCATATCTATACTAATTTCTTAGACGCTAAGCGTATTGAATGGGCAAGTTATGCGACTTATGTTTCACAATGGGAAATTGATAATTACCTAGATTTATATTAA

SEQ ID NO: 3224 - protein, 448 aa, Streptococcus agalactiae
MTITAEDIRREVKEKNVTFLRLMFTDILGVMKNVEIPATDEQLDKVLSNKAMFDGSSIEGFVRINESDMYLYPDLDTWIVFPWGDENGAVAGLICDIYTAEGEPFAGDPRGNLKRNMKRMQEMGYKSFNLGPEPEFFLFKMDENGNPTLDVNDKGGYFDLAPTDLADNTRREIVNVLTQMGFEVEASHHEVAVGQHEIDFKYDDVLKACDNIQLFKLVVKTIARKHGLYATFMAKPKFGINGSGMHCNMSLFDNEGNNAFFDPEDPRGMQLSEDAYYFLGGLMKHAYNYTAIINPTVNSYKRLVPGYEAPVYVAWAGRNRSPLIRVPASRGMGTRLELRSVDPTANPYLALSVLLGSGLEGIENKIEAPEPIETNIYAMTVEERRQAGIVDLPSTLHNALKALEEDEVVKAALGTHIYTNFLDAKRIEWASYATYVSQWEIDNYLDLY

SEQ ID NO: 3225 - protein, 372 aa, Streptococcus agalactiae
ATGAAAGAAAGAGAACTTAGGCGTACAATGGCTGTATTCCCGATTGGAGCTGTTATGAAGTTGACAGATTTGACTGCCAGACAAATTCGCTATTATGAGGATCAAGGGTTAATCACACCTGAACGTACTGAAGGTAACCGCCGCATGTTTTCACTGAATGATATGGACCGCTTACTGGAAATAAAAGACTTCATTAGCGATGGTTTGCATATTTCTGATATTAAAAATGAATACATGCAAAGACAACATAAGTCCAAAGAGAAACAAAAGTCATTATCAGATGCCGAGGTTCGTCGACTTTTACAAGATGAGCTCCGTAATCAAGGGCGTTTTTCAAGTCCTTCACAGCACATTGGAAATATGCATTTGTAA

SEQ ID NO: 3226 - protein, 123 aa, Streptococcus agalactiae
MKERELRRTMAVFPIGAVMKLTDLTARQIRYYEDQGLITPERTEGNRRMFSLNDMDRLLEIKDFISDGLHISDIKNEYMQRQHKSKEKQKSLSDAEVRRLLQDELRNQGRFSSPSQHIGNMHL

SEQ ID NO: 3227 - protein, 335 aa, Streptococcus agalactiae
ATGAAAACGTTAAAAAAATTATTATCTAATTACAAGTTTGATATTAAAAAGTTTAAATTGGGAATGAGAACATTTAAAACAGGCTTATCGGTCTTTTTAGTTTTATTGGTTTTTCATTTATTTGGTTGGAAAGGGCTTCAAATTGGTGCTCTAACTGCTGTATTTAGTTTAAGAGAAGACTTTGATAAAAGCGTGCACTTTGGTTTTTCTAGAATTATTGGTAATAGTATAGGTGGCTTACTCTCCTTAGTATTTTTTGCATTCAATGAGATATTTCATCAAGCTTTTTGGGTCACTTATTAATTGTYCYATTTGTACCATGTTATGTATCATGA

SEQ ID NO: 3228 - protein, 112 aa, Streptococcus agalactiae
  VARIANT 104: Xaa = Any Amino Acid
MKTLKKLLSNYKFDIKKFKLGMRTFKTGLSVFLVLLVFHLFGWKGLQIGALTAVFSLREDFDKSVHFGFSRIIGNSIGGLLSLVFFAFNEIFHQAFWVTFINCXLFVPCYVS

SEQ ID NO: 3229 - protein, 1197 aa, Streptococcus agalactiae
ATGGCTAAATTGACTGTTAAAGACGTTGATTTGAAAGGTAAAAAAGTCCTCGTTCGTGTTGACTTTAATGTGCCTTTGAAAGACGGCGTTATCACTAACGACAACCGTATCACTGCGGCTCTTCCAACAATCAAGTATATCATCGAACAAGGTGGTCGTGCTATCCTCTTCTCTCACCTTGGACGTGTTAAAGAAGAAGCTGACAAAGAAGGAAAATCACTTGCACCGGTAGCTGCTGATTTAGCTGCTAAACTTGGTCAAGATGTTGTATTCCCAGGTGTTACTCGTGGTGCAAAATTAGAAGAAGCAATCAATGCTTTGGAAGATGGACAAGTTCTTTTGGTTGAAAACACTCGTTTTGAAGATGTTGACGGTAAGAAAGAATCTAAGAATGACGAAGAACTTGGTAAATACTGGGCTTCACTTGGAGATGGAATCTTCGTTAACGATGCATTTGGTACAGCACACCGTGCTCATGCATCAAACGTAGGTATTTCAGCAAACGTTGAAAAAGCTGTAGCTGGTTTCCTTCTTGAAAACGAAATTGCTTACATCCAAGAAGCAGTTGAAACTCCAGAACGCCCATTCGTAGCTATTCTTGGTGGCTCAAAAGTTTCTGATAAGATTGGTGTTATCGAAAACCTTCTTGAAAAAGCTGATAAAGTTCTTATCGGTGGTGGTATGACTTACACATTCTACAAAGCTCAAGGTATCGAAATCGGTAACTCACTTGTAGAAGAAGACAAATTGGATGTTGCTAAAGACCTCCTTGAAAAATCAAACGGTAAATTGATCTTGCCAGTTGACTCAAAAGAAGCAAACGCATTTGCTGGTTATACTGAAGTTCGCGACACTGAAGGTGAAGCAGTTTCAGAAGGGTTCCTTGGTCTTGACATCGGTCCTAAATCAATCGCTAAATTTGATGAAGCACTTACTGGTGCTAAAACAGTTGTATGGAACGGACCTATGGGTGTCTTTGAAAACCCTGACTTCCAAGCTGGTACAATCGGTGTAATGGACGCTATCGTTAAACAACCAGGCGTTAAATCAATCATCGGTGGTGGTGATTCAGCAGCAGCTGCTATCAACCTTGGCCGTGCTGACAAATTCTCATGGATCTCTACTGGTGGTGGAGCAAGCATGGAATTGCTCGAAGGTAAAGTATTACCAGGTTTGGCAGCATTGACTGAAAAATAA

SEQ ID NO: 3230 - protein, 398 aa, Streptococcus agalactiae
MAKLTVKDVDLKGKKVLVRVDFNVPLKDGVITNDNRITAALPTIKYIIEQGGRAILFSHLGRVKEEADKEGKSLAPVAADLAAKLGQDVVFPGVTRGAKLEEAINALEDGQVLLVENTRFEDVDGKKESKNDEELGKYWASLGDGIFVNDAFGTAHRAHASNVGISANVEKAVAGFLLENEIAYIQEAVETPERPFVAILGGSKVSDKIGVIENLLEKADKVLIGGGMTYTFYKAQGIEIGNSLVEEDKLDVAKDLLEKSNGKLILPVDSKEANAFAGYTEVRDTEGEAVSEGFLGLDIGPKSIAKFDEALTGAKTVVWNGPMGVFENPDFQAGTIGVMDAIVKQPGVKSIIGGGDSAAAAINLGRADKFSWISTGGGASMELLEGKVLPGLAALTEK

SEQ ID NO: 3231 - protein, 870 aa, Streptococcus agalactiae
ATGAAGACTACAAAAGTTTTTTCAGTTTTATCGTTATCTGTTGCTGTATTTATGATGACAGCATGTCAGTCAAACCACAGTACTAAAAAAGCTGATATGTCTCCAGATAAGGTGGAGCAAAAGACGAAATTTAAAAATATTTCTCTAAGTTCTAATAAACTGTTGGCTAAGGAAAACACTATGTCTGTCCTTTGGTATCAAAATTCTGCAGAAGCCAAGGCTTTATATTTACAAGGTTATAATGTTGCTAAAATGAAGTTAGATGATTGGTTACAAAAGCCCAGTGAAAAACCATATTCAATTATCTTAGATTTAGATGAAACAGTTTTAGATAATAGCCCATATCAAGCAAAGAATATTAAAGATGGCTCTAGTTTCACGCCAGAGAGTTGGGATAAATGGGTGCAAAAGAAATCAGCTAAGGCTGTTGCGGGTGCCAAAGAATTTTTGAAGTATGCTAATGAAAAGGGAATAAAAATTTATTATGTCTCAGATCGTACAGATGCTCAAGTTGATGCGACTAAAGAAAATTTAGAGAAGGAAGGTATACCTGTTCAAGGGAAAGACCACTTGCTTTTCCTTAAAAAAGGAATGAAATCTAAAGAGAGTCGCCGTCAGGCAGTTCAAAAAGATACCAATTTAATTATGCTTTTTGGAGATAATTTAGTTGATTTTGCTGATTTTTCTAAATCATCTAGTACAGATAGAGAACAACTACTAACTAAACTTCAAAGTGAGTTTGGTAGTAAATTTATTGTTTTCCCAAATCCTATGTACGGTTCTTGGGAAAGTGCTATTTATCAAGGAAAACATCTGGATGTTCAAAAACAATTGAAAGAACGACAAAAAATGTTGCATTCGTATGATTAA

SEQ ID NO: 3232 - protein, 289 aa, Streptococcus agalactiae
MKTTKVFSVLSLSVAVFMMTACQSNHSTKKADMSPDKVEQKTKFKNISLSSNKLLAKENTMSVLWYQNSAEAKALYLQGYNVAKMKLDDWLQKPSEKPYSIILDLDETVLDNSPYQAKNIKDGSSFTPESWDKWVQKKSAKAVAGAKEFLKYANEKGIKIYYVSDRTDAQVDATKENLEKEGIPVQGKDHLLFLKKGMKSKESRRQAVQKDTNLIMLFGDNLVDFADFSKSSSTDREQLLTKLQSEFGSKFIVFPNPMYGSWESAIYQGKHLDVQKQLKERQKMLHSYD

SEQ ID NO: 3233 - protein, 1011 aa, Streptococcus agalactiae
ATGGTAGTTAAAGTTGGTATTAACGGTTTCGGTCGTATCGGTCGTCTTGCATTCCGTCGCATCCAAAACGTAGAAGGTGTTGAAGTTACTCGTATCAACGACCTTACAGATCCAAACATGCTTGCACACTTGTTGAAATATGACACAACTCAAGGTCGTTTCGACGGTACTGTTGAAGTTAAAGAAGGTGGATTCGAAGTTAACGGTCAATTTGTTAAAGTTTCTGCTGAACGCGAACCAGCAAACATTGACTGGGCTACTGATGGCGTAGAAATCGTTCTTGAAGCAACTGGTTTCTTTGCATCAAAAGAAAAAGCTGAACAACACATCCATGAAAATGGTGCTAAAAAAGTTGTTATCACAGCTCCTGGTGGAAACGACGTTAAAACAGTTGTTTTCAACACTAACCACGATATCCTTGATGGAACTGAAACAGTTATCTCAGGTGCTTCATGTACTACAAACTGTCTTGCTCCAATGGCTAAAGCTTTACAAGACAACTTTGGTGTTAAACAAGGTTTGATGACTACTATCCACGCATACACTGGTGACCAAATGATCCTTGACGGACCACACCGTGGTGGTGACCTTCGTCGTGCTCGTGCAGGTGCTGCAAACATCGTTCCTAACTCAACTGGTGCTGCAAAAGCTATCGGACTTGTTATCCCAGAATTGAACGGTAAACTTGATGGTGCTGCACAACGTGTTCCTGTTCCAACTGGATCAGTAACTGAATTGGTTGCAACTCTTGAAAAAGACGTAACTGTCGAAGAAGTAAATGCAGCTATGAAAGCAGCAGCTAACGATTCATACGGTTATACTGAAGATCCAATCGTATCATCTGATATCGTTGGTATTTCATACGGTTCATTGTTTGATGCTACTCAAACTAAAGTTCAAACTGTTGACGGTAACCAATTGGTTAAAGTTGTTTCATGGTACGATAACGAAATGTCATACACTTCACAACTTGTTCGTACACTTGAATACTTTGCAAAAATTGCAAAATAA

SEQ ID NO: 3234 - protein, 336 aa, Streptococcus agalactiae
MVVKVGINGFGRIGRLAFRRIQNVEGVEVTRINDLTDPNMLAHLLKYDTTQGRFDGTVEVKEGGFEVNGQFVKVSAEREPANIDWATDGVEIVLEATGFFASKEKAEQHIHENGAKKVVITAPGGNDVKTVVFNTNHDILDGTETVISGASCTTNCLAPMAKALQDNFGVKQGLMTTIHAYTGDQMILDGPHRGGDLRRARAGAANIVPNSTGAAKAIGLVIPELNGKLDGAAQRVPVPTGSVTELVATLEKDVTVEEVNAAMKAAANDSYGYTEDPIVSSDIVGISYGSLFDATQTKVQTVDGNQLVKVVSWYDNEMSYTSQLVRTLEYFAKIAK

SEQ ID NO: 3235 - protein, 2078 aa, Streptococcus agalactiae
ATGGCTCGCGAATTTTCACTTGAAAAAACTCGTAATATCGGTATCATGGCTCACGTCGATGCTGGTAAAACAACAACAACTGAGCGTATTCTTTACTATACTGGTAAAATCCACAAAATCGGTGAAACACACGAAGGTGCTTCACAAATGGACTGGATGGAACAAGAACAGAACGTGGTATCACAATTACATCAGCTGCAACAACAGCACAATGGGATGGTCACCGTGTTAACATCATCGATACACCAGGACACGTGGACTTCACAATTGAAGTTCAACGTTCACTTCGCGTACTTGATGGTGCGGTAACAGTTCTTGATGCTCAATCAGGTGTAGAACCTCAAACTGAAACAGTTTGGCGTCAAGCAACAGAATACGGAGTTCCACGTATCGTTTTTGCTAATAAAATGGATAAAATCGGTGCTGACTTCCTCTATTCAGTACAATCACTTCATGACCGTCTTCAAGCGAATGCACACCCAATTCAATTGCCAATTGGTTCAGAAGACGATTTCCGTGGTATTATTGACTTAATCAAAATGAAAGCTGAAATCTATACTAATGACCTTGGTACAGATATCCTTGAAGAAGATATTCCAGCAGAGTATGTTGATCAAGCAAATGAATATCGTGAAAAATTAGTAGAAGCAGTTGCTGATACTGATGAAGATTTGATGATGAAATACCTTGAAGGTGAAGAAATCACTAACGAAGAGTTGATGGCTGCTATTCGTAAAGCAACTATCAATGTTGAATTCTACCCTGTATTGTGTGGTTCAGCCTTCAAGAATAAAGGTGTTCAATTGATGCTTGATGCTGTTATTGATTACCTTCCAAGCCCACTTGATATTCCTGCAATCAAAGGTATTAACCCTGATACTGACGAAGAAGAAACACGTCCTGCTTCAGATGAAGAGCCATTTGCAGCGCTTGCCTTCAAGATCATGACAGATCCTTTCGTGGGTCGCTTAACATTCTTCCGTGTGTACTCAGGTGTTCTTAATTCAGGTTCATACGTGTTGAATACATCTAAAGGTAAACGTGAACGTATCGGACGTATCTTACAAATGCACGCAAATAGTCGTCAAGAAATTGAAACTGTTTATGCTGGGGATATCGCAGCGGCTGTTGGTTTGAAAGATACAACTACAGGTGATTCATTGACTGATGAAAAATCAAAAGTTATTCTTGAATCAATTGAAGTTCCAGAACCAGTTATCCAATTGATGGTTGAGCCAAAATCTAAAGCTGACCAAGATAAAATGGGTATCGCCCTTCAAAAACTTGCTGAAGAAGATCCAACGTTCCGCGTTGAAACTAACGTTGAAACTGGTGAAACAGTTATCTCAGGAATGGGTGAACTTCACCTTGATGTCCTTGTTGACCGTATGAAACGTGAATTCAAAGTTGAAGCAAACGTTGGTGCACCTCAAGTATCATACCGCGAAACATTCCGCGCTTCTACACAAGCACGTGGATTCTTCAAACGCCAATCTGGTGGTAAAGGTCAATTTGGTGATGTTTGGATTGAATTTACACCAAACGAAGAAGGTAAAGGATTCGAATTCGAAAATGCTATCGTCGGTGGTGTGGTTCCTCGTGAATTTATTCCAGCCGTTGAAAAAGGACTTGTAGAATCTATGGCAAACGGTGTTCTTGCTGGATATCCAATGGTTGACGTAAAAGCTAAACTTTACGATGGTTCATACCATGATGTTGACTCATCTGAGACAGCCTTCAAGATTGCTGCATCACTTGCACTTAAAGAAGCTGCTAAATCAGCGCAACCAGCTATCCTTGAGCCAATGATGCTTGTTACAATTACAGCTCCAGAAGACAATCTTGGTGACGTTATGGGTCACGTGACTGCACGTCGCGGTCGTGTTGATGGTATGGAAGCACGTGGTAATACACAAGTTGTTCGTGCCTTTGTTCCACTTGCTGAAATGTTTGGTTATGCAACAGTTCTTCGTTCTGCAACACAAGGACGTGGCACATTCATGATGGTATTTGACCACTACGAAGATGTTCCTAAGTCAGTTCAAGAAGAAATCATCAAGAAAAACTCTGGTGAATAA

SEQ ID NO: 3236 - protein, 692 aa, Streptococcus agalactiae
MAREFSLEKTRNIGIMAHVDAGKTTTTERILYYTGKIHKIGETHEGASQMDWMEQEQERGITITSAATTAQWDGHRVNIIDTPGHVDFTIEVQRSLRVLDGAVTVLDAQSGVEPQTETVWRQATEYGVPRIVFANKMDKIGADFLYSVQSLHDRLQANAHPIQLPIGSEDDFRGIIDLIKMKAEIYTNDLGTDILEEDIPAEYVDQANEYREKLVEAVADTDEDLMMKYLEGEEITNEELMAAIRKATINVEFYPVLCGSAFKNKGVQLMLDAVIDYLPSPLDIPAIKGINPDTDEEETRPASDEEPFAALAFKIMTDPFVGRLTFFRVYSGVLNSGSYVLNTSKGKRERIGRILQMHANSRQEIETVYAGDIAAAVGLKDTTTGDSLTDEKSKVILESIEVPEPVIQLMVEPKSKADQDKMGIALQKLAEEDPTFRVETNVETGETVISGMGELHLDVLVDRMKREFKVEANVGAPQVSYRETFRASTQARGFFKRQSGGKGQFGDVWIEFTPNEEGKGFEFENAIVGGVVPREFIPAVEKGLVESMANGVLAGYPMVDVKAKLYDGSYHDVDSSETAFKIAASLALKEAAKSAQPAILEPMMLVTITAPEDNLGDVMGHVTARRGRVDGMEARGNTQVVRAFVPLAEMFGYATVLRSATQGRGTFMMVFDHYEDVPKSVQEEIIKKNSGE

SEQ ID NO: 3237 - protein, 471 aa, Streptococcus agalactiae
ATGAGTCGTAAAAATCAAGCGCCTAAACGCGAAGTATTGCCAGATCCATTGTATAACTCAAAAATCGTTACACGTCTTATCAACCGTGTAATGCTTGATGGTAAACGTGGTACTGCTGCAACTATCGTATATGATGCTTTTGAAGCAATTAAAGAAGCTACTGGAACAGATGCTCTTGAAGTGTTCGAAACAGCTATGGAAAACATCATGCCTGTCCTTGAGGTACGTGCACGCCGTGTTGGTGGATCAAACTACCAAGTTCCTGTCGAAGTTCGTCCAGAACGTCGTACAACTTTAGGACTTCGTTGGTTGGTTAACGCATCACGTGCTCGTGGTGAACACACTATGAAAGATCGTCTTGCAAAAGAAATCATGGATGCTGCAAACAACACAGGAGCATCAGTTAAGAAACGTGAAGATACTCACAAAATGGCTGAAGCTAACCGTGCCTTTGCACACTTCCGTTGGTAA

SEQ ID NO: 3238 - protein, 156 aa, Streptococcus agalactiae
MSRKNQAPKREVLPDPLYNSKIVTRLINRVMLDGKRGTAATIVYDAFEAIKEATGTDALEVFETAMENIMPVLEVRARRVGGSNYQVPVEVRPERRTTLGLRWLVNASRARGEHTMKDRLAKEIMDAANNTGASVKKREDTHKMAEANRAFAHFRW

SEQ ID NO: 3239 - protein, 414 aa, Streptococcus agalactiae
ATGCCTACAATTAACCAGTTGGTACGTAAACCACGTAAATCTAAAGTTGAAAAATCAGATTCACCTGCTTTGAATATTGGTTACAACAGTCACAGAAAAGTTCACACTAAATTATCTGCACCACAAAAACGTGGTGTTGCAACTCGTGTTGGAACTATGACACCTAAAAAACCTAACTCTGCCCTTCGTAAATTTGCTCGTGTACGTTTGAGCAACCTTATTGAAGTTACTGCTTACATTCCAGGTATCGGACACAACTTGCAAGAACACAGTGTTGTGCTTATCCGTGGTGGACGTGTAAAAGACCTTCCAGGGGTACGTTACCATATCGTTCGTGGTGCACTTGATACTGCAGGTGTAGCTGATCGTAAACAAGGCCGTTCTAAATACGGTGCTAAACGTCCTAAAGGGTAA

SEQ ID NO: 3240 - protein, 137 aa, Streptococcus agalactiae
MPTINQLVRKPRKSKVEKSDSPALNIGYNSHRKVHTKLSAPQKRGVATRVGTMTPKKPNSALRKFARVRLSNLIEVTAYIPGIGHNLQEHSVVLIRGGRVKDLPGVRYHIVRGALDTAGVADRKQGRSKYGAKRPKG

SEQ ID NO: 3241 - protein, 813 aa, Streptococcus agalactiae
ATGAAATTAAGACGTAGCGAACGCATGGTTGTTATTTCAAATTACCTAATAAATAATCCCTATACATTAACTAGTTTAAATACATTTGCTAGTAAATACGGTGCCGCGAAATCTTCGATTTCAGAAGATATTGCTATTATCAAAAAAGCTTTTGAACAAGCTCAAATCGGAGATATTAAAACTGTGACTGGTGCAAGTGGAGGTGTTATCTTTACACCAACTATTGCTGAAGCAGAAGCGAAAGAAATCGTTGAAGAATTAAGACAGCGTTTATCTGAAAACGATCGTATTCTTCCGGGAGGTTACATTTATCTTTCAGATCTACTCAGTACACCAAAAATGTTACAAAGTATTGGTCGCATTATAGCGAACGCTTACAGAGGTCAAAAAATTGATGCTGTCATGACGGTTGCAACAAAAGGTGTTCCTTTAGCAAACGCAGTAGCAAATGTTTTAGATGTTCCTTTTGTTATTGTGAGACGTGATTTGAAGATTACGGAAGGTTCTACTGTGTCAGTAAACTACGCTAGTGGTTCAAGTGGCCGTATTGAAAAAATGTTTCTTTCTAAGCGTAGCTTAAAACCTAACAGTCGAGTTTTAATAGTTGATGATTTCTTGAAAGGTGGAGGTACTGTTTCGGGGATGATTAGTTTACTCTCAGAATTCGATAGCACATTAGTAGGTGTCGCTGTATTTGCAGAAAATGCTCAGGAACAACGTGAGAAGATGGCCTATAAATCTCTTCTGAGAGTATCTGAAATTGATGTAAAAAATAATAGAGTCTCTGTAGAAGCGGGGAATATATTTGATTAA

SEQ ID NO: 3242 - protein, 270 aa, Streptococcus agalactiae
MKLRRSERMVVISNYLINNPYTLTSLNTFASKYGAAKSSISEDIAIIKKAFEQAQIGDIKTVTGASGGVIFTPTIAEAEAKEIVEELRQRLSENDRILPGGYIYLSDLLSTPKMLQSIGRIIANAYRGQKIDAVMTVATKGVPLANAVANVLDVPFVIVRRDLKITEGSTVSVNYASGSSGRIEKMFLSKRSLKPNSRVLIVDDFLKGGGTVSGMISLLSEFDSTLVGVAVFAENAQEQREKMAYKSLLRVSEIDVKNNRVSVEAGNIFD

SEQ ID NO: 3243 - protein, 942 aa, Streptococcus agalactiae
ATGAAAATTAACCAAATGAAAAAAGACGAGCTTTTTGAGGGGTTTTACCTTATAAAGAAAGCAGAAGTTCGTAAAACGCGTGCAGGTAAAGACTTTATTGCCTTTACCTTTCAAGATGATACTGGCGAAATTTCAGGAAATATGTGGGATGCACAGACCTATAATGTAGAAGAGTTTGTAGCCGGTAAAATTGTTCATATGAAAGGGCGTCGTGAAGTTTATAATGGAACTCCCCAAGTCAACCAAATTACATTAAGAAACATCAAAGATGGTGAACCTAATGATCCTAGAGATTTTAAAGAAAAACCTCCAATCAATGTTGACAACGTGAGAGAGTACATGGAACAAATGCTCTTTAAAATTGAAAATGCAACCTGGCAGCGTGTGGTAAGAGCACTTTATCGTAAATACAATAAGGAATTTTTTACCTATCCAGCCGCCAAAACAAACCACCACGCTTTTGAATCAGGATTGGCATATCACACGGCAACAATGGTTCGTTTGGCAGATAGTATCGGAGATATCTATCCAGAACTTAATAAAAGTTTGATGTTTGCTGGTATTATGCTACATGATTTAGCCAAGGTCATTGAGTTATCGGGTCCTGATAATACAGAATATACTATTCGAGGTAATCTTATCGGTCATATTTCACTTATTGATGAGGAATTAACAAAAATACTAGCAGAGCTTAATATTGATGATACAAAAGAAGAGGTTACAGTGTTACGCCATGTTATTCTGAGTCATCATGGACAATTAGAATATGGAAGCCCGGTTCGTCCTAGAATCATGGAGGCAGAAATTATCCATATGATCGATAACATTGATGCAAATATGATGATGATGACAACAGCTTTAAACCGTGTCAACGAAGGTGAAATGACAAATCGCATTTTTGCCATGGATAACCGTTCTTTTTATAAACCGAACATTAAATAA

SEQ ID NO: 3244 - protein, 313 aa, Streptococcus agalactiae
MKINQMKKDELFEGFYLIKKAEVRKTRAGKDFIAFTFQDDTGEISGNMWDAQTYNVEEFVAGKIVHMKGRREVYNGTPQVNQITLRNIKDGEPNDPRDFKEKPPINVDNVREYMEQMLFKIENATWQRVVRALYRKYNKEFFTYPAAKTNHHAFESGLAYHTATMVRLADSIGDIYPELNKSLMFAGIMLHDLAKVIELSGPDNTEYTIRGNLIGHISLIDEELTKILAELNIDDTKEEVTVLRHVILSHHGQLEYGSPVRPRIMEAEIIHMIDNIDANMMMMTTALNRVNEGEMTNRIFAMDNRSFYKPNIK

SEQ ID NO: 3245 - protein, 1275 aa, Streptococcus agalactiae
ATGCTTGTCATCATTTTGATCATTGTACTAGCTAGTCTGACAGTGACGATAATTTCTTACCAAAAAATGACGGAATTAACAAAGTCCGTTGAAAAACAACTTGAAGATAATGCTGATAATCTATCAGACCAACTGACATATCAGATAGAAGTGGCGCAAAAAGATCAAATTCTAACGTTGACTAATCAGCTAAACCGTATGCAACAGGAAATTTATCAGTTGCTTACCGATATGCGTACAGAATTAAATCAGCATTTAACGGAGAGTCGAGATCGATCAGACAAACGCTTGGAATTGATTAACTCCAATTTATCTCAGTCAGTTCAGAAAATGCAAGATTCCAATGAAAAACGCTTGGATCAAATGCGCCAAACTGTTGAGGAAAAGCTAGAAAAAACGCTACAAACGCGTTTGCAAACTTCTTTTGAAACTGTATCGCGTCAACTAGAGAGCGTCAATCAAGGTCTTGGGGAGATGAAAACTGTTGCCCAAGATGTTGGTACACTGAACAAAGTCTTGTCAAATACTAAGACAAGGGGAATATTAGGGGAGTTACAACTCGGCCAAATTATAGAAGATATTATGACAGTTAGTCAATATGAGAGAGAATTTCCTACGGTGTCTGGCTCTTCTGAGCGTGTTGAATATGCTATTAAATTACCTGGAAATGGTCAGGGAGATTATATCTATTTGCCTATTGACTCTAAGTTTCCTCTAGAAGATTATTACCGATTGGAAGATGCTTATGAATTGGGTGACAAGGTTCAAATAGAACTCTATCGTAAATCTTTACTGGCAAGTATTCGTAAATTTGCAAAAGATATAAACAATAAGTACTTAAATCCTCCTGAAACGACAAATTTTGGTATCATGTTCTTACCAACTGAAGGGCTCTATTCTGAAGTGGTAAGAAATGCAACATTCTTTGATAGTCTAAGACGTGACGAAAATATTGTAGTAGCTGGACCGTCAACCTTATCTGCTTTACTAAATTCATTATCTGTTGGCTTTAAAACCTTAAATATTCAAAAGAATGCTAATGATATTAGTAAAATTTTAGGGAATGTCAAGGTTGAATTTGGAAAATTTGGTGGCATGTTATCAAAAGCTCAAAAACAATTAAATACAGCAAGTAAAAGTATTGATAGTTTACTCACAACGCGGACAAACGCTATTATCAGAGTCTTAAATACAGTTGAAGAACATCAAGATCAAGCAACCACTAGCTTGTTAAACCTTCCTATAACAGAAGAAGAGGAAATTAATGAAAATTAA

SEQ ID NO: 3246 - protein, 424 aa, Streptococcus agalactiae
MLVIILIIVLASLTVTIISYQKMTELTKSVEKQLEDNADNLSDQLTYQIEVAQKDQILTLTNQLNRMQQEIYQLLTDMRTELNQHLTESRDRSDKRLELINSNLSQSVQKMQDSNEKRLDQMRQTVEEKLEKTLQTRLQTSFETVSRQLESVNQGLGEMKTVAQDVGTLNKVLSNTKTRGILGELQLGQIIEDIMTVSQYEREFPTVSGSSERVEYAIKLPGNGQGDYIYLPIDSKFPLEDYYRLEDAYELGDKVQIELYRKSLLASIRKFAKDINNKYLNPPETTNFGIMFLPTEGLYSEVVRNATFFDSLRRDENIVVAGPSTLSALLNSLSVGFKTLNIQKNANDISKILGNVKVEFGKFGGMLSKAQKQLNTASKSIDSLLTTRTNAIIRVLNTVEEHQDQATTSLLNLPITEEEEINEN

SEQ ID NO: 3247 - protein, 633 aa, Streptococcus agalactiae
ATGACTAAAATTGCTTTATTTGCTGGCGGTGACTTAACTTATTTTGAATATGATTTTGACTATTTTGTCGGAATTGACCGTGGAAGCCTATTTTTATTAAAAAATGGGCTTTCTTTGGACATGGCAGTGGGTGATTTTGATTCTATAACAGAAGATGAACTGCTTTATATCAAACACTATTGTAGCAATATCGTTTCTGCTAGTGCAGAAAAAAATGATACAGATACAGAATTAGCTTTAAAAACTATTTTCAAAGAATTTCCAGAAGCTCAGGTGACCGTATTTGGAGCATTTGGTGGCAGGATTGACCATATGATGTCTAATATCTTTTTACCAAGTGACAGAGATCTAGAACCATTTATGTCACAAATCAGACTCAAAGATGAACAAAACATAGTGACTTATCTACCATCCGGGAAAAATCAAGTCTCAAGGATTGAAGGGATGTCCTATGTCTCGTTCATGCCTGAGAGTGAGTCTACTTTGCAGATTTCTGGGGCTAAATATGAATTGAACAAAAGTAATTATTTTAAGAAAAAAATGTATTCCAGTAATGAATTTATGACTTCGCCAATTGAAGTAGAGCTCAAAGATGGTTACTTAATCATTATTTATAGTAAGGATAGAGGTTAA

SEQ ID NO: 3248 - protein, 210 aa, Streptococcus agalactiae
MTKIALFAGGDLTYFEYDFDYFVGIDRGSLFLLKNGLSLDMAVGDFDSITEDELLYIKHYCSNIVSASAEKNDTDTELALKTIFKEFPEAQVTVFGAFGGRIDHMMSNIFLPSDRDLEPFMSQIRLKDEQNIVTYLPSGKNQVSRIEGMSYVSFMPESESTLQISGAKYELNKSNYFKKKMYSSNEFMTSPIEVELKDGYLIIIYSKDRG

SEQ ID NO: 3249 - protein, 663 aa, Streptococcus agalactiae
ATGTCAACCAATAAAATTGCCCCATCGATATTAGCAGCAGACTATGCTAATTTTGCTAACGAATTGAAACGTATTGAAGAGACAACAGCAGAATACGTTCATATTGATATCATGGATGGTCAATTTGTCCCTAATATTAGTTTTGGTGCGGATGTTGTATCCAGCATGCGTAAACACAGTAAACTTGTTTTTGATTGTCATCTGATGGTTGTTGATCCAGAACGTTATATTGAGGCTTTTGCTCAAGCTGGTGCTGATATCATGACCATTCATGTTGAAGCAACGAAACATATACATGGTGCGCTTCAAAAGATAAAAGAGGCAGGAATGAAAGCAGGTGTGGTTATTAACCCAGGAACACCCGTAGAATCTCTTATTCCTATCTTAGATTTGGTTGACCAGATTTTAATTATGACTGTTAATCCTGGCTTTGGTGGACAAGCCTTTATTCCAGAAATGATGTCAAAAGTAAAGACAGTTGCAGCATGGCGCAAAGAGTACGGTCATCATTATGATATTGAAGTTGATGGCGGTATAGATAATACTACAATTAAGGCAGCAGCAGAGGCTGGTGCAAATGTCTTTGTTGCAGGTTCTTATCTCTTTAAAGCAAGTGATTTACCTGCACAAGTAGAAACCTTAAGGGTGGCGCTCGATGACTAA

SEQ ID NO: 3250 - protein, 220 aa, Streptococcus agalactiae
MSTNKIAPSILAADYANFANELKRIEETTAEYVHIDIMDGQFVPNISFGADVVSSMRKHSKLVFDCHLMVVDPERYIEAFAQAGADIMTIHVEATKHIHGALQKIKEAGMKAGVVINPGTPVESLIPILDLVDQILIMTVNPGFGGQAFIPEMMSKVKTVAAWRKEYGHHYDIEVDGGIDNTTIKAAAEAGANVFVAGSYLFKASDLPAQVETLRVALDD

SEQ ID NO: 3251 - protein, 831 aa, Streptococcus agalactiae
GTGGAATCTGACGGTGTTGTTTATCAGACACGTGCGCGTGGAAATTTTAGAAAAAAAGGTCAAATTCCCTACGTTGGGGATTGGGTTGAATTTTCTTCGCAAGATCAATCAGAAGGATATATTCTATCAATTGAAGAGCGTAAAAATAGCCTCGTACGACCACCTATTGTTAATATTGATCAAGCTGTCGTTATCATGTCTGCTAAAGAACCTGATTTTAACGCTAACTTATTAGACCGGTTCTTAGTACTTCTAGAATATAAGATGATTCAGCCTATCATTTATATTTCCAAGTTGGATTTGTTAGACGATTTGGTTGTTATTGATGATATTCGCGAACATTATCAGAATATAGGCTACGTTTTCTGTTATTCTCAAGAGGAACTCTTGCCTCTGTTAGCAAATAAAGTGACTGTTTTTATGGGCCAGACAGGTGTCGGAAAATCAACGCTTCTCAACAAAATTGCTCCTGAGTTGAAACTTGAAACTGGTGAAATTTCGGGTAGTTTAGGCCGTGGCCGACACACCACAAGAGCAGTTAGTTTCTATAACGTTCATAAAGGAAAAATTGCAGACACTCCTGGTTTTTCTTCTTTGGACTATGAAGTGGATAATGCAGAGGACTTAAACGAATCCTTTCCAGAGCTTCGTAGACTTAGTCATTTTTGTAAATTCCGCTCGTGTACGCATACACATGAGCCTAAATGTGCTGTAAAAGAAGCCTTAACTCAAGGTCAGTTATGGCAAGTCCGCTATGATAACTACCTCCAATTTTTAAGTGAAATTGAGAGCCGTCGTGAAACATATAAGAAAGTTATTAAAAGAAAGTAG

SEQ ID NO: 3252 - protein, 276 aa, Streptococcus agalactiae
MESDGVVYQTRARGNFRKKGQIPYVGDWVEFSSQDQSEGYILSIEERKNSLVRPPIVNIDQAVVIMSAKEPDFNANLLDRFLVLLEYKMIQPIIYISKLDLLDDLVVIDDIREHYQNIGYVFCYSQEELLPLLANKVTVFMGQTGVGKSTLLNKIAPELKLETGEISGSLGRGRHTTRAVSFYNVHKGKIADTPGFSSLDYEVDNAEDLNESFPELRRLSHFCKFRSCTHTHEPKCAVKEALTQGQLWQVRYDNYLQFLSEIESRRETYKKVIKRK

SEQ ID NO: 3253 - protein, 852 aa, Streptococcus agalactiae
ATGTTGGTTGACAAGAAGTGGCGTTTTGAAGATAGTGCAAGTTATTTCGCTTGTCCTAAATGTCAAAATCCCTTGATAAAAGAAAGTAATAGCCTCAAATGCTCTGATAATCATTGTTTTGATTTATCCAAATTTGGATATGTTAATCTTCTTGGAGGAAAGAAGGTAGATGAACATTATGATAAAAAATCATTTGAAAATCGGCAGCTTGTCTTAGAAAACGGGTATTATAATCATATTTTAGAAGCTATTTCAAAGGTTTTGGAAAATAATTCTCAGTTTCATTCGGTTTTAGATATTGGTTGTGGAGAGGGCTTTTATTCTCGTCAATTAGTTAACAAGCATGAGAAGACTTTCTTGGCTTTTGATATTTCTAAAGATTCGATTCAATTAGCTGCTAAAAGTGATCAGTCTAGGCTTGTGAAATGGTTTGTTTCTGATTTAGCTAACCTTCCTATTCAAGACTCATCAATTGATATCATTTTAGACATTTTTTCTCCTGCAAATTATAAAGAATTTAGGCGGGTGCTGAGTGATGATGGTATCCTTGTAAAGGTTGTTCCTGTAGCTGAACATGTTCAAGAATTGCGAGAAAAAGCTAGTCAATACTTGAAACAGAAAGATTACTCTAATCAAAAAATTCTAGATCACTTTAGAGAAAATTTTGAAATTATTTCTGAGCAGAAAGTTGTTCAAAGCTATAACTGTTCTCAACAAGAACGTCAAGCTTTTATTGATATGACACCGTTGTTATTCAGCGTAGATAAAACGACTATTGATTGGGCGAGTATATCAGAAATTACAGTAGGTGCCTTAATAGTAATTGGAAAAAAGCGCAGTGTATCTAAATAA

SEQ ID NO: 3254 - protein, 283 aa, Streptococcus agalactiae
MLVDKKWRFEDSASYFACPKCQNPLIKESNSLKCSDNHCFDLSKFGYVNLLGGKKVDEHYDKKSFENRQLVLENGYYNHILEAISKVLENNSQFHSVLDIGCGEGFYSRQLVNKHEKTFLAFDISKDSIQLAAKSDQSRLVKWFVSDLANLPIQDSSIDIILDIFSPANYKEFRRVLSDDGILVKVVPVAEHVQELREKASQYLKQKDYSNQKILDHFRENFEIISEQKVVQSYNCSQQERQAFIDMTPLLFSVDKTTIDWASISEITVGALIVIGKKRSVSK

SEQ ID NO: 3255 - protein, 873 aa, Streptococcus agalactiae
ATGAGAATCGCAGATAAAACCGTTACCCGCGCTATTTTGGAGCGTCATGGGTTTACATTTAAGAAATCATTCGGTCAGAACTTTTTGACCGATACTAATATTTTACAGAAGATTGTTGACACGGCAGAGATTGACAAGGGTGTCAACGTGATTGAGATTGGTCCTGGTATCGGGGCTTTGACAGAGTTTTTGGCTGAGAATGCAGCTGAGGTTATGGCTTTTGAGATTGATGATCGTCTCATTCCTATCCTTGCTGATACGCTTGCGCGTTTTGACAATGTCCAAGTGGTCAATCAGGATATCCTCAAGGCTGATTTGCAGACCCAGATTCAGGCTTTCAAGAATCCTGATCTGCCTATCAAGGTGGTCGCAAACCTACCTTACTACATCACAACACCAATCCTTATGCACTTGATTGAGAGCAAGATTCCTTTTGCGGAGTTTGTGGTCATGATACAAAAAGAAGTGGCAGATCGTATTTCAGCTATGCCAAATACTAAAGCATACGGTTCTTTGTCAATCGCAGTGCAGTATTATATGACTGCCAAAGTATCATTTATCGTTCCGAGAACTGTTTTTGTTCCTGCTCCAAATGTAGATTCAGCTATTTTGAAAATGGTCCGTAGAGATCAACCAGTAGTGAGTGTTCAAGATGAGGATTTCTTTTTCAGAGTGTCAAAAGTAGCCTTCGTACATCGTCGTAAAACACTTTGGAATAATCTAACGAGTCATTTTGGAAAATCAGAAGATACTAAAGCAAAATTGGAAAAAGCATTAGAAATAGCAAAAATTAAGCCATCTATTCGCGGAGAAGCCTTATCTATCCCTGATTTTGCAAGTTTAGCAGATGCCTTGAAAGAGGTTGGGATATAA

SEQ ID NO: 3256 - protein, 290 aa, Streptococcus agalactiae
MRIADKTVTRAILERHGFTFKKSFGQNFLTDTNILQKIVDTAEIDKGVNVIEIGPGIGALTEFLAENAAEVMAFEIDDRLIPILADTLARFDNVQVVNQDILKADLQTQIQAFKNPDLPIKVVANLPYYITTPILMHLIESKIPFAEFVVMIQKEVADRISAMPNTKAYGSLSIAVQYYMTAKVSFIVPRTVFVPAPNVDSAILKMVRRDQPVVSVQDEDFFFRVSKVAFVHRRKTLWNNLTSHFGKSEDTKAKLEKALEIAKIKPSIRGEALSIPDFASLADALKEVGI

SEQ ID NO: 3257 - protein, 531 aa, Streptococcus agalactiae
ATGAGAATCGCAGATAAAACCGTTACCCGCGCTATTTTGGAGCGTCATGGGTTTACATTTAAGAAATCATTCGGTCAGAACTTTTTGACCGATACTAATATTTTACAGAAGATTGTTGACACGGCAGAGATTGACAAGGGTGTCAACGTGATTGAGATTGGTCCTGGTATCGGGGCTTTGACAGAGTTTTTGGCTGAGAATGCAGCTGAGGTTATGGCTTTTGAGATTGATGATCGTCTCATTCCTATCCTTGCTGATACGCTTGCGCGTTTTGACAATGTCCAAGTGGTCAATCAGGATATCCTCAAGGCTGATTTGCAGACCCAGATTCAGGCTTTCAAGAATCCTGATCTGCCTATCAAGGTGGTCGCAAACCTACCTTACTACATCACAACACCAATCCTTATGCACTTGATTGAGAGCAAGATTCCTTTTGCGGAGTTTGTGGTCATGATACAAAAAGAAGTGGCAGATCGTATTTCAGCTATGCCAAATACTAAAGCATACGGTTCNNNNNCATTCATTCATTAA

SEQ ID NO: 3258 - protein, 176 aa, Streptococcus agalactiae
  VARIANT 172, 173: Xaa = Any Amino Acid
MRIADKTVTRAILERHGFTFKKSFGQNFLTDTNILQKIVDTAEIDKGVNVIEIGPGIGALTEFLAENAAEVMAFEIDDRLIPILADTLARFDNVQVVNQDILKADLQTQIQAFKNPDLPIKVVANLPYYITTPILMHLIESKIPFAEFVVMIQKEVADRISAMPNTKAYGSXXFIH

SEQ ID NO: 3259 - protein, 492 aa, Streptococcus agalactiae
GTGGAGTATAATGTAACGGAAGCATTGACTAGAGCTGGGGTAGATTTAGCAACGCTTGCAGTCAAAGGGACTGCAACTATGGTAACCAGTAAAATTCAATCAATAAAGGATGTAAAAGATGCTGCAACATTGAGAGCTACTTATGATGATTTAATTAACGAATTATTAGCTGAACGGGAGCAAGCAATTCGCATTGCACAGTCATATAAAGAAGAGTATGAAAAAATTAATATAGATGATGAGGATATTGAATATCTATCCAATACTCTCGAGCAAGGAATCTCATTGTTATATAATTTTTCTGGTCTAAATGAGGAACAGGAACGAACAATGAAACAATTGGTTACATTATTGAATAAAGATACTTTAAAAACAATGCAGTTGATTGGATTTAATTATAAGCAAGCAATAGGAGGACCACTAACCGAAGCTTGTGCAACTGCAATTAAAAATAAGTTTATAACTCAGAATAGTAAAGGCAAAAGGAAGTAG

SEQ ID NO: 3260 - protein, 163 aa, Streptococcus agalactiae
MEYNVTEALTRAGVDLATLAVKGTATMVTSKIQSIKDVKDAATLRATYDDLINELLAEREQAIRIAQSYKEEYEKINIDDEDIEYLSNTLEQGISLLYNFSGLNEEQERTMKQLVTLLNKDTLKTMQLIGFNYKQAIGGPLTEACATAIKNKFITQNSKGKRK

SEQ ID NO: 3261 - protein, 561 aa, Streptococcus agalactiae
ATGAAAAAAATTGATATTCAAGAAGTGATCGTTGTCGAAGGGAAAGATGATACTGCTAATCTGCGACGCTTTTACAATGTTGATACCTATGAAACTAGAGGTTCAGCAATTGATGAAGATGATTTAGAGCGTATCGAACGTTTGCACAATTTGCGGGGAGTTATCGTCTTTACAGACCCAGATTATAATGGCGAGCGTATCCGTAAAATCATCATGAATGCCATTCCGACAGTCCGCCATGCCTTCCTCAATCGAGACGAGGCAAAGCCAGGCTCAAAGACCAAGGGACGATCTCTGGGTGTCGAGCATGCCAGCTTTGAAGATTTGCAGAAGGCACTCTCAAAAGTGACTCAGCATTTCGATGATGAAGATCATTTCGATATCACCCAAGCAGACCTCATTCGTTGGGGATTCATTACTGCTAGCGATAGCCGAAAACGCCGTGAGTATCTTGGGAATCAACTCCGTATCGGCTACTCAAATGGTAAACAACTCCTCAAACGCCTCAGACTCTTCGGAGTGACCAAGGCAGAAGTTGAAGAGTGTATGGAGGGGTATTAA

SEQ ID NO: 3262 - protein, 186 aa, Streptococcus agalactiae
MKKIDIQEVIVVEGKDDTANLRRFYNVDTYETRGSAIDEDDLERIERLHNLRGVIVFTDPDYNGERIRKIIMNAIPTVRHAFLNRDEAKPGSKTKGRSLGVEHASFEDLQKALSKVTQHFDDEDHFDITQADLIRWGFITASDSRKRREYLGNQLRIGYSNGKQLLKRLRLFGVTKAEVEECMEGY

SEQ ID NO: 3263 - protein, 586 aa, Streptococcus agalactiae
ATGAAAAAAATTGATATTCAAGAAGTGATCGTTGTCGAAGGGAAAGATGATACTGCTAATCTGCGACGCTTTTACAATGTTGATACCTATGAAACTAGAGGTTCAGCAATTGATGAAGATGATTTAGAGCGTATCGAACGTTTGCACAATTTGCGGGGAGTTATCGTCTTTACAGACCCAGATTATAATGGCGAGCGTATCCGTAAAATCATCATGAATGCCATTCCGACAGTCCGCCATGCCTTCCTCAATCGAGACGAGGCAAAGCCAGGCTCAAAGACCAAGGGACGATCTCTGGGTGTCGAGCATGCCAGCTTTGAAGATTTGCAGAAGGCACTCTCAAAAGTGACTCAGCATTTCGATGATGAAGATCATTTCGATATCACCCAAGCAGACCTCATTCGTTGGGGATTCATTACTGCTAGCGATAGCCGAAAACGCCGTGAGTATCTTGGGAATCAACTCCGTATCGGCTACTCAAATGGTAAACAACTCCTCAAACGCCTCAGACTCTTCGGAGTGACCAAGGCAGAAGTTGGAAGAGTTRGGAGGGGTMTTAATAGNNNNNCATTCATTCATTAATTAA

SEQ ID NO: 3264 - protein, 195 aa, Streptococcus agalactiae
  VARIANT 183, 189, 190: Xaa = Any Amino Acid
MKKIDIQEVIVVEGKDDTANLRRFYNVDTYETRGSAIDEDDLERIERLHNLRGVIVFTDPDYNGERIRKIIMNAIPTVRHAFLNRDEAKPGSKTKGRSLGVEHASFEDLQKALSKVTQHFDDEDHFDITQADLIRWGFITASDSRKRREYLGNQLRIGYSNGKQLLKRLRLFGVTKAEVEKSXGGVLIXXHSFIN

SEQ ID NO: 3265 - protein, 855 aa, Streptococcus agalactiae
ATGCTTCAGTCTTATGTTATAATAATAAAGATTAATGCTTGTAGCTACGATAAGCAAAGAAAGAACGATGATATGATAAAAATATTTGATACCCATACCCACCTTAACGTAGAAAATTTTGAAGGAAAGATAGACGAGGAAATTAATTTAGCTAGCGAACTCGGTGTTACAAAAATGAATGTTGTCGGCTTTGACCAAGATACCATTTCAAAATCTTTGGAATTATCTTCCCAATATGCACAGGTATATAGCACAATAGGATGGCATCCAACTGAAGCTGGTTCTTATGATGATAATATTGAGTCAATGATTATCAGTCATTTAGAAAATCCCAAGGTTATTGCACTTGGTGAAATTGGTCTGGATTATTATTGGATGGAGGATCCCAAAGATATTCAGATCGAGGTGTTTAAGCGTCAAATTGAACTTTCAAAAGAGTATAACCTTCCTTTTGTCGTTCATACACGTGATGCGTTAGAAGACACTTATGAAGTCATTAAGGAATCTGGAGTTGGGCCTTTTGGTGGTATAATGCACTCTTTTTCTGGTTCTTTGGAAATGGCTCAGAAATTTATTGATTTAGGGATGATGATTTCCTTTTCTGGTGTTGTGACCTTTAAGAAGGCATTAGATGTACAAGAAGCTGCACGAGAGTTGCCATTAGATAAGATATTAGTGGAAACAGATGCTCCTTATTTGGCTCCTGTACCTAAAAGAGGTCGAGAAAACAAAACCGCTTATACGAGATATGTCGTTGAAAAAATAGCAGAGCTACGAGGCATAACTGTGGAAGAGGTAGCGGAGGCTACATACCAAAATGCAGTAAGGATATTTAGACTTGATGAAAAAAATTGA

SEQ ID NO: 3266 - protein, 284 aa, Streptococcus agalactiae
MLQSYVIIIKINACSYDKQRKNDDMIKIFDTHTHLNVENFEGKIDEEINLASELGVTKMNVVGFDQDTISKSLELSSQYAQVYSTIGWHPTEAGSYDDNIESMIISHLENPKVIALGEIGLDYYWMEDPKDIQIEVFKRQIELSKEYNLPFVVHTRDALEDTYEVIKESGVGPFGGIMHSFSGSLEMAQKFIDLGMMISFSGVVTFKKALDVQEAARELPLDKILVETDAPYLAPVPKRGRENKTAYTRYVVEKIAELRGITVEEVAEATYQNAVRIFRLDEKN

SEQ ID NO: 3267 - protein, 273 aa, Streptococcus agalactiae
ATGTGGGATGTCCTGACTGGTAAGGAGTCAGTAAGGACTTTAAAAAAACAATTGGATAAAGAATTGATACATAGCGTGTACGCGCCACGCAAGAGATCTAAGTTTCACGATATTATTACGTCGCATCATAAAGAAATAGACGAAGTAGCCATCAACACAAAGACAGCTATTCATAAAGTTGCTAATCAATTGGACGAGGCAATAAAAGGAGAATTTCGTTCAAAGGTTGAGGAGGCTATTGAAAGCAATCAGCAAAAATATAATCATTTATAG

SEQ ID NO: 3268 - protein, 90 aa, Streptococcus agalactiae
MWDVLTGKESVRTLKKQLDKELIHSVYAPRKRSKFHDIITSHHKEIDEVAINTKTAIHKVANQLDEAIKGEFRSKVEEAIESNQQKYNHL

SEQ ID NO: 3269 - protein, 393 aa, Streptococcus agalactiae
ATGGCACTGATTGATATCATTGAAAAACAATTAGCTGATACTCAGAGAAAAATATCAGATTTAGATGATGCCTATCACCATAGTTGTTGCCAGTTTGAAGAAAAATTAGACGATCTCTCAGTAAGAAAAAATAAGATTATTAATATGCTTCAAGAAACTTACGACGCTGTTGAATATGATTTGAGATATAGTAATGATAGCTCAGATATGATGACGCTCAATCGTATTTTAGATTCTTATCATGACGACTTAGAGCAAGCTTACCATAAAGAGTACTATGCCTTGTCCGCTCAAGAAGAAGAATATAGAGCTAACTATATTCGGCAACGTTCAGAACATGAACTAACCTTTGAAGAGTTGCAAAGGGAAAAGAAAAGAGAATTAATGAAGTAG

SEQ ID NO: 3270 - protein, 130 aa, Streptococcus agalactiae
MALIDIIEKQLADTQRKISDLDDAYHHSCCQFEEKLDDLSVRKNKIINMLQETYDAVEYDLRYSNDSSDMMTLNRILDSYHDDLEQAYHKEYYALSAQEEEYRANYIRQRSEHELTFEELQREKKRELMK

SEQ ID NO: 3271 - protein, 1293 aa, Streptococcus agalactiae
ATGGAAAAAGTCTTGACTGATTTAGATAGGGTAAATATAGCGAAGCAAGAGTATGAATTAGGTAGCCAACTTGATACACTAGTCAAAATAATGAGCCAAGATAAGGTACTCCCCATCGGTAAAGTTGCTCACGTTCAAGATGGAGGCAAAGAAACCGGGGAACAAATTTATACCATCACTCCAAATGGAACTTTAGACAAGCCAGAGGATGTTAAGGAAGTTACGGTTTTATTTAAGGGGTCAACAGCACCGTTTGGAGGGGATGATTGGAAAACAGACTGGTTTAAAAATGATATTCCAATAGCTAGTAAACTATTATTAAAGAAATTTGGTTCACAAAGTGTATCTCATAAACAAGGTACAAAGCAGTTAGAACAATCAGCTCATCTGCTAAAAGAAGTTATGAATAAATATCCTAACGCAAAAATTTCGGTCTACGGACACTCGTTAGGGTCAATGAATGCACAGTATGCTATTGCAGAATTGGATGATAATCAAATTTACCGAGTTCAAGGAGCTTGGATATATAACGGTCCAAACCTTTATAGTATTTTGACAGATAAACAAAAAGAACAGGTTGATAAAATAAAAGGGGTGGTCAATAATTACGTTGATTCCAAGGATAAAATTGGAATAGGTTATCCTAAAGAAGGAAGCGATAATGCTGTCGGAATTGTTAAAATAGTTGACAGTAAAGCTGTTTCAGGAGGTAGCTGGGTTGCTAATTTTACCAATCAGCATATTTGGGGAGGCTACCAGTACAATCCAGATGGTTCTTTAAAATTAGCAGAAGATAAATTTGCTTACAAAGAAAACTATTCAGTAGTTCATACGAATGTGAATCAAAGAATGCATGCTATTAAAGCGAAACTTAGTAGCTTTAAAAGTACGGGAAAAGAAGTTAGTAAGAATCAAGCTATTTTCCTAGATAGTCAACAAGCAAAAGTGATCTCTAGTGGTTTGGTAACGATATCAAAAGAAGCAGTTGAAGAAGTTAAAAAAGTTGAGCAAAAAGCAGTTGCTAAAGCAGAAGAGCTTTATCAATCTTTAAAAGTAGCTCCTACAGGAGTTACTGAACTAAGTCCTCAAGAATTGGAAGAAGCGTATGCTCAGTCAGGTGTTAGCTATGCGAGCATTGTCGGAGAAGCTCAAACCTTTTTCTCAAATAAAACTCAAGCGGCAGAAAGCATTTCTCACGCTTACGTTGAATTAGAAAACCAAATTAATAAAGGAGTTGAAGCTATGTTGCGACAAGATAGTAACTTGTCAGGGGAGTTTAAACAATGGCACTGA

SEQ ID NO: 3272 - protein, 430 aa, Streptococcus agalactiae
MEKVLTDLDRVNIAKQEYELGSQLDTLVKIMSQDKVLPIGKVAHVQDGGKETGEQIYTITPNGTLDKPEDVKEVTVLFKGSTAPFGGDDWKTDWFKNDIPIASKLLLKKFGSQSVSHKQGTKQLEQSAHLLKEVMNKYPNAKISVYGHSLGSMNAQYAIAELDDNQIYRVQGAWIYNGPNLYSILTDKQKEQVDKIKGVVNNYVDSKDKIGIGYPKEGSDNAVGIVKIVDSKAVSGGSWVANFTNQHIWGGYQYNPDGSLKLAEDKFAYKENYSVVHTNVNQRMHAIKAKLSSFKSTGKEVSKNQAIFLDSQQAKVISSGLVTISKEAVEEVKKVEQKAVAKAEELYQSLKVAPTGVTELSPQELEEAYAQSGVSYASIVGEAQTFFSNKTQAAESISHAYVELENQINKGVEAMLRQDSNLSGEFKQWH

SEQ ID NO: 3273 - protein, 393 aa, Streptococcus agalactiae
ATGAAGTCAATAAAATTACTTAGTTTTATTGTAATAATCCTTTTAGGGCTTGGTTTCACTGTAGGAGGTTTAAAAGTGACTGAAAACAATAAACAACAAGAATTATGGGAAATAGCTAATAGCAAAGACGCTAAAAATGCTTATCAAAAGTGGATTTATGCAGAAGATGAAGATGCTTTCAAAGAGAATGCTGTTATTAAGTCGTATGATATTGACAAAGAAAGTATCAAAAAAAATCCTATGGGAGGGATTTCGGTAAGGTTAATCATTAATAAAGATCCTAACTTATATATTACTTGTAATTTGGATAGGGATAATCAAGGGCATTTGGTCAGTCAAAGTAGCCATCAATCTCCCCAGTTAACTCATTTATTGGAAAGTAGAGGTCATTAA

SEQ ID NO: 3274 - protein, 130 aa, Streptococcus agalactiae
MKSIKLLSFIVIILLGLGFTVGGLKVTENNKQQELWEIANSKDAKNAYQKWIYAEDEDAFKENAVIKSYDIDKESIKKNPMGGISVRLIINKDPNLYITCNLDRDNQGHLVSQSSHQSPQLTHLLESRGH

SEQ ID NO: 3275 - protein, 1263 aa, Streptococcus agalactiae
ATGCTTAAACGTCTAGGTAAAGTATTTGGACCTCTAGTTTGTGCTTTACTATTGTTGGTAGGATTATATTTTGTTTTTCCTGTTTCTCAGCCTCATCATTTAGGTAAGGAAAAAAACAGTGCAGTAGCGTTGACGAAGGCAGGTTTTAAAAGCAGAGTTCAAAAAGTTAGAGCTTTCAGTGATCCTAAAGCCAATTTTGTCCCTTTCTTTGGTTCAAGTGAGTGGCTAAGATTTGACGCAATGCATCCATCAGTTTTAGCAGAGGCTTACAATAGGTCTTATATCCCATATCTTTTAGGTCAAAAAGGGGCGGCTTCTCTGACACAATACTATGGCATTCAACAGATTAAAGGACAAATCAAAAATAAAAAAGCTATCTATGTTATTTCTCCGCAATGGTTTGTTCGCAAGGGAGCCAACAAAGGTGCTTTTCAAAACTATTTCAGCAACGATCAAACCATTCGATTTTTGCAAAATCAAACAGGGACAACCTACGATAGGTATGCTGCTCGTCGATTGTTAAAATTATATCCTGAAGCTTCTATGTCAGATTTGATAGAAAAAGTTGCAGATGGCCAAAAACTATCAAATAAAGACAAACAAAGACTAAAGTTTAATGATTGGGTATTTGAGAAGACAGATGCTATTTTTAGCTATCTACCACTAGGAAAAACTTATAATCAGGCAATAATGCCTCATGTTGGTAAATTACCGAAAGCATTCTCATATAATCATTTATCGCGTATTGCATCACAAGATGCTAAAGTAGCAACGAGATCAAATCAATTTGGTATTGATGATCGCTTTTACCAAACAAGAATTAAAAAGCACTTAAAAAAATTGAAAGGGTCACAACGACATTTCAATTATACTAAGTCACCAGAATTTAATGATTTACAGTTGGTTCTTAATGAATTCTCAAAACAAAATACAGATGTCCTTTTTGTCATACCACCAGTAAATAAAAAGTGGACAGACTACACAGGGCTTGATCAAAAAATGTATCAAAAATCTGTAGAAAAAATAAAACACCAACTTCAAAGTCAAGGTTTCAATCATATCGCTGACCTTTCTCGAGATGGAGGTAAGCCATACTTTATGCAAGATACAATCCATTTAGGTTGGAATGGTTGGTTAGAGCTAGATAAGCATATCAATCCATTTTTAACAGAGGAAAACAGCAAGCCGAATTATCACATTAATAATAAATTTTTGAAGAAATCTTGGGCAAAATATACAGGACGTCCAAGTGATTACAAGTAA

SEQ ID NO: 3276 - protein, 420 aa, Streptococcus agalactiae
MLKRLGKVFGPLVCALLLLVGLYFVFPVSQPHHLGKEKNSAVALTKAGFKSRVQKVRAFSDPKANFVPFFGSSEWLRFDAMHPSVLAEAYNRSYIPYLLGQKGAASLTQYYGIQQIKGQIKNKKAIYVISPQWFVRKGANKGAFQNYFSNDQTIRFLQNQTGTTYDRYAARRLLKLYPEASMSDLIEKVADGQKLSNKDKQRLKFNDWVFEKTDAIFSYLPLGKTYNQAIMPHVGKLPKAFSYNHLSRIASQDAKVATRSNQFGIDDRFYQTRIKKHLKKLKGSQRHFNYTKSPEFNDLQLVLNEFSKQNTDVLFVIPPVNKKWTDYTGLDQKMYQKSVEKIKHQLQSQGFNHIADLSRDGGKPYFMQDTIHLGWNGWLELDKHINPFLTEENSKPNYHINNKFLKKSWAKYTGRPSDYK

SEQ ID NO: 3277 - protein, 240 aa, Streptococcus agalactiae
ATGGATATTAAATCAGAAGTATTAGCAATTATTGATGACCTATTTATGGAGGATGTTTCTTCTATGATGGATGAAGACTTATTTGACGCAGGAGTTCTAGACAGCATGGGTACTGTTGAACTAATTGTTGAGTTGGAAAGCCACTTTAATATTGATATTCCGATTGCGGAATTTGGTCGTAATGACTGGAACACAGCTAATAAAATTGTTGCTGGAGTAACGGAGCTCTGCAATGCTTAA

SEQ ID NO: 3278 - protein, 79 aa, Streptococcus agalactiae
MDIKSEVLAIIDDLFMEDVSSMMDEDLFDAGVLDSMGTVELIVELESHFNIDIPIAEFGRNDWNTANKIVAGVTELCNA

SEQ ID NO: 3279 - protein, 1266 aa, Streptococcus agalactiae
GTGATACAGGCATTTTTAGAAAAACTTCCTCACTTGGATGTTTATGGGAATCCACAATATTTCTTCTACCTTATCTTAGCTGTCCTACCAATTTACATCGGCTTATTCTTTAAGAAGCGTTTTGCCTTATATGAGATTATTTTTAGTCTAAGTTTTATTGTAATGATGTTGACTGGTAGTACTTTTAATCAATTGAAGTCACTATTGGCATACGTTGTCGGACAGTCTCTGCTAGTTTTTATCTATAAAGCTTACCGGAAACGATTTAATCATACTTTGGTCTTTTATGTAACGGTTTGTTTATCTATTTTTCCGCTATTTTTGGTAAAATTAATTCCAGCTATATCTGAGGATGGGCATCAGTCACTTTTTGGGTTTCTAGGAATTTCTTACCTTACTTTTAGAGCTGTTGCTATGATTATTGAAATGAGAGACGGTGTCTTGAAAGAATTTACTTTATGGGAATTCTTAAGATTTTTACTCTTCTTTCCAACTTTCTCAAGTGGACCAATTGATCGTTTTAAACGATTCAATGAGGATTACATTAATATCCCAGATCGAAACGAACTCCTAGATATGTTAGGTCAAGCGATTCATTATTTGATGTTAGGTTTTCTCTATAAGTTTATTTTAGCCTATATTTTTGGAAGTCTGATTATGCCTCCTCTAAAAGAATTAGCGCTAGAACAGGGTGGTGTGTTTAATTGGCCAACACTTGGGGTTATGTATGCCTTTGGTTTTGATTTGTTCTTTGATTTTGCAGGTTACACAATGTTTGCGTTGGCTATTTCTAACCTAATGGGGATTAAGTCTCCGATTAACTTTGACAAACCTTTCAAATCACGCGACCTAAAAGAATTTTGGAATAGATGGCATATGAGCCTTTCTTTCTGGTTTAGAGACTTTGTTTTCATGAGGCTTGTTAAGCTTTTAGTTAAAAATAAAGTTTTTAAAAACCGTAATGTTACTTCAAGTGTAGCTTATATTATCAATATGCTTCTTATGGGATTCTGGCATGGGTTAACTTGGTACTATATAGCCTATGGTCTCTTTCATGGGATTGGCCTAGTTATTAATGACGCTTGGGTACGTAAGAAGAAAAATATTAATAAAGAAAGAAGATTGGCTAAAAAACCACTTTTACCAGAAAACAAATGGACTTATGCTTTGGGTGTCTTCATCACCTTTAATGTAGTTATGTTTTCTTTCTTGATTTTTTCAGGATTTTTAGATCTTTTGTGGTTCCCACAACCGCATAACAAATAA

SEQ ID NO: 3280 - protein, 421 aa, Streptococcus agalactiae
MIQAFLEKLPHLDVYGNPQYFFYLILAVLPIYIGLFFKKRFALYEIIFSLSFIVMMLTGSTFNQLKSLLAYVVGQSLLVFIYKAYRKRFNHTLVFYVTVCLSIFPLFLVKLIPAISEDGHQSLFGFLGISYLTFRAVAMIIEMRDGVLKEFTLWEFLRFLLFFPTFSSGPIDRFKRFNEDYINIPDRNELLDMLGQAIHYLMLGFLYKFILAYIFGSLIMPPLKELALEQGGVFNWPTLGVMYAFGFDLFFDFAGYTMFALAISNLMGIKSPINFDKPFKSRDLKEFWNRWHMSLSFWFRDFVFMRLVKLLVKNKVFKNRNVTSSVAYIINMLLMGFWHGLTWYYIAYGLFHGIGLVINDAWVRKKKNINKERRLAKKPLLPENKWTYALGVFITFNVVMFSFLIFSGFLDLLWFPQPHNK

SEQ ID NO: 3281 - protein, 1536 aa, Streptococcus agalactiae
ATGATACATGATATGATTAAAACAATTGAGCATTTTGCTGAGACACAAGCTGATTTTCCAGTGTATGATATTTTAGGGGAAGTCCATACTTATGGACAACTTAAAGTAGACTCTGACTCTCTAGCTGCTCATATTGATAGCCTAGGCCTTGTTGAAAAATCACCTGTCTTAGTATTCGGTGGTCAAGAATATGAAATGTTGGCGACATTTGTTGCTTTAACAAAGTCAGGGCATGCTTATATACCGGTTGACCAACACTCTGCTTTGGATAGAATACAGGCTATTATGACAGTTGCTCAACCAAGCCTTATCATTTCAATTGGTGAATTTCCTCTTGAAGTTGATAATGTCCCAATCCTAGACGTTTCTCAAGTTTCAGCTATTTTTGAAGAAAAGACTCCTTATGAGGTAACACATTCTGTTAAAGGTGATGATAATTACTATATTATTTTCACTTCAGGGACTACTGGTTTACCAAAAGGTGTGCAAATTTCACATGACAATTTATTGAGCTTTACAAATTGGATGATTTCTGATGATGAGTTTTCAGTTCCTGAAAGACCGCAAATGTTGGCTCAACCGCCATATTCATTTGACTTATCAGTTATGTATTGGGCACCAACACTAGCTATGGGAGGCACCCTGTTTGCCCTACCAAAGACAGTAGTTAATGATTTCAAAAAACTATTCGCTACCATTAATGAATTGCCAATACAGGTTTGGACTTCGACACCATCATTTGCTGATATGGCGCTACTATCTAACGATTTCAATTCAGAGACCTTGCCACAGTTAACACATTTTTATTTTGATGGGGAAGAGTTAACTGTCAAGACTGCACAAAAACTTCGTCAACGTTTTCCAAAAGCTCGTATCGTTAATGCATATGGGCCAACAGAAGCAACAGTTGCTCTATCCGCAGTAGCAATTACTGATGAAATGTTAGAAACATGCAAACGCCTTCCAATTGGTTACACTAAAGATGACTCACCAACGTATGTGATTGATGAAGAAGGTCATAAATTACCAAACGGAGAGCAAGGTGAAATCATTATTGCTGGACCAGCAGTATCAAAAGGCTATCTTAACAATCCAGAAAAGACAGCTGAGGCATTTTTCCAATTCGAAGGTCTACCTGCTTACCATACCGGTGACTTAGGAAGTATGACCGATGAAGGTCTTCTGCTTTACGGTGGGCGTATGGATTTCCAAATTAAATTTAACGGCTATCGTATTGAATTAGAAGATGTTTCTCAAAACTTAAACAAATCGCAGTATGTAAAATCAGCAGTAGCAGTGCCACGTTATAACAAGGATCATAAAGTTCAAAACTTATTAGCCTATATTGTCTTAAAAGAAGGTGTAAGAGATGATTTTGAACGTGATTTGGATTTGACAAAAGCAATTAAGGAAGACTTAAAGGACATTATGATGGATTACATGATGCCATCTAAATTTATCTATCGAGAGGATTTACCTTTGACACCAAATGGGAAAATTGATATCAAAGGTCTTATGAGCGAGGTAAACAAGTGA

SEQ ID NO: 3282 - protein, 511 aa, Streptococcus agalactiae [sequence omitted]

SEQ ID NO: 3283 - protein, 1188 aa, Streptococcus agalactiae
ATGTTTAGTGATTTACGCAAAAAATTTGTCTTTTTGACCATGTCAATCCTTATTGTCGTTGTTCTCTTTCTATTTGCAGTTAGTAATCGCTACAATCAATATTGGGATGAATATGATGCATATAGGATTGTTAAATTAGTTGCCAAAAATGATTATTTAGGAATACCAGGCGATGAACCGATTGCTTTGGTGACTATAGATAACCAAAAGATGGTTAAGATTCAAAGCAATAATACTGATTTGACAAATGATGTTATCGAAAAATCTAGTTTGAAGCTCCTTGAGCAAGGAAAGAAGTCACGAAAATGGAAGTCTTTTATATATTCCATAAAAGAATATAAAGATAAAACCTACACCATAGCTATTATGGATTTGGCTAGTTATGAAGTCCCTTATGCAAGGCGTTTTCTAATTCTTGTTTTTACTATTTTTGGATTTTGTTTATTAGCAGCTGTAAGTCTTTATCTTTCTCGATTTATTGTAGGACCTGTAGAGACAGAAATGACTCGCGAAAAACAGTTCGTTTCAGATGCGAGTCATGAGCTGAAGACCCCTATTGCAGCTATACGAGCCAACGTTCAGGTTCTGGAACAGCAAATTCCAGGGAATCGTTATCTGGATCATGTTGTTTCGGAGACTAAGCGAATGGAGTTTTTAATTGAAGATTTGCTTAATTTGTCTAGACTTGATGAAAAACGCTCCAAGGTAAATTTCAAAAAGTTAAACTTATCTGTCTTATGTCAAGAAGTACTTCTAACATATGAAAGTTTGGCATATGAAGAAGAAAAGTGTTTAAATGATACGATTGAAGATGATGTCTGGATTGTTGGAGAAGAGAGTCAGATTAAGCAAATTTTAATAATTCTTTTGGATAATGCTATTAGGCATTCTTTGTCAAAATCAGCAATCCAGTTTAGTCTTAAACAAGCTCGAAGAAAAGCTATTCTGACAATATCAAATCCAAGTGCTATCTATTCCAAAGAGGTTATGGATAATCTCTTTGAGCGTTTTTATCAAGCTAAAGATGATCATGCAGATTCTCTCAGTTTTGGTCTAGGCTTATCTATTGCTAAAGCAATCGTGGAACGCCATAAGGGGAGAATTAGAGCATATCAAGAAAAAGACCAATTACGTCTTGAAGTCCAGTTACCAATTGATGGATTTTGGACCAATACCATGATTAATTAA

SEQ ID NO: 3284 - protein, 395 aa, Streptococcus agalactiae
MFSDLRKKFVFLTMSILIVVVLFLFAVSNRYNQYWDEYDAYRIVKLVAKNDYLGIPGDEPIALVTIDNQKMVKIQSNNTDLTNDVIEKSSLKLLEQGKKSRKWKSFIYSIKEYKDKTYTIAIMDLASYEVPYARRFLILVFTIFGFCLLAAVSLYLSRFIVGPVETEMTREKQFVSDASHELKTPIAAIRANVQVLEQQIPGNRYLDHVVSETKRMEFLIEDLLNLSRLDEKRSKVNFKKLNLSVLCQEVLLTYESLAYEEEKCLNDTIEDDVWIVGEESQIKQILIILLDNAIRHSLSKSAIQFSLKQARRKAILTISNPSAIYSKEVMDNLFERFYQAKDDHADSLSFGLGLSIAKAIVERHKGRIRAYQEKDQLRLEVQLPIDGFWTNTMIN

SEQ ID NO: 3285 - protein, 675 aa, Streptococcus agalactiae
ATGAGACTTCTTGTAGTTGAGGATGAAAAAAGTATAGCAGAGGCTATTCAGGCTTTATTGGCAGATAAAGGTTATTCTGTTGATTTAGCATTTGATGGAGATGATGGGTTAGAATACATTTTGACAGGTCTCTATGATTTAGTCCTGTTGGATATTATGTTACCCAAACGCTCAGGATTATCTGTTTTAAAAAGAGTGAGGGAAGCTGGTTTAGAAACCCCAATAATCTTTTTAACTGCAAAATCACAGACTTATGATAAAGTTAATGGTTTAGATTTAGGGGCAGATGATTATATCACAAAACCCTTTGAAGCAGATGAATTGCTAGCTAGAATTAGGCTGAGAACCAGACAATCTTCTCTAATCAGAGCAAATCAATTGCGGCTTGGAAATATAAGGCTTAACACAGATTCACATGAGCTAGAATCTAAAGAAAGTAGTGTAAAATTATCCAATAAAGAATTTCTCTTGATGGAAGTTTTTATGCGAAATGCAAAGCAGATTATTCCTAAAAATCAGTTGATTTCTAAGGTTTGGGGACCTTCAGACAATTCAGAATATAACCAGTTAGAAGTATTTATTTCTTTTTTGCGAAAAAAATTGCGCTTTTTAAAAGCAGACATTGAAATAATAACCACTAAGGGCTTTGGATATTCCTTGGAGGAGAGGACATAA

SEQ ID NO: 3286 - protein, 224 aa, Streptococcus agalactiae
MRLLVVEDEKSIAEAIQALLADKGYSVDLAFDGDDGLEYILTGLYDLVLLDIMLPKRSGLSVLKRVREAGLETPIIFLTAKSQTYDKVNGLDLGADDYITKPFEADELLARIRLRTRQSSLIRANQLRLGNIRLNTDSHELESKESSVKLSNKEFLLMEVFMRNAKQIIPKNQLISKVWGPSDNSEYNQLEVFISFLRKKLRFLKADIEIITTKGFGYSLEERT

SEQ ID NO: 3287 - protein, 135 aa, Streptococcus agalactiae
GTGAAACGTACTTATCAACCAAGTAAAATCCGTCGCCAACGTAAACACGGATTCCGTCACCGTATGTCAACTAAAAACGGACGTCGCGTGCTTGCTAGCCGCCGTCGTAAAGGACGTAAAGTGTTATCAGCTTAA

SEQ ID NO: 3288 - protein, 44 aa, Streptococcus agalactiae
MKRTYQPSKIRRQRKHGFRHRMSTKNGRRVLASRRRKGRKVLSA

SEQ ID NO: 3289 - protein, 309 aa, Streptococcus agalactiae
ATGGAATGNNNNNTTCCGTTCCTTGAACTTTTAGGGATTCCAGAAGCAGATATTGCGAGTCAAACCATGATTGTTGGTTTTTCAGATATGGTTGTTCCTTCGATAATGGCGGCTGAAATTCACAGTGAGATGACAAGATTTATTGTCGCAACAGTTTCTATTGTGCAATTAATTTATATGTCTGAGACTGGTGCGGTGATATTAGGTTCCAAGATCCCTATCAACATTCTAGAATTATTTATCATTTTTATAGAGAGAACAATTATTTCATTACCTATTATTGTTTTGATGGCACATCTTTTCTTTTAG

SEQ ID NO: 3290 - protein, 102 aa, Streptococcus agalactiae
  VARIANT 3, 4, 5: Xaa = Any Amino Acid
MEXXXPFLELLGIPEADIASQTMIVGFSDMVVPSIMAAEIHSEMTRFIVATVSIVQLIYMSETGAVILGSKIPINILELFIIFIERTIISLPIIVLMAHLFF

SEQ ID NO: 3291 - protein, 288 aa, Streptococcus agalactiae
GTGTTAGCACTTTGTTATCGTCTGTTTAGACCTAGCTTTATTGAAAAAAATGACTTGCTAAAAGAAATTTCTGACATTACCATTTTCTGGCTGATTATTCGTTTGATCGGTTTGGCACTTGGTCTGATGACGGTTTTACATATTGGTCCTGAAATGGTATGGGGGAAAGAGACAGGCGGCCTTATCCTTTTTGATTTGATTGGTGGTTTGTTTACCATTTTCCTTGCTGCGGGTTTTATTCTTCCATTTTTGACAGAATTTGGTCTACTNNNNNCATTCATTCATTAA

SEQ ID NO: 3292 - protein, 95 aa, Streptococcus agalactiae
  VARIANT 91, 92: Xaa = Any Amino Acid
MLALCYRLFRPSFIEKNDLLKEISDITIFWLIIRLIGLALGLMTVLHIGPEMVWGKETGGLILFDLIGGLFTIFLAAGFILPFLTEFGLLXXFIH

SEQ ID NO: 3293 - protein, 1167 aa, Streptococcus agalactiae; identical to SEQ ID NO: 2901

SEQ ID NO: 3294 - protein, 388 aa, Streptococcus agalactiae; identical to SEQ ID NO: 2902

SEQ ID NO: 3295 - protein, 1728 aa, Streptococcus agalactiae
TTGGAAAATTTATTACAACATAAGTTACCGGTCGCACCATTTGTAGAGTCAACGACCAATTGGATTACGAAAACTTTTTCTGGTTTATTTGACTTTATCCAGACAATCGGTAATGCATTGATGGATTGGATGACAAAAACATTACTATTCATTAATCCTTTACTTTTTATTGTACTAATTACAATTGCTGTATTTTTCTTAGCTAAGAAAAAATGGCAATTACCGACATTTACTTTCATTGGTTTGCTATTTATCTATAACCAAGGGCTGTGGGAACAGTTGATTAATACTTTTAACTTGGTTTTAGTAGCAAGTTTAATTTCTATTATTATTGGTGTACCACTAGGTATTTGGATGGCAAAAAGTGATAAAGTTAAACAAGTTGTTAATCCAATTCTTGACTTTATGCAAACTATGCCGGCATTCGTTTACCTTATTCCTGCAGTAGCCTTCTTTGGTATCGGTATGGTACCAGGTGTCTTTGCCTCTGTTGTATTTGCTCTGCCTCCAACAGTGCGCTTTACTAACTTGGCTATTCGTGAAATCCCACTTGAATTAATAGAAGCATCTGATTCATTTGGTTCAACAGTTAAGCAAAAATTATTCAAAGTTGAACTACCACTTGCTAAGAACACTATTATGGCAGGAATCAATCAAACTATGATGTTGGCTCTTTCTATGGTGGTTACAGGATCTATGATCGGTGCACCTGGACTTGGTCGTGAGGTGTTATCGGCGCTTCAACATGCTGATATTGGTACAGGATTTGTTAGTGGTCTATCGCTAGTTATTTTAGCAATCGTGTTAGACCGTGTTAGTCAATTCTTTAATTCCAAACCGGGTGAGAAGCAAGCTAAAACATCAAAAGTTAAAAAATGGGTAGGTTTAGGGGCCCTGGCTCTCTTCATTCTAGCAGCTCTTGGTCGCATTGTTGTCAATATGACTTCAGGAAATGAAGCCAAAGGTCAAAAAGTGAAGATAGCTTATGTCCAATGGGATTCAGAAGTTGCTTCAACCAACGTTATTGCTGAAGTTTTAAAATCTAAAGGATATGATGTTGAATTGACACCACTTGACAATGCGGTCATGTGGCAAACAGTCGCCAATGGGAATGCTGATTTTACAACAAGTGCTTGGTTACCAAAGACCCACGGGCAATATTTTAATAAATACAAAAATAGTTTAGATGACTTAGGTCCTCACGTTGAGAACGTCAAAATAGGTTTAGTTGTTCCTAAATACATGAACGTAAATAGTATTGAAGAATTATCAAATCAAGCAGATAAACAAATTACAGGTATCGAACCAGGTGCAGGTATTATGAAGTCTGCTAAACAATCCCTTAAAGATTATCCAAACCTTTCAAGTTGGAAGTTGTTATCAGCATCAACAGGAGCTATGACAACAACCTTAGGGAAGGCTATCAAAAACAAAGATCAAGTAGTCATTACAGGTTGGTCACCTCACTGGATGTTTGCTAAGTATGATTTAAAATACCTTAAAGATCCTAAGAAATCATTTGGTGGTGAAGAACATATCAATACAATAGCACGCAAGAATTTGAAAAAAGATATGCCAAAAGTATATAAAATTATCGATAAGTTCAAGTGGACTAAAGAAGATATGGAATCTATCATGTTAGATATGGATAAAGGTATGGAGCCTGCTAAAGCAGCTCAAAAATGGATTAAAAACCACAAAAAAGAAGTTTCAGAGTGGACTAAATAG

SEQ ID NO: 3296 - protein, 575 aa, Streptococcus agalactiae
MENLLQHKLPVAPFVESTTNWITKTFSGLFDFIQTIGNALMDWMTKTLLFINPLLFIVLITIAVFFLAKKKWQLPTFTFIGLLFIYNQGLWEQLINTFNLVLVASLISIIIGVPLGIWMAKSDKVKQVVNPILDFMQTMPAFVYLIPAVAFFGIGMVPGVFASVVFALPPTVRFTNLAIREIPLELIEASDSFGSTVKQKLFKVELPLAKNTIMAGINQTMMLALSMVVTGSMIGAPGLGREVLSALQHADIGTGFVSGLSLVILAIVLDRVSQFFNSKPGEKQAKTSKVKKWVGLGALALFILAALGRIVVNMTSGNEAKGQKVKIAYVQWDSEVASTNVIAEVLKSKGYDVELTPLDNAVMWQTVANGNADFTTSAWLPKTHGQYFNKYKNSLDDLGPHVENVKIGLVVPKYMNVNSIEELSNQADKQITGIEPGAGIMKSAKQSLKDYPNLSSWKLLSASTGAMTTTLGKAIKNKDQVVITGWSPHWMFAKYDLKYLKDPKKSFGGEEHINTIARKNLKKDMPKVYKIIDKFKWTKEDMESIMLDMDKGMEPAKAAQKWIKNHKKEVSEWTK

SEQ ID NO: 3297 - protein, 1224 aa, Streptococcus agalactiae
ATGACAAATATTTTAGAAGTGAAGAATTTAACCAAAATTTTTGGGAAAAAGCAAAAAGCTGCTCTTGAAATGGTTAAGCAAGGAAAAAGTAAGACAGAAATTCTTGAAAAAACAGGAGCGACTGTAGGTGTCTATGATGCGAGTTTTGAAATAAAAGAAGGCGAAATTTTCGTTATCATGGGACTTTCTGGTTCAGGAAAATCAACTTTAGTTCGGATGTTAAACCGTTTGATTGACCCATCATCAGGAAATATCTATTTAGATGGTAAAGATATTGCAAAGATGAATGTAGAAGATTTACGTAACATTCGTCGTCATGATATCAACATGGTTTTCCAAAATTTTGGTCTTTTCCCACATCGTACAATTTTAGAAAATACAGAGTTTGGGTTAGAGATGCGTGGTGTTTCTAAGGAAGAACGTACAACGTTAGCTGAAAAAGCTTTGGACAATGCAGGTCTATTACCGTTTAAAGATCAGTACCCCAGTCAATTATCAGGAGGAATGCAACAGCGTGTTGGTTTAGCACGTGCCCTTGCTAACAGCCCTAAAATCCTTCTGATGGATGAGGCCTTCTCAGCTTTAGACCCATTAATTCGTCGTGAAATGCAAGATGAGCTTCTTGATCTTCAAGACACGAATAAACAAACTATTATTTTTATCAGCCATGATTTGAATGAAGCGTTACGTATTGGTGATCGTATTGCTCTGATGAAAGATGGAGAAATCATGCAGATTGGTACAGGAGAAGAGATTTTGACTAATCCGGCTAATGATTTTGTTCGTGAGTTTGTTGAAGACGTTGATCGCTCAAAAGTGTTAACTGCTCAAAATATTATGATAAAACCTTTAACAACTGTTTTAGAAATTGATGGCCCACAAGTTGCTTTAACAAGAATGCATCGTGAGGAAGTCTCAATGTTAATGGCAACGAATCGTCGTCGCCAACTTCTGGGATCCCTAACTGCAGATGCTGCAATTGAAGCTCGTAAGAAAGATTTGCCGCTTTCTGAAGTGATTGATAAAGATGTTGTAACGGTCTCAAAAGATACAGTTATTACAGATATCATGCCTTTAATTTATGATTCATCTGCTCCGATAGCCGTTACTGATGATAATGATAGACTCCTAGGGGTTATCATTAGAGGACGTGTGATCGAAGCACTTGCTAACGTTCAAGATGAAACAGTAGTAGAATCGCCAAAAGAAACGGTAGAAGCTTAA

SEQ ID NO: 3298 - protein, 407 aa, Streptococcus agalactiae
MTNILEVKNLTKIFGKKQKAALEMVKQGKSKTEILEKTGATVGVYDASFEIKEGEIFVIMGLSGSGKSTLVRMLNRLIDPSSGNIYLDGKDIAKMNVEDLRNIRRHDINMVFQNFGLFPHRTILENTEFGLEMRGVSKEERTTLAEKALDNAGLLPFKDQYPSQLSGGMQQRVGLARALANSPKILLMDEAFSALDPLIRREMQDELLDLQDTNKQTIIFISHDLNEALRIGDRIALMKDGEIMQIGTGEEILTNPANDFVREFVEDVDRSKVLTAQNIMIKPLTTVLEIDGPQVALTRMHREEVSMLMATNRRRQLLGSLTADAAIEARKKDLPLSEVIDKDVVTVSKDTVITDIMPLIYDSSAPIAVTDDNDRLLGVIIRGRVIEALANVQDETVVESPKETVEA

SEQ ID NO: 3299 - protein, 120 aa, Streptococcus agalactiae
ATGTATGGTCTCTTTATGTCAACACCTTTGCTTAGAGATATTTTAATTAGCCCACACCATTATTGTTATGGCATTATTGAATTATTTAAAGACTTATTAGTATTAATATTACAACTTTAA

SEQ ID NO: 3300 - protein, 39 aa, Streptococcus agalactiae
MYGLFMSTPLLRDILISPHHYCYGIIELFKDLLVLILQL

SEQ ID NO: 3301 - protein, 2379 aa, Streptococcus agalactiae
ATGTCAGAATTTGATACAAAATCATATTTAGAAAAACTTGATGCATGGTGGAGAGCAGCTAATTATATTTCTGCAGCACAAATGTATCTAAAGGATAACCCTCTCTTGAGACGAGAGCTGGTTGAAAACGACTTAAAGGTTCATCCAATTGGTCACTGGGGCACTGTACCTGGACAAAATTTTATCTATGCTCACTTAAATCGCGCTATTAATAAATACGATTTAGACATGTTCTATATTGAAGGTCCAGGTCATGGTGGTCAAGTTATGGTATCTAATTCATATTTAGATGGTTCATATACTGAATTAAACCCAAATATTGAGCAAACAGAGGATGGCTTTAAGCAGTTATGTAAAATCTTCTCTTTCCCATGTGGAATTGCATCCCATGCTGCACCAGAAACACCAGGGTCAATTCATGAAGGCGGTGAACTTGGTTACGCACTTTCTCATGCGACAGGTGCCATCCTAGACAATCCAGATGTTATTGCTGCGACTGTTATTGGTGATGGTGAAGGTGAAACAGGACCACTTATGGCTGGTTGGCTATCTAATACCTTTATCAATCCAGTAAATGATGGTGCTGTTCTACCAATCTTCTATTTAAATGGTGGTAAAATCCATAACCCAACTATCTTTGAACGTAAGACAGATGAAGAATTATCTCAGTTTTTTGAAGGATTAGGTTGGAAACCTATTTTTGCAGATGTTGTTGAACTCTCTGAGGATCATGCGGCTGCTCATGCTTTGTTTGCAGAAAAATTAGATCAAGCTATTCAAGAGATTAAAACCATTCAATCAGAAGCACGACAAAAACCAGCAGAAGAAGCTATCCAAGCAAAATTCCCTGTCTTAGTTGCACGTATTCCTAAGGGTTGGACTGGTCCAAAAGCTTGGGAAGGAACACCAATTGAAGGTGGCTTCCGCGCTCACCAAGTACCAATTCCAGTAGATGCCCACCATATGGAACATGTTGATTCTCTTTTGTCATGGCTTCAATCATACCGTCCAGAAGAATTATTTGATGAAAATGGTAAAATCGTTGATGAGATTGCTGCTATTTCACCAAAAGGTGATCGTCGCATGTCCATGAATCCAATAACCAATGCTGGTATTGTTAAAGCAATGGATACAGCAGATTGGAAGAAATTTGCTCTTGATATTAATGTTCCAGGTCAAATTATGGCACAAGATATGATTGAATTTGGAAAATATGCAGCAGATTTGGTAGATGCTAATCCAGATAATTTCCGTATTTTTGGTCCAGATGAAACGAAATCAAATCGTCTTCAAGAAGTGTTTACACGTACTAGCCGTCAATGGCTTGGTCGTCGTAAACCAGATTATGACGAAGCTTTAAGTCCAGCTGGACGTGTTATTGATTCCCAATTGTCTGAACACCAAGCAGAAGGTTTCTTAGAAGGTTATGTTTTAACTGGTCGTCACGGCTTCTTTGCTTCATACGAATCATTCCTTCGCGTTGTAGATTCAATGGTAACACAACATTTCAAATGGTTACGTAAATCAAAAACACACACAACATGGCGTAAAAATTATCCAGCGCTTAACCTAATTGCAGCTTCAACTGTTTTCCAACAAGATCATAATGGTTATACTCACCAAGATCCAGGTATTTTAACTCATTTAGCTGAAAAAACACCTGAATACATTCGTGAATATTTACCAGCAGATACTAACTCACTTCTAGCTGTTATGGATAAAGCGTTTAAAGCTGAAGATAAAATTAATTTAATTGTGACATCTAAGCACCCTCGTCCACAATTTTACTCTATTGCTGAAGCAGAAGAGTTAGTGGCAGAAGGATATAAGGTGATTGACTGGGCTTCAAATGTGTCGCTTAATCAAGAGCCAGATGTTGTCTTTGCTGCGGCGGGAACAGAACCTAACTTAGAAGCTTTGGCAGCTATTAGCATTCTTCATAAGGCTTTCCCAGAACTTAAGATTAGATTTGTTAATGTATTAGACATCCTAAAACTTCGTCATCCTTCACAAGATGCTCGCGGTTTATCAGATGAAGAGTTTAACAAAGTCTTTACCACAGATAAACCTGTTATTTTTGCTTTCCATGGTTATGAAGATATGATTCGAGATATTTTCTTTAGTCGTCACAATCATAATTTGCATACGCATGGTTACCGTGAAAATGGTGACATCACAACACCATTTGATATGCGCGTGATGTCAGAATTGGACCGATTCCATCTGGCACAGGATGCAGCTCTTGCTTCTTTAGGAAATAAAGCACAAGCCTTCAGTGATGAAATGAATCAAATGGTTGCTTATCACAAAGACTATATTCGTGAACACGGAGACGATATTCCAGAAGTACAAAATTGGAAATGGGAAAATATCAAGTAG

SEQ ID NO: 3302 - protein, 792 aa, Streptococcus agalactiae
MSEFDTKSYLEKLDAWWRAANYISAAQMYLKDNPLLRRELVENDLKVHPIGHWGTVPGQNFIYAHLNRAINKYDLDMFYIEGPGHGGQVMVSNSYLDGSYTELNPNIEQTEDGFKQLCKIFSFPCGIASHAAPETPGSIHEGGELGYALSHATGAILDNPDVIAATVIGDGEGETGPLMAGWLSNTFINPVNDGAVLPIFYLNGGKIHNPTIFERKTDEELSQFFEGLGWKPIFADVVELSEDHAAAHALFAEKLDQAIQEIKTIQSEARQKPAEEAIQAKFPVLVARIPKGWTGPKAWEGTPIEGGFRAHQVPIPVDAHHMEHVDSLLSWLQSYRPEELFDENGKIVDEIAAISPKGDRRMSMNPITNAGIVKAMDTADWKKFALDINVPGQIMAQDMIEFGKYAADLVDANPDNFRIFGPDETKSNRLQEVFTRTSRQWLGRRKPDYDEALSPAGRVIDSQLSEHQAEGFLEGYVLTGRHGFFASYESFLRVVDSMVTQHFKWLRKSKTHTTWRKNYPALNLIAASTVFQQDHNGYTHQDPGILTHLAEKTPEYIREYLPADTNSLLAVMDKAFKAEDKINLIVTSKHPRPQFYSIAEAEELVAEGYKVIDWASNVSLNQEPDVVFAAAGTEPNLEALAAISILHKAFPELKIRFVNVLDILKLRHPSQDARGLSDEEFNKVFTTDKPVIFAFHGYEDMIRDIFFSRHNHNLHTHGYRENGDITTPFDMRVMSELDRFHLAQDAALASLGNKAQAFSDEMNQMVAYHKDYIREHGDDIPEVQNWKWENIK

SEQ ID NO: 3303 - protein, 1092 aa, Streptococcus agalactiae
ATGCCTAACGTTAAAGATATTACTAGAGAATCATGGATTTTATCAACATTCCCAGAATGGGGTACATGGCTAAACGAAGAAATTGAAGAAGAAGTTGTTGCTGAGGGCAACTTTGCAATGTGGTGGTTAGGAAACTGTGGTGTTTGGATTAAAACACCAGGTGGTGCTAATGTTGTTATGGACCTATGGTCAAACCGCGGTAAATCAACAAAAAAAGTAAAAGATATGGTTCGTGGACACCAAATGGCTAATATGGCAGGTGTTCGTAAACTCCAACCAAACTTACGCGCACAACCAATGGTTATTGATCCATTTGCTATTAATGAATTGGATTACTATCTTGTTTCACATTTCCACAGTGACCACATTGATATCAACACTGCGGCAGCCATTATTAATAATCCTAACTTAGACCATGTTAAATTTGTTGGGCCATATGAATGTGGTGAAATTTGGAAAAAATGGGGAGTTCCAGAAGAACGAATCATCGTGATTAAACCAGGTGAATCATTTGAGTTTAAAGATATCAAAGTTACTGCTGTTGAATCATTTGACCGTACTTGCTTGGTGACACTTCCAGTAGATGGTGCAGAAGAACATGATGGAGAACTTGCTGGTTTAGCCGTGACTGATGAAGAAATGGCTCGTAAAGCAGTTAACTATATTTTTGAAACACCAGGTGGAACAATCTATCATGGAGCTGACTCACATTTTTCAAATTATTTTGCTAAACATGGTAAAGACTACAAGATTGACGTAGCTATTAACAACTATGGTGATAACCCAGTTGGTATTCAGGATAAAATGACTTCAATCGATCTTCTTCGTATGGCAGAAAATCTCCGTGCCAAAGTCATTATTCCTGTACACTACGATATCTGGTCTAACTTCATGGCTTCTACAGACGAAATCTTACAATTGTGGAAAATGCGTAAAGAACGCCTTCAATATGACTTCCATCCATTTATTTGGGAAGTTGGAGGTAAATACACTTATCCACAAGATAAAGATAGAATTGAATACCATCACCCACGTGGTTTTGATGATTGCTTCGAACAAGAATCAAATATTCAATTTAAAGCACTTCTATAA

SEQ ID NO: 3304 - protein, 363 aa, Streptococcus agalactiae
MPNVKDITRESWILSTFPEWGTWLNEEIEEEVVAEGNFAMWWLGNCGVWIKTPGGANVVMDLWSNRGKSTKKVKDMVRGHQMANMAGVRKLQPNLRAQPMVIDPFAINELDYYLVSHFHSDHIDINTAAAIINNPNLDHVKFVGPYECGEIWKKWGVPEERIIVIKPGESFEFKDIKVTAVESFDRTCLVTLPVDGAEEHDGELAGLAVTDEEMARKAVNYIFETPGGTIYHGADSHFSNYFAKHGKDYKIDVAINNYGDNPVGIQDKMTSIDLLRMAENLRAKVIIPVHYDIWSNFMASTDEILQLWKMRKERLQYDFHPFIWEVGGKYTYPQDKDRIEYHHPRGFDDCFEQESNIQFKALL

SEQ ID NO: 3305 - protein, 1419 aa, Streptococcus agalactiae
ATGAAAAGTAGTGAGAGGTTGCAGCTGTCTTTAGTATCTATCGTAGTAGCTAAGGACCGCGTAACGATTGATAGGTTGATGCAACTAAACGATGTTTCTCGAAATACTATCTTAAACGATTTAAACGAATTAAGAAGTGAGTTAGCAGAGAAAGAATATAATTTACAGTTACAATCAACAAAATGTCGTGGTTATTTTTTAGATGGTCACCCATTGTCCATTATCCAGTACTTATATAAGCTCTTAGATGATATCTACCATAATGGAAGTAGTAGTTTTATAGACCTTTTTAATCATAAACTGTCTCAAGCTTTTGGTGCCAGCACTTATTTTTCTAAAGAGGTTCTTGATTATTTTCATCATTATCTCTTCATTTCTCAACGAAGTCTAGGTAAGAAAATCAACAGTCAAGATGGTCAGTTTATGATTCAGATTTTGCCTTTTATACTAATGGCTTATCGTAAGATGCGATTAAGTCCTGAAGTACAGACCTCTCTTAATAGTGATTTTAGCTTGGTTTGGCAACGTAAGGAATATGAGATTGCTAAAGAGTTGGCTGATGAGCTGGAAGAAAATTTTCAGTTATCACTGGATGAGATTGAAGTGGGACTAGTAGCCATGCTTATGCTTAGTTTCCGCAAGGACCGTGACAATCATTTAGAGAGCCAGGATTATGATGATATGCGAGCTACTCTAACCAGTTTTTTGAAAGAATTGGAAGAACGATATCACCTTCACTTTGTTCATAAAAAGGACTTACTAAGACAACTTCTTACTCACTGCAAGGCACTCTTATATCGTAAACGTTATGGTATTTTTTCTGTTAATCCTTTAACAGAGCATATTAAAGACAAATATGAAGAACTTTTTGCCATAACCTCGTCTTCTGTAAAGCTTTTAGAGAAAGCTTGGCAAATCAAATTGACCGATGATGATGTAGCATATCTAACGATTCATTTAGGAGGGGAACTTCGTAATAGTCAACAATCTCCTAATAAACTTAAGTTAGTTATTGTATCTGATGAAGGAATAGCGATTCAGAAACTTCTTTTAAAGCAATGTCAACGCTACTTAACAAATAGTGATATAGAAGCTGTTTTTACAACCGAACAGTATCAAAGTGTGAGTGATCTTATGCATGTAGATATGGTTGTCTCTACTAGTGATGCTTTAGAATCTCGTTTTCCGATGTTAGTAGTTCACCCTGTTTTGACAGATGATGATATTATTCGCTTGATTCGCTTTTCTAAAAAAGGTAACTGTGCAAATAGTAATCAATTTACCAATGAACTTGAAAAAACAATTGCTCAATATGTCAAGGAAGATAGTGAACGCTACGTGCTGAAATCTAAGATTGAGAAACTTATTCATCAAGAATTGCTCCAAGACGTCCTTCCCCTTCAAAGTACAGTTTGTTAA

SEQ ID NO: 3306 - protein, 472 aa, Streptococcus agalactiae
MKSSERLQLSLVSIVVAKDRVTIDRLMQLNDVSRNTILNDLNELRSELAEKEYNLQLQSTKCRGYFLDGHPLSIIQYLYKLLDDIYHNGSSSFIDLFNHKLSQAFGASTYFSKEVLDYFHHYLFISQRSLGKKINSQDGQFMIQILPFILMAYRKMRLSPEVQTSLNSDFSLVWQRKEYEIAKELADELEENFQLSLDEIEVGLVAMLMLSFRKDRDNHLESQDYDDMRATLTSFLKELEERYHLHFVHKKDLLRQLLTHCKALLYRKRYGIFSVNPLTEHIKDKYEELFAITSSSVKLLEKAWQIKLTDDDVAYLTIHLGGELRNSQQSPNKLKLVIVSDEGIAIQKLLLKQCQRYLTNSDIEAVFTTEQYQSVSDLMHVDMVVSTSDALESRFPMLVVHPVLTDDDIIRLIRFSKKGNCANSNQFTNELEKTIAQYVKEDSERYVLKSKIEKLIHQELLQDVLPLQSTVC

SEQ ID NO: 3307 - protein, 762 aa, Streptococcus agalactiae
ATGAAACAAGAAGATATTATTATCAATAGTATTGTATTCAAAAAACAGTTAGACAAAGGTTTTACACAAGTTCAGCTCATTAAGTTAGTAAAGGATTTAGGATTTTCACGATTTGAGATACGTCAAGAATTGCTTCAAGATCCAGATAGAGAGCTACCCGCTTTAAAAGCAGAGGCTGACTTTTATGATATCAATCTTTACTATAGTGCTAATGAAGACCTTATCAAAGGAGGGAAAGTTAATCCTTATCTTAATAAAGGCCTTAAAGAAGCATCACAGTTAGGAGCTCCTTTCATTAAGCTAAATGTTGGACAAACCAGAAACTTAAGTAAAGAAGAGTTAGAACCTCTTAAAGAGATATTGAAAAGCCAAACTATTGGTATAAAGGTGGAAAATAATCAAGACCCTAAAGCAGCTACAGTGGAGAATTGCCAATATTTTATGACTCTAGTGAAAGAATTACAAATACCAATAAGTTTTGTTTTTGATACTGCTAATTGGGCCTTTATCAACCAAGACCTATACCAAGCGGTAAATAACTTAGCTTGTGATACCACCTACCTTCACTGTAAAAATTTTATACAGGTAGCTGGAAAGCCCCACCTCTCGAAGAGCCTCTTCGAAGGAGAGATTAATCTGACTGATTTGTTAAAGAGTTTCTCTAATTGTGAGTATCTAGCTCTAGAATACCCCACAGAGTTGGAGATATTAAAAAGGGATGTTCAACGTTTAATCTCTATCAGTAATAGTCAAAACTTTTAA

SEQ ID NO: 3308 - protein, 253 aa, Streptococcus agalactiae
MKQEDIIINSIVFKKQLDKGFTQVQLIKLVKDLGFSRFEIRQELLQDPDRELPALKAEADFYDINLYYSANEDLIKGGKVNPYLNKGLKEASQLGAPFIKLNVGQTRNLSKEELEPLKEILKSQTIGIKVENNQDPKAATVENCQYFMTLVKELQIPISFVFDTANWAFINQDLYQAVNNLACDTTYLHCKNFIQVAGKPHLSKSLFEGEINLTDLLKSFSNCEYLALEYPTELEILKRDVQRLISISNSQNF

SEQ ID NO: 3309 - protein, 675 aa, Streptococcus agalactiae
ATGACTTCCTATTTTCCAGATCGTCGTTATCTCTTAGAGGCAAGTAGCCCTACTTCTGCAGGGAATCTTAATTTTATGTTAAAAATGCTCATGCATCAAGAAATTGATAACGCTAAATCTAGTGGAGGTTCTATCTATGATAATTTAGAAGAATTTCTCACTCATACTGATGCTACACATCATGGACTTATTTTCTTTCCGTTTCTTTACGGTAGTAACACATCACAAGATGCTAGCGCTTGCTTTTTTGGGCTAACAACTAAATCGACGAAATCTCAGATGATACGTGCGGTATATGAAGGTATTGCGTTTGCACATAAGCAGCATATCACTGATTTAATAAAAAGTAGGGGCAGTGTGCCAAAAATAATTCGTTTCTCTGGCGGAGCTACCAACTCACCAGCATGGATGCAAATGTTTTCTGATATCTTAAACTTTCCTATTGAAACAGTAGAAGGCACAGAATTAGGAGGGTTAGGAGGAGCTATTTTAGCACGTCATGCTTTAGATAAGATTTCGTTAAAGGAAGCAGTCCAAGATATGGTTCGTGTAAAAGCTATTTATAAACCTCAATTATCCGAAGTAAAGGGGTACAAAAAAAAATATCACGCTTACCAAAAATTATTAGAAACACTGGATCCTATTTGGTCGGAACTCGGTCATCTGAATAAGTAG

SEQ ID NO: 3310 - protein, 224 aa, Streptococcus agalactiae
MTSYFPDRRYLLEASSPTSAGNLNFMLKMLMHQEIDNAKSSGGSIYDNLEEFLTHTDATHHGLIFFPFLYGSNTSQDASACFFGLTTKSTKSQMIRAVYEGIAFAHKQHITDLIKSRGSVPKIIRFSGGATNSPAWMQMFSDILNFPIETVEGTELGGLGGAILARHALDKISLKEAVQDMVRVKAIYKPQLSEVKGYKKKYHAYQKLLETLDPIWSELGHLNK

SEQ ID NO: 3311 - DNA, 861 bp, Streptococcus agalactiae
  misc_feature 843, 844, 845, 846, 847: n = A,T,C or G
atgacttattaccttagtattgactacggcggtacaaataccaaggcgcttatttttgacaaattaggacaccaaatcgctgtttcgagttttgaaactttaaaaaatgagactcaatctggtcatcgtcaagtaaaccttgttaaaacgtggaatgctataacttctgctattagagaggttattcaaatctcaaaactcagccctgagcagattagtgcagtagcatgtattggacatgggaaaggtctttatctgctagataataagttggagccacttgaacaaggaattttgtctacagataatcgtgccaaagatttggcgcaatatttcgaatctaaacttgataatatttgggagttgactcggcaacatattttcccttcacaaagtccagttattttacgttggcttaaagattatcagcccgaaacctataaatcaataggggcggtcctttctgcaaaggactttattcggtataagcttacaggaaaagtacagcaagaatatggtgacgcttcaggtaatcattggataaatttccaaacaggaacttatgatccagctattttagatttttttggcattagagagatagaaaactcacttcctgaacttatagatagtgcagatttagttcctgggggaattagttctcaagcagcaaaagagactggtcttgtagaagggacccccgttgttggagggctctttgacatcgatgcttgtgctcttggatcaggtgttttagagtcagatacttttagtgttatttcgggaacttggaatattaatacatatccmagtttwaaaccagcagagcaagatagtggtctnnnnncattcattcattaa

SEQ ID NO: 3312 - protein, 286 aa, Streptococcus agalactiae
  VARIANT 272, 282, 283: Xaa = Any Amino Acid
MTYYLSIDYGGTNTKALIFDKLGHQIAVSSFETLKNETQSGHRQVNLVKTWNAITSAIREVIQISKLSPEQISAVACIGHGKGLYLLDNKLEPLEQGILSTDNRAKDLAQYFESKLDNIWELTRQHIFPSQSPVILRWLKDYQPETYKSIGAVLSAKDFIRYKLTGKVQQEYGDASGNHWINFQTGTYDPAILDFFGIREIENSLPELIDSADLVPGGISSQAAKETGLVEGTPVVGGLFDIDACALGSGVLESDTFSVISGTWNINTYPSXKPAEQDSGLXXFIH

SEQ ID NO: 3313 - DNA, 990 bp, Streptococcus agalactiae
atgaaaaaaattgatggacatgctcatattgttgatacaattgcaggatttaatggtaaaggacgtcttaatgcccttggaaacggttatgctatttgggatgatggtgatttaattaagctcatcccagacgaatacggtgacaaagcatttacagctgaagcttttttgaagtatatggatgctaatggtgtagataaagcagtcattttgcaaggtcatcttaatggttatcaaaattattatacgcatttagctattaaacgttatccagaacgttttacaggcgcattctctgttgatccatttgcagataacgcaatgcaaattgtaaaacgtcatgttgaagtccttggttttcgagctattaaatttgaaattagtcaaggagggggtatccatggataccgtggacaaaaaacgcctttccgtcttgatacagacccacatgtgagtcgtattttgacttatctgttagactatccaggatttgtagttacagttgattatggcaattgggatcaaattagtcaccaacctgatgctattgctaatttagctcgcctttatacgagtctcgattttgttgtttgtcacctctcttttccacatgttgagcattcaaatcgattgcgtgctgaacttaatatgtggaaaaacttcaacaatatctatactgatatttcagctattcaagatattgatgccccagatagttttccttttccaaaatcagaacaaaatgtacgtattgctaaagaagttcttggggctaagcgtatcatttggggaactgattctccatggtcagcgaccttcaatacttacgaagaattagctacttggctagagaatgttgatattttcagtcaagaggaactagaagatgttatgtacaataatgctgagcgtgtttactttaaagaagaacatgtaaaggctaacagagcaggtatagatgatacaaccaaagagctcaatctctattag

SEQ ID NO: 3314 - protein, 329 aa, Streptococcus agalactiae
MKKIDGHAHIVDTIAGFNGKGRLNALGNGYAIWDDGDLIKLIPDEYGDKAFTAEAFLKYMDANGVDKAVILQGHLNGYQNYYTHLAIKRYPERFTGAFSVDPFADNAMQIVKRHVEVLGFRAIKFEISQGGGIHGYRGQKTPFRLDTDPHVSRILTYLLDYPGFVVTVDYGNWDQISHQPDAIANLARLYTSLDFVVCHLSFPHVEHSNRLRAELNMWKNFNNIYTDISAIQDIDAPDSFPFPKSEQNVRIAKEVLGAKRIIWGTDSPWSATFNTYEELATWLENVDIFSQEELEDVMYNNAERVYFKEEHVKANRAGIDDTTKELNLY

SEQ ID NO: 3315 - DNA, 627 bp, Streptococcus agalactiae
gtgcttttgctcctcttgctgaaagcagttgaacgcaataagaaaaaagaaagtcaagctgagcaaggagcactggataaaaaacgttggtttattgcagttgatgacggtgttggttttggtgaaccagcaactattatcgcaggtctcattttagtaccaataatggttgttatttccttgattttacctggaaatgaagctttaccagtcgttgaccttattgctatcccttttatgattgaagctatgatagctgtgtcaaaaggaaatattcttaaagctattttgaatggaatcatatggttttcactaggtctttatgctgctagtgccctaggtccaatctacacagaagctgttaagcattttggaactgctttaccagcaggggtaactttgattatgagctttaatctcctagctcatcctttgacagctctagtcttctttgcttggatatctgggaacccactctatattggtgtgacagttgttatctatcttgctttcttgttcttgcttcgtactcatcgtgaatctatttacgcataccttaaaactatggctgataagaatagcggatatgaaggtagttgtgaaaaaatctttattgctgaagattaa

SEQ ID NO: 3316 - protein, 208 aa, Streptococcus agalactiae
MLLLLLLKAVERNKKKESQAEQGALDKKRWFIAVDDGVGFGEPATIIAGLILVPIMVVISLILPGNEALPVVDLIAIPFMIEAMIAVSKGNILKAILNGIIWFSLGLYAASALGPIYTEAVKHFGTALPAGVTLIMSFNLLAHPLTALVFFAWISGNPLYIGVTVVIYLAFLFLLRTHRESIYAYLKTMADKNSGYEGSCEKIFIAED

SEQ ID NO: 3317 - DNA, 858 bp, Streptococcus agalactiae
atgctagaagctttacataaattctttgaagtctttggtgcagcaactgttgtacccgctatgatttttattgtcagcctttttctaaaggtcaatccaaggcgagctttctttagcgccttacgagctggtgttggactcacaggctttggttggattatatcagcttttgctcctatggtgactaagtatatccagcagatggttaaaactactggtctccatttaccaattgtagatattggttggcaggctggttctctcaccgccttttcttctgagattggcctctctttctttgtttttggcttgctaattgaattggggcttttcttgcttgggattacccgagtatttgtcccatctaatctttggaataactttggctatatgatttggggtacaatggcctatgcagcaacaggtaattttatattgtctttcgcatttatggtttttgtcttactctattcattagtgatgtcagaagtattggcagatcgatggtcggagtattacggtgttaaaaatgcaacgatcaactcgattcataatattgaaacccttattccagctcttattcttgatcctctttggaacctacttggtgtcaataaggtaaagttgaacccagaatcattaaagactaagttagggatatttggtgagccaatgacacttggttttatacttggtgtgattattggtgtattaggtagtttacgtaaccttgcaagtattgatacttggggaggtatacttggttttgcagttgctcttgcagcggttatgactatttttcctttgattacgggggtatttgctagtgcttttgctcctcttgctgaaagcagttga

SEQ ID NO: 3318 - protein, 285 aa, Streptococcus agalactiae
MLEALHKFFEVFGAATVVPAMIFIVSLFLKVNPRRAFFSALRAGVGLTGFGWIISAFAPMVTKYIQQMVKTTGLHLPIVDIGWQAGSLTAFSSEIGLSFFVFGLLIELGLFLLGITRVFVPSNLWNNFGYMIWGTMAYAATGNFILSFAFMVFVLLYSLVMSEVLADRWSEYYGVKNATINSIHNIETLIPALILDPLWNLLGVNKVKLNPESLKTKLGIFGEPMTLGFILGVIIGVLGSLRNLASIDTWGGILGFAVALAAVMTIFPLITGVFASAFAPLAESS

SEQ ID NO: 3319 - DNA, 957 bp, Streptococcus agalactiae
atggacaagaaaaaaatcttagtaacgggtattgtgcctaaagaaggtctaagaaagcttatggaccgatttgatgttacttattcagaagatcgcccattttcacgtgactatgtgttagagcatttatctgaatatgacggatggttactcatgggacaaaaaggcgataaagagatgattgatgcaggtgaaaacttacaaattatttctttaaatgcggttggttttgatcatgtagatactgcgtatgctaaagaaaaaggaattatagtctctaattcccctcaagcagtacgagttccgacagcggaaatgacttttgctttaattttagctgccagtaagcgccttgcattttatgatagtattgtaagaagtggagagtggattgatccgagcgaacaacgttatcaaggtttgactttgcaaggttcaacattaggtatttacggaatgggacgcatcggtttgacagtcgcaaattttgctaaagcatttgggatgactgttgtttacaatgatgtttatcgacttcctgaagataaggaaaaagagcttggtgtaacctatctcgaatttgatcagcttattaaaacagctgatgtcataaccatccacgccccagcattaccatcaacaatccacaaattcaataaagatgtttttgctaagatgaaaaatcgaagctacttaatcaacgctgctagaggcccaatcgtttctgaagaagcacttattgaagcactgaaagaaggtgaaatcgcgggtgcgggattagatgtttttgagaatgaaccacaggtatctgaaggattgagaagccttgataatgttatcatgagtccacatgctgggacaggtactattgagggacgtagaactttggctgaagaagcagctgacaacatcattgccttctttgatggcaagccacaaaatattgtcaataaataa

SEQ ID NO: 3320 - protein, 318 aa, Streptococcus agalactiae
MDKKKILVTGIVPKEGLRKLMDRFDVTYSEDRPFSRDYVLEHLSEYDGWLLMGQKGDKEMIDAGENLQIISLNAVGFDHVDTAYAKEKGIIVSNSPQAVRVPTAEMTFALILAASKRLAFYDSIVRSGEWIDPSEQRYQGLTLQGSTLGIYGMGRIGLTVANFAKAFGMTVVYNDVYRLPEDKEKELGVTYLEFDQLIKTADVITIHAPALPSTIHKFNKDVFAKMKNRSYLINAARGPIVSEEALIEALKEGEIAGAGLDVFENEPQVSEGLRSLDNVIMSPHAGTGTIEGRRTLAEEAADNIIAFFDGKPQNIVNK

SEQ ID NO: 3321 - protein, 1020 aa, Streptococcus agalactiae
ATGAAGATTAATAAATTATTGTCAGACAGACTTGAAGCTTGTTATTCAGTTTGTCGTTTGCAAAATCAAGACTATGATTTTTTATTAGTAGCTTCAGAGGTTGACCAAGCCTGCTTTGCTTATGATTTGAATAGCGATTTAGCAAAAATTGTTGTTTGGGAAGATGTGGGAGGTACCATGAGTATTATTCCAATTCCCGGAACCATGGATTTTTTGGCAACCCAGAAATTTTACCCAGGGTTTAAGGCCAAAGATTGTCAGGTTGTTTATGCAAGTTTTCAAGGAGATCATTGGGACATTTGTAACGCATTTGATTTTCCGTATTTACATCGCTTTGATCTCATTAAAGGTAAAGAAAATCAACTTTACTTTATAGGTTGTACAATTGCTAACAGTAAAGCCCACACTGAGGATTGGAGTGATAAAGGCCGAATTTTTGTTGCTCGTTTTAATACTCAAAACCATACATTGGAAGGATTGCAACAATTGCCTCAAACTTTATTAAAAAATCATGGATACTATGCCATTCAGGATGAAGGATATTCATTGATTACTTCAGTAGAAGGGGTATTCAAACTCACTTATCCAGAATTTTCTACTACAGGCGACTGGCAATTAGAACGGCTTTTCGATGAGGAGACAAGCGATGTGGTGAAAGTGGATATTAATCAGGATGGCAAGGATGAGTATGTGATTATCCAAGGTTTTCATGGAGATCGTTTACGCATCTTCACTGAAGATTTCGGTCGAGAATTATTCCATTATCCAGAAAAAACACCATTTGGTCATGCTATTTGGAGTGGTCGTTTACTTAATCAGACTTGTTTTGTATTCGGGTGGCGATCAGAAAAAGCAGAATTAAGGCTTTTTCACTTTGTAGATGGGCACTTGGTTTCAGAATTAGTAGATGCAAAAGCAGCTTCTAGTAATGTCTTAGCTTTTGAAAAAGATGAAAAAGCTTATCTTTTCTCAGCCAATAACGGACGTGGCGAAGTTGCTCTTTATCAATTAGTAAAATAA

SEQ ID NO: 3322 - protein, 339 aa, Streptococcus agalactiae
MKINKLLSDRLEACYSVCRLQNQDYDFLLVASEVDQACFAYDLNSDLAKIVVWEDVGGTMSIIPIPGTMDFLATQKFYPGFKAKDCQVVYASFQGDHWDICNAFDFPYLHRFDLIKGKENQLYFIGCTIANSKAHTEDWSDKGRIFVARFNTQNHTLEGLQQLPQTLLKNHGYYAIQDEGYSLITSVEGVFKLTYPEFSTTGDWQLERLFDEETSDVVKVDINQDGKDEYVIIQGFHGDRLRIFTEDFGRELFHYPEKTPFGHAIWSGRLLNQTCFVFGWRSEKAELRLFHFVDGHLVSELVDAKAASSNVLAFEKDEKAYLFSANNGRGEVALYQLVK

SEQ ID NO: 3323 - protein, 984 aa, Streptococcus agalactiae
ATGTTTGAGAAGGTAACCATTAGTGATATTGCAAATTTAGTAGGTGTGTCAAAAGCTACAGTTTCCTATTATCTCAATGGGAACTATAAGAAAATGTCTCTGCAAACGAAAGAAAAAATACGTTTAGCTATTAAGGAGACTGGTTATCAACCAAGTAAGATTGCTCAAAGTTTAGTTACAAAAAATACCCGTACTATTGGGGTCGTTATTGCTGATATTACTAATCCCTTTATTTCGTCTGTGATGAAGGGAATACATGATACTTGTCAACAATTTGGTTACTCGGTTAACTTTACTAACTCGGATAATGATATTGACATTGAGTTGGAAAATTTAAACCGTTTAAATCAGCAAAACGTTTCAGGAATTATTTTAGATTCTGTAGATCCTAATCATTCATTTATAGAAACTTTGAGTAATGATCGTCTTGTCATGGTTGATAGACAAGCTAAAGATATTAAAGTAGATACTGTAGCATCCGACAATAAAGAATCGACTCAAATATTTCTTGAAAAAATGCAAGAAGCTGGGTATCATGACATCTATTTTGTCACTTATCCCATTGAAGGGATTTCAACCCGTGAGCTTCGTTACGAAGGTTTTAAAGAAGTGGTCAGTTCAAATCCTGATAAGTTGATTATTATCACTGAAGATGGTAGTACACAGAGAATTCTTGATATCATTGAACATTCAGAGCAAAAACCAGGGTTCTTAATGATGAACGGTCCAACTCTTTTGAATTTTATGAAAAAATTAAATCAATCAACGGTCAGCTACCCTGAGGATTATGGTCTTGGGAGTTATGAAGATTTAGAATGGATGCAGGTGCTTACACCAAACGTTTCCTGTATAAAACAGGATTCATATGGCATTGGTTGCCTGGCTGCCCAATGTTTAATTGAAAAAATTAGTCAAGGAAACGAACCAACTACTGCAAGGTTACTAGAAGTAAAAAATCAAATCGTTATTCGTCAATCTTTTTAA

SEQ ID NO: 3324 - protein, 327 aa, Streptococcus agalactiae
MFEKVTISDIANLVGVSKATVSYYLNGNYKKMSLQTKEKIRLAIKETGYQPSKIAQSLVTKNTRTIGVVIADITNPFISSVMKGIHDTCQQFGYSVNFTNSDNDIDIELENLNRLNQQNVSGIILDSVDPNHSFIETLSNDRLVMVDRQAKDIKVDTVASDNKESTQIFLEKMQEAGYHDIYFVTYPIEGISTRELRYEGFKEVVSSNPDKLIIITEDGSTQRILDIIEHSEQKPGFLMMNGPTLLNFMKKLNQSTVSYPEDYGLGSYEDLEWMQVLTPNVSCIKQDSYGIGCLAAQCLIEKISQGNEPTTARLLEVKNQIVIRQSF

SEQ ID NO: 3325 - protein, 648 aa, Streptococcus agalactiae
ATGAAATACTTTTTAGATACTGCCGATGTTTCTGAAATTCGTCGTCTTAATCGTTTAGGAATCGTTGATGGTGTTACTACCAATCCGACTATTATTTCACGTGAGGGGCGTGACTTTAAAGAAGTTATTAACGAAATTTGCCAAATCGTTGATGGCCCAGTTAGTGCAGAAGTGACAGGTTTAACTTGTGATGAAATGGTTACCGAAGCTAGAGAAATCGCTAAGTGGTCACCAAATGTTGTTGTTAAAATTCCAATGACTGAAGAAGGTTTAGCAGCAGTTTCACAATTATCAAAAGAAGGTATAAAGACAAATGTGACATTAATATTTACTGTGGCTCAAGGTCTTTCGGCAATGAAAGCTGGTGCAACATTTATTAGTCCTTTTGTGGGTCGTCTTGAAGATATTGGAACAGATGCTTATGCTTTGATTCGTGACCTTCGTCACATTATTGATTTTTATGGTTTCCAATCTGAGATTATTGCTGCTAGCATTCGTGGATTGGCGCATGTGGAGGGCGTCGCTAAATGCGGTGCGCACATTGCCACTATTCCAGATAAAACATTTGCATCACTATTTACTCACCCGCTTACTGATAAAGGGATTGAAACTTTCTTAAAAGATTGGGATAGTTTCAAGAAGAAGTAG

SEQ ID NO: 3326 - protein, 215 aa, Streptococcus agalactiae
MKYFLDTADVSEIRRLNRLGIVDGVTTNPTIISREGRDFKEVINEICQIVDGPVSAEVTGLTCDEMVTEAREIAKWSPNVVVKIPMTEEGLAAVSQLSKEGIKTNVTLIFTVAQGLSAMKAGATFISPFVGRLEDIGTDAYALIRDLRHIIDFYGFQSEIIAASIRGLAHVEGVAKCGAHIATIPDKTFASLFTHPLTDKGIETFLKDWDSFKKK

SEQ ID NO: 3327 - protein, 717 aa, Streptococcus agalactiae
ATGGCAAAATCATTGCAAGAAATGCGTGAACGTGTGTGTGAAGCTAATAAATCACTACCAGTTCATAGTTTAGTTAAATTTACTTGGGGTAACGTTTCTGAAGTTGACCGCGAAGCAGGATTGATTGTTATCAAACCTTCAGGAGTTGACTATGACCAATTGACACCTGAAAATATGGTTGTCACAGACTTAGAGGGAAATATAGTGGAGGGGGATTTGAATCCATCATCTGATCTTCCAACTCATGTTCAACTTTATAAAGCATGGCCAGAAGTCGGTGGTATTGTTCATACTCATTCAACAGAAGCAGTTGGTTGGGCACAAGCGGGTCGCGATATTCCATTTTATGGAACAACACATGCAGATTATTTTTATGGGCCAGTACCATGTGCTAGGTCACTTAGTGAAGATGAAGTTAACACTGCTTATGAAAAAGAAACAGGTAGCGTTATTATAGAGGAATTTGAACGTCGGGATTTAGATCCAATGGCTGTTCCTGGTATTGTTGTACGTAATCATGGACCATTTACTTGGGGGAAAGATCCAGCACAAGCAGTTTATCACTCAGTCGTTCTTGAAGAAGTTGCTAAGATGAATCGTTTCACTGAACAAATTAATCCACGTGTTGAACCAGCTCCAAAATATATTATGGATAAACACTATTTACGTAAGCATGGACCAAATGCTTATTATGGTCAAAAAGGACAAGAACATTAA

SEQ ID NO: 3328 - protein, 238 aa, Streptococcus agalactiae
MAKSLQEMRERVCEANKSLPVHSLVKFTWGNVSEVDREAGLIVIKPSGVDYDQLTPENMVVTDLEGNIVEGDLNPSSDLPTHVQLYKAWPEVGGIVHTHSTEAVGWAQAGRDIPFYGTTHADYFYGPVPCARSLSEDEVNTAYEKETGSVIIEEFERRDLDPMAVPGIVVRNHGPFTWGKDPAQAVYHSVVLEEVAKMNRFTEQINPRVEPAPKYIMDKHYLRKHGPNAYYGQKGQEH

SEQ ID NO: 3329 - protein, 864 aa, Streptococcus agalactiae
ATGACACGTCCAATAGGAATTTACGAGAAGGCAACACCAAAACATTTTAACTGGTTAGAACGCCTACAATTTGCTAAAGAATTGGGATTTGATTTTGTAGAATTATCCATTGATGAGTCAGATGAACGTTTGGCACGTTTGGAGTGGTCAAAAGAAGAACGACTTGAGTTGGTCAAAGCTATTTTTGAGACAGGAGTTCGTGTTCCAACAATTACATTTAGTGGTCATCGTCGTTTCCCAATGGGATCTAATAATCCTGAGAAAGAAGCGCGTGCGATGGATATGATGAAAAAATGTATCGTCTTTGCTCAAGATATTGGTATTCGTAATATTCAATTAGCAGGATATGATGTGTACTATGAAGAAAAATCTCCAGAGACACGTGCACGCTTTATTAAGAATCTTCGTCAAGCTTGTACTTGGGCCGAAGAAGCACAAGTTATTCTATCTATTGAGATTATGGATGATCCATTTATGAATTCCATTGAGAAATATTTGGCTGTGGAAAAAGAGATTGATTCTCCTTATCTCTTTGTCTACCCAGATACTGGAAATGTATCAGCATGGCATAATGATCTTTGGAGTGAATTTTATAATGGACATCGCTCAATTGCAGCGCTTCATATTAAAGATACTTATGCTGTTACCGAAACGTCTAAAGGTCAATTCCGTGATGTTCCATTTGGTCAAGGGTGTGTTGATTGGGAAGAAATGTTTGCTGTCATTAAGAAAACAAATTATAATGGTCCATTCTTGATTGAAATGTGGTCGGAGAACTGTGAGACTGTAGAGGAAACACGTGCAGCCATTAAAGAGGCGCAAGATTTTCTTTACCCATTAATGGAGAAAACAGGAGTGAAATAA

SEQ ID NO: 3330 - protein, 287 aa, Streptococcus agalactiae
MTRPIGIYEKATPKHFNWLERLQFAKELGFDFVELSIDESDERLARLEWSKEERLELVKAIFETGVRVPTITFSGHRRFPMGSNNPEKEARAMDMMKKCIVFAQDIGIRNIQLAGYDVYYEEKSPETRARFIKNLRQACTWAEEAQVILSIEIMDDPFMNSIEKYLAVEKEIDSPYLFVYPDTGNVSAWHNDLWSEFYNGHRSIAALHIKDTYAVTETSKGQFRDVPFGQGCVDWEEMFAVIKKTNYNGPFLIEMWSENCETVEETRAAIKEAQDFLYPLMEKTGVK

SEQ ID NO: 3331 - DNA, 666 bp, Streptococcus agalactiae
atgacaaaacgtttaccaaatttacaagttgcacttgaccactcagatttacaaggagctatcaaagctgccgtatcagtaggacatgaagttgatgttattgaagctggaactgtttgccttcttcaagtaggtagtgaattagttgaggtccttcgcagtctcttccctgacaaaataattgttgctgatacaaaatgtgctgatgctggtgggactgttgctaaaaataatgctgttcgcggtgcagactggatgacttgtatctgttgtgctactattccaacaatggaagcagccttaaaagctatcaaagaagaacgcggcgatcgtggagaaattcaaatcgaactatatggtgattggacttatgagcaagcgcaacaatggttggatgcaggtatttcacaagccatttatcaccaatctcgtgatgcgcttcttgctggcgaaacatggggagagaaagaccttaataaggttaaaaaattgattgatatgggcttccgagtttctgtaactggtggtttatcaactgatactcttcaattatttgaaggtgttgatgtctttacttttattgcgggtcgtggtattacagaggcagatgatccagccgcagcagcacgtgcatttaaggatgaaattaaacgtatttgggggtaa

SEQ ID NO: 3332 - protein, 221 aa, Streptococcus agalactiae
MTKRLPNLQVALDHSDLQGAIKAAVSVGHEVDVIEAGTVCLLQVGSELVEVLRSLFPDKIIVADTKCADAGGTVAKNNAVRGADWMTCICCATIPTMEAALKAIKEERGDRGEIQIELYGDWTYEQAQQWLDAGISQAIYHQSRDALLAGETWGEKDLNKVKKLIDMGFRVSVTGGLSTDTLQLFEGVDVFTFIAGRGITEADDPAAAARAFKDEIKRIWG

SEQ ID NO: 3333 - DNA, 486 bp, Streptococcus agalactiae
atgaatttaaaacaagcctttatcgaaaatgactcaattcgtcttaaattatctgcaagcgattggaaagaagcaatcaaattatcaattgatccattgattgaaagtggtgctgttgatgcagaatattacgatgccattattgaatctacagaggaatttggtccgtactacattcttatgccgggtatggcgatgcctcatgctcgtccagaagcaggcgtaaaacgtgatgcattttcattaattacattaacagagccagtagtttttccagatggcaaagaagtctcagtattgttagcacttgctgcaacaagttcagctattcatacttctgttgctatccctcaaattattgccctttttgaattggaaaattcaattcagcgcttgacggaatgccaagaagcaaaagaagtccttgcaatggtagaggaatcaaaaaacagcccatatttagaaggtttagatttagaaagctaa

SEQ ID NO: 3334 - protein, 161 aa, Streptococcus agalactiae
MNLKQAFIENDSIRLKLSASDWKEAIKLSIDPLIESGAVDAEYYDAIIESTEEFGPYYILMPGMAMPHARPEAGVKRDAFSLITLTEPVVFPDGKEVSVLLALAATSSAIHTSVAIPQIIALFELENSIQRLTECQEAKEVLAMVEESKNSPYLEGLDLES

SEQ ID NO: 3335 - DNA, 279 bp, Streptococcus agalactiae
atggttaaagttcttacagcatgcggaaacggcatgggatcatcaatggttatcaaaatgaaagtcgaaaatgcgcttcgtcaattaggcgttagcaactttgagtcagcatcttgctcagtcggagaagcaaaaggtttagctgcaaactacgatatcgtggttgcttcaaaccaccttatccatgaattagacggacgtacaaaaggtcatttagtaggtcttgataaccttatggatgacaatgaaataaaaacaaaactacaagaaattttgtaa

SEQ ID NO: 3336 - protein, 92 aa, Streptococcus agalactiae
MVKVLTACGNGMGSSMVIKMKVENALRQLGVSNFESASCSVGEAKGLAANYDIVVASNHLIHELDGRTKGHLVGLDNLMDDNEIKTKLQEIL

SEQ ID NO: 3337 - DNA, 1440 bp, Streptococcus agalactiae
atggaaaacttcctagctccccttaattggttctcgcaaaatatcttgcagaatccagccttcttcgtaggtctattggtactcattgggtatcttttattgaagaaaccacttcatgatgtctttgctggttttatcaaagcgaccgttggatatttgattttgaacgtaggtgcaggaggattggttaatacattccgtccaatcttagttgctcttgctaaaaaatttaatttagaagctgctgttattgacccttactttggtttagcatcagcaaatgctaagttagaaacaatgggctttatcagtgttgcaacaacagcactcttgattggttttgggattaacattctcttggttgctcttcgtaaagtaactaaagtccgtactctttttattactggtcatatcatggtacaacaagctgcaacaatttcagtatttgtactgctcttgattccacaacttcgtaatggttttggtgcatgggctgttggtatcatttgtggtctatattgggcggtaagttctaatatgaccgttgaagcaactcaacgccttacaggtggtggcggatttgccatcggacaccaacaacaatttgcaatttggtttgttgataaagttgcgccattcttcggtaaaaaagaagaaaaccttgataacttaaaattaccaacattcttaaatattttccatgatacagttgttgcatcagcaacattgatgctagttttctttggaggaatcttagctgtccttggtccagacattatgtctaatgttaaattaatcggacctggtgcatttgtaccaactaagcaagctttcttcatgtacatccttcaaacatcattgacattctcagtttaccttttcattttgatgcaaggtgtacgcatgttcgttacagaattgacaaatgccttccaaggtatctcaaacaaacttcttccaggatcattcccagcagttgacgttgcagcttcatatggttttggttcttcaaatgcagttctttcaggatttgcttttggtttgattggtcaattaattacaatcgctctacttgttgtcttcaaaaatccaatcttgattatcacaggattcgttccagtattctttgataatgcggcaatcgctgtttatgcagataaacgtggtggctggaaagcagcagtagctctatcatttatctcaggtattattcaggtggcacttggtgctgttgctgtaggtcttttaggacttgcaggtggttatcatggaaatatcgactttgaattcccatggttagcatttggttacatcttcaagtatttaggtatcgctggttacgtgattgtatgtctcttcttcttagctattccacaacttcaatttatgaaatctaaagataaagaagcatactatcgtggtgatgcgcctgcagaataa

SEQ ID NO: 3338 - protein, 479 aa, Streptococcus agalactiae
MENFLAPLNWFSQNILQNPAFFVGLLVLIGYLLLKKPLHDVFAGFIKATVGYLILNVGAGGLVNTFRPILVALAKKFNLEAAVIDPYFGLASANAKLETMGFISVATTALLIGFGINILLVALRKVTKVRTLFITGHIMVQQAATISVFVLLLIPQLRNGFGAWAVGIICGLYWAVSSNMTVEATQRLTGGGGFAIGHQQQFAIWFVDKVAPFFGKKEENLDNLKLPTFLNIFHDTVVASATLMLVFFGGILAVLGPDIMSNVKLIGPGAFVPTKQAFFMYILQTSLTFSVYLFILMQGVRMFVTELTNAFQGISNKLLPGSFPAVDVAASYGFGSSNAVLSGFAFGLIGQLITIALLVVFKNPILIITGFVPVFFDNAAIAVYADKRGGWKAAVALSFISGIIQVALGAVAVGLLGLAGGYHGNIDFEFPWLAFGYIFKYLGIAGYVIVCLFFLAIPQLQFMKSKDKEAYYRGDAPAE

SEQ ID NO: 3339 - DNA, 618 bp, Streptococcus agalactiae
atgcgtaaatttttccaagatgttattgtagaggtggcttattatttagagattgctttgtcagttattctggcaacagctattattttttttagtttagcactctttcatgatttgtttagcatgttgtctgttgatcaaaatgttgataagttgttccagactttccttgctcgcgccatgacaatagcagtcgggattgagttgatcaaaatgttttcaaaaccttccccagatactttaattgaagtgttattgtttgccttagctcgtcaacttgtaattgaacatggtagtgtttcagattaccttatggggattgcttcagttgctattttgtttgctgttcgtaaatatcttttcacccattttgatgggtcaagcaacattgttttacgtgctaataacaaagtcaaaaaagctaatattttagctagggttcaactaccttgtcaacccaatgaaactttaggagacttacttgttcgtcatttaaatgatgaggaaaaggacgttgctattggttcagtagtctatattaataacgttgcattgcgtgttgatagtatgcacgatggtcttgtgacgcgtgtagaaatcattaggagtctacattaa

SEQ ID NO: 3340 - protein, 205 aa, Streptococcus agalactiae
MRKFFQDVIVEVAYYLEIALSVILATAIIFFSLALFHDLFSMLSVDQNVDKLFQTFLARAMTIAVGIELIKMFSKPSPDTLIEVLLFALARQLVIEHGSVSDYLMGIASVAILFAVRKYLFTHFDGSSNIVLRANNKVKKANILARVQLPCQPNETLGDLLVRHLNDEEKDVAIGSVVYINNVALRVDSMHDGLVTRVEIIRSLH

SEQ ID NO: 3341 - protein, 1293 aa, Streptococcus agalactiae
ATGACTTCAGTTGTTGTAGTAGGTACCCAATGGGGTGACGAAGGTAAAGGTAAAATTACAGATTTTTTATCTGCTGACGCAGAAGTAATTGCACGTTATCAAGGTGGTGATAACGCTGGGCATACTATCGTTATTGATAACAAAAAATTTAAACTTCATTTAATTCCTTCAGGAATTTTCTTCAAAGAAAAAATTTCTGTCATTGGTAATGGTGTTGTCGTTAATCCGAAATCATTAGTTAAAGAGTTAGCTTATCTTCACGGAGAAGGTGTAACAACGGATAACCTTCGTATTTCAGACCGTGCGCATGTTATCTTGCCATACCACATCAAGCTTGACCAACTACAAGAAGATGCTAAAGGTGATAATAAAATTGGAACAACCATCAAAGGAATTGGGCCAGCTTACATGGACAAGGCTGCGCGTGTCGGTATCCGTATTGCTGACCTTCTTGATAGAGAAGTTTTTGCTGAGCGTTTGAAAATTAATTTAGCTGAGAAAAATCGTTTATTTGAAAAAATGTATGACAGTACACCTCTTGAATTTGATGATATTTTCGAAGAATATTATGAATATGGTCAACAAATTAAGCAATATGTGACTGATACATCCGTTATCTTAAATGATGCTCTTGATGCCGGTAAACGTGTTCTTTTTGAAGGAGCACAAGGAGTTATGCTCGACATTGATCAAGGAACATACCCATTTGTAACATCTTCCAATCCAGTAGCAGGTGGTGTCACAATTGGTTCGGGAGTTGGACCAAGTAAAATTAATAAAGTAGTAGGTGTATGTAAAGCTTACACTAGCCGTGTCGGTGATGGACCATTCCCAACAGAACTTTTTGATGAGGTTGGTGACCGTATTCGTGAGATTGGTAAAGAGTATGGTACAACGACTGGTCGTCCTCGTCGCGTTGGATGGTTTGATTCTGTTGTTATGCGTCACAGCCGTCGAGTATCAGGTATTACTAATCTCTCTCTGAATTCAATTGATGTTCTTTCAGGGCTTGATACGGTGAAAATTTGTGTGGCTTATGACCTTGATGGGAAACGTATTGACTATTATCCAGCAAGCCTTGAACAGCTAAAACGTTGTAAACCAATCTATGAAGAATTACCGGGCTGGTCTGAAGATATTACAGCTTGCCGTAGCTTAGATGATCTTCCAGAAAATGCACGTAATTACGTTCGCCGTGTTGGCGAATTGGTTGGTGTTCGTATTTCTACTTTCTCAGTAGGGCCTGGTCGTGAACAAACAAACATTCTTGAGTCTGTTTGGTCAAATATTTAA

SEQ ID NO: 3342 - protein, 430 aa, Streptococcus agalactiae
MTSVVVVGTQWGDEGKGKITDFLSADAEVIARYQGGDNAGHTIVIDNKKFKLHLIPSGIFFKEKISVIGNGVVVNPKSLVKELAYLHGEGVTTDNLRISDRAHVILPYHIKLDQLQEDAKGDNKIGTTIKGIGPAYMDKAARVGIRIADLLDREVFAERLKINLAEKNRLFEKMYDSTPLEFDDIFEEYYEYGQQIKQYVTDTSVILNDALDAGKRVLFEGAQGVMLDIDQGTYPFVTSSNPVAGGVTIGSGVGPSKINKVVGVCKAYTSRVGDGPFPTELFDEVGDRIREIGKEYGTTTGRPRRVGWFDSVVMRHSRRVSGITNLSLNSIDVLSGLDTVKICVAYDLDGKRIDYYPASLEQLKRCKPIYEELPGWSEDITACRSLDDLPENARNYVRRVGELVGVRISTFSVGPGREQTNILESVWSNI

SEQ ID NO: 3343 - protein, 1023 aa, Streptococcus agalactiae
ATGAATATCATTATTGGGACCAGTCTTTTAATACTTGTATTAGCGATTTTCACTTTATTTAATTATAAAGCACCCTACGGAACAAAAGCAATGGGAGCATTGGCATCTGCGGCTTGTGCATCCTTCCTTGTAGAAGCTTTTCAAGATTCTTTCTTTGGTAAAGTTTTGGGATTTCAATTTTTAAGTGAAGTGGGTGGTGCTAATGGTTCACTTTCTGGTGTAGCTGCAGCTATATTGGTTGCTATTGCTATTGGTGTAACCCCAGGATACGCAGTTTTAATTGGTTTATCTGTTTCTGGAACAGGTATTATTCCTGGTTTCCTTGCAGGATATTTAGTGGGATTTCTTGTTAAGTGGATGGAAAGAAATATTCCTGGTGGTTTAGATCTTATTTCAATTATTATTATTGGTGCACCATTAACACGTCTTGTGGCCAAACTGTTGACGCCGCTTATTAATAGCACTTTGCTCACCATTGGAGATATCTTAACATCAGGTGCTCATAGCAACCCTATTTTAATGGGGATTATACTTGGCGGGACAATTGTAGTAGTGGCGACAGCACCACTTTCTTCTATGGCATTGACAGCTATGCTAGGATTAACCGGAATGCCTATGGCTATAGGAGCCTTGTCTGTCTTTGGTTCGTCATTTATGAATGGTGTACTTTTCCATAAATTAAAACTTGGAAGTCGTAAAGATAATATAGCTTTTGCTGTTGAGCCTCTAACTCAAGCTGACGTGACTTCAGCTAACCCTATTCCAATCTATGTCACTAATTTTGTTGGTGGTGCAGCTTGTGGTATTTTAATTGCCTTGATGAAATTAGTTAATGATACTCCTGGAACAGCGACACCAATTGCAGGATTTGCTGTCATGTTTGCCTATAACCCAATGATAAAAGTACTAATAACCGCTCTAGGTTGTATTATCCTATCTTTACTAGCAGGCTATTTTGGAGGCATTGTTTTTAAAGATTATAAATTAGTTACAAAAGAAGAGCTACAGGCTAGAGATAACTAG

SEQ ID NO: 3344 - protein, 340 aa, Streptococcus agalactiae
MNIIIGTSLLILVLAIFTLFNYKAPYGTKAMGALASAACASFLVEAFQDSFFGKVLGFQFLSEVGGANGSLSGVAAAILVAIAIGVTPGYAVLIGLSVSGTGIIPGFLAGYLVGFLVKWMERNIPGGLDLISIIIIGAPLTRLVAKLLTPLINSTLLTIGDILTSGAHSNPILMGIILGGTIVVVATAPLSSMALTAMLGLTGMPMAIGALSVFGSSFMNGVLFHKLKLGSRKDNIAFAVEPLTQADVTSANPIPIYVTNFVGGAACGILIALMKLVNDTPGTATPIAGFAVMFAYNPMIKVLITALGCIILSLLAGYFGGIVFKDYKLVTKEELQARDN

SEQ ID NO: 3345 - protein, 675 aa, Streptococcus agalactiae
ATGGATAAAGAAAAATTAGACTATTGGAAAACGATAATAACGTTTCTCCATAATGTTTTAGGTGATAATTACGAAATTGTTTTGCATGTAGTAGATGAAAATGATATCTATATTGGTGAGTTGGTTAATAGTCACATTAGTGGACGAACCATAAGTTCACCTCTAACGACTTTCGCCCTTGATTTAATCAAGAATAAAGTTTATAAGGAAAAAGATTTTGTTACTAACTATAAGGCGATTGTCAGCCCTCTCAATAAAGAAGTTCGTGGATCTACTTTCTTCATCAAGAATGCTCAAAATGAACTTGAAGGGATGTTATGTATCAACCTTGATATTTCTGCATACCAAAATATTGCTTTGGATATTCTAGACTTAGTTAATTTAAATGTTAACAAAATACTACCTAAGTCCCCTCAAAAAATTTCTCTCCCTCAACAGGAGGAACCTGTAGAAGTTCTATCAGGCAATATTCAGGATATTATTAGTGAGATTGTTGATCCTAGTCTTTTAAATCAGAATATTCATTTAAGTCAAGAAGTTAAGGTAGAAATTGTTTCTAAACTTCACGAAAAAGGTGTATTCCAATTAAAAGGTGCCGTTTCAAAGGTCGCTGAAGTTCTCAACATCTCCGAACCAAGCGTCTATCGTTATCTTAAAAAAATTGAAACTCATTAA

SEQ ID NO: 3346 - protein, 224 aa, Streptococcus agalactiae
MDKEKLDYWKTIITFLHNVLGDNYEIVLHVVDENDIYIGELVNSHISGRTISSPLTTFALDLIKNKVYKEKDFVTNYKAIVSPLNKEVRGSTFFIKNAQNELEGMLCINLDISAYQNIALDILDLVNLNVNKILPKSPQKISLPQQEEPVEVLSGNIQDIISEIVDPSLLNQNIHLSQEVKVEIVSKLHEKGVFQLKGAVSKVAEVLNISEPSVYRYLKKIETH

SEQ ID NO: 3347 - protein, 1692 aa, Streptococcus agalactiae
ATGAATGNNNNNTGGAAGCMACCCACTCAAAGGGTTGCTCAAACACCCCATCCCAAAACATTAGGGAGTCGTAACTATCATCCTTATATCCAAACGGATTATAGTGAACCTCAATTAGAACTCATTACACCTATTGCAAAGGATAGCCAAGAAGCCATTCGATTTTTGAAAGCTATAAGTGATGTTGCTGGACGCTCTATCAACCACGATGAATACTTATGGCCGCTTTCTATGCCACCCAAAGTGAGGGAAGAAGACATACAGATTGCCCAATTAGAGGATGCTTTTGAATATGATTATCGCAAATATTTGGAGAAGACTTATGGAAAACTAATACAATCCATCTCTGGAATTCACTATAATCTCGGTTTAGGTCAAGAGTTATTAACTTCTCTCTTTGAATTGAGTCAAGCAGATAATGCTATTGATTTTCAGAACCAGCTTTACATGAAATTGTCTCAAAATTTTTTACGTTACCGTTGGTTACTAACTTATCTATACGGAGCGAGCCCAGTAGCTGAAGAAGACTTTTTAGATCAGAAACTGAATAACCCTGTCCGGTCACTTAGAAATAGTCACTTAGGTTATGTGAATCATAAAGATATTCGTATTTCTTATACTAGCTTGAAGGATTATGTCAACGATCTAGAAAATGCTGTAAAAAGTGGGCAATTGATTGCTGAGAAAGAATTTTATTCACCTGTTCGTCTCCGTGGTAGTAAGGCCTGTCGTAATTATTTAGAAAAAGGAATTACATATTTAGAGTTTCGCACTTTTGATCTCAACCCATTTAGCCCAATCGGTATAACGCAGGAAACTGTTGATACTGTTCACCTTTTCTTATTGGCGCTTTTGTGGATAGATTCTAGTAGTCATATTGACCAAGATATCAAGGAAGCCAATAGATTAAATGACCTTATAGCACTTAGTCATCCATTAGAAAAATTACCTAATCAAGCACCAGTTTCTGACTTAGTGGATGCTATGCAATCTGTTATCCAACATTTTAACTTATCACCTTACTATCAAGACCTATTGGAATCTGTAAAAAGGCAAATTCAGTCACCTGAATTAACGGTAGCTGGTCAACTTTTAGAAATGATTGAAGGACTTTCCTTAGAAACATTTGGACAAAGACAAGGACAAATTTATCACGATTATGCTTGGGAAGCTCCCTACGCCTTAAAGGGATATGAAACGATGGAACTTTCTACCCAATTGCTACTATTTGACGTTATCCAAAAAGGAGTCAACTTCGAAGTGCTGGATGAACAAGATCAATTCCTAAAATTATGGCACAATAGTCATATTGAGTACGTTAAAAATGGTAATATGACCTCAAAAGATAACTATATTGTACCGCTCGCTATGGCTAACAAAGTTGTTACAAAAAAAATCCTAGATGAAAAGCATTTCCCAACTCCTTTTGGAGATGAATTTACTGACCGTAAAGAGGCACTTAACTATTTTTCACAAATCCAAGTAAACCAATCGTCGTTAAGCCAAAATCTACAAACTTTGGTTTAGGCATTTCTATTTTTAAAACATCAGCTAACTTAGCTTCTTATGAAAAAGCAATTGACATCGCTTTTACCGAAGATAGTGCTATTCTTGTGGAAGAATATATTGAGGGTACCGAATACCGTTTCTTCGTCCTTGAGGGGGACTGTATTGCTGTATTGCTTAGGGTAG

SEQ ID NO: 3348 - protein, 564 aa, Streptococcus agalactiae
  VARIANT 3, 4, 7: Xaa = Any Amino Acid
MNXXWKXPTQRVAQTPHPKTLGSRNYHPYIQTDYSEPQLELITPIAKDSQEAIRFLKAISDVAGRSINHDEYLWPLSMPPKVREEDIQIAQLEDAFEYDYRKYLEKTYGKLIQSISGIHYNLGLGQELLTSLFELSQADNAIDFQNQLYMKLSQNFLRYRWLLTYLYGASPVAEEDFLDQKLNNPVRSLRNSHLGYVNHKDIRISYTSLKDYVNDLENAVKSGQLIAEKEFYSPVRLRGSKACRNYLEKGITYLEFRTFDLNPFSPIGITQETVDTVHLFLLALLWIDSSSHIDQDIKEANRLNDLIALSHPLEKLPNQAPVSDLVDAMQSVIQHFNLSPYYQDLLESVKRQIQSPELTVAGQLLEMIEGLSLETFGQRQGQIYHDYAWEAPYALKGYETMELSTQLLLFDVIQKGVNFEVLDEQDQFLKLWHNSHIEYVKNGNMTSKDNYIVPLAMANKVVTKKILDEKHFPTPFGDEFTDRKEALNYFSQIQDKPIVVKPKSTNFGLGISIFKTSANLASYEKAQLTSLLPKIVLFLWKNILRVPNTVSSSLRGTVLLYCLG

SEQ ID NO: 3349 - protein, 276 aa, Streptococcus agalactiae
GTGGAAGAATATATTGAGGGTACCGAATACCGTTTCTTCGTCCTTGAGGGGGACTGTATTGCTGTATTGCTTAGGGTAGCAGCTAATGTCGTTGGAGATGGTATTCATACTATTAGTCAGCTAGTTAAACTTAAAAACCAAAACCCTCTCAGAGGCTATGATCATCGCTCTCCTCTAGAGGTTATTGAGCTCGGAGAAGTAGAACAGTTAATGTTGGAACAACAGGGATACACTGTTAACAGTATCCCNNNNNCATTCCATTCATTAATTAATTAA

SEQ ID NO: 3350 - protein, 91 aa, Streptococcus agalactiae
  VARIANT 84, 85: Xaa = Any Amino Acid
MEEYIEGTEYRFFVLEGDCIAVLLRVAANVVGDGIHTISQLVKLKNQNPLRGYDHRSPLEVIELGEVEQLMLEQQGYTVNSIPXXFHSLIN

SEQ ID NO: 3351 - DNA, 405 bp, Streptococcus agalactiae
atgatcatcgtctcctctagaggtatgagctcgggagaagtagaacagttatgttgggaacaccaaggatacactgttaacagtatccctccagaaggaacaaaaatagaacttcgccgtaattctaatatttccactggcggtgactctatagatgtaacaaatacaatggatcctacatataaacaactagcagctgagatggcagaggctatgggggcttgggtttgtggagttgatttaattattcctaatgccactcaagcatactcaaaagataagaaaaatgctacttgcattgaactaaactttaacccattgatgtatatgcacacctactgtcaagaggggcctggtcaatctattacacctcgaattttggctaaactgttcccagaattataa

SEQ ID NO: 3352 - protein, 134 aa, Streptococcus agalactiae
MIIVSSRGMSSGEVEQLCWEHQGYTVNSIPPEGTKIELRRNSNISTGGDSIDVTNTMDPTYKQLAAEMAEAMGAWVCGVDLIIPNATQAYSKDKKNATCIELNFNPLMYMHTYCQEGPGQSITPRILAKLFPEL

SEQ ID NO: 3353 - DNA, 819 bp, Streptococcus agalactiae
atggttaaaaaacgctattccaaaaattctcataatctaataacattacttggtattgttgttcttgcttccctgatttcagacttttggagtgaggtgattgctactctgttaattattggtggtggttattgtgcctattacgtttatgataaaaagcgtcttaaacgttttacatcaaaccaacgtattgaagctttaaaatccgatattaaagagactgaccaagacattagacacttggaaattttaaaaaaagacaatcgttctaaggaatatatcaaattagcacatcaaatattacctcaattggacctaattcgtaatgaagcaaaccaactacaaaaagccattgagcctaatatctataaacgtatcaccaaaaaagcaaatacatttagtaatgagattaacgaacaactaataaagctacatgcctctccagaactagaacctatttctgatcaggaagatgaaatgatacgcattgctccggaattaaaaccgttctatcacaatattcaagatgaccactttgctatcttaaaaaagattgaagaggcagataacaaagctgaattagcagcaattcatcaagccaatatgaaacgttttacagatgttctggctggctacatcagaatcaaacaatctcctaaaaattttaacaatgctaaggaacgcctagaacaagcattacaagcaattaaaaaatttaatttagatttagatgaaacgctgcgccaattgaatgaaagtgatatgaaagattttgacgttagcctaagaatgatgcaagacgaaaggaacagtaaatga

SEQ ID NO: 3354 - protein, 272 aa, Streptococcus agalactiae
MVKKRYSKNSHNLITLLGIVVLASLISDFWSEVIATLLIIGGGYCAYYVYDKKRLKRFTSNQRIEALKSDIKETDQDIRHLEILKKDNRSKEYIKLAHQILPQLDLIRNEANQLQKAIEPNIYKRITKKANTFSNEINEQLIKLHASPELEPISDQEDEMIRIAPELKPFYHNIQDDHFAILKKIEEADNKAELAAIHQANMKRFTDVLAGYIRIKQSPKNFNNAKERLEQALQAIKKFNLDLDETLRQLNESDMKDFDVSLRMMQDERNSK

SEQ ID NO: 3355 - DNA, 1257 bp, Streptococcus agalactiae
atgagcgatacctttaattttgatattgaccaaattgcagacaatgctatcactaaaacagataaaacaacagaaattatttccaaccagacaacaagccaaactgggcaaattgccttttttgaaaaactaacaccagcacaaaagtctgctatctctgaaaaaacaccagctttggtagatacttttgtcggcgatcaaaatgcgctccttgattttggacaatccgcagtagaaggcgttaataccactgttaatcatatcttgtctgagcagaaaaaaattcaaattcctcaagttgatgatttactaaaaaatgctaatcgcgaactaaatggatttattgccaaatataaagatgctactccggcagaattagagaaaaaaccaaacttgattcaaaaattattcaaacaaagcaagacctcgctacaggaattttattttgactcacaaaacatcgagcaaaaaatggatatgatggcagcgaatgttgtcaaacaagaagatactttggcaagaaatatcgtctctgctgaaatgctcattgaagataatactaaatctattgaaaatttggttggagttattgcttttattgaatcgagtcaagccgaggctgctaatcgtgcaagccacttacaacaagaaattctagcattagatagccaaacgtccgagtatcaaattaaaagtaaccaattagctcgaatgactgaagttatcaataccctcgaacagcaacatcctgaatatgtcagccgtctctacgttgcatgggcaacaacaccacagatgcgaaacttggtcaaagtatcgtcagatatgcgtcagaaacttggcatgttacgtcgaaataccattccaacaatgaaactctcaatcgctcagttaggcatgatgcaacaatctgtcaaatccggtgtcactgctgatgctattgtcaacgctaataatgcagcattgcagatgctggctgaaactagtaaagaagcgattccgatgttagagaagaccgcacaaagccccactgtttctattaaatctgtcactgcattagctgaaagcttagtggctcaaaataatggtattatcgctgccatagacaaaggacgtaaggaacgtgcccaattggaatctgctgttattaaatcggctgaaacaatcaatgattctgtcaaaattcgtgataaaaaaatagttgaagccttactcaacgaaggtaaatctacccaagaaaaagttgatgagtcttaa

SEQ ID NO: 3356 - protein, 418 aa, Streptococcus agalactiae
MSDTFNFDIDQIADNAITKTDKTTEIISNQTTSQTGQIAFFEKLTPAQKSAISEKTPALVDTFVGDQNALLDFGQSAVEGVNTTVNHILSEQKKIQIPQVDDLLKNANRELNGFIAKYKDATPAELEKKPNLIQKLFKQSKTSLQEFYFDSQNIEQKMDMMAANVVKQEDTLARNIVSAEMLIEDNTKSIENLVGVIAFIESSQAEAANRASHLQQEILALDSQTSEYQIKSNQLARMTEVINTLEQQHPEYVSRLYVAWATTPQMRNLVKVSSDMRQKLGMLRRNTIPTMKLSIAQLGMMQQSVKSGVTADAIVNANNAALQMLAETSKEAIPMLEKTAQSPTVSIKSVTALAESLVAQNNGIIAAIDKGRKERAQLESAVIKSAETINDSVKIRDKKIVEALLNEGKSTQEKVDES

SEQ ID NO: 3357 - DNA, 876 bp, Streptococcus agalactiae
atggataaaattataaaatcaatttcaacttccggttctttccgggcttatgtccttgattgtacagaaactgtaagaacagctcaagaaaaacatcagacactttcaagttctactgtagctcttgggagaacattaattgcaaatcaaattttagcagcaaatcaaaaaggaaatagtaaagtaactgtcaaggttattggagatagctcttttggtcatattatttctgtagctgatactaaaggaaatgttaaaggttacatccaaaatacgggtgttgatatcaagaaaacagctactggagaggtcttagttggacctttcatgggtaatggacactttgtcgttattaccgattacgcaactgggcaaccttacacttcaacaactccactaattacaggagaaattggagaagattttgcttattatttaaccgaaagtgagcaaacaccttctgccgtcggtttaaatgtcctcttagatgacgaggataaggttaaagttgcaggtggattcatgcttcaggtgctcccaggtgcttctgacgaagaaatttctcgctatgaaaaacgcattcaggagatgccttctatttcaagtctgctagagtctgaaaatcatatagaatctctcctttcagctatttacggagaagacgactacaagcgcttatcggaagactctttagccttctactgtgactgttcaaaagaacgttttgaagccgctctattgactttaggaactaaagaattgcaagccatgaaggatgaagataaaggtgttgaaattacttgtcaattttgcaaccagacttactatttcacagaagaagatttggagaagataattaatgactcaattaaatag

SEQ ID NO: 3358 - protein, 291 aa, Streptococcus agalactiae
MDKIIKSISTSGSFRAYVLDCTETVRTAQEKHQTLSSSTVALGRTLIANQILAANQKGNSKVTVKVIGDSSFGHIISVADTKGNVKGYIQNTGVDIKKTATGEVLVGPFMGNGHFVVITDYATGQPYTSTTPLITGEIGEDFAYYLTESEQTPSAVGLNVLLDDEDKVKVAGGFMLQVLPGASDEEISRYEKRIQEMPSISSLLESENHIESLLSAIYGEDDYKRLSEDSLAFYCDCSKERFEAALLTLGTKELQAMKDEDKGVEITCQFCNQTYYFTEEDLEKIINDSIK

SEQ ID NO: 3359 - DNA, 978 bp, Streptococcus agalactiae
atgactcaattaaatagttcatttatgattgggaaggttgaaattcctcatcgtaccgtactagcaccgatggcaggtattaccaattctgcttttcgtactatcgctaaagaatttggtgctggtctcgttgttatggaaatgatttctgagaaagggttactttataacaacgaaaagaccttacatatgctccatatcgatgaaaatgaacatcctatgtcaattcaactatttggtggcgatgcagaaggcttaaaacgtgcagctgactttatccaaagtaatacgaaagcagatatcgtagacatcaatatgggatgtccagttaacaaagttgttaaaaacgaagctggagctaaatggttacgtgaccctgaaaaaatttatcatattgttaaagaggtaacgtctgtacttgacattccattaacagtaaaaatgcgtacaggatggtctgactcatctaatgctatagaaaatgcactcgctgccgaatctgctggtgtatctgcacttgctatgcacggtcgaacgcgtgaacaaatgtatactggcacgtgtgaccatgaaacacttggcaaggtcgctaaagctgttactagtattccttttattgctaatggtgacattcgtactgttcacgatgccaaatttatgattgaagagattggagctgacgctataatggttggacgtggtgctcgtagcaatccttacatctttacacaaattaatcatttctttgaaacaggcgaaatccttcctgacctaccatttgagaagatgttagatgttgccgaggatcatctcactcgactagttaatttaaaaggtgaaactattgccgttcgtgaatttcgagggttagcacctcattatctgcgtggaaaatcaggcgcagcaaaaattagaggagctgtttcacgtgcagaaacactagcagaagttcaagaactttttgcaggtttacgctaa

SEQ ID NO: 3360 - protein, 325 aa, Streptococcus agalactiae
MTQLNSSFMIGKVEIPHRTVLAPMAGITNSAFRTIAKEFGAGLVVMEMISEKGLLYNNEKTLHMLHIDENEHPMSIQLFGGDAEGLKRAADFIQSNTKADIVDINMGCPVNKVVKNEAGAKWLRDPEKIYHIVKEVTSVLDIPLTVKMRTGWSDSSNAIENALAAESAGVSALAMHGRTREQMYTGTCDHETLGKVAKAVTSIPFIANGDIRTVHDAKFMIEEIGADAIMVGRGARSNPYIFTQINHFFETGEILPDLPFEKMLDVAEDHLTRLVNLKGETIAVREFRGLAPHYLRGKSGAAKIRGAVSRAETLAEVQELFAGLR

SEQ ID NO: 3361 - protein, 642 aa, Streptococcus agalactiae
ATGTTGATTGTTTTAGCTGGAACCATTGGAGCAGGTAAAAGCTCCCTTGCAGCTGCTCTAGGACAACACCTAGGGACAGATGTTTTCTATGAGGCGGTTGATAATAACCCAGTTTTAGATCTTTACTATCAAGATCCCCAAAAATATGCTTTTTTACTACAAATATTCTTTTTAAATAAACGATTCCAATCTATAAAAGAAGCCTATAAGGCTAACAACAATGTTTTGGATCGTTCTATTTTTGAAGATGAACTATTCCTCACTCTAAATTATAAGAATGGAAATGTGACTAAAACAGAGCTAGATATCTATAAAGAACTTCTTGCAAATATGTTGGAAGAATTAGAAGGTATGCCTAAGAAGAGACCTGATTTGCTAGTCTACATTGATGTTTCATTTGATAAAATGTTAGAACGTATTGACAAACGAGGACGCAGCTTTGAGCAAGTTGATTCTAACCCAGAGTTATACGACTACTACAAACAAGTCCATTCTGAATATCCAGAATGGTATGAAAATTACGACGTTTCACCTAAAATTCGGATCGATGGTAACAAACTTGATTTCGTCAAAAATCCAGAGGATCTTCAACACGTCCTTGACACTATTGATTCCGAATTGCAAAAACTTGATTTACTATAA

SEQ ID NO: 3362 - protein, 213 aa, Streptococcus agalactiae
MLIVLAGTIGAGKSSLAAALGQHLGTDVFYEAVDNNPVLDLYYQDPQKYAFLLQIFFLNKRFQSIKEAYKANNNVLDRSIFEDELFLTLNYKNGNVTKTELDIYKELLANMLEELEGMPKKRPDLLVYIDVSFDKMLERIDKRGRSFEQVDSNPELYDYYKQVHSEYPEWYENYDVSPKIRIDGNKLDFVKNPEDLQHVLDTIDSELQKLDLL

SEQ ID NO: 3363 - protein, 492 aa, Streptococcus agalactiae
ATGATTATAAGACCTGTCCTACCCTCAGATGCTAAAGAATTACTTGCTATCTATGCTCCCTACGTTGCTGACACTACAATAACGTTTGAATACGATATTCCTAGTATATCGGAATTCACTAATCGTATCAAAAATATCAGCAAATCTTTCCCATATTTAGTTGCTGAAGAAAATGGGAAAATATTAGGTTATGCATATGCTTCAACTTACTACGCTAGAGCTGCCTATGACTGGACTTGCGAGCTTTCTATTTACCTTGATAAAGATGCACGTAGCAAAAAAATTGGTAGCCAACTATATGATACATTGGAGAAAGAATTAGTTAACCAAGGGTATGTTAATCTACTCGCTTGTATCAGTTTACCAAATGATATAAGCATTGCATTCCACAAAAAAAGAGGATTTAATCAAGTCGCACATTTCCCAAAAATCGGATTTAAATTTGAACAATGGCATGACATTGTGTGGTTACAAAAGCGATTGAAATCTTAA

SEQ ID NO: 3364 - protein, 163 aa, Streptococcus agalactiae
MIIRPVLPSDAKELLAIYAPYVADTTITFEYDIPSISEFTNRIKNISKSFPYLVAEENGKILGYAYASTYYARAAYDWTCELSIYLDKDARSKKIGSQLYDTLEKELVNQGYVNLLACISLPNDISIAFHKKRGFNQVAHFPKIGFKFEQWHDIVWLQKRLKS

SEQ ID NO: 3365 - protein, 2447 aa, Streptococcus agalactiae
ATGAGTCATTATTCCATAAAATTACAAGAAGTATTCAGATTGGCGCAATTTCAAGCAGCACGCTATGAAAGTCACTATTTAGAAAGCTGGCATCTTCTTTTAGCAATGGTTTTAGTTCATGATTCAGTAGCTGGTTTGACATTTGCTGAATATGAGTCTGAAGTTGCAATTGAAGAGTACGAAGCAGCAACAATTTTAGCTTTAGGTAGAGCACCGAAAGAAGAGATTACCAATTATCAATTTTTAGAGCAATCACCAGCTTTGAAAAAGATCTTAAAGTTAGCAGAAAATATTAGTATCGTAGTAGGAGCTGAAGATGTGGGTACTGAACATGTCTTGCTTGCTATGTTGGTTAATAAAGATTTATTAGCCACACGTATCTTAGAGTTAGTTGGCTTTAGAGGTCAAGACGATGGTGAATCAGTTCGTATGGTTGATTTACGTAAGGCTCTAGAACGTCATGCCGGTTTTACAAAAGATGATATCAAAGCAATTTATGAATTACGTAATCCTAAAAAAGCAAAGTCGGGTGCTTCTTTTTCTGATATGATGAAACCACCGAGTACTGCTGGTGATTTAGCTGATTTCACACGTGATTTATCACAGATGGCGGTTGATGGGGAAATTGAACCTGTTATTGGGCGTGATAAAGAAATTTCACGTATGGTCCAAGTCTTAAGTCGTAAAACAAAGAATAATCCTGTCTTAGTTGGAGATGCGGGTGTCGGTAAAACAGCTTTGGCGTACGGTCTAGCACAACGTATTGCTAATGGAAATATTCCTTATGAGCTTAGAGATATGCGTGTTCTAGAGTTAGATATGATGAGCGTTGTTGCTGGAACTCGTTTTCGTGGTGATTTTGAGGAACGTATGAATCAAATCATTGCAGATATTGAAGAAGACGGTCATATTATTCTTTTCATTGATGAACTGCATACTATTATGGGTTCTGGCTCTGGTATTGATAGCACACTTGATGCTGCTAATATTTTAAAACCAGCTTTGGCCCGAGGCACTTTACGCACTGTTGGAGCAACAACTCAAGAGGAATATCAAAAGCATATTGAAAAAGATGCTGCTTTATCTCGTCGCTTTGCAAAAGTTTTAGTAGAAGAACCAAATCTTGAAGACGCATATGAAATTCTACTTGGATGAAGCCAGCGTATGAAGCCTTTCATAATGTTACTATTTCAGATGAAGCAGTTATGACTGCTGTAAAAGTGGCTCATCGTTATTTGACAAGTAAGAATTTACCAGACTCAGCTATAGACTTACTTGATGAAGCTTCTGCCACTGTGCAAATGATGATTAAGAAAAATGCTCCTTCGCTTTTAACAGAAGTTGACCAAGCTATTTTAGATGATGATATGAAATCTGCTTCTAAAGCTCTAAAAGCAAGTTATAAGGGTAAAAAGCGTAAGCCTATTGCCGTAACAGAAGATCATATTATGGCAACTCTCAGTCGTCTATCTGGTATTCCTGTTGAAAAATTGACACAAGCTGATAGTAAAAAATACCTCAATTTAGAAAAAGAATTGCATAAACGTGTTATCGGTCAAGATGATGCAGTTACTGCCATTAGTCGTGCTATCCGTCGCAATCAATCTGGCATTCGTACTGGTAAGCGTCCTATTGGTTCCTTTATGTTCTTGGGACCAACTGGTGTTGGTAAGACAGAGTTAGCAAAAGCCTTGGCAGAAGTGTTGTTTGATGATGAATCAGCCCTAATTCGTTTTGATATGTCGGAATATATGGAAAAATTCGCAGCTTCTCACCTGAATGGGGCACCTCCAGGTTATGTTGGTTATGATGAAGGAGGAGAGTTGACTGAAAAAGTACGCAATAAACCATATTCAGTTTTACTTTTTGATGAAGTTGAAAAAGCTCATCCAGATATTTTTAATGTATTATTACAAGTGCTTGATGATGGCGTTTTAACAGATAGTCGAGGACGAAAAGTTGATTTTTCAAATACTATAATCATTATGACTTCTAATTTAGGAGCAACTGCATTACGTGACGATAAAACAGTTGGTTTTGGAGCTAAGGATATCAGCCATGATTATACTGCTATGCAAAAACGTATTATGGAGGAGCTTAAAAAAGCTTATCGACCAGAGTTTATCAATCGTATTGATGAGAAAGTTGTATTCCATAGTCTCAGTCAAGATAATATGCGTGAAGTTGTGAAAATTATGGTTAAACCTTTAATTTTAGCGCTTAAAGATAAAGGTATGGATCTGAAATTCCAGCCTTCAGCCTTGAAACACTTGGCAGAGGATGGCTATGATATAGAAATGGGTGCTCGTCCACTGCGTAGAACTATTCAAACGCAAGTAGAGGATCATTTATCAGAACTACTATTGGCAAATCAAGTGAAAGAGGGGCAAGTAATTAAGATTGGCGTATCCAAAGGCAAATTGAAATTTGATATTGCAAAATCATAA

SEQ ID NO: 3366 - protein, 815 aa, Streptococcus agalactiae
MSHYSIKLQEVFRLAQFQAARYESHYLESWHLLLAMVLVHDSVAGLTFAEYESEVAIEEYEAATILALGRAPKEEITNYQFLEQSPALKKILKLAENISIVVGAEDVGTEHVLLAMLVNKDLLATRILELVGFRGQDDGESVRMVDLRKALERHAGFTKDDIKAIYELRNPKKAKSGASFSDMMKPPSTAGDLADFTRDLSQMAVDGEIEPVIGRDKEISRMVQVLSRKTKNNPVLVGDAGVGKTALAYGLAQRIANGNIPYELRDMRVLELDMMSVVAGTRFRGDFEERMNQIIADIEEDGHIILFIDELHTIMGSGSGIDSTLDAANILKPALARGTLRTVGATTQEEYQKHIEKDAALSRRFAKVLVEEPNLEDAYEILLGLKPAYEAFHNVTISDEAVMTAVKVAHRYLTSKNLPDSAIDLLDEASATVQMMIKKNAPSLLTEVDQAILDDDMKSASKALKASYKGKKRKPIAVTEDHIMATLSRLSGIPVEKLTQADSKKYLNLEKELHKRVIGQDDAVTAISRAIRRNQSGIRTGKRPIGSFMFLGPTGVGKTELAKALAEVLFDDESALIRFDMSEYMEKFAASHLNGAPPGYVGYDEGGELTEKVRNKPYSVLLFDEVEKAHPDIFNVLLQVLDDGVLTDSRGRKVDFSNTIIIMTSNLGATALRDDKTVGFGAKDISHDYTAMQKRIMEELKKAYRPEFINRIDEKVVFHSLSQDNMREVVKIMVKPLILALKDKGMDLKFQPSALKHLAEDGYDIEMGARPLRRTIQTQVEDHLSELLLANQVKEGQVIKIGVSKGKLKFDIAKS

SEQ ID NO: 3367 - protein, 465 aa, Streptococcus agalactiae
GTGGCCATAAAAAATACTTCCGATAATATTGAAGAATATATAAAATCATTATTAGAACAATCAGGAATTGCTGAAATAAAGCGTTCCAATTTAGCTGATACTTTTCAAGTTGTTCCTAGTCAGATTAATTATGTCATTAAGACACGGTTTACTGAAAGCCGTGGTTATGTGGTTGAGAGTAAACGAGGTGGTGGAGGTTACATCCGCATTGCTAAGGTTCATTTTTCTGATCAACACCAATTATTTGGAAATATGTTATCAACGATTGGCGAGCGTATCAGTGAACAAGTTTTTGATGATTTGATTCAATTATTATTCGATGAAGAGATAATTACAGAACGTGAAGGAAATTTGATTCTGGCGACATCAGGTGATGACGTCTTAGGAGAGCAAGCCTCTGTTATTAGAGCTCGTATGCTCCGTAAATTATTACAACGATTAGATAGAAAAGGATTCCATTTATGA

SEQ ID NO: 3368 - protein, 154 aa, Streptococcus agalactiae
MAIKNTSDNIEEYIKSLLEQSGIAEIKRSNLADTFQVVPSQINYVIKTRFTESRGYVVESKRGGGGYIRIAKVHFSDQHQLFGNMLSTIGERISEQVFDDLIQLLFDEEIITEREGNLILATSGDDVLGEQASVIRARMLRKLLQRLDRKGFHL

SEQ ID NO: 3369 - protein, 402 aa, Streptococcus agalactiae
GTGCCATTTGCAATCGCTAATGGAATACCTTTGTGGGAAGCGCTAGCTATCGGTGTTGTTGGAAACATGCTACCTGTACCTATCATCTTCTTCTTTGCTCGCAAAGTTCTAGAATGGGGAGCAGATAAACCTTATACTGGTAAGTTTTTCACATGGTGCCTTAAAAAAGGACATAGCGGTGGTCAAAAACTTGAAAAAGTAGCTGGAGAAAAAGGATTGTTTATTGCCTTGCTATTGTTTGTAGGCATTCCCTTACCCGGAACAGGAGCCTGGACTGGCACGCTTGCAGCTAGCCTCCTAGATTGGGAATTTAAACATAGTGTTATTGCTGTTATGCTAGGTGTTATACTAGCTGGATGCATCATGGGAACATTATCCATTATCGGCTTCAACCTATTCTAG

SEQ ID NO: 3370 - protein, 133 aa, Streptococcus agalactiae
MPFAIANGIPLWEALAIGVVGNMLPVPIIFFFARKVLEWGADKPYTGKFFTWCLKKGHSGGQKLEKVAGEKGLFIALLLFVGIPLPGTGAWTGTLAASLLDWEFKHSVIAVMLGVILAGCIMGTLSIIGFNLF

SEQ ID NO: 3371 - DNA, 1041 bp, Streptococcus agalactiae
atggcagaaatcacagctaaacttgtaaaagaattgcgtgaaaaatcaggtgcaggcgttatggacgctaaaaaagcattagtagaaactgatggtgaccttgataaagcgattgaattacttcgcgaaaaaggtatggctaaagcagctaaaaaagcagaccgtgttgctgctgaaggtttaacaggtgtttatgttgatggtaacgttgcagcagttattgaagttaacgctgagactgactttgttgctaaaaacgaccaatttgtaacattagttaatgaaactgctaaagttattgcagaaggacgtccttcaaacaatgaagaagcacttgctttaacaatgccttcaggtgaaactttagaacaagcatttgtaactgcaactgctacaattggtgaaaaaatttcattccgtcgcttcgctttagttgaaaagactgatgagcaacattttggtgcataccaacataatggtggacgtatcggagtaattactgttgttgaaggtggcgacgatgcacttgctaaacaagtatcaatgcacgttgcagctatgaagccaactgttctttcatatactgaacttgatgcacaatttgttcatgatgaattagcacagttgaaccacaaaattgagcaagacaacgagagtcgtgctatggttaacaaaccagctcttccattccttaaatatggatcaaaagctcaattgactgatgaagttattgcccaagcagaagaagacatcaaagcagaattagctgcagaaggtaaaccagaaaaaatctgggataaaatcgttccaggtaaaatggatcgtttcatgcttgacaacactaaagttgaccaagagtacacactccttgctcaagtttacatcatggatgatagcaaaacagttgaagcttatcttgagtcagtaaatgctaaagcagttgctttcgtacgttttgaagttggagaaggtattgagaaagcttctaacgactttgaagcagaagttgcagctacaatggcagcagcacttgaaaaataa

SEQ ID NO: 3372 - protein, 346 aa, Streptococcus agalactiae
MAEITAKLVKELREKSGAGVMDAKKALVETDGDLDKAIELLREKGMAKAAKKADRVAAEGLTGVYVDGNVAAVIEVNAETDFVAKNDQFVTLVNETAKVIAEGRPSNNEEALALTMPSGETLEQAFVTATATIGEKISFRRFALVEKTDEQHFGAYQHNGGRIGVITVVEGGDDALAKQVSMHVAAMKPTVLSYTELDAQFVHDELAQLNHKIEQDNESRAMVNKPALPFLKYGSKAQLTDEVIAQAEEDIKAELAAEGKPEKIWDKIVPGKMDRFMLDNTKVDQEYTLLAQVYIMDDSKTVEAYLESVNAKAVAFVRFEVGEGIEKASNDFEAEVAATMAAALEK

SEQ ID NO: 3373 - DNA, 771 bp, Streptococcus agalactiae
atggcagtaatttcaatgaaacaacttcttgaggctggtgttcactttggtcaccaaactcgtcgctggaaccctaagatggctaagtacatcttcacagaacgtaatggtatccacgttatcgaccttcaacaaactgtaaaattagctgaccaagcttacgaatttgttcgtgatgctgcagcaaacgatgcagttatcttgtttgttggtactaagaaacaagcagctgaagctgttgctgaagaagctaaacgtgctggtcaatacttcattaaccaccgttggttaggtggaactcttactaactggggaactatccaaaaacgtattgctcgtttgaaagaaatcaaacgtatggaagaagaaggaacttttgaacttcttcctaagaaagaagttgcattgttaaacaaacaacgtgcacgtcttgaaaaattcttgggtggtatcgaagatatgccacgcatcccagatgtaatgtatgttgttgacccacataaagagcaaatcgctgttaaagaagctaaaaaacttggtattccagttgtagctatggttgacactaacgctgatccagatgatatcgatgttatcatcccagcaaacgatgacgctattcgcgccgttaaattaattacttctaaattagctgatgcagttattgaaggtcgtcaaggtgaagatgctgacgttgacttcgctcaagaagcacaagcagattcaattgaagaaatcgttgaagtagttgaaggatcaaacaacgactaa

SEQ ID NO: 3374 - protein, 256 aa, Streptococcus agalactiae
MAVISMKQLLEAGVHFGHQTRRWNPKMAKYIFTERNGIHVIDLQQTVKLADQAYEFVRDAAANDAVILFVGTKKQAAEAVAEEAKRAGQYFINHRWLGGTLTNWGTIQKRIARLKEIKRMEEEGTFELLPKKEVALLNKQRARLEKFLGGIEDMPRIPDVMYVVDPHKEQIAVKEAKKLGIPVVAMVDTNADPDDIDVIIPANDDAIRAVKLITSKLADAVIEGRQGEDADVDFAQEAQADSIEEIVEVVEGSNND

SEQ ID NO: 3375 - DNA, 561 bp, Streptococcus agalactiae
atgtcattagtcggaaaagaaattattgaattttcagctcaagcttatcacgatggaaaattcatcactgttacaaatgaagacgttaaaggaaaatgggcagttttttgtttctacccagcagacttttcatttgtttgcccaactgaacttggtgaccttcaagagcaatacgaaacacttaaatctcttgatgtagaagtttattctgtctctactgatactcattttgttcataaagcatggcatgatgactcagatgtcgttggtactatcacatatcctatgattggtgacccttcacaccttatttcacaaggttttgatgtccttggacaagatggtctagcacaacgtggtacatttatcattgatccagacggtgtcatccaaatgatggaaattaatgctgatggcatcggacgtgatgcaagtactctcattgataaagtccgtgctgctcaatacatccgccaacatacaggtgaagtttgtccagctaaatggaaagaaggagctgaaactttaactcctagtttagaccttgtaggtaaaatttaa

SEQ ID NO: 3376 - protein, 186 aa, Streptococcus agalactiae
MSLVGKEIIEFSAQAYHDGKFITVTNEDVKGKWAVFCFYPADFSFVCPTELGDLQEQYETLKSLDVEVYSVSTDTHFVHKAWHDDSDVVGTITYPMIGDPSHLISQGFDVLGQDGLAQRGTFIIDPDGVIQMMEINADGIGRDASTLIDKVRAAQYIRQHTGEVCPAKWKEGAETLTPSLDLVGKI

SEQ ID NO: 3377 - DNA, 1533 bp, Streptococcus agalactiae
atggtcttagataaagaaatcaaggctcaattagcgcaatatttagatttgctagaatctgatattgtattacaagctgatttaggagataacgataattctcaaaaagtaaaggattttctagatgaaattgtcgctatgtctgatcgcatcagccttgaatcaacacatttaaaacgtcaacctagttttggaattgcaaaaaaagggcatgaaagtcgcgttattttttcaggcttgccaatggggcatgaattcacatctttcattttagctttgttgcaagtctctggtcgcgcaccaaaagttgatgaagatattatcaaacgaattaaggggattgagaaaactatcaatctagaaacttatgtttcattaacttgccataattgtccagatgtcgttcaagcctttaatataatggctgttttgaatccgaatatcactcatactatgattgaaggaggcatgtatcaagacgaagtcaaatcaaaaggtatcatgtctgttcctactgtttataaggaccaagaagaatttacttctggccgtgctacaattgaacagcttttagaacaactagatggacctcttgatgctgaagcatttgctgacaaaggtgtctatgatgttctagttattggtggtggtcctgcaggtaacagtgctgcaatttatgccgcccgtaaagggttaaaaacaggtattttagcagaaacttttggtggacaagttatcgaaacagttggtattgagaacatgattggtacactgtacacagaaggccctaaattaatggctcaaattgaagagcataccaaatcttacgatattgatattatcaagagtcaattagcaactggcattgagaaaaaagaattagttgaggtaacactggctaacggagctattttacaagctaaaactgctatcctagctctgggtgctaagtggcgaaatatcaacgttcctggcgaggaagaattccgcaataaaggtgttacttactgtccacattgtgatggccctcttttcgaaggaaaagatgttgctgttataggtggtggtaattcaggtatggaagctgctttagatctagccggtgtcactaaacatgttacagtcctagaattcttacctgagctcaaagcagaccaagtactgcaagaacgagcagctaaaactgacaatttaactattcttaagaatgttgctactaaagatatcgttggtgaagatcatgtcactggtttaaactataccgatcgtgatacaaacgaagaaaaacacattgatttagaaggtgtttttgtacaaattggtcttgtaccaagtacatcttggctcaaggatagcggcattgaactcaatgaacgtcaagaaattgtcgttgataaatttggctcaacaaatatccctggtatttttgctgcaggtgactgtacagatgctgcctacaagcaaatcattatttccatggggtctggtgccacagctgccattggcgcatttgattatttaatcagacaataa

SEQ ID NO: 3378 - protein, 510 aa, Streptococcus agalactiae
MVLDKEIKAQLAQYLDLLESDIVLQADLGDNDNSQKVKDFLDEIVAMSDRISLESTHLKRQPSFGIAKKGHESRVIFSGLPMGHEFTSFILALLQVSGRAPKVDEDIIKRIKGIEKTINLETYVSLTCHNCPDVVQAFNIMAVLNPNITHTMIEGGMYQDEVKSKGIMSVPTVYKDQEEFTSGRATIEQLLEQLDGPLDAEAFADKGVYDVLVIGGGPAGNSAAIYAARKGLKTGILAETFGGQVIETVGIENMIGTLYTEGPKLMAQIEEHTKSYDIDIIKSQLATGIEKKELVEVTLANGAILQAKTAILALGAKWRNINVPGEEEFRNKGVTYCPHCDGPLFEGKDVAVIGGGNSGMEAALDLAGVTKHVTVLEFLPELKADQVLQERAAKTDNLTILKNVATKDIVGEDHVTGLNYTDRDTNEEKHIDLEGVFVQIGLVPSTSWLKDSGIELNERQEIVVDKFGSTNIPGIFAAGDCTDAAYKQIIISMGSGATAAIGAFDYLIRQ

SEQ ID NO: 3379 - DNA, 828 bp, Streptococcus agalactiae
gtgaaagatgattatttaatacgtctatcgattttaacaaaagtattatctgtcttagaagaagatggtaagagttctgaaaatcaagcttcattttatgcagttatagataattataatagccgtattcgtcatctcattttagaacaagaatctagtgacattaagaaggacttagctgaattgcaactgatgatgcttagtatagaaagcgatggacttgaagctgcttatcgttatggcaatatttctatcaaagaatatcgtatttaccaacgttatttaaaatacttagaacgccaagttaatcgtagctttgtgtcaaatatcacttatagtttaacgattcttatgcgtgttattcgtggtattgttcatgagtttttaacatttggacaaggaatacgaaatcggaaaaaacatttcaaaaacaggaaacggttgttagcagaagtcaatcgtcagcacttaacagatttgtacttatcaaataatgacctcattttagaaacgctagaagatatggaaggttattataatgcaactttgatagatttcttacaaaatgaacgcattcgagacgcagaattaattaaatcaggtttatttgtagaacgtgtcattgcacgcataacgccagatattttaaatgaaaccctaagaggatattacttggaacgcagaacaatctctgaatttgaaagggacggtttaattagttctaaagagtctcaaattttaagggataatgtcaatgaattagaaagctattcattaagagatagtcaatcttctataccttatcaattattggatttaaaaaaataa

SEQ ID NO: 3380 - protein, 275 aa, Streptococcus agalactiae
MKDDYLIRLSILTKVLSVLEEDGKSSENQASFYAVIDNYNSRIRHLILEQESSDIKKDLAELQLMMLSIESDGLEAAYRYGNISIKEYRIYQRYLKYLERQVNRSFVSNITYSLTILMRVIRGIVHEFLTFGQGIRNRKKHFKNRKRLLAEVNRQHLTDLYLSNNDLILETLEDMEGYYNATLIDFLQNERIRDAELIKSGLFVERVIARITPDILNETLRGYYLERRTISEFERDGLISSKESQILRDNVNELESYSLRDSQSSIPYQLLDLKK

SEQ ID NO: 3381 - protein, 302 aa, Streptococcus agalactiae
TTGGCCATAATGGGTGGTTTTTTAATTGGCTTGCTTTTTGCTTTTCTAATGAGGTTATGTCTCACTGTCCTAGAGAAATTTGATGCTGCTGATGTTACAGGGGCTCTACTTTTGGAATTAACCTTACCTTTTGTTGCTTATTTCGTTGCTGATTTGTTGGGATTTTCAGCTATTATTGCGGTGGTAGTGGCAGGAGTAATGCAAGCAAATCGTTTGAAAAAAGTGACTCTCTTTGATGCTCAAGTAGATCGCGTTACCTCTGTTATTTGGGAAACCTTAAATTTTATTTTTAAATGGTTTAG

SEQ ID NO: 3382 - protein, 100 aa, Streptococcus agalactiae
MAIMGGFLIGLLFAFLMRLCLTVLEKFDAADVTGALLLELTLPFVAYFVADLLGFSAIIAVVVAGVMQANRLKKVTLFDAQVDRVTSVIWETLNFIFKMV

SEQ ID NO: 3383 - protein, 289 aa, Streptococcus agalactiae
TTGTTATTGCTCCTTKGAACTTTAGGGAAGGTCAAGAAAGTGATATTGGTAGTTTTATAAAGTATCGGGCTATTATTCTTTACTTAATCTTACCAACGGTATTTTTAACAGCTATTGTCGTTGGTTATGTAGCAGGGCACCTTTTGCCAGTTAGTTTACCACTTGCGGCATGCTTTGCGCTTGGAGCAGCCTTAGGCCCAACAGATGCCGTTGCCTTTATATCGATTGCTAAGAGGTTTCAATTTCCTAAACGGGMRGAAAATATCCTYMAAATTGGAAGGTCTTTTAA

SEQ ID NO: 3384 - protein, 96 aa, Streptococcus agalactiae
  VARIANT 6, 87, 91: Xaa = Any Amino Acid
MLLLPXNFREGQESDIGSFIKYRAIILYLILPTVFLTAIVVGYVAGHLLPVSLPLAACFALGAALGPTDAVAFISIAKRFQFPKRAXKYPXNWKVF

SEQ ID NO: 3385 - protein, 237 aa, Streptococcus agalactiae
ATGTCTCAATTATCTTTGGAAGAACAATTGAATCGACTAAAAGATAAATACCTTTCTTCTAAAAATCAAGAATTTTCAAATGTTCACTTAAGTAAAGTAAAGAAGAAAAAGAAGAAATTAATAATACTTGAAAAAGAAAGATGTCGCTGTCGATTGGAGAGAGAAGATACTAAAAAAATCGATGATAAAATTGAGAAATTGAAGAAAGAATTGATAGATGTTATGAAGGAGGAATAA

SEQ ID NO: 3386 - protein, 78 aa, Streptococcus agalactiae
MSQLSLEEQLNRLKDKYLSSKNQEFSNVHLSKVKKKKKKLIILEKERCRCRLEREDTKKIDDKIEKLKKELIDVMKEE

SEQ ID NO: 3387 - protein, 954 aa, Streptococcus agalactiae
ATGAAAAAATTAACAAAAGGCAGCCACATTCGTGTTCTTAGTCCCTCTTCTTCCATTGAGCGTCTGGGTGGTTTTGAGGCTAACCTATTAGCCAAAGAAGTACTAGAAAAGCTGGGATTTCAAGTGTCATTCTCTAAGCACTATCTAGAAAATGATATCCTCTATTCTGCTTCGATTACTAGCCGTGTAGAAGATTTACATGAAGCATTTGCCGACCCTTCTGTTGATGCCATATTAGCAACCATTGGCGGATTCAATTCCAACGAGCTTTTACCATATTTAGATTATGATTTAATCTCTAAGAATCCCAAAATAATTTGTGGTTACTCAGATTCAACGGCCTTCCTTAATGCTATTTTTGCCAAAGCAAAAATCCAAACTTACATGGGCCCTGCTTATTCTTCTTTCAAAATGAAGGAAGGTCAACCTTACCAAACACAAGCTTGGCTTACTGCCATGACAGAAAACCACTATGAACTTTGGCCTAGTGAAGAATGGTCTAGTGATCCCTGGTATGATCCCAGCAAACCACGCCAATTTTTCCCAACAGAATGGAAAATTTATAATCACGGAAAAGCTTCCGGTACGATTATCGGAGGTAATCTCTCTACGTTTGGCCTACTTCGAGGTACTCCTTATGCACCGAAAATTGAACGCTATGTCCTCTTGATTGAAGAGGCTGAGGAAAGTAATTTTTATGAATTTGACCGCAACCTTGCTGCAATTTTACAAGCTTATCCTCATCCACAAGCTATTCTTATGGGGCGCTTTCCTAAAGAATGCGGCATGACTCCACAAGTCTTTGAATATATCCTTTCAAAACATGCTATTTTCAAGGAAATTCCTGTTATTTATGATATGGATTTTGCGCACACCCAACCTCTTTTGACAGTGACTATTGGAGCTGAGCTAAGCGTTGACACTACTACATTATCTCTATCTATAAAAGAATAA

SEQ ID NO: 3388 - protein, 317 aa, Streptococcus agalactiae
MKKLTKGSHIRVLSPSSSIERLGGFEANLLAKEVLEKLGFQVSFSKHYLENDILYSASITSRVEDLHEAFADPSVDAILATIGGFNSNELLPYLDYDLISKNPKIICGYSDSTAFLNAIFAKAKIQTYMGPAYSSFKMKEGQPYQTQAWLTAMTENHYELWPSEEWSSDPWYDPSKPRQFFPTEWKIYNHGKASGTIIGGNLSTFGLLRGTPYAPKIERYVLLIEEAEESNFYEFDRNLAAILQAYPHPQAILMGRFPKECGMTPQVFEYILSKHAIFKEIPVIYDMDFAHTQPLLTVTIGAELSVDTTTLSLSIKE

SEQ ID NO: 3389 - protein, 1896 aa, Streptococcus agalactiae
ATGATAAAATATCAAGATGATTTTTACCAAGCGGTTAATGGGGAGTGGGCTAAGACAGCTGTTATTCCTGATGACAAACCAAGGACAGGTGGTTTTTCTGATCTTGCTGATGACATTGAAGCATTAATGCTGTCAACGACAGATAAGTGGCTGGCTGATGAAAATAAACCAAGTGATACGATTTTAAATCATTTTATTGCTTTTCATAAAATGACAGCTGATTATCAAAAACGTGAAGAGGTAGGAGTATCACCAGTATTACCATTAATTGAAGAATATAAAGGCCTACAATCTTTCTCTGAGTTTGCATCAAAAGTTGCAGAATATGAACTAGAGGGTAAACCAAATGAATTTCCATTTGGTGTGGCTCCTGACTTTATGAATGCTCAATTGAATGTACTTTGGGCTGAAGCGCCTGGGATTATTTTACCAGATACAACTTATTATAGTGAAGATAATGAAAAAGGAAAGGAACTCCTTGCTTTTTGGCGTAAAAGTCAAGAAGACCTACTGCCTTTGTTTGGCCTTTCAGAACAGGAAATTAAAGATATCTTGGATAAGGTTTTAGCATTGGATGCAAAATTGGCACAATATGTCTTATCTCGCGAAGAGAGTTCGGAATATGTTAAACTTTACCATCCTTATAACTGGGAAGATTTCACAAAATTAGCACCTGAACTTCCATTAGATGCTATTTTCCAAAAGATATTAGGACAAAAACCAGATAAAGTTATTGTTCCTGAAGAACGTTTCTGGACAGAATTTGCATCTGACTATTACTCAGAATCTAATTGGGAATTATTAAAGGCAGATCTTATTTTATCAGCTGCGAATGCCTATAATGCTTACTTAACTGATGATATTCGTATCAAATCGGGAGTTTACAGTCGAGCTTTATCAGGCACACCACAAGCAATGGATAAGAAAAAAGCAGCTTACTACCTTGCTTCAGGACCTTACAATCAAGCTCTAGGTTTGTGGTATGCAGGAGAAAAATTCTCTCCAGAAGCTAAAGCTGATGTTGAGCATAAGATTGCAACGATGATTGATGTCTATAAGTCACGCTTAGAAAAGGCGGATTGGCTTGCACAGTCAACGCGAGAAAAAGCTATTATGAAACTTAATGTTATCACACCACATATTGGATACCCTGAGAAACTACCAGAGACTTATACTAAAAAAATCATTGATCCTAAACTATCGCTTGTCGAAAATGCTACTAATTTAGACAAAATTTCAATAGCCTATGGTTGGAGTAAATGGAATAAACCAGTTGATAGAAGTGAATGGCATATGCCTGCCCACATGGTCAATGCGTATTATGATCCACAACAAAACCAAATTGTCTTCCCAGCAGCCATTTTACAAGAACCATTTTATGCTTTAGAGCAAAGTTCATCAGCAAATTATGGGGGAATTGGTGCAGTGATTGCACATGAAATATCACACGCTTTTGACACTAATGGAGCTTCATTTGATGAACATGGAAGTTTGAATAATTGGTGGACTGATGAAGATTTTGAAGCTTTCAAAAAACTTACAGATAAAGTAGTTGAGCAGTTTGATGGACTGGAATCTTATGGCGCAAAAGTCAATGGTAAACTAACAGTATCAGAAAATGTTGCAGATTTAGGTGGAGTTGCTTGTGCTTTAGAAGCTGCGCAGCGTGAGTCAGATTTTTCAGCGAGGGATTTCTTTATTAACTTTGCGACAATTTGGCGTATGAAGGCACGTGATGAGTATATGCAAATGTTAGCTAGTGTAGATGTTCACGCCCCAGCACAATGGCGAACTAATATTACAGTAACGAATTTTGAAGAATTCCATAAAGAGTTTGATGTTAAAGATGGTGATAACATGTGGCGTCCAGTTGAAAAACGTGTTATTATTTGGTAA

SEQ ID NO: 3390 - protein, 631 aa, Streptococcus agalactiae
MIKYQDDFYQAVNGEWAKTAVIPDDKPRTGGFSDLADDIEALMLSTTDKWLADENKPSDTILNHFIAFHKMTADYQKREEVGVSPVLPLIEEYKGLQSFSEFASKVAEYELEGKPNEFPFGVAPDFMNAQLNVLWAEAPGIILPDTTYYSEDNEKGKELLAFWRKSQEDLLPLFGLSEQEIKDILDKVLALDAKLAQYVLSREESSEYVKLYHPYNWEDFTKLAPELPLDAIFQKILGQKPDKVIVPEERFWTEFASDYYSESNWELLKADLILSAANAYNAYLTDDIRIKSGVYSRALSGTPQAMDKKKAAYYLASGPYNQALGLWYAGEKFSPEAKADVEHKIATMIDVYKSRLEKADWLAQSTREKAIMKLNVITPHIGYPEKLPETYTKKIIDPKLSLVENATNLDKISIAYGWSKWNKPVDRSEWHMPAHMVNAYYDPQQNQIVFPAAILQEPFYALEQSSSANYGGIGAVIAHEISHAFDTNGASFDEHGSLNNWWTDEDFEAFKKLTDKVVEQFDGLESYGAKVNGKLTVSENVADLGGVACALEAAQRESDFSARDFFINFATIWRMKARDEYMQMLASVDVHAPAQWRTNITVTNFEEFHKEFDVKDGDNMWRPVEKRVIIW

SEQ ID NO: 3391 - DNA, 984 bp, Streptococcus agalactiae
atgattgaaaaatattataattgggcaacgcttggaaccggcgttattgccaacgaattagcccaagcactagaagcacgtggacaaaaattatattctgtagctaatagaacttacgacaaaggacttgaatttgctaccaaatatggtatccaaaaagtttatgatcacatagatcaagtatttgaagaccctgaagtggatatcatttatatctctactccccacaatactcacatctcatttttacgaaaggctttagcaaatggtaagcacgttctttgcgaaaaatctattactttaaacagcactgaacttaaagaagccatagatttagccgaaactaaccatgttgtcttagctgaagccatgactatttttcatatgccaatttatcgccaattaaaaacattagttgatagtggaaaattaggaccgttaaaaatgattcaaatgaatttcggaagttataaagaatatgatatgactaaccgttttttcagtcgtgacctagcaggcggtgctttgctggacattggtgtttatgcactttcttgtattcgctggtttatgtcagaagcacctcacaacattacctctcaagttacatttgcaccaacaggagttgatgaacaagttggtatcctactaaccaatcctgcaaatgagatggcgactgtcagccttagtttacatgcaaaacaacctaaacgagcaactatcgcttacgataaaggctacattgaactttttgaatatccgcgaggacaaaaggcagttattacttatactgaggatgggcatcaagatattctcgaagctggcaaaactgaaaatgccctccaatatgaggtagctgatatggaagaagccgtttcaggaaaaactaaccacatgtacttaaactataccaaagacgttatggatatcatgacacagctacgtcaagaatggggatttacctacccagaagaagaaaaatga

SEQ ID NO: 3392 - protein, 327 aa, Streptococcus agalactiae
MIEKYYNWATLGTGVIANELAQALEARGQKLYSVANRTYDKGLEFATKYGIQKVYDHIDQVFEDPEVDIIYISTPHNTHISFLRKALANGKHVLCEKSITLNSTELKEAIDLAETNHVVLAEAMTIFHMPIYRQLKTLVDSGKLGPLKMIQMNFGSYKEYDMTNRFFSRDLAGGALLDIGVYALSCIRWFMSEAPHNITSQVTFAPTGVDEQVGILLTNPANEMATVSLSLHAKQPKRATIAYDKGYIELFEYPRGQKAVITYTEDGHQDILEAGKTENALQYEVADMEEAVSGKTNHMYLNYTKDVMDIMTQLRQEWGFTYPEEEK

SEQ ID NO: 3393 - DNA, 1152 bp, Streptococcus agalactiae
atggagaagctaagtttactctctttatcacttatcttgctatcaactttttcgacatcaccagccctaccacaaatgatatcttattatagagataagggcttaccatcaccccaagttgaattattgttttcaattccttcgatggctattatcttcatcttgcttatcacaccttggttaagtaaaaaactttctgagaaacatatgattatctttgggctattgctaacagcattagggggaggattgccggttgtcagtcagaactaccttttagtatttgtatcgcgtcttttattggggagtggtattggttttattaatactagggccattagtgtgattagtgaatattatcaaggcaaagaaagaagaaaactcttaggattaagggggtcctttgaagttttaggaaatgctggtttgacagctttagttgggctgttgttgacttttggttggtccaaatcatttatgatttattttttagctttaccaatcttagttctatatcttgtttttgcgcctaagaaagtggtgaaagatacaaatgacaagattaaaactaaaggtcaaaaaatccctaaagctgatttaacttatattgtcgccttagctattttagcaggatttgtcataactataaatactgggattaatcttaggatacctctgctagtagtagaatttggtttgggtacgccagctcaagctagtcttgttcttagtgcgatgatgcttatgggaataatagcaggtatgagttttggtcagttgatagctatgtttcataaacaattaattccaatctgcctcgtcttattttctttaacattgcttggagttggattgccttctaatctaatggtactaacaattagtgcgatggcatcaggtttcctttacagcctgatggtcactgctgtgtttagcctagtagcagaccgtgttgaatattcgttggttggttctgcaacgacattagttttagtattttgtaatattggtggagctagtgcggctattcttctgtcttgttttgatcatttactaggacaaataaatgcagttttctatgtttatgctattttaagtttagcagttggtatgatttatttctttaaacgcctattttttaagaaaatgtag

SEQ ID NO: 3394 - protein, 383 aa, Streptococcus agalactiae
MEKLSLLSLSLILLSTFSTSPALPQMISYYRDKGLPSPQVELLFSIPSMAIIFILLITPWLSKKLSEKHMIIFGLLLTALGGGLPVVSQNYLLVFVSRLLLGSGIGFINTRAISVISEYYQGKERRKLLGLRGSFEVLGNAGLTALVGLLLTFGWSKSFMIYFLALPILVLYLVFAPKKVVKDTNDKIKTKGQKIPKADLTYIVALAILAGFVITINTGINLRIPLLVVEFGLGTPAQASLVLSAMMLMGIIAGMSFGQLIAMFHKQLIPICLVLFSLTLLGVGLPSNLMVLTISAMASGFLYSLMVTAVFSLVADRVEYSLVGSATTLVLVFCNIGGASAAILLSCFDHLLGQINAVFYVYAILSLAVGMIYFFKRLFFKKM

SEQ ID NO: 3395 - DNA, 645 bp, Streptococcus agalactiae
atggatatagaaaactactgccaagactactgtttggagactatctttccaaaacattatttcaaggatttacaagtaatcaccctaactgccggccaatccgtctgtaaacagggagaacaattagaatacttgcactacatcgtcaagggacgttttaaaattgtacgtcgactctttaacggcaaagaacatattttagatattaaaacaaaaccaacactgattggtgatattgaacttttgactaatagacaaattgtatcatctgttattgccttagaggatcttacagtcattcaattatcacttaaaggacggaaagagaaactgttaacagacgcaactttcctcctaaaacttagtcaagagctagctcaggcttttcatgatcaaaacatcaaagcgtctactaatctagggtataccgtcaaagagttacttgcaagtcatattttagcaattgaagaacaaggttactttcaacttgagttaagtagtttagctgattcgtttggcgtcagttatcgtcatttattaagagttatccacgatatggtcaaagaaggccttatccaaaaagaaaaaccaaaatactttatcaaaaatcgtttcgcactagaatcattaaatattcagccatga

SEQ ID NO: 3396 - protein, 214 aa, Streptococcus agalactiae
MDIENYCQDYCLETIFPKHYFKDLQVITLTAGQSVCKQGEQLEYLHYIVKGRFKIVRRLFNGKEHILDIKTKPTLIGDIELLTNRQIVSSVIALEDLTVIQLSLKGRKEKLLTDATFLLKLSQELAQAFHDQNIKASTNLGYTVKELLASHILAIEEQGYFQLELSSLADSFGVSYRHLLRVIHDMVKEGLIQKEKPKYFIKNRFALESLNIQP

SEQ ID NO: 3397 - DNA, 615 bp, Streptococcus agalactiae
atgtctgctattgataaattagtaaaagctagtcatttaattgacatgaatgacattatccgtgaaggcaatccaacccttcgcaaagtggctgaagaagtcacattcccactttctgagaaagaagaaattctcggagaaaaaatgatgcaatttttaaaacactctcaagatccaattatggctgagaagctaggcttacgtggtggtgttggtttagccgcaccacaattagacatctcaaaacgcatcattgccgtccttgttccaaacgttgaggatgctcaaggaaatccacctaaagaagcttatagcctccaagaagtaatgtacaaccctaaagttgtatcgcattctgttcaagatgctgctttatctgacggggagggatgcctatcagtagatcgtgaagtacctggctatgtcgtccgccacgcgcgtgtaactattgaatatttcgacaaaactggtgaaaaacatcgactcaaattaaaaggttacaactctattgttgttcaacatgaaattgaccacattgatggtattatgttttacgaccgtatcaatgagaaaaatcctttcgctgtcaaagaaggcttacttattttagaataa

SEQ ID NO: 3398 - protein, 204 aa, Streptococcus agalactiae
MSAIDKLVKASHLIDMNDIIREGNPTLRKVAEEVTFPLSEKEEILGEKMMQFLKHSQDPIMAEKLGLRGGVGLAAPQLDISKRIIAVLVPNVEDAQGNPPKEAYSLQEVMYNPKVVSHSVQDAALSDGEGCLSVDREVPGYVVRHARVTIEYFDKTGEKHRLKLKGYNSIVVQHEIDHIDGIMFYDRINEKNPFAVKEGLLILE

SEQ ID NO: 3399 - DNA, 1002 bp, Streptococcus agalactiae
atgtctaaaaaaatgaccattaatgacatcgctcaattatcaaaaacttccaaaacaacggtttcttttttcttgaatcaaaaatttgaaaaaatgtcggatgagacgaggcaacgtattcaagaggtgattgatgaaacaggttatagaccaagtacgatagcaagaagtctaaattctaaaaaaacaaaactactaggtgtcttaattggagatataacaaacacattttcaaatcaaattgtaaaaggaattgagcacatcaccaaacaaaaaggctatcaaattattgtgggtaatagtaattacgatgccaaaagtgaagaagattatattgaaaatatgttaaatttaggtgttgatggtttcattattcagcctacatcaaattttcgaaagtattctcgtattttaaaagaaaaaaagaaaccaatggtattttttgatagtcaactttatgaacataagacgagttgggttaaggctaataactatgatgctgtttatgatatgacacaggagtgtctaaatcgagggtataaaaagtttattatgattactgctgatacgagcttgcttagtacacgtattgagagagcttcgggattcatggatgctttaaaggacaatggtttcggttatgacactttggtgattgaagatgatgatcattcaaaaagtgatatagaagactttctaaaagcggtagttccagataaggaggagacattagtatttgcaccaaattgttgggctttaccaatggtttttactgccatgaagaatctcaattttgatatgccacgagttggtttagttgggtttgacaatattgaatggacagacttttcatctcctaaagtgtcaacaattgtccagccggcttatgaagaaggtgaacaagtagcacagattttgattaatcgtattgaaggagatgactccgtcgataaccaacagattgtagattgccagatgttttggaaagagtcgactttttaa

SEQ ID NO: 3400 - protein, 333 aa, Streptococcus agalactiae
MSKKMTINDIAQLSKTSKTTVSFFLNQKFEKMSDETRQRIQEVIDETGYRPSTIARSLNSKKTKLLGVLIGDITNTFSNQIVKGIEHITKQKGYQIIVGNSNYDAKSEEDYIENMLNLGVDGFIIQPTSNFRKYSRILKEKKKPMVFFDSQLYEHKTSWVKANNYDAVYDMTQECLNRGYKKFIMITADTSLLSTRIERASGFMDALKDNGFGYDTLVIEDDDHSKSDIEDFLKAVVPDKEETLVFAPNCWALPMVFTAMKNLNFDMPRVGLVGFDNIEWTDFSSPKVSTIVQPAYEEGEQVAQILINRIEGDDSVDNQQIVDCQMFWKESTF

SEQ ID NO: 3401 - protein, 1905 aa, Streptococcus agalactiae
ATGAAAGATCGCTTATATAATAAATTCAAGGATTTTGATAGGGAATTTTGTCAAAAGTATATTAAAACATACCAATCTAATGCCTATCAAGAAATGAAAGCCTCTGTTAATTTGATGATGAGGAACACTTTTGTATTTAATGATAATTGGGATATGGAACCTTGTTCTAAAGCATATTGTCTTGATCCTTTGGAGTGGGATAAGCCAGTAACAGATGATCCAGAATGGTTGTATATGCTAAATCGTCAAACTTATCTTTTTAAATTCCTGGTGGTCTACATTGTTGAAGGCGATAAGTCTTACCTTAGACAAATGAAATATTTTATGTACCATTGGATTGATTGTCAATTTACACTAAAGCCAGAAGGGGCGGTAAGTCGTACTATTGACACTGGGATACGTTGCATGTCATGGCTCAAAGTTTTGATTTTTTTAGATTATTTTGGATTAATAACAGAAACTAAAAAAATTAAACTATTAACTAGTTTACGGGAGCAGATAACTTATATGAGGGACTATTATCGTGAAAAAGATAGTCTAAGTAACTGGGGAATTTTACAAACAACAGCAATATTGGCGTGTTTATACTATTATGAAGATGAATTAAATCTACCTGAAATTCAGAGTTTTGCTGAAGAAGAATTATTACTTCAAATCAAGCTTCAAATTTTAGATGACGGGAGCCAGTATGAACAATCAATTATGTATCATGTAGAAGTCTTGAAGTCCTTAATGGAACTAGTTATCCTTGCGCCTAAATATTATCTACCATTAGAAGAAACTATTGAAAAAATGGTTACCTATCTAATTGCTATGACTGGTCCGGATTATTGTCAACTAGCTATAGGGGACAGTGATGTGACCGATACTCGTGATATTCTAACTTTGGCAACACTTGTGTTGAAATCTTCTAAAACAAAATCATTTTCTTTTGATAATGTTAATTTAGAAACTTTACTTTTGTTTGGGAAGCCATCAATTTATCTTTTTGAAGAAATACCGCGTGCGACAATAGGAGAGTCTGCTTATCTTTTTCCAGATTCTGGTCATGTGTGTTTACGTGATGATAGGCGTTATATATTTTTTAAGAACGGTCCATTTGGTAGCGCTCATACTCATAGTGATAATAATAGTGTTTGTCTCTATGATAAAAAGAAACCTATTTTCATTGATGCAGGAAGATATACTTACAAAGAAGAACAACTAAGGTATGATTTTAAACGTTCGACTAGTCATTCAACATGTACCCTTGATGGGCAACCCTTAGAAATGATCAAGGACTCTTGGACATACAATTCTTATCCAAAATGTGACTATTGTCAGTTGACTTCAAAGGATAGGTACCATTTAGTCGAAGGACAACTACATGTCCAAAGAGCTTCTGATATCTATTACCATAAGCGATGGTTGTTAACTTTACCGCAGGCCATTACCTTAGTTATTGATAAGGTGAGTTGTCCAGGAGAGCATGTCTTAACAAATCAATATATTTTAGATGATCAGGTCATTTATGAAAATGGGTTTGTTAATGACTTGAAATTAGTAAGTCCTACGACCTTTAATCTAGAAGATTGCCTTATTTCTAAGCGGTATAATCAATTGACAGAAAGTCATAAATTAGTTAAGAAAATAAAATTTGTTGATGAGGTGATGGATTATACCTTGATAGTTGATCGGAACTGTCAGGTGAAATATGTTCCTTTAGTGCAAACGAACAGTCATAAGGAACTAAGTAATAGCATTGCATTTGATATTAGGTCTCAAGACTTTCATTATTTAATTGGAGTGCTTATGGATGATATTATCTTTGGGGATAAACTCTATTTGATGCAAGGGATAAAATGCAAAGGAAAAGTCATTGTATATGATAAAAATAATGGCAAAATGAGTCGTTTAAAAAATTAA

SEQ ID NO: 3402 - protein, 634 aa, Streptococcus agalactiae
MKDRLYNKFKDFDREFCQKYIKTYQSNAYQEMKASVNLMMRNTFVFNDNWDMEPCSKAYCLDPLEWDKPVTDDPEWLYMLNRQTYLFKFLVVYIVEGDKSYLRQMKYFMYHWIDCQFTLKPEGAVSRTIDTGIRCMSWLKVLIFLDYFGLITETKKIKLLTSLREQITYMRDYYREKDSLSNWGILQTTAILACLYYYEDELNLPEIQSFAEEELLLQIKLQILDDGSQYEQSIMYHVEVLKSLMELVILAPKYYLPLEETIEKMVTYLIAMTGPDYCQLAIGDSDVTDTRDILTLATLVLKSSKTKSFSFDNVNLETLLLFGKPSIYLFEEIPRATIGESAYLFPDSGHVCLRDDRRYIFFKNGPFGSAHTHSDNNSVCLYDKKKPIFIDAGRYTYKEEQLRYDFKRSTSHSTCTLDGQPLEMIKDSWTYNSYPKCDYCQLTSKDRYHLVEGQLHVQRASDIYYHKRWLLTLPQAITLVIDKVSCPGEHVLTNQYILDDQVIYENGFVNDLKLVSPTTFNLEDCLISKRYNQLTESHKLVKKIKFVDEVMDYTLIVDRNCQVKYVPLVQTNSHKELSNSIAFDIRSQDFHYLIGVLMDDIIFGDKLYLMQGIKCKGKVIVYDKNNGKMSRLKN

SEQ ID NO: 3403 - protein, 816 aa, Streptococcus agalactiae
ATGACTGGATCTAAAAAATTAGCAAAAAGTGATTACACTAAAACAGCTTTACGTGCCTTTTATTTACAAAATGGCTTTAATTACAGTAACTATCAAGGTCTTGGTTATGCTAATGTCATATATCCAGCTCTCAAAAAATATTATGGAGATGACAAAAAAGCTTTAGCGGGAGCTCTAGAAGAAAATGTGGAGTTTTACAATACAAACCCTCATTTCTTACCTTTTGTAACTAGCTTACATTTAGCAATGCTTGATAATGAGCGGCCAGAAGAAGAAATTCGCGGTATTAAGATGGCGCTTATGGGGCCTCTTGCAGGTATCGGTGATTCTTTATCACAATTTTGCTTAGCACCCTTGTTCTCAACGATTGCAGCCTCTTTAGCGACAGATGGTTTGGTGATGGGACCGATTCTGTTCTTTGTGGCTATGAATACTATTTTAACGGGAATTAAATTAGTTACTGGCATGTATGGTTATCGTCTTGGGACCAGTTTTATTGATAAATTGAGTGAACAAATGTCAGTTATCTCACGGGCAGCTAATATCGTTGGTGTAACGGTCATCTCAAGTTTAGCTGCAACACAAGTTAAGCTTACAATCCCTTACACTTTTGCTCCAGAAAAAGTAACTAGTACAACGCAAAAGATTGTTACTGTCCAAGGTATGCTTGATAAAATTGCACCAGCTCTACTTCCAGCACTCTACACTTTCCTTATGTTTTACCTTATTAAAAATAAAAAATGGACAACTTATAAGTTAGTTATCCTTACAGTTATTATTGGTATCCTTGGTAGCTGGTTAGGTATTTTAGCTTAA

SEQ ID NO: 3404 - protein, 271 aa, Streptococcus agalactiae
MTGSKKLAKSDYTKTALRAFYLQNGFNYSNYQGLGYANVIYPALKKYYGDDKKALAGALEENVEFYNTNPHFLPFVTSLHLAMLDNERPEEEIRGIKMALMGPLAGIGDSLSQFCLAPLFSTIAASLATDGLVMGPILFFVAMNTILTGIKLVTGMYGYRLGTSFIDKLSEQMSVISRAANIVGVTVISSLAATQVKLTIPYTFAPEKVTSTTQKIVTVQGMLDKIAPALLPALYTFLMFYLIKNKKWTTYKLVILTVIIGILGSWLGILA

SEQ ID NO: 3405 - protein, 867 aa, Streptococcus agalactiae
ATGGATATTAGTATTCTTCAGGCTGTCTTAATTGGACTGTGGACGGCTTTCTGTTTTAGTGGCATGTTGCTTGGCCTCTATACAAATCGTTGTATCGTTCTCTCTCTAGGCGTTGGTGTTATTTTAGGAGATATTCAAACAGCTTTGGCAGTTGGAGCAATATCTGAACTGGCTTACATGGGATTTGGTGTGGGAGCGGGAGGGACAGTTCCTCCAAACCCAATCGGTCCTGGGATTTTTGGAACTTTGATGGCTATTACAACAGCTGGAACTAAAGGAAAAATCACACCGGAAGCTGCTCTTGCATTATCAACCCCAATTGCAGTTGGTATTCAATTTCTTCAAACAGCAACTTATACTGCTTTTGCAGGGGCGCCTGAAACAGCTAAAAAAGCTTTGCAAGCAGGTAATTTCCGAGGATTTAAAATTGCAGCAAATGGTACAATTTGGGCATTCGCTGGATTGGGATTTGGTTTAGGAGTACTGGGTGCTCTTTCAACGCAAACTTTGACAGATTTATTTGCTCTCATTCCCCCTGTTTTGCTTAATGGTCTAACCTTAGCTGGGAAAATGCTTCCTGCAATTGGTTTTGCGATGATTCTCTCTGTAATGGCTAAAAAAGAACTCATTCCTTATATCCTACTTGGATATGTTCTAGCTGTTTATTTTGGTTTGCCAGTTCTAACTCCAACAGCAAATGGAGACGGAGTTTTAACATCAGTGGCTACTAACAGTGTGCTTGGGGTTCCAACTATCGGGGTAGCTATAATTGCAACAATATTTGCTTTGCTTGATATTTTCAGAAAACCAGCTGCACCTACTAAAGAAACTAAGACAGAAGGAGACAACCAAGATGACTGGATCTAA

SEQ ID NO: 3406 - protein, 288 aa, Streptococcus agalactiae
MDISILQAVLIGLWTAFCFSGMLLGLYTNRCIVLSLGVGVILGDIQTALAVGAISELAYMGFGVGAGGTVPPNPIGPGIFGTLMAITTAGTKGKITPEAALALSTPIAVGIQFLQTATYTAFAGAPETAKKALQAGNFRGFKIAANGTIWAFAGLGFGLGVLGALSTQTLTDLFALIPPVLLNGLTLAGKMLPAIGFAMILSVMAKKELIPYILLGYVLAVYFGLPVLTPTANGDGVLTSVATNSVLGVPTIGVAIIATIFALLDIFRKPAAPTKETKTEGDNQDDWI

SEQ ID NO: 3407 - protein, 495 aa, Streptococcus agalactiae
ATGGCAGCAGGACCAAATATTGTAATGACACGTGTTGATGAGCGTCTTATTCATGGACAAGGACAACTTTGGGTGAAATTTTTAAGTTGTAATACTGTTATTGTGGCAAATGATGATGTCTCCAAAGATCATCTTCAACAAACGTTAATGAAGACGGTGGTGCCAGAATCAATAGCATTGCGATTTTTTGATATTCAAAAAGTTATTGATATTATTCACAAGGCCAACCCAGCACAGACGATTTTTATAATTGTTAAAGATTTGAAAGATGTCTATAGACTTGTAGCAGGGGGCGTCCCAATTAAAGAGATTAATATTGGAAATATTCATAATGGAGAAGGTAAAGAGCAGGTAAGTCGCTCTATCTTCTTAGGGATGAAGGATAAAGAGATAATTAGAAAATTAAACCAAGAATATCACATTGCATTTAATACTAAAACAACTCCAACAGGTAACGATGGTGCTGTGGAAGTTAATATTTTAGATTATATTTAG

SEQ ID NO: 3408 - protein, 164 aa, Streptococcus agalactiae
MAAGPNIVMTRVDERLIHGQGQLWVKFLSCNTVIVANDDVSKDHLQQTLMKTVVPESIALRFFDIQKVIDIIHKANPAQTIFIIVKDLKDVYRLVAGGVPIKEINIGNIHNGEGKEQVSRSIFLGMKDKEIIRKLNQEYHIAFNTKTTPTGNDGAVEVNILDYI

SEQ ID NO: 3409 - protein, 1197 aa, Streptococcus agalactiae
ATGATGAAAATAAAACCGGTCAAGGTTGAGTCAATTGAAAATCCAAAGCGTTTTTTAAACAGTAGATTATTAACTAAGATTGAAGTTGAGGAAGCGATTGAAAAAGCCTTGAAGCAACTTTATATTAATATTGATTACTTTGGTGAAGAGTATCCAACGCCTGCAACATTCAATAATATTTATAAAGTTATGGATAACACAGAATGGACAAATGGTTTTTGGACAGGGTGCTTGTGGTTAGCTTATGAGTATAATCAGGATAAAAAGTTAAAAAACATAGCCCACAAAAATGTATTGTCATTTCTAAATCGTATTAATAATCGTATAGCATTAGATCACCACGACTTAGGATTTCTTTACACACCATCTTGTACAGCAGAATATCGTATCAATGGTGATGTTAAAGCTTTAGAAGCCACTATAAAAGCTGCAGATAAATTGATGGAGCGCTATCAAGAAAAAGGTGGATTTATTCAGGCTTGGGGAGAACTCGGGTATAAGGAACACTATCGCTTAATTATCGATTGCTTACTTAATATCCAACTCTTATTTTTTGCTTATGAACAGACAGGTGATGAAAAGTATAGACAAGTTGCGGTGAATCACTTCTACGCTTCAGCTAACAATGTGGTGCGTGATGATTCTTCTGCTTTTCATACTTTTTATTTCGACCCAGAAACTGGAGAACCGTTAAAAGGTGTCACACGACAGGGTTATAGTGATGAGTCATCTTGGGCAAGAGGGCAAGCATGGGGCATCTACGGTATTCCGCTTAGTTACCGGAAAATGAAAGATTATCAGCAGATTATCCTTTTTAAAGGTATGACAAACTATTTTCTAAATCGTTTACCTGAAGACAAGGTATCCTATTGGGACCTTATTTTTACGGATGGCTCGGGCCAGCCTAGAGATACATCCGCAACAGCAACGGCTGTGTGTGGAATTCATGAGATGCTTAAATATTTACCAGAAGTAGATCCTGATAAAGAGACATACAAATATGCTATGCATACAATGCTTCGTAGTCTGATTGAACAGTATAGTAATAATGAACTTATAGCAGGACGTCCTCTTCTATTGCACGGTGTGTATTCGTGGCATTCAGGTAAAGGAGTAGATGAAGGTAATATTTGGGGAGATTATTATTACTTAGAAGCCTTAATAAGATTCTATAAAGACTGGGAACTTTATTGGTAA

SEQ ID NO: 3410 - protein, 398 aa, Streptococcus agalactiae
MMKIKPVKVESIENPKRFLNSRLLTKIEVEEAIEKALKQLYINIDYFGEEYPTPATFNNIYKVMDNTEWTNGFWTGCLWLAYEYNQDKKLKNIAHKNVLSFLNRINNRIALDHHDLGFLYTPSCTAEYRINGDVKALEATIKAADKLMERYQEKGGFIQAWGELGYKEHYRLIIDCLLNIQLLFFAYEQTGDEKYRQVAVNHFYASANNVVRDDSSAFHTFYFDPETGEPLKGVTRQGYSDESSWARGQAWGIYGIPLSYRKMKDYQQIILFKGMTNYFLNRLPEDKVSYWDLIFTDGSGQPRDTSATATAVCGIHEMLKYLPEVDPDKETYKYAMHTMLRSLIEQYSNNELIAGRPLLLHGVYSWHSGKGVDEGNIWGDYYYLEALIRFYKDWELYW

SEQ ID NO: 3411 - protein, 321 aa, Streptococcus agalactiae
ATGTCTTCTAATGATGTTAGAGTTGCTTTGCAAAGAGAGGTTATCGATTTCAAAGAAATTTTAGTATTGACTGATTTGCTAGGTGGGACTCCTTTCAATGTTTCTTCCGCCTTATCAGTAGAATATACAGATAAAAAGATAAAAGTTTTATCGGGCTTGAACCTTTCAATGTTAATGGAAGCTGTTTTATCTAGAACGATGTTTGAACATGTAGATGATCTTGTTGATAAAGTTATAACATCATCTCATGAAGGAATTGTTGATTTTTCTACTTGCCTTGCTACACAAACTGCAGAAGCAACTTTTGAGGGAGGCATTTAA

SEQ ID NO: 3412 - protein, 106 aa, Streptococcus agalactiae
MSSNDVRVALQREVIDFKEILVLTDLLGGTPFNVSSALSVEYTDKKIKVLSGLNLSMLMEAVLSRTMFEHVDDLVDKVITSSHEGIVDFSTCLATQTAEATFEGGI

SEQ ID NO: 3413 - protein, 813 aa, Streptococcus agalactiae
ATGACTGAACAATTCTTAAAAGACAACTTTTCACTAGAAGGTAAAGTCGCCTTAATAACAGGCGCTTCTTACGGCATTGGTTTTTCAATAGCAACTGCTTTTGCTAGAGCTGGAGCAACTATTGTCTTCAATGATATTAAGCAAGAACTCGTTGACAAAGGCATCTCCGCCTATAAAAAACTTGGCATTAAGGCCCATGGCTATGTTTGTGATGTTACAGATGAAGATGGAATCAACGAAATGGTGGACAAAATTTCTCAAGATGTTGGGGTAATTGATATTCTAGTTAACAACGCAGGTATTATAAAACGCACCCCTATGCTAGAGATGAGCGCTGCAGATTTTCGACAAGTTATTGATATTGATTTGAATGCTCCCTTTATCGTATCAAAAGCGGTATTACCTGGAATGATCCAAAAAGGACATGGTAAAATCATCAATATTTGCTCCATGATGAGTGAGCTTGGACGCGAAACAGTTGCTGCCTATGCTGCTGCCAAAGGGGGACTTAAAATGTTAACCAAGAACATCGCTTCTGAATACGGTTCTGCTAACATCCAATGTAACGGTATCGGGCCCGGCTATATTGCCACACCACAAACAGCTCCCCTTCGTGAACGTCAAGATGATGGTTCACGTCATCCATTCGACCAATTTATCATCGCTAAAACACCTGCCGCTCGCTGGGGTGAGGCAGAAGATTTAGGTGCACCAGCTATCTTCCTTGCTAGTGATGCATCAAACTTTATCAATGGTCACATACTCTATGTAGATGGCGGTATTTTAGCTTACATCGGTAAACAACCTCAATAA

SEQ ID NO: 3414 - protein, 270 aa, Streptococcus agalactiae
MTEQFLKDNFSLEGKVALITGASYGIGFSIATAFARAGATIVFNDIKQELVDKGISAYKKLGIKAHGYVCDVTDEDGINEMVDKISQDVGVIDILVNNAGIIKRTPMLEMSAADFRQVIDIDLNAPFIVSKAVLPGMIQKGHGKIINICSMMSELGRETVAAYAAAKGGLKMLTKNIASEYGSANIQCNGIGPGYIATPQTAPLRERQDDGSRHPFDQFIIAKTPAARWGEAEDLGAPAIFLASDASNFINGHILYVDGGILAYIGKQPQ

SEQ ID NO: 3415 - protein, 639 aa, Streptococcus agalactiae
ATGAAAATTGCATTAATCAACGAAAATAGCCAAGCAAGTAAAAATACTATTATCTACAAAGAATTGAAAGCGGTTTCTGATGAAAAAGGATTTGAAGTTTTCAACTACGGAATGTATGGCAAAGAAGAAGAAAGCCAGCTAACTTATGTACAAAATGGTTTACTGACTGCTATTTTACTTAATAGCGGTGCTGCAGATTTTGTTATTACAGGCTGTGGGACAGGAATTGGAGCGATGCTTGCTTGTAATAGTTTTCCTGGCGTAGTCTGTGGATTCGCTGCTGATCCTGTCGACGCTTACTTATTCTCTCAAGTAAACGGAGGAAATGCTCTTTCCCTTCCTTTTGCTAAAGGATTTGGTTGGGGAGCTGAATTGAATCTGAGGTATTTATTTGAACGTCTTTTCGAAGATGAAAAAGGAGGGGGATACCCTAAAGAGAGGGCTGTACCTGAGCAACGCAATGCACGTATCCTTAGCGAAATAAAACAGATTACTTACAGAGATTTACTCTCTGTTTTAAAAGAAATTGATCAAGATTTCTTAAAGGAAACTATTTCTGGGGAGCATTTCCAAGAATATTTCTTCGCTAATTGCCAAAATCAAAATATAGCAGACTACTTGAAATCTGTCTTAGACTAA

SEQ ID NO: 3416 - protein, 212 aa, Streptococcus agalactiae
MKIALINENSQASKNTIIYKELKAVSDEKGFEVFNYGMYGKEEESQLTYVQNGLLTAILLNSGAADFVITGCGTGIGAMLACNSFPGVVCGFAADPVDAYLFSQVNGGNALSLPFAKGFGWGAELNLRYLFERLFEDEKGGGYPKERAVPEQRNARILSEIKQITYRDLLSVLKEIDQDFLKETISGEHFQEYFFANCQNQNIADYLKSVLD

SEQ ID NO: 3417 - protein, 1008 aa, Streptococcus agalactiae
ATGTCTAAGATTCTTTTTTTCGGTGAACCTCTCATTCGCATCACTCCAAAAGAAAATGACTATTTTGCAGATAGTATCTCAACTAAACTATTCTATGGTGGCTCTGAAGTTAATACCGCAAGAGCTCTACAAGGCTTTGGGCAAGATACTAAACTCCTCTCAGCCTTACCCAATAATCCCATAGGTAATAGTTTTCTTCAATTTTTAAAAGCACAGGGTATTGATACTCATTCTATTCAGTGGGTTGGAGAACGTGTTGGGTTATATTTTTTAGAAGATTCCTTTGCTTGCAGAAAAGGTGAGGTGGTCTACGACCGCGATCATAGTAGTTTACATGACTTTAGGATAAATCAAATTGATTTCGATCAATTATTTGAAGGAGTTTCTCTCTTTCATTTTAGTGGTATTACACTATCATTGGATGAGTCTATCCAAGAGATAACACTGCTTCTTTTAAAAGAAGCTAAAAAAAGAGAGATAACAATCTCCTTAGATCTCAATTTTCGCAGTAAACTAATTTCTCCTAAAAATGCCAAAATCCTTTTTTCTCAGTTCGCTACCTTTGCGGATATTTGTTTTGGTATTGAACCTCTTATGGTTGACTCACAGGACACTACCTTCTTCAATCGCGATGAAGCTACAATAGAGGACGTCAAAGAACGAATGATTTCGCTTATAAATCACTTTGACTTTCAAGTCATTTTCCATACTAAACGTCTACAGGATGAATGGGGACGAAACCACTACCAAGCTTACATAGCAAATCGTAAACAAGAGTTTGTCACTTCAAAAGAAATCACCACAGCTGTAAACCAGAGAATTGGAAGCGGAGATGCTTTTGTGGCGGGAGCGCTATATCAACTACTTCAGCACTCAGACAGCAAGACAGTCATTGATTTCGCTGTCGCTAGTGCATCTTTAAAATGTGCTTTGGAAGGGGACAATATGTTTGAGACCGTTACCGCAGTTAACAAAGTACTAAATCAATCGAAAGACATTATTCGTTAG

SEQ ID NO: 3418 - protein, 335 aa, Streptococcus agalactiae
MSKILFFGEPLIRITPKENDYFADSISTKLFYGGSEVNTARALQGFGQDTKLLSALPNNPIGNSFLQFLKAQGIDTHSIQWVGERVGLYFLEDSFACRKGEVVYDRDHSSLHDFRINQIDFDQLFEGVSLFHFSGITLSLDESIQEITLLLLKEAKKREITISLDLNFRSKLISPKNAKILFSQFATFADICFGIEPLMVDSQDTTFFNRDEATIEDVKERMISLINHFDFQVIFHTKRLQDEWGRNHYQAYIANRKQEFVTSKEITTAVNQRIGSGDAFVAGALYQLLQHSDSKTVIDFAVASASLKCALEGDNMFETVTAVNKVLNQSKDIIR

SEQ ID NO: 3419 - protein, 639 aa, Streptococcus agalactiae
ATGATAAAATCAAAGATTTTGTTGCAATTAATGCAAGGAAAAATAGTTGCTGTCATTCGTGGAAATAGCCAAGAAGAAGCTTTTCAAGCTGCTCAAGCATGCATAAAAGGTGGTATTTCTGCTATCGAAATCGCCTATACTAATAGCAAAGCTAGCCAAGTCATTGAACAACTAGTCACACAATATACTAACCAAGAACAAGTTGTCGTTGGGGCAGGAACTGTTCTAGACTCAGAAACTGCCCGAATGGCTATTTTAGCAGGAGCAAAGTTTATTGTATCTCCCGCATTTAATCTACAGACTGCTAAACTATGTAATCGTTATGCTATTCCTTATTTACCAGGTTGCATGACCTTATCAGAGGTAACAACAGCACTTGAAGCCGGTTGCGAAATAATTAAAATATTCCCAGGAGGTACTCTAGGAACATCTTTCATCTCATCACTAAAGGCACCTTTACCTCAAGTACAAATTATGGTGACTGGTGGGGTAAATCTCACAAATGCCAAAGACTGGTTTCTATCTGGAGTAACAGCCATTGGTATTGGTGGAGAGTTCAATAAACTAGCAGCTTTGGGGGAATTTGATAAAATCACAGAAATGGCTAAACAATACAAAATACAGCTAAATCTGAATTAA

(The sequence listing continues in the following parts.)

1. An isolated polypeptide comprising an amino acid sequence which has at least 75% sequence identity to one or more of the even-numbered amino acid sequences selected from the group consisting of SEQ ID NOS:2-22740.

2. The polypeptide of claim 1, comprising one or more of the even-numbered amino acid sequences selected from the group consisting of SEQ ID NOS:2-22740.

3. An isolated polypeptide comprising a fragment of at least 7 consecutive amino acids from one or more of the even-numbered amino acid sequences selected from the group consisting of SEQ ID NOS:2-22740.

4. The polypeptide of claim 3, wherein the fragment comprises a T-cell or a B-cell epitope from an even-numbered amino acid sequence selected from the group consisting of SEQ ID NOS:2-22740.

5. An antibody which binds to a polypeptide selected from:
(a) a polypeptide comprising an amino acid sequence which has at least 75% sequence identity to one or more of the even-numbered amino acid sequences selected from the group consisting of SEQ ID NOS:2-22740;
(b) a polypeptide comprising one or more of the even-numbered amino acid sequences selected from the group consisting of SEQ ID NOS:2-22740;
(c) a polypeptide comprising a fragment of at least 7 consecutive amino acids from one or more of the even-numbered amino acid sequences selected from the group consisting of SEQ ID NOS:2-22740; and
(d) a polypeptide comprising a fragment of at least 7 consecutive amino acids from one or more of the even-numbered amino acid sequences selected from the group consisting of SEQ ID NOS:2-22740, wherein the fragment comprises a T-cell or a B-cell epitope from an even-numbered amino acid sequence selected from the group consisting of SEQ ID NOS:2-22740.

6. The antibody of claim 5 which is monoclonal.

7. An isolated nucleic acid comprising a nucleotide sequence which has at least 75% sequence identity to one or more of the odd-numbered nucleotide sequences selected from the group consisting of SEQ ID NOS:1-22739.

8. The nucleic acid of claim 7, comprising a nucleotide sequence which is an odd-numbered nucleotide sequence selected from the group consisting of SEQ ID NOS:1-22739.

9. An isolated nucleic acid which can hybridize to the nucleic acid of claim 8 under high stringency conditions.

10. An isolated nucleic acid comprising a fragment of 10 or more consecutive nucleotides from one or more of the odd-numbered nucleotide sequences selected from the group consisting of SEQ ID NOS:1-22739.

11. An isolated nucleic acid encoding a polypeptide selected from:
(a) a polypeptide comprising an amino acid sequence which has at least 75% sequence identity to one or more of the even-numbered amino acid sequences selected from the group consisting of SEQ ID NOS:2-22740;
(b) a polypeptide comprising one or more of the even-numbered amino acid sequences selected from the group consisting of SEQ ID NOS:2-22740;
(c) a polypeptide comprising a fragment of at least 7 consecutive amino acids from one or more of the even-numbered amino acid sequences selected from the group consisting of SEQ ID NOS:2-22740; and
(d) a polypeptide comprising a fragment of at least 7 consecutive amino acids from one or more of the even-numbered amino acid sequences selected from the group consisting of SEQ ID NOS:2-22740, wherein the fragment comprises a T-cell or a B-cell epitope from an even-numbered amino acid sequence selected from the group consisting of SEQ ID NOS:2-22740.

12. A composition comprising:
(a) an active agent selected from:
(i) a polypeptide comprising an amino acid sequence which has at least 75% sequence identity to one or more of the even-numbered amino acid sequences selected from the group consisting of SEQ ID NOS:2-22740;
(ii) a polypeptide comprising one or more of the even-numbered amino acid sequences selected from the group consisting of SEQ ID NOS:2-22740;
(iii) a polypeptide comprising a fragment of at least 7 consecutive amino acids from one or more of the even-numbered amino acid sequences selected from the group consisting of SEQ ID NOS:2-22740; and
(iv) a polypeptide comprising a fragment of at least 7 consecutive amino acids from one or more of the even-numbered amino acid sequences selected from the group consisting of SEQ ID NOS:2-22740, wherein the fragment comprises a T-cell or a B-cell epitope from an even-numbered amino acid sequence selected from the group consisting of SEQ ID NOS:2-22740;
(v) an antibody which binds to (i), (ii), (iii), or (iv);
(vi) an isolated nucleic acid comprising a nucleotide sequence which has at least 75% sequence identity to one or more of the odd-numbered nucleotide sequences selected from the group consisting of SEQ ID NOS:1-22739;
(vii) an isolated nucleic acid comprising a nucleotide sequence which is an odd-numbered nucleotide sequence selected from the group consisting of SEQ ID NOS:1-22739;
(viii) an isolated nucleic acid which can hybridize to (vii) under high stringency conditions;
(ix) a nucleic acid comprising a fragment of 10 or more consecutive nucleotides from one or more of the odd-numbered nucleotide sequences selected from the group consisting of SEQ ID NOS:1-22739; and
(x) a nucleic acid encoding (i), (ii), (iii), or (ix); and
(b) a pharmaceutically acceptable carrier.

13. The composition of claim 12, further comprising a vaccine adjuvant.

14. (canceled)

15. A method of treating a patient, comprising administering to the patient a therapeutically effective amount of the composition of claim 12.

16. (canceled)
